United States Patent Application Publication US 2011/0183924 A1 - sequence listing, part 30

SEQ ID NO: 69575 - DNA, 1515 bp, Homo sapiens
ggcggaatcagcggggaaagaagaccctgttgagcttaactcttccctgccagcactataccacagtgtggaagaaattagtcaaatgcttgttttcctgcttctcttttcaactgttactgtgctttgtttgaaagtagttttctctctcaaagccgttgcttatatcgttaagaatgaaggtttgtgtttaaaatttattgcattgcaaagggtagtttcactgaagtcatgcaccattaaataagatgaaatatttgtatttattgtcctacttcctaagccgtaacttcttttcctctgtgaatttgcattgagtcactcatgctacactacatcgctttagtatttgagatggcatttatgtttcctctcgtttatcatgaaatggggtcagattccatcagattccacctctgtcaggtggactcttgtctgccttccatgatgagattttttttctccttcccctttctttaagagaggctgacagatctaggtgtcaatcaattggaaaccagtctctgattttttttcattagttattttctatcattagtttcactgtgtaaattagatatcaactgcacttctttaaaaaaaaatacatctccctattacctccttgaaagatttacttctgtaggcctttttcaataggctcatgactgcagacaaggaaaaaaaaagtaaaaacaaaaacagtatgtgcctgaaaatgacaaaaaaaaaatttgtaacatttaaaaaagaaacctgaatagcctttaattctttaataatacacttaaattttatgtaaatcggttttcgccacgtgtgtttgttcacattctaaatgacttaatgggattctcacggtctgtgtctttgtgtcacgtgtataaaatgggcttgtgatgtaagcgtttcatctggtcagtggttcctttgatattgtactgctgctgggagtgggctgtggaacctgccttcgggtaactgggttcctcttgggtagattggagagatgggggtgggcgtgggcaaattctcacacatgttttcttaacctatttgcagaaactttcaaaaggcatttgattaaacctcttggcagtacagtattcttgtatttgttaacgtctgtgtttaggtactggtacctttttgttttaaaatgttctaagtgttggctttaaagtgaatttatctttagtatgatagttatatgaaaattataggatttgtgtgcagagaatttttttataaagtgctttgtaaaaaaaaaaaaatgtattctagcttttgcggtacatatgtgtgataactttaatacccatgacagttaagtgcaattatttcatcactctaaaaatgctatttttgtgtcagttcctgcaggtgttttcatgtctttgcaaagtgacacattttgatgccttcttgataaagtggtagacattttgtagctttctagaaactttgtattcatacggtatcaatgaaaaataaagaaaatgaaagtgtgggtca

SEQ ID NO: 69576 - DNA, 715 bp, Homo sapiens
tttatagtcttgtgtgtgcagttatattttatatggacgaccaaattttttattaagatgagtaaatatttgaaccactgaattttaataacaaaattttaaaattggcatgaatacggaatactgcactgtgagatgcaaagtatacagaatctgtggtgtggaacctgccttcgggtaactgggttcctcttgggtagattggagagatgggggtgggcgtgggcaaattctcacacatgttttcttaacctatttgcagaaactttcaaaaggcatttgattaaacctcttggcagtacagtattcttgtatttgttaacgtctgtgtttaggtactggtacctttttgttttaaaatgttctaagtgttggctttaaagtgaatttatctttagtatgatagttatatgaaaattataggatttgtgtgcagagaatttttttataaagtgctttgtaaaaaaaaaaaaatgtattctagcttttgcggtacatatgtgtgataactttaatacccatgacagttaagtgcaattatttcatcactctaaaaatgctatttttgtgtcagttcctgcaggtgttttcatgtctttgcaaagtgacacattttgatgccttcttgataaagtggtagacattttgtagctttctagaaactttgtattcatacggtatcaatgaaaaataaagaaaatgaaagtgtgggtca

SEQ ID NO: 69577 - DNA, 540 bp, Homo sapiens
ctacgggagagagggaggggaggaaattggagaccccagcacccccttgctcactctcttgctcacagtccacgatggcccggtccctggtgtgccttggtgtcatcatcttgctgtctgccttctccggacctggtgtcaggggtggtcctatgcccaagctggctgaccggaagctgtgtgcggaccaggagtgcagccaccctatctccatggctgtggcccttcaggactacatggcccccgactgccgattcctgaccattcaccggggccaagtggtgtatgtcttctccaagctgaagggccgtgggcggctcttctggggaggcagcgttcagggagattactatggagatctggctgctcgcctgggctatttccccagtagcattgtccgagaggaccagaccctgaaacctggcaaagtcgatgtgaagacagacaaatgggatttctactgccagtgagctcagcctaccgctggccctgccgtttcccctccttgggtttatgcaaatacaatcagcccagtgcaaa

SEQ ID NO: 69578 - DNA, 832 bp, Homo sapiens
ctacgggagagagggaggggaggaaattggagaccccagcacccccttgctcactctcttgctcacagtccacgatggcccggtccctggtgtgccttggtgtcatcatcttgctgtctgccttctccggacctggtgtcaggggtggtcctatgcccaagctggctgaccggaagctgtgtgcggaccaggagtgcagccaccctatctccatggctgtggcccttcaggactacatggcccccgactgccgattcctgaccattcaccggggccaagtggtgtatgtcttctccaagctgaagggccgtgggcggctcttctggggaggcagcgttcagggagattactatggagatctggctgctcgcctgggctatttccccagtagcattgtccgagaggaccagaccctgaaacctggcaaagtcgatgtgaagacagacaaatgggatttctactgccagtgagctcagcctaccgctggccctgccgtttcccctccttgggtttatgcaaatacaatcagcccagtgcaaaaaaaaaaaaaaaaaaaaaaaaaaactgtgggttgggccggcagtggcgaccacaaaaaaaaagttttccaagacccatcgcggtggggcgccggggccccagtgagtaatgtgaacctggccaaagggtgtgcaagagaacccggggtcctgacacgggcccggtttccccacacaaaaaaaagcgccgggcgcgccggcgctctgcaacaaatccgaggggtcgaggcatcactggcctacacagggccaccagccatgagcccgccgcgtcgcggcggagagaaagacgt

SEQ ID NO: 69579 - DNA, 518 bp, Homo sapiens
ctaggcctctgtgattgttgaggagggggctgtcactgggaaagtttccacgatggcccggtccctggtgtgccttggtgtcatcatcttgctgtctgccttctccggacctggtgtcaggggtggtcctatgcccaagctggctgaccggaagctgtgtgcggaccaggagtgcagccaccctatctccatggctgtggcccttcaggactacatggcccccgactgccgattcctgaccattcaccggggccaagtggtgtatgtcttctccaagctgaagggccgtgggcggctcttctggggaggcagcgttcagggagattactatggagatctggctgctcgcctgggctatttccccagtagcattgtccgagaggaccagaccctgaaacctggcaaagtcgatgtgaagacagacaaatgggatttctactgccagtgagctcagcctaccgctggccctgccgtttcccctccttgggtttatgcaaatacaatcagcccagtgcaaa

SEQ ID NO: 69580 - DNA, 466 bp, Homo sapiens
ctaggcctctgtgattgttgaggagggggctgtcactgggaaagtttccacgatggcccggtccctggtgtgccttggtgtcatcatcttgctgtctgccttctccggacctggtgtcaggggtggtcctatgcccaagctggctgaccggaagctgtgtgcggaccaggagtgcagccaccctatctccatggctgtggcccttcaggactacatggcccccgactgccgattcctgaccattcaccggggccaagtggtgttcagggagattactatggagatctggctgctcgcctgggctatttccccagtagcattgtccgagaggaccagaccctgaaacctggcaaagtcgatgtgaagacagacaaatgggatttctactgccagtgagctcagcctaccgctggccctgccgtttcccctccttgggtttatgcaaatacaatcagcccagtgcaaa

SEQ ID NO: 69581 - DNA, 384 bp, Homo sapiens
ctaggcctctgtgattgttgaggagggggctgtcactgggaaagtttccacgatggcccggtccctggtgtgccttggtgtcatcatcttgctgtctgccttctccggacctggtgtcaggggtggtcctatgcccaagctggctgaccggaagctgtgtgcggaccaggagtgcagccgttcagggagattactatggagatctggctgctcgcctgggctatttccccagtagcattgtccgagaggaccagaccctgaaacctggcaaagtcgatgtgaagacagacaaatgggatttctactgccagtgagctcagcctaccgctggccctgccgtttcccctccttgggtttatgcaaatacaatcagcccagtgcaaa

SEQ ID NO: 69582 - DNA, 493 bp, Homo sapiens
ggcagggaaggggatgaactagaggatgggaaagtagtaagactccaagcagaggccagaaaggggcagaacagcaagagacaggaaggtcactgagtgccacatcaaaacatgcaggtcacatgcaagaactgtgtaaacacaccacgcccttaacaagcactgctgcgcggacagggcctgctgttatctagccccaagtcatctgctttatcttggacctcagtcttcttggtcactaaagactgaatcctctgtccaggagtagggattcaaagagctctgtcctttcatccgtgctgtcacatgaagaaaaaagaaggaaaaaggacctctgtccaacactgttctcaacctttctgtcctagtgttaaaaaatacgtaacatgcagggtgcagtggcttgggaggccgaggcgggcggatcacctgaggtcaggagtttgagaccagcctggccaacatggcaaaaccctgtctctactaaaaatac

SEQ ID NO: 69583 - DNA, 741 bp, Homo sapiens
gagtgtaaattcaaatcctgagtctgtaactcccgactgtgccgtcattaacattttaatctttctaaaaatctatgaagtaagtattatgaaagttacttcgcaggattgttcttagaattaaatgagattatggagacaaagcacctgtcaccctgtgtttgacatgtggtaagcattcagtgcataacttgatagctagccagattttgttcctacctataatgtgttaagcttttattacatggaaaataaactatgctgacttctcctttctcaataacactagataactaaagcagtaatagtacagattattaataattatttgttataatataatgggaatcatgtctatgtcactggtctccaaagaagggcttaccccacaatagtttatacaaacaggtgcattggtatgtggggaaaaacatgagaacttccatttatttttttatcttttaaaatttaaaatttttgaatctattgaaattatagtatatctgtacatgtttcatttataaataaataaatatacacacatcgtgggtgtatgtataaacttttttgaagactcatgaacaaaatgtttgagccaataggtatactcagtgagcattcataaagtagatgtcacagtgtttttattgggtgtctgctacatgaacaggactaggtattaaatctttaaaggcaaatcagatatggatatggatttttactttaaaaagcttaaagtct

SEQ ID NO: 69584 - DNA, 508 bp, Homo sapiens
  misc_feature (216)..(216): n is a, c, g, or t
  misc_feature (284)..(284): n is a, c, g, or t
  misc_feature (292)..(293): n is a, c, g, or t
  misc_feature (312)..(312): n is a, c, g, or t
  misc_feature (352)..(352): n is a, c, g, or t
  misc_feature (355)..(355): n is a, c, g, or t
  misc_feature (483)..(483): n is a, c, g, or t
cacccgcctcggcctcccagtgttctgggattacaggtgtgagccaccaccccagcctcattacaaatttaaaagtgaggtaatgaaagctaactagttcccgcaaggtcacacaagtagagaccgagttaaaaagaaaattattttattttttccctcctgcacgacatgactctgttttgattctcaaactcatgtcagttactgggcctgccnggtgtggtgactcatacctgtcatcccaaagctttgggaggccgaggcgggaggattgcttgcagccnggagttcnngaccagcctgggcaacacngtgagacccccatctctaccaaaacaaattgtttgaattngcngggtgttgtggcatgttcctgtagtcctagcaacctttccacttgggaggctgaggcagaaggactgctggagtccaggagttggaggtcacagtgagctatgatcgcaccactgcactccagcctgnggaacagagtaagactctgtctctc

SEQ ID NO: 69585 - DNA, 223 bp, Homo sapiens
ggaagcagaacacatacacgaggaccagtacttgatgaggacaagagagatgggaaacaggctgtggaattcctttcggcaccctgaatgttaacccctgctcaggaaagggtgcatctgtcttcatcatgcctctctctcctcccctcctccagccacctcccaaaggcagagctgccgcaacctgcctggcccatgtggtggcaagtcacccagtcaggag

SEQ ID NO: 69586 - DNA, 337 bp, Homo sapiens
ggaaaatttacagcatgactacatatgttaggaaaaaaatatctaaaatcaattaactaagcttccatcttaggaaactaaaaaaagaagagcaaattaaatccaaagtaagaagaagaaaataaataataaaaattagagcagagagaaatgaaattatgaacaggaaatcaattttaaaaataaatgaaaccaaaagctggttctttgaatcaattaataaaattgataagcctctagccagactaagaaaaaagaggtagggcacaaattactaatatcataagtcaaagaggggacacccctacagatcccatggatattaaaaggataataa

SEQ ID NO: 69587 - DNA, 524 bp, Homo sapiens
gaaatatgacatctcttctgccttaaatctcaaatgtgtgcttcttaatggcagaatataacccagtaccatataggaagagagatcctcagaaatgtagttccagacttctctcctgaaatgcagagattttaggagtggggtgggggggtgataatgctaaattaacaacaaatagtccagcacagatgacctcccccaagtctcatctgtgagaagaaaggcttgcacagctctggtaacactgagctttacttactccacctctaggaagctgtcatattcacttgaaacatcttcctgcaggagcagtgcaacaaaacttagaacatttccattcaaccacatcttaaaaacccaccatttagaaagcaggcccaggtaatgtggggtagtggaaagaactccagttttgggggcagacatactgagtgctaatctcagctgtactccttattagccatgtgaacttaagcagttatttaatccttctgggaaaaagtgattataaaataatcagagct

SEQ ID NO: 69588 - DNA, 965 bp, Homo sapiens
agcggagcttgcattgagccgagattgcgccactgcagtccgcagtccggcctgggcgacagagcgagactccgtctcaaaaaaaaaaaaaaaaaaaaaaaatgttagatatcagttgacttctcactatttggctctcttatactatactcctcctacccctacttcctaaaaccacacattttttttctcctattgttccaatataatttctttttttgttgttaaatcagtttagtaatacagttactttgactatgtaaatgttgcgtgtgtcttcctgagcatattatatactgattactttgactttttaaatacaacttattttgtttcctggagctaataatggcctatgtccaagccttccaaagttttactggaagttctcagtgtttactggaattcctgagccatggtttactgggtatgtggcatatccagggcgggccctgggggaagtcaaccctactgcaaggaccattttattactggtagaatttacagttgttggatctaggtgataaaaggctcaccaactttttatcagttatatttcttagattttctgccaacagagcacccacttattctttgcccttggatgttctgcttccaccaacctgtccttgctaagactgtgagttcagctaagcaaggcaaggggtggtgctctgagagagtggtagtgtgttccaagaagatgggacaacctgagtggaaagccatggcagtgagagatagcatgttgtgttcttggaattacagatagtttggtataggtagagcgtagagtacagggcaggactagccgagatgaggctgtgtggtgggcaggagtcagatcaaggtgatctttttattacagactcatactcactagattctgtcgtgtaggccatggggaaactcatactgttaagtaacatggtctgctttgcttgtgaatgaatgacagagtaagc

SEQ ID NO: 69589 - DNA, 1711 bp, Homo sapiens
gagaatctaatgccactactgatctaacaagaggtggagctcaggcagtaatgctcactcacctgcctctcagctcaccaactgtgtggcccgattcctaacaggccacacacagcccagggctggggacccctgctttaactgatgcattgatttgataaagtattttacaagcctgataatgttataaccctgtttattcaggtcagatttatgccaactttgctgagaatatggagggtatagatgagtgaacatcaacaaacataacttctaccatggttaagaattttacttaggaaaagtattgaagttcaaatccagatagtattacatttgaaattgttataagggttattaatttaataaaattcatcatcaggtttcccctataagctttctcctaggttaattttccacaagcattgttttatatacactgtaatcaggataacacaagcttagtgttagatcttgtaggaaaccaagattagaaacattagaaatttgcagaatttaagaaattatgttttgtggtaatctatggccaacgatgttagaacctagcgcaattgtaaagtgaaattcaaggagaaggaatgaggagttagggaagcagcatacttgaatattagagaaggagaggagctgtgggtcaggaatcagagagacctgctaaaaccagacagatataaacaccaaagacggaagccaaataggtagccaaaaatccagatatttgagaagcaggaaatttatagcaaccaaagaaatagggcaagagaggcaggtgaacacacatgatacctcaattgacaatcttcctcccaccaagccagacacgttgtaaatgctgcttcctattggagcccagaaaaaaggaaaaggaaagtttaggctttctttgtcctttgtgtggaagcagggaattggattgaagactttcatagttgtaacataaaggcaaatcctgaggaactcactgatggagatgtgaaatggcagtaaggaagaaaacagaataactgaacaaatatattagtctagggccacttaatttagaggaagaaaaaaaatcaacccatccatagaaatagtttgataaacaggtcactaaatcattggcgtttataaagattcttagctatcaagggctgcattgtattttatatactcagttttataaggtgatactttttaaataagcgctttaatgaaaatggttagactgaaaataattttggtccttaaaaggagtcaggagcttttatatataaggtacatattttaaaagaatacctcctttataacagggttttacagacactaccataatttataatcattattttttacttttgggttcacctagatcatatgagttgatgtgatacttctagaacaaaattattcatagtgcgttttttgtaatttatgattgttaagtaagcttgacttataaattgacattgtaattgtgtacataattggatatatgtgttaaaatttaacatttagatttacttaattgtagaaaatacaaatgtaaaacttacacatggaaagaactgtatgcagttgactttactatgtaaattggagggaaacaaagttttagatccattttctttcaaaattttctttattgtaaagtatgcaaaatatatattcataccatttattaaatcagaatgtttatacaaaattgtcg

SEQ ID NO: 69590 - DNA, 2366 bp, Homo sapiens
gtcttgtgtggttgcagcaaggcaaagagtgtggggcgtctctgtgttccagggccagtgctcttctgggtgatcctggtgttggttgtggtggtcggctccagcgccttcctcctgtgccaccggagggcctgcaggaagcgaattcggcagaagctccacctgtgctacccggtccagacctcccagcccaagctagagcttgtggattccagacccaggaggagctcaacgcagctgaggagtggtgcgtcggtgacagaacccgtcgcggaagagcgagggttaatgagccagccactgatggagacctgccacagcgtgggggcagcctacctggagagcctgccgctgcaggatgccagcccggccgggggcccctcgtcccccagggaccttcctgagccccgggtgtccacggagcacaccaataacaagattgagaaaatctacatcatgaaggctgacaccgtgatcgtggggaccgtgaaggctgagctgccggagggccggggcctggcggggccagcagagcccgagttggaggaggagctggaggcggaccataccccccactaccccgagcaggagacagaaccgcctctgggcagctgcagcgatgtcatgctctcagtggaagaggaagggaaagaagaccccttgcccacagctgcctctggaaagtgaggcctgggctgggctggggctaggagggcagcagggtggcctctgggaggccaggatggcactgttggcaccgaggttgggggcagaggcccatctggcctgaactgaggctccagcatctagtggtggaccggccggtcactgcaggggtctggtggtctctgcttgcatccccaacttagctgtcccctgacccagagcctaggggatccggggcttgtacagaagagacagtccaaggggactggatcccagcagtgatgttggttgaggcagcaaacagatggcaggatgggcactgccgagaacagcattggtcccagagccctgggcatcagaccttaaccaccaggcccacagcccagcgagggagaggtcgtgaggccagctcccggggcccctgtaaccctactctcctctctccctggacctcagaggtgacacccattgggcccttccggcatgcccccagttactgtaaatgtggcccccagtgggcatggagccagtgcctgtggttgtttctccagagtcaaaagggaagtcgagggatggggcgtcgtcagctggcactgtctctgctgcagcggccacactgtactctgcactggtgtgagggcccctgcctggactgtgggaccctcctggtgctgcccaccttccctgtcctgtagccccctcggtgggcccagggcctaggggcccaggatcaagtcactcatctcagaatgtccccaccaatccccgccacagcaggcgcctcgggtcccagatgtctgcagccctcagcagctgcagaccgcccctcaccaacccagagaacctgctttactttgcccagggacttcctccccatgtgaacatggggaacttcgggccctgcctggagtccttgaccgctctctgtgggccccacccactctgtcctgggaaatgaagaagcatcttccttaggtctgccctgcttgcaaatccactagcaccgaccccaccacctggttccggctctgcacgctttggggtgtggatgtcgagaggcaccacggcctcacccaggcatctgctttactctggaccataggaaacaagaccgtttggaggtttcatcaggattttgggtttttcacatttcacgctaaggagtagtggccctgacttccggtcggctggccagctgactccctagggccttcagacgtgtatgcaaatgagtgatggataaggatgagtcttggagttgcgggcagcctggagactcgtggacttaccgcctggaggcaggcccgggaaggctgctgtttactcatcgggcagccacgtgctctctggaggaagtgatagtttctgaaaccgctcagatgttttggggaaagttggagaagccgtggccttgcgagaggtggttacaccagaacctggacattggccagaagaagcttaagtgggcagacactgtttgcccagtgtttgtgcaaggatggagtgggtgtctctgcatcacccacagccgcagctgtaaggcacgctggaaggcacacgcctgccaggcagggcagtctggcgcccatgatgggagggattgacatgtttcaacaaaataatgcacttccttacctagtggcccttcacacaacttttgaatctctaaaaatccataaaatccttaaagaactgtaaaa

SEQ ID NO: 69591 - DNA, 3689 bp, Homo sapiens
  misc_feature (993)..(993): n is a, c, g, or t
atacgggagaactaaggctgaaacctcggaggaacaaccacttttgaagtgacttcgcggcgtgcgttgggtgcggactaggtggccccggcgggagtgtgctggagcctgaagtccacgcgcgcggctgagaaccgccgggaccgcacgtgggcgccgcgcgcttcccccgcttcccaggtgggcgccggccgccaggccacctcacgtccggccccggggatgcgcgtcctcctcgccgcgctgggactgctgttcctgggggcgctacgagccttcccacaggatcgacccttcgaggacacctgtcatggaaaccccagccactactatgacaaggctgtcaggaggtgctgttaccgctgccccatggggctgttcccgacacagcagtgcccacagaggcctactgactgcaggaagcagtgtgagcctgactactacctggatgaggccgaccgctgtacagcctgcgtgacttgttctcgagatgacctcgtggagaagacgccgtgtgcatggaactcctcccgtgtctgcgaatgtcgacccggcatgttctgttccacgtctgccgtcaactcctgtgcccgctgcttcttccattctgtctgtccggcagggatgattgtcaagttcccaggcacggcgcagaagaacacggtctgtgagccggcttccccaggggtcagccctgcctgtgccagcccagagaactgcaaggaaccctccagtggcaccatcccccaggccaagcccaccccggtgtccccagcaacctccagtgccagcaccatgcctgtaagagggggcacccgcctcgcccaggaagctgcttctaaactgacgagggctcccgactctccctcctctgtgggaaggcctagttcagatccaggtctgtccccaacacagccatgcccagaggggtctggtgattgcagaaagcagtgtgagcccgactactacctggacgaggccggccgctgcacngcctgcgtgagctgttctcgagatgaccttgtggagaagacgccatgtgcatggaactcctcccgcacctgcgaatgtcgacctggcatgatctgtgccacatcagccaccaactcctgtgcccgctgtgtcccctacccaatctgtgcagcagagacggtcaccaagccccaggatatggctgagaaggacaccacctttgaggcgccacccctggggacccagccggactgcaaccccaccccagagaatggcgaggcgcctgccagcaccagccccactcagagcttgctggtggactcccaggccagtaagacgctgcccatcccaaccagcgctcccgtcgctctctcctccacggggaagcccgttctggatgcagggccagtgctcttctgggtgatcctggtgttggttgtggtggtcggctccagcgccttcctcctgtgccaccggagggcctgcaggaagcgaattcggcagaagctccacctgtgctacccggtccagacctcccagcccaagctagagcttgtggattccagacccaggaggagctcaacgcagctgaggagtggtgcgtcggtgacagaacccgtcgcggaagagcgagggttaatgagccagccactgatggagacctgccacagcgtgggggcagcctacctggagagcctgccgctgcaggatgccagcccggccgggggcccctcgtcccccagggaccttcctgagccccgggtgtccacggagcacaccaataacaagattgagaaaatctacatcatgaaggctgacaccgtgatcgtggggaccgtgaaggctgagctgccggagggccggggcctggcggggccagcagagcccgagttggaggaggagctggaggcggaccataccccccactaccccgagcaggagacagaaccgcctctgggcagctgcagcgatgtcatgctctcagtggaagaggaagggaaagaagaccccttgcccacagctgcctctggaaagtgaggcctgggctgggctggggctaggagggcagcagggtggcctctgggaggccaggatggcactgttggcaccgaggttgggggcagaggcccatctggcctgaactgaggctccagcatctagtggtggaccggccggtcactgcaggggtctggtggtctctgcttgcatccccaacttagctgtcccctgacccagagcctaggggatccggggcttgtacagaagagacagtccaaggggactggatcccagcagtgatgttggttgaggcagcaaacagatggcaggatgggcactgccgagaacagcattggtcccagagccctgggcatcagaccttaaccaccaggcccacagcccagcgagggagaggtcgtgaggccagctcccggggcccctgtaaccctactctcctctctccctggacctcagaggtgacacccattgggcccttccggcatgcccccagttactgtaaatgtggcccccagtgggcatggagccagtgcctgtggttgtttctccagagtcaaaagggaagtcgagggatggggcgtcgtcagctggcactgtctctgctgcagcggccacactgtactctgcactggtgtgagggcccctgcctggactgtgggaccctcctggtgctgcccaccttccctgtcctgtagccccctcggtgggcccagggcctaggggcccaggatcaagtcactcatctcagaatgtccccaccaatccccgccacagcaggcgcctcgggtcccagatgtctgcagccctcagcagctgcagaccgcccctcaccaacccagagaacctgctttactttgcccagggacttcctccccatgtgaacatggggaacttcgggccctgcctggagtccttgaccgctctctgtgggccccacccactctgtcctgggaaatgaagaagcatcttccttaggtctgccctgcttgcaaatccactagcaccgaccccaccacctggttccggctctgcacgctttggggtgtggatgtcgagaggcaccacggcctcacccaggcatctgctttactctggaccataggaaacaagaccgtttggaggtttcatcaggattttgggtttttcacatttcacgctaaggagtagtggccctgacttccggtcggctggccagctgactccctagggccttcagacgtgtatgcaaatgagtgatggataaggatgagtcttggagttgcgggcagcctggagactcgtggacttaccgcctggaggcaggcccgggaaggctgctgtttactcatcgggcagccacgtgctctctggaggaagtgatagtttctgaaaccgctcagatgttttggggaaagttggagaagccgtggccttgcgagaggtggttacaccagaacctggacattggccagaagaagcttaagtgggcagacactgtttgcccagtgtttgtgcaaggatggagtgggtgtctctgcatcacccacagccgcagctgtaaggcacgctggaaggcacacgcctgccaggcagggcagtctggcgcccatgatgggagggattgacatgtttcaacaaaataatgcacttccttacctagtggcccttcacacaacttttgaatctctaaaaatccataaaatccttaaagaactgtaaaa

SEQ ID NO: 69592 - DNA, 3481 bp, Homo sapiens
  misc_feature (993)..(993): n is a, c, g, or t
atacgggagaactaaggctgaaacctcggaggaacaaccacttttgaagtgacttcgcggcgtgcgttgggtgcggactaggtggccccggcgggagtgtgctggagcctgaagtccacgcgcgcggctgagaaccgccgggaccgcacgtgggcgccgcgcgcttcccccgcttcccaggtgggcgccggccgccaggccacctcacgtccggccccggggatgcgcgtcctcctcgccgcgctgggactgctgttcctgggggcgctacgagccttcccacaggatcgacccttcgaggacacctgtcatggaaaccccagccactactatgacaaggctgtcaggaggtgctgttaccgctgccccatggggctgttcccgacacagcagtgcccacagaggcctactgactgcaggaagcagtgtgagcctgactactacctggatgaggccgaccgctgtacagcctgcgtgacttgttctcgagatgacctcgtggagaagacgccgtgtgcatggaactcctcccgtgtctgcgaatgtcgacccggcatgttctgttccacgtctgccgtcaactcctgtgcccgctgcttcttccattctgtctgtccggcagggatgattgtcaagttcccaggcacggcgcagaagaacacggtctgtgagccggcttccccaggggtcagccctgcctgtgccagcccagagaactgcaaggaaccctccagtggcaccatcccccaggccaagcccaccccggtgtccccagcaacctccagtgccagcaccatgcctgtaagagggggcacccgcctcgcccaggaagctgcttctaaactgacgagggctcccgactctccctcctctgtgggaaggcctagttcagatccaggtctgtccccaacacagccatgcccagaggggtctggtgattgcagaaagcagtgtgagcccgactactacctggacgaggccggccgctgcacngcctgcgtgagctgttctcgagatgaccttgtggagaagacgccatgtgcatggaactcctcccgcacctgcgaatgtcgacctggcatgatctgtgccacatcagccaccaactcctgtgcccgctgtgtcccctacccaatctgtgcagcagagacggtcaccaagccccaggatatggctgagaaggacaccacctttgaggcgccacccctggggacccagccggactgcaaccccaccccagagaatggcgaggcgcctgccagcaccagccccactcagagcttgctggtggactcccaggccagtaagacgctgcccatcccaaccagcgctcccgtcgctctctcctccacggggaagcccgttctggatgcagggccagtgctcttctgggtgatcctggtgttggttgtggtggtcggctccagcgccttcctcctgtgccaccggagggcctgcaggaagcgaattcggcagaagctccacctgtgctacccggtccagacctcccagcccaagctagagcttgtggattccagacccaggaggagctcaacgagaaaatctacatcatgaaggctgacaccgtgatcgtggggaccgtgaaggctgagctgccggagggccggggcctggcggggccagcagagcccgagttggaggaggagctggaggcggaccataccccccactaccccgagcaggagacagaaccgcctctgggcagctgcagcgatgtcatgctctcagtggaagaggaagggaaagaagaccccttgcccacagctgcctctggaaagtgaggcctgggctgggctggggctaggagggcagcagggtggcctctgggaggccaggatggcactgttggcaccgaggttgggggcagaggcccatctggcctgaactgaggctccagcatctagtggtggaccggccggtcactgcaggggtctggtggtctctgcttgcatccccaacttagctgtcccctgacccagagcctaggggatccggggcttgtacagaagagacagtccaaggggactggatcccagcagtgatgttggttgaggcagcaaacagatggcaggatgggcactgccgagaacagcattggtcccagagccctgggcatcagaccttaaccaccaggcccacagcccagcgagggagaggtcgtgaggccagctcccggggcccctgtaaccctactctcctctctccctggacctcagaggtgacacccattgggcccttccggcatgcccccagttactgtaaatgtggcccccagtgggcatggagccagtgcctgtggttgtttctccagagtcaaaagggaagtcgagggatggggcgtcgtcagctggcactgtctctgctgcagcggccacactgtactctgcactggtgtgagggcccctgcctggactgtgggaccctcctggtgctgcccaccttccctgtcctgtagccccctcggtgggcccagggcctaggggcccaggatcaagtcactcatctcagaatgtccccaccaatccccgccacagcaggcgcctcgggtcccagatgtctgcagccctcagcagctgcagaccgcccctcaccaacccagagaacctgctttactttgcccagggacttcctccccatgtgaacatggggaacttcgggccctgcctggagtccttgaccgctctctgtgggccccacccactctgtcctgggaaatgaagaagcatcttccttaggtctgccctgcttgcaaatccactagcaccgaccccaccacctggttccggctctgcacgctttggggtgtggatgtcgagaggcaccacggcctcacccaggcatctgctttactctggaccataggaaacaagaccgtttggaggtttcatcaggattttgggtttttcacatttcacgctaaggagtagtggccctgacttccggtcggctggccagctgactccctagggccttcagacgtgtatgcaaatgagtgatggataaggatgagtcttggagttgcgggcagcctggagactcgtggacttaccgcctggaggcaggcccgggaaggctgctgtttactcatcgggcagccacgtgctctctggaggaagtgatagtttctgaaaccgctcagatgttttggggaaagttggagaagccgtggccttgcgagaggtggttacaccagaacctggacattggccagaagaagcttaagtgggcagacactgtttgcccagtgtttgtgcaaggatggagtgggtgtctctgcatcacccacagccgcagctgtaaggcacgctggaaggcacacgcctgccaggcagggcagtctggcgcccatgatgggagggattgacatgtttcaacaaaataatgcacttccttacctagtggcccttcacacaacttttgaatctctaaaaatccataaaatccttaaagaactgtaaaa

SEQ ID NO: 69593 - DNA, 683 bp, Homo sapiens
ttaaaaaaaaacccttttaatttataactggaatttcaacatgaatgttaatgtagtttgggttcctgctctctctcgctctctttcttttttcctgagagagtgattttgtaccatcagactgttttgaagttcttagtcattttgtttctttattagtaaaatgggataatggtacagcatggatgtgagcattagaatactgtgatttgggaaaagaacccagtgctgtaacggaagtctaatagctgctcagtacatagtaaatgctatttcaaatttagattaaagaaaaaacatgttcacggtctatgcaggcagtgtagctctatatgaaaaggaacctattgattaaatacttagaaagtttcaaaaagcccccttttaaatcctaagatattggcattcatgtgatggatgtcttgaggcagataacacagttgaatctttttagtggaagaaacacagatcttttcacatgaagttgtacttgaaaaatattgccataattaaaatatacagtgtagttatcaggaaatgtacatttttttgtatcttgaaggagccttacagagttaataaaaaaaaaaaaaaagaaaagaaaaaaaaggaacagcctctaatggaaattagcatgtgattgaagttgtttttgttttgttgtcctctttccttctgtctga

SEQ ID NO: 69594 - DNA, 493 bp, Homo sapiens
gctttagttaattattaatgaagttaaagaccctttttctctcactttcatgttggaaatcaagtccaaatatcaagtttttatgaccttagaatattatgttcaagacatgtgggagttccttcagtttagaggttttgattacgtaggatttgatttaaccaattttgtcctcagttttttcttttgttgtaattgaaagttaatctattgcttgttagcatttttaccaaaggagcagagagtggcaaagaacttcaaggcaattggctatttgtaactaagtgggagcactatgatacatgaatagtatgacaaatgaagtcttggtcggatgcggtggctcatgcctgtcattctaacacttcgggaggctgaggtgggaagatcgcttgagcccaggaatgtgagaacagcctgtctctacagaaaattaataaattagccgggcatggtggcatgtgcctttagccctagctactcaggaggctaa

SEQ ID NO: 69595 - DNA, 3469 bp, Homo sapiens
ccagtctgcggaccgttcggagcaacgtggcggcccttgcccgccagcaatgcctaggagcagccaagcagggacccgtcggaaacccttcatccaccctttctctggcgcatggagaacctgggggtcggcgaaggggcagaggcttgcagcaggttgagtcgctctcgcggccgccacagcatgaccagagccccgaagcacctgtggcggcaaccccggcgccccatccgcatccaacagcgcttctattcggatccggacaagtccgcgggctgccgcgagagggacctgagcccgcggccggagctcaggaagtcgcggctctcctggcccgtttcctcctgcaggcgctttgacctggaaaatgggctctcgtgtgggaggagggccctggaccctcagtccagccctggcctgggccggattatgcaggctccagtcccgcacagccagcggcgcgagtccttcctgtaccgctcagatagcgactatgaactctcgcccaaggccatgtctcggaactcctctgtggccagcgacctacatggagaggacatgattgtgacgccctttgcccaggtcctggccagtctgcggaccgttcggagcaacgtggcggcccttgcccgccagcaatgcctaggagcagccaagcagggacccgtcggaaacccttcatccagcaatcagctccctcctgcagaggacacggggcagaagctggcattggagacgctagacgagctggactggtgcctggatcagttggagacgctgcagacccggcactcggtgggggagatggcctccaacaagttcaagcggatcctgaaccgggagttgacccacctgtccgaaaccagccgctccgggaaccaggtgtccgagtacatctcccggaccttcctggaccagcagaccgaggtggagctgcccaaggtgaccgctgaggaggccccacagcccatgtcccggatcagtggcctacatgggctctgccacagtgccagcctctcctcagccactgtcccacgctttggggtccagactgaccaggaggagcaactggccaaggagctagaagacaccaacaagtggggacttgatgtgttcaaggtggcggagctaagtgggaaccggcccctcacagctatcatattcagcatttttcaggagcgggacctgctgaagacattccagatcccagcagacacactggccacctacctgctgatgctggagggtcactaccacgccaatgtggcctaccacaacagcctacatgccgccgacgtggcccagtccacgcatgtgctgctggctacgcccgccctcgaggctgtgttcacagacttggaaatcctggctgccctctttgcaagcgccatccacgacgtggaccatcctggggtctccaaccagtttctgattaacaccaactcagagctggcgcttatgtacaacgacgcctcggtgctggagaaccatcacctggctgtgggcttcaagctgctgcaggcagagaactgcgatatcttccagaacctcagcgccaagcagcgactgagtctgcgcaggatggtcattgacatggtgctggccacagacatgtccaaacacatgaacctcctggccgacctcaagaccatggtggagaccaagaaggtgacaagcctcggtgtcctcctcctggacaactattccgaccgaatccaggtcttgcagaacctggtgcactgtgctgatctgagcaaccccaccaagccgctgcccctgtaccgccagtggacggaccgcatcatggccgagttcttccagcagggagaccgcgagcgtgagtcgggcctggacatcagtcccatgtgtgacaagcatacggcctcagtggagaagtcccaggtgggtttcattgactacattgctcacccactgtgggagacttgggctgacctggtccacccagatgcacaggacctgctggacacgctggaggacaatcgagagtggtaccagagcaagatcccccgaagtccctcagacctcaccaaccccgagcgggacgggcctgacagattccagtttgaactgactctggaggaggcagaggaagaggatgaggaggaagaagaggagggggaagagacagctttagccaaagaggccttggagttgcctgacactgaactcctgtcccctgaagccggcccagaccctggggacttacccctcgacaaccagaggacttagggccagccctgcgtgaactgcaggggcaatggatggtaaagccctttggctcttggcaggcagactttccaggaagaggctccatgtggctcctgcttcactttcccacccatttagggagacaatcaagctcttagttataggtggctcccagggtctaattggaggcacctggctggggtccactctgaccctagacttgcctaaaagagctctctaaggggcagcctcttacgatgccctggtgtctttctcctgggcttctatccctgtgaggagaggtgctgtctgctggagcctctagtccaccctctccagtggtcactcttgagtcacatctgtcacttaattatttccttctttatcaaatatttattgctcatctacttcgggccagctttctgcctctgtagtagccctgcacaaagggtggggagtcaggagaccatcccaaaggcatctccctgtcttcctctaccaagcggctctctgcaagagcatggaaatgtgagtggggaaaattttcagcaccaaagcttcactcatacccagttttgtttctgaaactacggtagggggcaggaagaggagcagaaaagaagggctgggcaaggcatagtggcttatgcctgtaatcccggtactttgggaggctgaggtgggaggactgcttaagctcaggagtttgagaccagcctgggcaacatagcaagacccccaccatctctgaaaaaaaaaattagccaggcatggtggtgtgcacctgagaatcccagctactcagaaggttgagacaaaggggatcgcttgagcccaggagttggaggctgaagagagctatgactgcatcactgcactccagcctgggcaacacagcaagatcctgtctaaaaataaaaagaaaagagaaggaaaggaaagagacggggctctgaggccgagcacagtggcccatgcctataatcccagcactttgggaggctgaggcaggtggatcacctgaggttaggagttcgagaccagcctggccaacatggtgaaaccccatctctactaaaaatacaaaaattggctgggcatggtggcgggtgcctgtaatcccagctactggggaggctgaggcaggagaatcacttgaattcaggaggtggaggttgcagtgagccgacatcatgccactgcactccagcctggggctgacagagcaagacactgtctc

SEQ ID NO: 69596 - DNA, 3375 bp, Homo sapiens
ttcgacgtgatcagacccaactcagacccggtcatacttggaccgaatgctgccaaatcccccacctctacccagatctgagcctacgcggggtgccgacccagctcgtggacggggatacggtgacctttgacccaaaagtcttggccgggaccagccggacactggccctcggccgggagctccgagtctcaggcggtcccggttgtcttcctgtcggtgccgcttccgcctgcccttcttgaaaacccacccccagctttgacctggaaaatgggctctcgtgtgggaggagggccctggaccctcagtccagccctggcctgggccggattatgcaggctccagtcccgcacagccagcggcgcgagtccttcctgtaccgctcagatagcgactatgaactctcgcccaaggccatgtctcggaactcctctgtggccagcgacctacatggagaggacatgattgtgacgccctttgcccaggtcctggccagtctgcggaccgttcggagcaacgtggcggcccttgcccgccagcaatgcctaggagcagccaagcagggacccgtcggaaacccttcatccagcaatcagctccctcctgcagaggacacggggcagaagctggcattggagacgctagacgagctggactggtgcctggatcagttggagacgctgcagacccggcactcggtgggggagatggcctccaacaagttcaagcggatcctgaaccgggagttgacccacctgtccgaaaccagccgctccgggaaccaggtgtccgagtacatctcccggaccttcctggaccagcagaccgaggtggagctgcccaaggtgaccgctgaggaggccccacagcccatgtcccggatcagtggcctacatgggctctgccacagtgccagcctctcctcagccactgtcccacgctttggggtccagactgaccaggaggagcaactggccaaggagctagaagacaccaacaagtggggacttgatgtgttcaaggtggcggagctaagtgggaaccggcccctcacagctatcatattcagcatttttcaggagcgggacctgctgaagacattccagatcccagcagacacactggccacctacctgctgatgctggagggtcactaccacgccaatgtggcctaccacaacagcctacatgccgccgacgtggcccagtccacgcatgtgctgctggctacgcccgccctcgaggctgtgttcacagacttggaaatcctggctgccctctttgcaagcgccatccacgacgtggaccatcctggggtctccaaccagtttctgattaacaccaactcagagctggcgcttatgtacaacgacgcctcggtgctggagaaccatcacctggctgtgggcttcaagctgctgcaggcagagaactgcgatatcttccagaacctcagcgccaagcagcgactgagtctgcgcaggatggtcattgacatggtgctggccacagacatgtccaaacacatgaacctcctggccgacctcaagaccatggtggagaccaagaaggtgacaagcctcggtgtcctcctcctggacaactattccgaccgaatccaggtcttgcagaacctggtgcactgtgctgatctgagcaaccccaccaagccgctgcccctgtaccgccagtggacggaccgcatcatggccgagttcttccagcagggagaccgcgagcgtgagtcgggcctggacatcagtcccatgtgtgacaagcatacggcctcagtggagaagtcccaggtgggtttcattgactacattgctcacccactgtgggagacttgggctgacctggtccacccagatgcacaggacctgctggacacgctggaggacaatcgagagtggtaccagagcaagatcccccgaagtccctcagacctcaccaaccccgagcgggacgggcctgacagattccagtttgaactgactctggaggaggcagaggaagaggatgaggaggaagaagaggagggggaagagacagctttagccaaagaggccttggagttgcctgacactgaactcctgtcccctgaagccggcccagaccctggggacttacccctcgacaaccagaggacttagggccagccctgcgtgaactgcaggggcaatggatggtaaagccctttggctcttggcaggcagactttccaggaagaggctccatgtggctcctgcttcactttcccacccatttagggagacaatcaagctcttagttataggtggctcccagggtctaattggaggcacctggctggggtccactctgaccctagacttgcctaaaagagctctctaaggggcagcctcttacgatgccctggtgtctttctcctgggcttctatccctgtgaggagaggtgctgtctgctggagcctctagtccaccctctccagtggtcactcttgagtcacatctgtcacttaattatttccttctttatcaaatatttattgctcatctacttcgggccagctttctgcctctgtagtagccctgcacaaagggtggggagtcaggagaccatcccaaaggcatctccctgtcttcctctaccaagcggctctctgcaagagcatggaaatgtgagtggggaaaattttcagcaccaaagcttcactcatacccagttttgtttctgaaactacggtagggggcaggaagaggagcagaaaagaagggctgggcaaggcatagtggcttatgcctgtaatcccggtactttgggaggctgaggtgggaggactgcttaagctcaggagtttgagaccagcctgggcaacatagcaagacccccaccatctctgaaaaaaaaaattagccaggcatggtggtgtgcacctgagaatcccagctactcagaaggttgagacaaaggggatcgcttgagcccaggagttggaggctgaagagagctatgactgcatcactgcactccagcctgggcaacacagcaagatcctgtctaaaaataaaaagaaaagagaaggaaaggaaagagacggggctctgaggccgagcacagtggcccatgcctataatcccagcactttgggaggctgaggcaggtggatcacctgaggttaggagttcgagaccagcctggccaacatggtgaaaccccatctctactaaaaatacaaaaattggctgggcatggtggcgggtgcctgtaatcccagctactggggaggctgaggcaggagaatcacttgaattcaggaggtggaggttgcagtgagccgacatcatgccactgcactccagcctggggctgacagagcaagacactgtctc

SEQ ID NO: 69597 - DNA, 2778 bp, Homo sapiens
accccctccggatccggcctctccttcccaccgcctaccacctcctcccaacaggtcctggccagtctgcggaccgttcggagcaacgtggcggcccttgcccgccagcaatgcctaggagcagccaattcaagcggatcctgaaccgggagttgacccacctgtccgaaaccagccgctccgggaaccaggtgtccgagtacatctcccggaccttcctggaccagcagaccgaggtggagctgcccaaggtgaccgctgaggaggccccacagcccatgtcccggatcagtggcctacatgggctctgccacagtgccagcctctcctcagccactgtcccacgctttggggtccagactgaccaggaggagcaactggccaaggagctagaagacaccaacaagtggggacttgatgtgttcaaggtggcggagctaagtgggaaccggcccctcacagctatcatattcagcatttttcaggagcgggacctgctgaagacattccagatcccagcagacacactggccacctacctgctgatgctggagggtcactaccacgccaatgtggcctaccacaacagcctacatgccgccgacgtggcccagtccacgcatgtgctgctggctacgcccgccctcgaggctgtgttcacagacttggaaatcctggctgccctctttgcaagcgccatccacgacgtggaccatcctggggtctccaaccagtttctgattaacaccaactcagagctggcgcttatgtacaacgacgcctcggtgctggagaaccatcacctggctgtgggcttcaagctgctgcaggcagagaactgcgatatcttccagaacctcagcgccaagcagcgactgagtctgcgcaggatggtcattgacatggtgctggccacagacatgtccaaacacatgaacctcctggccgacctcaagaccatggtggagaccaagaaggtgacaagcctcggtgtcctcctcctggacaactattccgaccgaatccaggtcttgcagaacctggtgcactgtgctgatctgagcaaccccaccaagccgctgcccctgtaccgccagtggacggaccgcatcatggccgagttcttccagcagggagaccgcgagcgtgagtcgggcctggacatcagtcccatgtgtgacaagcatacggcctcagtggagaagtcccaggtgggtttcattgactacattgctcacccactgtgggagacttgggctgacctggtccacccagatgcacaggacctgctggacacgctggaggacaatcgagagtggtaccagagcaagatcccccgaagtccctcagacctcaccaaccccgagcgggacgggcctgacagattccagtttgaactgactctggaggaggcagaggaagaggatgaggaggaagaagaggagggggaagagacagctttagccaaagaggccttggagttgcctgacactgaactcctgtcccctgaagccggcccagaccctggggacttacccctcgacaaccagaggacttagggccagccctgcgtgaactgcaggggcaatggatggtaaagccctttggctcttggcaggcagactttccaggaagaggctccatgtggctcctgcttcactttcccacccatttagggagacaatcaagctcttagttataggtggctcccagggtctaattggaggcacctggctggggtccactctgaccctagacttgcctaaaagagctctctaaggggcagcctcttacgatgccctggtgtctttctcctgggcttctatccctgtgaggagaggtgctgtctgctggagcctctagtccaccctctccagtggtcactcttgagtcacatctgtcacttaattatttccttctttatcaaatatttattgctcatctacttcgggccagctttctgcctctgtagtagccctgcacaaagggtggggagtcaggagaccatcccaaaggcatctccctgtcttcctctaccaagcggctctctgcaagagcatggaaatgtgagtggggaaaattttcagcaccaaagcttcactcatacccagttttgtttctgaaactacggtagggggcaggaagaggagcagaaaagaagggctgggcaaggcatagtggcttatgcctgtaatcccggtactttgggaggctgaggtgggaggactgcttaagctcaggagtttgagaccagcctgggcaacatagcaagacccccaccatctctgaaaaaaaaaattagccaggcatggtggtgtgcacctgagaatcccagctactcagaaggttgagacaaaggggatcgcttgagcccaggagttggaggctgaagagagctatgactgcatcactgcactccagcctgggcaacacagcaagatcctgtctaaaaataaaaagaaaagagaaggaaaggaaagagacggggctctgaggccgagcacagtggcccatgcctataatcccagcactttgggaggctgaggcaggtggatcacctgaggttaggagttcgagaccagcctggccaacatggtgaaaccccatctctactaaaaatacaaaaattggctgggcatggtggcgggtgcctgtaatcccagctactggggaggctgaggcaggagaatcacttgaattcaggaggtggaggttgcagtgagccgacatcatgccactgcactccagcctggggctgacagagcaagacactgtctc

SEQ ID NO: 69598 - DNA, 3482 bp, Homo sapiens
gtgcgagggacaccgtctcggccccgggggtctcctgagaccctgtctccctgccctccatttagcagcgatcagtggacaatttctgtcttctccactccaagtccttgtcttggttcttttccatgcagcgctataggggacggcagacggttttcggggctggtgtgttggggggggtctcttcagcccctagcttcaacaccccctcaccacgttcttctcccctgttctacccttcagcaccatctgggcatcgacagctcctcggtgtcggccccaccttgagccccagttccaccttctaccgcttcagcacctccggcgcggacagctcctcgctgtcgcctccactcccggccctgggccggacccgggagcagacgctcctcggcgcccgctcacggggacgagtcctgctccctgctatcccagacccctttctctggcgcatggagaacctgggggtcggcgaaggggcagaggcttgcagcaggttgagtcgctctcgcggccgccacagcatgaccagagccccgaagcacctgtggcggcaaccccggcgccccatccgcatccaacagcgcttctattcggatccggacaagtccgcgggctgccgcgagagggacctgagcccgcggccggagctcaggaagtcgcggctctcctggcccgtttcctcctgcaggcgctttgacctggaaaatgggctctcgtgtgggaggagggccctggaccctcagtccagccctggcctgggccggattatgcaggctccagtcccgcacagccagcggcgcgagtccttcctgtaccgctcagatagcgactatgaactctcgcccaaggccatgtctcggaactcctctgtggccagcgacctacatggagaggacatgattgtgacgccctttgcccaggtcctggccagtctgcggaccgttcggagcaacgtggcggcccttgcccgccagcaatgcctaggagcagccaattcaagcggatcctgaaccgggagttgacccacctgtccgaaaccagccgctccgggaaccaggtgtccgagtacatctcccggaccttcctggaccagcagaccgaggtggagctgcccaaggtgaccgctgaggaggccccacagcccatgtcccggatcagtggcctacatgggctctgccacagtgccagcctctcctcagccactgtcccacgctttggggtccagactgaccaggaggagcaactggccaaggagctagaagacaccaacaagtggggacttgatgtgttcaaggtggcggagctaagtgggaaccggcccctcacagctatcatattcagcatttttcaggctgtgttcacagacttggaaatcctggctgccctctttgcaagcgccatccacgacgtggaccatcctggggtctccaaccagtttctgattaacaccaactcagagctggcgcttatgtacaacgacgcctcggtgctggagaaccatcacctggctgtgggcttcaagctgctgcaggcagagaactgcgatatcttccagaacctcagcgccaagcagcgactgagtctgcgcaggatggtcattgacatggtgctggccacagacatgtccaaacacatgaacctcctggccgacctcaagaccatggtggagaccaagaaggtgacaagcctcggtgtcctcctcctggacaactattccgaccgaatccaggtcttgcagaacctggtgcactgtgctgatctgagcaaccccaccaagccgctgcccctgtaccgccagtggacggaccgcatcatggccgagttcttccagcagggagaccgcgagcgtgagtcgggcctggacatcagtcccatgtgtgacaagcatacggcctcagtggagaagtcccaggtgggtttcattgactacattgctcacccactgtgggagacttgggctgacctggtccacccagatgcacaggacctgctggacacgctggaggacaatcgagagtggtaccagagcaagatcccccgaagtccctcagacctcaccaaccccgagcgggacgggcctgacagattccagtttgaactgactctggaggaggcagaggaagaggatgaggaggaagaagaggagggggaagagacagctttagccaaagaggccttggagttgcctgacactgaactcctgtcccctgaagccggcccagaccctggggacttacccctcgacaaccagaggacttagggccagccctgcgtgaactgcaggggcaatggatggtaaagccctttggctcttggcaggcagactttccaggaagaggctccatgtggctcctgcttcactttcccacccatttagggagacaatcaagctcttagttataggtggctcccagggtctaattggaggcacctggctggggtccactctgaccctagacttgcctaaaagagctctctaaggggcagcctcttacgatgccctggtgtctttctcctgggcttctatccctgtgaggagaggtgctgtctgctggagcctctagtccaccctctccagtggtcactcttgagtcacatctgtcacttaattatttccttctttatcaaatatttattgctcatctacttcgggccagctttctgcctctgtagtagccctgcacaaagggtggggagtcaggagaccatcccaaaggcatctccctgtcttcctctaccaagcggctctctgcaagagcatggaaatgtgagtggggaaaattttcagcaccaaagcttcactcatacccagttttgtttctgaaactacggtagggggcaggaagaggagcagaaaagaagggctgggcaaggcatagtggcttatgcctgtaatcccggtactttgggaggctgaggtgggaggactgcttaagctcaggagtttgagaccagcctgggcaacatagcaagacccccaccatctctgaaaaaaaaaattagccaggcatggtggtgtgcacctgagaatcccagctactcagaaggttgagacaaaggggatcgcttgagcccaggagttggaggctgaagagagctatgactgcatcactgcactccagcctgggcaacacagcaagatcctgtctaaaaataaaaagaaaagagaaggaaaggaaagagacggggctctgaggccgagcacagtggcccatgcctataatcccagcactttgggaggctgaggcaggtggatcacctgaggttaggagttcgagaccagcctggccaacatggtgaaaccccatctctactaaaaatacaaaaattggctgggcatggtggcgggtgcctgtaatcccagctactggggaggctgaggcaggagaatcacttgaattcaggaggtggaggttgcagtgagccgacatcatgccactgcactccagcctggggctgacagagcaagacactgtctc

SEQ ID NO: 69599 - DNA, 2613 bp, Homo sapiens
accccctccggatccggcctctccttcccaccgcctaccacctcctcccaacaggtcctggccagtctgcggaccgttcggagcaacgtggcggcccttgcccgccagcaatgcctaggagcagccaattcaagcggatcctgaaccgggagttgacccacctgtccgaaaccagccgctccgggaaccaggtgtccgagtacatctcccggaccttcctggaccagcagaccgaggtggagctgcccaaggtgaccgctgaggaggccccacagcccatgtcccggatcagtggcctacatgggctctgccacagtgccagcctctcctcagccactgtcccacgctttggggtccagactgaccaggaggagcaactggccaaggagctagaagacaccaacaagtggggacttgatgtgttcaaggtggcggagctaagtgggaaccggcccctcacagctatcatattcagcatttttcaggctgtgttcacagacttggaaatcctggctgccctctttgcaagcgccatccacgacgtggaccatcctggggtctccaaccagtttctgattaacaccaactcagagctggcgcttatgtacaacgacgcctcggtgctggagaaccatcacctggctgtgggcttcaagctgctgcaggcagagaactgcgatatcttccagaacctcagcgccaagcagcgactgagtctgcgcaggatggtcattgacatggtgctggccacagacatgtccaaacacatgaacctcctggccgacctcaagaccatggtggagaccaagaaggtgacaagcctcggtgtcctcctcctggacaactattccgaccgaatccaggtcttgcagaacctggtgcactgtgctgatctgagcaaccccaccaagccgctgcccctgtaccgccagtggacggaccgcatcatggccgagttcttccagcagggagaccgcgagcgtgagtcgggcctggacatcagtcccatgtgtgacaagcatacggcctcagtggagaagtcccaggtgggtttcattgactacattgctcacccactgtgggagacttgggctgacctggtccacccagatgcacaggacctgctggacacgctggaggacaatcgagagtggtaccagagcaagatcccccgaagtccctcagacctcaccaaccccgagcgggacgggcctgacagattccagtttgaactgactctggaggaggcagaggaagaggatgaggaggaagaagaggagggggaagagacagctttagccaaagaggccttggagttgcctgacactgaactcctgtcccctgaagccggcccagaccctggggacttacccctcgacaaccagaggacttagggccagccctgcgtgaactgcaggggcaatggatggtaaagccctttggctcttggcaggcagactttccaggaagaggctccatgtggctcctgcttcactttcccacccatttagggagacaatcaagctcttagttataggtggctcccagggtctaattggaggcacctggctggggtccactctgaccctagacttgcctaaaagagctctctaaggggcagcctcttacgatgccctggtgtctttctcctgggcttctatccctgtgaggagaggtgctgtctgctggagcctctagtccaccctctccagtggtcactcttgagtcacatctgtcacttaattatttccttctttatcaaatatttattgctcatctacttcgggccagctttctgcctctgtagtagccctgcacaaagggtggggagtcaggagaccatcccaaaggcatctccctgtcttcctctaccaagcggctctctgcaagagcatggaaatgtgagtggggaaaattttcagcaccaaagcttcactcatacccagttttgtttctgaaactacggtagggggcaggaagaggagcagaaaagaagggctgggcaaggcatagtggcttatgcctgtaatcccggtactttgggaggctgaggtgggaggactgcttaagctcaggagtttgagaccagcctgggcaacatagcaagacccccaccatctctgaaaaaaaaaattagccaggcatggtggtgtgcacctgagaatcccagctactcagaaggttgagacaaaggggatcgcttgagcccaggagttggaggctgaagagagctatgactgcatcactgcactccagcctgggcaacacagcaagatcctgtctaaaaataaaaagaaaagagaaggaaaggaaagagacggggctctgaggccgagcacagtggcccatgcctataatcccagcactttgggaggctgaggcaggtggatcacctgaggttaggagttcgagaccagcctggccaacatggtgaaaccccatctctactaaaaatacaaaaattggctgggcatggtggcgggtgcctgtaatcccagctactggggaggctgaggcaggagaatcacttgaattcaggaggtggaggttgcagtgagccgacatcatgccactgcactccagcctggggctgacagagcaagacactgtctc

SEQ ID NO: 69600 - DNA, 3597 bp, Homo sapiens
atgggacccaggcaggactccgcagtggtgcaccatctgggcatcgacagctcctcggtgtcggccccaccttgagccccagttccaccttctaccgcttcagcacctccggcgcggacagctcctcgctgtcgcctccactcccggccctgggccggacccgggagcagacgctcctcggcgcccgctcacggggacgagtcctgctccctgctatcccagacccctttctctggcgcatggagaacctgggggtcggcgaaggggcagaggcttgcagcaggttgagtcgctctcgcggccgccacagcatgaccagagccccgaagcacctgtggcggcaaccccggcgccccatccgcatccaacagcgcttctattcggatccggacaagtccgcgggctgccgcgagagggacctgagcccgcggccggagctcaggaagtcgcggctctcctggcccgtttcctcctgcaggcgctttgacctggaaaatgggctctcgtgtgggaggagggccctggaccctcagtccagccctggcctgggccggattatgcaggctccagtcccgcacagccagcggcgcgagtccttcctgtaccgctcagatagcgactatgaactctcgcccaaggccatgtctcggaactcctctgtggccagcgacctacatggagaggacatgattgtgacgccctttgcccaggtcctggccagtctgcggaccgttcggagcaacgtggcggcccttgcccgccagcaatgcctaggagcagccaagcagggacccgtcggaaacccttcatccagcaatcagctccctcctgcagaggacacggggcagaagctggcattggagacgctagacgagctggactggtgcctggatcagttggagacgctgcagacccggcactcggtgggggagatggcctccaacaagttcaagcggatcctgaaccgggagttgacccacctgtccgaaaccagccgctccgggaaccaggtgtccgagtacatctcccggaccttcctggaccagcagaccgaggtggagctgcccaaggtgaccgctgaggaggccccacagcccatgtcccggatcagtggcctacatgggctctgccacagtgccagcctctcctcagccactgtcccacgctttggggtccagactgaccaggaggagcaactggccaaggagctagaagacaccaacaagtggggacttgatgtgttcaaggtggcggagctaagtgggaaccggcccctcacagctatcatattcagcatttttcaggagcgggacctgctgaagacattccagatcccagcagacacactggccacctacctgctgatgctggagggtcactaccacgccaatgtggcctaccacaacagcctacatgccgccgacgtggcccagtccacgcatgtgctgctggctacgcccgccctcgaggctgtgttcacagacttggaaatcctggctgccctctttgcaagcgccatccacgacgtggaccatcctggggtctccaaccagtttctgattaacaccaactcagagctggcgcttatgtacaacgacgcctcggtgctggagaaccatcacctggctgtgggcttcaagctgctgcaggcagagaactgcgatatcttccagaacctcagcgccaagcagcgactgagtctgcgcaggatggtcattgacatggtgctggccacagacatgtccaaacacatgaacctcctggccgacctcaagaccatggtggagaccaagaaggtgacaagcctcggtgtcctcctcctggacaactattccgaccgaatccaggtcttgcagaacctggtgcactgtgctgatctgagcaaccccaccaagccgctgcccctgtaccgccagtggacggaccgcatcatggccgagttcttccagcagggagaccgcgagcgtgagtcgggcctggacatcagtcccatgtgtgacaagcatacggcctcagtggagaagtcccaggtgggtttcattgactacattgctcacccactgtgggagacttgggctgacctggtccacccagatgcacaggacctgctggacacgctggaggacaatcgagagtggtaccagagcaagatcccccgaagtccctcagacctcaccaaccccgagcgggacgggcctgacagattccagtttgaactgactctggaggaggcagaggaagaggatgaggaggaagaagaggagggggaagagacagctttagccaaagaggccttggagttgcctgacactgaactcctgtcccctgaagccggcccagaccctggggacttacccctcgacaaccagaggacttagggccagccctgcgtgaactgcaggggcaatggatggtaaagccctttggctcttggcaggcagactttccaggaagaggctccatgtggctcctgcttcactttcccacccatttagggagacaatcaagctcttagttataggtggctcccagggtctaattggaggcacctggctggggtccactctgaccctagacttgcctaaaagagctctctaaggggcagcctcttacgatgccctggtgtctttctcctgggcttctatccctgtgaggagaggtgctgtctgctggagcctctagtccaccctctccagtggtcactcttgagtcacatctgtcacttaattatttccttctttatcaaatatttattgctcatctacttcgggccagctttctgcctctgtagtagccctgcacaaagggtggggagtcaggagaccatcccaaaggcatctccctgtcttcctctaccaagcggctctctgcaagagcatggaaatgtgagtggggaaaattttcagcaccaaagcttcactcatacccagttttgtttctgaaactacggtagggggcaggaagaggagcagaaaagaagggctgggcaaggcatagtggcttatgcctgtaatcccggtactttgggaggctgaggtgggaggactgcttaagctcaggagtttgagaccagcctgggcaacatagcaagacccccaccatctctgaaaaaaaaaattagccaggcatggtggtgtgcacctgagaatcccagctactcagaaggttgagacaaaggggatcgcttgagcccaggagttggaggctgaagagagctatgactgcatcactgcactccagcctgggcaacacagcaagatcctgtctaaaaataaaaagaaaagagaaggaaaggaaagagacggggctctgaggccgagcacagtggcccatgcctataatcccagcactttgggaggctgaggcaggtggatcacctgaggttaggagttcgagaccagcctggccaacatggtgaaaccccatctctactaaaaatacaaaaattggctgggcatggtggcgggtgcctgtaatcccagctactggggaggctgaggcaggagaatcacttgaattcaggaggtggaggttgcagtgagccgacatcatgccactgcactccagcctggggctgacagagcaagacactgtctc

SEQ ID NO: 69601 - DNA, 3322 bp, Homo sapiens
  misc_feature (26)..(26): n is a, c, g, or t
gctgtccagaaaaggtcccgcgcagncggcgctcggtccagcctccacgcagtcctggcgatgcagggcccccccgcgcccgccccggtccccgggcccggctcccctcggggatccccgcgcggctcccccgggctcttcaggaagcttttggtgaatcagagcatccgcctgcagcggcgcttcacggtggcccatccgctgtgctttgacctggaaaatgggctctcgtgtgggaggagggccctggaccctcagtccagccctggcctgggccggattatgcaggctccagtcccgcacagccagcggcgcgagtccttcctgtaccgctcagatagcgactatgaactctcgcccaaggccatgtctcggaactcctctgtggccagcgacctacatggagaggacatgattgtgacgccctttgcccaggtcctggccagtctgcggaccgttcggagcaacgtggcggcccttgcccgccagcaatgcctaggagcagccaagcagggacccgtcggaaacccttcatccagcaatcagctccctcctgcagaggacacggggcagaagctggcattggagacgctagacgagctggactggtgcctggatcagttggagacgctgcagacccggcactcggtgggggagatggcctccaacaagttcaagcggatcctgaaccgggagttgacccacctgtccgaaaccagccgctccgggaaccaggtgtccgagtacatctcccggaccttcctggaccagcagaccgaggtggagctgcccaaggtgaccgctgaggaggccccacagcccatgtcccggatcagtggcctacatgggctctgccacagtgccagcctctcctcagccactgtcccacgctttggggtccagactgaccaggaggagcaactggccaaggagctagaagacaccaacaagtggggacttgatgtgttcaaggtggcggagctaagtgggaaccggcccctcacagctatcatattcagcatttttcaggagcgggacctgctgaagacattccagatcccagcagacacactggccacctacctgctgatgctggagggtcactaccacgccaatgtggcctaccacaacagcctacatgccgccgacgtggcccagtccacgcatgtgctgctggctacgcccgccctcgaggctgtgttcacagacttggaaatcctggctgccctctttgcaagcgccatccacgacgtggaccatcctggggtctccaaccagtttctgattaacaccaactcagagctggcgcttatgtacaacgacgcctcggtgctggagaaccatcacctggctgtgggcttcaagctgctgcaggcagagaactgcgatatcttccagaacctcagcgccaagcagcgactgagtctgcgcaggatggtcattgacatggtgctggccacagacatgtccaaacacatgaacctcctggccgacctcaagaccatggtggagaccaagaaggtgacaagcctcggtgtcctcctcctggacaactattccgaccgaatccaggtcttgcagaacctggtgcactgtgctgatctgagcaaccccaccaagccgctgcccctgtaccgccagtggacggaccgcatcatggccgagttcttccagcagggagaccgcgagcgtgagtcgggcctggacatcagtcccatgtgtgacaagcatacggcctcagtggagaagtcccaggtgggtttcattgactacattgctcacccactgtgggagacttgggctgacctggtccacccagatgcacaggacctgctggacacgctggaggacaatcgagagtggtaccagagcaagatcccccgaagtccctcagacctcaccaaccccgagcgggacgggcctgacagattccagtttgaactgactctggaggaggcagaggaagaggatgaggaggaagaagaggagggggaagagacagctttagccaaagaggccttggagttgcctgacactgaactcctgtcccctgaagccggcccagaccctggggacttacccctcgacaaccagaggacttagggccagccctgcgtgaactgcaggggcaatggatggtaaagccctttggctcttggcaggcagactttccaggaagaggctccatgtggctcctgcttcactttcccacccatttagggagacaatcaagctcttagttataggtggctcccagggtctaattggaggcacctggctggggtccactctgaccctagacttgcctaaaagagctctctaaggggcagcctcttacgatgccctggtgtctttctcctgggcttctatccctgtgaggagaggtgctgtctgctggagcctctagtccaccctctccagtggtcactcttgagtcacatctgtcacttaattatttccttctttatcaaatatttattgctcatctacttcgggccagctttctgcctctgtagtagccctgcacaaagggtggggagtcaggagaccatcccaaaggcatctccctgtcttcctctaccaagcggctctctgcaagagcatggaaatgtgagtggggaaaattttcagcaccaaagcttcactcatacccagttttgtttctgaaactacggtagggggcaggaagaggagcagaaaagaagggctgggcaaggcatagtggcttatgcctgtaatcccggtactttgggaggctgaggtgggaggactgcttaagctcaggagtttgagaccagcctgggcaacatagcaagacccccaccatctctgaaaaaaaaaattagccaggcatggtggtgtgcacctgagaatcccagctactcagaaggttgagacaaaggggatcgcttgagcccaggagttggaggctgaagagagctatgactgcatcactgcactccagcctgggcaacacagcaagatcctgtctaaaaataaaaagaaaagagaaggaaaggaaagagacggggctctgaggccgagcacagtggcccatgcctataatcccagcactttgggaggctgaggcaggtggatcacctgaggttaggagttcgagaccagcctggccaacatggtgaaaccccatctctactaaaaatacaaaaattggctgggcatggtggcgggtgcctgtaatcccagctactggggaggctgaggcaggagaatcacttgaattcaggaggtggaggttgcagtgagccgacatcatgccactgcactccagcctggggctgacagagcaagacactgtctc

SEQ ID NO: 69602 - DNA, 4611 bp, Homo sapiens
gtgcgagggacaccgtctcggccccgggggtctcctgagaccctgtctccctgccctccatttagcagcgatcagtggacaatttctgtcttctccactccaagtccttgtcttggttcttttccatgcagcgctataggggacggcagacggttttcggggctggtgtgttggggggggtctcttcagcccctagcttcaacaccccctcaccacgttcttctcccctgttctacccttcagcaccatctgggcatcgacagctcctcggtgtcggccccaccttgagccccagttccaccttctaccgcttcagcacctccggcgcggacagctcctcgctgtcgcctccactcccggccctgggccggacccgggagcagacgctcctcggcgcccgctcacggggacgagtcctgctccctgctatcccagacccctttctctggcgcatggagaacctgggggtcggcgaaggggcagaggcttgcagcaggttgagtcgctctcgcggccgccacagcatgaccagagccccgaagcacctgtggcggcaaccccggcgccccatccgcatccaacagcgcttctattcggatccggacaagtccgcgggctgccgcgagagggacctgagcccgcggccggagctcaggaagtcgcggctctcctggcccgtttcctcctgcaggcgctttgacctggaaaatgggctctcgtgtgggaggagggccctggaccctcagtccagccctggcctgggccggattatgcaggctccagtcccgcacagccagcggcgcgagtccttcctgtaccgctcagatagcgactatgaactctcgcccaaggccatgtctcggaactcctctgtggccagcgacctacatggagaggacatgattgtgacgccctttgcccaggtcctggccagtctgcggaccgttcggagcaacgtggcggcccttgcccgccagcaatgcctaggagcagccaagtaggtagagggcggggcggggcgggggcggggccggcagagacaaggtgggcggaaagcgggctgcaaattgaggctggggctccggcgcctccaggtgggtttgaggggcggggcctggtggacttgggggcggggcgagatgggcggagcagccacgcctgaggctgctgtaccgcaggcagggacccgtcggaaacccttcatccagcaatcagctccctcctgcaggtaaagtacctgttccttccctcccccgctgaggacagctgggagcttcctttccatagtgacctccccagtccatgagccccttatactggggctaattgtagccccgcccctgcaaaaacaataacgccctcggggatggaccccaccacactcatattacagatgaggaggctgaggcccagagatctcatggtcacacaggcactcggggaacagatctggaacttgggtccaggagtcctgggtggcccccgtgggaacagtttcagggtccagatgaagagacgaagtcgcgagaggcgtggggtccctgagcgggggggttgggcaggcccctgactgcctcggctcccagaggacacggggcagaagctggcattggagacgctagacgagctggactggtgcctggatcagttggagacgctgcagacccggcactcggtgggggagatggcctccaacaagttcaagcggatcctgaaccgggagttgacccacctgtccgaaaccagccgctccgggaaccaggtgtccgagtacatctcccggaccttcctggtagcgatggggtttcaccgtattgctcagactggtctcgaactcctgacctcaagtgatctgcccacctcgacctcccaaagcactgggattacaggcgtgagccactgcgtccggccgacagggtctttactccgaacttactttggttcctgtagaaagggaaataggttgattctggggtttggcaaaattcaggtcctgaggccaggccccagcaggtgaaatcggcttctctgagcttcaccctggcccatccgcagaccagcagaccgaggtggagctgcccaaggtgaccgctgaggaggccccacagcccatgtcccggatcagtggcctacatgggctctgccacagtgccagcctctcctcagccactgtcccacgctttggggtccagactgaccaggaggagcaactggccaaggagctagaagacaccaacaagtggggacttgatgtgttcaaggtggcggagctaagtgggaaccggcccctcacagctatcatattcagcatttttcaggagcgggacctgctgaagacattccagatcccagcagacacactggccacctacctgctgatgctggagggtcactaccacgccaatgtggcctaccacaacagcctacatgccgccgacgtggcccagtccacgcatgtgctgctggctacgcccgccctcgaggctgtgttcacagacttggaaatcctggctgccctctttgcaagcgccatccacgacgtggaccatcctggggtctccaaccagtttctgattaacaccaactcagagctggcgcttatgtacaacgacgcctcggtgctggagaaccatcacctggctgtgggcttcaagctgctgcaggcagagaactgcgatatcttccagaacctcagcgccaagcagcgactgagtctgcgcaggatggtcattgacatggtgctggccacagacatgtccaaacacatgaacctcctggccgacctcaagaccatggtggagaccaagaaggtgacaagcctcggtgtcctcctcctggacaactattccgaccgaatccaggtcttgcagaacctggtgcactgtgctgatctgagcaaccccaccaagccgctgcccctgtaccgccagtggacggaccgcatcatggccgagttcttccagcagggagaccgcgagcgtgagtcgggcctggacatcagtcccatgtgtgacaagcatacggcctcagtggagaagtcccaggtgggtttcattgactacattgctcacccactgtgggagacttgggctgacctggtccacccagatgcacaggacctgctggacacgctggaggacaatcgagagtggtaccagagcaagatcccccgaagtccctcagacctcaccaaccccgagcgggacgggcctgacagattccagtttgaactgactctggaggaggcagaggaagaggatgaggaggaagaagaggagggggaagagacagctttagccaaagaggccttggagttgcctgacactgaactcctgtcccctgaagccggcccagaccctggggacttacccctcgacaaccagaggacttagggccagccctgcgtgaactgcaggggcaatggatggtaaagccctttggctcttggcaggcagactttccaggaagaggctccatgtggctcctgcttcactttcccacccatttagggagacaatcaagctcttagttataggtggctcccagggtctaattggaggcacctggctggggtccactctgaccctagacttgcctaaaagagctctctaaggggcagcctcttacgatgccctggtgtctttctcctgggcttctatccctgtgaggagaggtgctgtctgctggagcctctagtccaccctctccagtggtcactcttgagtcacatctgtcacttaattatttccttctttatcaaatatttattgctcatctacttcgggccagctttctgcctctgtagtagccctgcacaaagggtggggagtcaggagaccatcccaaaggcatctccctgtcttcctctaccaagcggctctctgcaagagcatggaaatgtgagtggggaaaattttcagcaccaaagcttcactcatacccagttttgtttctgaaactacggtagggggcaggaagaggagcagaaaagaagggctgggcaaggcatagtggcttatgcctgtaatcccggtactttgggaggctgaggtgggaggactgcttaagctcaggagtttgagaccagcctgggcaacatagcaagacccccaccatctctgaaaaaaaaaattagccaggcatggtggtgtgcacctgagaatcccagctactcagaaggttgagacaaaggggatcgcttgagcccaggagttggaggctgaagagagctatgactgcatcactgcactccagcctgggcaacacagcaagatcctgtctaaaaataaaaagaaaagagaaggaaaggaaagagacggggctctgaggccgagcacagtggcccatgcctataatcccagcactttgggaggctgaggcaggtggatcacctgaggttaggagttcgagaccagcctggccaacatggtgaaaccccatctctactaaaaatacaaaaattggctgggcatggtggcgggtgcctgtaatcccagctactggggaggctgaggcaggagaatcacttgaattcaggaggtggaggttgcagtgagccgacatcatgccactgcactccagcctggggctgacagagcaagacactgtctc

SEQ ID NO: 69603 - DNA, 237 bp, Homo sapiens
gcgggtgtaggtcccacgtgaaactgctggagcccggcggagcttcggacgggaatttggggtcagaacaggtccaggtctcaaggcaacccccaactctgtacagtggaatccgctcgtccagggtcgtgacccgggtgaggcagtgcggatttcagggtccccgtgctcccagcccggcgaagtttcacccttccttcccttgctggcttcctctcccagttccctggacgccga

SEQ ID NO: 69604 - DNA, 757 bp, Homo sapiens
aaactgctaaatgtttagccattgaagttttctaacctaaatttccttgttggtaaaatgggtataatactttctctgcctacctttatagggttattttcaggattaaatgcttttaaggaagtgaaactagtaaaaactatcggagggaagtgttgttattttcttcttttgagaacaatatatctttaaacatttttagaagaaaaaaaggttttgaattccttgaagaaaaggtgcttccaaagcatatttattgatgctattattgtaaatccctctttaagcttcatgcatttaaaaattaatgacaactctcctcttcctttctggaaagcttttatgacttaactccaaattctatgtgtttaaaaaaactaaagtatcatgtcctccttaaagaataccattattattcataacctctgaaaccagcgagggtcataaagctactgactgcgaatgattaagtggccacaaataaaacactggtattaccacatgtaaattctttccctgcagtttatgcctccgcaaacagtgattcaactgcaggtgtctgtcaagagacagtagagttttgtccttctggaagcctcactgtatgtgaagtcaagaaacaatgcccctgccactgtctagctatagcctcaatcaaatcatttcacctctcttagcctctgcttcctcttttaactgacagggcattcagtggctgtgcgtctgggcctcactgctctccccagaaggcatttga

SEQ ID NO: 69605 - DNA, 329 bp, Homo sapiens
gtcacattagcagaatgaaagataaaaaattatatatcatatcaatagacacagcaaaagaatttgacaaaatgcaatatcattttgtgataaaatctctcaataaattatgtattaatgtaccacaacataataaaggccatatatgacaagcacacaggtaatatactcagtgatggaaagcagaaggctttttctttaagattaggaacaagacaaggatgcccacttccacaacttatagttagtatagtactggtagtcttggctagtgcaattaggagagtgattgctgggtcacacggttaatatgtgcttaactttataag

SEQ ID NO: 69606 - DNA, 176 bp, Homo sapiens
cgtgagccacagtggttatctccaagctcagggcaatcccttccctcctgtcaactgctccccgactcctgcatggctcattccttcacaatgtcgccgtggctgccaggttcctcaggcagccccggtgggaggctgcggaccatggggactcagctctgcatggcaggcaaagg

SEQ ID NO: 69607 - DNA, 1554 bp, Homo sapiens
ctgctctggcaaccaatagaagctaggagagggcggggacaactgggtcttttgcggctgcagcgggcttgtaggtgtccggctttgctggcccagcaagcctgataagcatgaagctcttatctttggtggctgtggtcgggtgtttgctggtgcccccagctgaagccaacaagagttctgaagatatccggtgcaaatgcatctgtccaccttatagaaacatcagtgggcacatttacaaccagaatgtatcccagaaggactgcaactgcctgcacgtggtggagcccatgccagtgcctggccatgacgtggaggcctactgcctgctgtgcgagtgcaggtacgaggagcgcagcaccaccaccatcaaggtcatcattgtcatctacctgtccgtggtgggtgccctgttgctctacatggccttcctgatgctggtggaccctctgatccgaaagccggatgcatacactgagcaactgcacaatgaggaggagaatgaggatgctcgctctatggcagcagctgctgcatccctcgggggaccccgagcaaacacagtcctggagcgtgtggaaggtgcccagcagcggtggaagctgcaggtgcaggagcagcggaagacagtcttcgatcggcacaagatgctcagctagatgggctggtgtggttgggtcaaggccccaacaccatggctgccagcttccaggctggacaaagcagggggctacttctcccttccctcggttccagtcttccctttaaaagcctgtggcatttttcctccttctccctaactttagaaatgttgtacttggctattttgattagggaagagggatgtggtctctgatctccgttgtcttcttgggtctttggggttgaagggagggggaaggcaggccagaagggaatggagacattcgaggcggcctcaggagtggatgcgatctgtctctcctggctccactcttgccgccttccagctctgagtcttgggaatgttgttacccttggaagataaagctgggtcttcaggaactcagtgtctgggaggaaagcatggcccagcattcagcatgtgttcctttctgcagtggttctttatcaccacctccctcccagccccagcgcctcagccccagccccagctccagccctgaggacagctctgatgggagagctgggccccctgagcccactgggtcttcagggtgcactggaagctggtgttcgctgtcccctgtgcacttctcgcactggggcatggagtgcccatgcatactctgctgccggtcccctcacctgcacttgaggggtctgggcagtccctcctctccccagtgtccacagtcactgagccagacggtcggttggaacatgagactcgaggctgagcgtggatctgaacaccacagcccctgtacttgggttgcctcttgtccctgaacttcgttgtaccagtgcatggagagaaaattttgtcctcttgtcttagagttgtgtgtaaatcaaggaagccatcattaaattgttttatttctctca

SEQ ID NO: 69608 - DNA, 1865 bp, Homo sapiens
  misc_feature (1572)..(1572): n is a, c, g, or t
  misc_feature (1580)..(1580): n is a, c, g, or t
  misc_feature (1588)..(1588): n is a, c, g, or t
ctgctctggcaaccaatagaagctaggagagggcggggacaactgggtcttttgcggctgcagcgggcttgtaggtgtccggctttgctggcccagcaagcctgataagcatgaagctcttatctttggtggctgtggtcgggtgtttgctggtgcccccagctgaagccaacaagagttctgaagatatccggtgcaaatgcatctgtccaccttatagaaacatcagtgggcacatttacaaccagaatgtatcccagaaggactgcaactgcctgcacgtggtggagcccatgccagtgcctggccatgacgtggaggcctactgcctgctgtgcgagtgcaggtacgaggagcgcagcaccaccaccatcaaggtcatcattgtcatctacctgtccgtggtgggtgccctgttgctctacatggccttcctgatgctggtggaccctctgatccgaaagccggatgcatacactgagcaactgcacaatgaggaggagaatgaggatgctcgctctatggcagcagctgctgcatccctcgggggaccccgagcaaacacagtcctggagcgtgtggaaggtgcccagcagcggtggaagctgcaggtgcaggagcagcggaagacagtcttcgatcggcacaagatgctcagctagatgggctggtgtggttgggtcaaggccccaacaccatggctgccagcttccaggctggacaaagcagggggctacttctcccttccctcggttccagtcttccctttaaaagcctgtggcatttttcctccttctccctaactttagaaatgttgtacttggctattttgattagggaagagggatgtggtctctgatctccgttgtcttcttgggtctttggggttgaagggagggggaaggcaggccagaagggaatggagacattcgaggcggcctcaggagtggatgcgatctgtctctcctggctccactcttgccgccttccagctctgagtcttgggaatgttgttacccttggaagataaagctgggtcttcaggaactcagtgtctgggaggaaagcatggcccagcattcagcatgtgttcctttctgcagtggttctttatcaccacctccctcccagccccagcgcctcagccccagccccagctccagccctgaggacagctctgatgggagagctgggccccctgagcccactgggtcttcagggtgcactggaagctggtgttcgctgtcccctgtgcacttctcgcactggggcatggagtgcccatgcatactctgctgccggtcccctcacctgcacttgaggggtctgggcagtccctcctctccccagtgtccacagtcactgagccagacggtcggttggaacatgagactcgaggctgagcgtggatctgaacaccacagcccctgtacttgggttgcctcttgtccctgaacttcgttgtaccagtgcatggagagaaaattttgtcctcttgtcttagagttgtgtgtaaatcaaggaagccatcattaaattgttttatttctctcaaaaaaaaaaaaaaaaaanaaaaaaanaaaaaaanaaaaaaaaaaaaaaaaaaaaaaaggggggggggcccccaaaacccccgcggagggggagccccagacgatgcagcgacgctgccccacgacttgtgctgggatgaaaagagggggcccccccagatgagagggaggcgctcattaaaaacacggagagaccgacgcggcgacccacgaggtaacaacagcgcgcgggagcgcgcggaaacatggctctgcaggttgggaactcatggggaggaaccaaacaccacctcggcgggggggggggaactg

SEQ ID NO: 69609 - DNA, 1533 bp, Homo sapiens
ctgctctggcaaccaatagaagctaggagagggcggggacaactgggtcttttgcggctgcagcgggcttgtaggtgtccggctttgctggcccagcaagcctgataagcatgaagctcttatctttggtggctgtggtcgggtgtttgctggtgcccccagctgaagccaacaagagttctgaagatatccggtgcaaatgcatctgtccaccttatagaaacatcagtgggcacatttacaaccagaatgtatcccagaaggactgcaactgcctgcacgtggtggagcccatgccagtgcctggccatgacgtggaggcctactgcctgctgtgcgagtgcaggtacgaggagcgcagcaccaccaccatcaaggtcatcattgtcatctacctgtccgtggtgggtgccctgttgctctacatggccttcctgatgctggtggaccctctgatccgaaagccggatgcatacactgagcaactgcacaatgaggaggagaatgaggatgctcgctctatggcagcagctgctgcatccctcgggggaccccgagcaaacacagtcctggagcgtgtggaaggtgcccagcagcggtggaagctgcaggtgcaggagcagcggaagacagtcttcgatcggcacaagatgctcagctagatgggctggtgtggttgggtcaaggccccaacaccatggctgccagcttccaggctggacaaagcagggggctacttctcccttccctcggttccagtcttccctttaaaagcctgtggcatttttcctccttctccctaactttagaaatgttgtacttggctattttgattagggaagagggatgtggtctctgatctccgttgtcttcttgggtctttggggttgaagggagggggaaggcaggccagaagggaatggagacattcgaggcggcctcaggagtggatgcgatctgtctctcctggctccactcttgccgccttccagctctgagtcttgggaatgttgttacccttggaagataaagctgggtcttcaggaactcagtgtctgggaggaaagcatggcccagcattcagcatgtgttcctttctgcagtggttctttatcaccacctccctcccaccccagctccagccctgaggacagctctgatgggagagctgggccccctgagcccactgggtcttcagggtgcactggaagctggtgttcgctgtcccctgtgcacttctcgcactggggcatggagtgcccatgcatactctgctgccggtcccctcacctgcacttgaggggtctgggcagtccctcctctccccagtgtccacagtcactgagccagacggtcggttggaacatgagactcgaggctgagcgtggatctgaacaccacagcccctgtacttgggttgcctcttgtccctgaacttcgttgtaccagtgcatggagagaaaattttgtcctcttgtcttagagttgtgtgtaaatcaaggaagccatcattaaattgttttatttctctca

SEQ ID NO: 69610 - DNA, 1765 bp, Homo sapiens
ggcattgggggaggggacgggggtcgcggggctattgggggtcccagtccggcttaagacctctgggcgtggtgggcaccggccttcgccgtcggagcaggggtcccagactcgcacccaaaagttcccgtcgggcccgagcggggaggagctgcggggcgggcagaggcggagatggcggagggcggtgggacgtgatgcgcgggtcagagccgggccttgagaaggaactggaggcccctggcagcggtgtcccctcgaggacccctctgccgggctcaccaggtgtccggctttgctggcccagcaagcctgataagcatgaagctcttatctttggtggctgtggtcgggtgtttgctggtgcccccagctgaagccaacaagagttctgaagatatccggtgcaaatgcatctgtccaccttatagaaacatcagtgggcacatttacaaccagaatgtatcccagaaggactgcaactgcctgcacgtggtggagcccatgccagtgcctggccatgacgtggaggcctactgcctgctgtgcgagtgcaggtacgaggagcgcagcaccaccaccatcaaggtcatcattgtcatctacctgtccgtggtgggtgccctgttgctctacatggccttcctgatgctggtggaccctctgatccgaaagccggatgcatacactgagcaactgcacaatgaggaggagaatgaggatgctcgctctatggcagcagctgctgcatccctcgggggaccccgagcaaacacagtcctggagcgtgtggaaggtgcccagcagcggtggaagctgcaggtgcaggagcagcggaagacagtcttcgatcggcacaagatgctcagctagatgggctggtgtggttgggtcaaggccccaacaccatggctgccagcttccaggctggacaaagcagggggctacttctcccttccctcggttccagtcttccctttaaaagcctgtggcatttttcctccttctccctaactttagaaatgttgtacttggctattttgattagggaagagggatgtggtctctgatctccgttgtcttcttgggtctttggggttgaagggagggggaaggcaggccagaagggaatggagacattcgaggcggcctcaggagtggatgcgatctgtctctcctggctccactcttgccgccttccagctctgagtcttgggaatgttgttacccttggaagataaagctgggtcttcaggaactcagtgtctgggaggaaagcatggcccagcattcagcatgtgttcctttctgcagtggttctttatcaccacctccctcccagccccagcgcctcagccccagccccagctccagccctgaggacagctctgatgggagagctgggccccctgagcccactgggtcttcagggtgcactggaagctggtgttcgctgtcccctgtgcacttctcgcactggggcatggagtgcccatgcatactctgctgccggtcccctcacctgcacttgaggggtctgggcagtccctcctctccccagtgtccacagtcactgagccagacggtcggttggaacatgagactcgaggctgagcgtggatctgaacaccacagcccctgtacttgggttgcctcttgtccctgaacttcgttgtaccagtgcatggagagaaaattttgtcctcttgtcttagagttgtgtgtaaatcaaggaagccatcattaaattgttttatttctctca

SEQ ID NO: 69611 - DNA, 1538 bp, Homo sapiens
  misc_feature (18)..(18): n is a, c, g, or t
agctcggtacccaacaancccggacaactgggtcttttgcggctgcagcgggctgtaggtgtccggctttgctggcccagcaagcctgataagcatgaagctcttatctttggtggctgtggtcgggtgtttgctggtgcccccagctgaagccaacaagagttctgaagatatccggtgcaaatgcatctgtccaccttatagaaacatcagtgggcacatttacaaccagaatgtatcccagaaggactgcaactgcctgcacgtggtggagcccatgccagtgcctggccatgacgtggaggcctactgcctgctgtgcgagtgcaggtacgaggagcgcagcaccaccaccatcaaggtcatcattgtcatctacctgtccgtggtgggtgccctgttgctctacatggccttcctgatgctggtggaccctctgatccgaaagccggatgcatacactgagcaactgcacaatgaggaggagaatgaggatgctcgctctatggcagcagctgctgcatccctcgggggaccccgagcaaacacagtcctggagcgtgtggaaggtgcccagcagcggtggaagctgcaggtgcaggagcagcggaagacagtcttcgatcggcacaagatgctcagctagatgggctggtgtggttgggtcaaggccccaacaccatggctgccagcttccaggctggacaaagcagggggctacttctcccttccctcggttccagtcttccctttaaaagcctgtggcatttttcctccttctccctaactttagaaatgttgtacttggctattttgattagggaagagggatgtggtctctgatctccgttgtcttcttgggtctttggggttgaagggagggggaaggcaggccagaagggaatggagacattcgaggcggcctcaggagtggatgcgatctgtctctcctggctccactcttgccgccttccagctctgagtcttgggaatgttgttacccttggaagataaagctgggtcttcaggaactcagtgtctgggaggaaagcatggcccagcattcagcatgtgttcctttctgcagtggttctttatcaccacctccctcccagccccagcgcctcagccccagccccagctccagccctgaggacagctctgatgggagagctgggccccctgagcccactgggtcttcagggtgcactggaagctggtgttcgctgtcccctgtgcacttctcgcactggggcatggagtgcccatgcatactctgctgccggtcccctcacctgcacttgaggggtctgggcagtccctcctctccccagtgtccacagtcactgagccagacggtcggttggaacatgagactcgaggctgagcgtggatctgaacaccacagcccctgtacttgggttgcctcttgtccctgaacttcgttgtaccagtgcatggagagaaaattttgtcctcttgtcttagagttgtgtgtaaatcaaggaagccatcattaaattgttttatttctctca

SEQ ID NO: 69612 - DNA, 1551 bp, Homo sapiens
ggcattgggggaggggacgggggtcgcggggctattgggggtcccagtccggcttaagacctctgggcgtggtgtccggctttgctggcccagcaagcctgataagcatgaagctcttatctttggtggctgtggtcgggtgtttgctggtgcccccagctgaagccaacaagagttctgaagatatccggtgcaaatgcatctgtccaccttatagaaacatcagtgggcacatttacaaccagaatgtatcccagaaggactgcaactgcctgcacgtggtggagcccatgccagtgcctggccatgacgtggaggcctactgcctgctgtgcgagtgcaggtacgaggagcgcagcaccaccaccatcaaggtcatcattgtcatctacctgtccgtggtgggtgccctgttgctctacatggccttcctgatgctggtggaccctctgatccgaaagccggatgcatacactgagcaactgcacaatgaggaggagaatgaggatgctcgctctatggcagcagctgctgcatccctcgggggaccccgagcaaacacagtcctggagcgtgtggaaggtgcccagcagcggtggaagctgcaggtgcaggagcagcggaagacagtcttcgatcggcacaagatgctcagctagatgggctggtgtggttgggtcaaggccccaacaccatggctgccagcttccaggctggacaaagcagggggctacttctcccttccctcggttccagtcttccctttaaaagcctgtggcatttttcctccttctccctaactttagaaatgttgtacttggctattttgattagggaagagggatgtggtctctgatctccgttgtcttcttgggtctttggggttgaagggagggggaaggcaggccagaagggaatggagacattcgaggcggcctcaggagtggatgcgatctgtctctcctggctccactcttgccgccttccagctctgagtcttgggaatgttgttacccttggaagataaagctgggtcttcaggaactcagtgtctgggaggaaagcatggcccagcattcagcatgtgttcctttctgcagtggttctttatcaccacctccctcccagccccagcgcctcagccccagccccagctccagccctgaggacagctctgatgggagagctgggccccctgagcccactgggtcttcagggtgcactggaagctggtgttcgctgtcccctgtgcacttctcgcactggggcatggagtgcccatgcatactctgctgccggtcccctcacctgcacttgaggggtctgggcagtccctcctctccccagtgtccacagtcactgagccagacggtcggttggaacatgagactcgaggctgagcgtggatctgaacaccacagcccctgtacttgggttgcctcttgtccctgaacttcgttgtaccagtgcatggagagaaaattttgtcctcttgtcttagagttgtgtgtaaatcaaggaagccatcattaaattgttttatttctctca

SEQ ID NO: 69613 - DNA, 1583 bp, Homo sapiens
  misc_feature (21)..(22): n is a, c, g, or t
  misc_feature (64)..(64): n is a, c, g, or t
gcggcctctgctccctccctnntaggctctgtcccacaatgcacccgagagcaggagctgaaanctctaacacccacagatccctctatgactgcaatgtgaggtgtccggctttgctggcccagcaagcctgataagcatgaagctcttatctttggtggctgtggtcgggtgtttgctggtgcccccagctgaagccaacaagagttctgaagatatccggtgcaaatgcatctgtccaccttatagaaacatcagtgggcacatttacaaccagaatgtatcccagaaggactgcaactgcctgcacgtggtggagcccatgccagtgcctggccatgacgtggaggcctactgcctgctgtgcgagtgcaggtacgaggagcgcagcaccaccaccatcaaggtcatcattgtcatctacctgtccgtggtgggtgccctgttgctctacatggccttcctgatgctggtggaccctctgatccgaaagccggatgcatacactgagcaactgcacaatgaggaggagaatgaggatgctcgctctatggcagcagctgctgcatccctcgggggaccccgagcaaacacagtcctggagcgtgtggaaggtgcccagcagcggtggaagctgcaggtgcaggagcagcggaagacagtcttcgatcggcacaagatgctcagctagatgggctggtgtggttgggtcaaggccccaacaccatggctgccagcttccaggctggacaaagcagggggctacttctcccttccctcggttccagtcttccctttaaaagcctgtggcatttttcctccttctccctaactttagaaatgttgtacttggctattttgattagggaagagggatgtggtctctgatctccgttgtcttcttgggtctttggggttgaagggagggggaaggcaggccagaagggaatggagacattcgaggcggcctcaggagtggatgcgatctgtctctcctggctccactcttgccgccttccagctctgagtcttgggaatgttgttacccttggaagataaagctgggtcttcaggaactcagtgtctgggaggaaagcatggcccagcattcagcatgtgttcctttctgcagtggttctttatcaccacctccctcccagccccagcgcctcagccccagccccagctccagccctgaggacagctctgatgggagagctgggccccctgagcccactgggtcttcagggtgcactggaagctggtgttcgctgtcccctgtgcacttctcgcactggggcatggagtgcccatgcatactctgctgccggtcccctcacctgcacttgaggggtctgggcagtccctcctctccccagtgtccacagtcactgagccagacggtcggttggaacatgagactcgaggctgagcgtggatctgaacaccacagcccctgtacttgggttgcctcttgtccctgaacttcgttgtaccagtgcatggagagaaaattttgtcctcttgtcttagagttgtgtgtaaatcaaggaagccatcattaaattgttttatttctctca

SEQ ID NO: 69614 - DNA, 1603 bp, Homo sapiens
ggcattgggggaggggacgggggtcgcggggctattgggggtcccagtccggcttaagacctctgggcgtggtgggcaccggccttcgccgtcggagcaggggtcccagactcgcacccaaaagtgtccggctttgctggcccagcaagcctgataagcatgaagctcttatctttggtggctgtggtcgggtgtttgctggtgcccccagctgaagccaacaagagttctgaagatatccggtgcaaatgcatctgtccaccttatagaaacatcagtgggcacatttacaaccagaatgtatcccagaaggactgcaactgcctgcacgtggtggagcccatgccagtgcctggccatgacgtggaggcctactgcctgctgtgcgagtgcaggtacgaggagcgcagcaccaccaccatcaaggtcatcattgtcatctacctgtccgtggtgggtgccctgttgctctacatggccttcctgatgctggtggaccctctgatccgaaagccggatgcatacactgagcaactgcacaatgaggaggagaatgaggatgctcgctctatggcagcagctgctgcatccctcgggggaccccgagcaaacacagtcctggagcgtgtggaaggtgcccagcagcggtggaagctgcaggtgcaggagcagcggaagacagtcttcgatcggcacaagatgctcagctagatgggctggtgtggttgggtcaaggccccaacaccatggctgccagcttccaggctggacaaagcagggggctacttctcccttccctcggttccagtcttccctttaaaagcctgtggcatttttcctccttctccctaactttagaaatgttgtacttggctattttgattagggaagagggatgtggtctctgatctccgttgtcttcttgggtctttggggttgaagggagggggaaggcaggccagaagggaatggagacattcgaggcggcctcaggagtggatgcgatctgtctctcctggctccactcttgccgccttccagctctgagtcttgggaatgttgttacccttggaagataaagctgggtcttcaggaactcagtgtctgggaggaaagcatggcccagcattcagcatgtgttcctttctgcagtggttctttatcaccacctccctcccagccccagcgcctcagccccagccccagctccagccctgaggacagctctgatgggagagctgggccccctgagcccactgggtcttcagggtgcactggaagctggtgttcgctgtcccctgtgcacttctcgcactggggcatggagtgcccatgcatactctgctgccggtcccctcacctgcacttgaggggtctgggcagtccctcctctccccagtgtccacagtcactgagccagacggtcggttggaacatgagactcgaggctgagcgtggatctgaacaccacagcccctgtacttgggttgcctcttgtccctgaacttcgttgtaccagtgcatggagagaaaattttgtcctcttgtcttagagttgtgtgtaaatcaaggaagccatcattaaattgttttatttctctca

SEQ ID NO: 69615 - DNA, 1834 bp, Homo sapiens
tagcttcttctttttcaatgactatatagattagtagataatgcaactgccactcagtgtatcagtatatactgagtggcatcgataaacaccggtgtttatcgatgccacctggaggcccctggcagcggtgtcccctcgaggacccctctgccgggctcaccaggtggctggcggagagccggagagttgggcgggagggaagcagggtttggcgaccaggtttagcaggccttggaatcctggagcccagcccccaaccccattcccacttggccggatggttaagggcctagcgtgctggctgcggtgtggccaccttccccttctccgactccgtatctctttttccaggtgtccggctttgctggcccagcaagcctgataagcatgaagctcttatctttggtggctgtggtcgggtgtttgctggtgcccccagctgaagccaacaagagttctgaagatatccggtgcaaatgcatctgtccaccttatagaaacatcagtgggcacatttacaaccagaatgtatcccagaaggactgcaactgcctgcacgtggtggagcccatgccagtgcctggccatgacgtggaggcctactgcctgctgtgcgagtgcaggtacgaggagcgcagcaccaccaccatcaaggtcatcattgtcatctacctgtccgtggtgggtgccctgttgctctacatggccttcctgatgctggtggaccctctgatccgaaagccggatgcatacactgagcaactgcacaatgaggaggagaatgaggatgctcgctctatggcagcagctgctgcatccctcgggggaccccgagcaaacacagtcctggagcgtgtggaaggtgcccagcagcggtggaagctgcaggtgcaggagcagcggaagacagtcttcgatcggcacaagatgctcagctagatgggctggtgtggttgggtcaaggccccaacaccatggctgccagcttccaggctggacaaagcagggggctacttctcccttccctcggttccagtcttccctttaaaagcctgtggcatttttcctccttctccctaactttagaaatgttgtacttggctattttgattagggaagagggatgtggtctctgatctccgttgtcttcttgggtctttggggttgaagggagggggaaggcaggccagaagggaatggagacattcgaggcggcctcaggagtggatgcgatctgtctctcctggctccactcttgccgccttccagctctgagtcttgggaatgttgttacccttggaagataaagctgggtcttcaggaactcagtgtctgggaggaaagcatggcccagcattcagcatgtgttcctttctgcagtggttctttatcaccacctccctcccagccccagcgcctcagccccagccccagctccagccctgaggacagctctgatgggagagctgggccccctgagcccactgggtcttcagggtgcactggaagctggtgttcgctgtcccctgtgcacttctcgcactggggcatggagtgcccatgcatactctgctgccggtcccctcacctgcacttgaggggtctgggcagtccctcctctccccagtgtccacagtcactgagccagacggtcggttggaacatgagactcgaggctgagcgtggatctgaacaccacagcccctgtacttgggttgcctcttgtccctgaacttcgttgtaccagtgcatggagagaaaattttgtcctcttgtcttagagttgtgtgtaaatcaaggaagccatcattaaattgttttatttctctca

SEQ ID NO: 69616 - DNA, 1645 bp, Homo sapiens
gtgttgagtaggacatatgtgatcagaaatgtacacctttaaccagaggagattcagaatgccttgcaaggcaggatataactccactgaattctggggggaaaagcttccatagattcctcgtaaaacctggtttctacatggcaagtgtgagccgtagcgcgtagatgcagacattaacagctccaggtcagggaaggtagtttcaatcgagcctctaaagaaatcccatgagccgatctggccgatcagttgcgatgcccttggagttctgaagatatccggtgcaaatgcatctgtccaccttatagaaacatcagtgggcacatttacaaccagaatgtatcccagaaggactgcaactgcctgcacgtggtggagcccatgccagtgcctggccatgacgtggaggcctactgcctgctgtgcgagtgcaggtacgaggagcgcagcaccaccaccatcaaggtcatcattgtcatctacctgtccgtggtgggtgccctgttgctctacatggccttcctgatgctggtggaccctctgatccgaaagccggatgcatacactgagcaactgcacaatgaggaggagaatgaggatgctcgctctatggcagcagctgctgcatccctcgggggaccccgagcaaacacagtcctggagcgtgtggaaggtgcccagcagcggtggaagctgcaggtgcaggagcagcggaagacagtcttcgatcggcacaagatgctcagctagatgggctggtgtggttgggtcaaggccccaacaccatggctgccagcttccaggctggacaaagcagggggctacttctcccttccctcggttccagtcttccctttaaaagcctgtggcatttttcctccttctccctaactttagaaatgttgtacttggctattttgattagggaagagggatgtggtctctgatctccgttgtcttcttgggtctttggggttgaagggagggggaaggcaggccagaagggaatggagacattcgaggcggcctcaggagtggatgcgatctgtctctcctggctccactcttgccgccttccagctctgagtcttgggaatgttgttacccttggaagataaagctgggtcttcaggaactcagtgtctgggaggaaagcatggcccagcattcagcatgtgttcctttctgcagtggttctttatcaccacctccctcccagccccagcgcctcagccccagccccagctccagccctgaggacagctctgatgggagagctgggccccctgagcccactgggtcttcagggtgcactggaagctggtgttcgctgtcccctgtgcacttctcgcactggggcatggagtgcccatgcatactctgctgccggtcccctcacctgcacttgaggggtctgggcagtccctcctctccccagtgtccacagtcactgagccagacggtcggttggaacatgagactcgaggctgagcgtggatctgaacaccacagcccctgtacttgggttgcctcttgtccctgaacttcgttgtaccagtgcatggagagaaaattttgtcctcttgtcttagagttgtgtgtaaatcaaggaagccatcattaaattgttttatttctctca

SEQ ID NO: 69617 - DNA, 905 bp, Homo sapiens
ctgctctggcaaccaatagaagctaggagagggcggggacaactgggtcttttgcggctgcagcgggcttgtaggtgtccggctttgctggcccagcaagcctgataagcatgaagctcttatctttggtggctgtggtcgggtgtttgctggtgcccccagctgaagccaacaagagttctgaagatatccggtgcaaatgcatctgtccaccttatagaaacatcagtgggcacatttacaaccagaatgtatcccagaaggactgcaactgcctgcacgtggtggagcccatgccagtgcctggccatgacgtggaggcctactgcctgctgtgcgagtgcaggtacgaggagcgcagcaccaccaccatcaaggtcatcattgtcatctacctgtccgtggtgggtgccctgttgctctacatggccttcctgatgctggtggaccctctgatccgaaagccggatgcatacactgagcaactgcacaatgaggaggagaatgaggatgctcgctctatggcagcagctgctgcatccctcgggggaccccgagcaaacacagtcctggagcgtgtggaaggtgcccagcagcggtggaagctgcaggtgcaggagcagcggaagacagtcttcgatcggcacaagatgctcagctagatgggctggtgtggttgggtcaaggccccaacaccatggctgccagcttccaggctggacaaagcagggggctacttctcccttccctcggttccagtcttccctttaaaagcctgtggcatttttcctccttctccctaactttagaaatgttgtacttggctattttgattagggaagagggatgtggtctctgatctccgttgtcttcttggtctcataggatcctgctagatcacccat

SEQ ID NO: 69618 - DNA, 1260 bp, Homo sapiens
gacacagatggcccaagactagcaacggatttctagccctggccccagataatggttcataggcacgccggtctcttcctcaggtcatcattgtcatctacctgtccgtggtgggtgccctgttgctctacatggccttcctgatgctggtggaccctctgatccgaaagccggatgcatacactgagcaactgcacaatgaggaggagaatgaggatgctcgctctatggcagcagctgctgcatccctcgggggaccccgagcaaacacagtcctggagcgtgtggaaggtgcccagcagcggtggaagctgcaggtgcaggagcagcggaagacagtcttcgatcggcacaagatgctcagctagatgggctggtgtggttgggtcaaggccccaacaccatggctgccagcttccaggctggacaaagcagggggctacttctcccttccctcggttccagtcttccctttaaaagcctgtggcatttttcctccttctccctaactttagaaatgttgtacttggctattttgattagggaagagggatgtggtctctgatctccgttgtcttcttgggtctttggggttgaagggagggggaaggcaggccagaagggaatggagacattcgaggcggcctcaggagtggatgcgatctgtctctcctggctccactcttgccgccttccagctctgagtcttgggaatgttgttacccttggaagataaagctgggtcttcaggaactcagtgtctgggaggaaagcatggcccagcattcagcatgtgttcctttctgcagtggttctttatcaccacctccctcccagccccagcgcctcagccccagccccagctccagccctgaggacagctctgatgggagagctgggccccctgagcccactgggtcttcagggtgcactggaagctggtgttcgctgtcccctgtgcacttctcgcactggggcatggagtgcccatgcatactctgctgccggtcccctcacctgcacttgaggggtctgggcagtccctcctctccccagtgtccacagtcactgagccagacggtcggttggaacatgagactcgaggctgagcgtggatctgaacaccacagcccctgtacttgggttgcctcttgtccctgaacttcgttgtaccagtgcatggagagaaaattttgtcctcttgtcttagagttgtgtgtaaatcaaggaagccatcattaaattgttttatttctctca

SEQ ID NO: 69619 - DNA, 777 bp, Homo sapiens
ggcattgggggaggggacgggggtcgcggggctattgggggtcccagtccggcttaagacctctgggcgtggtgggcaccggccttcgccgtcggagcaggggtcccagactcgcacccaaaagttcccgtcgggcccgagcggggaggagctgcggggcgggcagaggcggagatggcggagggcggtgggacgtgatgcgcgggtcagagccgggccttgagaaggaactggaggcccctggcagcggtgtcccctcgaggacccctctgccgggctcaccaggtgtccggctttgctggcccagcaagcctgataagcatgaagctcttatctttggtggctgtggtcgggtgtttgctggtgcccccagctgaagccaacaagagttctgaagatatccggtgcaaatgcatctgtccaccttatagaaacatcagtgggcacatttacaaccagaatgtatcccagaaggactgcaactgcctgcacgtggtggagcccatgccagtgcctggccatgacgtggaggcctactgcctgctgtgcgagtgcaggtacgaggagcgcagcaccaccaccatcaaggtccatcatttgctcatctaccatgttccgtggtgggtggccctggtatgctcctaacattggcctttccctggaattgctgggtaggaccccctctggatcccgaaaaagcccgggatgcattacaacttggaagccaaacttgggcacaaaatgcacgggaaggcgaacgaaactgcacggcgattc

SEQ ID NO: 69620 - DNA, 1953 bp, Homo sapiens
ggcattgggggaggggacgggggtcgcggggctattgggggtcccagtccggcttaagacctctgggcgtggtgggcaccggccttcgccgtcggagcaggggtcccagactcgcacccaaaagttcccgtcgggcccgagcggggaggagctgcggggcgggcagaggcggagatggcggagggcggtgggacgtgatgcgcgggtcagagccgggccttgagaaggaactggaggcccctggcagcggtgtcccctcgaggacccctctgccgggctcaccaggtggctggcggagagccggagagttgggcgggagggaagcagggtttggcgaccaggtttagcaggccttggaatcctggagcccagcccccaaccccattcccacttggccggatggttaagggcctagcgtgctggctgcggtgtggccaccttccccttctccgactccgtatctctttttccaggtgtccggctttgctggcccagcaagcctgataagcatgaagctcttatctttggtggctgtggtcgggtgtttgctggtgcccccagctgaagccaacaagagttctgaagatatccggtgcaaatgcatctgtccaccttatagaaacatcagtgggcacatttacaaccagaatgtatcccagaaggactgcaactgcctgcacgtggtggagcccatgccagtgcctggccatgacgtggaggcctactgcctgctgtgcgagtgcaggtacgaggagcgcagcaccaccaccatcaaggtcatcattgtcatctacctgtccgtggtgggtgccctgttgctctacatggccttcctgatgctggtggaccctctgatccgaaagccggatgcatacactgagcaactgcacaatgaggaggagaatgaggatgctcgctctatggcagcagctgctgcatccctcgggggaccccgagcaaacacagtcctggagcgtgtggaaggtgcccagcagcggtggaagctgcaggtgcaggagcagcggaagacagtcttcgatcggcacaagatgctcagctagatgggctggtgtggttgggtcaaggccccaacaccatggctgccagcttccaggctggacaaagcagggggctacttctcccttccctcggttccagtcttccctttaaaagcctgtggcatttttcctccttctccctaactttagaaatgttgtacttggctattttgattagggaagagggatgtggtctctgatctccgttgtcttcttgggtctttggggttgaagggagggggaaggcaggccagaagggaatggagacattcgaggcggcctcaggagtggatgcgatctgtctctcctggctccactcttgccgccttccagctctgagtcttgggaatgttgttacccttggaagataaagctgggtcttcaggaactcagtgtctgggaggaaagcatggcccagcattcagcatgtgttcctttctgcagtggttctttatcaccacctccctcccagccccagcgcctcagccccagccccagctccagccctgaggacagctctgatgggagagctgggccccctgagcccactgggtcttcagggtgcactggaagctggtgttcgctgtcccctgtgcacttctcgcactggggcatggagtgcccatgcatactctgctgccggtcccctcacctgcacttgaggggtctgggcagtccctcctctccccagtgtccacagtcactgagccagacggtcggttggaacatgagactcgaggctgagcgtggatctgaacaccacagcccctgtacttgggttgcctcttgtccctgaacttcgttgtaccagtgcatggagagaaaattttgtcctcttgtcttagagttgtgtgtaaatcaaggaagccatcattaaattgttttatttctctca

SEQ ID NO: 69621 - DNA, 1084 bp, Homo sapiens
ctgctctggcaaccaatagaagctaggagagggcggggacaactgggtcttttgcggctgcagcgggcttgtaggtgtccggctttgctggcccagcaagcctgataagcatgaagctcttatctttggtggctgtggtcgggtgtttgctggtgcccccagctgaagccaacaagagttctgaagatatccggtgcaaatgcatctgtccaccttatagaaacatcagtgggcacatttacaaccagaatgtatcccagaaggactgcaactgcctgcacgtggtggagcccatgccagtgcctggccatgacgtggaggcctactgcctgctgtgcgagtgcaggtacgaggagcgcagcaccaccaccatcaaggtcatcattgtcatctacctgtccgtggtgggtgccctgttgctctacatggccttcctgatgctggtggaccctctgatccgaaagccggatgcatacactgagcaactgcacaatgaggaggagaatgaggatgctcgctctatggcagcagctgctgcatccctcgggggaccccgagcaaacacagtcctggagcgtgtggaaggtgcccagcagcggtggaagctgcaggtgcaggagcagcggaagacagtcttcgatcggcacaagatgctcagctagatgggctggtgtggttgggtcaaggccccaacaccatggctgccagcttccaggctggacaaagcagggggctacttctcccttccctcggttccagtcttccctttaaaagcctgtggcatttttcctccttctccctaactttagaaatgttgtacttggctattttgattagggaagagggatgtggtctctgatctccgttgtcttcttgggtctttggggttgaagggagggggaaggcaggccagaagggaatggagacattcgaggcggcctcaggagtggatgcgatctgtctctcctggctccactcttgccgccttccagcttccagtgcaccctgaagacccagtgggctcagggggcccagctctcccatcagagctgtcctcagggctggagctggggctgggggtcga

SEQ ID NO: 69622 - DNA, 1629 bp, Homo sapiens
ctgctctggcaaccaatagaagctaggagagggcggggacaactgggtcttttgcggctgcagcgggcttgtaggtgtccggctttgctggcccagcaagcctgataagcatgaagctcttatctttggtggctgtggtcgggtgtttgctggtgcccccagctgaagccaacaaggtgagggaggtgagcctgcagcacctggtcacgaccacagtgcacggccaccctgtctacagggctgactcagagagttctgaagatatccggtgcaaatgcatctgtccaccttatagaaacatcagtgggcacatttacaaccagaatgtatcccagaaggactgcaactgcctgcacgtggtggagcccatgccagtgcctggccatgacgtggaggcctactgcctgctgtgcgagtgcaggtacgaggagcgcagcaccaccaccatcaaggtcatcattgtcatctacctgtccgtggtgggtgccctgttgctctacatggccttcctgatgctggtggaccctctgatccgaaagccggatgcatacactgagcaactgcacaatgaggaggagaatgaggatgctcgctctatggcagcagctgctgcatccctcgggggaccccgagcaaacacagtcctggagcgtgtggaaggtgcccagcagcggtggaagctgcaggtgcaggagcagcggaagacagtcttcgatcggcacaagatgctcagctagatgggctggtgtggttgggtcaaggccccaacaccatggctgccagcttccaggctggacaaagcagggggctacttctcccttccctcggttccagtcttccctttaaaagcctgtggcatttttcctccttctccctaactttagaaatgttgtacttggctattttgattagggaagagggatgtggtctctgatctccgttgtcttcttgggtctttggggttgaagggagggggaaggcaggccagaagggaatggagacattcgaggcggcctcaggagtggatgcgatctgtctctcctggctccactcttgccgccttccagctctgagtcttgggaatgttgttacccttggaagataaagctgggtcttcaggaactcagtgtctgggaggaaagcatggcccagcattcagcatgtgttcctttctgcagtggttctttatcaccacctccctcccagccccagcgcctcagccccagccccagctccagccctgaggacagctctgatgggagagctgggccccctgagcccactgggtcttcagggtgcactggaagctggtgttcgctgtcccctgtgcacttctcgcactggggcatggagtgcccatgcatactctgctgccggtcccctcacctgcacttgaggggtctgggcagtccctcctctccccagtgtccacagtcactgagccagacggtcggttggaacatgagactcgaggctgagcgtggatctgaacaccacagcccctgtacttgggttgcctcttgtccctgaacttcgttgtaccagtgcatggagagaaaattttgtcctcttgtcttagagttgtgtgtaaatcaaggaagccatcattaaattgttttatttctctca

SEQ ID NO: 69623 - DNA, 1575 bp, Homo sapiens
ctgctctggcaaccaatagaagctaggagagggcggggacaactgggtcttttgcggctgcagcgggcttgtaggtgtccggctttgctggcccagcaagcctgataagcatgaagctcttatctttggtggctgtggtcgggtgtttgctggtgcccccagctgaagccaacaagagttctgaagatatccggtgcaaatgcatctgtccaccttatagaaacatcagtgggcacatttacaaccagaatgtatcccagaaggactgccctgtctctctctgttgtagcaactgcctgcacgtggtggagcccatgccagtgcctggccatgacgtggaggcctactgcctgctgtgcgagtgcaggtacgaggagcgcagcaccaccaccatcaaggtcatcattgtcatctacctgtccgtggtgggtgccctgttgctctacatggccttcctgatgctggtggaccctctgatccgaaagccggatgcatacactgagcaactgcacaatgaggaggagaatgaggatgctcgctctatggcagcagctgctgcatccctcgggggaccccgagcaaacacagtcctggagcgtgtggaaggtgcccagcagcggtggaagctgcaggtgcaggagcagcggaagacagtcttcgatcggcacaagatgctcagctagatgggctggtgtggttgggtcaaggccccaacaccatggctgccagcttccaggctggacaaagcagggggctacttctcccttccctcggttccagtcttccctttaaaagcctgtggcatttttcctccttctccctaactttagaaatgttgtacttggctattttgattagggaagagggatgtggtctctgatctccgttgtcttcttgggtctttggggttgaagggagggggaaggcaggccagaagggaatggagacattcgaggcggcctcaggagtggatgcgatctgtctctcctggctccactcttgccgccttccagctctgagtcttgggaatgttgttacccttggaagataaagctgggtcttcaggaactcagtgtctgggaggaaagcatggcccagcattcagcatgtgttcctttctgcagtggttctttatcaccacctccctcccagccccagcgcctcagccccagccccagctccagccctgaggacagctctgatgggagagctgggccccctgagcccactgggtcttcagggtgcactggaagctggtgttcgctgtcccctgtgcacttctcgcactggggcatggagtgcccatgcatactctgctgccggtcccctcacctgcacttgaggggtctgggcagtccctcctctccccagtgtccacagtcactgagccagacggtcggttggaacatgagactcgaggctgagcgtggatctgaacaccacagcccctgtacttgggttgcctcttgtccctgaacttcgttgtaccagtgcatggagagaaaattttgtcctcttgtcttagagttgtgtgtaaatcaaggaagccatcattaaattgttttatttctctca

SEQ ID NO: 69624 - DNA, 884 bp, Homo sapiens
tccggaagtcccctttggaacgacttattgttgtgacctgaaaatgttaatttgaagatgtggggcagggacagtgacatttctgtagtcccagatgcacagaattatgggagagaatgttgatttctatacggtgtggcgcacttcaaggggcagtgggtaacaaagtttgactccagaaagacttccctcgaggatttctacttggatgaagagaggaccgtgagggtccccatgatgtcggaccctaaggctgttttacgctatggcttggattcagatctcagctgcaagattgcccagctgcccttgaccggaagcatgagtatcatcttcttcctgcccctgaaagtgacccagaatttgaccttgatagaggagagcctcacctccgagttcattcatgacatagaccgagaactgaagaccgtgcaggcggtcctcactgtccccaagctgaagctgagttacgaaggcgaagtcaccaagtccctgcaggagatgaagctgcaatccttgtttgattcaccagactttagcaagatcacaggcaaacccatcaagctgactcaggtggaacaccgggctggctttgagtggaacgaggatggggcgggaaccacccccagcccagggctgcagcctgcccacctcaccttcccgctggactatcaccttaaccagcctttcatcttcgtactgagggacacagacacaggggcccttctcttcattggcaagattctggaccccaggggcccctaatatcccagtttaatattccaataccctagaagaaaacccgagggacagcagattccacaggacacgaaggctgcccctgtaaggtttcaatgcatacaataaaagagctttatccctaa

SEQ ID NO: 69625 - DNA, 1220 bp, Homo sapiens
tgttgctccccagtgcctgcggctggacttttaacatgtaccttgagcaaaggggcctgacttcactgaccaaggctggtacttgtcttttaacctggaccgccggctttgctaccatctgggttcaatcccacttcataccggatgacatcattgatcggcttctatacgctgactaggactacccaccatgcttacccagatccggtcagaccatcattgctacccacactggcctggacatgaacgtgagaaccacctggcggatcatgtccattaaatgtctgggcgtgctatacagcttagaaggcacctttagaaaagtcatatgggaccaggcccagagtcctgacgggcaaccctcgcttggacctgcaagagatcaacaactgggtgcaggcgcagatgaaagggaagctcgccaggtccacaaaggaaattcccgatgagatcagcattctccttctcggtgtggcgcacttcaaggggcagtgggtaacaaagtttgactccagaaagacttccctcgaggatttctacttggatgaagagaggaccgtgagggtccccatgatgtcggaccctaaggctgttttacgctatggcttggattcagatctcagctgcaagattgcccagctgcccttgaccggaagcatgagtatcatcttcttcctgcccctgaaagtgacccagaatttgaccttgatagaggagagcctcacctccgagttcattcatgacatagaccgagaactgaagaccgtgcaggcggtcctcactgtccccaagctgaagctgagttacgaaggcgaagtcaccaagtccctgcaggagatgaagctgcaatccttgtttgattcaccagactttagcaagatcacaggcaaacccatcaagctgactcaggtggaacaccgggctggctttgagtggaacgaggatggggcgggaaccacccccagcccagggctgcagcctgcccacctcaccttcccgctggactatcaccttaaccagcctttcatcttcgtactgagggacacagacacaggggcccttctcttcattggcaagattctggaccccaggggcccctaatatcccagtttaatattccaataccctagaagaaaacccgagggacagcagattccacaggacacgaaggctgcccctgtaaggtttcaatgcatacaataaaagagctttatccctaa

SEQ ID NO: 69626 - DNA, 663 bp, Homo sapiens
  misc_feature (25)..(26): n is a, c, g, or t
actactactactaaattcgcggccnntcgacacttcagatctcagctgcaagattgcccagctgcccttgaccggaagcatgagtatcatcttcttcctgcccctgaaagtgacccagaatttgaccttgatagaggagagcctcacctccgagttcattcatgacatagaccgagaactgaagaccgtgcaggcggtcctcactgtccccaagctgaagctgagttacgaaggcgaagtcaccaagtccctgcaggagatgaagctgcaatccttgtttgattcaccagactttagcaagatcacaggcaaacccatcaagctgactcaggtggaacaccgggctggctttgagtggaacgaggatggggcgggaaccacccccagcccagggctgcagcctgcccacctcaccttcccgctggactatcaccttaaccagcctttcatcttcgtactgagggacacagacacaggggcccttctcttcattggcaagattctggaccccaggggcccctaatatcccagtttaatattccaataccctagaagaaaacccgagggacagcagattccacaggacacgaaggctgcccctgtaaggtttcaatgcatacaataaaagagctttatccctaaaaaaaaacacaaagtcgacgc

SEQ ID NO: 69627 - DNA, 453 bp, Homo sapiens
aaaatgtttccccacccccccaaaaagtggttcccccccccttgggcccaaaggggggggggaagaattgaaaaagctgcaatccttgtttgattcaccagactttagcaagatcacaggcaaacccatcaagctgactcaggtggaacaccgggctggctttgagtggaacgaggatggggcgggaaccacccccagcccagggctgcagcctgcccacctcaccttcccgctggactatcaccttaaccagcctttcatcttcgtactgagggacacagacacaggggcccttctcttcattggcaagattctggaccccaggggcccctaatatcccagtttaatattccaataccctagaagaaaacccgagggacagcagattccacaggacacgaaggctgcccctgtaaggtttcaatgcatacaataaaagagctttatccctaa

SEQ ID NO: 69628 - DNA, 371 bp, Homo sapiens
agtgcaggtcgctttaagaaaggagtagctgtaatctgaagcctgctggacgctggattagaaggcagcaaaaaaagctctgtgctggctggagccccctcagtgtgcaggcttagcccagggctgcagcctgcccacctcaccttcccgctggactatcaccttaaccagcctttcatcttcgtactgagggacacagacacaggggcccttctcttcattggcaagattctggaccccaggggcccctaatatcccagtttaatattccaataccctagaagaaaacccgagggacagcagattccacaggacacgaaggctgcccctgtaaggtttcaatgcatacaataaaagagctttatccctaa

SEQ ID NO: 69629 - DNA, 484 bp, Homo sapiens
agtcctggcaagtcacaggaagatgctggctgggaagtcagggcctgctgagcgctaaaccagaacccgagcctggcaggctctcaaagacgggatgcttgtcgtcgagtctcatacgctaacctctgctccgcctcttctcagagctgcgcataaaatccagctttgtggcacctctggctgcaagagatcaacaactgggtgcaggcgcagatgaaagggaagctcgccaggtccacaaaggaaattcccgatgagatcagcattctccttctcggtgtggcgcacttcaaggggcagtgggtaacaaagtttgactccagaaagacttccctcgaggatttctacttggatgaagagaggaccgtgagggtccccatgatgtcggaccctaaggctgttttacgctatggcttggattcagatctcagctgcaagattgcccaacttgccctggacccggcttgtttctctttcttcctgc

SEQ ID NO: 69630 - DNA, 1457 bp, Homo sapiens
aggctgtactggtccgaagtcttatgatgcttagagggactaggctgggtgtggagctgcagcgtatccacaggccccaggatgcaggccctggtgctactcctctgcattggagccctcctcgggcacagcagctgccagaaccctgccagccccccggaggagggctccccagaccccgacagcacaggggcgctggtggaggaggaggatcctttcttcaaagtccccgtgaacaagctggcagcggctgtctccaacttcggctatgacctgtaccgggtgcgatccagcatgagccccacgaccaacgtgctcctgtctcctctcagtgtggccacggccctctcggccctctcgctgggagcggagcagcgaacagaatccatcattcaccgggctctctactatgacttgatcagcagcccagacatccatggtacctataaggagctccttgacacggtcactgccccccagaagaacctcaagagtgcctcccggatcgtctttgagaagaagctgcgcataaaatccagctttgtggcacctctggaaaagtcatatgggaccaggcccagagtcctgacgggcaaccctcgcttggacctgcaagagatcaacaactgggtgcaggcgcagatgaaagggaagctcgccaggtccacaaaggaaattcccgatgagatcagcattctccttctcggtgtggcgcacttcaaggggcagtgggtaacaaagtttgactccagaaagacttccctcgaggatttctacttggatgaagagaggaccgtgagggtccccatgatgtcggaccctaaggctgttttacgctatggcttggattcagatctcagctgcaagattgcccagctgcccttgaccggaagcatgagtatcatcttcttcctgcccctgaaagtgacccagaatttgaccttgatagaggagagcctcacctccgagttcattcatgacatagaccgagaactgaagaccgtgcaggcggtcctcactgtccccaagctgaagctgagttacgaaggcgaagtcaccaagtccctgcaggagatgaagctgcaatccttgtttgattcaccagactttagcaagatcacaggcaaacccatcaagctgactcaggtggaacaccgggctggctttgagtggaacgaggatggggcgggaaccacccccagcccagggctgcagcctgcccacctcaccttcccgctggactatcaccttaaccagcctttcatcttcgtactgagggacacagacacaggggcccttctcttcattggcaagattctggaccccaggggcccctaatatcccagtttaatattccaataccctagaagaaaacccgagggacagcagattccacaggacacgaaggctgcccctgtaaggtttcaatgcatacaataaaagagctttatccctaa

SEQ ID NO: 69631 - DNA, 1560 bp, Homo sapiens
agtgcaggtcgctttaagaaaggagtagctgtaatctgaagcctgctggacgctggattagaaggcagcaaaaaaagctctgtgctggctggagccccctcagtgtgcaggcttagagggactaggctgggtgtggagctgcagcgtatccacaggccccaggatgcaggccctggtgctactcctctgcattggagccctcctcgggcacagcagctgccagaaccctgccagccccccggaggagggctccccagaccccgacagcacaggggcgctggtggaggaggaggatcctttcttcaaagtccccgtgaacaagctggcagcggctgtctccaacttcggctatgacctgtaccgggtgcgatccagcatgagccccacgaccaacgtgctcctgtctcctctcagtgtggccacggccctctcggccctctcgctgggagcggagcagcgaacagaatccatcattcaccgggctctctactatgacttgatcagcagcccagacatccatggtacctataaggagctccttgacacggtcactgccccccagaagaacctcaagagtgcctcccggatcgtctttgagaagaagctgcgcataaaatccagctttgtggcacctctggaaaagtcatatgggaccaggcccagagtcctgacgggcaaccctcgcttggacctgcaagagatcaacaactgggtgcaggcgcagatgaaagggaagctcgccaggtccacaaaggaaattcccgatgagatcagcattctccttctcggtgtggcgcacttcaaggggcagtgggtaacaaagtttgactccagaaagacttccctcgaggatttctacttggatgaagagaggaccgtgagggtccccatgatgtcggaccctaaggctgttttacgctatggcttggattcagatctcagctgcaagattgcccagctgcccttgaccggaagcatgagtatcatcttcttcctgcccctgaaagtgacccagaatttgaccttgatagaggagagcctcacctccgagttcattcatgacatagaccgagaactgaagaccgtgcaggcggtcctcactgtccccaagctgaagctgagttacgaaggcgaagtcaccaagtccctgcaggagatgaagctgcaatccttgtttgattcaccagactttagcaagatcacaggcaaacccatcaagctgactcaggtggaacaccgggctggctttgagtggaacgaggatggggcgggaaccacccccagcccagggctgcagcctgcccacctcaccttcccgctggactatcaccttaaccagcctttcatcttcgtactgagggacacagacacaggggcccttctcttcattggcaagattctggaccccaggggcccctaatatcccagtttaatattccaataccctagaagaaaacccgagggacagcagattccacaggacacgaaggctgcccctgtaaggtttcaatgcatacaataaaagagctttatccctaaaaaaaaacacaaagtcgacgc

SEQ ID NO: 69632 - DNA, 1734 bp, Homo sapiens
agtgcaggtcgctttaagaaaggagtagctgtaatctgaagcctgctggacgctggattagaaggcagcaaaaaaagctctgtgctggctggagccccctcagtgtgcaggcttagagggactaggctgggtgtggagctgcagcgtatccacaggccccaggatgcaggccctggtgctactcctctgcattggagccctcctcgggcacagcagctgccagaaccctgccagccccccggaggagggctccccagaccccgacagcacaggggcgctggtggaggaggaggatcctttcttcaaagtccccgtgaacaagctggcagcggctgtctccaacttcggctatgacctgtaccgggtgcgatccagcatgagccccacgaccaacgtgctcctgtctcctctcagtgtggccacggccctctcggccctctcgctgggcctgatgcctttaacctacttcaggaaaatctctaaggatgaaaattccttggccacctagattgtcttgaagatcagcctacttgggctctcagcagacaaaaaagatgagtatagtgtctgtgttctgggagggggcttgatttggggccctggtgtgcagttatcaacgtccacatccttgtctctggcaggagcggagcagcgaacagaatccatcattcaccgggctctctactatgacttgatcagcagcccagacatccatggtacctataaggagctccttgacacggtcactgccccccagaagaacctcaagagtgcctcccggatcgtctttgagaagaagctgcgcataaaatccagctttgtggcacctctggaaaagtcatatgggaccaggcccagagtcctgacgggcaaccctcgcttggacctgcaagagatcaacaactgggtgcaggcgcagatgaaagggaagctcgccaggtccacaaaggaaattcccgatgagatcagcattctccttctcggtgtggcgcacttcaaggggcagtgggtaacaaagtttgactccagaaagacttccctcgaggatttctacttggatgaagagaggaccgtgagggtccccatgatgtcggaccctaaggctgttttacgctatggcttggattcagatctcagctgcaagattgcccagctgcccttgaccggaagcatgagtatcatcttcttcctgcccctgaaagtgacccagaatttgaccttgatagaggagagcctcacctccgagttcattcatgacatagaccgagaactgaagaccgtgcaggcggtcctcactgtccccaagctgaagctgagttacgaaggcgaagtcaccaagtccctgcaggagatgaagctgcaatccttgtttgattcaccagactttagcaagatcacaggcaaacccatcaagctgactcaggtggaacaccgggctggctttgagtggaacgaggatggggcgggaaccacccccagcccagggctgcagcctgcccacctcaccttcccgctggactatcaccttaaccagcctttcatcttcgtactgagggacacagacacaggggcccttctcttcattggcaagattctggaccccaggggcccctaatatcccagtttaatattccaataccctagaagaaaacccgagggacagcagattccacaggacacgaaggctgcccctgtaaggtttcaatgcatacaataaaagagctttatccctaa

SEQ ID NO: 69633 - DNA, 1596 bp, Homo sapiens
ctcagctcactgcaacctctgcctccctggttcaaggaattctcctgcctcagcctccagagtagctgggattacaggcacctgccatcatgcccagctaatttttgtatttttagtagagacggggtttcaccatgttgcctaggctggtctcaaactcccgggctcaagcgatccacccgccttggcctcccaaagtgctgggattacaggcgtgagccaccgcgcctggccagaataatcttaagggctatgatgggagaagtacagggactggtacctctcactccctcactcccaccttccaggcctgatgcctttaacctacttcaggaaaatctctaaggatgaaaattccttggccacctagattgtcttgaagatcagcctacttgggctctcagcagacaaaaaagatgagtatagtgtctgtgttctgggagggggcttgatttggggccctggtgtgcagttatcaacgtccacatccttgtctctggcaggagcggagcagcgaacagaatccatcattcaccgggctctctactatgacttgatcagcagcccagacatccatggtacctataaggagctccttgacacggtcactgccccccagaagaacctcaagagtgcctcccggatcgtctttgagaagaagctgcgcataaaatccagctttgtggcacctctggaaaagtcatatgggaccaggcccagagtcctgacgggcaaccctcgcttggacctgcaagagatcaacaactgggtgcaggcgcagatgaaagggaagctcgccaggtccacaaaggaaattcccgatgagatcagcattctccttctcggtgtggcgcacttcaaggggcagtgggtaacaaagtttgactccagaaagacttccctcgaggatttctacttggatgaagagaggaccgtgagggtccccatgatgtcggaccctaaggctgttttacgctatggcttggattcagatctcagctgcaagattgcccagctgcccttgaccggaagcatgagtatcatcttcttcctgcccctgaaagtgacccagaatttgaccttgatagaggagagcctcacctccgagttcattcatgacatagaccgagaactgaagaccgtgcaggcggtcctcactgtccccaagctgaagctgagttacgaaggcgaagtcaccaagtccctgcaggagatgaagctgcaatccttgtttgattcaccagactttagcaagatcacaggcaaacccatcaagctgactcaggtggaacaccgggctggctttgagtggaacgaggatggggcgggaaccacccccagcccagggctgcagcctgcccacctcaccttcccgctggactatcaccttaaccagcctttcatcttcgtactgagggacacagacacaggggcccttctcttcattggcaagattctggaccccaggggcccctaatatcccagtttaatattccaataccctagaagaaaacccgagggacagcagattccacaggacacgaaggctgcccctgtaaggtttcaatgcatacaataaaagagctttatccctaa

SEQ ID NO: 69634 - DNA, 1983 bp, Homo sapiens
agtgcaggtcgctttaagaaaggagtagctgtaatctgaagcctgctggacgctggattagaaggcagcaaaaaaagctctgtgctggctggagccccctcagtgtgcaggcttagagggactaggctgggtgtggagctgcagcgtatccacaggccccaggatgcaggccctggtgctactcctctgcattggagccctcctcgggcacagcagctgccagaaccctgccagccccccggaggagggctccccagaccccgacagcacaggggcgctggtggaggaggaggatcctttcttcaaagtccccgtgaacaagctggcagcggctgtctccaacttcggctatgacctgtaccgggtgcgatccagcatgagccccacgaccaacgtgctcctgtctcctctcagtgtggccacggccctctcggccctctcgctgggagcggagcagcgaacagaatccatcattcaccgggctctctactatgacttgatcagcagcccagacatccatggtacctataaggagctccttgacacggtcactgccccccagaagaacctcaagagtgcctcccggatcgtctttgagaagaagctgcgcataaaatccagctttgtggcacctctggaaaagtcatatgggaccaggcccagagtcctgacgggcaaccctcgcttggacctgcaagagatcaacaactgggtgcaggcgcagatgaaagggaagctcgccaggtccacaaaggaaattcccgatgagatcagcattctccttctcggtgtggcgcacttcaaggggcagtgggtaacaaagtttgactccagaaagacttccctcgaggatttctacttggatgaagagaggaccgtgagggtccccatgatgtcggaccctaaggctgttttacgctatggcttggattcagatctcagctgcaagattgcccagctgcccttgaccggaagcatgagtatcatcttcttcctgcccctgaaagtgacccagaatttgaccttgatagaggagagcctcacctccgagttcattcatgacatagaccgagaactgaagaccgtgcaggcggtcctcactgtccccaagctgaagctgagttacgaaggcgaagtcaccaagtccctgcaggagatgagtatgtctgaagaccctttcgctcttggtgggtggatggggtggggcagggtctttgggccttccactgtgctaagcagaacgcaagggctccacaggcttgtaggggggccgtggatgagtccttaatcctcatcgtgccagaagggaaggctgaactgccttctctcatcagactcattcctcagcctcacgagcagacctccctgacaggcgctcacaacactgcctctcaagacgagtctgtctgacctgttttctcatcttgacctaacttgctaaatgctcctgggcaagtcactccaccctcggtcagctcagacctcttcaggcctcagagaaagtcaacagtgctgcgccatcccagcttgcttgcaaagggatcccttggttggggtgttggggaaggcagggttttaacggaaatctctctccatctctacagagctgcaatccttgtttgattcaccagactttagcaagatcacaggcaaacccatcaagctgactcaggtggaacaccgggctggctttgagtggaacgaggatggggcgggaaccacccccagcccagggctgcagcctgcccacctcaccttcccgctggactatcaccttaaccagcctttcatcttcgtactgagggacacagacacaggggcccttctcttcattggcaagattctggaccccaggggcccctaatatcccagtttaatattccaataccctagaagaaaacccgagggacagcagattccacaggacacgaaggctgcccctgtaaggtttcaatgcatacaataaaagagctttatccctaa

SEQ ID NO: 69635 - DNA, 1478 bp, Homo sapiens
agtgcaggtcgctttaagaaaggagtagctgtaatctgaagcctgctggacgctggattagaaggcagcaaaaaaagctctgtgctggctggagccccctcagtgtgcaggcttagagggactaggctgggtgtggagctgcagcgtatccacaggccccaggatgcaggccctggtgctactcctctgcattggagccctcctcgggcacagcagctgccagaaccctgccagccccccggaggagggctccccagaccccgacagcacaggggcgctggtggaggaggaggatcctttcttcaaagtccccgtgaacaagctggcagcggctgtctccaacttcggctatgacctgtaccgggtgcgatccagcatgagccccacgaccaacgtgctcctgtctcctctcagtgtggccacggccctctcggccctctcgctgggagcggagcagcgaacagaatccatcattcaccgggctctctactatgacttgatcagcagcccagacatccatggtacctataaggagctccttgacacggtcactgccccccagaagaacctcaagagtgcctcccggatcgtctttgagaagaagtcctgacgggcaaccctcgcttggacctgcaagagatcaacaactgggtgcaggcgcagatgaaagggaagctcgccaggtccacaaaggaaattcccgatgagatcagcattctccttctcggtgtggcgcacttcaaggggcagtgggtaacaaagtttgactccagaaagacttccctcgaggatttctacttggatgaagagaggaccgtgagggtccccatgatgtcggaccctaaggctgttttacgctatggcttggattcagatctcagctgcaagattgcccagctgcccttgaccggaagcatgagtatcatcttcttcctgcccctgaaagtgacccagaatttgaccttgatagaggagagcctcacctccgagttcattcatgacatagaccgagaactgaagaccgtgcaggcggtcctcactgtccccaagctgaagctgagttacgaaggcgaagtcaccaagtccctgcaggagatgaagctgcaatccttgtttgattcaccagactttagcaagatcacaggcaaacccatcaagctgactcaggtggaacaccgggctggctttgagtggaacgaggatggggcgggaaccacccccagcccagggctgcagcctgcccacctcaccttcccgctggactatcaccttaaccagcctttcatcttcgtactgagggacacagacacaggggcccttctcttcattggcaagattctggaccccaggggcccctaatatcccagtttaatattccaataccctagaagaaaacccgagggacagcagattccacaggacacgaaggctgcccctgtaaggtttcaatgcatacaataaaagagctttatccctaa

SEQ ID NO: 69636 - DNA, 1029 bp, Homo sapiens
ggcagtgcccaccggttgttatatggcgtgctagtcctgactcctagaggagtacccccctgcctgacctcccaaagctgctgggattacagagctgcgcataaaatccagctttgtggcacctctggaaaagtcatatgggaccaggcccagagtcctgacgggcaaccctcgcttggacctgcaagagatcaacaactgggtgcaggcgcagatgaaagggaagctcgccaggtccacaaaggaaattcccgatgagatcagcattctccttctcggtgtggcgcacttcaaggggcagtgggtaacaaagtttgactccagaaagacttccctcgaggatttctacttggatgaagagaggaccgtgagggtccccatgatgtcggaccctaaggctgttttacgctatggcttggattcagatctcagctgcaagattgcccagctgcccttgaccggaagcatgagtatcatcttcttcctgcccctgaaagtgacccagaatttgaccttgatagaggagagcctcacctccgagttcattcatgacatagaccgagaactgaagaccgtgcaggcggtcctcactgtccccaagctgaagctgagttacgaaggcgaagtcaccaagtccctgcaggagatgaagctgcaatccttgtttgattcaccagactttagcaagatcacaggcaaacccatcaagctgactcaggtggaacaccgggctggctttgagtggaacgaggatggggcgggaaccacccccagcccagggctgcagcctgcccacctcaccttcccgctggactatcaccttaaccagcctttcatcttcgtactgagggacacagacacaggggcccttctcttcattggcaagattctggaccccaggggcccctaatatcccagtttaatattccaataccctagaagaaaacccgagggacagcagattccacaggacacgaaggctgcccctgtaaggtttcaatgcatacaataaaagagctttatccctaa

SEQ ID NO: 69637 - DNA, 1239 bp, Homo sapiens
agtgcaggtcgctttaagaaaggagtagctgtaatctgaagcctgctggacgctggattagaaggcagcaaaaaaagctctgtgctggctggagccccctcagtgtgcaggcttagagggactaggctgggtgtggagctgcagcgtatccacaggccccaggatgcaggccctggtgctactcctctgcattggagccctcctcgggcacagcagctgccagaaccctgccagccccccggaggagggctccccagaccccgacagcacaggggcgctggtggaggaggaggatcctttcttcaaagtccccgtgaacaagctggcagcggctgtctccaacttcggctatgacctgtaccgggtgcgatccagcatgagccccacgaccaacgtgctcctgtctcctctcagtgtggccacggccctctcggccctctcgctgggagcggagcagcgaacagaatccatcattcaccgggctctctactatgacttgatcagcagcccagacatccatggtacctataaggagctccttgacacggtcactgccccccagaagaacctcaagagtgcctcccggatcgtctttgagaagaagctgcgcataaaatccagctttgtggcacctctggaaaagtcatatgggaccaggcccagagtcctgacgggcaaccctcgcttggacctgcaagagatcaacaactgggtgcaggcgcagatgaaagggaagctcgccaggtccacaaaggaaattcccgatgagatcagcattctccttctcggtgtggcgcacttcaaggggcagtgggtaacaaagtttgactccagaaagacttccctcgaggatttctacttggatgaagagaggaccgtgagggtccccatgatgtcggaccctaaggctgttttacgctatggcttggattcagatctcagctgcaagattgcccagctgcccttgaccggaagcatgagtatcatcttcttcctgcccctgaaagtgacccagaatttgaccttgatagaggagagcctcacctccgagttcattcatgacatagaccgagaactgaagaccgtgcaggcggtcctcactgtccccaagctgaagctgagttacgaaggcgaagtcaccaagtccctgcaggagatgaagctgcaatccttgtttgattcaccagactttagcaagatcacagcctctggagttgtctggtcagatgtgccggtccg

SEQ ID NO: 69638 - DNA, 987 bp, Homo sapiens
  misc_feature (985)..(985): n is a, c, g, or t
agtgcaggtcgctttaagaaaggagtagctgtaatctgaagcctgctggacgctggattagaaggcagcaaaaaaagctctgtgctggctggagccccctcagtgtgcaggcttagagggactaggctgggtgtggagctgcagcgtatccacaggccccaggatgcaggccctggtgctactcctctgcattggagccctcctcgggcacagcagctgccagaaccctgccagccccccggaggagggctccccagaccccgacagcacaggggcgctggtggaggaggaggatcctttcttcaaagtccccgtgaacaagctggcagcggctgtctccaacttcggctatgacctgtaccgggtgcgatccagcatgagccccacgaccaacgtgctcctgtctcctctcagtgtggccacggccctctcggccctctcgctgggagcggagcagcgaacagaatccatcattcaccgggctctctactatgacttgatcagcagcccagacatccatggtacctataaggagctccttgacacggtcactgccccccagaagaacctcaagagtgcctcccggatcgtctttgagaagaagctgcgcataaaatccagctttgtggcacctctggaaaagtcatatgggaccaggcccagagtcctgacgggcaaccctcgcttggacctgcaagagatcaacaactgggtgcaggcgcagatgaaagggaagctcgccaggtccacaaaggaaattcccgatgagatcagcattctccttctcggtgtggcgcacttcaaggggcagtgggtaacaaagtttgactccagaaagacttccctcgaggatttctacttggatgaagagaggaccgtgagggtccccatgatgtcggaccctaaggctgttttacgctatggcttggattcagatctcagctgcaagataaaccagctgcccttgcccgaatatcgtggggtngc

SEQ ID NO: 69639 - DNA, 160 bp, Homo sapiens
agtgactagccctgcccaacccctgggtcctggctggggtggccaggaaggggtagcggggcagtgcagtgtcgggggagagcggcttgctgcctcgttcttttcttgcaggccccaggatgcaggccctggtgctactcctctgcattggagccctcct

SEQ ID NO: 69640 - DNA, 359 bp, Homo sapiens
agctgcaatccttgtttgattcaccagactttagcaagatcacaggcaaacccatcaagctgactcaggtggaacaccgggctggctttgagtggaacgaggatggggcgggaaccacccccagcccagggctgcagcctgcccacctcaccttcccgctggactatcaccttaaccagcctttcatcttcgtactgagggacacagacacaggggcccttctcttcattggcaagattctggaccccaggggcccctaatatcccagtttaatattccaataccctagaagaaaacccgagggacagcagattccacaggacacgaaggctgcccctgtaaggtttcaatgcatacaa

SEQ ID NO: 69641 - DNA, 431 bp, Homo sapiens
agtggcgcgatgtggggaaatctgctgcccccctggccagtgcctggggatgccagcagaagtcctggcaagtcacaggaagatgctggctgggaagtcagggcctgctgagcgctaaaccagaacccgagcctggcaggctctcaaagacgggatgcttgtcgtcgagtctcatacgctaacctctgctccgcctcttctcagagctgcgcataaaatccagctttgtggcacctctggaaaagtcatatgggaccaggcccagagtcctgacgggcaaccctcgcttggacctgcaagagatcaacaactgggtgcaggcgcagatgaaagggaagctcgccaggtccacaaaggaaattcccgatgagatcagcattctccttctcggtgtggcgcacttcaagggtgagcgcgtctccaattctttt

SEQ ID NO: 69642 - DNA, 642 bp, Homo sapiens
  misc_feature (25)..(26): n is a, c, g, or t
actactactactaaattcgcggccnntcgacacttcagatctcagctgcaagattgcccagctgcccttgaccggaagcatgagtatcatcttcttcctgcccctgaaagtgacccagaatttgaccttgatagaggagagcctcacctccgagttcattcatgacatagaccgagaactgaagaccgtgcaggcggtcctcactgtccccaagctgaagctgagttacgaaggcgaagtcaccaagtccctgcaggagatgaagctgcaatccttgtttgattcaccagactttagcaagatcacaggcaaacccatcaagctgactcaggtggaacaccgggctggctttgagtggaacgaggatggggcgggaaccacccccagcccagggctgcagcctgcccacctcaccttcccgctggactatcaccttaaccagcctttcatcttcgtactgagggacacagacacaggggcccttctcttcattggcaagattctggaccccaggggcccctaatatcccagtttaatattccaataccctagaagaaaacccgagggacagcagattccacaggacacgaaggctgcccctgtaaggtttcaatgcatacaataaaagagctttatccctaa

SEQ ID NO: 69643 - DNA, 1539 bp, Homo sapiens
agtgcaggtcgctttaagaaaggagtagctgtaatctgaagcctgctggacgctggattagaaggcagcaaaaaaagctctgtgctggctggagccccctcagtgtgcaggcttagagggactaggctgggtgtggagctgcagcgtatccacaggccccaggatgcaggccctggtgctactcctctgcattggagccctcctcgggcacagcagctgccagaaccctgccagccccccggaggagggctccccagaccccgacagcacaggggcgctggtggaggaggaggatcctttcttcaaagtccccgtgaacaagctggcagcggctgtctccaacttcggctatgacctgtaccgggtgcgatccagcatgagccccacgaccaacgtgctcctgtctcctctcagtgtggccacggccctctcggccctctcgctgggagcggagcagcgaacagaatccatcattcaccgggctctctactatgacttgatcagcagcccagacatccatggtacctataaggagctccttgacacggtcactgccccccagaagaacctcaagagtgcctcccggatcgtctttgagaagaagctgcgcataaaatccagctttgtggcacctctggaaaagtcatatgggaccaggcccagagtcctgacgggcaaccctcgcttggacctgcaagagatcaacaactgggtgcaggcgcagatgaaagggaagctcgccaggtccacaaaggaaattcccgatgagatcagcattctccttctcggtgtggcgcacttcaaggggcagtgggtaacaaagtttgactccagaaagacttccctcgaggatttctacttggatgaagagaggaccgtgagggtccccatgatgtcggaccctaaggctgttttacgctatggcttggattcagatctcagctgcaagattgcccagctgcccttgaccggaagcatgagtatcatcttcttcctgcccctgaaagtgacccagaatttgaccttgatagaggagagcctcacctccgagttcattcatgacatagaccgagaactgaagaccgtgcaggcggtcctcactgtccccaagctgaagctgagttacgaaggcgaagtcaccaagtccctgcaggagatgaagctgcaatccttgtttgattcaccagactttagcaagatcacaggcaaacccatcaagctgactcaggtggaacaccgggctggctttgagtggaacgaggatggggcgggaaccacccccagcccagggctgcagcctgcccacctcaccttcccgctggactatcaccttaaccagcctttcatcttcgtactgagggacacagacacaggggcccttctcttcattggcaagattctggaccccaggggcccctaatatcccagtttaatattccaataccctagaagaaaacccgagggacagcagattccacaggacacgaaggctgcccctgtaaggtttcaatgcatacaataaaagagctttatccctaa

SEQ ID NO: 69644 - DNA, 907 bp, Homo sapiens
  misc_feature (876)..(876): n is a, c, g, or t
agtgcaggtcgctttaagaaaggagtagctgtaatctgaagcctgctggacgctggattagaaggcagcaaaaaaagctctgtgctggctggagccccctcagtgtgcaggcttagagggactaggctgggtgtggagctgcagcgtatccacaggccccaggatgcaggccctggtgctactcctctgcattggagccctcctcgggcacagcagctgccagaaccctgccagccccccggaggagggctccccagaccccgacagcacaggggcgctggtggaggaggaggatcctttcttcaaagtccccgtgaacaagctggcagcggctgtctccaacttcggctatgacctgtaccgggtgcgatccagcatgagccccacgaccaacgtgctcctgtctcctctcagtgtggccacggccctctcggccctctcgctgggagcggagcagcgaacagaatccatcattcaccgggctctctactatgacttgatcagcagcccagacatccatggtacctataaggagctccttgacacggtcactgccccccagaagaacctcaagagtgcctcccggatcgtctttgagaagaagctgcgcataaaatccagctttgtggcacctctggaaaagtcatatgggaccaggcccagagtcctgacgggcaaccctcgcttggacctgcaagagatcaacaactgggtgcaggcgcagatgaaagggaagctcgccaggtccacaaaggaaattcccgatgagatcagcattctccttctcggtgtggcgcacttcaaggggcagtgggtaacaaagtttgactccagaaagacttccctcgaggatttctacttggattgaaaggcggnggcccttttgaccaggggacagggggacaaa

SEQ ID NO: 69645 - DNA, 331 bp, Homo sapiens
gacacaggctggttaaggtgatagtccagcgggaaggtgaggtgggcaggctgcagccctgggctgggggtggttcccgccccatcctcgttccactcaaagccttcccgctggactatcaccttaaccagcctttcatcttcgtactgagggacacagacacaggggcccttctcttcattggcaagattctggaccccaggggcccctaatatcccagtttaatattccaataccctagaagaaaacccgagggacagcagattccacaggacacgaaggctgcccctgtaaggtttcaatgcatacaataaaagagctttatccctaa

SEQ ID NO: 69646 - DNA, 1456 bp, Homo sapiens
cgctaggtacgagctggtgttatcggccgagggagggactaggctgggtgtggagctgcagcgtatccacaggccccaggatgcaggccctggtgctactcctctgcattggagccctcctcgggcacagcagctgccagaaccctgccagccccccggaggagggctccccagaccccgacagcacaggggcgctggtggaggaggaggatcctttcttcaaagtccccgtgaacaagctggcagcggctgtctccaacttcggctatgacctgtaccgggtgcgatccagcatgagccccacgaccaacgtgctcctgtctcctctcagtgtggccacggccctctcggccctctcgctgggagcggagcagcgaacagaatccatcattcaccgggctctctactatgacttgatcagcagcccagacatccatggtacctataaggagctccttgacacggtcactgccccccagaagaacctcaagagtgcctcccggatcgtctttgagaagaagctgcgcataaaatccagctttgtggcacctctggaaaagtcatatgggaccaggcccagagtcctgacgggcaaccctcgcttggacctgcaagagatcaacaactgggtgcaggcgcagatgaaagggaagctcgccaggtccacaaaggaaattcccgatgagatcagcattctccttctcggtgtggcgcacttcaaggggcagtgggtaacaaagtttgactccagaaagacttccctcgaggatttctacttggatgaagagaggaccgtgagggtccccatgatgtcggaccctaaggctgttttacgctatggcttggattcagatctcagctgcaagattgcccagctgcccttgaccggaagcatgagtatcatcttcttcctgcccctgaaagtgacccagaatttgaccttgatagaggagagcctcacctccgagttcattcatgacatagaccgagaactgaagaccgtgcaggcggtcctcactgtccccaagctgaagctgagttacgaaggcgaagtcaccaagtccctgcaggagatgaagctgcaatccttgtttgattcaccagactttagcaagatcacaggcaaacccatcaagctgactcaggtggaacaccgggctggctttgagtggaacgaggatggggcgggaaccacccccagcccagggctgcagcctgcccacctcaccttcccgctggactatcaccttaaccagcctttcatcttcgtactgagggacacagacacaggggcccttctcttcattggcaagattctggaccccaggggcccctaatatcccagtttaatattccaataccctagaagaaaacccgagggacagcagattccacaggacacgaaggctgcccctgtaaggtttcaatgcatacaataaaagagctttatccctaa

SEQ ID NO: 69647 - DNA, 1870 bp, Homo sapiens
agtgcaggtcgctttaagaaaggagtagctgtaatctgaagcctgctggacgctggattagaaggcagcaaaaaaagctctgtgctggctggagccccctcagtgtgcaggcttagagggactaggctgggtgtggagctgcagcgtatccacaggccccaggatgcaggccctggtgctactcctctgcattggagccctcctcgggcacagcagctgccagaaccctgccagccccccggaggagggctccccagaccccgacagcacaggggcgctggtggaggaggaggatcctttcttcaaagtccccgtgaacaagctggcagcggctgtctccaacttcggctatgacctgtaccgggtgcgatccagcatgagccccacgaccaacgtgctcctgtctcctctcagtgtggccacggccctctcggccctctcgctgggagcggagcagcgaacagaatccatcattcaccgggctctctactatgacttgatcagcagcccagacatccatggtacctataaggagctccttgacacggtcactgccccccagaagaacctcaagagtgcctcccggatcgtctttgagaagaagctgcgcataaaatccagctttgtggcacctctggaaaagtcatatgggaccaggcccagagtcctgacgggcaaccctcgcttggacctgcaagagatcaacaactgggtgcaggcgcagatgaaagggaagctcgccaggtccacaaaggaaattcccgatgagatcagcattctccttctcggtgtggcgcacttcaaggggcagtgggtaacaaagtttgactccagaaagacttccctcgaggatttctacttggatgaagagaggaccgtgagggtccccatgatgtcggaccctaaggctgttttacgctatggcttggattcagatctcagctgcaagattgcccagctgcccttgaccggaagcatgagtatcatcttcttcctgcccctgaaagtgacccagaatttgaccttgatagaggagagcctcacctccgagttcattcatgacatagaccgagaactgaagaccgtgcaggcggtcctcactgtccccaagctgaagctgagttacgaaggcgaagtcaccaagtccctgcaggagatgaagctgcaatccttgtttgattcaccagactttagcaagatcacaggcaaacccatcaagctgactcaggtggaacaccgggctggctttgagtggaacgaggatggggcgggaaccacccccagcccagggctgcagcctgcccacctcaccttcccgctggactatcaccttaaccagcctttcatcttcgtactgagggacacagacacaggggcccttctcttcattggcaagattctggaccccaggggcccctaatatcccagtttaatattccaataccctagaagaaaacccgagggacagcagattccacaggacacgaaggctgcccctgtaaggtttcaatgcatacaataaaagagctttatccctaaaaaaaaaaaaaaaaaaaaaaaaaaaaaaaaaaaaaaaaggggggggcgccgcccaaaaaaaatatcccccacagaagcgcgcgcaagaatttacggcggtccccagcagattatctgttgtggctcaacagaggggggcccccaatatagcgggagccgcataaataaatagacccaaggccgcagggcggccgccacgtttataaacaacaggatgcgtagcactgcgggacaaccggcgacagcgcggggggcaacccgggggcagaaaggaacacccttccacacggggggggggggagcaaccacacagggcggccaaaagccgccg

SEQ ID NO: 69648 - DNA, 1186 bp, Homo sapiens
gtctagccgatccgttaataggttcgcaccccacgaccaacgtgctcctgtctcctctcagtgtggccacggccctctcggccctctcgctgggagcggagcagcgaacagaatccatcattcaccgggctctctactatgacttgatcagcagcccagacatccatggtacctataaggagctccttgacacggtcactgccccccagaagaacctcaagagtgcctcccggatcgtctttgagaagaagctgcgcataaaatccagctttgtggcacctctggaaaagtcatatgggaccaggcccagagtcctgacgggcaaccctcgcttggacctgcaagagatcaacaactgggtgcaggcgcagatgaaagggaagctcgccaggtccacaaaggaaattcccgatgagatcagcattctccttctcggtgtggcgcacttcaaggggcagtgggtaacaaagtttgactccagaaagacttccctcgaggatttctacttggatgaagagaggaccgtgagggtccccatgatgtcggaccctaaggctgttttacgctatggcttggattcagatctcagctgcaagattgcccagctgcccttgaccggaagcatgagtatcatcttcttcctgcccctgaaagtgacccagaatttgaccttgatagaggagagcctcacctccgagttcattcatgacatagaccgagaactgaagaccgtgcaggcggtcctcactgtccccaagctgaagctgagttacgaaggcgaagtcaccaagtccctgcaggagatgaagctgcaatccttgtttgattcaccagactttagcaagatcacaggcaaacccatcaagctgactcaggtggaacaccgggctggctttgagtggaacgaggatggggcgggaaccacccccagcccagggctgcagcctgcccacctcaccttcccgctggactatcaccttaaccagcctttcatcttcgtactgagggacacagacacaggggcccttctcttcattggcaagattctggaccccaggggcccctaatatcccagtttaatattccaataccctagaagaaaacccgagggacagcagattccacaggacacgaaggctgcccctgtaaggtttcaatgcatacaataaaagagctttatccctaa

SEQ ID NO: 69649 - DNA, 1486 bp, Homo sapiens
agtgcaggtcgctttaagaaaggagtagctgtaatctgaagcctgctggacgctggattagaaggcagcaaaaaaagctctgtgctggctggagccccctcagtgtgcaggcttagagggactaggctgggtgtggagctgcagcgtatccacaggccccaggatgcaggccctggtgctactcctctgcattggagccctcctcgggcacagcagctgccagaaccctgccagccccccggaggagggctccccagaccccgacagcacaggggcgctggtggaggaggaggatcctttcttcaaagtccccgtgaacaagctggcagcggctgtctccaacttcggctatgacctgtaccgggtgcgatccagcatgagccccacgaccaacgtgctcctgtctcctctcagtgtggccacggccctctcggccctctcgctgggagcggagcagcgaacagaatccatcattcaccgggctctctactatgacttgatcagcagcccagacatccatggtacctataaggagctccttgacacggtcactgccccccagaagaacctcaagagtgcctcccggatcgtctttgagaagaagctgcgcataaaatccagctttgtggcacctctggctgcaagagatcaacaactgggtgcaggcgcagatgaaagggaagctcgccaggtccacaaaggaaattcccgatgagatcagcattctccttctcggtgtggcgcacttcaaggggcagtgggtaacaaagtttgactccagaaagacttccctcgaggatttctacttggatgaagagaggaccgtgagggtccccatgatgtcggaccctaaggctgttttacgctatggcttggattcagatctcagctgcaagattgcccagctgcccttgaccggaagcatgagtatcatcttcttcctgcccctgaaagtgacccagaatttgaccttgatagaggagagcctcacctccgagttcattcatgacatagaccgagaactgaagaccgtgcaggcggtcctcactgtccccaagctgaagctgagttacgaaggcgaagtcaccaagtccctgcaggagatgaagctgcaatccttgtttgattcaccagactttagcaagatcacaggcaaacccatcaagctgactcaggtggaacaccgggctggctttgagtggaacgaggatggggcgggaaccacccccagcccagggctgcagcctgcccacctcaccttcccgctggactatcaccttaaccagcctttcatcttcgtactgagggacacagacacaggggcccttctcttcattggcaagattctggaccccaggggcccctaatatcccagtttaatattccaataccctagaagaaaacccgagggacagcagattccacaggacacgaaggctgcccctgtaaggtttcaatgcatacaataaaagagctttatccctaa

SEQ ID NO: 69650 - DNA, 1248 bp, Homo sapiens
atctagcaggatcctcttcgacggtgtctgtaatatggaaactggggaaacatgcataagtgccaatcctttgaatgttccacggaaacactggtggacagattctagtgctgagaagaaacacgtttggtttggagagtccatggatggtggttttcagtttagctacggcaatcctgaacttcctgaagatgtccttgatgtgcagctggcattccttcgacttctctccagccgagcttcccagaacaccgtcgaagcttcgactggtgttctgcccgcctcgacctcccaaagtgctgggattacagagctgcgcataaaatccagctttgtggcacctctggaaaagtcatatgggaccaggcccagagtcctgacgggcaaccctcgcttggacctgcaagagatcaacaactgggtgcaggcgcagatgaaagggaagctcgccaggtccacaaaggaaattcccgatgagatcagcattctccttctcggtgtggcgcacttcaaggggcagtgggtaacaaagtttgactccagaaagacttccctcgaggatttctacttggatgaagagaggaccgtgagggtccccatgatgtcggaccctaaggctgttttacgctatggcttggattcagatctcagctgcaagattgcccagctgcccttgaccggaagcatgagtatcatcttcttcctgcccctgaaagtgacccagaatttgaccttgatagaggagagcctcacctccgagttcattcatgacatagaccgagaactgaagaccgtgcaggcggtcctcactgtccccaagctgaagctgagttacgaaggcgaagtcaccaagtccctgcaggagatgaagctgcaatccttgtttgattcaccagactttagcaagatcacaggcaaacccatcaagctgactcaggtggaacaccgggctggctttgagtggaacgaggatggggcgggaaccacccccagcccagggctgcagcctgcccacctcaccttcccgctggactatcaccttaaccagcctttcatcttcgtactgagggacacagacacaggggcccttctcttcattggcaagattctggaccccaggggcccctaatatcccagtttaatattccaataccctagaagaaaacccgagggacagcagattccacaggacacgaaggctgcccctgtaaggtttcaatgcatacaataaaagagctttatccctaa

SEQ ID NO: 69651 - DNA, 1044 bp, Homo sapiens
  misc_feature (30)..(30): n is a, c, g, or t
gaagagaggaccgtgaggtccccatgatgncggaccctaaggctgttttacgctatggcttggattcagatctcagctgcaagattgcccagctgcccttgaccggaagctgcgcataaaatccagctttgtggcacctctggaaaagtcatatgggaccaggcccagagtcctgacgggcaaccctcgcttggacctgcaagagatcaacaactgggtgcaggcgcagatgaaagggaagctcgccaggtccacaaaggaaattcccgatgagatcagcattctccttctcggtgtggcgcacttcaaggggcagtgggtaacaaagtttgactccagaaagacttccctcgaggatttctacttggatgaagagaggaccgtgagggtccccatgatgtcggaccctaaggctgttttacgctatggcttggattcagatctcagctgcaagattgcccagctgcccttgaccggaagcatgagtatcatcttcttcctgcccctgaaagtgacccagaatttgaccttgatagaggagagcctcacctccgagttcattcatgacatagaccgagaactgaagaccgtgcaggcggtcctcactgtccccaagctgaagctgagttacgaaggcgaagtcaccaagtccctgcaggagatgaagctgcaatccttgtttgattcaccagactttagcaagatcacaggcaaacccatcaagctgactcaggtggaacaccgggctggctttgagtggaacgaggatggggcgggaaccacccccagcccagggctgcagcctgcccacctcaccttcccgctggactatcaccttaaccagcctttcatcttcgtactgagggacacagacacaggggcccttctcttcattggcaagattctggaccccaggggcccctaatatcccagtttaatattccaataccctagaagaaaacccgagggacagcagattccacaggacacgaaggctgcccctgtaaggtttcaatgcatacaataaaagagctttatccctaa

SEQ ID NO: 69652 - DNA, 1212 bp, Homo sapiens
  misc_feature (1048)..(1049): n is a, c, g, or t
  misc_feature (1053)..(1053): n is a, c, g, or t
  misc_feature (1068)..(1068): n is a, c, g, or t
agtgcaggtcgctttaagaaaggagtagctgtaatctgaagcctgctggacgctggattagaaggcagcaaaaaaagctctgtgctggctggagccccctcagtgtgcaggcttagagggactaggctgggtgtggagctgcagcgtatccacaggccccaggatgcaggccctggtgctactcctctgcattggagccctcctcgggcacagcagctgccagaaccctgccagccccccggaggagggctccccagaccccgacagcacaggggcgctggtggaggaggaggatcctttcttcaaagtccccgtgaacaagctggcagcggctgtctccaacttcggctatgacctgtaccgggtgcgatccagcatgagccccacgaccaacgtgctcctgtctcctctcagtgtggccacggccctctcggccctctcgctgggcctgatgcctttaacctacttcaggaaaatctctaaggatgaaaattccttggccacctagattgtcttgaagatcagcctacttgggctctcagcagacaaaaaagatgagtatagtgtctgtgttctgggagggggcttgatttggggccctggtgtgcagttatcaacgtccacatccttgtctctggcaggagcggagcagcgaacagaatccatcattcaccgggctctctactatgacttgatcagcagcccagacatccatggtacctataaggagctccttgacacggtcactgccccccagaagaacctcaagagtgcctcccggatcgtctttgagaagaagacggggtttcaccgtgtttgccaggatagtctcgatctcctgacctggtgttctgcccgcctcgacctcccaaagtgctgggattacagagctgcgcataaaatccagctttgtggcacctctggctgcaagagatcaacaactgggtgcaggcgcagatgaaagggaagctcgccaggtccacaaaggaaattcccgatgagatcagcattctccttctcggtgtggcgcacttcaaggtggtaacannagtngactcagaagacttnctcgagattctactggatgaaagagaccggagggtccatgatgcgcctaggctgttacctatgtggatcaactagtgagatgcagtgctgacgagctaatattctctgctgaaggacaatgctgtgagagcactcgtattgcta

SEQ ID NO: 69653 - DNA, 294 bp, Homo sapiens
cacagttttgcaggctggaagtccaacataaaggtgcaggcagggttggcttctggtgaggcctcgattcttggcttgcaaacagccgccttctcactgtatcctcacgtggcctttcctctgtgcatgaacactcctggtgtctcttcctcttcttagaaggacagcagtccgactgggttagggacccaccctatgacctcatttaaccttaatttcctctttaaaggccctttctccagatacaatcacattggggattagggcttcaacacaggaatttggggtaggagg

SEQ ID NO: 69654 - DNA, 363 bp, Homo sapiens
aacaaaaaaccccccaccaaaaaacaaagaaacccccttcagattggttttatcccaccattttaggtgagtatttccagctgttagagctgtgtgattatgtagatagggatgtgtgggtgtgtgtttgaagtagtaagaatatacccaggagtcagttctgtgagtgctcactgcttgtgttcagttgctgtggtgtatgttccctaaatagattgaagcctgtcaatctgcacaatcaggtataagagccttgtcttgaattctgagtgggaatgaaggaagagtgagtgaactatccctgatagaactcaaacaggattagctgcattgtgaatttgagatttggccatttcccataaa

SEQ ID NO: 69655 - DNA, 322 bp, Homo sapiens
ccatttggtttatagcacagattaggcctgatatttcttcgttggtttttctgtctggaagatttattcaatgctgaaagtggggtgttgcagtctctaggtattattatattggggcctgtctctttagctctaataatactggcttaatatatctgagtactccagtgttaggtgcatatgtatgtaacattcttatatcttcttgatgaattaacctcattattattttttttttttttttttgagacggagtttctctgagtttcgctcttgttgcccaggctggagtacaatggtgcaatctgggctccctgcaacc

SEQ ID NO: 69656 - DNA, 382 bp, Homo sapiens
gaaaaacatttgctaagagatgagtcctgctacagagatatataaagagctaaatggacctataggcctgcacatgtgtgtgggagtaggaaggtgtgtggggttgagggcaaatattcacaggaagtggcatttgagctgcatcttgaaggattaatagcaggtgttttctaaggaaagaaggaagattaagaacattccaggtaaaagagtcatgttttaagaccttggttatgatcatgtctgaagacaggagagaatggcagctgggcgtggtggctcatgcctgtaatccagcactttgggaggccgaggtgggaggatcacttgagctcagaagttcaagaccagcctggccaacatagtaagaccccattacata

SEQ ID NO: 69657 - DNA, 1273 bp, Homo sapiens
cgcgcagagagggcggaccgcgcgaagggggagtgtctgcccgccgccgccactgctgctgccaccgccgtcgccgccgccgccgccgccgccgctgctgctgccggtgctaaggagttcgctggagccctttcctcagacccggcccggtcttcgcgcccggactcctggcgccagcgctaggcgcactcaccgctctgacgggtgcagacgcgggagttgtcccagactgtggagtggcgggcacggccccagccccccttcccttccctgaccccttcttgccatcgccccagacatggggaacgcggcgaccgccaagaaaggcagcgaggtggagagcggtgagttgaaggccgggtctgggtatccgctgggcgggccggcgcggggcaccgagcgccctccgggtcgcagcttctgaggccgcgggcacgggccaggcctagcagcggccgccgggagtcgttctggggggccgggagaccagctgcctttctcctccattccgaccccccagctccgcgttgagagctgaacgcgaagggccggatgtggggatcctgggaagagcgttccctgggattccctttctcactctagcgaggaggacttgcacacgttctggaacacttccccaaatatggtccgaggaaagaagtccctagtgccatcccacccctgctttcccccctcgccgactctttgggagctacaggtagtgctgtgggtaaaggttggctcttctccctccatcacttgggtccgacccaaccttatcacaaggcgggggctgctagtctggctctacgcaagtgaggctaatcctgagtggacaaccctgccttagagatccttcatctcttcagattaggaatggaaaacataatgagacccaacagcaactttatccattagagaaaaaagccaggcaggtttgccttttctctagacattcaaggatctgctaccaatgcctgtaaaacttaaaggtcattcggagttgaagtgcttccagaacacggttaatttcttctgagagcggaaggtgcgggtactccacactttacatcaaacagtaaaaaatcatgaaaatggaatttctgtatggcgataaggtgtgtgtgtgtctgtgtgtttgtgtgtgcatgtatacacatgcatatatatgtgtgtatatatgtgtcagaatggttgtgaaataaaagttggtttgcctttgtaaagttcatatatttttataattcagaatgtccaaataacagatggtatt

SEQ ID NO: 69658 - DNA, 4484 bp, Homo sapiens
acacatgcatagctcttagcttctgtgtaagaagttgtgagctccttctggaaacatttgcagttacattaagtaaagtgtaaatgcacatgaatggcagcttatagagaaccaccttgtaaccagtatacaggtacaactacagctcttcagaaattggaaggttttgctagccggttatttcatagacactctaaaggtactgcacatgatcagaaaacagctctggaaaatgacagccttcatttctctgaacatactgccttatgggacagatcaatgaaagagtttctagccaaagccaaagaagactttttgaaaaaatgggagaatccaactcagaataatgccggacttgaagattttgaaaggaaaaaaacccttggaacaggttcatttggaagagtcatgttggtaaaacacaaagccactgaacagtattatgccatgaagatcttagataagcagaaggttgttaaactgaagcaaatagagcatactttgaatgagaaaagaatattacaggcagtgaattttcctttccttgttcgactggagtatgcttttaaggataattctaatttatacatggttatggaatatgtccctgggggtgaaatgttttcacatctaagaagaattggaaggttcagtgagccccatgcacggttctatgcagctcagatagtgctaacattcgagtacctccattcactagacctcatctacagagatctaaaacctgaaaatctcttaattgaccatcaaggctatatccaggtcacagactttgggtttgccaaaagagttaaaggcagaacttggacattatgtggaactccagagtatttggctccagaaataattctcagcaagggctacaataaggcagtggattggtgggcattaggagtgctaatctatgaaatggcagctggctatcccccattctttgcagaccaaccaattcagatttatgaaaagattgtttctggaaaggtccgattcccatcccacttcagttcagatctcaaggaccttctacggaacctgctgcaggtggatttgaccaagagatttggaaatctaaagaatggtgtcagtgatataaaaactcacaagtggtttgccacgacagattggattgctatttaccagaggaaggttgaagctccattcataccaaagtttagaggctctggagataccagcaactttgatgactatgaagaagaagatatccgtgtctctataacagaaaaatgtgcaaaagaatttggtgaattttaaagaggaacaagatgacatctgagctcacactcagtgtttgcactctgttgagagataaggtagagctgagaccgtccttgttgaagcagttacctagttccttcattccaacgactgagtgaggtctttattgccatcatcccgtgtgcgcactctgcatccacctatgtaacaaggcaccgctaagcaagcattgtctgtgccataacacagtactagaccactttcttacttctctttgggttgtctttctcctctcctacatccatttcttccttttccaatttcattggttttctctaaacagtgctccattttattttgttggtgtttcagatgggcagtgttatggctacgtgatatttgaagggaaggataagtgttgctttcagtagttattgccaatattgttgttggtcaatggcttgaagataaactttctaataattattatttctttgagtagctcagacttggttttgccaaaactcttggtaatttttgaagatagactgtcttatcaccaaggaaatttatacaaattaagactaactttcttggaattcactattctggcaataaattttggtagactaatacagtacagctagacccagaaatttggaaggctgtagatcagaggttctagttccctttccctccttttatatcctcctctccttgagtaatgaagtgaccagcctgtgtagtgtgacaaacgtgtctcattcagcaggaaaaactaatgatatggatcatcacccagattctctcacttggtaccagcatttctgtaggtattagagaagagttctaagttttctaaaccttaactgttccttaaggattttagccagtattttaatagaacatgattaatgaaagtgacaaattttaaattttctctaatagtcctcatcataaactttttaaaggaaaataagcaaactaaaaagaacattggtttagataaatacttatactttgcaaagtcaaaaatggcttgatttttggaaacaatatagaggtattcatatttaaatgagggtttacatttgttttgttttgtaaccgttaaaaagaagttgtttccagctaattattgtggtgtactatatttgtgagcctagggtaggggcactgctgcaacttctgctttcatcccatgcctcatcaatgaggaaagggaacaaagtgtataaaaactgccacaattgtattttaattttgaggtatgatattttcagatatttcataatttctaacctctgttctctcagtaaacagaatgtctgatcgatcatgcagatacaatgttggtatttgagaggttagtttttttcctacacttttttttgccaactgacttaacaacattgctgtcaggtggaaatttcaagcacttttgcacatttagttcagtgtttgttgagaatccatggcttaacccacttgttttgctatttttttctttgcttttaattttccccatctgattttatctctgcgtttcagtgacctaccttaaaacaacacacgagaagagttaaactgggttcattttaatgatcaatttacctgcatataaaatttatttttaatcaagctgatcttaatgtatataatcattctatttgctttattatcggtgcaggtaggtcattaacaccacttcttttcatctgtaccacaccctggtgaaacctttgaagacataaaaaaaacctgtctgagatgttctttctaccaatctatatgtctttcggttatcaagtgtttctgcatggtaatgtcatgtaaatgctgatattgatttcactggtccatctatatttaaaacgtgcaagaaaaaaataaaatactctgctctagcaagttttgtgtaacaaaggcatatcgtcatgttaataaatttaaaacatcattcgtataaaatattttaattttcttgtatttcatttagacccaagaacatgctgaccaatgtgttctatatgtaaactacaaattctatggtagctttgttgtatattattgtaaaattattttaataagtcatggggatgacaatttgattattacaatttagttttcagtaatcaaaaagatttctatgaattctaaaaaatatttttttctatgaaattactagtgcccagctgtagaatctaccttaggtagatgatccctagacatacgttggttttgagggctattcagccattccattttactctctatttaaaggccgtgagcaagcttgtcatgagcaaatatgtcaagggagtcaatttctgaccaatcaagtacactaaattagaatatttttaaagtatgtaacattcccagtttcagccacaatttagccaagaataagataaaaacttgaataagaagtaagtagcataaatcagtatttaacctaaaattacatatttgaaacagaagatattatgttatgctcagtaaataattaagagatggcattgtgtaagaaggagccctagactgaaagtcaagacatctgaatttcaggctggaaaactatcagtatgatctcagcctcagttctcttgtctgtaaaatggaagaactggattaggcagtttgtaagattcctcctaactttcacagtcgatgacaagattgtctttttatctgatattttgaagggtatattgctttgaagtaagtctcaataaggcaatatattttagggcatctttcttcttatctctgacagtgttcttaaaattatttgaatatcataagagccttggtgtctgtcctaattcctttctcactcaccgatgctgaatacccagttgaatcaaactgtcaacctaccaaaaacgatattgtggcttatgggtattgctgtctcattcttggtatattcttgtgttaactgcccattggcctgaaaatactcattgtaagcctgaaaaaaaaaatctttcccactgttttttctgcttgttgtaagaatcaaatgaaataatgtatgtgaaagcaccttgtaaactgtaacctatcaatgtaaaatgttaaggtgtgttgttatttcattaattacttctttgtttagaatggaatttcctatgcactactgtagctaggaaatgctgaaaacaactgtgttttttaattaatcaataactgcaaaattaaagtaccttcaatggataagacaa

SEQ ID NO: 69659 - DNA, 4317 bp, Homo sapiens
agcggaatatcggagtgaggtccacagctagcagtaagagctggtgtaattgaaagacgtttaggtgcaatcattctgctgtttgctccttgccaggttcaacatgggattgttgaaagagtttctagccaaagccaaagaagactttttgaaaaaatgggagaatccaactcagaataatgccggacttgaagattttgaaaggaaaaaaacccttggaacaggttcatttggaagagtcatgttggtaaaacacaaagccactgaacagtattatgccatgaagatcttagataagcagaaggttgttaaactgaagcaaatagagcatactttgaatgagaaaagaatattacaggcagtgaattttcctttccttgttcgactggagtatgcttttaaggataattctaatttatacatggttatggaatatgtccctgggggtgaaatgttttcacatctaagaagaattggaaggttcagtgagccccatgcacggttctatgcagctcagatagtgctaacattcgagtacctccattcactagacctcatctacagagatctaaaacctgaaaatctcttaattgaccatcaaggctatatccaggtcacagactttgggtttgccaaaagagttaaaggcagaacttggacattatgtggaactccagagtatttggctccagaaataattctcagcaagggctacaataaggcagtggattggtgggcattaggagtgctaatctatgaaatggcagctggctatcccccattctttgcagaccaaccaattcagatttatgaaaagattgtttctggaaaggtccgattcccatcccacttcagttcagatctcaaggaccttctacggaacctgctgcaggtggatttgaccaagagatttggaaatctaaagaatggtgtcagtgatataaaaactcacaagtggtttgccacgacagattggattgctatttaccagaggaaggttgaagctccattcataccaaagtttagaggctctggagataccagcaactttgatgactatgaagaagaagatatccgtgtctctataacagaaaaatgtgcaaaagaatttggtgaattttaaagaggaacaagatgacatctgagctcacactcagtgtttgcactctgttgagagataaggtagagctgagaccgtccttgttgaagcagttacctagttccttcattccaacgactgagtgaggtctttattgccatcatcccgtgtgcgcactctgcatccacctatgtaacaaggcaccgctaagcaagcattgtctgtgccataacacagtactagaccactttcttacttctctttgggttgtctttctcctctcctacatccatttcttccttttccaatttcattggttttctctaaacagtgctccattttattttgttggtgtttcagatgggcagtgttatggctacgtgatatttgaagggaaggataagtgttgctttcagtagttattgccaatattgttgttggtcaatggcttgaagataaactttctaataattattatttctttgagtagctcagacttggttttgccaaaactcttggtaatttttgaagatagactgtcttatcaccaaggaaatttatacaaattaagactaactttcttggaattcactattctggcaataaattttggtagactaatacagtacagctagacccagaaatttggaaggctgtagatcagaggttctagttccctttccctccttttatatcctcctctccttgagtaatgaagtgaccagcctgtgtagtgtgacaaacgtgtctcattcagcaggaaaaactaatgatatggatcatcacccagattctctcacttggtaccagcatttctgtaggtattagagaagagttctaagttttctaaaccttaactgttccttaaggattttagccagtattttaatagaacatgattaatgaaagtgacaaattttaaattttctctaatagtcctcatcataaactttttaaaggaaaataagcaaactaaaaagaacattggtttagataaatacttatactttgcaaagtcaaaaatggcttgatttttggaaacaatatagaggtattcatatttaaatgagggtttacatttgttttgttttgtaaccgttaaaaagaagttgtttccagctaattattgtggtgtactatatttgtgagcctagggtaggggcactgctgcaacttctgctttcatcccatgcctcatcaatgaggaaagggaacaaagtgtataaaaactgccacaattgtattttaattttgaggtatgatattttcagatatttcataatttctaacctctgttctctcagtaaacagaatgtctgatcgatcatgcagatacaatgttggtatttgagaggttagtttttttcctacacttttttttgccaactgacttaacaacattgctgtcaggtggaaatttcaagcacttttgcacatttagttcagtgtttgttgagaatccatggcttaacccacttgttttgctatttttttctttgcttttaattttccccatctgattttatctctgcgtttcagtgacctaccttaaaacaacacacgagaagagttaaactgggttcattttaatgatcaatttacctgcatataaaatttatttttaatcaagctgatcttaatgtatataatcattctatttgctttattatcggtgcaggtaggtcattaacaccacttcttttcatctgtaccacaccctggtgaaacctttgaagacataaaaaaaacctgtctgagatgttctttctaccaatctatatgtctttcggttatcaagtgtttctgcatggtaatgtcatgtaaatgctgatattgatttcactggtccatctatatttaaaacgtgcaagaaaaaaataaaatactctgctctagcaagttttgtgtaacaaaggcatatcgtcatgttaataaatttaaaacatcattcgtataaaatattttaattttcttgtatttcatttagacccaagaacatgctgaccaatgtgttctatatgtaaactacaaattctatggtagctttgttgtatattattgtaaaattattttaataagtcatggggatgacaatttgattattacaatttagttttcagtaatcaaaaagatttctatgaattctaaaaaatatttttttctatgaaattactagtgcccagctgtagaatctaccttaggtagatgatccctagacatacgttggttttgagggctattcagccattccattttactctctatttaaaggccgtgagcaagcttgtcatgagcaaatatgtcaagggagtcaatttctgaccaatcaagtacactaaattagaatatttttaaagtatgtaacattcccagtttcagccacaatttagccaagaataagataaaaacttgaataagaagtaagtagcataaatcagtatttaacctaaaattacatatttgaaacagaagatattatgttatgctcagtaaataattaagagatggcattgtgtaagaaggagccctagactgaaagtcaagacatctgaatttcaggctggaaaactatcagtatgatctcagcctcagttctcttgtctgtaaaatggaagaactggattaggcagtttgtaagattcctcctaactttcacagtcgatgacaagattgtctttttatctgatattttgaagggtatattgctttgaagtaagtctcaataaggcaatatattttagggcatctttcttcttatctctgacagtgttcttaaaattatttgaatatcataagagccttggtgtctgtcctaattcctttctcactcaccgatgctgaatacccagttgaatcaaactgtcaacctaccaaaaacgatattgtggcttatgggtattgctgtctcattcttggtatattcttgtgttaactgcccattggcctgaaaatactcattgtaagcctgaaaaaaaaaatctttcccactgttttttctgcttgttgtaagaatcaaatgaaataatgtatgtgaaagcaccttgtaaactgtaacctatcaatgtaaaatgttaaggtgtgttgttatttcattaattacttctttgtttagaatggaatttcctatgcactactgtagctaggaaatgctgaaaacaactgtgttttttaattaatcaataactgcaaaattaaagtaccttcaatggataagacaa

SEQ ID NO: 69660 - DNA, 4264 bp, Homo sapiens
  misc_feature (9)..(9): n is a, c, g, or t
agcgggtgngctccttgccaggttcaacatgggatgtctgctcctcttcagaaatatctgtgaaagagtttctagccaaagccaaagaagactttttgaaaaaatgggagaatccaactcagaataatgccggacttgaagattttgaaaggaaaaaaacccttggaacaggttcatttggaagagtcatgttggtaaaacacaaagccactgaacagtattatgccatgaagatcttagataagcagaaggttgttaaactgaagcaaatagagcatactttgaatgagaaaagaatattacaggcagtgaattttcctttccttgttcgactggagtatgcttttaaggataattctaatttatacatggttatggaatatgtccctgggggtgaaatgttttcacatctaagaagaattggaaggttcagtgagccccatgcacggttctatgcagctcagatagtgctaacattcgagtacctccattcactagacctcatctacagagatctaaaacctgaaaatctcttaattgaccatcaaggctatatccaggtcacagactttgggtttgccaaaagagttaaaggcagaacttggacattatgtggaactccagagtatttggctccagaaataattctcagcaagggctacaataaggcagtggattggtgggcattaggagtgctaatctatgaaatggcagctggctatcccccattctttgcagaccaaccaattcagatttatgaaaagattgtttctggaaaggtccgattcccatcccacttcagttcagatctcaaggaccttctacggaacctgctgcaggtggatttgaccaagagatttggaaatctaaagaatggtgtcagtgatataaaaactcacaagtggtttgccacgacagattggattgctatttaccagaggaaggttgaagctccattcataccaaagtttagaggctctggagataccagcaactttgatgactatgaagaagaagatatccgtgtctctataacagaaaaatgtgcaaaagaatttggtgaattttaaagaggaacaagatgacatctgagctcacactcagtgtttgcactctgttgagagataaggtagagctgagaccgtccttgttgaagcagttacctagttccttcattccaacgactgagtgaggtctttattgccatcatcccgtgtgcgcactctgcatccacctatgtaacaaggcaccgctaagcaagcattgtctgtgccataacacagtactagaccactttcttacttctctttgggttgtctttctcctctcctacatccatttcttccttttccaatttcattggttttctctaaacagtgctccattttattttgttggtgtttcagatgggcagtgttatggctacgtgatatttgaagggaaggataagtgttgctttcagtagttattgccaatattgttgttggtcaatggcttgaagataaactttctaataattattatttctttgagtagctcagacttggttttgccaaaactcttggtaatttttgaagatagactgtcttatcaccaaggaaatttatacaaattaagactaactttcttggaattcactattctggcaataaattttggtagactaatacagtacagctagacccagaaatttggaaggctgtagatcagaggttctagttccctttccctccttttatatcctcctctccttgagtaatgaagtgaccagcctgtgtagtgtgacaaacgtgtctcattcagcaggaaaaactaatgatatggatcatcacccagattctctcacttggtaccagcatttctgtaggtattagagaagagttctaagttttctaaaccttaactgttccttaaggattttagccagtattttaatagaacatgattaatgaaagtgacaaattttaaattttctctaatagtcctcatcataaactttttaaaggaaaataagcaaactaaaaagaacattggtttagataaatacttatactttgcaaagtcaaaaatggcttgatttttggaaacaatatagaggtattcatatttaaatgagggtttacatttgttttgttttgtaaccgttaaaaagaagttgtttccagctaattattgtggtgtactatatttgtgagcctagggtaggggcactgctgcaacttctgctttcatcccatgcctcatcaatgaggaaagggaacaaagtgtataaaaactgccacaattgtattttaattttgaggtatgatattttcagatatttcataatttctaacctctgttctctcagtaaacagaatgtctgatcgatcatgcagatacaatgttggtatttgagaggttagtttttttcctacacttttttttgccaactgacttaacaacattgctgtcaggtggaaatttcaagcacttttgcacatttagttcagtgtttgttgagaatccatggcttaacccacttgttttgctatttttttctttgcttttaattttccccatctgattttatctctgcgtttcagtgacctaccttaaaacaacacacgagaagagttaaactgggttcattttaatgatcaatttacctgcatataaaatttatttttaatcaagctgatcttaatgtatataatcattctatttgctttattatcggtgcaggtaggtcattaacaccacttcttttcatctgtaccacaccctggtgaaacctttgaagacataaaaaaaacctgtctgagatgttctttctaccaatctatatgtctttcggttatcaagtgtttctgcatggtaatgtcatgtaaatgctgatattgatttcactggtccatctatatttaaaacgtgcaagaaaaaaataaaatactctgctctagcaagttttgtgtaacaaaggcatatcgtcatgttaataaatttaaaacatcattcgtataaaatattttaattttcttgtatttcatttagacccaagaacatgctgaccaatgtgttctatatgtaaactacaaattctatggtagctttgttgtatattattgtaaaattattttaataagtcatggggatgacaatttgattattacaatttagttttcagtaatcaaaaagatttctatgaattctaaaaaatatttttttctatgaaattactagtgcccagctgtagaatctaccttaggtagatgatccctagacatacgttggttttgagggctattcagccattccattttactctctatttaaaggccgtgagcaagcttgtcatgagcaaatatgtcaagggagtcaatttctgaccaatcaagtacactaaattagaatatttttaaagtatgtaacattcccagtttcagccacaatttagccaagaataagataaaaacttgaataagaagtaagtagcataaatcagtatttaacctaaaattacatatttgaaacagaagatattatgttatgctcagtaaataattaagagatggcattgtgtaagaaggagccctagactgaaagtcaagacatctgaatttcaggctggaaaactatcagtatgatctcagcctcagttctcttgtctgtaaaatggaagaactggattaggcagtttgtaagattcctcctaactttcacagtcgatgacaagattgtctttttatctgatattttgaagggtatattgctttgaagtaagtctcaataaggcaatatattttagggcatctttcttcttatctctgacagtgttcttaaaattatttgaatatcataagagccttggtgtctgtcctaattcctttctcactcaccgatgctgaatacccagttgaatcaaactgtcaacctaccaaaaacgatattgtggcttatgggtattgctgtctcattcttggtatattcttgtgttaactgcccattggcctgaaaatactcattgtaagcctgaaaaaaaaaatctttcccactgttttttctgcttgttgtaagaatcaaatgaaataatgtatgtgaaagcaccttgtaaactgtaacctatcaatgtaaaatgttaaggtgtgttgttatttcattaattacttctttgtttagaatggaatttcctatgcactactgtagctaggaaatgctgaaaacaactgtgttttttaattaatcaataactgcaaaattaaagtaccttcaatggataagacaa

SEQ ID NO: 69661 - DNA, 4365 bp, Homo sapiens
agcggaatatcggagtgaggtccacagctagcagtaagagctggtgtaattgaaagacgtttaggtgcaatcattctgctgtttgctccttgccaggttcaacatgggattgtcacgcaaatcatcagatgcatctgcttgctcctcttcagaaatatctgtgaaagagtttctagccaaagccaaagaagactttttgaaaaaatgggagaatccaactcagaataatgccggacttgaagattttgaaaggaaaaaaacccttggaacaggttcatttggaagagtcatgttggtaaaacacaaagccactgaacagtattatgccatgaagatcttagataagcagaaggttgttaaactgaagcaaatagagcatactttgaatgagaaaagaatattacaggcagtgaattttcctttccttgttcgactggagtatgcttttaaggataattctaatttatacatggttatggaatatgtccctgggggtgaaatgttttcacatctaagaagaattggaaggttcagtgagccccatgcacggttctatgcagctcagatagtgctaacattcgagtacctccattcactagacctcatctacagagatctaaaacctgaaaatctcttaattgaccatcaaggctatatccaggtcacagactttgggtttgccaaaagagttaaaggcagaacttggacattatgtggaactccagagtatttggctccagaaataattctcagcaagggctacaataaggcagtggattggtgggcattaggagtgctaatctatgaaatggcagctggctatcccccattctttgcagaccaaccaattcagatttatgaaaagattgtttctggaaaggtccgattcccatcccacttcagttcagatctcaaggaccttctacggaacctgctgcaggtggatttgaccaagagatttggaaatctaaagaatggtgtcagtgatataaaaactcacaagtggtttgccacgacagattggattgctatttaccagaggaaggttgaagctccattcataccaaagtttagaggctctggagataccagcaactttgatgactatgaagaagaagatatccgtgtctctataacagaaaaatgtgcaaaagaatttggtgaattttaaagaggaacaagatgacatctgagctcacactcagtgtttgcactctgttgagagataaggtagagctgagaccgtccttgttgaagcagttacctagttccttcattccaacgactgagtgaggtctttattgccatcatcccgtgtgcgcactctgcatccacctatgtaacaaggcaccgctaagcaagcattgtctgtgccataacacagtactagaccactttcttacttctctttgggttgtctttctcctctcctacatccatttcttccttttccaatttcattggttttctctaaacagtgctccattttattttgttggtgtttcagatgggcagtgttatggctacgtgatatttgaagggaaggataagtgttgctttcagtagttattgccaatattgttgttggtcaatggcttgaagataaactttctaataattattatttctttgagtagctcagacttggttttgccaaaactcttggtaatttttgaagatagactgtcttatcaccaaggaaatttatacaaattaagactaactttcttggaattcactattctggcaataaattttggtagactaatacagtacagctagacccagaaatttggaaggctgtagatcagaggttctagttccctttccctccttttatatcctcctctccttgagtaatgaagtgaccagcctgtgtagtgtgacaaacgtgtctcattcagcaggaaaaactaatgatatggatcatcacccagattctctcacttggtaccagcatttctgtaggtattagagaagagttctaagttttctaaaccttaactgttccttaaggattttagccagtattttaatagaacatgattaatgaaagtgacaaattttaaattttctctaatagtcctcatcataaactttttaaaggaaaataagcaaactaaaaagaacattggtttagataaatacttatactttgcaaagtcaaaaatggcttgatttttggaaacaatatagaggtattcatatttaaatgagggtttacatttgttttgttttgtaaccgttaaaaagaagttgtttccagctaattattgtggtgtactatatttgtgagcctagggtaggggcactgctgcaacttctgctttcatcccatgcctcatcaatgaggaaagggaacaaagtgtataaaaactgccacaattgtattttaattttgaggtatgatattttcagatatttcataatttctaacctctgttctctcagtaaacagaatgtctgatcgatcatgcagatacaatgttggtatttgagaggttagtttttttcctacacttttttttgccaactgacttaacaacattgctgtcaggtggaaatttcaagcacttttgcacatttagttcagtgtttgttgagaatccatggcttaacccacttgttttgctatttttttctttgcttttaattttccccatctgattttatctctgcgtttcagtgacctaccttaaaacaacacacgagaagagttaaactgggttcattttaatgatcaatttacctgcatataaaatttatttttaatcaagctgatcttaatgtatataatcattctatttgctttattatcggtgcaggtaggtcattaacaccacttcttttcatctgtaccacaccctggtgaaacctttgaagacataaaaaaaacctgtctgagatgttctttctaccaatctatatgtctttcggttatcaagtgtttctgcatggtaatgtcatgtaaatgctgatattgatttcactggtccatctatatttaaaacgtgcaagaaaaaaataaaatactctgctctagcaagttttgtgtaacaaaggcatatcgtcatgttaataaatttaaaacatcattcgtataaaatattttaattttcttgtatttcatttagacccaagaacatgctgaccaatgtgttctatatgtaaactacaaattctatggtagctttgttgtatattattgtaaaattattttaataagtcatggggatgacaatttgattattacaatttagttttcagtaatcaaaaagatttctatgaattctaaaaaatatttttttctatgaaattactagtgcccagctgtagaatctaccttaggtagatgatccctagacatacgttggttttgagggctattcagccattccattttactctctatttaaaggccgtgagcaagcttgtcatgagcaaatatgtcaagggagtcaatttctgaccaatcaagtacactaaattagaatatttttaaagtatgtaacattcccagtttcagccacaatttagccaagaataagataaaaacttgaataagaagtaagtagcataaatcagtatttaacctaaaattacatatttgaaacagaagatattatgttatgctcagtaaataattaagagatggcattgtgtaagaaggagccctagactgaaagtcaagacatctgaatttcaggctggaaaactatcagtatgatctcagcctcagttctcttgtctgtaaaatggaagaactggattaggcagtttgtaagattcctcctaactttcacagtcgatgacaagattgtctttttatctgatattttgaagggtatattgctttgaagtaagtctcaataaggcaatatattttagggcatctttcttcttatctctgacagtgttcttaaaattatttgaatatcataagagccttggtgtctgtcctaattcctttctcactcaccgatgctgaatacccagttgaatcaaactgtcaacctaccaaaaacgatattgtggcttatgggtattgctgtctcattcttggtatattcttgtgttaactgcccattggcctgaaaatactcattgtaagcctgaaaaaaaaaatctttcccactgttttttctgcttgttgtaagaatcaaatgaaataatgtatgtgaaagcaccttgtaaactgtaacctatcaatgtaaaatgttaaggtgtgttgttatttcattaattacttctttgtttagaatggaatttcctatgcactactgtagctaggaaatgctgaaaacaactgtgttttttaattaatcaataactgcaaaattaaagtaccttcaatggataagacaa

SEQ ID NO: 69662 - DNA, 4555 bp, Homo sapiens
acacatgcatagctcttagcttctgtgtaagaagttgtgagctccttctggaaacatttgcagttacattaagtaaagtgtaaatgcacatgaatggcagcttatagagaaccaccttgtaaccagtatacaggtacaactacagctcttcagaaattggaaggttttgctagccggttatttcatagacactctaaaggtactgcacatgatcagaaaacagctctggaaaatgacagccttcatttctctgaacatactgccttatgggacagatcaacaaagatctatttcaagccaactgtttcctcctcggtagagaagcatttgacaactttttttttaattgagtgaaagagtttctagccaaagccaaagaagactttttgaaaaaatgggagaatccaactcagaataatgccggacttgaagattttgaaaggaaaaaaacccttggaacaggttcatttggaagagtcatgttggtaaaacacaaagccactgaacagtattatgccatgaagatcttagataagcagaaggttgttaaactgaagcaaatagagcatactttgaatgagaaaagaatattacaggcagtgaattttcctttccttgttcgactggagtatgcttttaaggataattctaatttatacatggttatggaatatgtccctgggggtgaaatgttttcacatctaagaagaattggaaggttcagtgagccccatgcacggttctatgcagctcagatagtgctaacattcgagtacctccattcactagacctcatctacagagatctaaaacctgaaaatctcttaattgaccatcaaggctatatccaggtcacagactttgggtttgccaaaagagttaaaggcagaacttggacattatgtggaactccagagtatttggctccagaaataattctcagcaagggctacaataaggcagtggattggtgggcattaggagtgctaatctatgaaatggcagctggctatcccccattctttgcagaccaaccaattcagatttatgaaaagattgtttctggaaaggtccgattcccatcccacttcagttcagatctcaaggaccttctacggaacctgctgcaggtggatttgaccaagagatttggaaatctaaagaatggtgtcagtgatataaaaactcacaagtggtttgccacgacagattggattgctatttaccagaggaaggttgaagctccattcataccaaagtttagaggctctggagataccagcaactttgatgactatgaagaagaagatatccgtgtctctataacagaaaaatgtgcaaaagaatttggtgaattttaaagaggaacaagatgacatctgagctcacactcagtgtttgcactctgttgagagataaggtagagctgagaccgtccttgttgaagcagttacctagttccttcattccaacgactgagtgaggtctttattgccatcatcccgtgtgcgcactctgcatccacctatgtaacaaggcaccgctaagcaagcattgtctgtgccataacacagtactagaccactttcttacttctctttgggttgtctttctcctctcctacatccatttcttccttttccaatttcattggttttctctaaacagtgctccattttattttgttggtgtttcagatgggcagtgttatggctacgtgatatttgaagggaaggataagtgttgctttcagtagttattgccaatattgttgttggtcaatggcttgaagataaactttctaataattattatttctttgagtagctcagacttggttttgccaaaactcttggtaatttttgaagatagactgtcttatcaccaaggaaatttatacaaattaagactaactttcttggaattcactattctggcaataaattttggtagactaatacagtacagctagacccagaaatttggaaggctgtagatcagaggttctagttccctttccctccttttatatcctcctctccttgagtaatgaagtgaccagcctgtgtagtgtgacaaacgtgtctcattcagcaggaaaaactaatgatatggatcatcacccagattctctcacttggtaccagcatttctgtaggtattagagaagagttctaagttttctaaaccttaactgttccttaaggattttagccagtattttaatagaacatgattaatgaaagtgacaaattttaaattttctctaatagtcctcatcataaactttttaaaggaaaataagcaaactaaaaagaacattggtttagataaatacttatactttgcaaagtcaaaaatggcttgatttttggaaacaatatagaggtattcatatttaaatgagggtttacatttgttttgttttgtaaccgttaaaaagaagttgtttccagctaattattgtggtgtactatatttgtgagcctagggtaggggcactgctgcaacttctgctttcatcccatgcctcatcaatgaggaaagggaacaaagtgtataaaaactgccacaattgtattttaattttgaggtatgatattttcagatatttcataatttctaacctctgttctctcagtaaacagaatgtctgatcgatcatgcagatacaatgttggtatttgagaggttagtttttttcctacacttttttttgccaactgacttaacaacattgctgtcaggtggaaatttcaagcacttttgcacatttagttcagtgtttgttgagaatccatggcttaacccacttgttttgctatttttttctttgcttttaattttccccatctgattttatctctgcgtttcagtgacctaccttaaaacaacacacgagaagagttaaactgggttcattttaatgatcaatttacctgcatataaaatttatttttaatcaagctgatcttaatgtatataatcattctatttgctttattatcggtgcaggtaggtcattaacaccacttcttttcatctgtaccacaccctggtgaaacctttgaagacataaaaaaaacctgtctgagatgttctttctaccaatctatatgtctttcggttatcaagtgtttctgcatggtaatgtcatgtaaatgctgatattgatttcactggtccatctatatttaaaacgtgcaagaaaaaaataaaatactctgctctagcaagttttgtgtaacaaaggcatatcgtcatgttaataaatttaaaacatcattcgtataaaatattttaattttcttgtatttcatttagacccaagaacatgctgaccaatgtgttctatatgtaaactacaaattctatggtagctttgttgtatattattgtaaaattattttaataagtcatggggatgacaatttgattattacaatttagttttcagtaatcaaaaagatttctatgaattctaaaaaatatttttttctatgaaattactagtgcccagctgtagaatctaccttaggtagatgatccctagacatacgttggttttgagggctattcagccattccattttactctctatttaaaggccgtgagcaagcttgtcatgagcaaatatgtcaagggagtcaatttctgaccaatcaagtacactaaattagaatatttttaaagtatgtaacattcccagtttcagccacaatttagccaagaataagataaaaacttgaataagaagtaagtagcataaatcagtatttaacctaaaattacatatttgaaacagaagatattatgttatgctcagtaaataattaagagatggcattgtgtaagaaggagccctagactgaaagtcaagacatctgaatttcaggctggaaaactatcagtatgatctcagcctcagttctcttgtctgtaaaatggaagaactggattaggcagtttgtaagattcctcctaactttcacagtcgatgacaagattgtctttttatctgatattttgaagggtatattgctttgaagtaagtctcaataaggcaatatattttagggcatctttcttcttatctctgacagtgttcttaaaattatttgaatatcataagagccttggtgtctgtcctaattcctttctcactcaccgatgctgaatacccagttgaatcaaactgtcaacctaccaaaaacgatattgtggcttatgggtattgctgtctcattcttggtatattcttgtgttaactgcccattggcctgaaaatactcattgtaagcctgaaaaaaaaaatctttcccactgttttttctgcttgttgtaagaatcaaatgaaataatgtatgtgaaagcaccttgtaaactgtaacctatcaatgtaaaatgttaaggtgtgttgttatttcattaattacttctttgtttagaatggaatttcctatgcactactgtagctaggaaatgctgaaaacaactgtgttttttaattaatcaataactgcaaaattaaagtaccttcaatggataagacaa

SEQ ID NO: 69663 - DNA, 4500 bp, Homo sapiens
gctacggaagatccttgcgattgctggaagaaatcgtgccttcagaaaacataagagcaatacttgaaaaatcactatataactcttggattaatctgatgtactatgatatctcatgctagcatatgctgcttctagggctctctaaaaaccttcgttttctgtgtgctgcatgctccagtgtgtgtgtttacaccatcggttcttctccctctagagattagcataactccctttgctgttggattgttattttgagcaatatgttttggaaaggttggttttcatcatgagtgtgaaagagtttctagccaaagccaaagaagactttttgaaaaaatgggagaatccaactcagaataatgccggacttgaagattttgaaaggaaaaaaacccttggaacaggttcatttggaagagtcatgttggtaaaacacaaagccactgaacagtattatgccatgaagatcttagataagcagaaggttgttaaactgaagcaaatagagcatactttgaatgagaaaagaatattacaggcagtgaattttcctttccttgttcgactggagtatgcttttaaggataattctaatttatacatggttatggaatatgtccctgggggtgaaatgttttcacatctaagaagaattggaaggttcagtgagccccatgcacggttctatgcagctcagatagtgctaacattcgagtacctccattcactagacctcatctacagagatctaaaacctgaaaatctcttaattgaccatcaaggctatatccaggtcacagactttgggtttgccaaaagagttaaaggcagaacttggacattatgtggaactccagagtatttggctccagaaataattctcagcaagggctacaataaggcagtggattggtgggcattaggagtgctaatctatgaaatggcagctggctatcccccattctttgcagaccaaccaattcagatttatgaaaagattgtttctggaaaggtccgattcccatcccacttcagttcagatctcaaggaccttctacggaacctgctgcaggtggatttgaccaagagatttggaaatctaaagaatggtgtcagtgatataaaaactcacaagtggtttgccacgacagattggattgctatttaccagaggaaggttgaagctccattcataccaaagtttagaggctctggagataccagcaactttgatgactatgaagaagaagatatccgtgtctctataacagaaaaatgtgcaaaagaatttggtgaattttaaagaggaacaagatgacatctgagctcacactcagtgtttgcactctgttgagagataaggtagagctgagaccgtccttgttgaagcagttacctagttccttcattccaacgactgagtgaggtctttattgccatcatcccgtgtgcgcactctgcatccacctatgtaacaaggcaccgctaagcaagcattgtctgtgccataacacagtactagaccactttcttacttctctttgggttgtctttctcctctcctacatccatttcttccttttccaatttcattggttttctctaaacagtgctccattttattttgttggtgtttcagatgggcagtgttatggctacgtgatatttgaagggaaggataagtgttgctttcagtagttattgccaatattgttgttggtcaatggcttgaagataaactttctaataattattatttctttgagtagctcagacttggttttgccaaaactcttggtaatttttgaagatagactgtcttatcaccaaggaaatttatacaaattaagactaactttcttggaattcactattctggcaataaattttggtagactaatacagtacagctagacccagaaatttggaaggctgtagatcagaggttctagttccctttccctccttttatatcctcctctccttgagtaatgaagtgaccagcctgtgtagtgtgacaaacgtgtctcattcagcaggaaaaactaatgatatggatcatcacccagattctctcacttggtaccagcatttctgtaggtattagagaagagttctaagttttctaaaccttaactgttccttaaggattttagccagtattttaatagaacatgattaatgaaagtgacaaattttaaattttctctaatagtcctcatcataaactttttaaaggaaaataagcaaactaaaaagaacattggtttagataaatacttatactttgcaaagtcaaaaatggcttgatttttggaaacaatatagaggtattcatatttaaatgagggtttacatttgttttgttttgtaaccgttaaaaagaagttgtttccagctaattattgtggtgtactatatttgtgagcctagggtaggggcactgctgcaacttctgctttcatcccatgcctcatcaatgaggaaagggaacaaagtgtataaaaactgccacaattgtattttaattttgaggtatgatattttcagatatttcataatttctaacctctgttctctcagtaaacagaatgtctgatcgatcatgcagatacaatgttggtatttgagaggttagtttttttcctacacttttttttgccaactgacttaacaacattgctgtcaggtggaaatttcaagcacttttgcacatttagttcagtgtttgttgagaatccatggcttaacccacttgttttgctatttttttctttgcttttaattttccccatctgattttatctctgcgtttcagtgacctaccttaaaacaacacacgagaagagttaaactgggttcattttaatgatcaatttacctgcatataaaatttatttttaatcaagctgatcttaatgtatataatcattctatttgctttattatcggtgcaggtaggtcattaacaccacttcttttcatctgtaccacaccctggtgaaacctttgaagacataaaaaaaacctgtctgagatgttctttctaccaatctatatgtctttcggttatcaagtgtttctgcatggtaatgtcatgtaaatgctgatattgatttcactggtccatctatatttaaaacgtgcaagaaaaaaataaaatactctgctctagcaagttttgtgtaacaaaggcatatcgtcatgttaataaatttaaaacatcattcgtataaaatattttaattttcttgtatttcatttagacccaagaacatgctgaccaatgtgttctatatgtaaactacaaattctatggtagctttgttgtatattattgtaaaattattttaataagtcatggggatgacaatttgattattacaatttagttttcagtaatcaaaaagatttctatgaattctaaaaaatatttttttctatgaaattactagtgcccagctgtagaatctaccttaggtagatgatccctagacatacgttggttttgagggctattcagccattccattttactctctatttaaaggccgtgagcaagcttgtcatgagcaaatatgtcaagggagtcaatttctgaccaatcaagtacactaaattagaatatttttaaagtatgtaacattcccagtttcagccacaatttagccaagaataagataaaaacttgaataagaagtaagtagcataaatcagtatttaacctaaaattacatatttgaaacagaagatattatgttatgctcagtaaataattaagagatggcattgtgtaagaaggagccctagactgaaagtcaagacatctgaatttcaggctggaaaactatcagtatgatctcagcctcagttctcttgtctgtaaaatggaagaactggattaggcagtttgtaagattcctcctaactttcacagtcgatgacaagattgtctttttatctgatattttgaagggtatattgctttgaagtaagtctcaataaggcaatatattttagggcatctttcttcttatctctgacagtgttcttaaaattatttgaatatcataagagccttggtgtctgtcctaattcctttctcactcaccgatgctgaatacccagttgaatcaaactgtcaacctaccaaaaacgatattgtggcttatgggtattgctgtctcattcttggtatattcttgtgttaactgcccattggcctgaaaatactcattgtaagcctgaaaaaaaaaatctttcccactgttttttctgcttgttgtaagaatcaaatgaaataatgtatgtgaaagcaccttgtaaactgtaacctatcaatgtaaaatgttaaggtgtgttgttatttcattaattacttctttgtttagaatggaatttcctatgcactactgtagctaggaaatgctgaaaacaactgtgttttttaattaatcaataactgcaaaattaaagtaccttcaatggataagacaa

SEQ ID NO: 69664 - DNA, 4685 bp, Homo sapiens
cgcgcagagagggcggaccgcgcgaagggggagtgtctgcccgccgccgccactgctgctgccaccgccgtcgccgccgccgccgccgccgccgctgctgctgccggtgctaaggagttcgctggagccctttcctcagacccggcccggtcttcgcgcccggactcctggcgccagcgctaggcgcactcaccgctctgacgggtgcagacgcgggagttgtcccagactgtggagtggcgggcacggccccagccccccttcccttccctgaccccttcttgccatcgccccagacatggggaacgcggcgaccgccaagaaaggcagcgaggtggagagcgtgaaagagtttctagccaaagccaaagaagactttttgaaaaaatgggagaatccaactcagaataatgccggacttgaagattttgaaaggaaaaaaacccttggaacaggttcatttggaagagtcatgttggtaaaacacaaagccactgaacagtattatgccatgaagatcttagataagcagaaggttgttaaactgaagcaaatagagcatactttgaatgagaaaagaatattacaggcagtgaattttcctttccttgttcgactggagtatgcttttaaggataattctaatttatacatggttatggaatatgtccctgggggtgaaatgttttcacatctaagaagaattggaaggttcagtgagccccatgcacggttctatgcagctcagatagtgctaacattcgagtacctccattcactagacctcatctacagagatctaaaacctgaaaatctcttaattgaccatcaaggctatatccaggtcacagactttgggtttgccaaaagagttaaaggcagaacttggacattatgtggaactccagagtatttggctccagaaataattctcagcaagggctacaataaggcagtggattggtgggcattaggagtgctaatctatgaaatggcagctggctatcccccattctttgcagaccaaccaattcagatttatgaaaagattgtttctggaaaggtccgattcccatcccacttcagttcagatctcaaggaccttctacggaacctgctgcaggtggatttgaccaagagatttggaaatctaaagaatggtgtcagtgatataaaaactcacaagtggtttgccacgacagattggattgctatttaccagaggaaggttgaagctccattcataccaaagtttagaggctctggagataccagcaactttgatgactatgaagaagaagatatccgtgtctctataacagaaaaatgtgcaaaagaatttggtgaattttaaagaggaacaagatgacatctgagctcacactcagtgtttgcactctgttgagagataaggtagagctgagaccgtccttgttgaagcagttacctagttccttcattccaacgactgagtgaggtctttattgccatcatcccgtgtgcgcactctgcatccacctatgtaacaaggcaccgctaagcaagcattgtctgtgccataacacagtactagaccactttcttacttctctttgggttgtctttctcctctcctacatccatttcttccttttccaatttcattggttttctctaaacagtgctccattttattttgttggtgtttcagatgggcagtgttatggctacgtgatatttgaagggaaggataagtgttgctttcagtagttattgccaatattgttgttggtcaatggcttgaagataaactttctaataattattatttctttgagtagctcagacttggttttgccaaaactcttggtaatttttgaagatagactgtcttatcaccaaggaaatttatacaaattaagactaactttcttggaattcactattctggcaataaattttggtagactaatacagtacagctagacccagaaatttggaaggctgtagatcagaggttctagttccctttccctccttttatatcctcctctccttgagtaatgaagtgaccagcctgtgtagtgtgacaaacgtgtctcattcagcaggaaaaactaatgatatggatcatcacccagattctctcacttggtaccagcatttctgtaggtattagagaagagttctaagttttctaaaccttaactgttccttaaggattttagccagtattttaatagaacatgattaatgaaagtgacaaattttaaattttctctaatagtcctcatcataaactttttaaaggaaaataagcaaactaaaaagaacattggtttagataaatacttatactttgcaaagtcaaaaatggcttgatttttggaaacaatatagaggtattcatatttaaatgagggtttacatttgttttgttttgtaaccgttaaaaagaagttgtttccagctaattattgtggtgtactatatttgtgagcctagggtaggggcactgctgcaacttctgctttcatcccatgcctcatcaatgaggaaagggaacaaagtgtataaaaactgccacaattgtattttaattttgaggtatgatattttcagatatttcataatttctaacctctgttctctcagtaaacagaatgtctgatcgatcatgcagatacaatgttggtatttgagaggttagtttttttcctacacttttttttgccaactgacttaacaacattgctgtcaggtggaaatttcaagcacttttgcacatttagttcagtgtttgttgagaatccatggcttaacccacttgttttgctatttttttctttgcttttaattttccccatctgattttatctctgcgtttcagtgacctaccttaaaacaacacacgagaagagttaaactgggttcattttaatgatcaatttacctgcatataaaatttatttttaatcaagctgatcttaatgtatataatcattctatttgctttattatcggtgcaggtaggtcattaacaccacttcttttcatctgtaccacaccctggtgaaacctttgaagacataaaaaaaacctgtctgagatgttctttctaccaatctatatgtctttcggttatcaagtgtttctgcatggtaatgtcatgtaaatgctgatattgatttcactggtccatctatatttaaaacgtgcaagaaaaaaataaaatactctgctctagcaagttttgtgtaacaaaggcatatcgtcatgttaataaatttaaaacatcattcgtataaaatattttaattttcttgtatttcatttagacccaagaacatgctgaccaatgtgttctatatgtaaactacaaattctatggtagctttgttgtatattattgtaaaattattttaataagtcatggggatgacaatttgattattacaatttagttttcagtaatcaaaaagatttctatgaattctaaaaaatatttttttctatgaaattactagtgcccagctgtagaatctaccttaggtagatgatccctagacatacgttggttttgagggctattcagccattccattttactctctatttaaaggccgtgagcaagcttgtcatgagcaaatatgtcaagggagtcaatttctgaccaatcaagtacactaaattagaatatttttaaagtatgtaacattcccagtttcagccacaatttagccaagaataagataaaaacttgaataagaagtaagtagcataaatcagtatttaacctaaaattacatatttgaaacagaagatattatgttatgctcagtaaataattaagagatggcattgtgtaagaaggagccctagactgaaagtcaagacatctgaatttcaggctggaaaactatcagtatgatctcagcctcagttctcttgtctgtaaaatggaagaactggattaggcagtttgtaagattcctcctaactttcacagtcgatgacaagattgtctttttatctgatattttgaagggtatattgctttgaagtaagtctcaataaggcaatatattttagggcatctttcttcttatctctgacagtgttcttaaaattatttgaatatcataagagccttggtgtctgtcctaattcctttctcactcaccgatgctgaatacccagttgaatcaaactgtcaacctaccaaaaacgatattgtggcttatgggtattgctgtctcattcttggtatattcttgtgttaactgcccattggcctgaaaatactcattgtaagcctgaaaaaaaaaatctttcccactgttttttctgcttgttgtaagaatcaaatgaaataatgtatgtgaaagcaccttgtaaactgtaacctatcaatgtaaaatgttaaggtgtgttgttatttcattaattacttctttgtttagaatggaatttcctatgcactactgtagctaggaaatgctgaaaacaactgtgttttttaattaatcaataactgcaaaattaaagtaccttcaatggataagacaaattataaaaatatattttttatatattaatatattttattattataaaataaaaacttcgaggggggccccggtcccaatttcccctttagggggtcgtttacaatcaatggcccgcgttttacacattgagactgg

SEQ ID NO: 69665 - DNA, 3742 bp, Homo sapiens
tagcaccagctccactagggccatagatgccccctcctttgtgcctagctcctgcgaatccaccgagtgcctgagaccatagcttctactgtgcccacccaggcagagaccctcggccccctctcctccatttctgagcccccatggccagatcctgggcagggaaatgatcctttcaggagacaaccagagcacctcagcgtgggttctttgcagaccaaccaattcagatttatgaaaagattgtttctggaaaggtccgattcccatcccacttcagttcagatctcaaggaccttctacggaacctgctgcaggtggatttgaccaagagatttggaaatctaaagaatggtgtcagtgatataaaaactcacaagtggtttgccacgacagattggattgctatttaccagaggaaggttgaagctccattcataccaaagtttagaggctctggagataccagcaactttgatgactatgaagaagaagatatccgtgtctctataacagaaaaatgtgcaaaagaatttggtgaattttaaagaggaacaagatgacatctgagctcacactcagtgtttgcactctgttgagagataaggtagagctgagaccgtccttgttgaagcagttacctagttccttcattccaacgactgagtgaggtctttattgccatcatcccgtgtgcgcactctgcatccacctatgtaacaaggcaccgctaagcaagcattgtctgtgccataacacagtactagaccactttcttacttctctttgggttgtctttctcctctcctacatccatttcttccttttccaatttcattggttttctctaaacagtgctccattttattttgttggtgtttcagatgggcagtgttatggctacgtgatatttgaagggaaggataagtgttgctttcagtagttattgccaatattgttgttggtcaatggcttgaagataaactttctaataattattatttctttgagtagctcagacttggttttgccaaaactcttggtaatttttgaagatagactgtcttatcaccaaggaaatttatacaaattaagactaactttcttggaattcactattctggcaataaattttggtagactaatacagtacagctagacccagaaatttggaaggctgtagatcagaggttctagttccctttccctccttttatatcctcctctccttgagtaatgaagtgaccagcctgtgtagtgtgacaaacgtgtctcattcagcaggaaaaactaatgatatggatcatcacccagattctctcacttggtaccagcatttctgtaggtattagagaagagttctaagttttctaaaccttaactgttccttaaggattttagccagtattttaatagaacatgattaatgaaagtgacaaattttaaattttctctaatagtcctcatcataaactttttaaaggaaaataagcaaactaaaaagaacattggtttagataaatacttatactttgcaaagtcaaaaatggcttgatttttggaaacaatatagaggtattcatatttaaatgagggtttacatttgttttgttttgtaaccgttaaaaagaagttgtttccagctaattattgtggtgtactatatttgtgagcctagggtaggggcactgctgcaacttctgctttcatcccatgcctcatcaatgaggaaagggaacaaagtgtataaaaactgccacaattgtattttaattttgaggtatgatattttcagatatttcataatttctaacctctgttctctcagtaaacagaatgtctgatcgatcatgcagatacaatgttggtatttgagaggttagtttttttcctacacttttttttgccaactgacttaacaacattgctgtcaggtggaaatttcaagcacttttgcacatttagttcagtgtttgttgagaatccatggcttaacccacttgttttgctatttttttctttgcttttaattttccccatctgattttatctctgcgtttcagtgacctaccttaaaacaacacacgagaagagttaaactgggttcattttaatgatcaatttacctgcatataaaatttatttttaatcaagctgatcttaatgtatataatcattctatttgctttattatcggtgcaggtaggtcattaacaccacttcttttcatctgtaccacaccctggtgaaacctttgaagacataaaaaaaacctgtctgagatgttctttctaccaatctatatgtctttcggttatcaagtgtttctgcatggtaatgtcatgtaaatgctgatattgatttcactggtccatctatatttaaaacgtgcaagaaaaaaataaaatactctgctctagcaagttttgtgtaacaaaggcatatcgtcatgttaataaatttaaaacatcattcgtataaaatattttaattttcttgtatttcatttagacccaagaacatgctgaccaatgtgttctatatgtaaactacaaattctatggtagctttgttgtatattattgtaaaattattttaataagtcatggggatgacaatttgattattacaatttagttttcagtaatcaaaaagatttctatgaattctaaaaaatatttttttctatgaaattactagtgcccagctgtagaatctaccttaggtagatgatccctagacatacgttggttttgagggctattcagccattccattttactctctatttaaaggccgtgagcaagcttgtcatgagcaaatatgtcaagggagtcaatttctgaccaatcaagtacactaaattagaatatttttaaagtatgtaacattcccagtttcagccacaatttagccaagaataagataaaaacttgaataagaagtaagtagcataaatcagtatttaacctaaaattacatatttgaaacagaagatattatgttatgctcagtaaataattaagagatggcattgtgtaagaaggagccctagactgaaagtcaagacatctgaatttcaggctggaaaactatcagtatgatctcagcctcagttctcttgtctgtaaaatggaagaactggattaggcagtttgtaagattcctcctaactttcacagtcgatgacaagattgtctttttatctgatattttgaagggtatattgctttgaagtaagtctcaataaggcaatatattttagggcatctttcttcttatctctgacagtgttcttaaaattatttgaatatcataagagccttggtgtctgtcctaattcctttctcactcaccgatgctgaatacccagttgaatcaaactgtcaacctaccaaaaacgatattgtggcttatgggtattgctgtctcattcttggtatattcttgtgttaactgcccattggcctgaaaatactcattgtaagcctgaaaaaaaaaatctttcccactgttttttctgcttgttgtaagaatcaaatgaaataatgtatgtgaaagcaccttgtaaactgtaacctatcaatgtaaaatgttaaggtgtgttgttatttcattaattacttctttgtttagaatggaatttcctatgcactactgtagctaggaaatgctgaaaacaactgtgttttttaattaatcaataactgcaaaattaaagtaccttcaatggataagacaa

SEQ ID NO: 69666 - DNA, 1648 bp, Homo sapiens
agcggaatatcggagtgaggtccacagctagcagtaagagctggtgtaattgaaagacgtttaggtgcaatcattctgctgtttgctccttgccaggttcaacatgggattgttgaaagagtttctagccaaagccaaagaagactttttgaaaaaatgggagaatccaactcagaataatgccggacttgaagattttgaaaggaaaaaaacccttggaacaggttcatttggaagagtcatgttggtaaaacacaaagccactgaacagtattatgccatgaagatcttagataagcagaaggttgttaaactgaagcaaatagagcatactttgaatgagaaaagaatattacaggcagtgaattttcctttccttgttcgactggagtatgcttttaaggataattctaatttatacatggttatggaatatgtccctgggggtgaaatgttttcacatctaagaagaattggaaggttcagtgagccccatgcacggttctatgcagctcagatagtgctaacattcgagtacctccattcactagacctcatctacagagatctaaaacctgaaaatctcttaattgaccatcaaggctatatccaggtcacagactttgggtttgccaaaagagttaaaggcagaacttggacattatgtggaactccagagtatttggctccagaaataattctcagcaagggctacaataaggcagtggattggtgggcattaggagtgctaatctatgaaatggcagctggctatcccccattctttgcagaccaaccaattcagatttatgaaaagattgtttctggaaagagaacttttgatatgaacaaaacaaaactttgagaaaaattaacagacaaggcagtgatttatttttgaagaatttgagaagtgtagactctcaagaggactaaaggtcatatgaagaatgatgagagaaccaaaatacattaaaatcacaaatggaagaagaatattttactaatacaaaaactaagaatgtaaatgttataataattgtttcaaatcatttaattgacagtaattataaagttcttgaatctttactatattacttttatttatattcatataagaaatccaattttctaacaaggatactgtcataactaaatttacatttattaagaaaaactgctttagttaaaattaatgtgtcttcatttttatgcattggcctcgatttgccaatcattctctattggttaaaatttatattcagctgtttatgaatatatattcattttatatcaaactttaaaattttgtatctaataatcagcatatattctaaaatcataacagtctaaatcctgggcaccttagaagaatgacaccagaaaaccttattatatcacaatattctgttttccccttcatttatttagaaatatgacaggatatttggtgtacttttgttttttaactaaaagtaccagattatctctccccatgtgggatataaaattatccccatctcttactccctttactcatctaaagtagaagtcatgaaagtggaatttttgccattaaaaggctctgtattatgtgaagttagattgtattaaccatttcccaataaatcatctgtttcaaaactca

SEQ ID NO: 69667 - DNA, 657 bp, Homo sapiens
gattcctcctaactttcacagtcgatgacaagattgtctttttatctgatattttgaagggtatattgctttgaagtaagtctcaataaggcaatatattttagggcatctttcttcttatctctgacagtgttcttaaaattatttgaatatcataagagccttggtgtctgtcctaattcctttctcactcaccgatgctgaatacccagttgaatcaaactgtcaacctaccaaaaacgatattgtggcttatgggtattgctgtctcattcttggtatattcttgtgttaactgcccattggcctgaaaatactcattgtaagcctgaaaaaaaaaatctttcccactgttttttctgcttgttgtaagaatcaaatgaaataatgtatgtgaaagcaccttgtaaactgtaacctatcaatgtaaaatgttaaggtgtgttgttatttcattaattacttctttgtttagaatggaatttcctatgcactactgtagctaggaaatgctgaaaacaactgtgttttttaattaatcaataactgcaaaattaaagtaccttcaatggataagacaattgattgagtcgtgaattctacttggtgccctcatctcctgatttattttccgctgatacaagagatgcttataga

SEQ ID NO: 69668 - DNA, 4548 bp, Homo sapiens
cgcgcagagagggcggaccgcgcgaagggggagtgtctgcccgccgccgccactgctgctgccaccgccgtcgccgccgccgccgccgccgccgctgctgctgccggtgctaaggagttcgctggagccctttcctcagacccggcccggtcttcgcgcccggactcctggcgccagcgctaggcgcactcaccgctctgacgggtgcagacgcgggagttgtcccagactgtggagtggcgggcacggccccagccccccttcccttccctgaccccttcttgccatcgccccagacatggggaacgcggcgaccgccaagaaaggcagcgaggtggagagcgtgaaagagtttctagccaaagccaaagaagactttttgaaaaaatgggagaatccaactcagaataatgccggacttgaagattttgaaaggaaaaaaacccttggaacaggttcatttggaagagtcatgttggtaaaacacaaagccactgaacagtattatgccatgaagatcttagataagcagaaggttgttaaactgaagcaaatagagcatactttgaatgagaaaagaatattacaggcagtgaattttcctttccttgttcgactggagtatgcttttaaggataattctaatttatacatggttatggaatatgtccctgggggtgaaatgttttcacatctaagaagaattggaaggttcagtgagccccatgcacggttctatgcagctcagatagtgctaacattcgagtacctccattcactagacctcatctacagagatctaaaacctgaaaatctcttaattgaccatcaaggctatatccaggtcacagactttgggtttgccaaaagagttaaaggcagaacttggacattatgtggaactccagagtatttggctccagaaataattctcagcaagggctacaataaggcagtggattggtgggcattaggagtgctaatctatgaaatggcagctggctatcccccattctttgcagaccaaccaattcagatttatgaaaagattgtttctggaaaggtccgattcccatcccacttcagttcagatctcaaggaccttctacggaacctgctgcaggtggatttgaccaagagatttggaaatctaaagaatggtgtcagtgatataaaaactcacaagtggtttgccacgacagattggattgctatttaccagaggaaggttgaagctccattcataccaaagtttagaggctctggagataccagcaactttgatgactatgaagaagaagatatccgtgtctctataacagaaaaatgtgcaaaagaatttggtgaattttaaagaggaacaagatgacatctgagctcacactcagtgtttgcactctgttgagagataaggtagagctgagaccgtccttgttgaagcagttacctagttccttcattccaacgactgagtgaggtctttattgccatcatcccgtgtgcgcactctgcatccacctatgtaacaaggcaccgctaagcaagcattgtctgtgccataacacagtactagaccactttcttacttctctttgggttgtctttctcctctcctacatccatttcttccttttccaatttcattggttttctctaaacagtgctccattttattttgttggtgtttcagatgggcagtgttatggctacgtgatatttgaagggaaggataagtgttgctttcagtagttattgccaatattgttgttggtcaatggcttgaagataaactttctaataattattatttctttgagtagctcagacttggttttgccaaaactcttggtaatttttgaagatagactgtcttatcaccaaggaaatttatacaaattaagactaactttcttggaattcactattctggcaataaattttggtagactaatacagtacagctagacccagaaatttggaaggctgtagatcagaggttctagttccctttccctccttttatatcctcctctccttgagtaatgaagtgaccagcctgtgtagtgtgacaaacgtgtctcattcagcaggaaaaactaatgatatggatcatcacccagattctctcacttggtaccagcatttctgtaggtattagagaagagttctaagttttctaaaccttaactgttccttaaggattttagccagtattttaatagaacatgattaatgaaagtgacaaattttaaattttctctaatagtcctcatcataaactttttaaaggaaaataagcaaactaaaaagaacattggtttagataaatacttatactttgcaaagtcaaaaatggcttgatttttggaaacaatatagaggtattcatatttaaatgagggtttacatttgttttgttttgtaaccgttaaaaagaagttgtttccagctaattattgtggtgtactatatttgtgagcctagggtaggggcactgctgcaacttctgctttcatcccatgcctcatcaatgaggaaagggaacaaagtgtataaaaactgccacaattgtattttaattttgaggtatgatattttcagatatttcataatttctaacctctgttctctcagtaaacagaatgtctgatcgatcatgcagatacaatgttggtatttgagaggttagtttttttcctacacttttttttgccaactgacttaacaacattgctgtcaggtggaaatttcaagcacttttgcacatttagttcagtgtttgttgagaatccatggcttaacccacttgttttgctatttttttctttgcttttaattttccccatctgattttatctctgcgtttcagtgacctaccttaaaacaacacacgagaagagttaaactgggttcattttaatgatcaatttacctgcatataaaatttatttttaatcaagctgatcttaatgtatataatcattctatttgctttattatcggtgcaggtaggtcattaacaccacttcttttcatctgtaccacaccctggtgaaacctttgaagacataaaaaaaacctgtctgagatgttctttctaccaatctatatgtctttcggttatcaagtgtttctgcatggtaatgtcatgtaaatgctgatattgatttcactggtccatctatatttaaaacgtgcaagaaaaaaataaaatactctgctctagcaagttttgtgtaacaaaggcatatcgtcatgttaataaatttaaaacatcattcgtataaaatattttaattttcttgtatttcatttagacccaagaacatgctgaccaatgtgttctatatgtaaactacaaattctatggtagctttgttgtatattattgtaaaattattttaataagtcatggggatgacaatttgattattacaatttagttttcagtaatcaaaaagatttctatgaattctaaaaaatatttttttctatgaaattactagtgcccagctgtagaatctaccttaggtagatgatccctagacatacgttggttttgagggctattcagccattccattttactctctatttaaaggccgtgagcaagcttgtcatgagcaaatatgtcaagggagtcaatttctgaccaatcaagtacactaaattagaatatttttaaagtatgtaacattcccagtttcagccacaatttagccaagaataagataaaaacttgaataagaagtaagtagcataaatcagtatttaacctaaaattacatatttgaaacagaagatattatgttatgctcagtaaataattaagagatggcattgtgtaagaaggagccctagactgaaagtcaagacatctgaatttcaggctggaaaactatcagtatgatctcagcctcagttctcttgtctgtaaaatggaagaactggattaggcagtttgtaagattcctcctaactttcacagtcgatgacaagattgtctttttatctgatattttgaagggtatattgctttgaagtaagtctcaataaggcaatatattttagggcatctttcttcttatctctgacagtgttcttaaaattatttgaatatcataagagccttggtgtctgtcctaattcctttctcactcaccgatgctgaatacccagttgaatcaaactgtcaacctaccaaaaacgatattgtggcttatgggtattgctgtctcattcttggtatattcttgtgttaactgcccattggcctgaaaatactcattgtaagcctgaaaaaaaaaatctttcccactgttttttctgcttgttgtaagaatcaaatgaaataatgtatgtgaaagcaccttgtaaactgtaacctatcaatgtaaaatgttaaggtgtgttgttatttcattaattacttctttgtttagaatggaatttcctatgcactactgtagctaggaaatgctgaaaacaactgtgttttttaattaatcaataactgcaaaattaaagtaccttcaatggataagacaa

SEQ ID NO: 69669 - DNA, 4591 bp, Homo sapiens
gttcgaacattttctccctgccattttgagttgttctagtggtatatgaaggaggctgggataactagcttgaaagaaattcagtctagttatagacatctttggcattaatctgatgtttactagtgatatctcatgctaggcagttatgctttgcttctaggggcttctctttttaaaacaaaagaaagctcttttcgttttctgtgtgctgcatgctccagtgtgtgtgtttacaccatcggttcttctccctctagagattagcataactccctttgctgttggattgttattttgagcaatatgttttggaaaggttggttttcatcatgagtgcacgcaaatcatcagatgcatctgcttgctcctcttcagaaatatctgtgaaagagtttctagccaaagccaaagaagactttttgaaaaaatgggagaatccaactcagaataatgccggacttgaagattttgaaaggaaaaaaacccttggaacaggttcatttggaagagtcatgttggtaaaacacaaagccactgaacagtattatgccatgaagatcttagataagcagaaggttgttaaactgaagcaaatagagcatactttgaatgagaaaagaatattacaggcagtgaattttcctttccttgttcgactggagtatgcttttaaggataattctaatttatacatggttatggaatatgtccctgggggtgaaatgttttcacatctaagaagaattggaaggttcagtgagccccatgcacggttctatgcagctcagatagtgctaacattcgagtacctccattcactagacctcatctacagagatctaaaacctgaaaatctcttaattgaccatcaaggctatatccaggtcacagactttgggtttgccaaaagagttaaaggcagaacttggacattatgtggaactccagagtatttggctccagaaataattctcagcaagggctacaataaggcagtggattggtgggcattaggagtgctaatctatgaaatggcagctggctatcccccattctttgcagaccaaccaattcagatttatgaaaagattgtttctggaaaggtccgattcccatcccacttcagttcagatctcaaggaccttctacggaacctgctgcaggtggatttgaccaagagatttggaaatctaaagaatggtgtcagtgatataaaaactcacaagtggtttgccacgacagattggattgctatttaccagaggaaggttgaagctccattcataccaaagtttagaggctctggagataccagcaactttgatgactatgaagaagaagatatccgtgtctctataacagaaaaatgtgcaaaagaatttggtgaattttaaagaggaacaagatgacatctgagctcacactcagtgtttgcactctgttgagagataaggtagagctgagaccgtccttgttgaagcagttacctagttccttcattccaacgactgagtgaggtctttattgccatcatcccgtgtgcgcactctgcatccacctatgtaacaaggcaccgctaagcaagcattgtctgtgccataacacagtactagaccactttcttacttctctttgggttgtctttctcctctcctacatccatttcttccttttccaatttcattggttttctctaaacagtgctccattttattttgttggtgtttcagatgggcagtgttatggctacgtgatatttgaagggaaggataagtgttgctttcagtagttattgccaatattgttgttggtcaatggcttgaagataaactttctaataattattatttctttgagtagctcagacttggttttgccaaaactcttggtaatttttgaagatagactgtcttatcaccaaggaaatttatacaaattaagactaactttcttggaattcactattctggcaataaattttggtagactaatacagtacagctagacccagaaatttggaaggctgtagatcagaggttctagttccctttccctccttttatatcctcctctccttgagtaatgaagtgaccagcctgtgtagtgtgacaaacgtgtctcattcagcaggaaaaactaatgatatggatcatcacccagattctctcacttggtaccagcatttctgtaggtattagagaagagttctaagttttctaaaccttaactgttccttaaggattttagccagtattttaatagaacatgattaatgaaagtgacaaattttaaattttctctaatagtcctcatcataaactttttaaaggaaaataagcaaactaaaaagaacattggtttagataaatacttatactttgcaaagtcaaaaatggcttgatttttggaaacaatatagaggtattcatatttaaatgagggtttacatttgttttgttttgtaaccgttaaaaagaagttgtttccagctaattattgtggtgtactatatttgtgagcctagggtaggggcactgctgcaacttctgctttcatcccatgcctcatcaatgaggaaagggaacaaagtgtataaaaactgccacaattgtattttaattttgaggtatgatattttcagatatttcataatttctaacctctgttctctcagtaaacagaatgtctgatcgatcatgcagatacaatgttggtatttgagaggttagtttttttcctacacttttttttgccaactgacttaacaacattgctgtcaggtggaaatttcaagcacttttgcacatttagttcagtgtttgttgagaatccatggcttaacccacttgttttgctatttttttctttgcttttaattttccccatctgattttatctctgcgtttcagtgacctaccttaaaacaacacacgagaagagttaaactgggttcattttaatgatcaatttacctgcatataaaatttatttttaatcaagctgatcttaatgtatataatcattctatttgctttattatcggtgcaggtaggtcattaacaccacttcttttcatctgtaccacaccctggtgaaacctttgaagacataaaaaaaacctgtctgagatgttctttctaccaatctatatgtctttcggttatcaagtgtttctgcatggtaatgtcatgtaaatgctgatattgatttcactggtccatctatatttaaaacgtgcaagaaaaaaataaaatactctgctctagcaagttttgtgtaacaaaggcatatcgtcatgttaataaatttaaaacatcattcgtataaaatattttaattttcttgtatttcatttagacccaagaacatgctgaccaatgtgttctatatgtaaactacaaattctatggtagctttgttgtatattattgtaaaattattttaataagtcatggggatgacaatttgattattacaatttagttttcagtaatcaaaaagatttctatgaattctaaaaaatatttttttctatgaaattactagtgcccagctgtagaatctaccttaggtagatgatccctagacatacgttggttttgagggctattcagccattccattttactctctatttaaaggccgtgagcaagcttgtcatgagcaaatatgtcaagggagtcaatttctgaccaatcaagtacactaaattagaatatttttaaagtatgtaacattcccagtttcagccacaatttagccaagaataagataaaaacttgaataagaagtaagtagcataaatcagtatttaacctaaaattacatatttgaaacagaagatattatgttatgctcagtaaataattaagagatggcattgtgtaagaaggagccctagactgaaagtcaagacatctgaatttcaggctggaaaactatcagtatgatctcagcctcagttctcttgtctgtaaaatggaagaactggattaggcagtttgtaagattcctcctaactttcacagtcgatgacaagattgtctttttatctgatattttgaagggtatattgctttgaagtaagtctcaataaggcaatatattttagggcatctttcttcttatctctgacagtgttcttaaaattatttgaatatcataagagccttggtgtctgtcctaattcctttctcactcaccgatgctgaatacccagttgaatcaaactgtcaacctaccaaaaacgatattgtggcttatgggtattgctgtctcattcttggtatattcttgtgttaactgcccattggcctgaaaatactcattgtaagcctgaaaaaaaaaatctttcccactgttttttctgcttgttgtaagaatcaaatgaaataatgtatgtgaaagcaccttgtaaactgtaacctatcaatgtaaaatgttaaggtgtgttgttatttcattaattacttctttgtttagaatggaatttcctatgcactactgtagctaggaaatgctgaaaacaactgtgttttttaattaatcaataactgcaaaattaaagtaccttcaatggataagacaa

SEQ ID NO: 69670 - DNA, 4548 bp, Homo sapiens
gctacggaagatccttgcgattgctggaagaaatcgtgccttcagaaaacataagagcaatacttgaaaaatcactatataactcttggattaatctgatgtactatgatatctcatgctagcatatgctgcttctagggctctctaaaaaccttcgttttctgtgtgctgcatgctccagtgtgtgtgtttacaccatcggttcttctccctctagagattagcataactccctttgctgttggattgttattttgagcaatatgttttggaaaggttggttttcatcatgagtgcacgcaaatcatcagatgcatctgcttgctcctcttcagaaatatctgtgaaagagtttctagccaaagccaaagaagactttttgaaaaaatgggagaatccaactcagaataatgccggacttgaagattttgaaaggaaaaaaacccttggaacaggttcatttggaagagtcatgttggtaaaacacaaagccactgaacagtattatgccatgaagatcttagataagcagaaggttgttaaactgaagcaaatagagcatactttgaatgagaaaagaatattacaggcagtgaattttcctttccttgttcgactggagtatgcttttaaggataattctaatttatacatggttatggaatatgtccctgggggtgaaatgttttcacatctaagaagaattggaaggttcagtgagccccatgcacggttctatgcagctcagatagtgctaacattcgagtacctccattcactagacctcatctacagagatctaaaacctgaaaatctcttaattgaccatcaaggctatatccaggtcacagactttgggtttgccaaaagagttaaaggcagaacttggacattatgtggaactccagagtatttggctccagaaataattctcagcaagggctacaataaggcagtggattggtgggcattaggagtgctaatctatgaaatggcagctggctatcccccattctttgcagaccaaccaattcagatttatgaaaagattgtttctggaaaggtccgattcccatcccacttcagttcagatctcaaggaccttctacggaacctgctgcaggtggatttgaccaagagatttggaaatctaaagaatggtgtcagtgatataaaaactcacaagtggtttgccacgacagattggattgctatttaccagaggaaggttgaagctccattcataccaaagtttagaggctctggagataccagcaactttgatgactatgaagaagaagatatccgtgtctctataacagaaaaatgtgcaaaagaatttggtgaattttaaagaggaacaagatgacatctgagctcacactcagtgtttgcactctgttgagagataaggtagagctgagaccgtccttgttgaagcagttacctagttccttcattccaacgactgagtgaggtctttattgccatcatcccgtgtgcgcactctgcatccacctatgtaacaaggcaccgctaagcaagcattgtctgtgccataacacagtactagaccactttcttacttctctttgggttgtctttctcctctcctacatccatttcttccttttccaatttcattggttttctctaaacagtgctccattttattttgttggtgtttcagatgggcagtgttatggctacgtgatatttgaagggaaggataagtgttgctttcagtagttattgccaatattgttgttggtcaatggcttgaagataaactttctaataattattatttctttgagtagctcagacttggttttgccaaaactcttggtaatttttgaagatagactgtcttatcaccaaggaaatttatacaaattaagactaactttcttggaattcactattctggcaataaattttggtagactaatacagtacagctagacccagaaatttggaaggctgtagatcagaggttctagttccctttccctccttttatatcctcctctccttgagtaatgaagtgaccagcctgtgtagtgtgacaaacgtgtctcattcagcaggaaaaactaatgatatggatcatcacccagattctctcacttggtaccagcatttctgtaggtattagagaagagttctaagttttctaaaccttaactgttccttaaggattttagccagtattttaatagaacatgattaatgaaagtgacaaattttaaattttctctaatagtcctcatcataaactttttaaaggaaaataagcaaactaaaaagaacattggtttagataaatacttatactttgcaaagtcaaaaatggcttgatttttggaaacaatatagaggtattcatatttaaatgagggtttacatttgttttgttttgtaaccgttaaaaagaagttgtttccagctaattattgtggtgtactatatttgtgagcctagggtaggggcactgctgcaacttctgctttcatcccatgcctcatcaatgaggaaagggaacaaagtgtataaaaactgccacaattgtattttaattttgaggtatgatattttcagatatttcataatttctaacctctgttctctcagtaaacagaatgtctgatcgatcatgcagatacaatgttggtatttgagaggttagtttttttcctacacttttttttgccaactgacttaacaacattgctgtcaggtggaaatttcaagcacttttgcacatttagttcagtgtttgttgagaatccatggcttaacccacttgttttgctatttttttctttgcttttaattttccccatctgattttatctctgcgtttcagtgacctaccttaaaacaacacacgagaagagttaaactgggttcattttaatgatcaatttacctgcatataaaatttatttttaatcaagctgatcttaatgtatataatcattctatttgctttattatcggtgcaggtaggtcattaacaccacttcttttcatctgtaccacaccctggtgaaacctttgaagacataaaaaaaacctgtctgagatgttctttctaccaatctatatgtctttcggttatcaagtgtttctgcatggtaatgtcatgtaaatgctgatattgatttcactggtccatctatatttaaaacgtgcaagaaaaaaataaaatactctgctctagcaagttttgtgtaacaaaggcatatcgtcatgttaataaatttaaaacatcattcgtataaaatattttaattttcttgtatttcatttagacccaagaacatgctgaccaatgtgttctatatgtaaactacaaattctatggtagctttgttgtatattattgtaaaattattttaataagtcatggggatgacaatttgattattacaatttagttttcagtaatcaaaaagatttctatgaattctaaaaaatatttttttctatgaaattactagtgcccagctgtagaatctaccttaggtagatgatccctagacatacgttggttttgagggctattcagccattccattttactctctatttaaaggccgtgagcaagcttgtcatgagcaaatatgtcaagggagtcaatttctgaccaatcaagtacactaaattagaatatttttaaagtatgtaacattcccagtttcagccacaatttagccaagaataagataaaaacttgaataagaagtaagtagcataaatcagtatttaacctaaaattacatatttgaaacagaagatattatgttatgctcagtaaataattaagagatggcattgtgtaagaaggagccctagactgaaagtcaagacatctgaatttcaggctggaaaactatcagtatgatctcagcctcagttctcttgtctgtaaaatggaagaactggattaggcagtttgtaagattcctcctaactttcacagtcgatgacaagattgtctttttatctgatattttgaagggtatattgctttgaagtaagtctcaataaggcaatatattttagggcatctttcttcttatctctgacagtgttcttaaaattatttgaatatcataagagccttggtgtctgtcctaattcctttctcactcaccgatgctgaatacccagttgaatcaaactgtcaacctaccaaaaacgatattgtggcttatgggtattgctgtctcattcttggtatattcttgtgttaactgcccattggcctgaaaatactcattgtaagcctgaaaaaaaaaatctttcccactgttttttctgcttgttgtaagaatcaaatgaaataatgtatgtgaaagcaccttgtaaactgtaacctatcaatgtaaaatgttaaggtgtgttgttatttcattaattacttctttgtttagaatggaatttcctatgcactactgtagctaggaaatgctgaaaacaactgtgttttttaattaatcaataactgcaaaattaaagtaccttcaatggataagacaa

SEQ ID NO: 69671 - DNA, 4524 bp, Homo sapiens
gctacggaagatccttgcgattgctggaagaaatcgtgccttcagaaaacataagagcaatacttgaaaaatcactatataactcttggattaatctgatgtactatgatatctcatgctagcatatgctgcttctagggctctctaaaaaccttcgttttctgtgtgctgcatgctccagtgtgtgtgtttacaccatcggttcttctccctctagagattagcataactccctttgctgttggattgttattttgagcaatatgttttggaaaggttggttttcatcatgagtgcttgctcctcttcagaaatatctgtgaaagagtttctagccaaagccaaagaagactttttgaaaaaatgggagaatccaactcagaataatgccggacttgaagattttgaaaggaaaaaaacccttggaacaggttcatttggaagagtcatgttggtaaaacacaaagccactgaacagtattatgccatgaagatcttagataagcagaaggttgttaaactgaagcaaatagagcatactttgaatgagaaaagaatattacaggcagtgaattttcctttccttgttcgactggagtatgcttttaaggataattctaatttatacatggttatggaatatgtccctgggggtgaaatgttttcacatctaagaagaattggaaggttcagtgagccccatgcacggttctatgcagctcagatagtgctaacattcgagtacctccattcactagacctcatctacagagatctaaaacctgaaaatctcttaattgaccatcaaggctatatccaggtcacagactttgggtttgccaaaagagttaaaggcagaacttggacattatgtggaactccagagtatttggctccagaaataattctcagcaagggctacaataaggcagtggattggtgggcattaggagtgctaatctatgaaatggcagctggctatcccccattctttgcagaccaaccaattcagatttatgaaaagattgtttctggaaaggtccgattcccatcccacttcagttcagatctcaaggaccttctacggaacctgctgcaggtggatttgaccaagagatttggaaatctaaagaatggtgtcagtgatataaaaactcacaagtggtttgccacgacagattggattgctatttaccagaggaaggttgaagctccattcataccaaagtttagaggctctggagataccagcaactttgatgactatgaagaagaagatatccgtgtctctataacagaaaaatgtgcaaaagaatttggtgaattttaaagaggaacaagatgacatctgagctcacactcagtgtttgcactctgttgagagataaggtagagctgagaccgtccttgttgaagcagttacctagttccttcattccaacgactgagtgaggtctttattgccatcatcccgtgtgcgcactctgcatccacctatgtaacaaggcaccgctaagcaagcattgtctgtgccataacacagtactagaccactttcttacttctctttgggttgtctttctcctctcctacatccatttcttccttttccaatttcattggttttctctaaacagtgctccattttattttgttggtgtttcagatgggcagtgttatggctacgtgatatttgaagggaaggataagtgttgctttcagtagttattgccaatattgttgttggtcaatggcttgaagataaactttctaataattattatttctttgagtagctcagacttggttttgccaaaactcttggtaatttttgaagatagactgtcttatcaccaaggaaatttatacaaattaagactaactttcttggaattcactattctggcaataaattttggtagactaatacagtacagctagacccagaaatttggaaggctgtagatcagaggttctagttccctttccctccttttatatcctcctctccttgagtaatgaagtgaccagcctgtgtagtgtgacaaacgtgtctcattcagcaggaaaaactaatgatatggatcatcacccagattctctcacttggtaccagcatttctgtaggtattagagaagagttctaagttttctaaaccttaactgttccttaaggattttagccagtattttaatagaacatgattaatgaaagtgacaaattttaaattttctctaatagtcctcatcataaactttttaaaggaaaataagcaaactaaaaagaacattggtttagataaatacttatactttgcaaagtcaaaaatggcttgatttttggaaacaatatagaggtattcatatttaaatgagggtttacatttgttttgttttgtaaccgttaaaaagaagttgtttccagctaattattgtggtgtactatatttgtgagcctagggtaggggcactgctgcaacttctgctttcatcccatgcctcatcaatgaggaaagggaacaaagtgtataaaaactgccacaattgtattttaattttgaggtatgatattttcagatatttcataatttctaacctctgttctctcagtaaacagaatgtctgatcgatcatgcagatacaatgttggtatttgagaggttagtttttttcctacacttttttttgccaactgacttaacaacattgctgtcaggtggaaatttcaagcacttttgcacatttagttcagtgtttgttgagaatccatggcttaacccacttgttttgctatttttttctttgcttttaattttccccatctgattttatctctgcgtttcagtgacctaccttaaaacaacacacgagaagagttaaactgggttcattttaatgatcaatttacctgcatataaaatttatttttaatcaagctgatcttaatgtatataatcattctatttgctttattatcggtgcaggtaggtcattaacaccacttcttttcatctgtaccacaccctggtgaaacctttgaagacataaaaaaaacctgtctgagatgttctttctaccaatctatatgtctttcggttatcaagtgtttctgcatggtaatgtcatgtaaatgctgatattgatttcactggtccatctatatttaaaacgtgcaagaaaaaaataaaatactctgctctagcaagttttgtgtaacaaaggcatatcgtcatgttaataaatttaaaacatcattcgtataaaatattttaattttcttgtatttcatttagacccaagaacatgctgaccaatgtgttctatatgtaaactacaaattctatggtagctttgttgtatattattgtaaaattattttaataagtcatggggatgacaatttgattattacaatttagttttcagtaatcaaaaagatttctatgaattctaaaaaatatttttttctatgaaattactagtgcccagctgtagaatctaccttaggtagatgatccctagacatacgttggttttgagggctattcagccattccattttactctctatttaaaggccgtgagcaagcttgtcatgagcaaatatgtcaagggagtcaatttctgaccaatcaagtacactaaattagaatatttttaaagtatgtaacattcccagtttcagccacaatttagccaagaataagataaaaacttgaataagaagtaagtagcataaatcagtatttaacctaaaattacatatttgaaacagaagatattatgttatgctcagtaaataattaagagatggcattgtgtaagaaggagccctagactgaaagtcaagacatctgaatttcaggctggaaaactatcagtatgatctcagcctcagttctcttgtctgtaaaatggaagaactggattaggcagtttgtaagattcctcctaactttcacagtcgatgacaagattgtctttttatctgatattttgaagggtatattgctttgaagtaagtctcaataaggcaatatattttagggcatctttcttcttatctctgacagtgttcttaaaattatttgaatatcataagagccttggtgtctgtcctaattcctttctcactcaccgatgctgaatacccagttgaatcaaactgtcaacctaccaaaaacgatattgtggcttatgggtattgctgtctcattcttggtatattcttgtgttaactgcccattggcctgaaaatactcattgtaagcctgaaaaaaaaaatctttcccactgttttttctgcttgttgtaagaatcaaatgaaataatgtatgtgaaagcaccttgtaaactgtaacctatcaatgtaaaatgttaaggtgtgttgttatttcattaattacttctttgtttagaatggaatttcctatgcactactgtagctaggaaatgctgaaaacaactgtgttttttaattaatcaataactgcaaaattaaagtaccttcaatggataagacaa

SEQ ID NO: 69672 - DNA, 4429 bp, Homo sapiens
acacatgcatagctcttagcttctgtgtaagaagttgtgagctccttctggaaacatttgcagttacattaagtaaagtgtaaatgcacatgaatggcagcttatagagaaccaccttgtaaccagtatacaggtacaactacagctcttcagaaattggaaggttttgctagccggttatttcatagacactctaaaggtactgcacatgatcagaaaacagctctggaaaatgacagccttcatttctctgaacatactgccttatgggacagatcaatgaaagagtttctagccaaagccaaagaagactttttgaaaaaatgggagaatccaactcagaataatgccggacttgaagattttgaaaggaaaaaaacccttggaacaggttcatttggaagagtcatgttggtaaaacacaaagccactgaacagtattatgccatgaagatcttagataagcagaaggttgttaaactgaagcaaatagagcatactttgaatgagaaaaggataattctaatttatacatggttatggaatatgtccctgggggtgaaatgttttcacatctaagaagaattggaaggttcagtgagccccatgcacggttctatgcagctcagatagtgctaacattcgagtacctccattcactagacctcatctacagagatctaaaacctgaaaatctcttaattgaccatcaaggctatatccaggtcacagactttgggtttgccaaaagagttaaaggcagaacttggacattatgtggaactccagagtatttggctccagaaataattctcagcaagggctacaataaggcagtggattggtgggcattaggagtgctaatctatgaaatggcagctggctatcccccattctttgcagaccaaccaattcagatttatgaaaagattgtttctggaaaggtccgattcccatcccacttcagttcagatctcaaggaccttctacggaacctgctgcaggtggatttgaccaagagatttggaaatctaaagaatggtgtcagtgatataaaaactcacaagtggtttgccacgacagattggattgctatttaccagaggaaggttgaagctccattcataccaaagtttagaggctctggagataccagcaactttgatgactatgaagaagaagatatccgtgtctctataacagaaaaatgtgcaaaagaatttggtgaattttaaagaggaacaagatgacatctgagctcacactcagtgtttgcactctgttgagagataaggtagagctgagaccgtccttgttgaagcagttacctagttccttcattccaacgactgagtgaggtctttattgccatcatcccgtgtgcgcactctgcatccacctatgtaacaaggcaccgctaagcaagcattgtctgtgccataacacagtactagaccactttcttacttctctttgggttgtctttctcctctcctacatccatttcttccttttccaatttcattggttttctctaaacagtgctccattttattttgttggtgtttcagatgggcagtgttatggctacgtgatatttgaagggaaggataagtgttgctttcagtagttattgccaatattgttgttggtcaatggcttgaagataaactttctaataattattatttctttgagtagctcagacttggttttgccaaaactcttggtaatttttgaagatagactgtcttatcaccaaggaaatttatacaaattaagactaactttcttggaattcactattctggcaataaattttggtagactaatacagtacagctagacccagaaatttggaaggctgtagatcagaggttctagttccctttccctccttttatatcctcctctccttgagtaatgaagtgaccagcctgtgtagtgtgacaaacgtgtctcattcagcaggaaaaactaatgatatggatcatcacccagattctctcacttggtaccagcatttctgtaggtattagagaagagttctaagttttctaaaccttaactgttccttaaggattttagccagtattttaatagaacatgattaatgaaagtgacaaattttaaattttctctaatagtcctcatcataaactttttaaaggaaaataagcaaactaaaaagaacattggtttagataaatacttatactttgcaaagtcaaaaatggcttgatttttggaaacaatatagaggtattcatatttaaatgagggtttacatttgttttgttttgtaaccgttaaaaagaagttgtttccagctaattattgtggtgtactatatttgtgagcctagggtaggggcactgctgcaacttctgctttcatcccatgcctcatcaatgaggaaagggaacaaagtgtataaaaactgccacaattgtattttaattttgaggtatgatattttcagatatttcataatttctaacctctgttctctcagtaaacagaatgtctgatcgatcatgcagatacaatgttggtatttgagaggttagtttttttcctacacttttttttgccaactgacttaacaacattgctgtcaggtggaaatttcaagcacttttgcacatttagttcagtgtttgttgagaatccatggcttaacccacttgttttgctatttttttctttgcttttaattttccccatctgattttatctctgcgtttcagtgacctaccttaaaacaacacacgagaagagttaaactgggttcattttaatgatcaatttacctgcatataaaatttatttttaatcaagctgatcttaatgtatataatcattctatttgctttattatcggtgcaggtaggtcattaacaccacttcttttcatctgtaccacaccctggtgaaacctttgaagacataaaaaaaacctgtctgagatgttctttctaccaatctatatgtctttcggttatcaagtgtttctgcatggtaatgtcatgtaaatgctgatattgatttcactggtccatctatatttaaaacgtgcaagaaaaaaataaaatactctgctctagcaagttttgtgtaacaaaggcatatcgtcatgttaataaatttaaaacatcattcgtataaaatattttaattttcttgtatttcatttagacccaagaacatgctgaccaatgtgttctatatgtaaactacaaattctatggtagctttgttgtatattattgtaaaattattttaataagtcatggggatgacaatttgattattacaatttagttttcagtaatcaaaaagatttctatgaattctaaaaaatatttttttctatgaaattactagtgcccagctgtagaatctaccttaggtagatgatccctagacatacgttggttttgagggctattcagccattccattttactctctatttaaaggccgtgagcaagcttgtcatgagcaaatatgtcaagggagtcaatttctgaccaatcaagtacactaaattagaatatttttaaagtatgtaacattcccagtttcagccacaatttagccaagaataagataaaaacttgaataagaagtaagtagcataaatcagtatttaacctaaaattacatatttgaaacagaagatattatgttatgctcagtaaataattaagagatggcattgtgtaagaaggagccctagactgaaagtcaagacatctgaatttcaggctggaaaactatcagtatgatctcagcctcagttctcttgtctgtaaaatggaagaactggattaggcagtttgtaagattcctcctaactttcacagtcgatgacaagattgtctttttatctgatattttgaagggtatattgctttgaagtaagtctcaataaggcaatatattttagggcatctttcttcttatctctgacagtgttcttaaaattatttgaatatcataagagccttggtgtctgtcctaattcctttctcactcaccgatgctgaatacccagttgaatcaaactgtcaacctaccaaaaacgatattgtggcttatgggtattgctgtctcattcttggtatattcttgtgttaactgcccattggcctgaaaatactcattgtaagcctgaaaaaaaaaatctttcccactgttttttctgcttgttgtaagaatcaaatgaaataatgtatgtgaaagcaccttgtaaactgtaacctatcaatgtaaaatgttaaggtgtgttgttatttcattaattacttctttgtttagaatggaatttcctatgcactactgtagctaggaaatgctgaaaacaactgtgttttttaattaatcaataactgcaaaattaaagtaccttcaatggataagacaa

SEQ ID NO: 69673 - DNA, 1815 bp, Homo sapiens
acacatgcatagctcttagcttctgtgtaagaagttgtgagctccttctggaaacatttgcagttacattaagtaaagtgtaaatgcacatgaatggcagcttatagagaaccaccttgtaaccagtatacaggtacaactacagctcttcagaaattggaaggttttgctagccggttatttcatagacactctaaaggtactgcacatgatcagaaaacagctctggaaaatgacagccttcatttctctgaacatactgccttatgggacagatcaatgaaagagtttctagccaaagccaaagaagactttttgaaaaaatgggagaatccaactcagaataatgccggacttgaagattttgaaaggaaaaaaacccttggaacaggttcatttggaagagtcatgttggtaaaacacaaagccactgaacagtattatgccatgaagatcttagataagcagaaggttgttaaactgaagcaaatagagcatactttgaatgagaaaagaatattacaggcagtgaattttcctttccttgttcgactggagtatgcttttaaggataattctaatttatacatggttatggaatatgtccctgggggtgaaatgttttcacatctaagaagaattggaaggttcagtgagccccatgcacggttctatgcagctcagatagtgctaacattcgagtacctccattcactagacctcatctacagagatctaaaacctgaaaatctcttaattgaccatcaaggctatatccaggtcacagactttgggtttgccaaaagagttaaaggcagaacttggacattatgtggaactccagagtatttggctccagaaataattctcagcaagggctacaataaggcagtggattggtgggcattaggagtgctaatctatgaaatggcagctggctatcccccattctttgcagaccaaccaattcagatttatgaaaagattgtttctggaaagagaacttttgatatgaacaaaacaaaactttgagaaaaattaacagacaaggcagtgatttatttttgaagaatttgagaagtgtagactctcaagaggactaaaggtcatatgaagaatgatgagagaaccaaaatacattaaaatcacaaatggaagaagaatattttactaatacaaaaactaagaatgtaaatgttataataattgtttcaaatcatttaattgacagtaattataaagttcttgaatctttactatattacttttatttatattcatataagaaatccaattttctaacaaggatactgtcataactaaatttacatttattaagaaaaactgctttagttaaaattaatgtgtcttcatttttatgcattggcctcgatttgccaatcattctctattggttaaaatttatattcagctgtttatgaatatatattcattttatatcaaactttaaaattttgtatctaataatcagcatatattctaaaatcataacagtctaaatcctgggcaccttagaagaatgacaccagaaaaccttattatatcacaatattctgttttccccttcatttatttagaaatatgacaggatatttggtgtacttttgttttttaactaaaagtaccagattatctctccccatgtgggatataaaattatccccatctcttactccctttactcatctaaagtagaagtcatgaaagtggaatttttgccattaaaaggctctgtattatgtgaagttagattgtattaaccatttcccaataaatcatctgtttcaaaactca

SEQ ID NO: 69674 - DNA, 1949 bp, Homo sapiens
acacatgcatagctcttagcttctgtgtaagaagttgtgagctccttctggaaacatttgcagttacattaagtaaagtgtaaatgcacatgaatggcagcttatagagaaccaccttgtaaccagtatacaggtacaactacagctcttcagaaattggaaggttttgctagccggttatttcatagacactctaaaggtactgcacatgatcagaaaacagctctggaaaatgacagccttcatttctctgaacatactgccttatgggacagatcaatgaaagagtttctagccaaagccaaagaagactttttgaaaaaatgggagaatccaactcagaataatgccggacttgaagattttgaaaggaaaaaaacccttggaacaggttcatttggaagagtcatgttggtaaaacacaaagccactgaacagtattatgccatgaagatcttagataagcagaaggttgttaaactgaagcaaatagagcatactttgaatgagaaaagaatattacaggcagtgaattttcctttccttgttcgactggagtatgcttttaaggataattctaatttatacatggttatggaatatgtccctgggggtgaaatgttttcacatctaagaagaattggaaggttcagtgagccccatgcacggttctatgcagctcagatagtgctaacattcgagtacctccattcactagacctcatctacagagatctaaaacctgaaaatctcttaattgaccatcaaggctatatccaggtcacagactttgggtttgccaaaagagttaaaggcagaacttggacattatgtggaactccagagtatttggctccagaaataattctcagcaagggctacaataaggcagtggattggtgggcattaggagtgctaatctatgaaatggcagctggctatcccccattctttgcagaccaaccaattcagatttatgaaaagattgtttctggaaagagaacttttgatatgaacaaaacaaaactttgagaaaaattaacagacaaggcagtgatttatttttgaagaatttgagaagtgtagactctcaagaggactaaaggtcatatgaagaatgatgagagaaccaaaatacattaaaatcacaaatggaagaagaatattttactaatacaaaaactaagaatgtaaatgttataataattgtttcaaatcatttaattgacagtaattataaagttcttgaatctttactatattacttttatttatattcatataagaaatccaattttctaacaaggatactgtcataactaaatttacatttattaagaaaaactgctttagttaaaattaatgtgtcttcatttttatgcattggcctcgatttgccaatcattctctattggttaaaatttatattcagctgtttatgaatatatattcattttatatcaaactttaaaattttgtatctaataatcagcatatattctaaaatcataacagtctaaatcctgggcaccttagaagaatgacaccagaaaaccttattatatcacaatattctgttttccccttcatttatttagaaatatgacaggatatttggtgtacttttgttttttaactaaaagtaccagattatctctccccatgtgggatataaaattatccccatctcttactccctttactcatctaaagtagaagtcatgaaagtggaatttttgccattaaaaggctctgtattatgtgaagttagattgtattaaccatttcccaataaatcatctgtttcaaaactcaaattcaaactagaatgtgtctctattcacattgcaaaaatattattgtctctctggttagtggctaaaagccaaattggaaactaactagttttttaaattttttaaattgtgcaaattattaaaaatccaatt

SEQ ID NO: 69675 - DNA, 682 bp, Homo sapiens
gggaaagacccgtgccagcgggcgtgtggccgcgggtttcgcacggtccaataagggagggcggcgtggcccggcctggtagcgacgaggacgcgcctgcgcagaggcggcagcaccaccggggttgactccgggggcgcggcgaggagagacatgaggctgagctggttccgggtcctgacagtactgtccatctgcctgagcgccgtggccacggccacgggggccgagggcaaaaggaagctgcagatcggggtcaagaagcgggtggaccactgtcccatcaaatcgcgcaaaggggatgtcctgcacatgcactacacggggaagctggaagatgggacagagtttgacagcagcctgccccagaaccagccctttgtcttctcccttggcacaggccaggtcatcaagggctgggaccaggggctgctggggatgtgtgagggggaaaagcgcaagctggtgatcccatccgagctagggtatggagagcggggagctcccccaaagattccaggcggtgcaaccctggtgttcgaggtggagctgctcaaaatagagcgacgaactgagctgtaaccagactggggaggggcagggggagaggcccccatcagggaccagactgttccaaaaaaaaaacaaaaaacaaaaacaaacaaaaaaacacttaaaagcc

SEQ ID NO: 69676 - DNA, 616 bp, Homo sapiens
ctggggggagccggggtgcaagagggcaggctggatcaggccgggcagaagcggaccgggctccgagtgtcaacgagagctagagacatgaggctgagctggttccgggtcctgacagtactgtccatctgcctgagcgccgtggccacggccacgggggccgagggcaaaaggaagctgcagatcggggtcaagaagcgggtggaccactgtcccatcaaatcgcgcaaaggggatgtcctgcacatgcactacacggggaagctggaagatgggacagagtttgacagcagcctgccccagaaccagccctttgtcttctcccttggcacaggccaggtcatcaagggctgggaccaggggctgctggggatgtgtgagggggaaaagcgcaagctggtgatcccatccgagctagggtatggagagcggggagctcccccaaagattccaggcggtgcaaccctggtgttcgaggtggagctgctcaaaatagagcgacgaactgagctgtaaccagactggggaggggcagggggagaggcccccatcagggaccagactgttccaaaaaaaaaacaaaaaacaaaaacaaacaaaaaaacacttaaaagcc

SEQ ID NO: 69677 - DNA, 821 bp, Homo sapiens
gggaaagacccgtgccagcgggcgtgtggccgcgggtttcgcacggtccaataagggagggcggcgtggcccggcctggtagcgacgaggacgcgcctgcgcagaggcggcagcaccaccggggttgactccgggggcgcggcgaggagagacatgaggctgagctggttccgggtcctgacagtactgtccatctgcctgagcgccgtggccacggccacgggggccgagggcaaaaggaagctgcagatcggggtcaagaagcgggtggaccactgtcccatcaaatcgcgcaaaggggatgtcctgcacatgcactacacggggaagctggaagatgggacagagtttgacagcagcctgccccagaaccagccctttgtcttctcccttggcacaggccaggtcatcaagggctgggaccaggggctgctggggtgagtcatgggggaatgggcttgggagtgggggcgtgcatggccaccgcccaggaggtaagctgtgggaggcaagccccagggatacaagacaagggccctgggtgctgccatgggctgagcatgtgtcttcctgcaggatgtgtgagggggaaaagcgcaagctggtgatcccatccgagctagggtatggagagcggggagctcccccaaagattccaggcggtgcaaccctggtgttcgaggtggagctgctcaaaatagagcgacgaactgagctgtaaccagactggggaggggcagggggagaggcccccatcagggaccagactgttccaaaaaaaaaacaaaaaacaaaaacaaacaaaaaaacacttaaaagcc

SEQ ID NO: 69678 - DNA, 1372 bp, Homo sapiens
ctggggggagccggggtgcaagagggcaggctggatcaggccgggcagaagcggaccgggctccgagtgtcaacgagagctaggtgacgaggaaattgggggtgggggccggagctgtccggagatgccgcagggggagggttctcacgccgcacggggcggagtcctgggactcggggcgggacgtggaaccgggacgggtgggacctccgagctggtgccagtggaaggcggagcccggcggcggggggcggagctaggagggtcgggggacggagcctggctcttgaaggaggagctggaggaggtgaaaggcggagcctcggggtcggaagcagagggggacggagcggaggcgctgggggcggggcttcagccggtgagtggcgtggctacggctccggaaaaggggtctagttctgtcgaaggcggggctgcaggcccgggggcggtaccgcgtcctccgaagggcggtgccaaggagccaagtgaggagcctggcccgagtaatggccccgggcgtcctcgcgggggtggtctccgtggtggccgggcttggggacgccgtaggccgagaactccaccgggagaggtggtgtgggtggagcgggctcggcggccagcagacacagggccagtctgggtgccccggagacccccaagggctcagagttggggcggcgccccgggcggaagcacagggccaggctggggggtatctcccgaggacccgggctcctcggagccacccagtggggatgtgtgggtgcctcggggccggccccctgcagcggccgcagaggtgttggtgtgctggaccgggggcagctgggtgtggcagacatgaggctgagctggttccgggtcctgacagtactgtccatctgcctgagcgccgtggccacggccacgggggccgagggcaaaaggaagctgcagatcggggtcaagaagcgggtggaccactgtcccatcaaatcgcgcaaaggggatgtcctgcacatgcactacacggggaagctggaagatgggacagagtttgacagcagcctgccccagaaccagccctttgtcttctcccttggcacaggccaggtcatcaagggctgggaccaggggctgctggggatgtgtgagggggaaaagcgcaagctggtgatcccatccgagctagggtatggagagcggggagctcccccaaagattccaggcggtgcaaccctggtgttcgaggtggagctgctcaaaatagagcgacgaactgagctgtaaccagactggggaggggcagggggagaggcccccatcagggaccagactgttccaaaaaaaaaacaaaaaacaaaaacaaacaaaaaaacacttaaaagcc

SEQ ID NO: 69679 - DNA, 1935 bp, Homo sapiens
ctggggggagccggggtgcaagagggcaggctggatcaggccgggcagaagcggaccgggctccgagtgtcaacgagagctaggtgacgaggaaattgggggtgggggccggagctgtccggagatgccgcagggggagggttctcacgccgcacggggcggagtcctgggactcggggcgggacgtggaaccgggacgggtgggacctccgagctggtgccagtggaaggcggagcccggcggcggggggcggagctaggagggtcgggggacggagcctggctcttgaaggaggagctggaggaggtgaaaggcggagcctcggggtcggaagcagagggggacggagcggaggcgctgggggcggggcttcagccggtgagtggcgtggctacggctccggaaaaggggtctagttctgtcgaaggcggggctgcaggcccgggggcggtaccgcgtcctccgaagggcggtgccaaggagccaagtgaggagcctggcccgagtaatggccccgggcgtcctcgcgggggtggtctccgtggtggccgggcttggggacgccgtaggccgagaactccaccgggagaggtggtgtgggtggagcgggctcggcggccagcagacacagggccagtctgggtgccccggagacccccaagggctcagagttggggcggcgccccgggcggaagcacagggccaggctggggggtatctcccgaggacccgggctcctcggagccacccagtggggatgtgtgggtgcctcggggccggccccctgcagcggccgcagaggtgttggtgtgctggaccgggggcagctgggtgtggcgtgagtggggccgcccagtcggggcaactgcagtgcagccagatagggtctggactttgcgtaaagggacaggcgggaactgaagagcggaggtggggactgggagggagggaaggtatgggggtgagcaaaggggcgggtccctggctgctgtggcctcccctgaccccctccccccgctgctggggtcctcggccaagcccccttctcactggactgagacatgaggctgagctggttccgggtcctgacagtactgtccatctgcctgagcgccgtggccacggccacgggggccgagggcaaaaggaagctgcagatcggggtcaagaagcgggtggaccactgtcccatcaaatcgcgcaaaggggatgtcctgcacatgcactacacggggaagctggaagatgggacagagtttgacagcagcctgccccagaaccagccctttgtcttctcccttggcacaggccaggtcatcaagggctgggaccaggggctgctggggatgtgtgagggggaaaagcgcaagctggtgatcccatccgagctaggtaagaggcccctcctgagggtgcagagcgagtttggggtgtgtgactgggaagggtgaaagctgcttcagcttttcattggtcttcaccgtatccattcattacaatacatgcctcctccaagtttggctgtgtctagcagtgagtacaggggcaatatcattgaagcactcagctgtagtggccccactctgcccttgccaggcctttggcacccccttcccatctccattacccttctccatttctggccttcttgctgagaggggcggaacactctccctttgcccacactggaagggagcttggccatcactgactgtttctttgtgcatcttcaacagggtatggagagcggggagctcccccaaagattccaggcggtgcaaccctggtgttcgaggtggagctgctcaaaatagagcgacgaactgagctgtaaccagactggggaggggcagggggagaggcccccatcagggaccagactgttccaaaaaaaaaacaaaaaacaaaaacaaacaaaaaaacacttaaaagcc

SEQ ID NO: 69680 - DNA, 1555 bp, Homo sapiens
ctggggggagccggggtgcaagagggcaggctggatcaggccgggcagaagcggaccgggctccgagtgtcaacgagagctaggtgacgaggaaattgggggtgggggccggagctgtccggagatgccgcagggggagggttctcacgccgcacggggcggagtcctgggactcggggcgggacgtggaaccgggacgggtgggacctccgagctggtgccagtggaaggcggagcccggcggcggggggcggagctaggagggtcgggggacggagcctggctcttgaaggaggagctggaggaggtgaaaggcggagcctcggggtcggaagcagagggggacggagcggaggcgctgggggcggggcttcagccggtgagtggcgtggctacggctccggaaaaggggtctagttctgtcgaaggcggggctgcaggcccgggggcggtaccgcgtcctccgaagggcggtgccaaggagccaagtgaggagcctggcccgagtaatggccccgggcgtcctcgcgggggtggtctccgtggtggccgggcttggggacgccgtaggccgagaactccaccgggagaggtggtgtgggtggagcgggctcggcggccagcagacacagggccagtctgggtgccccggagacccccaagggctcagagttggggcggcgccccgggcggaagcacagggccaggctggggggtatctcccgaggacccgggctcctcggagccacccagtggggatgtgtgggtgcctcggggccggccccctgcagcggccgcagaggtgttggtgtgctggaccgggggcagctgggtgtggcgtgagtggggccgcccagtcggggcaactgcagtgcagccagatagggtctggactttgcgtaaagggacaggcgggaactgaagagcggaggtggggactgggagggagggaaggtatgggggtgagcaaaggggcgggtccctggctgctgtggcctcccctgaccccctccccccgctgctggggtcctcggccaagcccccttctcactggactgagacatgaggctgagctggttccgggtcctgacagtactgtccatctgcctgagcgccgtggccacggccacgggggccgagggcaaaaggaagctgcagatcggggtcaagaagcgggtggaccactgtcccatcaaatcgcgcaaaggggatgtcctgcacatgcactacacggggaagctggaagatgggacagagtttgacagcagcctgccccagaaccagccctttgtcttctcccttggcacaggccaggtcatcaagggctgggaccaggggctgctggggatgtgtgagggggaaaagcgcaagctggtgatcccatccgagctaggcggtgcaaccctggtgttcgaggtggagctgctcaaaatagagcgacgaactgagctgtaaccagactggggaggggcagggggagaggcccccatcagggaccagactgttccaaaaaaaaaacaaaaaacaaaaacaaacaaaaaaacacttaaaagcc

SEQ ID NO: 69681 - DNA, 329 bp, Homo sapiens
gtaagtgtggccccggagcccgggggagagggcggtgacccgggacaaaggggatcccccggggcaaggaagatacagtggcggtggaaccctcctgttacctacccgtgttccatactctccctgccctcccccacgttcagtcggtcggtcggggtctgtgcccacagagacatgaggctgagctggttccgggtcctgacagtactgtccatctgcctgagcgccgtggccacggccacgggggccgagggcaaaaggaagctgcagatcggggtcaagaagcgggtggaccactgtcccatcaaatcgcgcaaaggggatgtcct

SEQ ID NO: 69682 - DNA, 396 bp, Homo sapiens
accagagagtgcttgggagtctggttctccataagccagggaagctggaagatgggacagagtttgacagcagcctgccccagaaccagccctttgtcttctcccttggcacaggccaggtcatcaagggctgggaccaggggctgctggggatgtgtgagggggaaaagcgcaagctggtgatcccatccgagctagggtatggagagcggggagctcccccaaagattccaggcggtgcaaccctggtgttcgaggtggagctgctcaaaatagagcgacgaactgagctgtaaccagactggggaggggcagggggagaggcccccatcagggaccagactgttccaaaaaaaaaacaaaaaacaaaaacaaacaaaaaaacacttaaaagcc

SEQ ID NO: 69683 - DNA, 1591 bp, Homo sapiens
ctggggggagccggggtgcaagagggcaggctggatcaggccgggcagaagcggaccgggctccgagtgtcaacgagagctaggtgacgaggaaattgggggtgggggccggagctgtccggagatgccgcagggggagggttctcacgccgcacggggcggagtcctgggactcggggcgggacgtggaaccgggacgggtgggacctccgagctggtgccagtggaaggcggagcccggcggcggggggcggagctaggagggtcgggggacggagcctggctcttgaaggaggagctggaggaggtgaaaggcggagcctcggggtcggaagcagagggggacggagcggaggcgctgggggcggggcttcagccggtgagtggcgtggctacggctccggaaaaggggtctagttctgtcgaaggcggggctgcaggcccgggggcggtaccgcgtcctccgaagggcggtgccaaggagccaagtgaggagcctggcccgagtaatggccccgggcgtcctcgcgggggtggtctccgtggtggccgggcttggggacgccgtaggccgagaactccaccgggagaggtggtgtgggtggagcgggctcggcggccagcagacacagggccagtctgggtgccccggagacccccaagggctcagagttggggcggcgccccgggcggaagcacagggccaggctggggggtatctcccgaggacccgggctcctcggagccacccagtggggatgtgtgggtgcctcggggccggccccctgcagcggccgcagaggtgttggtgtgctggaccgggggcagctgggtgtggcgtgagtggggccgcccagtcggggcaactgcagtgcagccagatagggtctggactttgcgtaaagggacaggcgggaactgaagagcggaggtggggactgggagggagggaaggtatgggggtgagcaaaggggcgggtccctggctgctgtggcctcccctgaccccctccccccgctgctggggtcctcggccaagcccccttctcactggactgagacatgaggctgagctggttccgggtcctgacagtactgtccatctgcctgagcgccgtggccacggccacgggggccgagggcaaaaggaagctgcagatcggggtcaagaagcgggtggaccactgtcccatcaaatcgcgcaaaggggatgtcctgcacatgcactacacggggaagctggaagatgggacagagtttgacagcagcctgccccagaaccagccctttgtcttctcccttggcacaggccaggtcatcaagggctgggaccaggggctgctggggatgtgtgagggggaaaagcgcaagctggtgatcccatccgagctagggtatggagagcggggagctcccccaaagattccaggcggtgcaaccctggtgttcgaggtggagctgctcaaaatagagcgacgaactgagctgtaaccagactggggaggggcagggggagaggcccccatcagggaccagactgttccaaaaaaaaaacaaaaaacaaaaacaaacaaaaaaacacttaaaagcc

SEQ ID NO: 69684 - DNA, 623 bp, Homo sapiens
gggaaagacccgtgccagcgggcgtgtggccgcgggtttcgcacggtccaataagggagggcggcgtggcccggcctggtagcgacgaggacgcgcctgcgcagaggcggcagcaccaccggggttgactccgggggcgcggcgaggagagacatgaggctgagctggttccgggtcctgacagtactgtccatctgcctgagcgccgtggccacggccacgggggccgagggcaaaaggaagtggccttctcatggttccacaggggaagctggaagatgggacagagtttgacagcagcctgccccagaaccagccctttgtcttctcccttggcacaggccaggtcatcaagggctgggaccaggggctgctggggatgtgtgagggggaaaagcgcaagctggtgatcccatccgagctagggtatggagagcggggagctcccccaaagattccaggcggtgcaaccctggtgttcgaggtggagctgctcaaaatagagcgacgaactgagctgtaaccagactggggaggggcagggggagaggcccccatcagggaccagactgttccaaaaaaaaaacaaaaaacaaaaacaaacaaaaaaacacttaaaagcc

SEQ ID NO: 69685 - DNA, 1476 bp, Homo sapiens
ctggggggagccggggtgcaagagggcaggctggatcaggccgggcagaagcggaccgggctccgagtgtcaacgagagctaggtgacgaggaaattgggggtgggggccggagctgtccggagatgccgcagggggagggttctcacgccgcacggggcggagtcctgggactcggggcgggacgtggaaccgggacgggtgggacctccgagctggtgccagtggaaggcggagcccggcggcggggggcggagctaggagggtcgggggacggagcctggctcttgaaggaggagctggaggaggtgaaaggcggagcctcggggtcggaagcagagggggacggagcggaggcgctgggggcggggcttcagccggtgagtggcgtggctacggctccggaaaaggggtctagttctgtcgaaggcggggctgcaggcccgggggcggtaccgcgtcctccgaagggcggtgccaaggagccaagtgaggagcctggcccgagtaatggccccgggcgtcctcgcgggggtggtctccgtggtggccgggcttggggacgccgtaggccgagaactccaccgggagaggtggtgtgggtggagcgggctcggcggccagcagacacagggccagtctgggtgccccggagacccccaagggctcagagttggggcggcgccccgggcggaagcacagggccaggctggggggtatctcccgaggacccgggctcctcggagccacccagtggggatgtgtgggtgcctcggggccggccccctgcagcggccgcagaggtgttggtgtgctggaccgggggcagctgggtgtggcgtgagtggggccgcccagtcggggcaactgcagtgcagccagatagggtctggactttgcgtaaagggacaggcgggaactgaagagcggaggtggggactgggagggagggaaggtatgggggtgagcaaaggggcgggtccctggctgctgtggcctcccctgaccccctccccccgctgctggggtcctcggccaagcccccttctcactggactgagacatgaggctgagctggttccgggtcctgacagtactgtccatctgcctgagcgccgtggccacggccacgggggccgagggcaaaaggaagctgcagatcggggtcaagaagcgggtggaccactgtcccatcaaatcgcgcaaaggggatgtcctgcacatgcactacacggggaagctggaagatgggacagagtttgacagcagcctgccccagaaccagccctttgtcttctcccttggcacaggccaggtcatcaagggctgggaccaggggctgctggggatgtgtgagggggaaaagcgcaagctggtgatcccatccgagctagagggggagaggcccccatcagggaccagactgttccaaaaaaaaaacaaaaaacaaaaacaaacaaaaaaacacttaaaagcc

SEQ ID NO: 69686 - DNA, 352 bp, Homo sapiens
tcagcagtgtgaaaatggactaatacacagggcaactgtccctatgattcaattacctcccaccaggtccctcccatgacacttggggattatgggacctacagttcaagatgagatttgggtggggacatagaaaaccatatcattcagtaataagtcccttatatctgtacagaatattttagttcatgtagcacttcacatttttccctaataattctcacaactagtgtgtaagagaggcaaacagatgttcttattttgcagacaaggagattgactctcatagaaattaaaagatttgttcagtgtggcagaaattgtatgtgattgtgctggctcttgcaacgaa

SEQ ID NO: 69687 - DNA, 739 bp, Homo sapiens
ttatcccccatcatttaatataagatgtattaataatagttaactttatatcacattatttaagttactggatataaaaaaagaaggaacaactcccaaaaaactttgcatccttttctggtgaaaaggttactgtgttttcagttatatgaaagataattgtttcaggttaggtagaaatatatgacttttttttctgcttggagattaaatatggtttaggaaaatgtgtataactgtcaagttttcaagggatagacagtacgatttttgttgtattaacttgacacattaaactgtgatgttgctgtgaagatattttgagaagtgattaaagtccataatcagttgcctttaaggaagggagattatttgaggtaatctaggtgggcctgattcaatcattaagaggacttaagagcatagctgtttcctgaagaggaaacttcacctatggacagcttcagtctacctttcctgaggacccacgtgatggatttcagacatacaatcatgtaagccaagtccccacagtcaatatcttaatatgtatctcatactggttattcttcagtggttaaactctgactgacacagaatatgtgtgtatttatttattatttgtaaattgtttttctatattttcctgttgggaggattatattgtcttattgatttgtaaaggctctttgtatattaaagatatacatcaaatatgttaaaaaaaattttctcatcc

SEQ ID NO: 69688 - DNA, 5282 bp, Homo sapiens
  misc_feature (139)..(139): n is a, c, g, or t
  misc_feature (658)..(658): n is a, c, g, or t
  misc_feature (732)..(732): n is a, c, g, or t
  misc_feature (1044)..(1044): n is a, c, g, or t
  misc_feature (1555)..(1555): n is a, c, g, or t
  misc_feature (1921)..(1921): n is a, c, g, or t
  misc_feature (2189)..(2189): n is a, c, g, or t
  misc_feature (2250)..(2250): n is a, c, g, or t
  misc_feature (2728)..(2728): n is a, c, g, or t
  misc_feature (2846)..(2846): n is a, c, g, or t
  misc_feature (3647)..(3647): n is a, c, g, or t
  misc_feature (3656)..(3656): n is a, c, g, or t
ttcttttctcccatccttttcctcctcctattcttctcctcgtttcttctcctcctctcctctttctccactcctttttctcctcctccttctcttctcctttcctcctcctctccttcacctcttcatctcctcctcnttcttctgctcccgattctcctcctctcctttctcttcgtcttctcctcttccttgtcccctcctcctccttgtccatctcctctactcctccttctcctcctcctccttctcttcctttcctcctttcctctttttctcatcctctcctcctcctctcgtcctcttctcttttcctcattcttttcttcttctcctcctccttttttctccctacttcctcctagcttcccttttctcctctcctctcctggtcctgttgtccccctctcctttttttctccacttcctctcttcttactatcttcttctcattttctcttctagttcttctctttcctcctccttttcttctcttctcctcctcctctttcttcactcctccactcctactccttctcttactgtgccactggccatgccaaacagcacccagcacaagtagtggcaccctcttcagcgctgcgctagaaagaactgatgtgcatttatattagcttttggaggatagtactaatcnggcctaactcaggcggccaagtatatatatatatacgtatatacatatgtatgtatatacgtatgtatacatanatatatacacatatatattatagatatattctatgagaaataatcttgctctgtcacctaggctgcagtgcagtggcacaagattatgactcactgtagcctcaagagatcctctcacctcaccctcccgagtagctgggactacaggcgtggcccatcacacctgactaaattcttttttagtgacggggtctcaacacgttgcctagtctggtctgaaacttctgggcgcaagctctctaatgtttttgcattcatagtctcccttattttaatttctcaagtttttgcaaaattgttacataactatcngcccttttcatagagcgctgtttcttgagccaggtcttctgtccatgcatgtcctcttgagagagtggatgtcagccagctaccctggctgagagggatggggataatacagggatgcaataaaggagacagtgataatttatatgatctgggaccccaggcctcacaccagaactgtctagtatacttttagcaaacaagtgccactgatctgagccttgttctgcccttccactttccactttattacacaagcaggagataggcaagggagaaggcaggatgatgaggagactaaattccagaaaagaaagggctgcgtgcagtaagcagacagttgcccccaaagtggtctgggctcccacttaccttagagacatgtgcaacacttgtgaatagttgttttacaattcttaaatcagtggacagactgtaagcatcccattggtgtcagttgccaggtgcccaatgcctgttctctgcagcaacctttgtggtcccatacctgggngtgagttctgttcctgcagagtgccctgtgcattctggtgcttttgtgccctctcctctaacctataaactgacaactctaactctatattttcacttacaatttttctgaagcagtgatcttttgtcatcttgatcacactacaagtcgctcaccctgcaagtacttgtaaaaatgaaagtaatctccattccttctggaaggtgattgccatgtacacaacctactaggccaggaacattactgatggctgtcctgatgcatgtctctctcacccccatgtccaatcagtcaccaggctctccccaaaaccatgctccggtcactgactttggctgtttaatcacttctgacctaaggtcctcnttgagtcataagtacctcttgagttaattttctgcctccagtttctctctactgctgtttatcttccaccctgctgccagagtcatcatcctcaaaaatgaaagctgctctcattgtttgcctgcctaataacatctcttccctccctgttgtctacaaaaagaaaaatccaaactccttcacttgttttacaaagaccctcatctgcttccaaaccaaattgctagtcttggctcttgtctctgtcttccacatcactgccacactnaataattctttactgcctctgttgttgcacgggttgttctttttgttttgtctccatcccnttcccccagcaaagaatatttactctttactcttctgttgagacccatctcaaatactaccttttctagggaaaattaggccttctgttcctaataacttttacccccatctatcaagtctgtctgctgtaatttatctgttaacatgtttctcccacctcaagaatattttttccatcttctgtacctagcacaattgcatggttggtgctcactgactactacatgttgatttatttattttacttgtttgagaggtggagtcttgctctgttatccaggctggtgtgcagtgatacaatcttggctcactgcaggctctgcctcccggtttcaagcaattctcctgcctcagcctcccaagtagctccgattacaggcacccaccaccacgtccagctaatttttgtattttcagtagagacaggtttcaccacattggtcaggctggttttgaactcctgacctcaggtgagcngcctgccttggcctggcaaaatgctgggattacaggcataagacaccatgcctggacttgcatgctgatttccgatataaaaatgaaatttttgaagattttggagaataccatcatntaaattggaagctaaggcctaactattactacacattcagcaaaggaagtgggtataaactaacaactttggcacatctgtcatgcagtagtttgctgcaaggtggaaaagattttggtgctttggtgggaaatactgttgaattacagaaattctaaaacaaaagctggctcagcttaaagagaaaagaaaatgcttgctaatgcctgcttgcactaaaagctgtcacactgtggcctttaataattctaaacatttttaatggattttggtttgaacttcaaattcaataggaaaaataaatgcacagataaaggacccagatcatttcagagctccaatgtgtgaacccgttttctctacttatttagagttttgtttcactagtggcatgagttaataggagtgttgctttgtacataaattctctttattccataattcttggttttaaaaattgaatgcaataccagaaacctacagggtataaatcttgcttgatgtgtgtgcaatgtacatacttgataataattgattatatatcatatttataaaaagaatcatgtgtactgttttaggagaacatactttaccctgatactttattgttaaaaacaacaaagcattgttctaactactaaaaatcaaaaatttaactttcttttaaaagaggtacatgtatcttcagaaataaaagggatacccagaagataaggtaggtgttctgaaacacgaggtgaaacatttgaatgggttttttttgtcaaacaataaatttttaacaaagaaaagtttgcattntgggtgaantatccttagtatctttatacaagatgaaatcctgattgattaaagatacgttactaactttaaatgtcttttaataagtgcttacatgctaactagtatttagactcatacctggcagatacatttagacataagattctaacttagtttcatttctgaggaggcttgtgtattttcctctgtgatacagaaaatagatttttttaagccattttatcttttactttagagttttaattgtttgttaagtggtttataatggtttaattaacaacccgaacaggttttctgtgatttggttggttaaatctatatgtatttggttaaaatattctacgtcaaagttttaaaccaagagtaacttaaaggagtcttaacttgtgtttctctgaatttgatttgtgtttaaattatgaaattaagttttcaaagaacgatttttgtgttcaaaagcttaaggtttcacaacttaattttcctaagtacaatttttttctatcggacttagcctccttttagaagacagttttttactaccaaatttaccattcccatttttttttttacttttacagatctgtatttagtccataaatatccaaatatctgcttgtgaaggttctgtctttaccaccaagcctaccggtatggcaaagacatacagttgctaatctcattaaagatagatcacaatgagagagactcatctagccatgaacaggtcacttctatcagtgttaactgctcaaagttaagtatgacaagaagctatgaagtaaagtttggcctttgtgtatgggagaggaatggaggatgccaggatgcaggtcaaggaaggcatcctgtggaagtaacatttgagctaatatctgaaggatgtgtgatagaaggaaaaagaatgcttcagagaacagctggtacaaaagccctgaggttgaaaaggtggatgtgtcagggaaatgggggaagtacagtgtctggaagaagaaaagacactgaatgaggtgaatgacaggaatgatgaagtagataggggctagagcagattgtaagaactctggaaagctttgaaaactgttgggccaaaaagtagtatgatgaaatttgcatgctaaggactatttttacccaagtagtaaatagaccaggtagaaggaaataatgattggccttctgtttggaagatcagttagaaggctagtttatgaaaactttgaaaagcagtgatggcctgcagcatcgtgacagtaaagatgggagctcaaatggatttgataaaggtttaagaggtaagagaggcttgctgattggatggtgtggggaagggatagataacttcctgatcttggattttatagctgggtggatggtggtgcctcattgagactggaatgctggattaagcaatgtatatgaacagggcatgttccctaccctttaaagagttatgtatatgttttccatgtttttagctatttctccacttgtaatgtgttttagttggttaaaaattatgtacctggcatggatgacgcattaaatgtacttatgtaactgataaaccaatgttacattcttgaaaataaattacattctatgaaaataaatggctttctcctattcttt

SEQ ID NO: 69689 - DNA, 1010 bp, Homo sapiens
tgctaaaatctcttcactccctaacctgggtcatagtgtataaaaattattattctagaaaacatttaatgagcatttactatgttctagagactgtctcaggttcttcacttatgttagtccactgaatcctctaatagccctatgggatatatgctgttatgatggctattttatagatgaagaaactgagaaacaaaggggtgaagtaacttgcccaagcttctgcagctaggaaatcgacattggttgatcccatgcagtctggcactggagccggtgcccttagccaccatgctgactgactccacaggacacatgagccacatttccatcagtcgagaagacaaaggatcagaataggactccagtgctgctatgtacaatcacagtttctctgattaaaaattgtggaagaccatcccaacggctgcaataagcatgaggtcaaatgcctcccatttaagatcccctactgatatgaccttgtacctggattcacagtgagcaacaccacagccaggccaatctccgagcttttgccgcatctatttcttgctgttcccaaaggcatctccacatggatcagtgcctctaaacacatcctacccaaaagttgatgcaatcacttctctcccagctccattagcagaggttgaagtcctagtaagaattactcatatgtggagatattaagtcctagtaagttgaagtcctagtaagaaatactcagtatattggccaggcaccgtggctcacacctgtaattccagcactttgggaagctgaggtaggtggattacctgatgtcaagagtttgagaccagcctggccaacatggtgaaactgcttctctactaaaaatacaaaattagctgggcgtggtgatgcatgcctataatctcagctacttgggaggctgagccaggagaatcacttgagcctgggaggcagagattgcagtgagctgagattttgccattgcacaccagcctgggtgacaagagcaa

SEQ ID NO: 69690 - DNA, 341 bp, Homo sapiens
  misc_feature (330)..(330): n is a, c, g, or t
ataaatgttattgttacaaacttgtaaatgagtgaaaaaaaagagttgtcaatagcccttcatatgtttgtttaacaaatattaatttcctgtcactctgtgctctaaataagatggaaacaaaaatatatacaacagtgccagtccacagtgcaaacatcaataaacaacaagccaggccactgaattgcttcctccacgttgttaataatgttatcatcgtttattactagtaaacttttgacatagaacctggttctgtttggcccatgaaaaacaaggcttctatgacctaagtggtataacgggggtgaagatggaggcacgggngtctcagcacg

SEQ ID NO: 69691 - DNA, 758 bp, Homo sapiens
ggctcaagagacgccaggcaggtgggactggagttgtcatggaaggggcagggcgcagggcggaaccattgctcgcggagctggcgtcgagtcggaacctcggactgcaggaagtgggagcaccgcggtttcggggaagagaccggggttgagcgtctagcccatctctgcgtgacttccgccagcgtttagagcgttttcggggtccgagttgaagagcaaaaccaagtgaaggaaacttcactaagttcagggtgacaagggaggaagtacagagtgaactattggcatggctcaatccattgacctgttttggttcctgatgaagttttgttaatttaaatgagaaaaataaggacagtgaaaaacagagcgcttaaaaagcactgtctggatatcttcagagggaaaaaggagaaagttaactgaattggtgacacttcgggtctctcacagaggaagattagatgaaggtgaccttccccttcgccaagcagaatctcccatgagactcatgaatcctcttgaggccaattacagctatcacttgttaactgttggagtactttcagtcttaaaagagctgctagaaaattaaggctgcaacatgaaagaagaacaaaatggtcaggcatatcacacgtttttatcaaatgatttggtttaggacttgataacctggttagtacttgagcactgaaagatattttgaatttaaagtaagatggagaaagtgatggaagctaaatcacagagga

SEQ ID NO: 69692 - DNA, 900 bp, Homo sapiens
ggctcaagagacgccaggcaggtgggactggagttgtcatggaaggggcagggcgcagggcggaaccattgctcgcggagctggcgtcgagtcggaacctcggactgcaggaagtgggagcaccgcggtttcggggaagagaccggggttgagcgtctagcccatctctgcgtgacttccgccagcgtttagagcgttttcggggtccgagttgaagagcaaaaccaagtgaaggaaacttcactaagttcagggtgacaagggaggaagtacagagactgcactttaaattctggatgacagacctatcaggactgagtggacctttgagtgacaagatgggggtgttccaaagagaccatggcagcctgcagctaggactttaataaacagagcgcttaaaaagcactgtctggatatcttcagagggaaaaaggagaaagttaactgaattggtgacacttcgggtctctcacagaggaagagaccaccaaaccaacagaagccaccaggacagcacacagccattccaaaattccagaccaggatcattccagaaaagccttacatctcagtccagtatatggatggttttgtaagatgacctatgatttttctgttcctccttcctgcccctaacttcagagaaacagacctagaaagagggaaggaaggagtgaaaaagcgtgccatactttatcttctccccttctgttttaaactagacaaatctatattttaattattataagtaaccagaaagttatatggtctggccaggatggcattaaagaaaatgagagagaaaagtttaagatagcatggttggagacaataagtagaagaaaccaagtagttcaagttttataacgctctatcttataaacactcttgaaccaa

SEQ ID NO: 69693 - DNA, 868 bp, Homo sapiens
ggctcaagagacgccaggcaggtgggactggagttgtcatggaaggggcagggcgcagggcggaaccattgctcgcggagctggcgtcgagtcggaacctcggactgcaggaagtgggagcaccgcggtttcggggaagagaccggggttgagcgtctagcccatctctgcgtgacttccgccagcgtttagagcgttttcggggtccgagttgaagagcaaaaccaagtgaaggaaacttcactaagttcagggtgacaagggaggaagtacagagactgcactttaaattctggatgacagacctatcaggactgagtggacctttgagtgacaagatgggggtgttccaaagagaccatggcagcctgcagctaggactttaattgaactattggcatggctcaatccattgacctgttttggttcctgatgaagttttgttaatttaaatgagaaaaataaggacagtgaaaaacagagcgcttaaaaagcactgtctggatatcttcagagggaaaaaggagaaagttaactgaattggtgacacttcgggtctctcacagaggaagattagatgaaggtgaccttccccttcgccaagcagaatctcccatgagactcatgaatcctcttgaggccaattacagctatcacttgttaactgttggagtactttcagtcttaaaagagctgctagaaaattaaggctgcaacatgaaagaagaacaaaatggtcaggcatatcacacgtttttatcaaatgatttggtttaggacttgataacctggttagtacttgagcactgaaagatattttgaatttaaagtaagatggagaaagtgatggaagctaaatcacagagga

SEQ ID NO: 69694 - DNA, 587 bp, Homo sapiens
  misc_feature (399)..(399): n is a, c, g, or t
  misc_feature (584)..(584): n is a, c, g, or t
gaattcttaacaggacacgtttaggattaaacaggttttactgggggtctgaagaaacttcccagacctccacaaacaagttttattggaggatctaaaggaacttcccaaacctccatgatttagcaggagacaagatgagggtaatcacccccggcacctggacccatttagattaagtacatttactgaggctccagaggaaggtcttcaggactcagaccttagttatagattagaagaagttaatcacttatgtctttagacaaatgcacacttacacatagatgtatagcttagaggttatataagctctggaaaactttgtaatttagacttggtctggtgatactttcccagccttctccctatacccggttacagaagtaaactctcttntttcccagttagtctgcatcttgctattgggccacaggaataagcatctcgaccctctctttggtttgggaaaagtttggctgttgtctgttatgggaaggtctgggaaaagatctcgactgcttaattggaagagtcagaactacagtaaccattccacagactagaacacagaaagaaacagntct

SEQ ID NO: 69695 - DNA, 810 bp, Homo sapiens
aagttagacatcatcttaagttacaacaacagaatccttcccactacttctacaaaattttgtacatgaaatatataattatatagcacttttatagactgaattaaggcaacccctttcaaaacttccagggatctacttgaaaggaaatgttttatagccatttgtgagctaacaaaagctacagtttactgaagtttacttcaagtcttaattgtctacaaaagtgtattgaagagcaatatgattagattatttcttaatagatatcttcttttgtaattttaaaatgctgttacacagcgttaagttatagaaactagtgtgtaaacatgttgcttgatcaagaaaaagtacaatacagggtgtatatttattttttgtgttataaagtttacttttagttgctcttctagagattattaggtaataaatgtgtatatactgtataatttgcaatatacccaggaactgatttaagatggaattgtgtgtgtgtttgcttgcacatgtgtgtgttaccattctgcttgcatttctaatagtgtttcaattttagcaacatataggagcaagtgttccagaatgtaatatgaataggagaaatagggaagcagtaaaacaaaatttaacacaagcttgtgtctcttttcctctcatgtgtccaaaagctaatctctttattcactaaaaggaaatgtgtataagactaaatcccctttggctttttaaaaacattttgtgatatcagtgacaatgcagttcttctagccattaatcttgtacccctgtaagaaatttcacctttct

SEQ ID NO: 69696 - DNA, 253 bp, Homo sapiens
cagagtaagaactgtgggacaattacaaatgttgtaatatgcatatggtggaaatattaaatttcccattatataatatattacatgggaattgtccttatgatggcacataacatgatataggaagggaaatagacaaaatcaagattatggaaggatttttttcttgaacacgatctatgtctcagaaagctttaatgacgttccataccaaatattcaagagtatatgcaggctctggaactagaaggct

SEQ ID NO: 69697 - DNA, 304 bp, Homo sapiens
agaagagccaaataaagtcagaagtaaaaaaggaaatacaaaacttatcagagactactatggacaactatacactgaccaactggaaaacctagagcttgatgtacaaaaatccttaacaaaatactaccaaatcgaatccaacagcacatcaaaaacataatataccacaatcaaatgggacttataccagggatgcagggatgattcaacatatgcaaacaataaacatgatacattacatcaacagaatgaaggatgaaaaccatttgatcacctcaatagatgcaaataagcatttgat

SEQ ID NO: 69698 - DNA, 4299 bp, Homo sapiens
agaggccaggtgaggccgtcccgtgatgccccgcgccccggccgctctggcctgcaacgtgtctctggggcggaggcagcggcagtggagttcgctgcgcgctgttgggggccacctgtcttttcgcttgtgtccctctttctagtgtcgcgctcgagtcccgacgggccgctccaagcctcgacatgtcgtacaactacgtggtaacggcccagaagcccaccgccgtgaacggctgcgtgaccggacactttacttcggccgaagacttaaacctgttgattgccaaaaacacgagattagagatctatgtggtcaccgccgaggggcttcggcccgtcaaagaggtgggcatgtatgggaagattgcggtcatggagcttttcaggcccaagggggagagcaaggacctgctgtttatcttgacagcgaagtacaatgcctgcatcctggagtataaacagagtggcgagagcattgacatcattacgcgagcccatggcaatgtccaggaccgcattggccgcccctcagagaccggcattattggcatcattgaccctgagtgccggatgattggcctgcgtctctatgatggccttttcaaggttattccactagatcgcgataataaagaactcaaggccttcaacatccgcctggaggagctgcatgtcattgatgtcaagttcctatatggttgccaagcacctactatttgctttgtctaccaggaccctcaggggcggcacgtaaaaacctatgaggtgtctctccgagaaaaggaattcaataagggcccttggaaacaggaaaatgtcgaagctgaagcttccatggtgatcgcagtcccagagccctttgggggggccatcatcattggacaggagtcaatcacctatcacaatggtgacaaatacctggctattgcccctcctatcatcaagcaaagcacgattgtgtgccacaatcgagtggaccctaatggctcaagatacctgctgggagacatggaaggccggctcttcatgctgcttttggagaaggaggaacagatggatggcaccgtcactctcaaggatctccgtgtagaactccttggagagacctctattgctgagtgcttgacataccttgataatggtgttgtgtttgtcgggtctcgcctgggtgactcccagcttgtgaagctcaacgttgacagtaatgaacaaggctcctatgtagtggccatggaaacctttaccaacttaggacccattgtcgatatgtgcgtggtggacctggagaggcaggggcaggggcagctggtcacttgctctggggctttcaaggaaggttctttgcggatcatccggaatggaattggaatccacgagcatgccagcattgacttaccaggcatcaaaggattatggccactgcggtctgaccctaatcgtgagactgatgacactttggtgctctcttttgtgggccagacaagagttctcatgttaaatggagaggaggtagaagaaaccgaactgatgggtttcgtggatgatcagcagactttcttctgtggcaacgtggctcatcagcagcttatccagatcacttcagcatcggtgaggttggtctctcaagaacccaaagctctggtcagtgaatggaaggagcctcaggccaagaacatcagtgtggcctcctgcaatagcagccaggtggtggtggctgtaggcagggccctctactatctgcagatccatcctcaggagctccggcagatcagccacacagagatggaacatgaagtggcttgcttggacatcaccccattaggagacagcaatggactgtcccctctttgtgccattggcctctggacggacatctcggctcgtatcttgaagttgccctcttttgaactactgcacaaggagatgctgggtggagagatcattcctcgctccatcctgatgaccacctttgagagtagccattacctcctttgtgccttgggagatggagcgcttttctactttgggctcaacattgagacaggtctgttgagcgaccgtaagaaggtgactttgggcacccagcccaccgtattgaggacttttcgttctctttctaccaccaacgtctttgcttgttctgaccgccccactgtcatctatagcagcaaccacaaattggtcttctcaaatgtcaacctcaaggaagtgaactacatgtgtcccctcaattcagatggctatcctgacagcctggcgctggccaacaatagcaccctcaccattggcaccatcgatgagatccagaagctgcacattcgcacagttcccctctatgagtctccaaggaagatctgctaccaggaagtgtcccagtgtttcggggtcctctccagccgcattgaagtccaagacacgagtgggggcacgacagccttgaggcccagcgctagcacccaggctctgtccagcagtgtaagctccagcaagctgttctccagcagcactgctcctcatgagacctcctttggagaagaggtggaggtgcacaacctacttatcattgaccaacacacctttgaagtgcttcatgcccaccagtttctgcagaatgaatatgccctcagtctggtttcctgcaagctgggcaaagaccccaacacttacttcattgtgggcacagcaatggtgtatcctgaagaggcagagcccaagcagggtcgcattgtggtctttcagtattcggatggaaaactacagactgtggctgaaaaggaagtgaaaggggccgtgtactctatggtggaatttaacgggaagctgttagccagcatcaatagcacggtgcggctctatgagtggacaacagagaaggagctgcgcactgagtgcaaccactacaacaacatcatggccctctacctgaagaccaagggcgacttcatcctggtgggcgaccttatgcgctcagtgctgctgcttgcctacaagcccatggaaggaaactttgaagagattgctcgagactttaatcccaactggatgagtgctgtggaaatcttggatgatgacaattttctgggggctgaaaatgcctttaacttgtttgtgtgtcaaaaggatagcgctgccaccactgacgaggagcggcagcacctccaggaggttggtcttttccacctgggcgagtttgtcaatgtcttttgccacggctctctggtaatgcagaatctgggtgagacttccacccccacacaaggctcggtgctcttcggcacggtcaacggcatgatagggctggtgacctcactgtcagagagctggtacaacctcctgctggacatgcagaatcgactcaataaagtcatcaaaagtgtggggaagatcgagcactccttctggagatcctttcacaccgagcggaagacagaaccagccacaggtttcatcgacggtgacttgattgagagtttcctggatattagccgccccaagatgcaggaggtggtggcaaacctacagtatgacgatggcagcggtatgaagcgagaggccactgcagacgacctcatcaaggttgtggaggagctaactcggatccattagccaagggcagggggcccctttgctgaccctccccaaaggctttgccctgctgccctccccctcctctccaccatcgtcttcttggccatgggaggcctttccctaagccagctgcccccagagccacagttcccctatgtggaagtggggcgggcttcatagagacttgggaatgagctgaaggtgaaacattttctccctggatttttaccagtctcacatgattccagccatcaccttagaccaccaagccttgattggtgttgccagttgtcctccttccggggaaggattttgcagttctttggctgaaaggaagctgtgcgtgtgtgtgtgtgtatgtgtgtgtgtgtatgtgtatctcacactcatgcattgtcctctttttatttagattggcagtgtagggagttgtgggtagtggggaagagggttaggagggtttcattgtctgtgaagtgagaccttccttttacttttcttctattgcctctgagagcatcaggcctagaggcctgactgccaagccatgggtagcctgggtgtaaaacctggagatggtggatgatccccacgccacagcccttttgtctctgcaaactgccttcttcggaaagaagaaggtgggaggatgtgaattgttagtttctgagttttaccaaataaagtagaatataagaataagaagaaa

SEQ ID NO: 69699 - DNA, 626 bp, Homo sapiens
gataaatatgtcgaccacgcgcttgggaggcctttccctaagccagctgcccccagagccacagttcccctatgtggaagtggggcgggcttcatagagacttgggaatgagctgaaggtgaaacattttctccctggatttttaccagtctcacatgattccagccatcaccttagaccaccaagccttgattggtgttgccagttgtcctccttccggggaaggattttgcagttctttggctgaaaggaagctgtgcgtgtgtgtgtgtgtatgtgtgtgtgtgtatgtgtatctcacactcatgcattgtcctctttttatttagattggcagtgtagggagttgtgggtagtggggaagagggttaggagggtttcattgtctgtgaagtgagaccttccttttacttttcttctattgcctctgagagcatcaggcctagaggcctgactgccaagccatgggtagcctgggtgtaaaacctggagatggtggatgatccccacgccacagcccttttgtctctgcaaactgccttcttcggaaagaagaaggtgggaggatgtgaattgttagtttctgagttttaccaaataaagtagaatataagaataagaagaaa

SEQ ID NO: 69700 - DNA, 313 bp, Homo sapiens
actagttctagatcgcgatctagaactagtcgacgcgtgggcgacccacgcgtccgtaggagggtttcattgtctgtgaagtgagaccttccttttacttttcttctattgcctctgagagcatcaggcctagaggcctgactgccaagccatgggtagcctgggtgtaaaacctggagatggtggatgatccccacgccacagcccttttgtctctgcaaactgccttcttcggaaagaagaaggtgggaggatgtgaattgttagtttctgagttttaccaaataaagtagaatataagaataagaagaaa

SEQ ID NO: 69701 - DNA, 293 bp, Homo sapiens
cgcggccgcgcgacgaagacgacagaaaggggggagtaggagggtttcattgtctgtgaagtgagaccttccttttacttttcttctattgcctctgagagcatcaggcctagaggcctgactgccaagccatgggtagcctgggtgtaaaacctggagatggtggatgatccccacgccacagcccttttgtctctgcaaactgccttcttcggaaagaagaaggtgggaggatgtgaattgttagtttctgagttttaccaaataaagtagaatataagaataagaagaaa

SEQ ID NO: 69702 - DNA, 730 bp, Homo sapiens
gcattctaattttgctgtctttcctgcagtcccagagccctttgggggggccatcatcattggacaggagtcaatcacctatcacaatggtgacaaatacctggctattgcccctcctatcatcaagcaaagcacgattgtgtgccacaatcgagtggaccctaatggctcaagatacctgctgggagacatggaaggccggctcttcatgctgcttttggagaaggaggaacagatggatggcaccgtcactctcaaggatctccgtgtagaactccttggagaggtagagcttgttctccctgttcctctacaatgttcttttaggttcctaaagacaccaaatgtgtggtcccacacctcaactctgggaattatgttacttaacacctaacaacaaactgttgttcctgctgtggaagttgactgttgaatgagttaggtattggagcatctcacaggatcctgtgataatctatccaagcagcctgtgagaaaaggaaaagaaagggaaacagaaaaggatataatctggaattaaagatcaatctagctggtttcagtggctcacacctgtgatcccagcactttgggagactgagtcaggcagattgtgtgagccccaggagttcgagattagcctgggcaatatggcaaaaccccatctctacaaaaagtacaaaaattaggtgggtatggtggtgtgtgcctgtagtcccagctactcggg

SEQ ID NO: 69703 - DNA, 791 bp, Homo sapiens
catcctcaaacctagccccacaataaaggttcttggatttaggtataccgtgtttactttctgggcatcagtatgactggcccagtatcttgagggggttctttagaaacgttttctctgcttgcagctggtcacttgctctggggctttcaaggaaggttctttgcggatcatccggaatggaattggaatccacgagcatgccagcattgacttaccaggcatcaaaggtagcttttttggtgggcataggatgtagatcttacatgagggactttggccttgttacatgttgtgaaggcgttttggtgggagccagaggaaagcagatcaagtgaagagtgaaagtcgtaacaacagatcagaagcttaaacatatctgaaagtataaaagtaaactttagaaaaaaaaaaaaaagaaaatactactgatcaaaattggtagtggaatagaggactaggggattaaaagattataaattaaaattaatgttgtttatatgaggcaaccgatagaattcataaagaaaggagagactgaggatattttatgaagatataagtataaatgtggtttctagataaaaaatataaatcttcctaaattccaggagaattttaataaaaaaaagatcagaggctaggcgaggtggcgtggctcatgcctgtcattacagcactttgggaggccaaggtggaaggattgcttaagcccaggagtttgagaccagcctaggcaacgtagacctcatctctataaaaaaaattaaaaattagccaggggtgatggt

SEQ ID NO: 69704 - DNA, 4213 bp, Homo sapiens
ttccactacgcttccacgctaggtacgaggcggggtttcgcttgtgtccctctttctagtgtcgcgctcgagtcccgacgggccgctccaagcctcgacatgtcgtacaactacgtggtaacggcccagaagcccaccgccgtgaacggctgcgtgaccggacactttacttcggccgaagacttaaacctgttgattgccaaaaacacgagattagagatctatgtggtcaccgccgaggggcttcggcccgtcaaagaggtgggcatgtatgggaagattgcggtcatggagcttttcaggcccaagggggagagcaaggacctgctgtttatcttgacagcgaagtacaatgcctgcatcctggagtataaacagagtggcgagagcattgacatcattacgcgagcccatggcaatgtccaggaccgcattggccgcccctcagagaccggcattattggcatcattgaccctgagtgccggatgattggcctgcgtctctatgatggccttttcaaggttattccactagatcgcgataataaagaactcaaggccttcaacatccgcctggaggagctgcatgtcattgatgtcaagttcctatatggttgccaagcacctactatttgctttgtctaccaggaccctcaggggcggcacgtaaaaacctatgaggtgtctctccgagaaaaggaattcaataagggcccttggaaacaggaaaatgtcgaagctgaagcttccatggtgatcgcagtcccagagccctttgggggggccatcatcattggacaggagtcaatcacctatcacaatggtgacaaatacctggctattgcccctcctatcatcaagcaaagcacgattgtgtgccacaatcgagtggaccctaatggctcaagatacctgctgggagacatggaaggccggctcttcatgctgcttttggagaaggaggaacagatggatggcaccgtcactctcaaggatctccgtgtagaactccttggagagacctctattgctgagtgcttgacataccttgataatggtgttgtgtttgtcgggtctcgcctgggtgactcccagcttgtgaagctcaacgttgacagtaatgaacaaggctcctatgtagtggccatggaaacctttaccaacttaggacccattgtcgatatgtgcgtggtggacctggagaggcaggggcaggggcagctggtcacttgctctggggctttcaaggaaggttctttgcggatcatccggaatggaattggaatccacgagcatgccagcattgacttaccaggcatcaaaggattatggccactgcggtctgaccctaatcgtgagactgatgacactttggtgctctcttttgtgggccagacaagagttctcatgttaaatggagaggaggtagaagaaaccgaactgatgggtttcgtggatgatcagcagactttcttctgtggcaacgtggctcatcagcagcttatccagatcacttcagcatcggtgaggttggtctctcaagaacccaaagctctggtcagtgaatggaaggagcctcaggccaagaacatcagtgtggcctcctgcaatagcagccaggtggtggtggctgtaggcagggccctctactatctgcagatccatcctcaggagctccggcagatcagccacacagagatggaacatgaagtggcttgcttggacatcaccccattaggagacagcaatggactgtcccctctttgtgccattggcctctggacggacatctcggctcgtatcttgaagttgccctcttttgaactactgcacaaggagatgctgggtggagagatcattcctcgctccatcctgatgaccacctttgagagtagccattacctcctttgtgccttgggagatggagcgcttttctactttgggctcaacattgagacaggtctgttgagcgaccgtaagaaggtgactttgggcacccagcccaccgtattgaggacttttcgttctctttctaccaccaacgtctttgcttgttctgaccgccccactgtcatctatagcagcaaccacaaattggtcttctcaaatgtcaacctcaaggaagtgaactacatgtgtcccctcaattcagatggctatcctgacagcctggcgctggccaacaatagcaccctcaccattggcaccatcgatgagatccagaagctgcacattcgcacagttcccctctatgagtctccaaggaagatctgctaccaggaagtgtcccagtgtttcggggtcctctccagccgcattgaagtccaagacacgagtgggggcacgacagccttgaggcccagcgctagcacccaggctctgtccagcagtgtaagctccagcaagctgttctccagcagcactgctcctcatgagacctcctttggagaagaggtggaggtgcacaacctacttatcattgaccaacacacctttgaagtgcttcatgcccaccagtttctgcagaatgaatatgccctcagtctggtttcctgcaagctgggcaaagaccccaacacttacttcattgtgggcacagcaatggtgtatcctgaagaggcagagcccaagcagggtcgcattgtggtctttcagtattcggatggaaaactacagactgtggctgaaaaggaagtgaaaggggccgtgtactctatggtggaatttaacgggaagctgttagccagcatcaatagcacggtgcggctctatgagtggacaacagagaaggagctgcgcactgagtgcaaccactacaacaacatcatggccctctacctgaagaccaagggcgacttcatcctggtgggcgaccttatgcgctcagtgctgctgcttgcctacaagcccatggaaggaaactttgaagagattgctcgagactttaatcccaactggatgagtgctgtggaaatcttggatgatgacaattttctgggggctgaaaatgcctttaacttgtttgtgtgtcaaaaggatagcgctgccaccactgacgaggagcggcagcacctccaggaggttggtcttttccacctgggcgagtttgtcaatgtcttttgccacggctctctggtaatgcagaatctgggtgagacttccacccccacacaaggctcggtgctcttcggcacggtcaacggcatgatagggctggtgacctcactgtcagagagctggtacaacctcctgctggacatgcagaatcgactcaataaagtcatcaaaagtgtggggaagatcgagcactccttctggagatcctttcacaccgagcggaagacagaaccagccacaggtttcatcgacggtgacttgattgagagtttcctggatattagccgccccaagatgcaggaggtggtggcaaacctacagtatgacgatggcagcggtatgaagcgagaggccactgcagacgacctcatcaaggttgtggaggagctaactcggatccattagccaagggcagggggcccctttgctgaccctccccaaaggctttgccctgctgccctccccctcctctccaccatcgtcttcttggccatgggaggcctttccctaagccagctgcccccagagccacagttcccctatgtggaagtggggcgggcttcatagagacttgggaatgagctgaaggtgaaacattttctccctggatttttaccagtctcacatgattccagccatcaccttagaccaccaagccttgattggtgttgccagttgtcctccttccggggaaggattttgcagttctttggctgaaaggaagctgtgcgtgtgtgtgtgtgtatgtgtgtgtgtgtatgtgtatctcacactcatgcattgtcctctttttatttagattggcagtgtagggagttgtgggtagtggggaagagggttaggagggtttcattgtctgtgaagtgagaccttccttttacttttcttctattgcctctgagagcatcaggcctagaggcctgactgccaagccatgggtagcctgggtgtaaaacctggagatggtggatgatccccacgccacagcccttttgtctctgcaaactgccttcttcggaaagaagaaggtgggaggatgtgaattgttagtttctgagttttaccaaataaagtagaatataagaataagaagaaa

SEQ ID NO: 69705 - DNA, 4483 bp, Homo sapiens
agaggccaggtgaggccgtcccgtgatgccccgcgccccggccgctctggcctgcaacgtgtctctggggcggaggcagcggcagtggagttcgctgcgcgctgttgggggccacctgtcttttcgcttgtgtccctctttctagtgtcgcgctcgagtcccgacgggccgctccaagcctcgacatgtcgtacaactacgtggtaacggcccagaagcccaccgccgtgaacggctgcgtgaccggacactttacttcggccgaagacttaaacctgttgattgccaaaaacacgagattagagatctatgtggtcaccgccgaggggcttcggcccgtcaaagaggtgggcatgtatgggaagattgcggtcatggagcttttcaggcccaagggggagagcaaggacctgctgtttatcttgacagcgaagtacaatgcctgcatcctggagtataaacagagtggcgagagcattgacatcattacgcgagcccatggcaatgtccaggaccgcattggccgcccctcagagaccggcattattggcatcattgaccctgagtgccggatgattggcctgcgtctctatgatggccttttcaaggttattccactagatcgcgataataaagaactcaaggccttcaacatccgcctggaggagctgcatgtcattgatgtcaagttcctatatggttgccaagcacctactatttgctttgtctaccaggaccctcaggggcggcacgtaaaaacctatgaggtgtctctccgagaaaaggaattcaataagggcccttggaaacaggaaaatgtcgaagctgaagcttccatggtgatcgcagtcccagagccctttgggggggccatcatcattggacaggagtcaatcacctatcacaatggtgacaaatacctggctattgcccctcctatcatcaagcaaagcacgattgtgtgccacaatcgagtggaccctaatggctcaagatacctgctgggagacatggaaggccggctcttcatgctgcttttggagaaggaggaacagatggatggcaccgtcactctcaaggatctccgtgtagaactccttggagagacctctattgctgagtgcttgacataccttgataatggtgttgtgtttgtcgggtctcgcctgggtgactcccagcttgtgaagctcaacgttgacagtaatgaacaaggctcctatgtagtggccatggaaacctttaccaacttaggacccattgtcgatatgtgcgtggtggacctggagaggcaggggcaggggcagctggtcacttgctctggggctttcaaggaaggttctttgcggatcatccggaatggaattggaatccacgagcatgccagcattgacttaccaggcatcaaaggattatggccactgcggtctgaccctaatcgtgagactgatgacactttggtgctctcttttgtgggccagacaagagttctcatgttaaatggagaggaggtagaagaaaccgaactgatgggtttcgtggatgatcagcagactttcttctgtggcaacgtggctcatcagcagcttatccagatcacttcagcatcggtgaggttggtctctcaagaacccaaagctctggtcagtgaatggaaggagcctcaggccaagaacatcagtgtggcctcctgcaatagcagccaggtggtggtggctgtaggcagggccctctactatctgcagatccatcctcaggagctccggcagatcagccacacagagatggaacatgaagtggcttgcttggacatcaccccattaggagacagcaatggactgtcccctctttgtgccattggcctctggacggacatctcggctcgtatcttgaagttgccctcttttgaactactgcacaaggagatgctgggtggagagatcattcctcgctccatcctgatgaccacctttgagagtagccattacctcctttgtgccttgggagatggagcgcttttctactttgggctcaacattgagacaggtctgttgagcgaccgtaagaaggtgactttgggcacccagcccaccgtattgaggacttttcgttctctttctaccaccaacgtctttgcttgttctgaccgccccactgtcatctatagcagcaaccacaaattggtcttctcaaatgtcaacctcaaggaagtgaactacatgtgtcccctcaattcagatggctatcctgacagcctggcgctggccaacaatagcaccctcaccattggcaccatcgatgagatccagaagctgcacattcgcacagttcccctctatgagtctccaaggaagatctgctaccaggaagtgtcccagtgtttcggggtcctctccagccgcattgaagtccaagacacgagtgggggcacgacagccttgaggcccagcgctagcacccaggctctgtccagcagtgtaagctccagcaagctgttctccagcagcactgctcctcatgagacctcctttggagaagaggtggaggtgcacaacctacttatcattgaccaacacacctttgaagtgcttcatgcccaccagtttctgcagaatgaatatgccctcagtctggtttcctgcaagctgggcaaagaccccaacacttacttcattgtgggcacagcaatggtgtatcctgaagaggcagagcccaagcagggtcgcattgtggtctttcagtattcggatggaaaactacagactgtggctgaaaaggaagtgaaaggggccgtgtactctatggtggaatttaacgggaagctgttagccagcatcaatagcacggtgcggctctatgagtggacaacagagaaggagctgcgcactgagtgcaaccactacaacaacatcatggccctctacctgaagaccaagggcgacttcatcctggtgggcgaccttatgcgctcagtgctgctgcttgcctacaagcccatggaaggaaactttgaagagattgctcgagactttaatcccaactggatgagtgctgtggaaatcttggatgatgacaattttctgggggctgaaaatgcctttaacttgtttgtgtgtcaaaaggatagcgctgccaccactgacgaggagcggcagcacctccaggaggttggtcttttccacctgggcgagtttgtcaatgtcttttgccacggctctctggtaatgcagaatctgggtgagacttccacccccacacaaggctcggtgctcttcggcacggtcaacggcatgatagggctggtgacctcactgtcagagagctggtacaacctcctgctggacatgcagaatcgactcaataaagtcatcaaaagtgtggggaagatcgagcactccttctggagatcctttcacaccgagcggaagacagaaccagccacaggtttcatcgacggtgacttgattgagagtttcctggatattagccgccccaagatgcaggaggtggtggcaaacctacagtatgacgatggcagcggtatgaagcgagaggccactgcagacgacctcatcaaggttgtggaggagctaactcggatccattagccaagggcagggggcccctttgctgaccctccccaaaggctttgccctgctgccctccccctcctctccaccatcgtcttcttggccatgggaggcctttccctaagccagctgcccccagagccacagttcccctatgtggaagtggggcgggcttcatagagacttgggaatgagctgaaggtgaaacattttctccctggatttttaccagtctcacatgattccagccatcaccttagaccaccaagccttgattggtgttgccagttgtcctccttccggggaaggattttgcagttctttggctgaaaggaagctgtgcgtgtgtgtgtgtgtatgtgtgtgtgtgtatgtgtatctcacactcatgcattgtcctctttttatttagattggcagtgtagggagttgtgggtagtggggaagagggttaggagggtttcattgtctgtgaagtgagaccttccttttacttttcttctattgcctctgagagcatcaggcctagaggcctgactgccaagccatgggtagcctgggtgtaaaacctggagatggtggatgatccccacgccacagcccttttgtctctgcaaactgccttcttcggaaagaagaaggtgggaggatgtgaattgttagtttctgagttttaccaaataaagtagaatataagaataagaagaaaaaaaaaaaaaaaaaaaaacaacaaaaaaaaaacgcgggggctttttttggcgggggggggaaaaaaaggtgtatagagagaggcatgggtaaatgttttcctggacccctttttttctgcacgcgggaaatccgcgcggcccaaaggagggaaaatccagacgctgctgtctttgccatcactc

SEQ ID NO: 69706 - DNA, 4318 bp, Homo sapiens
agaggccaggtgaggccgtcccgtgatgccccgcgccccggccgctctggcctgcaacgtgtctctggggcggaggcagcggcagtggagttcgctgcgcgctgttgggggccacctgtcttttcgcttgtgtccctctttctagtgtcgcgctcgagtcccgacgggccgctccaagcctcgacatgtcgtacaactacgtggtaacggcccagaagcccaccgccgtgaacggctgcgtgaccggacactttacttcggccgaagacttaaacctgttgattgccaaaaacacgagattagagatctatgtggtcaccgccgaggggcttcggcccgtcaaagaggtgggcatgtatgggaagattgcggtcatggagcttttcaggcccaagggggagagcaaggacctgctgtttatcttgacagcgaagtacaatgcctgcatcctggagtataaacagagtggcgagagcattgacatcattacgcgagcccatggcaatgtccaggaccgcattggccgcccctcagagaccggcattattggcatcattgaccctgagtgccggatgattggcctgcgtctctatgatggccttttcaaggttattccactagatcgcgataataaagaactcaaggccttcaacatccgcctggaggagctgcatgtcattgatgtcaagttcctatatggttgccaagcacctactatttgctttgtctaccaggaccctcaggggcggcacgtaaaaacctatgaggtgtctctccgagaaaaggaattcaataagggcccttggaaacaggaaaatgtcgaagctgaagcttccatggtgatcgcagtcccagagccctttgggggggccatcatcattggacaggagtcaatcacctatcacaatggtgacaaatacctggctattgcccctcctatcatcaagcaaagcacgattgtgtgccacaatcgagtggaccctaatggctcaagatacctgctgggagacatggaaggccggctcttcatgctgcttttggagaaggaggaacagatggatggcaccgtcactctcaaggatctccgtgtagaactccttggagagacctctattgctgagtgcttgacataccttgataatggtgttgtgtttgtcgggtctcgcctgggtgactcccagcttgtgaagctcaacgttgacagtaatgaacaaggctcctatgtagtggccatggaaacctttaccaacttaggacccattgtcgatatgtgcgtggtggacctggagaggcaggggcaggggcagctggtcacttgctctggggctttcaaggaaggttctttgcggatcatccggaatggaattggaatccacgagcatgccagcattgacttaccaggcatcaaaggattatggccactgcggtctgaccctaatcgtgagactgatgacactttggtgctctcttttgtgggccagacaagagttctcatgttaaatggagaggaggtagaagaaaccgaactgatgggtttcgtggatgatcagcagactttcttctgtggcaacgtggctcatcagcagcttatccagtcatcagcagcttatccagatcacttcagcatcggtgaggttggtctctcaagaacccaaagctctggtcagtgaatggaaggagcctcaggccaagaacatcagtgtggcctcctgcaatagcagccaggtggtggtggctgtaggcagggccctctactatctgcagatccatcctcaggagctccggcagatcagccacacagagatggaacatgaagtggcttgcttggacatcaccccattaggagacagcaatggactgtcccctctttgtgccattggcctctggacggacatctcggctcgtatcttgaagttgccctcttttgaactactgcacaaggagatgctgggtggagagatcattcctcgctccatcctgatgaccacctttgagagtagccattacctcctttgtgccttgggagatggagcgcttttctactttgggctcaacattgagacaggtctgttgagcgaccgtaagaaggtgactttgggcacccagcccaccgtattgaggacttttcgttctctttctaccaccaacgtctttgcttgttctgaccgccccactgtcatctatagcagcaaccacaaattggtcttctcaaatgtcaacctcaaggaagtgaactacatgtgtcccctcaattcagatggctatcctgacagcctggcgctggccaacaatagcaccctcaccattggcaccatcgatgagatccagaagctgcacattcgcacagttcccctctatgagtctccaaggaagatctgctaccaggaagtgtcccagtgtttcggggtcctctccagccgcattgaagtccaagacacgagtgggggcacgacagccttgaggcccagcgctagcacccaggctctgtccagcagtgtaagctccagcaagctgttctccagcagcactgctcctcatgagacctcctttggagaagaggtggaggtgcacaacctacttatcattgaccaacacacctttgaagtgcttcatgcccaccagtttctgcagaatgaatatgccctcagtctggtttcctgcaagctgggcaaagaccccaacacttacttcattgtgggcacagcaatggtgtatcctgaagaggcagagcccaagcagggtcgcattgtggtctttcagtattcggatggaaaactacagactgtggctgaaaaggaagtgaaaggggccgtgtactctatggtggaatttaacgggaagctgttagccagcatcaatagcacggtgcggctctatgagtggacaacagagaaggagctgcgcactgagtgcaaccactacaacaacatcatggccctctacctgaagaccaagggcgacttcatcctggtgggcgaccttatgcgctcagtgctgctgcttgcctacaagcccatggaaggaaactttgaagagattgctcgagactttaatcccaactggatgagtgctgtggaaatcttggatgatgacaattttctgggggctgaaaatgcctttaacttgtttgtgtgtcaaaaggatagcgctgccaccactgacgaggagcggcagcacctccaggaggttggtcttttccacctgggcgagtttgtcaatgtcttttgccacggctctctggtaatgcagaatctgggtgagacttccacccccacacaaggctcggtgctcttcggcacggtcaacggcatgatagggctggtgacctcactgtcagagagctggtacaacctcctgctggacatgcagaatcgactcaataaagtcatcaaaagtgtggggaagatcgagcactccttctggagatcctttcacaccgagcggaagacagaaccagccacaggtttcatcgacggtgacttgattgagagtttcctggatattagccgccccaagatgcaggaggtggtggcaaacctacagtatgacgatggcagcggtatgaagcgagaggccactgcagacgacctcatcaaggttgtggaggagctaactcggatccattagccaagggcagggggcccctttgctgaccctccccaaaggctttgccctgctgccctccccctcctctccaccatcgtcttcttggccatgggaggcctttccctaagccagctgcccccagagccacagttcccctatgtggaagtggggcgggcttcatagagacttgggaatgagctgaaggtgaaacattttctccctggatttttaccagtctcacatgattccagccatcaccttagaccaccaagccttgattggtgttgccagttgtcctccttccggggaaggattttgcagttctttggctgaaaggaagctgtgcgtgtgtgtgtgtgtatgtgtgtgtgtgtatgtgtatctcacactcatgcattgtcctctttttatttagattggcagtgtagggagttgtgggtagtggggaagagggttaggagggtttcattgtctgtgaagtgagaccttccttttacttttcttctattgcctctgagagcatcaggcctagaggcctgactgccaagccatgggtagcctgggtgtaaaacctggagatggtggatgatccccacgccacagcccttttgtctctgcaaactgccttcttcggaaagaagaaggtgggaggatgtgaattgttagtttctgagttttaccaaataaagtagaatataagaataagaagaaa

SEQ ID NO: 69707 - DNA, 3959 bp, Homo sapiens
agaggccaggtgaggccgtcccgtgatgccccgcgccccggccgctctggcctgcaacgtgtctctggggcggaggcagcggcagtggagttcgctgcgcgctgttgggggccacctgtcttttcgcttgtgtccctctttctagtgtcgcgctcgagtcccgacgggccgctccaagcctcgacatgtcgtacaactacgtggtaacggcccagaagcccaccgccgtgaacggctgcgtgaccggacactttacttcggccgaagacttaaacctgttgatcgcgataataaagaactcaaggccttcaacatccgcctggaggagctgcatgtcattgatgtcaagttcctatatggttgccaagcacctactatttgctttgtctaccaggaccctcaggggcggcacgtaaaaacctatgaggtgtctctccgagaaaaggaattcaataagggcccttggaaacaggaaaatgtcgaagctgaagcttccatggtgatcgcagtcccagagccctttgggggggccatcatcattggacaggagtcaatcacctatcacaatggtgacaaatacctggctattgcccctcctatcatcaagcaaagcacgattgtgtgccacaatcgagtggaccctaatggctcaagatacctgctgggagacatggaaggccggctcttcatgctgcttttggagaaggaggaacagatggatggcaccgtcactctcaaggatctccgtgtagaactccttggagagacctctattgctgagtgcttgacataccttgataatggtgttgtgtttgtcgggtctcgcctgggtgactcccagcttgtgaagctcaacgttgacagtaatgaacaaggctcctatgtagtggccatggaaacctttaccaacttaggacccattgtcgatatgtgcgtggtggacctggagaggcaggggcaggggcagctggtcacttgctctggggctttcaaggaaggttctttgcggatcatccggaatggaattggaatccacgagcatgccagcattgacttaccaggcatcaaaggattatggccactgcggtctgaccctaatcgtgagactgatgacactttggtgctctcttttgtgggccagacaagagttctcatgttaaatggagaggaggtagaagaaaccgaactgatgggtttcgtggatgatcagcagactttcttctgtggcaacgtggctcatcagcagcttatccagatcacttcagcatcggtgaggttggtctctcaagaacccaaagctctggtcagtgaatggaaggagcctcaggccaagaacatcagtgtggcctcctgcaatagcagccaggtggtggtggctgtaggcagggccctctactatctgcagatccatcctcaggagctccggcagatcagccacacagagatggaacatgaagtggcttgcttggacatcaccccattaggagacagcaatggactgtcccctctttgtgccattggcctctggacggacatctcggctcgtatcttgaagttgccctcttttgaactactgcacaaggagatgctgggtggagagatcattcctcgctccatcctgatgaccacctttgagagtagccattacctcctttgtgccttgggagatggagcgcttttctactttgggctcaacattgagacaggtctgttgagcgaccgtaagaaggtgactttgggcacccagcccaccgtattgaggacttttcgttctctttctaccaccaacgtctttgcttgttctgaccgccccactgtcatctatagcagcaaccacaaattggtcttctcaaatgtcaacctcaaggaagtgaactacatgtgtcccctcaattcagatggctatcctgacagcctggcgctggccaacaatagcaccctcaccattggcaccatcgatgagatccagaagctgcacattcgcacagttcccctctatgagtctccaaggaagatctgctaccaggaagtgtcccagtgtttcggggtcctctccagccgcattgaagtccaagacacgagtgggggcacgacagccttgaggcccagcgctagcacccaggctctgtccagcagtgtaagctccagcaagctgttctccagcagcactgctcctcatgagacctcctttggagaagaggtggaggtgcacaacctacttatcattgaccaacacacctttgaagtgcttcatgcccaccagtttctgcagaatgaatatgccctcagtctggtttcctgcaagctgggcaaagaccccaacacttacttcattgtgggcacagcaatggtgtatcctgaagaggcagagcccaagcagggtcgcattgtggtctttcagtattcggatggaaaactacagactgtggctgaaaaggaagtgaaaggggccgtgtactctatggtggaatttaacgggaagctgttagccagcatcaatagcacggtgcggctctatgagtggacaacagagaaggagctgcgcactgagtgcaaccactacaacaacatcatggccctctacctgaagaccaagggcgacttcatcctggtgggcgaccttatgcgctcagtgctgctgcttgcctacaagcccatggaaggaaactttgaagagattgctcgagactttaatcccaactggatgagtgctgtggaaatcttggatgatgacaattttctgggggctgaaaatgcctttaacttgtttgtgtgtcaaaaggatagcgctgccaccactgacgaggagcggcagcacctccaggaggttggtcttttccacctgggcgagtttgtcaatgtcttttgccacggctctctggtaatgcagaatctgggtgagacttccacccccacacaaggctcggtgctcttcggcacggtcaacggcatgatagggctggtgacctcactgtcagagagctggtacaacctcctgctggacatgcagaatcgactcaataaagtcatcaaaagtgtggggaagatcgagcactccttctggagatcctttcacaccgagcggaagacagaaccagccacaggtttcatcgacggtgacttgattgagagtttcctggatattagccgccccaagatgcaggaggtggtggcaaacctacagtatgacgatggcagcggtatgaagcgagaggccactgcagacgacctcatcaaggttgtggaggagctaactcggatccattagccaagggcagggggcccctttgctgaccctccccaaaggctttgccctgctgccctccccctcctctccaccatcgtcttcttggccatgggaggcctttccctaagccagctgcccccagagccacagttcccctatgtggaagtggggcgggcttcatagagacttgggaatgagctgaaggtgaaacattttctccctggatttttaccagtctcacatgattccagccatcaccttagaccaccaagccttgattggtgttgccagttgtcctccttccggggaaggattttgcagttctttggctgaaaggaagctgtgcgtgtgtgtgtgtgtatgtgtgtgtgtgtatgtgtatctcacactcatgcattgtcctctttttatttagattggcagtgtagggagttgtgggtagtggggaagagggttaggagggtttcattgtctgtgaagtgagaccttccttttacttttcttctattgcctctgagagcatcaggcctagaggcctgactgccaagccatgggtagcctgggtgtaaaacctggagatggtggatgatccccacgccacagcccttttgtctctgcaaactgccttcttcggaaagaagaaggtgggaggatgtgaattgttagtttctgagttttaccaaataaagtagaatataagaataagaagaaa

SEQ ID NO: 69708 - DNA, 3604 bp, Homo sapiens
gcctacggttcgatctttgcctatttgctttgtctacaggaccctcaggggcggcacgtaaaaacctatgaggtgtctctccgagaaaaggaattcaataagggcccttggaaacaggaaaatgtcgaagctgaagcttccatggtgatcgcagtcccagagccctttgggggggccatcatcattggacaggagtcaatcacctatcacaatggtgacaaatacctggctattgcccctcctatcatcaagcaaagcacgattgtgtgccacaatcgagtggaccctaatggctcaagatacctgctgggagacatggaaggccggctcttcatgctgcttttggagaaggaggaacagatggatggcaccgtcactctcaaggatctccgtgtagaactccttggagagacctctattgctgagtgcttgacataccttgataatggtgttgtgtttgtcgggtctcgcctgggtgactcccagcttgtgaagctcaacgttgacagtaatgaacaaggctcctatgtagtggccatggaaacctttaccaacttaggacccattgtcgatatgtgcgtggtggacctggagaggcaggggcaggggcagctggtcacttgctctggggctttcaaggaaggttctttgcggatcatccggaatggaattggaatccacgagcatgccagcattgacttaccaggcatcaaaggattatggccactgcggtctgaccctaatcgtgagactgatgacactttggtgctctcttttgtgggccagacaagagttctcatgttaaatggagaggaggtagaagaaaccgaactgatgggtttcgtggatgatcagcagactttcttctgtggcaacgtggctcatcagcagcttatccagatcacttcagcatcggtgaggttggtctctcaagaacccaaagctctggtcagtgaatggaaggagcctcaggccaagaacatcagtgtggcctcctgcaatagcagccaggtggtggtggctgtaggcagggccctctactatctgcagatccatcctcaggagctccggcagatcagccacacagagatggaacatgaagtggcttgcttggacatcaccccattaggagacagcaatggactgtcccctctttgtgccattggcctctggacggacatctcggctcgtatcttgaagttgccctcttttgaactactgcacaaggagatgctgggtggagagatcattcctcgctccatcctgatgaccacctttgagagtagccattacctcctttgtgccttgggagatggagcgcttttctactttgggctcaacattgagacaggtctgttgagcgaccgtaagaaggtgactttgggcacccagcccaccgtattgaggacttttcgttctctttctaccaccaacgtctttgcttgttctgaccgccccactgtcatctatagcagcaaccacaaattggtcttctcaaatgtcaacctcaaggaagtgaactacatgtgtcccctcaattcagatggctatcctgacagcctggcgctggccaacaatagcaccctcaccattggcaccatcgatgagatccagaagctgcacattcgcacagttcccctctatgagtctccaaggaagatctgctaccaggaagtgtcccagtgtttcggggtcctctccagccgcattgaagtccaagacacgagtgggggcacgacagccttgaggcccagcgctagcacccaggctctgtccagcagtgtaagctccagcaagctgttctccagcagcactgctcctcatgagacctcctttggagaagaggtggaggtgcacaacctacttatcattgaccaacacacctttgaagtgcttcatgcccaccagtttctgcagaatgaatatgccctcagtctggtttcctgcaagctgggcaaagaccccaacacttacttcattgtgggcacagcaatggtgtatcctgaagaggcagagcccaagcagggtcgcattgtggtctttcagtattcggatggaaaactacagactgtggctgaaaaggaagtgaaaggggccgtgtactctatggtggaatttaacgggaagctgttagccagcatcaatagcacggtgcggctctatgagtggacaacagagaaggagctgcgcactgagtgcaaccactacaacaacatcatggccctctacctgaagaccaagggcgacttcatcctggtgggcgaccttatgcgctcagtgctgctgcttgcctacaagcccatggaaggaaactttgaagagattgctcgagactttaatcccaactggatgagtgctgtggaaatcttggatgatgacaattttctgggggctgaaaatgcctttaacttgtttgtgtgtcaaaaggatagcgctgccaccactgacgaggagcggcagcacctccaggaggttggtcttttccacctgggcgagtttgtcaatgtcttttgccacggctctctggtaatgcagaatctgggtgagacttccacccccacacaaggctcggtgctcttcggcacggtcaacggcatgatagggctggtgacctcactgtcagagagctggtacaacctcctgctggacatgcagaatcgactcaataaagtcatcaaaagtgtggggaagatcgagcactccttctggagatcctttcacaccgagcggaagacagaaccagccacaggtttcatcgacggtgacttgattgagagtttcctggatattagccgccccaagatgcaggaggtggtggcaaacctacagtatgacgatggcagcggtatgaagcgagaggccactgcagacgacctcatcaaggttgtggaggagctaactcggatccattagccaagggcagggggcccctttgctgaccctccccaaaggctttgccctgctgccctccccctcctctccaccatcgtcttcttggccatgggaggcctttccctaagccagctgcccccagagccacagttcccctatgtggaagtggggcgggcttcatagagacttgggaatgagctgaaggtgaaacattttctccctggatttttaccagtctcacatgattccagccatcaccttagaccaccaagccttgattggtgttgccagttgtcctccttccggggaaggattttgcagttctttggctgaaaggaagctgtgcgtgtgtgtgtgtgtatgtgtgtgtgtgtatgtgtatctcacactcatgcattgtcctctttttatttagattggcagtgtagggagttgtgggtagtggggaagagggttaggagggtttcattgtctgtgaagtgagaccttccttttacttttcttctattgcctctgagagcatcaggcctagaggcctgactgccaagccatgggtagcctgggtgtaaaacctggagatggtggatgatccccacgccacagcccttttgtctctgcaaactgccttcttcggaaagaagaaggtgggaggatgtgaattgttagtttctgagttttaccaaataaagtagaatataagaataagaagaaa

SEQ ID NO: 69709 - DNA, 3013 bp, Homo sapiens
ttcgggcacaggagggggcgcctggtcacttgctctggggctttcaaggaaggttctttgcggatcatccggaatggaattggaatccacgagcatgccagcattgacttaccaggcatcaaaggattatggccactgcggtctgaccctaatcgtgagactgatgacactttggtgctctcttttgtgggccagacaagagttctcatgttaaatggagaggaggtagaagaaaccgaactgatgggtttcgtggatgatcagcagactttcttctgtggcaacgtggctcatcagcagcttatccagatcacttcagcatcggtgaggttggtctctcaagaacccaaagctctggtcagtgaatggaaggagcctcaggccaagaacatcagtgtggcctcctgcaatagcagccaggtggtggtggctgtaggcagggccctctactatctgcagatccatcctcaggagctccggcagatcagccacacagagatggaacatgaagtggcttgcttggacatcaccccattaggagacagcaatggactgtcccctctttgtgccattggcctctggacggacatctcggctcgtatcttgaagttgccctcttttgaactactgcacaaggagatgctgggtggagagatcattcctcgctccatcctgatgaccacctttgagagtagccattacctcctttgtgccttgggagatggagcgcttttctactttgggctcaacattgagacaggtctgttgagcgaccgtaagaaggtgactttgggcacccagcccaccgtattgaggacttttcgttctctttctaccaccaacgtctttgcttgttctgaccgccccactgtcatctatagcagcaaccacaaattggtcttctcaaatgtcaacctcaaggaagtgaactacatgtgtcccctcaattcagatggctatcctgacagcctggcgctggccaacaatagcaccctcaccattggcaccatcgatgagatccagaagctgcacattcgcacagttcccctctatgagtctccaaggaagatctgctaccaggaagtgtcccagtgtttcggggtcctctccagccgcattgaagtccaagacacgagtgggggcacgacagccttgaggcccagcgctagcacccaggctctgtccagcagtgtaagctccagcaagctgttctccagcagcactgctcctcatgagacctcctttggagaagaggtggaggtgcacaacctacttatcattgaccaacacacctttgaagtgcttcatgcccaccagtttctgcagaatgaatatgccctcagtctggtttcctgcaagctgggcaaagaccccaacacttacttcattgtgggcacagcaatggtgtatcctgaagaggcagagcccaagcagggtcgcattgtggtctttcagtattcggatggaaaactacagactgtggctgaaaaggaagtgaaaggggccgtgtactctatggtggaatttaacgggaagctgttagccagcatcaatagcacggtgcggctctatgagtggacaacagagaaggagctgcgcactgagtgcaaccactacaacaacatcatggccctctacctgaagaccaagggcgacttcatcctggtgggcgaccttatgcgctcagtgctgctgcttgcctacaagcccatggaaggaaactttgaagagattgctcgagactttaatcccaactggatgagtgctgtggaaatcttggatgatgacaattttctgggggctgaaaatgcctttaacttgtttgtgtgtcaaaaggatagcgctgccaccactgacgaggagcggcagcacctccaggaggttggtcttttccacctgggcgagtttgtcaatgtcttttgccacggctctctggtaatgcagaatctgggtgagacttccacccccacacaaggctcggtgctcttcggcacggtcaacggcatgatagggctggtgacctcactgtcagagagctggtacaacctcctgctggacatgcagaatcgactcaataaagtcatcaaaagtgtggggaagatcgagcactccttctggagatcctttcacaccgagcggaagacagaaccagccacaggtttcatcgacggtgacttgattgagagtttcctggatattagccgccccaagatgcaggaggtggtggcaaacctacagtatgacgatggcagcggtatgaagcgagaggccactgcagacgacctcatcaaggttgtggaggagctaactcggatccattagccaagggcagggggcccctttgctgaccctccccaaaggctttgccctgctgccctccccctcctctccaccatcgtcttcttggccatgggaggcctttccctaagccagctgcccccagagccacagttcccctatgtggaagtggggcgggcttcatagagacttgggaatgagctgaaggtgaaacattttctccctggatttttaccagtctcacatgattccagccatcaccttagaccaccaagccttgattggtgttgccagttgtcctccttccggggaaggattttgcagttctttggctgaaaggaagctgtgcgtgtgtgtgtgtgtatgtgtgtgtgtgtatgtgtatctcacactcatgcattgtcctctttttatttagattggcagtgtagggagttgtgggtagtggggaagagggttaggagggtttcattgtctgtgaagtgagaccttccttttacttttcttctattgcctctgagagcatcaggcctagaggcctgactgccaagccatgggtagcctgggtgtaaaacctggagatggtggatgatccccacgccacagcccttttgtctctgcaaactgccttcttcggaaagaagaaggtgggaggatgtgaattgttagtttctgagttttaccaaataaagtagaatataagaataagaagaaa

SEQ ID NO: 69710 - DNA, 2804 bp, Homo sapiens
gccggggttgatggcgagggggtcgtggatgatcagcagactttcttctgtggcaacgtggctcatcagcagcttatccagtcatcagcagcttatccagatcacttcagcatcggtgaggttggtctctcaagaacccaaagctctggtcagtgaatggaaggagcctcaggccaagaacatcagtgtggcctcctgcaatagcagccaggtggtggtggctgtaggcagggccctctactatctgcagatccatcctcaggagctccggcagatcagccacacagagatggaacatgaagtggcttgcttggacatcaccccattaggagacagcaatggactgtcccctctttgtgccattggcctctggacggacatctcggctcgtatcttgaagttgccctcttttgaactactgcacaaggagatgctgggtggagagatcattcctcgctccatcctgatgaccacctttgagagtagccattacctcctttgtgccttgggagatggagcgcttttctactttgggctcaacattgagacaggtctgttgagcgaccgtaagaaggtgactttgggcacccagcccaccgtattgaggacttttcgttctctttctaccaccaacgtctttgcttgttctgaccgccccactgtcatctatagcagcaaccacaaattggtcttctcaaatgtcaacctcaaggaagtgaactacatgtgtcccctcaattcagatggctatcctgacagcctggcgctggccaacaatagcaccctcaccattggcaccatcgatgagatccagaagctgcacattcgcacagttcccctctatgagtctccaaggaagatctgctaccaggaagtgtcccagtgtttcggggtcctctccagccgcattgaagtccaagacacgagtgggggcacgacagccttgaggcccagcgctagcacccaggctctgtccagcagtgtaagctccagcaagctgttctccagcagcactgctcctcatgagacctcctttggagaagaggtggaggtgcacaacctacttatcattgaccaacacacctttgaagtgcttcatgcccaccagtttctgcagaatgaatatgccctcagtctggtttcctgcaagctgggcaaagaccccaacacttacttcattgtgggcacagcaatggtgtatcctgaagaggcagagcccaagcagggtcgcattgtggtctttcagtattcggatggaaaactacagactgtggctgaaaaggaagtgaaaggggccgtgtactctatggtggaatttaacgggaagctgttagccagcatcaatagcacggtgcggctctatgagtggacaacagagaaggagctgcgcactgagtgcaaccactacaacaacatcatggccctctacctgaagaccaagggcgacttcatcctggtgggcgaccttatgcgctcagtgctgctgcttgcctacaagcccatggaaggaaactttgaagagattgctcgagactttaatcccaactggatgagtgctgtggaaatcttggatgatgacaattttctgggggctgaaaatgcctttaacttgtttgtgtgtcaaaaggatagcgctgccaccactgacgaggagcggcagcacctccaggaggttggtcttttccacctgggcgagtttgtcaatgtcttttgccacggctctctggtaatgcagaatctgggtgagacttccacccccacacaaggctcggtgctcttcggcacggtcaacggcatgatagggctggtgacctcactgtcagagagctggtacaacctcctgctggacatgcagaatcgactcaataaagtcatcaaaagtgtggggaagatcgagcactccttctggagatcctttcacaccgagcggaagacagaaccagccacaggtttcatcgacggtgacttgattgagagtttcctggatattagccgccccaagatgcaggaggtggtggcaaacctacagtatgacgatggcagcggtatgaagcgagaggccactgcagacgacctcatcaaggttgtggaggagctaactcggatccattagccaagggcagggggcccctttgctgaccctccccaaaggctttgccctgctgccctccccctcctctccaccatcgtcttcttggccatgggaggcctttccctaagccagctgcccccagagccacagttcccctatgtggaagtggggcgggcttcatagagacttgggaatgagctgaaggtgaaacattttctccctggatttttaccagtctcacatgattccagccatcaccttagaccaccaagccttgattggtgttgccagttgtcctccttccggggaaggattttgcagttctttggctgaaaggaagctgtgcgtgtgtgtgtgtgtatgtgtgtgtgtgtatgtgtatctcacactcatgcattgtcctctttttatttagattggcagtgtagggagttgtgggtagtggggaagagggttaggagggtttcattgtctgtgaagtgagaccttccttttacttttcttctattgcctctgagagcatcaggcctagaggcctgactgccaagccatgggtagcctgggtgtaaaacctggagatggtggatgatccccacgccacagcccttttgtctctgcaaactgccttcttcggaaagaagaaggtgggaggatgtgaattgttagtttctgagttttaccaaataaagtagaatataagaataagaagaaa

SEQ ID NO: 69711 - DNA, 4275 bp, Homo sapiens
agaggccaggtgaggccgtcccgtgatgccccgcgccccggccgctctggcctgcaacgtgtctctggggcggaggcagcggcagtggagttcgctgcgcgctgttgggggccacctgtcttttcgcttgtgtccctctttctagtgtcgcgctcgagtcccgacgggccgctccaagcctcgacatgtcgtacaactacgtggtaacggcccagaagcccaccgccgtgaacggctgcgtgaccggacactttacttcggccgaagacttaaacctgttgattgccaaaaacacgagattagagatctatgtggtcaccgccgaggggcttcggcccgtcaaagaggtgggcatgtatgggaagattgcggtcatggagcttttcaggcccaagggggagagcaaggacctgctgtttatcttgacagcgaagtacaatgcctgcatcctggagtataaacagagtggcgagagcattgacatcattacgcgagcccatggcaatgtccaggaccgcattggccgcccctcagagaccggcattattggcatcattgaccctgagtgccggatgattggcctgcgtctctatgatggccttttcaaggttattccactagatcgcgataataaagaactcaaggccttcaacatccgcctggaggagctgcatgtcattgatgtcaagttcctatatggttgccaagcacctactatttgctttgtctaccaggaccctcaggggcggcacgtaaaaacctatgaggtgtctctccgagaaaaggaattcaataagggcccttggaaacaggaaaatgtcgaagctgaagcttccatggtgatcgcagtcccagagccctttgggggggccatcatcattggacaggagtcaatcacctatcacaatggtgacaaatacctggctattgcccctcctatcatcaagcaaagcacgattgtgtgccacaatcgagtggaccctaatggctcaagatacctgctgggagacatggaaggccggctcttcatgctgcttttggagaaggaggaacagatggatggcaccgtcactctcaaggatctccgtgtagaactccttggagagacctctattgctgagtgcttgacataccttgataatggtgttgtgtttgtcgggtctcgcctgggtgactcccagcttgtgaagctcaacgttgacagtaatgaacaaggctcctatgtagtggccatggaaacctttaccaacttaggacccattgtcgatatgtgcgtggtggacctggagaggcaggggcaggggcagctggtcacttgctctggggctttcaaggaaggttctttgcggatcatccggaatggaattggaatccacgagcatgccagcattgacttaccaggcatcaaaggattatggccactgcggtctgaccctaatcgtgagactgatgacactttggtgctctcttttgtgggccagacaagagttctcatgttaaatggagaggaggtagaagaaaccgaactgatgggtttcgtggatgatcagcagactttcttctgtggcaacgtggctcatcagcagcttatccagatcacttcagcatcggtgaggttggtctctcaagaacccaaagctctggtcagtgaatggaaggagcctcaggccaagaacatcagtgtggcctcctgcaatagcagccaggtggtggtggctgtaggcagggccctctactatctgcagatccatcctcaggagctccggcagatcagccacacagagatggaacatgaagtggcttgcttggacatcaccccattaggagacagcaatggactgtcccctctttgtgccattggcctctggacggacatctcggctcgtatcttgaagttgccctcttttgaactactgcacaaggagatgctgggtggagagatcattcctcgctccatcctgatgaccacctttgagagtagccattacctcctttgtgccttgggagatggagcgcttttctactttgggctcaacattgagacaggtctgttgagcgaccgtaagaaggtgactttgggcacccagcccaccgtattgaggacttttcgttctctttctaccaccaacgtctttgcttgttctgaccgccccactgtcatctatagcagcaaccacaaattggtcttctcaaatgtcaacctcaaggaagtgaactacatgtgtcccctcaattcagatggctatcctgacagcctggcgctggccaacaatagcaccctcaccattggcaccatcgatgagatccagaagctgcacattcgcacagttcccctctatgagtctccaaggaagatctgctaccaggaagtgtcccagtgtttcggggtcctctccagccgcattgaagtccaagacacgagtgggggcacgacagccttgaggcccagcgctagcacccaggctctgtccagcagtgtaagctccagcaagctgttctccagcagcactgctcctcatgagacctcctttggagaagaggtggaggtgcacaacctacttatcattgaccaacacacctttgaagtgcttcatgcccaccagtttctgcagaatgaatatgccctcagtctggtttcctgcaagctgggcaaagaccccaacacttacttcattgtgggcacagcaatggtgtatcctgaagaggcagagcccaagcagggtcgcattgtggtctttcagtattcggatggaaaactacagactgtggctgaaaaggaagtgaaaggggccgtgtactctatggtggaatttaacgggaagctgttagccagcatcaatagcacggtgcggctctatgagtggacaacagagaaggagctgcgcactgagtgcaaccactacaacaacatcatggccctctacctgaagaccaagggcgacttcatcctggtgggcgaccttatgcgctcagtgctgctgcttgcctacaagcccatggaaggaaactttgaagagattgctcgagactttaatcccaactggatgagtgctgtggaaatcttggatgatgacaattttctgggggctgaaaatgcctttaacttgtttgtgtgtcaaaaggatagcgctgccaccactgacgaggagcggcagcacctccaggaggttggtcttttccacctgggcgagtttgtcaatgtcttttgccacggctctctggtaatgcagaatctgggtgagacttccacccccacacaaggctcggtgctcttcggcacggtcaacggcatgatagggctggtgacctcactgtcagagagctggtacaacctcctgctggacatgcagaatcgactcaataaagtcatcaaaagtgtggggaagatcgagcactccttctggagatcctttcacaccgagcggaagacagaaccagccacaggtttcatcgacggtgacttgattgagagtttcctggatattagccgccccaagatgcaggaggtggtggcaaacctacagtatgacgatggcagcggtatgaagcgagaggccactgcagacgacctcatcaaggttgtggaggagctaactcggatccattagccaagggcagggggcccctttgctgaccctccccaaaggctttgccctgctgccctccccctcctctccaccatcgtcttcttggccatgggaggcctttccctaagccagctgcccccagagccacagttcccctatgtggaagtggggcgggcttcatagagacttgggaatgagctgaaggtgaaacattttctccctggatttttaccagtctcacatgattccagccatcaccttagaccaccaagccttgattggtgttgccagttgtcctccttccggggaaggattttgcagttctttggctgaaaggaagctgtgcgtgtgtgtgtgtgtatgtgtgtgtgtgtatgtgtatctcacactcatgcattgtcctctttttatttagattggcagtgtagggagttgtgggtagtggggaagagggttaggagggtttcattgtctgtgaagtgagaccttccttttacttttcttctattgcctctgagagcatcaggcctagaggcctgactgccaagccatgggtagcctgggtgtaaaacctggagatggtggatgatccccacgccacagcccttttgtctctgcggcgtactcggacagacaacgggcacggctgccatggcagtccggatctcccaaacagacacaccgcccc

SEQ ID NO: 69712 - DNA, 4345 bp, Homo sapiens
agaggccaggtgaggccgtcccgtgatgccccgcgccccggccgctctggcctgcaacgtgtctctggggcggaggcagcggcagtggagttcgctgcgcgctgttgggggccacctgtcttttcgcttgtgtccctctttctagtgtcgcgctcgagtcccgacgggccgctccaagcctcgacatgtcgtacaactacgtggtaacggcccagaagcccaccgccgtgaacggctgcgtgaccggacactttacttcggccgaagacttaaacctgttgattgccaaaaacacgagattagagatctatgtggtcaccgccgaggggcttcggcccgtcaaagaggtgggcatgtatgggaagattgcggtcatggagcttttcaggcccaagggggagagcaaggacctgctgtttatcttgacagcgaagtacaatgcctgcatcctggagtataaacagagtggcgagagcattgacatcattacgcgagcccatggcaatgtccaggaccgcattggccgcccctcagagaccggcattattggcatcattgaccctgagtgccggatgattggcctgcgtctctatgatggccttttcaaggttattccactagatcgcgataataaagaactcaaggccttcaacatccgcctggaggagctgcatgtcattgatgtcaagttcctatatggttgccaagcacctactatttgctttgtctaccaggaccctcaggggcggcacgtaaaaacctatgaggtgtctctccgagaaaaggaattcaataagggcccttggaaacaggaaaatgtcgaagctgaagcttccatggtgatcgcagtcccagagccctttgggggggccatcatcattggacaggagtcaatcacctatcacaatggtgacaaatacctggctattgcccctcctatcatcaagcaaagcacgattgtgtgccacaatcgagtggaccctaatggctcaagatacctgctgggagacatggaaggccggctcttcatgctgcttttggagaaggaggaacagatggatggcaccgtcactctcaaggatctccgtgtagaactccttggagagacctctattgctgagtgcttgacataccttgataatggtgttgtgtttgtcgggtctcgcctgggtgactcccagcttgtgaagctcaacgttgacagtaatgaacaaggctcctatgtagtggccatggaaacctttaccaacttaggacccattgtcgatatgtgcgtggtggacctggagaggcaggggcaggggcagctggtcacttgctctggggctttcaaggaaggttctttgcggatcatccggaatggaattggaatccacgagcatgccagcattgacttaccaggcatcaaaggattatggccactgcggtctgaccctaatcgtgagactgatgacactttggtgctctcttttgtgggccagacaagagttctcatgttaaatggagaggaggtagaagaaaccgaactgatgggtttcgtggatgatcagcagactttcttctgtggcaacgtggctcatcagcagcttatccagatcacttcagcatcggtgaggttggtctctcaagaacccaaagctctggtcagtgaatggaaggagcctcaggccaagaacatcagtgtggcctcctgcaatagcagccaggtggtggtggctgtaggcagggccctctactatctgcagatccatcctcaggagctccggcagatcagccacacagagatggaacatgaagtggcttgcttggacatcaccccattaggagacagcaatggactgtcccctctttgtgccattggcctctggacggacatctcggctcgtatcttgaagttgccctcttttgaactactgcacaaggagatgctgggtggagagatcattcctcgctccatcctgatgaccacctttgagagtagccattacctcctttgtgccttgggagatggagcgcttttctactttgggctcaacattgagacaggtctgttgagcgaccgtaagaaggtgactttgggcacccagcccaccgtattgaggacttttcgttctctttctaccaccaacgtctttgcttgttctgaccgccccactgtcatctatagcagcaaccacaaattggtcttctcaaatgtcaacctcaaggaagtgaactacatgtgtcccctcaattcagatggctatcctgacagcctggcgctggccaacaatagcaccctcaccattggcaccatcgatgagatccagaagctgcacattcgcacagttcccctctatgagtctccaaggaagatctgctaccaggaagtgtcccagtgtttcggggtcctctccagccgcattgaagtccaagacacgagtgggggcacgacagccttgaggcccagcgctagcacccaggctctgtccagcagtgtaagctccagcaagctgttctccagcagcactgctcctcatgagacctcctttggagaagaggtggaggtgcacaacctacttatcattgaccaacacacctttgaagtgcttcatgcccaccagtttctgcagaatgaatatgccctcagtctggtttcctgcaagctgggcaaagaccccaacacttacttcattgtgggcacagcaatggtgtatcctgaagaggcagagcccaagcagggtcgcattgtggtctttcagtattcggatggaaaactacagactgtggctgaaaaggaagtgaaaggggccgtgtactctatggtggaatttaacgggaagctgttagccagcatcaatagcacggtgcggctctatgagtggacaacagagaaggagctgcgcactgagtgcaaccactacaacaacatcatggccctctacctgaagaccaagggcgacttcatcctggtgggcgaccttatgcgctcagtgctgctgcttgcctacaagcccatggaaggaaactttgaagagattgctcgagactttaatcccaactggatgagtgctgtggaaatcttggatgatgacaattttctgggggctgaaaatgcctttaacttgtttgtgtgtcaaaaggatagcgctgccaccactgacgaggagcggcagcacctccaggaggttggtcttttccacctgggcgagtttgtcaatgtcttttgccacggctctctggtaatgcagaatctgggtgagacttccacccccacacaaggctcggtgctcttcggcacggtcaacggcatgatagggctggtgacctcactgtcagagagctggtacaacctcctgctggacatgcagaatcgactcaataaagtcatcaaaagtgtggggaagatcgagcactccttctggagatcctttcacaccgagcggaagacagaaccagccacaggtttcatcgacggtgacttgattgagagtttcctggatattagccgccccaagatgcaggaggtggtggcaaacctacagtatgacgatggcagcggtatgaagcgagaggccactgcagacgacctcatcaaggttgtggaggagctaactcggatccattagccaagggcagggggcccctttgctgaccctccccaaaggctttgccctgctgccctccccctcctctccaccatcgtcttcttggccatgggaggcctttccctaagccagctgcccccagagccacagttcccctatgtggaagtggggcgggcttcatagagacttgggaatgagctgaaggtgaaacattttctccctggatttttaccagtctcacatgattccagccatcaccttagaccaccaagccttgattggtgttgccagttgtcctccttccggggaaggattttgcagttctttggctgaaaggaagctgtgcgtgtgtgtgtgtgtatgtgtgtgtgtgtatgtgtatctcacactcatgcattgtcctctttttatttagattggcagtgtagggagttgtgggtagtggggaagagggttaggagggtttcattgtctgtgaagtgagaccttccttttacttttcttctattgcctctgagagcatcaggcctagaggcctgactgccaagccatgggtagcctgggtgtaaaacctggagatggtggatgatccccacgccacagcccttttgtctctgcgagctgccttttttggttagcgtgagttgtgttttctgtggtctgggcgttctgcactcctctcctcgtcccctgggttgtgtttgtatattaaatgtgctgttcttgtgttgtgtgttgtgtcgtggtgcgtgtgtctc

SEQ ID NO: 69713 - DNA, 4222 bp, Homo sapiens
agaggccaggtgaggccgtcccgtgatgccccgcgccccggccgctctggcctgcaacgtgtctctggggcggaggcagcggcagtggagttcgctgcgcgctgttgggggccacctgtcttttcgcttgtgtccctctttctagtgtcgcgctcgagtcccgacgggccgctccaagcctcgacatgtcgtacaactacgtggtaacggcccagaagcccaccgccgtgaacggctgcgtgaccggacactttacttcggccgaagacttaaacctgttgattgccaaaaacacgagattagagatctatgtggtcaccgccgaggggcttcggcccgtcaaagaggtgggcatgtatgggaagattgcggtcatggagcttttcaggcccaagggggagagcaaggacctgctgtttatcttgacagcgaagtacaatgcctgcatcctggagtataaacagagtggcgagagcattgacatcattacgcgagcccatggcaatgtccaggaccgcattggccgcccctcagagaccggcattattggcatcattgaccctgagtgccggatgattggcctgcgtctctatgatggccttttcaaggttattccactagatcgcgataataaagaactcaaggccttcaacatccgcctggaggagctgcatgtcattgatgtcaagttcctatatggttgccaagcacctactatttgctttgtctaccaggaccctcaggggcggcacgtaaaaacctatgaggtgtctctccgagaaaaggaattcaataagggcccttggaaacaggaaaatgtcgaagctgaagcttccatggtgatcgcagtcccagagccctttgggggggccatcatcattggacaggagtcaatcacctatcacaatggtgacaaatacctggctattgcccctcctatcatcaagcaaagcacgattgtgtgccacaatcgagtggaccctaatggctcaagatacctgctgggagacatggaaggccggctcttcatgctgcttttggagaaggaggaacagatggatggcaccgtcactctcaaggatctccgtgtagaactccttggagagacctctattgctgagtgcttgacataccttgataatggtgttgtgtttgtcgggtctcgcctgggtgactcccagcttgtgaagctcaacgttgacagtaatgaacaaggctcctatgtagtggccatggaaacctttaccaacttaggacccattgtcgatatgtgcgtggtggacctggagaggcaggggcaggggcagctggtcacttgctctggggctttcaaggaaggttctttgcggatcatccggaatggaattggaatccacgagcatgccagcattgacttaccaggcatcaaaggattatggccactgcggtctgaccctaatcgtgagactgatgacactttggtgctctcttttgtgggccagacaagagttctcatgttaaatggagaggaggtagaagaaaccgaactgatgggtttcgtggatgatcagcagactttcttctgtggcaacgtggctcatcagcagcttatccagatcacttcagcatcggtgaggttggtctctcaagaacccaaagctctggtcagtgaatggaaggagcctcaggccaagaacatcagtgtggcctcctgcaatagcagccaggtggtggtggctgtaggcagggccctctactatctgcagatccatcctcaggagctccggcagatcagccacacagagatggaacatgaagtggcttgcttggacatcaccccattaggagacagcaatggactgtcccctctttgtgccattggcctctggacggacatctcggctcgtatcttgaagttgccctcttttgaactactgcacaaggagatgctgggtggagagatcattcctcgctccatcctgatgaccacctttgagagtagccattacctcctttgtgccttgggagatggagcgcttttctactttgggctcaacattgagacaggtctgttgagcgaccgtaagaaggtgactttgggcacccagcccaccgtattgaggacttttcgttctctttctaccaccaacgtctttgcttgttctgaccgccccactgtcatctatagcagcaaccacaaattggtcttctcaaatgtcaacctcaaggaagtgaactacatgtgtcccctcaattcagatggctatcctgacagcctggcgctggccaacaatagcaccctcaccattggcaccatcgatgagatccagaagctgcacattcgcacagttcccctctatgagtctccaaggaagatctgctaccaggaagtgtcccagtgtttcggggtcctctccagccgcattgaagtccaagacacgagtgggggcacgacagccttgaggcccagcgctagcacccaggctctgtccagcagtgtaagctccagcaagctgttctccagcagcactgctcctcatgagacctcctttggagaagaggtggaggtgcacaacctacttatcattgaccaacacacctttgaagacttacttcattgtgggcacagcaatggtgtatcctgaagaggcagagcccaagcagggtcgcattgtggtctttcagtattcggatggaaaactacagactgtggctgaaaaggaagtgaaaggggccgtgtactctatggtggaatttaacgggaagctgttagccagcatcaatagcacggtgcggctctatgagtggacaacagagaaggagctgcgcactgagtgcaaccactacaacaacatcatggccctctacctgaagaccaagggcgacttcatcctggtgggcgaccttatgcgctcagtgctgctgcttgcctacaagcccatggaaggaaactttgaagagattgctcgagactttaatcccaactggatgagtgctgtggaaatcttggatgatgacaattttctgggggctgaaaatgcctttaacttgtttgtgtgtcaaaaggatagcgctgccaccactgacgaggagcggcagcacctccaggaggttggtcttttccacctgggcgagtttgtcaatgtcttttgccacggctctctggtaatgcagaatctgggtgagacttccacccccacacaaggctcggtgctcttcggcacggtcaacggcatgatagggctggtgacctcactgtcagagagctggtacaacctcctgctggacatgcagaatcgactcaataaagtcatcaaaagtgtggggaagatcgagcactccttctggagatcctttcacaccgagcggaagacagaaccagccacaggtttcatcgacggtgacttgattgagagtttcctggatattagccgccccaagatgcaggaggtggtggcaaacctacagtatgacgatggcagcggtatgaagcgagaggccactgcagacgacctcatcaaggttgtggaggagctaactcggatccattagccaagggcagggggcccctttgctgaccctccccaaaggctttgccctgctgccctccccctcctctccaccatcgtcttcttggccatgggaggcctttccctaagccagctgcccccagagccacagttcccctatgtggaagtggggcgggcttcatagagacttgggaatgagctgaaggtgaaacattttctccctggatttttaccagtctcacatgattccagccatcaccttagaccaccaagccttgattggtgttgccagttgtcctccttccggggaaggattttgcagttctttggctgaaaggaagctgtgcgtgtgtgtgtgtgtatgtgtgtgtgtgtatgtgtatctcacactcatgcattgtcctctttttatttagattggcagtgtagggagttgtgggtagtggggaagagggttaggagggtttcattgtctgtgaagtgagaccttccttttacttttcttctattgcctctgagagcatcaggcctagaggcctgactgccaagccatgggtagcctgggtgtaaaacctggagatggtggatgatccccacgccacagcccttttgtctctgcaaactgccttcttcggaaagaagaaggtgggaggatgtgaattgttagtttctgagttttaccaaataaagtagaatataagaataagaagaaa

SEQ ID NO: 69714 - DNA, 4379 bp, Homo sapiens
agaggccaggtgaggccgtcccgtgatgccccgcgccccggccgctctggcctgcaacgtgtctctggggcggaggcagcggcagtggagttcgctgcgcgctgttgggggccacctgtcttttcgcttgtgtccctctttctagtgtcgcgctcgagtcccgacgggccgctccaagcctcgacatgtcgtacaactacgtggtaacggcccagaagcccaccgccgtgaacggctgcgtgaccggacactttacttcggccgaagacttaaacctgttgattgccaaaaacacgagattagagatctatgtggtcaccgccgaggggcttcggcccgtcaaagaggtgggcatgtatgggaagattgcggtcatggagcttttcaggcccaagggggagagcaaggacctgctgtttatcttgacagcgaagtacaatgcctgcatcctggagtataaacagagtggcgagagcattgacatcattacgcgagcccatggcaatgtccaggaccgcattggccgcccctcagagaccggcattattggcatcattgaccctgagtgccggatgattggcctgcgtctctatgatggccttttcaaggttattccactagatcgcgataataaagaactcaaggccttcaacatccgcctggaggagctgcatgtcattgatgtcaagttcctatatggttgccaagcacctactatttgctttgtctaccaggaccctcaggggcggcacgtaaaaacctatgaggtgtctctccgagaaaaggaattcaataagggcccttggaaacaggaaaatgtcgaagctgaagcttccatggtgatcgcagtcccagagccctttgggggggccatcatcattggacaggagtcaatcacctatcacaatggtgacaaatacctggctattgcccctcctatcatcaagcaaagcacgattgtgtgccacaatcgagtggaccctaatggctcaagatacctgctgggagacatggaaggccggctcttcatgctgcttttggagaaggaggaacagatggatggcaccgtcactctcaaggatctccgtgtagaactccttggagagacctctattgctgagtgcttgacataccttgataatggtgttgtgtttgtcgggtctcgcctgggtgactcccagcttgtgaagctcaacgttgacagtaatgaacaaggctcctatgtagtggccatggaaacctttaccaacttaggacccattgtcgatatgtgcgtggtggacctggagaggcaggggcaggggcagctggtcacttgctctggggctttcaaggaaggttctttgcggatcatccggaatggaattggaatccacgagcatgccagcattgacttaccaggcatcaaaggattatggccactgcggtctgaccctaatcgtgagactgatgacactttggtgctctcttttgtgggccagacaagagttctcatgttaaatggagaggaggtagaagaaaccgaactgatgggtttcgtggatgatcagcagactttcttctgtggcaacgtggctcatcagcagcttatccagatcacttcagcatcggtgaggttggtctctcaagaacccaaagctctggtcagtgaatggaaggagcctcaggccaagaacatcagtgtggcctcctgcaatagcagccaggtggtggtggctgtaggcagggccctctactatctgcagatccatcctcaggagctccggcagatcagccacacagagatggaacatgaagtggcttgcttggacatcaccccattaggagacagcaatggactgtcccctctttgtgccattggcctctggacggacatctcggctcgtatcttgaagttgccctcttttgaactactgcacaaggagatgctgggtggagagatcattcctcgctccatcctgatgaccacctttgagagtagccattacctcctttgtgccttgggagatggagcgcttttctactttgggctcaacattgagacaggtctgttgagcgaccgtaagaaggtgactttgggcacccagcccaccgtattgaggacttttcgttctctttctaccaccaacgtctttgcttgttctgaccgccccactgtcatctatagcagcaaccacaaattggtcttctcaaatgtcaacctcaaggaagtgaactacatgtgtcccctcaattcagatggctatcctgacagcctggcgctggccaacaatagcaccctcaccattggcaccatcgatgagatccagaagctgcacattcgcacagttcccctctatgagtctccaaggaagatctgctaccaggaagtgtcccagtgtttcggggtcctctccagccgcattgaagtccaagacacgagtgggggcacgacagccttgaggcccagcgctagcacccaggctctgtccagcagtgtaagctccagcaagctgttctccagcagcactgctcctcatgagacctcctttggagaagaggtggaggtgcacaacctacttatcattgaccaacacacctttgaagtgcttcatgcccaccagtttctgcagaatgaatatgccctcagtctggtttcctgcaagctgggcaaagaccccaacacttacttcattgtgggcacagcaatggtgtatcctgaagaggcagagcccaagcagggtcgcattgtggtctttcagtattcggatggaaaactacagactgtggctgaaaaggaagtgaaaggggccgtgtactctatggtggaatttaacgggaagctgttagccagcatcaatagcacggtgcggctctatgagtggacaacagagaaggagctgcgcactgagtgcaaccactacaacaacatcatggccctctacctgaagaccaagggcgacttcatcctggtgggcgaccttatgcgctcagtgctgctgcttgcctacaagcccatggaaggaaactttgaagagattgctcgagactttaatcccaactggatgagtgctgtggaaatcttggatgatgacaattttctgggggctgaaaatgcctttaacttgtttgtgtgtcaaaaggatagcgctgccaccactgacgaggagcggcagcacctccaggaggttggtcttttccacctgggcgagtttgtcaatgtcttttgccacggctctctggtaatgcagaatctgggtgagacttccacccccacacaaggctcggtgctcttcggcacggtcaacggcatgatagggctggtgacctcactgtcagagagctggtacaacctcctgctggacatgcagaatcgactcaataaagtcatcaaaagtgtggggaagatcgagcactccttctggagatcctttcacaccgagcggaagacagaaccagccacaggtttcatcgacggtgacttgattgagagtttcctggatattagccgccccaagatgcaggaggtggtggcaaacctacagtatgacgatggcagcggtatgaagcgagaggccactgcagacgacctcatcaaggttgtggaggagctaactcggatccattagccaagggcagggggcccctttgctgaccctccccaaaggctttgccctgctgccctccccctcctctccaccatcgtcttcttggccatgggaggcctttccctaagccagctgcccccagagccacagttcccctatgtggaagtggggcgggcttcatagagacttgggaatgagctgaaggtgaaacattttctccctggatttttaccagtctcacatgattccagccatcaccttagaccaccaagccttgattggtgttgccagttgtcctccttccggggaaggattttgcagttctttggctgaaaggaagctgtgcgtgtgtgtgtgtgtatgtgtgtgtgtgtatgtgtatctcacactcatgcattgtcctctttttatttagattggcagtgtagggagttgtgggtagtggggaagagggttaggagggtttcattgtctgtgaagtgagaccttccttttacttttcttctattgcctctgagagcatcaggcctagaggcctgactgccaagccatgggtagcctgggtgtaaaactgccttcttcggaaagaagaaggtgggaggatgtgaattgttagtttctgagttttaccaaataaagtagaatataagaataagaagaaatgatattagattcctcacttattagctcttctagattttctcccttatcaatatatatcctcgggtgggggctcgttcccaattcgccctataggagttggtttacattaacttgcctgggctttacacg

SEQ ID NO: 69715 - DNA, 4179 bp, Homo sapiens
agaggccaggtgaggccgtcccgtgatgccccgcgccccggccgctctggcctgcaacgtgtctctggggcggaggcagcggcagtggagttcgctgcgcgctgttgggggccacctgtcttttcgcttgtgtccctctttctagtgtcgcgctcgagtcccgacgggccgctccaagcctcgacatgtcgtacaactacgtggtaacggcccagaagcccaccgccgtgaacggctgcgtgaccggacactttacttcggccgaagacttaaacctgttgattgccaaaaacacgagattagagatctatgtggtcaccgccgaggggcttcggcccgtcaaagaggtgggcatgtatgggaagattgcggtcatggagcttttcaggcccaagggggagagcaaggacctgctgtttatcttgacagcgaagtacaatgcctgcatcctggagtataaacagagtggcgagagcattgacatcattacgcgagcccatggcaatgtccaggaccgcattggccgcccctcagagaccggcattattggcatcattgaccctgagtgccggatgattggcctgcgtctctatgatggccttttcaaggttattccactagatcgcgataataaagaactcaaggccttcaacatccgcctggaggagctgcatgtcattgatgtcaagttcctatatggttgccaagcacctactatttgctttgtctaccaggaccctcaggggcggcacgtaaaaacctatgaggtgtctctccgagaaaaggaattcaataagggcccttggaaacaggaaaatgtcgaagctgaagcttccatggtgatcgcagtcccagagccctttgggggggccatcatcattggacaggagtcaatcacctatcacaatggtgacaaatacctggctattgcccctcctatcatcaagcaaagcacgattgtgtgccacaatcgagtggaccctaatggctcaagatacctgctgggagacatggaaggccggctcttcatgctgcttttggagaaggaggaacagatggatggcaccgtcactctcaaggatctccgtgtagaactccttggagagacctctattgctgagtgcttgacataccttgataatggtgttgtgtttgtcgggtctcgcctgggtgactcccagcttgtgaagctcaacgttgacagtaatgaacaaggctcctatgtagtggccatggaaacctttaccaacttaggacccattgtcgatatgtgcgtggtggacctggagaggcaggggcaggggcagctggtcacttgctctggggctttcaaggaaggttctttgcggatcatccggaatggaattggaatccacgagcatgccagcattgacttaccaggcatcaaaggattatggccactgcggtctgaccctaatcgtgagactgatgacactttggtgctctcttttgtgggccagacaagagttctcatgttaaatggagaggaggtagaagaaaccgaactgatgggtttcgtggatgatcagcagactttcttctgtggcaacgtggctcatcagcagcttatccagatcacttcagcatcggtgaggttggtctctcaagaacccaaagctctggtcagtgaatggaaggagcctcaggccaagaacatcagtgtggcctcctgcaatagcagccaggtggtggtggctgtaggcagggccctctactatctgcagatccatcctcaggagctccggcagatcagccacacagagatggaacatgaagtggcttgcttggacatcaccccattaggagacagcaatggactgtcccctctttgtgccattggcctctggacggacatctcggctcgtatcttgaagttgccctcttttgaactactgcacaaggagatgctgggtggagagatcattcctcgctccatcctgatgaccacctttgagagtagccattacctcctttgtgccttgggagatggagcgcttttctactttgggctcaacattgagacaggtctgttgagcgaccgtaagaaggtgactttgggcacccagcccaccgtattgaggacttttcgttctctttctaccaccaacgtctttgcttgttctgaccgccccactgtcatctatagcagcaaccacaaattggtcttctcaaatgtcaacctcaaggaagtgaactacatgtgtcccctcaattcagatggctatcctgacagcctggcgctggccaacaatagcaccctcaccattggcaccatcgatgagatccagaagctgcacattcgcacagttcccctctatgagtctccaaggaagatctgctaccaggaagtgtcccagtgtttcggggtcctctccagccgcattgaagtccaagacacgagtgggggcacgacagccttgaggcccagcgctagcacccaggctctgtccagcagtgtaagctccagcaagctgttctccagcagcactgctcctcatgagacctcctttggagaagaggtggaggtgcacaacctacttatcattgaccaacacacctttgaagtgcttcatgcccaccagtttctgcagaatgaatatgccctcagtctggtttcctgcaagctgggcaaagaccccaacacttacttcattgtgggcacagcaatggtgtatcctgaagaggcagagcccaagcagggtcgcattgtggtctttcagtattcggatggaaaactacagactgtggctgaaaaggaagtgaaaggggccgtgtactctatggtggaatttaacgggaagctgttagccagcatcaatagcacggtgcggctctatgagtggacaacagagaaggagctgcgcactgagtgcaaccactacaacaacatcatggccctctacctgaagaccaagggcgacttcatcctggtgggcgaccttatgcgctcagtgctgctgcttgcctacaagcccatggaaggaaactttgaagagattgctcgagactttaatcccaactggatgagtgctgtggaaatcttggatgatgacaattttctgggggctgaaaatgcctttaacttgtttgtgtgtcaaaaggatagcgctgccaccactgacgaggagcggcagcacctccaggaggttggtcttttccacctgggcgagtttgtcaatgtcttttgccacggctctctggtaatgcagaatcgactcaataaagtcatcaaaagtgtggggaagatcgagcactccttctggagatcctttcacaccgagcggaagacagaaccagccacaggtttcatcgacggtgacttgattgagagtttcctggatattagccgccccaagatgcaggaggtggtggcaaacctacagtatgacgatggcagcggtatgaagcgagaggccactgcagacgacctcatcaaggttgtggaggagctaactcggatccattagccaagggcagggggcccctttgctgaccctccccaaaggctttgccctgctgccctccccctcctctccaccatcgtcttcttggccatgggaggcctttccctaagccagctgcccccagagccacagttcccctatgtggaagtggggcgggcttcatagagacttgggaatgagctgaaggtgaaacattttctccctggatttttaccagtctcacatgattccagccatcaccttagaccaccaagccttgattggtgttgccagttgtcctccttccggggaaggattttgcagttctttggctgaaaggaagctgtgcgtgtgtgtgtgtgtatgtgtgtgtgtgtatgtgtatctcacactcatgcattgtcctctttttatttagattggcagtgtagggagttgtgggtagtggggaagagggttaggagggtttcattgtctgtgaagtgagaccttccttttacttttcttctattgcctctgagagcatcaggcctagaggcctgactgccaagccatgggtagcctgggtgtaaaacctggagatggtggatgatccccacgccacagcccttttgtctctgcaaactgccttcttcggaaagaagaaggtgggaggatgtgaattgttagtttctgagttttaccaaataaagtagaatataagaataagaagaaa

SEQ ID NO: 69716 - DNA, 3996 bp, Homo sapiens
agaggccaggtgaggccgtcccgtgatgccccgcgccccggccgctctggcctgcaacgtgtctctggggcggaggcagcggcagtggagttcgctgcgcgctgttgggggccacctgtcttttcgcttgtgtccctctttctagtgtcgcgctcgagtcccgacgggccgctccaagcctcgacatgtcgtacaactacgtggtaacggcccagaagcccaccgccgtgaacggctgcgtgaccggacactttacttcggccgaagacttaaacctgttgattgccaaaaacacgagattagagatctatgtggtcaccgccgaggggcttcggcccgtcaaagaggtgggcatgtatgggaagattgcggtcatggagcttttcaggcccaagggggagagcaaggacctgctgtttatcttgacagcgaagtacaatgcctgcatcctggagtataaacagagtggcgagagcattgacatcattacgcgagcccatggcaatgtccaggaccgcattggccgcccctcagagaccggcattattggcatcattgaccctgagtgccggatgattggcctgcgtctctatgatggccttttcaaggttattccactagatcgcgataataaagaactcaaggccttcaacatccgcctggaggagctgcatgtcattgatgtcaagttcctatatggttgccaagcacctactatttgctttgtctaccaggaccctcaggggcggcacgtaaaaacctatgaggtgtctctccgagaaaaggaattcaataagggcccttggaaacaggaaaatgtcgaagctgaagcttccatggtgatcgcagtcccagagccctttgggggggccatcatcattggacaggagtcaatcacctatcacaatggtgacaaatacctggctattgcccctcctatcatcaagcaaagcacgattgtgtgccacaatcgagtggaccctaatggctcaagatacctgctgggagacatggaaggccggctcttcatgctgcttttggagaaggaggaacagatggatggcaccgtcactctcaaggatctccgtgtagaactccttggagagacctctattgctgagtgcttgacataccttgataatggtgttgtgtttgtcgggtctcgcctgggtgactcccagcttgtgaagctcaacgttgacagtaatgaacaaggctcctatgtagtggccatggaaacctttaccaacttaggacccattgtcgatatgtgcgtggtggacctggagaggcaggggcaggggcagctggtcacttgctctggggctttcaaggaaggttctttgcggatcatccggaatggaattggaatccacgagcatgccagcattgacttaccaggcatcaaaggattatggccactgcggtctgaccctaatcgtgagactgatgacactttggtgctctcttttgtgggccagacaagagttctcatgttaaatggagaggaggtagaagaaaccgaactgatgggtttcgtggatgatcagcagactttcttctgtggcaacgtggctcatcagcagcttatccagatcacttcagcatcggtgaggttggtctctcaagaacccaaagctctggtcagtgaatggaaggagcctcaggccaagaacatcagtgtggcctcctgcaatagcagccaggtggtggtggctgtaggcagggccctctactatctgcagatccatcctcaggagctccggcagatcagccacacagagatggaacatgaagtggcttgcttggacatcaccccattaggagacagcaatggactgtcccctctttgtgccattggcctctggacggacatctcggctcgtatcttgaagttgccctcttttgaactactgcacaaggagatgctgggtggagagatcattcctcgctccatcctgatgaccacctttgagagtagccattacctcctttgtgccttgggagatggagcgcttttctactttgggctcaacattgagacaggtctgttgagcgaccgtaagaaggtgactttgggcacccagcccaccgtattgaggacttttcgttctctttctaccaccaacgtctttgcttgttctgaccgccccactgtcatctatagcagcaaccacaaattggtcttctcaaatgtcaacctcaaggaagtgaactacatgtgtcccctcaattcagatggctatcctgacagcctggcgctggccaacaatagcaccctcaccattggcaccatcgatgagatccagaagctgcacattcgcacagttcccctctatgagtctccaaggaagatctgctaccaggaagtgtcccagtgtttcggggtcctctccagccgcattgaagtccaagacacgagtgggggcacgacagccttgaggcccagcgctagcacccaggctctgtccagcagtgtaagctccagcaagctgttctccagcagcactgctcctcatgagacctcctttggagaagaggtggaggtgcacaacctacttatcattgaccaacacacctttgaagtgcttcatgcccaccagtttctgcagaatgaatatgccctcagtctggtttcctgcaagctgggcaaagaccccaacacttacttcattgtgggcacagcaatggtgtatcctgaagaggcagagcccaagcagggtcgcattgtggtctttcagtattcggatggaaaactacagactgtggctgaaaaggaagtgaaaggggccgtgtactctatggtggaatttaacgggaagctgttagccagcatcaatagcacggtgcggctctatgagtggacaacagagaaggagctgcgcactgagtgcaaccactacaacaacatcatggccctctacctgaagaccaagggcgacttcatcctggtgggcgaccttatgcgctcagtgctgctgcttgcctacaagcccatggaaggaaactttgaagagattgctcgagactttaatcccaactggatgagtgctgtggaaatcttggatgatgacaattttctgggggctgaaaatgcctttaacttgtttgtgtgtcaaaaggatagcgctgccaccactgacgaggagcggcagcacctccaggaggttggtcttttccacctgggcgagtttgtcaatgtcttttgccacggctctctggtaatgcagaatctgggtgagacttccacccccacacaaggctcggtgctcttcggcacggtcaacggcatgatagggctggtgacctcactgtcagagagctggtacaacctcctgctggacatgcagaatcgactcaataaagtcatcaaaagtgtggggaagatcgagcactccttctggagatcctttcacaccgagcggaagacagaaccagccacaggtttcatcgacggtgacttgattgagagtttcctggatattagccgccccaagatgcaggaggtggtggcaaacctacagtatgacgatggcagcggtatgaagcgagaggccactgcagacgacctcatcaaggttgtggaggagctaactcggatccattagccaagggcagggggcccctttgctgaccctccccaaaggctttgccctgctgccctccccctcctctccaccatcgtcttcttggccatgggaggcctttccctaagccagctgcccccagagccacagttcccctatgtggaagtggggcgggcttcatagagacttgggaatgagctgaaggtgaaacattttctccctggatttttaccagtctcacatgattccagccatcaccttagaccaccaagccttgattggtgttgccagttgtcctccttccggggaaggattttgcagttctttggctgaaaggaagctgtgcgtgtgtgtgtgtgtatgtgtgtgtgtgaaatgtgcggccggcggatcctcagagtcacctcgc

SEQ ID NO: 69717 - DNA, 2537 bp, Homo sapiens
cacgcgtgcaccttgattctgtggtcgtctagagttggcttgcttggacatcaccccattaggagacagcaatggactgtcccctctttgtgccattggcctctggacggacatctcggctcgtatcttgaagttgccctcttttgaactactgcacaaggagatgctgggtggagagatcattcctcgctccatcctgatgaccacctttgagagtagccattacctcctttgtgccttgggagatggagcgcttttctactttgggctcaacattgagacaggtctgttgagcgaccgtaagaaggtgactttgggcacccagcccaccgtattgaggacttttcgttctctttctaccaccaacgtctttgcttgttctgaccgccccactgtcatctatagcagcaaccacaaattggtcttctcaaatgtcaacctcaaggaagtgaactacatgtgtcccctcaattcagatggctatcctgacagcctggcgctggccaacaatagcaccctcaccattggcaccatcgatgagatccagaagctgcacattcgcacagttcccctctatgagtctccaaggaagatctgctaccaggaagtgtcccagtgtttcggggtcctctccagccgcattgaagtccaagacacgagtgggggcacgacagccttgaggcccagcgctagcacccaggctctgtccagcagtgtaagctccagcaagctgttctccagcagcactgctcctcatgagacctcctttggagaagaggtggaggtgcacaacctacttatcattgaccaacacacctttgaagtgcttcatgcccaccagtttctgcagaatgaatatgccctcagtctggtttcctgcaagctgggcaaagaccccaacacttacttcattgtgggcacagcaatggtgtatcctgaagaggcagagcccaagcagggtcgcattgtggtctttcagtattcggatggaaaactacagactgtggctgaaaaggaagtgaaaggggccgtgtactctatggtggaatttaacgggaagctgttagccagcatcaatagcacggtgcggctctatgagtggacaacagagaaggagctgcgcactgagtgcaaccactacaacaacatcatggccctctacctgaagaccaagggcgacttcatcctggtgggcgaccttatgcgctcagtgctgctgcttgcctacaagcccatggaaggaaactttgaagagattgctcgagactttaatcccaactggatgagtgctgtggaaatcttggatgatgacaattttctgggggctgaaaatgcctttaacttgtttgtgtgtcaaaaggatagcgctgccaccactgacgaggagcggcagcacctccaggaggttggtcttttccacctgggcgagtttgtcaatgtcttttgccacggctctctggtaatgcagaatctgggtgagacttccacccccacacaaggctcggtgctcttcggcacggtcaacggcatgatagggctggtgacctcactgtcagagagctggtacaacctcctgctggacatgcagaatcgactcaataaagtcatcaaaagtgtggggaagatcgagcactccttctggagatcctttcacaccgagcggaagacagaaccagccacaggtttcatcgacggtgacttgattgagagtttcctggatattagccgccccaagatgcaggaggtggtggcaaacctacagtatgacgatggcagcggtatgaagcgagaggccactgcagacgacctcatcaaggttgtggaggagctaactcggatccattagccaagggcagggggcccctttgctgaccctccccaaaggctttgccctgctgccctccccctcctctccaccatcgtcttcttggccatgggaggcctttccctaagccagctgcccccagagccacagttcccctatgtggaagtggggcgggcttcatagagacttgggaatgagctgaaggtgaaacattttctccctggatttttaccagtctcacatgattccagccatcaccttagaccaccaagccttgattggtgttgccagttgtcctccttccggggaaggattttgcagttctttggctgaaaggaagctgtgcgtgtgtgtgtgtgtatgtgtgtgtgtgtatgtgtatctcacactcatgcattgtcctctttttatttagattggcagtgtagggagttgtgggtagtggggaagagggttaggagggtttcattgtctgtgaagtgagaccttccttttacttttcttctattgcctctgagagcatcaggcctagaggcctgactgccaagccatgggtagcctgggtgtaaaacctggagatggtggatgatccccacgccacagcccttttgtctctgcaaactgccttcttcggaaagaagaaggtgggaggatgtgaattgttagtttctgagttttaccaaataaagtagaatataagaataagaagaaa

SEQ ID NO: 69718 - DNA, 3902 bp, Homo sapiens
agaggccaggtgaggccgtcccgtgatgccccgcgccccggccgctctggcctgcaacgtgtctctggggcggaggcagcggcagtggagttcgctgcgcgctgttgggggccacctgtcttttcgcttgtgtccctctttctagtgtcgcgctcgagtcccgacgggccgctccaagcctcgacatgtcgtacaactacgtggtaacggcccagaagcccaccgccgtgaacggctgcgtgaccggacactttacttcggccgaagacttaaacctgttgattgccaaaaacacgagattagagatctatgtggtcaccgccgaggggcttcggcccgtcaaagaggtgggcatgtatgggaagattgcggtcatggagcttttcaggcccaagggggagagcaaggacctgctgtttatcttgacagcgaagtacaatgcctgcatcctggagtataaacagagtggcgagagcattgacatcattacgcgagcccatggcaatgtccaggaccgcattggccgcccctcagagaccggcattattggcatcattgaccctgagtgccggatgattggcctgcgtctctatgatggccttttcaaggttattccactagatcgcgataataaagaactcaaggccttcaacatccgcctggaggagctgcatgtcattgatgtcaagttcctatatggttgccaagcacctactatttgctttgtctaccaggaccctcaggggcggcacgtaaaaacctatgaggtgtctctccgagaaaaggaattcaataagggcccttggaaacaggaaaatgtcgaagctgaagcttccatggtgatcgcagtcccagagccctttgggggggccatcatcattggacaggagtcaatcacctatcacaatggtgacaaatacctggctattgcccctcctatcatcaagcaaagcacgattgtgtgccacaatcgagtggaccctaatggctcaagatacctgctgggagacatggaaggccggctcttcatgctgcttttggagaaggaggaacagatggatggcaccgtcactctcaaggatctccgtgtagaactccttggagagacctctattgctgagtgcttgacataccttgataatggtgttgtgtttgtcgggtctcgcctgggtgactcccagcttgtgaagctcaacgttgacagtaatgaacaaggctcctatgtagtggccatggaaacctttaccaacttaggacccattgtcgatatgtgcgtggtggacctggagaggcaggggcaggggcagctggtcacttgctctggggctttcaaggaaggttctttgcggatcatccggaatggaattggaatccacgagcatgccagcattgacttaccaggcatcaaaggattatggccactgcggtctgaccctaatcgtgagactgatgacactttggtgctctcttttgtgggccagacaagagttctcatgttaaatggagaggaggtagaagaaaccgaactgatgggtttcgtggatgatcagcagactttcttctgtggcaacgtggctcatcagcagcttatccagatcacttcagcatcggtgaggttggtctctcaagaacccaaagctctggtcagtgaatggaaggagcctcaggccaagaacatcagtgtggcctcctgcaatagcagccaggtggtggtggctgtaggcagggccctctactatctgcagatccatcctcaggagctccggcagatcagccacacagagatggaacatgaagtggcttgcttggacatcaccccattaggagacagcaatggactgtcccctctttgtgccattggcctctggacggacatctcggctcgtatcttgaagttgccctcttttgaactactgcacaaggagatgctgggtggagagatcattcctcgctccatcctgatgaccacctttgagagtagccattacctcctttgtgccttgggagatggagcgcttttctactttgggctcaacattgagacaggtctgttgagcgaccgtaagaaggtgactttgggcacccagcccaccgtattgaggacttttcgttctctttctaccaccaacgtctttgcttgttctgaccgccccactgtcatctatagcagcaaccacaaattggtcttctcaaatgtcaacctcaaggaagtgaactacatgtgtcccctcaattcagatggctatcctgacagcctggcgctggccaacaatagcaccctcaccattggcaccatcgatgagatccagaagctgcacattcgcacagttcccctctatgagtctccaaggaagatctgctaccaggaagtgtcccagtgtttcggggtcctctccagccgcattgaagtccaagacacgagtgggggcacgacagccttgaggcccagcgctagcacccaggctctgtccagcagtgtaagctccagcaagctgttctccagcagcactgctcctcatgagacctcctttggagaagaggtggaggtgcacaacctacttatcattgaccaacacacctttgaagtgcttcatgcccaccagtttctgcagaatgaatatgccctcagtctggtttcctgcaagctgggcaaagaccccaacacttacttcattgtgggcacagcaatggtgtatcctgaagaggcagagcccaagcagggtcgcattgtggtctttcagtattcggatggaaaactacagactgtggctgaaaaggaagtgaaaggggccgtgtactctatggtggaatttaacgggaagctgttagccagcatcaatagcacggtgcggctctatgagtggacaacagagaaggagctgcgcactgagtgcaaccactacaacaacatcatggccctctacctgaagaccaagggcgacttcatcctggtgggcgaccttatgcgctcagtgctgctgcttgcctacaagcccatggaaggaaactttgaagagattgctcgagactttaatcccaactggatgagtgctgtggaaatcttggatgatgacaattttctgggggctgaaaatgcctttaacttgtttgtgtgtcaaaaggatagtatgacgatggcagcggtatgaagcgagaggccactgcagacgacctcatcaaggttgtggaggagctaactcggatccattagccaagggcagggggcccctttgctgaccctccccaaaggctttgccctgctgccctccccctcctctccaccatcgtcttcttggccatgggaggcctttccctaagccagctgcccccagagccacagttcccctatgtggaagtggggcgggcttcatagagacttgggaatgagctgaaggtgaaacattttctccctggatttttaccagtctcacatgattccagccatcaccttagaccaccaagccttgattggtgttgccagttgtcctccttccggggaaggattttgcagttctttggctgaaaggaagctgtgcgtgtgtgtgtgtgtatgtgtgtgtgtgtatgtgtatctcacactcatgcattgtcctctttttatttagattggcagtgtagggagttgtgggtagtggggaagagggttaggagggtttcattgtctgtgaagtgagaccttccttttacttttcttctattgcctctgagagcatcaggcctagaggcctgactgccaagccatgggtagcctgggtgtaaaacctggagatggtggatgatccccacgccacagcccttttgtctctgcaaactgccttcttcggaaagaagaaggtgggaggatgtgaattgttagtttctgagttttaccaaataaagtagaatataagaataagaagaaa

SEQ ID NO: 69719 - DNA, 3725 bp, Homo sapiens
agaggccaggtgaggccgtcccgtgatgccccgcgccccggccgctctggcctgcaacgtgtctctggggcggaggcagcggcagtggagttcgctgcgcgctgttgggggccacctgtcttttcgcttgtgtccctctttctagtgtcgcgctcgagtcccgacgggccgctccaagcctcgacatgtcgtacaactacgtggtaacggcccagaagcccaccgccgtgaacggctgcgtgaccggacactttacttcggccgaagacttaaacctgttgattgccaaaaacacgagattagagatctatgtggtcaccgccgaggggcttcggcccgtcaaagaggtgggcatgtatgggaagattgcggtcatggagcttttcaggcccaagggggagagcaaggacctgctgtttatcttgacagcgaagtacaatgcctgcatcctggagtataaacagagtggcgagagcattgacatcattacgcgagcccatggcaatgtccaggaccgcattggccgcccctcagagaccggcattattggcatcattgaccctgagtgccggatgattggcctgcgtctctatgatggccttttcaaggttattccactagatcgcgataataaagaactcaaggccttcaacatccgcctggaggagctgcatgtcattgatgtcaagttcctatatggttgccaagcacctactatttgctttgtctaccaggaccctcaggggcggcacgtaaaaacctatgaggtgtctctccgagaaaaggaattcaataagggcccttggaaacaggaaaatgtcgaagctgaagcttccatggtgatcgcagtcccagagccctttgggggggccatcatcattggacaggagtcaatcacctatcacaatggtgacaaatacctggctattgcccctcctatcatcaagcaaagcacgattgtgtgccacaatcgagtggaccctaatggctcaagatacctgctgggagacatggaaggccggctcttcatgctgcttttggagaaggaggaacagatggatggcaccgtcactctcaaggatctccgtgtagaactccttggagagacctctattgctgagtgcttgacataccttgataatggtgttgtgtttgtcgggtctcgcctgggtgactcccagcttgtgaagctcaacgttgacagtaatgaacaaggctcctatgtagtggccatggaaacctttaccaacttaggacccattgtcgatatgtgcgtggtggacctggagaggcaggggcaggggcagctggtcacttgctctggggctttcaaggaaggttctttgcggatcatccggaatggaattggaatccacgagcatgccagcattgacttaccaggcatcaaaggattatggccactgcggtctgaccctaatcgtgagactgatgacactttggtgctctcttttgtgggccagacaagagttctcatgttaaatggagaggaggtagaagaaaccgaactgatgggtttcgtggatgatcagcagactttcttctgtggcaacgtggctcatcagcagcttatccagatcacttcagcatcggtgaggttggtctctcaagaacccaaagctctggtcagtgaatggaaggagcctcaggccaagaacatcagtgtggcctcctgcaatagcagccaggtggtggtggctgtaggcagggccctctactatctgcagatccatcctcaggagctccggcagatcagccacacagagatggaacatgaagtggcttgcttggacatcaccccattaggagacagcaatggactgtcccctctttgtgccattggcctctggacggacatctcggctcgtatcttgaagttgccctcttttgaactactgcacaaggagatgctgggtggagagatcattcctcgctccatcctgatgaccacctttgagagtagccattacctcctttgtgccttgggagatggagcgcttttctactttgggctcaacattgagacaggtctgttgagcgaccgtaagaaggtgactttgggcacccagcccaccgtattgaggacttttcgttctctttctaccaccaacgtctttgcttgttctgaccgccccactgtcatctatagcagcaaccacaaattggtcttctcaaatgtcaacctcaaggaagtgaactacatgtgtcccctcaattcagatggctatcctgacagcctggcgctggccaacaatagcaccctcaccattggcaccatcgatgagatccagaagctgcacattcgcacagttcccctctatgagtctccaaggaagatctgctaccaggaagtgtcccagtgtttcggggtcctctccagccgcattgaagtccaagacacgagtgggggcacgacagccttgaggcccagcgctagcacccaggctctgtccagcagtgtaagctccagcaagctgttctccagcagcactgctcctcatgagacctcctttggagaagaggtggaggtgcacaacctacttatcattgaccaacacacctttgaagtgcttcatgcccaccagtttctgcagaatgaatatgccctcagtctggtttcctgcaagctgggcaaagaccccaacacttacttcattgtgggcacagcaatggtgtatcctgaagaggcagagcccaagcagggtcgcattgtggtctttcagtattcggatggaaaactacagactgtggctgaaaaggaagtgaaaggggccgtgtactctatggtggaatttaacgggaagctgttagccagcatcaatagcacggtgcggctctatgagtggacaacagagaaggagctgcgcactgagtgcaaccactacaacaacatcatggccctctacctgaagaccaagggcgacttcatcctggtgggcgaccttatgcgctcagtgctgctgcttgcctacaagcccatggaaggaaactttgaagagattgctcgagactttaatcccaactggatgagtgctgtggaaatcttggatgatgacaattttctgggggctgaaaatgcctttaacttgtttgtgtgtcaaaaggatagcgctgccaccactgacgaggagcggcagcacctccaggaggttggtcttttccacctgggcgagtttgtcaatgtcttttgccacggctctctggtaatgcagaatctgggtgagacttccacccccacacaaggctcggtgctcttcggcacggtcaacggcatgatagggctggtgacctcactgtcagagagctggtacaacctcctgctggacatgcagaatcgactcaataaagtcatcaaaagtgtggggaagatcgagcactccttctggagatcctttcacaccgagcggaagacagaaccagccacaggtttcatcgacggtgacttgattgagagtttcctggatattagccgccccaagatgcaggaggtggtggcaaacctacagtatgacgatggcagcggtatgaagcgagaggccactgcagacgacctcatcaaggttgtggaggagctaactcggatccattagccaagggcagggggcccctttgctgaccctccccaaaggctttgccctgctgccctccccctcctctccaccatcgtcttcttggccaagtaaatggcagggatcctctagaacacc

SEQ ID NO: 69720 - DNA, 4003 bp, Homo sapiens
agaggccaggtgaggccgtcccgtgatgccccgcgccccggccgctctggcctgcaacgtgtctctggggcggaggcagcggcagtggagttcgctgcgcgctgttgggggccacctgtcttttcgcttgtgtccctctttctagtgtcgcgctcgagtcccgacgggccgctccaagcctcgacatgtcgtacaactacgtggtaacggcccagaagcccaccgccgtgaacggctgcgtgaccggacactttacttcggccgaagacttaaacctgttgattgccaaaaacacgagattagagatctatgtggtcaccgccgaggggcttcggcccgtcaaagaggtgggcatgtatgggaagattgcggtcatggagcttttcaggcccaagggggagagcaaggacctgctgtttatcttgacagcgaagtacaatgcctgcatcctggagtataaacagagtggcgagagcattgacatcattacgcgagcccatggcaatgtccaggaccgcattggccgcccctcagagaccggcattattggcatcattgaccctgagtgccggatgattggcctgcgtctctatgatggccttttcaaggttattccactagatcgcgataataaagaactcaaggccttcaacatccgcctggaggagctgcatgtcattgatgtcaagttcctatatggttgccaagcacctactatttgctttgtctaccaggaccctcaggggcggcacgtaaaaacctatgaggtgtctctccgagaaaaggaattcaataagggcccttggaaacaggaaaatgtcgaagctgaagcttccatggtgatcgcagtcccagagccctttgggggggccatcatcattggacaggagtcaatcacctatcacaatggtgacaaatacctggctattgcccctcctatcatcaagcaaagcacgattgtgtgccacaatcgagtggaccctaatggctcaagatacctgctgggagacatggaaggccggctcttcatgctgcttttggagaaggaggaacagatggatggcaccgtcactctcaaggatctccgtgtagaactccttggagagacctctattgctgagtgcttgacataccttgataatggtgttgtgtttgtcgggtctcgcctgggtgactcccagcttgtgaagctcaacgttgacagtaatgaacaaggctcctatgtagtggccatggaaacctttaccaacttaggacccattgtcgatatgtgcgtggtggacctggagaggcaggggcaggggcagctggtcacttgctctggggctttcaaggaaggttctttgcggatcatccggaatggaattggaatccacgagcatgccagcattgacttaccaggcatcaaaggattatggccactgcggtctgaccctaatcgtgagactgatgacactttggtgctctcttttgtgggccagacaagagttctcatgttaaatggagaggaggtagaagaaaccgaactgatgggtttcgtggatgatcagcagactttcttctgtggcaacgtggctcatcagcagcttatccagatcacttcagcatcggtgaggttggtctctcaagaacccaaagctctggtcagtgaatggaaggagcctcaggccaagaacatcagtgtggcctcctgcaatagcagccaggtggtggtggctgtaggcagggccctctactatctgcagatccatcctcaggagctccggcagatcagccacacagagatggaacatgaagtggcttgcttggacatcaccccattaggagacagcaatggactgtcccctctttgtgccattggcctctggacggacatctcggctcgtatcttgaagttgccctcttttgaactactgcacaaggagatgctgggtggagagatcattcctcgctccatcctgatgaccacctttgagagtagccattacctcctttgtgccttgggagatggagcgcttttctactttgggctcaacattgagacaggtctgttgagcgaccgtaagaaggtgactttgggcacccagcccaccgtattgaggacttttcgttctctttctaccaccaacgtctttgcttgttctgaccgccccactgtcatctatagcagcaaccacaaattggtcttctcaaatgtcaacctcaaggaagtgaactacatgtgtcccctcaattcagatggctatcctgacagcctggcgctggccaacaatagcaccctcaccattggcaccatcgatgagatccagaagctgcacattcgcacagttcccctctatgagtctccaaggaagatctgctaccaggaagtgtcccagtgtttcggggtcctctccagccgcattgaagtccaagacacgagtgggggcacgacagccttgaggcccagcgaatagcaccctcaccattggcaccatcgatgagatccagaagctgcacattcgcacagttcccctctatgagtctccaaggaagatctgctaccaggaagtgtcccagtgtttcggggagggctgggagttccttggtctctggtggatgcaagcattgggttctgtgtcaggttcaggtgctcctgtttacagagatagaactttcctcgtcagagaataaaaggtgacagaaatccacctctttagactggctcccctactgtggagtatgtcagctccccagggaaattgagcaccgtgaccactgcacgtggtcctgtctcagggcctgtggtggaaacaggaggttcagaaagtgactttcttaccgcctttcagcgctgccaccactgacgaggagcggcagcacctccaggaggttggtcttttccacctgggcgagtttgtcaatgtcttttgccacggctctctggtaatgcagaatctgggtgagacttccacccccacacaaggctcggtgctcttcggcacggtcaacggcatgatagggctggtgacctcactgtcagagagctggtacaacctcctgctggacatgcagaatcgactcaataaagtcatcaaaagtgtggggaagatcgagcactccttctggagatcctttcacaccgagcggaagacagaaccagccacaggtttcatcgacggtgacttgattgagagtttcctggatattagccgccccaagatgcaggaggtggtggcaaacctacagtatgacgatggcagcggtatgaagcgagaggccactgcagacgacctcatcaaggttgtggaggagctaactcggatccattagccaagggcagggggcccctttgctgaccctccccaaaggctttgccctgctgccctccccctcctctccaccatcgtcttcttggccatgggaggcctttccctaagccagctgcccccagagccacagttcccctatgtggaagtggggcgggcttcatagagacttgggaatgagctgaaggtgaaacattttctccctggatttttaccagtctcacatgattccagccatcaccttagaccaccaagccttgattggtgttgccagttgtcctccttccggggaaggattttgcagttctttggctgaaaggaagctgtgcgtgtgtgtgtgtgtatgtgtgtgtgtgtatgtgtatctcacactcatgcattgtcctctttttatttagattggcagtgtagggagttgtgggtagtggggaagagggttaggagggtttcattgtctgtgaagtgagaccttccttttacttttcttctattgcctctgagagcatcaggcctagaggcctgactgccaagccatgggtagcctgggtgtaaaacctggagatggtggatgatccccacgccacagcccttttgtctctgcaaactgccttcttcggaaagaagaaggtgggaggatgtgaattgttagtttctgagttttaccaaataaagtagaatataagaataagaagaaa

SEQ ID NO: 69721 - DNA, 1788 bp, Homo sapiens
gccctcagtctgcagaaactggtgggcatgaagcacttcaaaggtgtgttggtcaatgataagtaggttgtgcactgcttcatgcccaccagtttctgcagaatgaatatgccctcagtctggtttcctgcaagctgggcaaagaccccaacacttacttcattgtgggcacagcaatggtgtatcctgaagaggcagagcccaagcagggtcgcattgtggtctttcagtattcggatggaaaactacagactgtggctgaaaaggaagtgaaaggggccgtgtactctatggtggaatttaacgggaagctgttagccagcatcaatagcacggtgcggctctatgagtggacaacagagaaggagctgcgcactgagtgcaaccactacaacaacatcatggccctctacctgaagaccaagggcgacttcatcctggtgggcgaccttatgcgctcagtgctgctgcttgcctacaagcccatggaaggaaactttgaagagattgctcgagactttaatcccaactggatgagtgctgtggaaatcttggatgatgacaattttctgggggctgaaaatgcctttaacttgtttgtgtgtcaaaaggatagcgctgccaccactgacgaggagcggcagcacctccaggaggttggtcttttccacctgggcgagtttgtcaatgtcttttgccacggctctctggtaatgcagaatctgggtgagacttccacccccacacaaggctcggtgctcttcggcacggtcaacggcatgatagggctggtgacctcactgtcagagagctggtacaacctcctgctggacatgcagaatcgactcaataaagtcatcaaaagtgtggggaagatcgagcactccttctggagatcctttcacaccgagcggaagacagaaccagccacaggtttcatcgacggtgacttgattgagagtttcctggatattagccgccccaagatgcaggaggtggtggcaaacctacagtatgacgatggcagcggtatgaagcgagaggccactgcagacgacctcatcaaggttgtggaggagctaactcggatccattagccaagggcagggggcccctttgctgaccctccccaaaggctttgccctgctgccctccccctcctctccaccatcgtcttcttggccatgggaggcctttccctaagccagctgcccccagagccacagttcccctatgtggaagtggggcgggcttcatagagacttgggaatgagctgaaggtgaaacattttctccctggatttttaccagtctcacatgattccagccatcaccttagaccaccaagccttgattggtgttgccagttgtcctccttccggggaaggattttgcagttctttggctgaaaggaagctgtgcgtgtgtgtgtgtgtatgtgtgtgtgtgtatgtgtatctcacactcatgcattgtcctctttttatttagattggcagtgtagggagttgtgggtagtggggaagagggttaggagggtttcattgtctgtgaagtgagaccttccttttacttttcttctattgcctctgagagcatcaggcctagaggcctgactgccaagccatgggtagcctgggtgtaaaacctggagatggtggatgatccccacgccacagcccttttgtctctgcaaactgccttcttcggaaagaagaaggtgggaggatgtgaattgttagtttctgagttttaccaaataaagtagaatataagaataagaagaaa

SEQ ID NO: 69722 - DNA, 1750 bp, Homo sapiens
gcctcgtgccgaatcggcacgaggcacacctttgaagtgcttcatgcccaccagtttctgcagaatgaatatgccctcagtctggtttcctgcaagctgggcaaagaccccaacacttacttcattgtgggcacagcaatggtgtatcctgaagaggcagagcccaagcagggtcgcattgtggtctttcagtattcggatggaaaactacagactgtggctgaaaaggaagtgaaaggggccgtgtactctatggtggaatttaacgggaagctgttagccagcatcaatagcacggtgcggctctatgagtggacaacagagaaggagctgcgcactgagtgcaaccactacaacaacatcatggccctctacctgaagaccaagggcgacttcatcctggtgggcgaccttatgcgctcagtgctgctgcttgcctacaagcccatggaaggaaactttgaagagattgctcgagactttaatcccaactggatgagtgctgtggaaatcttggatgatgacaattttctgggggctgaaaatgcctttaacttgtttgtgtgtcaaaaggatagcgctgccaccactgacgaggagcggcagcacctccaggaggttggtcttttccacctgggcgagtttgtcaatgtcttttgccacggctctctggtaatgcagaatctgggtgagacttccacccccacacaaggctcggtgctcttcggcacggtcaacggcatgatagggctggtgacctcactgtcagagagctggtacaacctcctgctggacatgcagaatcgactcaataaagtcatcaaaagtgtggggaagatcgagcactccttctggagatcctttcacaccgagcggaagacagaaccagccacaggtttcatcgacggtgacttgattgagagtttcctggatattagccgccccaagatgcaggaggtggtggcaaacctacagtatgacgatggcagcggtatgaagcgagaggccactgcagacgacctcatcaaggttgtggaggagctaactcggatccattagccaagggcagggggcccctttgctgaccctccccaaaggctttgccctgctgccctccccctcctctccaccatcgtcttcttggccatgggaggcctttccctaagccagctgcccccagagccacagttcccctatgtggaagtggggcgggcttcatagagacttgggaatgagctgaaggtgaaacattttctccctggatttttaccagtctcacatgattccagccatcaccttagaccaccaagccttgattggtgttgccagttgtcctccttccggggaaggattttgcagttctttggctgaaaggaagctgtgcgtgtgtgtgtgtgtatgtgtgtgtgtgtatgtgtatctcacactcatgcattgtcctctttttatttagattggcagtgtagggagttgtgggtagtggggaagagggttaggagggtttcattgtctgtgaagtgagaccttccttttacttttcttctattgcctctgagagcatcaggcctagaggcctgactgccaagccatgggtagcctgggtgtaaaacctggagatggtggatgatccccacgccacagcccttttgtctctgcaaactgccttcttcggaaagaagaaggtgggaggatgtgaattgttagtttctgagttttaccaaataaagtagaatataagaataagaagaaa

SEQ ID NO: 69723 - DNA, 3305 bp, Homo sapiens
agaggccaggtgaggccgtcccgtgatgccccgcgccccggccgctctggcctgcaacgtgtctctggggcggaggcagcggcagtggagttcgctgcgcgctgttgggggccacctgtcttttcgcttgtgtccctctttctagtgtcgcgctcgagtcccgacgggccgctccaagcctcgacatgtcgtacaactacgtggtaacggcccagaagcccaccgccgtgaacggctgcgtgaccggacactttacttcggccgaagacttaaacctgttgattgccaaaaacacgagattagagatctatgtggtcaccgccgaggggcttcggcccgtcaaagaggtgggcatgtatgggaagattgcggtcatggagcttttcaggcccaagggggagagcaaggacctgctgtttatcttgacagcgaagtacaatgcctgcatcctggagtataaacagagtggcgagagcattgacatcattacgcgagcccatggcaatgtccaggaccgcattggccgcccctcagagaccggcattattggcatcattgaccctgagtgccggatgattggcctgcgtctctatgatggccttttcaaggttattccactagatcgcgataataaagaactcaaggccttcaacatccgcctggaggagctgcatgtcattgatgtcaagttcctatatggttgccaagcacctactatttgctttgtctaccaggaccctcaggggcggcacgtaaaaacctatgaggtgtctctccgagaaaaggaattcaataagggcccttggaaacaggaaaatgtcgaagctgaagcttccatggtgatcgcagtcccagagccctttgggggggccatcatcattggacaggagtcaatcacctatcacaatggtgacaaatacctggctattgcccctcctatcatcaagcaaagcacgattgtgtgccacaatcgagtggaccctaatggctcaagatacctgctgggagacatggaaggccggctcttcatgctgcttttggagaaggaggaacagatggatggcaccgtcactctcaaggatctccgtgtagaactccttggagagacctctattgctgagtgcttgacataccttgataatggtgttgtgtttgtcgggtctcgcctgggtgactcccagcttgtgaagctcaacgttgacagtaatgaacaaggctcctatgtagtggccatggaaacctttaccaacttaggacccattgtcgatatgtgcgtggtggacctggagaggcaggggcaggggcagctggtcacttgctctggggctttcaaggaaggttctttgcggatcatccggaatggaattggaatccacgagcatgccagcattgacttaccaggcatcaaaggattatggccactgcggtctgaccctaatcgtgagactgatgacactttggtgctctcttttgtgggccagacaagagttctcatgttaaatggagaggaggtagaagaaaccgaactgatgggtttcgtggatgatcagcagactttcttctgtggcaacgtggctcatcagcagcttatccagatcacttcagcatcggtgaggttggtctctcaagaacccaaagctctggtcagtgaatggaaggagcctcaggccaagaacatcagtgtggcctcctgcaatagcagccaggtggtggtggctgtaggcagggccctctactatctgcagatccatcctcaggagctccggcagatcagccacacagagatggaacatgaagtggcttgcttggacatcaccccattaggagacagcaatggactgtcccctctttgtgccattggcctctggacggacatctcggctcgtatcttgaagttgccctcttttgaactactgcacaaggagatgctgggtggagagatcattcctcgctccatcctgatgaccacctttgagagtagccattacctcctttgtgccttgggagatggagcgcttttctactttgggctcaacattgagacaggtctgttgagcgaccgtaagaaggtgactttgggcacccagcccaccgtattgaggacttttcgttctctttctaccaccaacgtctttgcttgttctgaccgccccactgtcatctatagcagcaacttggtcttttccacctgggcgagtttgtcaatgtcttttgccacggctctctggtaatgcagaatctgggtgagacttccacccccacacaaggctcggtgctcttcggcacggtcaacggcatgatagggctggtgacctcactgtcagagagctggtacaacctcctgctggacatgcagaatcgactcaataaagtcatcaaaagtgtggggaagatcgagcactccttctggagatcctttcacaccgagcggaagacagaaccagccacaggtttcatcgacggtgacttgattgagagtttcctggatattagccgccccaagatgcaggaggtggtggcaaacctacagtatgacgatggcagcggtatgaagcgagaggccactgcagacgacctcatcaaggttgtggaggagctaactcggatccattagccaagggcagggggcccctttgctgaccctccccaaaggctttgccctgctgccctccccctcctctccaccatcgtcttcttggccatgggaggcctttccctaagccagctgcccccagagccacagttcccctatgtggaagtggggcgggcttcatagagacttgggaatgagctgaaggtgaaacattttctccctggatttttaccagtctcacatgattccagccatcaccttagaccaccaagccttgattggtgttgccagttgtcctccttccggggaaggattttgcagttctttggctgaaaggaagctgtgcgtgtgtgtgtgtgtatgtgtgtgtgtgtatgtgtatctcacactcatgcattgtcctctttttatttagattggcagtgtagggagttgtgggtagtggggaagagggttaggagggtttcattgtctgtgaagtgagaccttccttttacttttcttctattgcctctgagagcatcaggcctagaggcctgactgccaagccatgggtagcctgggtgtaaaacctggagatggtggatgatccccacgccacagcccttttgtctctgcaaactgccttcttcggaaagaagaaggtgggaggatgtgaattgttagtttctgagttttaccaaataaagtagaatataagaataagaagaaa

SEQ ID NO: 69724 - DNA, 3592 bp, Homo sapiens
agaggccaggtgaggccgtcccgtgatgccccgcgccccggccgctctggcctgcaacgtgtctctggggcggaggcagcggcagtggagttcgctgcgcgctgttgggggccacctgtcttttcgcttgtgtccctctttctagtgtcgcgctcgagtcccgacgggccgctccaagcctcgacatgtcgtacaactacgtggtaacggcccagaagcccaccgccgtgaacggctgcgtgaccggacactttacttcggccgaagacttaaacctgttgattgccaaaaacacgagattagagatctatgtggtcaccgccgaggggcttcggcccgtcaaagaggtgggcatgtatgggaagattgcggtcatggagcttttcaggcccaagggggagagcaaggacctgctgtttatcttgacagcgaagtacaatgcctgcatcctggagtataaacagagtggcgagagcattgacatcattacgcgagcccatggcaatgtccaggaccgcattggccgcccctcagagaccggcattattggcatcattgaccctgagtgccggatgattggcctgcgtctctatgatggccttttcaaggttattccactagatcgcgataataaagaactcaaggccttcaacatccgcctggaggagctgcatgtcattgatgtcaagttcctatatggttgccaagcacctactatttgctttgtctaccaggaccctcaggggcggcacgtaaaaacctatgaggtgtctctccgagaaaaggaattcaataagggcccttggaaacaggaaaatgtcgaagctgaagcttccatggtgatcgcagtcccagagccctttgggggggccatcatcattggacaggagtcaatcacctatcacaatggtgacaaatacctggctattgcccctcctatcatcaagcaaagcacgattgtgtgccacaatcgagtggaccctaatggctcaagatacctgctgggagacatggaaggccggctcttcatgctgcttttggagaaggaggaacagatggatggcaccgtcactctcaaggatctccgtgtagaactccttggagagacctctattgctgagtgcttgacataccttgataatggtgttgtgtttgtcgggtctcgcctgggtgactcccagcttgtgaagctcaacgttgacagtaatgaacaaggctcctatgtagtggccatggaaacctttaccaacttaggacccattgtcgatatgtgcgtggtggacctggagaggcaggggcaggggcagctggtcacttgctctggggctttcaaggaaggttctttgcggatcatccggaatggaattggaatccacgagcatgccagcattgacttaccaggcatcaaaggattatggccactgcggtctgaccctaatcgtgagactgatgacactttggtgctctcttttgtgggccagacaagagttctcatgttaaatggagaggaggtagaagaaaccgaactgatgggtttcgtggatgatcagcagactttcttctgtggcaacgtggctcatcagcagcttatccagatcacttcagcatcggtgaggttggtctctcaagaacccaaagctctggtcagtgaatggaaggagcctcaggccaagaacatcagtgtggcctcctgcaatagcagccaggtggtggtggctgtaggcagggccctctactatctgcagatccatcctcaggagctccggcagatcagccacacagagatggaacatgaagtggcttgcttggacatcaccccattaggagacagcaatggactgtcccctctttgtgccattggcctctggacggacatctcggctcgtatcttgaagttgccctcttttgaactactgcacaaggagatgctgggtggagagatcattcctcgctccatcctgatgaccacctttgagagtagccattacctcctttgtgccttgggagatggagcgcttttctactttgggctcaacattgagacaggtctgttgagcgaccgtaagaaggtgactttgggcacccagcccaccgtattgaggacttttcgttctctttctaccaccaacgtctttgcttgttctgaccgccccactgtcatctatagcagcaaccacaaattggtcttctcaaatgtcaacctcaaggaagtgaactacatgtgtcccctcaattcagatggctatcctgacagcctggcgctggccaacaatagcaccctcaccattggcaccatcgatgagatccagaagctgcacattcgcacagttcccctctatgagtctccaaggaagatctgctaccaggaagtgtcccagtgtttcggggtcctctccagccgcattgaagtccaagacacgagtgggggcacgacagccttgaggcccagcgctagcacccaggctctgtccagcagtgtaagctccagcaagctgttctccagcagcactgctcctcatgagacctcctttggagaagaggtggaggtgcacaacctacttatcattgaccaacacacctttgaagtgcttcatgcccaccagtttctgcagaatgaatatgccctcagtctggtttcctgcaagctgggcaaagaccccaacacttacttcattgtgggcacagcaatggtgtatcctgaagaggcagagcccaagcagggtcgcattgtggtctttcagtattcggatggaaaactacagactgtggctgaaaaggaagtgaaaggggccgtgtactctatggtggaatttaacgggaagctgttagccagcatcaatagcacggtgcggctctatgagtggacaacagagaaggagctgcgcactgagtgcaaccactacaacaacatcatggccctctacctgaagaccaagggcgacttcatcctggtgggcgaccttatgcgctcagtgctgctgcttgcctacaagcccatggaaggaaactttgaagagattgctcgagactttaatcccaactggatgagtgctgtggaaatcttggatgatgacaattttctgggggctgaaaatgcctttaacttgtttgtgtgtcaaaaggatagcgctgccaccactgacgaggagcggcagcacctccaggaggttggtcttttccacctgggcgagtttgtcaatgtcttttgccacggctctctggtaatgcagaatctgggtgagacttccacccccacacaaggctcggtgctcttcggcacggtcaacggcatgatagggctggtgacctcactgtcagagagctggtacaacctcctgctggacatgcagaatcgactcaataaagtcatcaaaagtgtggggaagatcgagcactccttctggagatcctttcacaccgagcggaagacataaccgagcgtggcaataatttacaaggggatttagagggttctgtgggcaaactttaaggttgaactaagattcgatcttggacaaccagctatcaccaggctcggtaggtttgtcgcctctacctataaatcttcccactatttgcacatatcacgcgc

SEQ ID NO: 69725 - DNA, 1368 bp, Homo sapiens
ggattgagataagcacggtggattgagataagcacggtgcgctctatgagtggacaacagagaaggagctgcgcactgagtgcaaccactacaacaacatcatggccctctacctgaagaccaagggcgacttcatcctggtgggcgaccttatgcgctcagtgctgctgcttgcctacaagcccatggaaggaaactttgaagagattgctcgagactttaatcccaactggatgagtgctgtggaaatcttggatgatgacaattttctgggggctgaaaatgcctttaacttgtttgtgtgtcaaaaggatagcgctgccaccactgacgaggagcggcagcacctccaggaggttggtcttttccacctgggcgagtttgtcaatgtcttttgccacggctctctggtaatgcagaatcgactcaataaagtcatcaaaagtgtggggaagatcgagcactccttctggagatcctttcacaccgagcggaagacagaaccagccacaggtttcatcgacggtgacttgattgagagtttcctggatattagccgccccaagatgcaggaggtggtggcaaacctacagtatgacgatggcagcggtatgaagcgagaggccactgcagacgacctcatcaaggttgtggaggagctaactcggatccattagccaagggcagggggcccctttgctgaccctccccaaaggctttgccctgctgccctccccctcctctccaccatcgtcttcttggccatgggaggcctttccctaagccagctgcccccagagccacagttcccctatgtggaagtggggcgggcttcatagagacttgggaatgagctgaaggtgaaacattttctccctggatttttaccagtctcacatgattccagccatcaccttagaccaccaagccttgattggtgttgccagttgtcctccttccggggaaggattttgcagttctttggctgaaaggaagctgtgcgtgtgtgtgtgtgtatgtgtgtgtgtgtatgtgtatctcacactcatgcattgtcctctttttatttagattggcagtgtagggagttgtgggtagtggggaagagggttaggagggtttcattgtctgtgaagtgagaccttccttttacttttcttctattgcctctgagagcatcaggcctagaggcctgactgccaagccatgggtagcctgggtgtaaaacctggagatggtggatgatccccacgccacagcccttttgtctctgcaaactgccttcttcggaaagaagaaggtgggaggatgtgaattgttagtttctgagttttaccaaataaagtagaatataagaataagaagaaa

SEQ ID NO: 69726 - DNA, 601 bp, Homo sapiens
gctgcctagaggatccctcctacgagcgcagagccacagttcccctatgtggaagtggggcgggcttcatagagacttgggaatgagctgaaggtgaaacattttctccctggatttttaccagtctcacatgattccagccatcaccttagaccaccaagccttgattggtgttgccagttgtcctccttccggggaaggattttgcagttctttggctgaaaggaagctgtgcgtgtgtgtgtgtgtatgtgtgtgtgtgtatgtgtatctcacactcatgcattgtcctctttttatttagattggcagtgtagggagttgtgggtagtggggaagagggttaggagggtttcattgtctgtgaagtgagaccttccttttacttttcttctattgcctctgagagcatcaggcctagaggcctgactgccaagccatgggtagcctgggtgtaaaacctggagatggtggatgatccccacgccacagcccttttgtctctgcaaactgccttcttcggaaagaagaaggtgggaggatgtgaattgttagtttctgagttttaccaaataaagtagaatataagaataagaagaaa

SEQ ID NO: 69727 - DNA, 2291 bp, Homo sapiens
agaggccaggtgaggccgtcccgtgatgccccgcgccccggccgctctggcctgcaacgtgtctctggggcggaggcagcggcagtggagttcgctgcgcgctgttgggggccacctgtcttttcgcttgtgtccctctttctagtgtcgcgctcgagtcccgacgggccgctccaagcctcgacatgtcgtacaactacgtggtaacggcccagaagcccaccgccgtgaacggctgcgtgaccggacactttacttcggccgaagacttaaacctgttgattgccaaaaacacgagattagagatctatgtggtcaccgccgaggggcttcggcccgtcaaagaggtgggcatgtatgggaagattgcggtcatggagcttttcaggcccaagggggagagcaaggacctgctgtttatcttgacagcgaagtacaatgcctgcatcctggagtataaacagagtggcgagagcattgacatcattacgcgagcccatggcaatgtccaggaccgcattggccgcccctcagagaccggcattattggcatcattgaccctgagtgccggatgattggcctgcgtctctatgatggccttttcaaggttattccactagatcgcgataataaagaactcaaggccttcaacatccgcctggaggagctgcatgtcattgatgtcaagttcctatatggttgccaagcacctactatttgctttgtctaccaggaccctcaggggcggcacgtaaaaacctatgaggtgtctctccgagaaaaggaattcaataagggcccttggaaacaggaaaatgtcgaagctgaagcttccatggtgatcgcagtcccagagccctttgggggggccatcatcattggacaggagtcaatcacctatcacaatggtgacaaatacctggctattgcccctcctatcatcaagcaaagcacgattgtgtgccacaatcgagtggaccctaatggctcaagatacctgctgggagacatggaaggccggctcttcatgctgcttttggagaaggaggaacagatggatggcaccgtcactctcaaggatctccgtgtagaactccttggagagacctctattgctgagtgcttgacataccttgataatggtgttgtgtttgtcgggtctcgcctgggtgactcccagcttgtgaagctcaacgttgacagtaatgaacaaggctcctatgtagtggccatggaaacctttaccaacttaggacccattgtcgatatgtgcgtggtggacctggagaggcaggggcaggggcagctggtcacttgctctggggctttcaaggaaggttctttgcggatcatccggaatggaattggaatccacgagcatgccagcattgacttaccaggcatcaaaggattatggccactgcggtctgaccctaatcgtgagactgatgacactttggtgctctcttttgtgggccagacaagagttctcatgttaaatggagaggaggtagaagaaaccgaactgatgggtttcgtggatgatcagcagactttcttctgtggcaacgtggctcatcagcagcttatccagatcacttcagcatcggtgaggttggtctctcaagaacccaaagctctggtcagtgaatggaaggagcctcaggccaagaacatcagtgtggcctcctgcaatagcagccaggtggtggtggctgtaggcagggccctctactatctgcagatccatcctcaggagctccggcagatcagccacacagagatggaacatgaagtggcttgcttggacatcaccccattaggagacagcaatggactgtcccctctttgtgccattggcctctggacggacatctcggctcgtatcttgaagttgccctcttttgaactactgcacaaggagatgctgggtggagagatcattcctcgctccatcctgatgaccacctttgagagtagccattacctcctttgtgccttgggagatggagcgcttttctactttgggctcaacattgagacaggtctgttgagcgaccgtaagaaggtgactttgggcacccagcccaccgtattgaggacttttcgttctctttctaccaccaacgtctttgcttgttctgaccgccccactgtcatctatagcagcaaccacaaattggtcttctcaaatgtcaacctcaccattggcaccatcgatgagatcaagaaactaccctgcctccactagacagaacaggcgagagtactgtgatccccaatagacagt

SEQ ID NO: 69728 - DNA, 2198 bp, Homo sapiens
agaggccaggtgaggccgtcccgtgatgccccgcgccccggccgctctggcctgcaacgtgtctctggggcggaggcagcggcagtggagttcgctgcgcgctgttgggggccacctgtcttttcgcttgtgtccctctttctagtgtcgcgctcgagtcccgacgggccgctccaagcctcgacatgtcgtacaactacgtggtaacggcccagaagcccaccgccgtgaacggctgcgtgaccggacactttacttcggccgaagacttaaacctgttgattgccaaaaacacgagattagagatctatgtggtcaccgccgaggggcttcggcccgtcaaagaggtgggcatgtatgggaagattgcggtcatggagcttttcaggcccaagggggagagcaaggacctgctgtttatcttgacagcgaagtacaatgcctgcatcctggagtataaacagagtggcgagagcattgacatcattacgcgagcccatggcaatgtccaggaccgcattggccgcccctcagagaccggcattattggcatcattgaccctgagtgccggatgattggcctgcgtctctatgatggccttttcaaggttattccactagatcgcgataataaagaactcaaggccttcaacatccgcctggaggagctgcatgtcattgatgtcaagttcctatatggttgccaagcacctactatttgctttgtctaccaggaccctcaggggcggcacgtaaaaacctatgaggtgtctctccgagaaaaggaattcaataagggcccttggaaacaggaaaatgtcgaagctgaagcttccatggtgatcgcagtcccagagccctttgggggggccatcatcattggacaggagtcaatcacctatcacaatggtgacaaatacctggctattgcccctcctatcatcaagcaaagcacgattgtgtgccacaatcgagtggaccctaatggctcaagatacctgctgggagacatggaaggccggctcttcatgctgcttttggagaaggaggaacagatggatggcaccgtcactctcaaggatctccgtgtagaactccttggagagacctctattgctgagtgcttgacataccttgataatggtgttgtgtttgtcgggtctcgcctgggtgactcccagcttgtgaagctcaacgttgacagtaatgaacaaggctcctatgtagtggccatggaaacctttaccaacttaggacccattgtcgatatgtgcgtggtggacctggagaggcaggggcaggggcagctggtcacttgctctggggctttcaaggaaggttctttgcggatcatccggaatggaattggaatccacgagcatgccagcattgacttaccaggcatcaaaggattatggccactgcggtctgaccctaatcgtgagactgatgacactttggtgctctcttttgtgggccagacaagagttctcatgttaaatggagaggaggtagaagaaaccgaactgatgggtttcgtggatgatcagcagactttcttctgtggcaacgtggctcatcagcagcttatccagatcacttcagcatcggtgaggttggtctctcaagaacccaaagctctggtcagtgaatggaaggagcctcaggccaagaacatcagtgtggcctcctgcaatagcagccaggtggtggtggctgtaggcagggccctctactatctgcagatccatcctcaggagctccggcagatcagccacacagagatggaacatgaagtggcttgcttggacatcaccccattaggagacagcaatggactgtcccctctttgtgccattggcctctggacggacatctcggctcgtatcttgaagttgccctcttttgaactactgcacaaggagatgctgggtggagagatcattcctcgctccatcctgatgaccacctttgagagtagccattacctcctttgtgccttgggagatggagcgcttttctactttgggctcaacattgagacaggtctgttgagcgaccgtaagaaggtgactttgggcacccagcccaccgtattgaggacttttcgttctctttctaccaccaacgtctttgcttgttctgaccgccccactgtcatctatagcagcaactccgctttgaaaggtaccagctca

SEQ ID NO: 69729 - DNA, 2094 bp, Homo sapiens
agaggccaggtgaggccgtcccgtgatgccccgcgccccggccgctctggcctgcaacgtgtctctggggcggaggcagcggcagtggagttcgctgcgcgctgttgggggccacctgtcttttcgcttgtgtccctctttctagtgtcgcgctcgagtcccgacgggccgctccaagcctcgacatgtcgtacaactacgtggtaacggcccagaagcccaccgccgtgaacggctgcgtgaccggacactttacttcggccgaagacttaaacctgttgattgccaaaaacacgagattagagatctatgtggtcaccgccgaggggcttcggcccgtcaaagaggtgggcatgtatgggaagattgcggtcatggagcttttcaggcccaagggggagagcaaggacctgctgtttatcttgacagcgaagtacaatgcctgcatcctggagtataaacagagtggcgagagcattgacatcattacgcgagcccatggcaatgtccaggaccgcattggccgcccctcagagaccggcattattggcatcattgaccctgagtgccggatgattggcctgcgtctctatgatggccttttcaaggttattccactagatcgcgataataaagaactcaaggccttcaacatccgcctggaggagctgcatgtcattgatgtcaagttcctatatggttgccaagcacctactatttgctttgtctaccaggaccctcaggggcggcacgtaaaaacctatgaggtgtctctccgagaaaaggaattcaataagggcccttggaaacaggaaaatgtcgaagctgaagcttccatggtgatcgcagtcccagagccctttgggggggccatcatcattggacaggagtcaatcacctatcacaatggtgacaaatacctggctattgcccctcctatcatcaagcaaagcacgattgtgtgccacaatcgagtggaccctaatggctcaagatacctgctgggagacatggaaggccggctcttcatgctgcttttggagaaggaggaacagatggatggcaccgtcactctcaaggatctccgtgtagaactccttggagagacctctattgctgagtgcttgacataccttgataatggtgttgtgtttgtcgggtctcgcctgggtgactcccagcttgtgaagctcaacgttgacagtaatgaacaaggctcctatgtagtggccatggaaacctttaccaacttaggacccattgtcgatatgtgcgtggtggacctggagaggcaggggcaggggcagctggtcacttgctctggggctttcaaggaaggttctttgcggatcatccggaatggaattggaatccacgagcatgccagcattgacttaccaggcatcaaaggattatggccactgcggtctgaccctaatcgtgagactgatgacactttggtgctctcttttgtgggccagacaagagttctcatgttaaatggagaggaggtagaagaaaccgaactgatgggtttcgtggatgatcagcagactttcttctgtggcaacgtggctcatcagcagcttatccagatcacttcagcatcggtgaggttggtctctcaagaacccaaagctctggtcagtgaatggaaggagcctcaggccaagaacatcagtgtggcctcctgcaatagcagccaggtggtggtggctgtaggcagggccctctactatctgcagatccatcctcaggagctccggcagatcagccacacagagatggaacaagctttggtcagcacttccaggttagttaccacttcattactggagggcactgtcacaaacttctgactatccagacttgaagtgctgtggactctccttaggggaatgtcgggtgcttcttcctcaagcagctcagcactttgtaggagagcatggatctctgggtgcagatcctccatactatcttccctgaggccagtgctctgcagtgcaatacccaggcgacatctggattataaaaatgaaagcaccgacacacactaactgatccacatcccagagcctgagggaactctagatc

SEQ ID NO: 69730 - DNA, 1550 bp, Homo sapiens
agaggccaggtgaggccgtcccgtgatgccccgcgccccggccgctctggcctgcaacgtgtctctggggcggaggcagcggcagtggagttcgctgcgcgctgttgggggccacctgtcttttcgcttgtgtccctctttctagtgtcgcgctcgagtcccgacgggccgctccaagcctcgacatgtcgtacaactacgtggtaacggcccagaagcccaccgccgtgaacggctgcgtgaccggacactttacttcggccgaagacttaaacctgttgattgccaaaaacacgagattagagatctatgtggtcaccgccgaggggcttcggcccgtcaaagaggtgggcatgtatgggaagattgcggtcatggagcttttcaggcccaagggggagagcaaggacctgctgtttatcttgacagcgaagtacaatgcctgcatcctggagtataaacagagtggcgagagcattgacatcattacgcgagcccatggcaatgtccaggaccgcattggccgcccctcagagaccggcattattggcatcattgaccctgagtgccggatgattggcctgcgtctctatgatggccttttcaaggttattccactagatcgcgataataaagaactcaaggccttcaacatccgcctggaggagctgcatgtcattgatgtcaagttcctatatggttgccaagcacctactatttgctttgtctaccaggaccctcaggggcggcacgtaaaaacctatgaggtgtctctccgagaaaaggaattcaataagggcccttggaaacaggaaaatgtcgaagctgaagcttccatggtgatcgcagtcccagagccctttgggggggccatcatcattggacaggagtcaatcacctatcacaatggtgacaaatacctggctattgcccctcctatcatcaagcaaagcacgattgtgtgccacaatcgagtggaccctaatggctcaagatacctgctgggagacatggaaggccggctcttcatgctgcttttggagaaggaggaacagatggatggcaccgtcactctcaaggatctccgtgtagaactccttggagaggtagagcttgttctccctgttcctctacaatgttcttttaggttcctaaagacaccaaatgtgtggtcccacacctcaactctgggaattatgttacttaacacctaacaacaaactgttgttcctgctgtggaagttgactgttgaatgagttaggtattggagcatctcacaggatcctgtgataatctatccaagcagcctgtgagaaaaggaaaagaaagggaaacagaaaaggatataatctggaattaaagatcaatctagctggtttcagtggctcacacctgtgatcccagcactttgggagactgagtcaggcagattgtgtgagccccaggagttcgagattagcctgggcaatatggcaaaaccccatctctacaaaaagtacaaaaattaggtgggtatggtggtgtgtgcctgtagtcccagctactcggg

SEQ ID NO: 69731 - DNA, 1197 bp, Homo sapiens
agaggccaggtgaggccgtcccgtgatgccccgcgccccggccgctctggcctgcaacgtgtctctggggcggaggcagcggcagtggagttcgctgcgcgctgttgggggccacctgtcttttcgcttgtgtccctctttctagtgtcgcgctcgagtcccgacgggccgctccaagcctcgacatgtcgtacaactacgtggtaacggcccagaagcccaccgccgtgaacggctgcgtgaccggacactttacttcggccgaagacttaaacctgttgattgccaaaaacacgagattagagatctatgtggtcaccgccgaggggcttcggcccgtcaaagaggtgggcatgtatgggaagattgcggtcatggagcttttcaggcccaagggggagagcaaggacctgctgtttatcttgacagcgaagtacaatgcctgcatcctggagtataaacagagtggcgagagcattgacatcattacgcgagcccatggcaatgtccaggaccgcattggccgcccctcagagaccggcattattggcatcattgaccctgagtgccggatgattggcctgcgtctctatgatggccttttcaaggttattccactagatcgcgataataaagaactcaaggccttcaacatccgcctggaggagctgcatgtcattgatgtcaagttcctatatggttgccaagcacctactatttgctttgtctaccaggaccctcaggggcggcacgtaaaaacctatgaggtgtctctccgagaaaaggaattcaataagggcccttggaaacaggaaaatgtcgaagctgaagcttccatggtgatcgcagtcccagagccctttgggggggccatcatcattggacaggagtcaatcacctatcacaatggtgacaaatacctggctattgcccctcctatcatcaagcaaagcacgattgtgtgccacaatcgagtggaccctaatggctcaagatacctgctgggagacatggaagcctcagcttcgacattttcctgtttccaagggcccttattgaattccttttctcggagagacacctcataggtttttacgtgccgccctgagggtcctggtagacaaagcaaatagtagtgcttgcaaccatataggaactgacatcaatgacatgaggtagagagcctggaaaggatcg

SEQ ID NO: 69732 - DNA, 686 bp, Homo sapiens
  misc_feature (50)..(50): n is a, c, g, or t
  misc_feature (75)..(75): n is a, c, g, or t
  misc_feature (89)..(89): n is a, c, g, or t
  misc_feature (132)..(132): n is a, c, g, or t
  misc_feature (177)..(177): n is a, c, g, or t
  misc_feature (194)..(194): n is a, c, g, or t
  misc_feature (251)..(251): n is a, c, g, or t
  misc_feature (253)..(253): n is a, c, g, or t
  misc_feature (255)..(255): n is a, c, g, or t
  misc_feature (259)..(259): n is a, c, g, or t
  misc_feature (262)..(262): n is a, c, g, or t
  misc_feature (267)..(271): n is a, c, g, or t
  misc_feature (274)..(276): n is a, c, g, or t
  misc_feature (289)..(290): n is a, c, g, or t
  misc_feature (292)..(293): n is a, c, g, or t
  misc_feature (295)..(295): n is a, c, g, or t
  misc_feature (299)..(299): n is a, c, g, or t
  misc_feature (301)..(303): n is a, c, g, or t
  misc_feature (307)..(307): n is a, c, g, or t
  misc_feature (311)..(312): n is a, c, g, or t
  misc_feature (317)..(317): n is a, c, g, or t
  misc_feature (320)..(320): n is a, c, g, or t
  misc_feature (340)..(340): n is a, c, g, or t
  misc_feature (344)..(344): n is a, c, g, or t
  misc_feature (346)..(346): n is a, c, g, or t
  misc_feature (348)..(348): n is a, c, g, or t
  misc_feature (350)..(350): n is a, c, g, or t
  misc_feature (356)..(356): n is a, c, g, or t
  misc_feature (358)..(358): n is a, c, g, or t
  misc_feature (360)..(360): n is a, c, g, or t
  misc_feature (362)..(362): n is a, c, g, or t
  misc_feature (365)..(365): n is a, c, g, or t
  misc_feature (369)..(369): n is a, c, g, or t
  misc_feature (373)..(373): n is a, c, g, or t
  misc_feature (375)..(376): n is a, c, g, or t
  misc_feature (378)..(378): n is a, c, g, or t
aaaatttcatctaaataaaataaccattgcaaatcattaaataaaaaaanaacaaaaattactattattccaatnccctccaatggaantaacaaacagcaaaaaactcaaaacctgaaaatagcgccaacnccccacccaggaagacacaaggcccccgctcagcttccgcttcanggggatgaaagccaggngtgaaaacgagtattaatgcttgaaacaaaaaaaaggacaaaaaatacaagtcaggncntntgcnaangtctnnnnntcnnngggaaggattttnnanntntttncnnnaaangaannggtgnggnggggggtgtggggaggtggngggngngngntcgagngnanangtnagcnaggngnngngggggaggtagattggcagtgtagggagttgtgggtagtggggaagagggttaggagggtttcattgtctgtgaagtgagaccttccttttacttttcttctattgcctctgagagcatcaggcctagaggcctgactgccaagccatgggtagcctgggtgtaaaacctggagatggtggatgatccccacgccacagcccttttgtctctgcaaactgccttcttcggaaagaagaaggtgggaggatgtgaattgttagtttctgagttttaccaaataaagtagaatataagaataagaagaaa

SEQ ID NO: 69733 - DNA, 278 bp, Homo sapiens
gtagcggaccgcataaactattaggagggtttcattgtctgtgaagtgagaccttccttttacttttcttctattgcctctgagagcatcaggcctagaggcctgactgccaagccatgggtagcctgggtgtaaaacctggagatggtggatgatccccacgccacagcccttttgtctctgcaaactgccttcttcggaaagaagaaggtgggaggatgtgaattgttagtttctgagttttaccaaataaagtagaatataagaataagaagaaa

SEQ ID NO: 69734 - DNA, 471 bp, Homo sapiens
caaacattttacattaattttcaaacattcactacttctctgaaatccatccatggactctaggtcagcaatccttggctgattaatgggtcacctgtgggacaaccatattctttcgtcaatagtccccttctggaatcatcccttggaacatgagaatggcagatctagaaactagttattgagagtttcttttggacaataaccatctcttttgggtgggtctgttagggtgttctaggactaacataacattgttctttcttattagctcaacgttgacagtaatgaacaaggctcctatgtagtggccatggaaacctttaccaacttaggacccattgtcgatatgtgcgtggtggacctggagaggcaggggcaggggcaggtaagggccattctgaaagtggatagttggtatatgcccactcaaactgtgtcctcctagctatgcttatctagaatggggag

SEQ ID NO: 69735 - DNA, 120 bp, Homo sapiens
ccccacctgtgggagagcaccctcttggtcctcacagccccgcccatcttctcattgcatatgacgatggcagcggtatgaagcgagaggccactgcagacgacctcatcaaggttgtgg

SEQ ID NO: 69736 - DNA, 424 bp, Homo sapiens
tcctctgaaacactctcctcaggctccttgagctgccagccatcagagttcttggctagctgcagcctttgtgtcctgatctgacgggtcccttcacaatgatgtctcagcacttcttctgtgtttgagaaggatgatgtgcattctctctgtttgcaggctctgtccagcagtgtaagctccagcaagctgttctccagcagcactgctcctcatgagacctcctttggagaagaggtggaggtgcacaacctacttatcattgaccaacacacctttgaagaaggtgcacatgagctctttcgataatttttatctacgccctccctaatccaggctgttctgggctctggtacctgcaaagcctgacagatgtggcagactgtcctaggaggagcagaaaggaggggtgggaattctgtga

SEQ ID NO: 69737 - DNA, 499 bp, Homo sapiens
gagactttaatcccaactggatgagtgctgtggaaatcttggatgatgacaattttctgggggctgaaaatgcctttaacttgtttgtgtgtcaaaaggataggtgagtagtggccagctctgggagtggtggggagggctgggagttccttggtctctggtggatgcaagcattgggttctgtgtcaggttcaggtgctcctgtttacagagatagaactttcctcgtcagagaataaaaggtgacagaaatccacctctttagactggctcccctactgtggagtatgtcagctccccagggaaattgagcaccgtgaccactgcacgtggtcctgtctcagggcctgtggtggaaacaggaggttcagaaagtgactttcttaccgcctttcagcgctgccaccactgacgaggagcggcagcacctccaggaggttggtcttttccacctgggcgagtttgtcaatgtcttttgccacggctctctggtaatgca

SEQ ID NO: 69738 - DNA, 808 bp, Homo sapiens
aaactaggctaggtacgaggcctgggtggttccctctatgagtctccaagcaatggtgtatcctgaagaggcagagcccaagcagggtcgcattgtggtctttcagtattcggatggaaaactacagactgtggctgaaaaggaagtgaaaggggccgtgtactctatggtggaatttaacgggaagctgttagccagcatcaatagcacggtgcggctctatgagtggacaacagagaaggagctgcgcactgagtgcaaccactacaacaacatcatggccctctacctgaagaccaagggcgacttcatcctggtgggcgaccttatgcgctcagtgctgctgcttgcctacaagcccatggaaggaaactttgaagagattgctcgagactttaatcccaactggatgagtgctgtggaaatcttggatgatgacaattttctgggggctgaaaatgcctttaacttgtttgtgtgtcaaaaggatagcgctgccaccactgacgaggagcggcagcacctccaggaggttggtcttttccacctgggcgagtttgtcaatgtcttttgccacggctctctggtaatgcagaatctgggtgagacttccacccccacacaaggctcggtgctcttcggcacggtcaacggcatgatagggctggtgacctcactgtcagagagctggtacaacctcctgctggacatgcagaatcgactcaataaagtcatcaaaagtgtggggaagatcgagcactcctttctggcagatcctttcacaccgtgcttatctcatccggtacca

SEQ ID NO: 69739 - DNA, 450 bp, Homo sapiens
gctgatctgagggactggggagagcaactgtacaagacctaggtgtttactagaaggaggctgcagcacattagccctccctgagctgctcacctgggctgccctttacgtagaggatacatgctgtggggttgagctctctgcagctcactgcctccttcacttcttcagggctggtgacctcactgtcagagagctggtacaacctcctgctggacatgcagaatcgactcaataaagtcatcaaaagtgtggggaagatcgagcactccttctggagatcctttcacaccgagcggaagacagaaccagccacaggtttcatcgacggtgacttgattgagagtttcctggatattagccgccccaagatgcaggaggtggtggcaaacctacagtatgacggcgttcgcggcgccttgtttatcctcaagagcgagctatgaccat

SEQ ID NO: 69740 - DNA, 4319 bp, Homo sapiens
agaggccaggtgaggccgtcccgtgatgccccgcgccccggccgctctggcctgcaacgtgtctctggggcggaggcagcggcagtggagttcgctgcgcgctgttgggggccacctgtcttttcgcttgtgtccctctttctagtgtcgcgctcgagtcccgacgggccgctccaagcctcgacatgtcgtacaactacgtggtaacggcccagaagcccaccgccgtgaacggctgcgtgaccggacactttacttcggccgaagacttaaacctgttgattgccaaaaacacgagattagagatctatgtggtcaccgccgaggggcttcggcccgtcaaagaggtgggcatgtatgggaagattgcggtcatggagcttttcaggcccaagggggagagcaaggacctgctgtttatcttgacagcgaagtacaatgcctgcatcctggagtataaacagagtggcgagagcattgacatcattacgcgagcccatggcaatgtccaggaccgcattggccgcccctcagagaccggcattattggcatcattgaccctgagtgccggatgattggcctgcgtctctatgatggccttttcaaggttattccactagatcgcgataataaagaactcaaggccttcaacatccgcctggaggagctgcatgtcattgatgtcaagttcctatatggttgccaagcacctactatttgctttgtctaccaggaccctcaggggcggcacgtaaaaacctatgaggtgtctctccgagaaaaggaattcaataagggcccttggaaacaggaaaatgtcgaagctgaagcttccatggtgatcgcagtcccagagccctttgggggggccatcatcattggacaggagtcaatcacctatcacaatggtgacaaatacctggctattgcccctcctatcatcaagcaaagcacgattgtgtgccacaatcgagtggaccctaatggctcaagatacctgctgggagacatggaaggccggctcttcatgctgcttttggagaaggaggaacagatggatggcaccgtcactctcaaggatctccgtgtagaactccttggagagacctctattgctgagtgcttgacataccttgataatggtgttgtgtttgtcgggtctcgcctgggtgactcccagcttgtgaagctcaacgttgacagtaatgaacaaggctcctatgtagtggccatggaaacctttaccaacttaggacccattgtcgatatgtgcgtggtggacctggagaggcaggggcaggggcagctggtcacttgctctggggctttcaaggaaggttctttgcggatcatccggaatggaattggaatccacgagcatgccagcattgacttaccaggcatcaaaggattatggccactgcggtctgaccctaatcgtgagactgatgacactttggtgctctcttttgtgggccagacaagagttctcatgttaaatggagaggaggtagaagaaaccgaactgatgggtttcgtggatgatcagcagactttcttctgtggcaacgtggctcatcagcagcttatccagatcacttcagcatcggtgaggttggtctctcaagaacccaaagctctggtcagtgaatggaaggagcctcaggccaagaacatcagtgtggcctcctgcaatagcagccaggtggtggtggctgtaggcagggccctctactatctgcagatccatcctcaggagctccggcagatcagccacacagagatggaacatgaagtggcttgcttggacatcaccccattaggagacagcaatggactgtcccctctttgtgccattggcctctggacggacatctcggctcgtatcttgaagttgccctcttttgaactactgcacaaggagatgctgggtggagagatcattcctcgctccatcctgatgaccacctttgagagtagccattacctcctttgtgccttgggagatggagcgcttttctactttgggctcaacattgagacaggtctgttgagcgaccgtaagaaggtgactttgggcacccagcccaccgtattgaggacttttcgttctctttctaccaccaacgtctttgcttgttctgaccgccccactgtcatctatagcagcaaccacaaattggtcttctcaaatgtcaacctcaaggaagtgaactacatgtgtcccctcaattcagatggctatcctgacagcctggcgctggccaacaatagcaccctcaccattggcaccatcgatgagatccagaagctgcacattcgcacagttcccctctatgagtctccaaggaagatctgctaccaggaagtgtcccagtgtttcggggtcctctccagccgcattgaagtccaagacacgagtgggggcacgacagccttgaggcccagcgctagcacccaggctctgtccagcagtgtaagctccagcaagctgttctccagcagcactgctcctcatgagacctcctttggagaagaggtggaggtgcacaacctacttatcattgaccaacacacctttgaagtgcttcatgcccaccagtttctgcagaatgaatatgccctcagtctggtttcctgcaagctgggcaaagaccccaacacttacttcattgtgggcacagcaatggtgtatcctgaagaggcagagcccaagcagggtcgcattgtggtctttcagtattcggatggaaaactacagactgtggctgaaaaggaagtgaaaggggccgtgtactctatggtggaatttaacgggaagctgttagccagcatcaatagcacggtgcggctctatgagtggacaacagagaaggagctgcgcactgagtgcaaccactacaacaacatcatggccctctacctgaagaccaagggcgacttcatcctggtgggcgaccttatgcgctcagtgctgctgcttgcctacaagcccatggaaggaaactttgaagagattgctcgagactttaatcccaactggatgagtgctgtggaaatcttggatgatgacaattttctgggggctgaaaatgcctttaacttgtttgtgtgtcaaaaggatagcgctgccaccactgacgaggagcggcagcacctccaggaggttggtcttttccacctgggcgagtttgtcaatgtcttttgccacggctctctggtaatgcagaatctgggtgagacttccacccccacacaaggctcggtgctcttcggcacggtcaacggcatgatagggctggtgacctcactgtcagagagctggtacaacctcctgctggacatgcagaatcgactcaataaagtcatcaaaagtgtggggaagatcgagcactccttctggagatcctttcacaccgagcggaagacagaaccagccacaggtttcatcgacggtgacttgattgagagtttcctggatattagccgccccaagatgcaggaggtggtggcaaacctacagtatgacgatggcagcggtatgaagcgagaggccactgcagacgacctcatcaaggttgtggaggagctaactcggatccattagccaagggcagggggcccctttgctgaccctccccaaaggctttgccctgctgccctccccctcctctccaccatcgtcttcttggccatgggaggcctttccctaagccagctgcccccagagccacagttcccctatgtggaagtggggcgggcttcatagagacttgggaatgagctgaaggtgaaacattttctccctggatttttaccagtctcacatgattccagccatcaccttagaccaccaagccttgattggtgttgccagttgtcctccttccggggaaggattttgcagttctttggctgaaaggaagctgtgcgtgtgtgtgtgtgtatgtgtgtgtgtgtatgtgtatctcacactcatgcattgtcctctttttatttagattggcagtgtagggagttgtgggtagtggggaagagggttaggagggtttcattgtctgtgaagtgagaccttccttttacttttcttctattgcctctgagagcatcaggcctagaggcctgactgccaagccatgggtagcctgggtgtaaaacctggagatggtggatgatccccacgccacagcccttttgtctctgcaaactgccttcttcggaaagaagaaggtgggaggatgtgaattgttagtttctgagttttaccaaataaagtagaatataagaataagaagaaagagaattcccccccctcctg

SEQ ID NO: 69741 - DNA, 4551 bp, Homo sapiens
agaggccaggtgaggccgtcccgtgatgccccgcgccccggccgctctggcctgcaacgtgtctctggggcggaggcagcggcagtggagttcgctgcgcgctgttgggggccacctgtcttttcgcttgtgtccctctttctagtgtcgcgctcgagtcccgacgggccgctccaagcctcgacatgtcgtacaactacgtggtaacggcccagaagcccaccgccgtgaacggctgcgtgaccggacactttacttcggccgaagacttaaacctgttgattgccaaaaacacgagattagagatctatgtggtcaccgccgaggggcttcggcccgtcaaagaggtgggcatgtatgggaagattgcggtcatggagcttttcaggcccaagggggagagcaaggacctgctgtttatcttgacagcgaagtacaatgcctgcatcctggagtataaacagagtggcgagagcattgacatcattacgcgagcccatggcaatgtccaggaccgcattggccgcccctcagagaccggcattattggcatcattgaccctgagtgccggatgattggcctgcgtctctatgatggccttttcaaggttattccactagatcgcgataataaagaactcaaggccttcaacatccgcctggaggagctgcatgtcattgatgtcaagttcctatatggttgccaagcacctactatttgctttgtctaccaggaccctcaggggcggcacgtaaaaacctatgaggtgtctctccgagaaaaggaattcaataagggcccttggaaacaggaaaatgtcgaagctgaagcttccatggtgatcgcagtcccagagccctttgggggggccatcatcattggacaggagtcaatcacctatcacaatggtgacaaatacctggctattgcccctcctatcatcaagcaaagcacgattgtgtgccacaatcgagtggaccctaatggctcaagatacctgctgggagacatggaaggccggctcttcatgctgcttttggagaaggaggaacagatggatggcaccgtcactctcaaggatctccgtgtagaactccttggagagacctctattgctgagtgcttgacataccttgataatggtgttgtgtttgtcgggtctcgcctgggtgactcccagcttgtgaagctcaacgttgacagtaatgaacaaggctcctatgtagtggccatggaaacctttaccaacttaggacccattgtcgatatgtgcgtggtggacctggagaggcaggggcaggggcagctggtcacttgctctggggctttcaaggaaggttctttgcggatcatccggaatggaattggaatccacgagcatgccagcattgacttaccaggcatcaaaggattatggccactgcggtctgaccctaatcgtgagactgatgacactttggtgctctcttttgtgggccagacaagagttctcatgttaaatggagaggaggtagaagaaaccgaactgatgggtttcgtggatgatcagcagactttcttctgtggcaacgtggctcatcagcagcttatccagatcacttcagcatcggtgaggttggtctctcaagaacccaaagctctggtcagtgaatggaaggagcctcaggccaagaacatcagtgtggcctcctgcaatagcagccaggtggtggtggctgtaggcagggccctctactatctgcagatccatcctcaggagctccggcagatcagccacacagagatggaacatgaagtggcttgcttggacatcaccccattaggagacagcaatggactgtcccctctttgtgccattggcctctggacggacatctcggctcgtatcttgaagttgccctcttttgaactactgcacaaggagatgctgggtggagagatcattcctcgctccatcctgatgaccacctttgagagtagccattacctcctttgtgccttgggagatggagcgcttttctactttgggctcaacattgagacaggtctgttgagcgaccgtaagaaggtgactttgggcacccagcccaccgtattgaggacttttcgttctctttctaccaccaacgtctttgcttgttctgaccgccccactgtcatctatagcagcaaccacaaattggtcttctcaaatgtcaacctcaaggaagtgaactacatgtgtcccctcaattcagatggctatcctgacagcctggcgctggccaacaatagcaccctcaccattggcaccatcgatgagatccagaagctgcacattcgcacagttcccctctatgagtctccaaggaagatctgctaccaggaagtgtcccagtgtttcggggtcctctccagccgcattgaagtccaagacacgagtgggggcacgacagccttgaggcccagcgctagcacccaggctctgtccagcagtgtaagctccagcaagctgttctccagcagcactgctcctcatgagacctcctttggagaagaggtggaggtgcacaacctacttatcattgaccaacacacctttgaagtgcttcatgcccaccagtttctgcagaatgaatatgccctcagtctggtttcctgcaagctgggcaaagaccccaacacttacttcattgtgggcacagcaatggtgtatcctgaagaggcagagcccaagcagggtcgcattgtggtctttcagtattcggatggaaaactacagactgtggctgaaaaggaagtgaaaggggccgtgtactctatggtggaatttaacgggaagctgttagccagcatcaatagcacggtgcggctctatgagtggacaacagagaaggagctgcgcactgagtgcaaccactacaacaacatcatggccctctacctgaagaccaagggcgacttcatcctggtgggcgaccttatgcgctcagtgctgctgcttgcctacaagcccatggaaggaaactttgaagagattgctcgagactttaatcccaactggatgagtgctgtggaaatcttggatgatgacaattttctgggggctgaaaatgcctttaacttgtttgtgtgtcaaaaggatagcgctgccaccactgacgaggagcggcagcacctccaggaggttggtcttttccacctgggcgagtttgtcaatgtcttttgccacggctctctggtaatgcagaatctgggtgagacttccacccccacacaaggctcggtgctcttcggcacggtcaacggcatgatagggctggtgacctcactgtcagagagctggtacaacctcctgctggacatgcagaatcgactcaataaagtcatcaaaagtgtggggaagatcgagcactccttctggagatcctttcacaccgagcggaagacagaaccagccacaggtttcatcgacggtgacttgattgagagtttcctggatattagccgccccaagatgcaggaggtggtggcaaacctacagtatgacgatggcagcggtatgaagcgagaggccactgcagacgacctcatcaaggttgtggaggagctaactcggatccattagccaagggcagggggcccctttgctgaccctccccaaaggctttgccctgctgccctccccctcctctccaccatcgtcttcttggccatgggaggcctttccctaagccagctgcccccagagccacagttcccctatgtggaagtggggcgggcttcatagagacttgggaatgagctgaaggtgaaacattttctccctggatttttaccagtctcacatgattccagccatcaccttagaccaccaagccttgattggtgttgccagttgtcctccttccggggaaggattttgcagttctttggctgaaaggaagctgtgcgtgtgtgtgtgtgtatgtgtgtgtgtgtatgtgtatctcacactcatgcattgtcctctttttatttagattggcagtgtagggagttgtgggtagtggggaagagggttaggagggtttcattgtctgtgaagtgagaccttccttttacttttcttctattgcctctgagagcatcaggcctagaggcctgactgccaagccatgggtagcctgggtgtaaaacctggagatggtggatgatccccacgccacagcccttttgtctctgcaaactgccttcttcggaaagaagaaggtgggaggatgtgaattgttagtttctgagttttaccaaataaagtagaatataagaataagaagaaagcagcaatcttagatgcctttccgatttgtctctttatgctgtctctccatacaaaaatttcttggggcgccccgttacccaattgctcctatagtgaggcttcttataattaactgcttcgcgtttcaaattcccctttctcctctttgccttattctcttattgtcccttacctctttcgtcgtcgcacattttctatactctcgatgtctataggacaattgtcatgcgcaatatttcgttaaactccg

SEQ ID NO: 69742 - DNA, 4500 bp, Homo sapiens
agaggccaggtgaggccgtcccgtgatgccccgcgccccggccgctctggcctgcaacgtgtctctggggcggaggcagcggcagtggagttcgctgcgcgctgttgggggccacctgtcttttcgcttgtgtccctctttctagtgtcgcgctcgagtcccgacgggccgctccaagcctcgacatgtcgtacaactacgtggtaacggcccagaagcccaccgccgtgaacggctgcgtgaccggacactttacttcggccgaagacttaaacctgttgattgccaaaaacacgagattagagatctatgtggtcaccgccgaggggcttcggcccgtcaaagaggtgggcatgtatgggaagattgcggtcatggagcttttcaggcccaagggggagagcaaggacctgctgtttatcttgacagcgaagtacaatgcctgcatcctggagtataaacagagtggcgagagcattgacatcattacgcgagcccatggcaatgtccaggaccgcattggccgcccctcagagaccggcattattggcatcattgaccctgagtgccggatgattggcctgcgtctctatgatggccttttcaaggttattccactagatcgcgataataaagaactcaaggccttcaacatccgcctggaggagctgcatgtcattgatgtcaagttcctatatggttgccaagcacctactatttgctttgtctaccaggaccctcaggggcggcacgtaaaaacctatgaggtgtctctccgagaaaaggaattcaataagggcccttggaaacaggaaaatgtcgaagctgaagcttccatggtgatcgcagtcccagagccctttgggggggccatcatcattggacaggagtcaatcacctatcacaatggtgacaaatacctggctattgcccctcctatcatcaagcaaagcacgattgtgtgccacaatcgagtggaccctaatggctcaagatacctgctgggagacatggaaggccggctcttcatgctgcttttggagaaggaggaacagatggatggcaccgtcactctcaaggatctccgtgtagaactccttggagagacctctattgctgagtgcttgacataccttgataatggtgttgtgtttgtcgggtctcgcctgggtgactcccagcttgtgaagctcaacgttgacagtaatgaacaaggctcctatgtagtggccatggaaacctttaccaacttaggacccattgtcgatatgtgcgtggtggacctggagaggcaggggcaggggcagctggtcacttgctctggggctttcaaggaaggttctttgcggatcatccggaatggaattggaatccacgagcatgccagcattgacttaccaggcatcaaaggattatggccactgcggtctgaccctaatcgtgagactgatgacactttggtgctctcttttgtgggccagacaagagttctcatgttaaatggagaggaggtagaagaaaccgaactgatgggtttcgtggatgatcagcagactttcttctgtggcaacgtggctcatcagcagcttatccagatcacttcagcatcggtgaggttggtctctcaagaacccaaagctctggtcagtgaatggaaggagcctcaggccaagaacatcagtgtggcctcctgcaatagcagccaggtggtggtggctgtaggcagggccctctactatctgcagatccatcctcaggagctccggcagatcagccacacagagatggaacatgaagtggcttgcttggacatcaccccattaggagacagcaatggactgtcccctctttgtgccattggcctctggacggacatctcggctcgtatcttgaagttgccctcttttgaactactgcacaaggagatgctgggtggagagatcattcctcgctccatcctgatgaccacctttgagagtagccattacctcctttgtgccttgggagatggagcgcttttctactttgggctcaacattgagacaggtctgttgagcgaccgtaagaaggtgactttgggcacccagcccaccgtattgaggacttttcgttctctttctaccaccaacgtctttgcttgttctgaccgccccactgtcatctatagcagcaaccacaaattggtcttctcaaatgtcaacctcaaggaagtgaactacatgtgtcccctcaattcagatggctatcctgacagcctggcgctggccaacaatagcaccctcaccattggcaccatcgatgagatccagaagctgcacattcgcacagttcccctctatgagtctccaaggaagatctgctaccaggaagtgtcccagtgtttcggggtcctctccagccgcattgaagtccaagacacgagtgggggcacgacagccttgaggcccagcgctagcacccaggctctgtccagcagtgtaagctccagcaagctgttctccagcagcactgctcctcatgagacctcctttggagaagaggtggaggtgcacaacctacttatcattgaccaacacacctttgaagtgcttcatgcccaccagtttctgcagaatgaatatgccctcagtctggtttcctgcaagctgggcaaagaccccaacacttacttcattgtgggcacagcaatggtgtatcctgaagaggcagagcccaagcagggtcgcattgtggtctttcagtattcggatggaaaactacagactgtggctgaaaaggaagtgaaaggggccgtgtactctatggtggaatttaacgggaagctgttagccagcatcaatagcacggtgcggctctatgagtggacaacagagaaggagctgcgcactgagtgcaaccactacaacaacatcatggccctctacctgaagaccaagggcgacttcatcctggtgggcgaccttatgcgctcagtgctgctgcttgcctacaagcccatggaaggaaactttgaagagattgctcgagactttaatcccaactggatgagtgctgtggaaatcttggatgatgacaattttctgggggctgaaaatgcctttaacttgtttgtgtgtcaaaaggatagcgctgccaccactgacgaggagcggcagcacctccaggaggttggtcttttccacctgggcgagtttgtcaatgtcttttgccacggctctctggtaatgcagaatctgggtgagacttccacccccacacaaggctcggtgctcttcggcacggtcaacggcatgatagggctggtgacctcactgtcagagagctggtacaacctcctgctggacatgcagaatcgactcaataaagtcatcaaaagtgtggggaagatcgagcactccttctggagatcctttcacaccgagcggaagacagaaccagccacaggtttcatcgacggtgacttgattgagagtttcctggatattagccgccccaagatgcaggaggtggtggcaaacctacagtatgacgatggcagcggtatgaagcgagaggccactgcagacgacctcatcaaggttgtggaggagctaactcggatccattagccaagggcagggggcccctttgctgaccctccccaaaggctttgccctgctgccctccccctcctctccaccatcgtcttcttggccatgggaggcctttccctaagccagctgcccccagagccacagttcccctatgtggaagtggggcgggcttcatagagacttgggaatgagctgaaggtgaaacattttctccctggatttttaccagtctcacatgattccagccatcaccttagaccaccaagccttgattggtgttgccagttgtcctccttccggggaaggattttgcagttctttggctgaaaggaagctgtgcgtgtgtgtgtgtgtatgtgtgtgtgtgtatgtgtatctcacactcatgcattgtcctctttttatttagattggcagtgtagggagttgtgggtagtggggaagagggttaggagggtttcattgtctgtgaagtgagaccttccttttacttttcttctattgcctctgagagcatcaggcctagaggcctgactgccaagccatgggtagcctgggtgtaaaacctggagatggtggatgatccccacgccacagcccttttgtctctgcaaactgccttcttcggaaagaagaaggtggcggttcacttggcgttctcggtttacccatacgtgcactcgcaaacacaacacaaacaccagggggccggacaattgcccaaagggcgctacccaccggggcctaaaacacgaggaaaccgggtacacaatgtgtgaacccctgccggaaaaaacgcaacccacagggcatgagacgggatatagaatgacgcacgagtataactgcgtaccggcgcccacgtagacacgcacagcgcaacaagcgcgcatacgcagccagagcg

SEQ ID NO: 69743 - DNA, 2920 bp, Homo sapiens
  misc_feature (30)..(30): n is a, c, g, or t
cggctaggtagaggccggggtgtaatcggncgaggactaatcgtgagactgatgacactttggtgctctcttttgtgggccagacaagagttctcatgttaaatggagaggaggtagaagaaaccgaactgatgggtttcgtggatgatcagcagactttcttctgtggcaacgtggctcatcagcagcttatccagtcatcagcagcttatccagatcacttcagcatcggtgaggttggtctctcaagaacccaaagctctggtcagtgaatggaaggagcctcaggccaagaacatcagtgtggcctcctgcaatagcagccaggtggtggtggctgtaggcagggccctctactatctgcagatccatcctcaggagctccggcagatcagccacacagagatggaacatgaagtggcttgcttggacatcaccccattaggagacagcaatggactgtcccctctttgtgccattggcctctggacggacatctcggctcgtatcttgaagttgccctcttttgaactactgcacaaggagatgctgggtggagagatcattcctcgctccatcctgatgaccacctttgagagtagccattacctcctttgtgccttgggagatggagcgcttttctactttgggctcaacattgagacaggtctgttgagcgaccgtaagaaggtgactttgggcacccagcccaccgtattgaggacttttcgttctctttctaccaccaacgtctttgcttgttctgaccgccccactgtcatctatagcagcaaccacaaattggtcttctcaaatgtcaacctcaaggaagtgaactacatgtgtcccctcaattcagatggctatcctgacagcctggcgctggccaacaatagcaccctcaccattggcaccatcgatgagatccagaagctgcacattcgcacagttcccctctatgagtctccaaggaagatctgctaccaggaagtgtcccagtgtttcggggtcctctccagccgcattgaagtccaagacacgagtgggggcacgacagccttgaggcccagcgctagcacccaggctctgtccagcagtgtaagctccagcaagctgttctccagcagcactgctcctcatgagacctcctttggagaagaggtggaggtgcacaacctacttatcattgaccaacacacctttgaagtgcttcatgcccaccagtttctgcagaatgaatatgccctcagtctggtttcctgcaagctgggcaaagaccccaacacttacttcattgtgggcacagcaatggtgtatcctgaagaggcagagcccaagcagggtcgcattgtggtctttcagtattcggatggaaaactacagactgtggctgaaaaggaagtgaaaggggccgtgtactctatggtggaatttaacgggaagctgttagccagcatcaatagcacggtgcggctctatgagtggacaacagagaaggagctgcgcactgagtgcaaccactacaacaacatcatggccctctacctgaagaccaagggcgacttcatcctggtgggcgaccttatgcgctcagtgctgctgcttgcctacaagcccatggaaggaaactttgaagagattgctcgagactttaatcccaactggatgagtgctgtggaaatcttggatgatgacaattttctgggggctgaaaatgcctttaacttgtttgtgtgtcaaaaggatagcgctgccaccactgacgaggagcggcagcacctccaggaggttggtcttttccacctgggcgagtttgtcaatgtcttttgccacggctctctggtaatgcagaatctgggtgagacttccacccccacacaaggctcggtgctcttcggcacggtcaacggcatgatagggctggtgacctcactgtcagagagctggtacaacctcctgctggacatgcagaatcgactcaataaagtcatcaaaagtgtggggaagatcgagcactccttctggagatcctttcacaccgagcggaagacagaaccagccacaggtttcatcgacggtgacttgattgagagtttcctggatattagccgccccaagatgcaggaggtggtggcaaacctacagtatgacgatggcagcggtatgaagcgagaggccactgcagacgacctcatcaaggttgtggaggagctaactcggatccattagccaagggcagggggcccctttgctgaccctccccaaaggctttgccctgctgccctccccctcctctccaccatcgtcttcttggccatgggaggcctttccctaagccagctgcccccagagccacagttcccctatgtggaagtggggcgggcttcatagagacttgggaatgagctgaaggtgaaacattttctccctggatttttaccagtctcacatgattccagccatcaccttagaccaccaagccttgattggtgttgccagttgtcctccttccggggaaggattttgcagttctttggctgaaaggaagctgtgcgtgtgtgtgtgtgtatgtgtgtgtgtgtatgtgtatctcacactcatgcattgtcctctttttatttagattggcagtgtagggagttgtgggtagtggggaagagggttaggagggtttcattgtctgtgaagtgagaccttccttttacttttcttctattgcctctgagagcatcaggcctagaggcctgactgccaagccatgggtagcctgggtgtaaaacctggagatggtggatgatccccacgccacagcccttttgtctctgcaaactgccttcttcggaaagaagaaggtgggaggatgtgaattgttagtttctgagttttaccaaataaagtagaatataagaataagaagaaa

SEQ ID NO: 69744 - DNA, 2740 bp, Homo sapiens
  misc_feature (30)..(30): n is a, c, g, or t
cggctaggtagaggccggggtgtaatcggncgaggaatcacttcagcatcggtgaggttggtctctcaagaacccaaagctctggtcagtgaatggaaggagcctcaggccaagaacatcagtgtggcctcctgcaatagcagccaggtggtggtggctgtaggcagggccctctactatctgcagatccatcctcaggagctccggcagatcagccacacagagatggaacatgaagtggcttgcttggacatcaccccattaggagacagcaatggactgtcccctctttgtgccattggcctctggacggacatctcggctcgtatcttgaagttgccctcttttgaactactgcacaaggagatgctgggtggagagatcattcctcgctccatcctgatgaccacctttgagagtagccattacctcctttgtgccttgggagatggagcgcttttctactttgggctcaacattgagacaggtctgttgagcgaccgtaagaaggtgactttgggcacccagcccaccgtattgaggacttttcgttctctttctaccaccaacgtctttgcttgttctgaccgccccactgtcatctatagcagcaaccacaaattggtcttctcaaatgtcaacctcaaggaagtgaactacatgtgtcccctcaattcagatggctatcctgacagcctggcgctggccaacaatagcaccctcaccattggcaccatcgatgagatccagaagctgcacattcgcacagttcccctctatgagtctccaaggaagatctgctaccaggaagtgtcccagtgtttcggggtcctctccagccgcattgaagtccaagacacgagtgggggcacgacagccttgaggcccagcgctagcacccaggctctgtccagcagtgtaagctccagcaagctgttctccagcagcactgctcctcatgagacctcctttggagaagaggtggaggtgcacaacctacttatcattgaccaacacacctttgaagtgcttcatgcccaccagtttctgcagaatgaatatgccctcagtctggtttcctgcaagctgggcaaagaccccaacacttacttcattgtgggcacagcaatggtgtatcctgaagaggcagagcccaagcagggtcgcattgtggtctttcagtattcggatggaaaactacagactgtggctgaaaaggaagtgaaaggggccgtgtactctatggtggaatttaacgggaagctgttagccagcatcaatagcacggtgcggctctatgagtggacaacagagaaggagctgcgcactgagtgcaaccactacaacaacatcatggccctctacctgaagaccaagggcgacttcatcctggtgggcgaccttatgcgctcagtgctgctgcttgcctacaagcccatggaaggaaactttgaagagattgctcgagactttaatcccaactggatgagtgctgtggaaatcttggatgatgacaattttctgggggctgaaaatgcctttaacttgtttgtgtgtcaaaaggatagcgctgccaccactgacgaggagcggcagcacctccaggaggttggtcttttccacctgggcgagtttgtcaatgtcttttgccacggctctctggtaatgcagaatctgggtgagacttccacccccacacaaggctcggtgctcttcggcacggtcaacggcatgatagggctggtgacctcactgtcagagagctggtacaacctcctgctggacatgcagaatcgactcaataaagtcatcaaaagtgtggggaagatcgagcactccttctggagatcctttcacaccgagcggaagacagaaccagccacaggtttcatcgacggtgacttgattgagagtttcctggatattagccgccccaagatgcaggaggtggtggcaaacctacagtatgacgatggcagcggtatgaagcgagaggccactgcagacgacctcatcaaggttgtggaggagctaactcggatccattagccaagggcagggggcccctttgctgaccctccccaaaggctttgccctgctgccctccccctcctctccaccatcgtcttcttggccatgggaggcctttccctaagccagctgcccccagagccacagttcccctatgtggaagtggggcgggcttcatagagacttgggaatgagctgaaggtgaaacattttctccctggatttttaccagtctcacatgattccagccatcaccttagaccaccaagccttgattggtgttgccagttgtcctccttccggggaaggattttgcagttctttggctgaaaggaagctgtgcgtgtgtgtgtgtgtatgtgtgtgtgtgtatgtgtatctcacactcatgcattgtcctctttttatttagattggcagtgtagggagttgtgggtagtggggaagagggttaggagggtttcattgtctgtgaagtgagaccttccttttacttttcttctattgcctctgagagcatcaggcctagaggcctgactgccaagccatgggtagcctgggtgtaaaacctggagatggtggatgatccccacgccacagcccttttgtctctgcaaactgccttcttcggaaagaagaaggtgggaggatgtgaattgttagtttctgagttttaccaaataaagtagaatataagaataagaagaaa

SEQ ID NO: 69745 - DNA, 4326 bp, Homo sapiens
agaggccaggtgaggccgtcccgtgatgccccgcgccccggccgctctggcctgcaacgtgtctctggggcggaggcagcggcagtggagttcgctgcgcgctgttgggggccacctgtcttttcgcttgtgtccctctttctagtgtcgcgctcgagtcccgacgggccgctccaagcctcgacatgtcgtacaactacgtggtaacggcccagaagcccaccgccgtgaacggctgcgtgaccggacactttacttcggccgaagacttaaacctgttgattgccaaaaacacgagattagagatctatgtggtcaccgccgaggggcttcggcccgtcaaagaggtgggcatgtatgggaagattgcggtcatggagcttttcaggcccaagggggagagcaaggacctgctgtttatcttgacagcgaagtacaatgcctgcatcctggagtataaacagagtggcgagagcattgacatcattacgcgagcccatggcaatgtccaggaccgcattggccgcccctcagagaccggcattattggcatcattgaccctgagtgccggatgattggcctgcgtctctatgatggccttttcaaggttattccactagatcgcgataataaagaactcaaggccttcaacatccgcctggaggagctgcatgtcattgatgtcaagttcctatatggttgccaagcacctactatttgctttgtctaccaggaccctcaggggcggcacgtaaaaacctatgaggtgtctctccgagaaaaggaattcaataagggcccttggaaacaggaaaatgtcgaagctgaagcttccatggtgatcgcagtcccagagccctttgggggggccatcatcattggacaggagtcaatcacctatcacaatggtgacaaatacctggctattgcccctcctatcatcaagcaaagcacgattgtgtgccacaatcgagtggaccctaatggctcaagatacctgctgggagacatggaaggccggctcttcatgctgcttttggagaaggaggaacagatggatggcaccgtcactctcaaggatctccgtgtagaactccttggagagacctctattgctgagtgcttgacataccttgataatggtgttgtgtttgtcgggtctcgcctgggtgactcccagcttgtgaagctcaacgttgacagtaatgaacaaggctcctatgtagtggccatggaaacctttaccaacttaggacccattgtcgatatgtgcgtggtggacctggagaggcaggggcaggggcagctggtcacttgctctggggctttcaaggaaggttctttgcggatcatccggaatggaattggaatccacgagcatgccagcattgacttaccaggcatcaaaggattatggccactgcggtctgaccctaatcgtgagactgatgacactttggtgctctcttttgtgggccagacaagagttctcatgttaaatggagaggaggtagaagaaaccgaactgatgggtttcgtggatgatcagcagactttcttctgtggcaacgtggctcatcagcagcttatccagatcacttcagcatcggtgaggttggtctctcaagaacccaaagctctggtcagtgaatggaaggagcctcaggccaagaacatcagtgtggcctcctgcaatagcagccaggtggtggtggctgtaggcagggccctctactatctgcagatccatcctcaggagctccggcagatcagccacacagagatggaacatgaagtggcttgcttggacatcaccccattaggagacagcaatggactgtcccctctttgtgccattggcctctggacggacatctcggctcgtatcttgaagttgccctcttttgaactactgcacaaggagatgctgggtggagagatcattcctcgctccatcctgatgaccacctttgagagtagccattacctcctttgtgccttgggagatggagcgcttttctactttgggctcaacattgagacaggtctgttgagcgaccgtaagaaggtgactttgggcacccagcccaccgtattgaggacttttcgttctctttctaccaccaacgtctttgcttgttctgaccgccccactgtcatctatagcagcaaccacaaattggtcttctcaaatgtcaacctcaaggaagtgaactacatgtgtcccctcaattcagatggctatcctgacagcctggcgctggccaacaatagcaccctcaccattggcaccatcgatgagatccagaagctgcacattcgcacagttcccctctatgagtctccaaggaagatctgctaccaggaagtgtcccagtgtttcggggtcctctccagccgcattgaagtccaagacacgagtgggggcacgacagccttgaggcccagcgctagcacccaggctctgtccagcagtgtaagctccagcaagctgttctccagcagcactgctcctcatgagacctcctttggagaagaggtggaggtgcacaacctacttatcattgaccaacacacctttgaagtgcttcatgcccaccagtttctgcagaatgaatatgccctcagtctggtttcctgcaagctgggcaaagaccccaacacttacttcattgtgggcacagcaatggtgtatcctgaagaggcagagcccaagcagggtcgcattgtggtctttcagtattcggatggaaaactacagactgtggctgaaaaggaagtgaaaggggccgtgtactctatggtggaatttaacgggaagctgttagccagcatcaatagcacggtgcggctctatgagtggacaacagagaaggagctgcgcactgagtgcaaccactacaacaacatcatggccctctacctgaagaccaagggcgacttcatcctggtgggcgaccttatgcgctcagtgctgctgcttgcctacaagcccatggaaggaaactttgaagagattgctcgagactttaatcccaactggatgagtgctgtggaaatcttggatgatgacaattttctgggggctgaaaatgcctttaacttgtttgtgtgtcaaaaggatagcgctgccaccactgacgaggagcggcagcacctccaggaggttggtcttttccacctgggcgagtttgtcaatgtcttttgccacggctctctggtaatgcagaatctgggtgagacttccacccccacacaaggctcggtgctcttcggcacggtcaacggcatgatagggctggtgacctcactgtcagagagctggtacaacctcctgctggacatgcagaatcgactcaataaagtcatcaaaagtgtggggaagatcgagcactccttctggagatcctttcacaccgagcggaagacagaaccagccacaggtttcatcgacggtgacttgattgagagtttcctggatattagccgccccaagatgcaggaggtggtggcaaacctacagtatgacgatggcagcggtatgaagcgagaggccactgcagacgacctcatcaaggttgtggaggagctaactcggatccattagccaagggcagggggcccctttgctgaccctccccaaaggctttgccctgctgccctccccctcctctccaccatcgtcttcttggccatgggaggcctttccctaagccagctgcccccagagccacagttcccctatgtggaagtggggcgggcttcatagagacttgggaatgagctgaaggtgaaacattttctccctggatttttaccagtctcacatgattccagccatcaccttagaccaccaagccttgattggtgttgccagttgtcctccttccggggaaggattttgcagttctttggctgaaaggaagctgtgcgtgtgtgtgtgtgtatgtgtgtgtgtgtatgtgtatctcacactcatgcattgtcctctttttatttagattggcagtgtagggagttgtgggtagtggggaagagggttaggagggtttcattgtctgtgaagtgagaccttccttttacttttcttctattgcctctgagagcatcaggcctagaggcctgactgccaagccatgggtagcctgggtgtaaaacctggagatggtggatgatccccacgccacagcccttttgtctctgcaagtgcgtctccggaagacacggggcgggggaatgggagtccgggttcccccacagggatcagacagagacacccgagggggcgggccgatcacaagggagttataacggaggacccgcgg

SEQ ID NO: 69746 - DNA, 2703 bp, Homo sapiens
  misc_feature (30)..(30): n is a, c, g, or t
cggctaggtagaggccggggtgtaatcggncgaggaccaaagctctggtcagtgaatggaaggagcctcaggccaagaacatcagtgtggcctcctgcaatagcagccaggtggtggtggctgtaggcagggccctctactatctgcagatccatcctcaggagctccggcagatcagccacacagagatggaacatgaagtggcttgcttggacatcaccccattaggagacagcaatggactgtcccctctttgtgccattggcctctggacggacatctcggctcgtatcttgaagttgccctcttttgaactactgcacaaggagatgctgggtggagagatcattcctcgctccatcctgatgaccacctttgagagtagccattacctcctttgtgccttgggagatggagcgcttttctactttgggctcaacattgagacaggtctgttgagcgaccgtaagaaggtgactttgggcacccagcccaccgtattgaggacttttcgttctctttctaccaccaacgtctttgcttgttctgaccgccccactgtcatctatagcagcaaccacaaattggtcttctcaaatgtcaacctcaaggaagtgaactacatgtgtcccctcaattcagatggctatcctgacagcctggcgctggccaacaatagcaccctcaccattggcaccatcgatgagatccagaagctgcacattcgcacagttcccctctatgagtctccaaggaagatctgctaccaggaagtgtcccagtgtttcggggtcctctccagccgcattgaagtccaagacacgagtgggggcacgacagccttgaggcccagcgctagcacccaggctctgtccagcagtgtaagctccagcaagctgttctccagcagcactgctcctcatgagacctcctttggagaagaggtggaggtgcacaacctacttatcattgaccaacacacctttgaagtgcttcatgcccaccagtttctgcagaatgaatatgccctcagtctggtttcctgcaagctgggcaaagaccccaacacttacttcattgtgggcacagcaatggtgtatcctgaagaggcagagcccaagcagggtcgcattgtggtctttcagtattcggatggaaaactacagactgtggctgaaaaggaagtgaaaggggccgtgtactctatggtggaatttaacgggaagctgttagccagcatcaatagcacggtgcggctctatgagtggacaacagagaaggagctgcgcactgagtgcaaccactacaacaacatcatggccctctacctgaagaccaagggcgacttcatcctggtgggcgaccttatgcgctcagtgctgctgcttgcctacaagcccatggaaggaaactttgaagagattgctcgagactttaatcccaactggatgagtgctgtggaaatcttggatgatgacaattttctgggggctgaaaatgcctttaacttgtttgtgtgtcaaaaggatagcgctgccaccactgacgaggagcggcagcacctccaggaggttggtcttttccacctgggcgagtttgtcaatgtcttttgccacggctctctggtaatgcagaatctgggtgagacttccacccccacacaaggctcggtgctcttcggcacggtcaacggcatgatagggctggtgacctcactgtcagagagctggtacaacctcctgctggacatgcagaatcgactcaataaagtcatcaaaagtgtggggaagatcgagcactccttctggagatcctttcacaccgagcggaagacagaaccagccacaggtttcatcgacggtgacttgattgagagtttcctggatattagccgccccaagatgcaggaggtggtggcaaacctacagtatgacgatggcagcggtatgaagcgagaggccactgcagacgacctcatcaaggttgtggaggagctaactcggatccattagccaagggcagggggcccctttgctgaccctccccaaaggctttgccctgctgccctccccctcctctccaccatcgtcttcttggccatgggaggcctttccctaagccagctgcccccagagccacagttcccctatgtggaagtggggcgggcttcatagagacttgggaatgagctgaaggtgaaacattttctccctggatttttaccagtctcacatgattccagccatcaccttagaccaccaagccttgattggtgttgccagttgtcctccttccggggaaggattttgcagttctttggctgaaaggaagctgtgcgtgtgtgtgtgtgtatgtgtgtgtgtgtatgtgtatctcacactcatgcattgtcctctttttatttagattggcagtgtagggagttgtgggtagtggggaagagggttaggagggtttcattgtctgtgaagtgagaccttccttttacttttcttctattgcctctgagagcatcaggcctagaggcctgactgccaagccatgggtagcctgggtgtaaaacctggagatggtggatgatccccacgccacagcccttttgtctctgcaaactgccttcttcggaaagaagaaggtgggaggatgtgaattgttagtttctgagttttaccaaataaagtagaatataagaataagaagaaa

SEQ ID NO: 69747 - DNA, 4070 bp, Homo sapiens
agaggccaggtgaggccgtcccgtgatgccccgcgccccggccgctctggcctgcaacgtgtctctggggcggaggcagcggcagtggagttcgctgcgcgctgttgggggccacctgtcttttcgcttgtgtccctctttctagtgtcgcgctcgagtcccgacgggccgctccaagcctcgacatgtcgtacaactacgtggtaacggcccagaagcccaccgccgtgaacggctgcgtgaccggacactttacttcggccgaagacttaaacctgttgattgccaaaaacacgagattagagatctatgtggtcaccgccgaggggcttcggcccgtcaaagaggtgggcatgtatgggaagattgcggtcatggagcttttcaggcccaagggggagagcaaggacctgctgtttatcttgacagcgaagtacaatgcctgcatcctggagtataaacagagtggcgagagcattgacatcattacgcgagcccatggcaatgtccaggaccgcattggccgcccctcagagaccggcattattggcatcattgaccctgagtgccggatgattggcctgcgtctctatgatggccttttcaaggttattccactagatcgcgataataaagaactcaaggccttcaacatccgcctggaggagctgcatgtcattgatgtcaagttcctatatggttgccaagcacctactatttgctttgtctaccaggaccctcaggggcggcacgtaaaaacctatgaggtgtctctccgagaaaaggaattcaataagggcccttggaaacaggaaaatgtcgaagctgaagcttccatggtgatcgcagtcccagagccctttgggggggccatcatcattggacaggagtcaatcacctatcacaatggtgacaaatacctggctattgcccctcctatcatcaagcaaagcacgattgtgtgccacaatcgagtggaccctaatggctcaagatacctgctgggagacatggaaggccggctcttcatgctgcttttggagaaggaggaacagatggatggcaccgtcactctcaaggatctccgtgtagaactccttggagagacctctattgctgagtgcttgacataccttgataatggtgttgtgtttgtcgggtctcgcctgggtgactcccagcttgtgaagctcaacgttgacagtaatgaacaaggctcctatgtagtggccatggaaacctttaccaacttaggacccattgtcgatatgtgcgtggtggacctggagaggcaggggcaggggcagctggtcacttgctctggggctttcaaggaaggttctttgcggatcatccggaatggaattggaatccacgagcatgccagcattgacttaccaggcatcaaaggattatggccactgcggtctgaccctaatcgtgagactgatgacactttggtgctctcttttgtgggccagacaagagttctcatgttaaatggagaggaggtagaagaaaccgaactgatgggtttcgtggatgatcagcagactttcttctgtggcaacgtggctcatcagcagcttatccagatcacttcagcatcggtgaggttggtctctcaagaacccaaagctctggtcagtgaatggaaggagcctcaggccaagaacatcagtgtggcctcctgcaatagcagccaggtggtggtggctgtaggcagggccctctactatctgcagatccatcctcaggagctccggcagatcagccacacagagatggaacatgaagtggcttgcttggacatcaccccattaggagacagcaatggactgtcccctctttgtgccattggcctctggacggacatctcggctcgtatcttgaagttgccctcttttgaactactgcacaaggagatgctgggtggagagatcattcctcgctccatcctgatgaccacctttgagagtagccattacctcctttgtgccttgggagatggagcgcttttctactttgggctcaacattgagacaggtctgttgagcgaccgtaagaaggtgactttgggcacccagcccaccgtattgaggacttttcgttctctttctaccaccaacgtctttgcttgttctgaccgccccactgtcatctatagcagcaaccacaaattggtcttctcaaatgtcaacctcaaggaagtgaactacatgtgtcccctcaattcagatggctatcctgacagcctggcgctggccaacaatagcaccctcaccattggcaccatcgatgagatccagaagctgcacattcgcacagttcccctctatgagtctccaaggaagatctgctaccaggaagtgtcccagtgtttcggggtcctctccagccgcattgaagtccaagacacgagtgggggcacgacagccttgaggcccagcgctagcacccaggctctgtccagcagtgtaagctccagcaagctgttctccagcagcactgctcctcatgagacctcctttggagaagaggtggaggtgcacaacctacttatcattgaccaacacacctttgaagtgcttcatgcccaccagtttctgcagaatgaatatgccctcagtctggtttcctgcaagctgggcaaagaccccaacacttacttcattgtgggcacagcaatggtgtatcctgaagaggcagagcccaagcagggtcgcattgtggtctttcagtattcggatggaaaactacagactgtggctgaaaaggaagtgaaaggggccgtgtactctatggtggaatttaacgggaagctgttagccagcatcaatagcacggtgcggctctatgagtggacaacagagaaggagctgcgcactgagtgcaaccactacaacaacatcatggccctctacctgaagaccaagggcgacttcatcctggtgggcgaccttatgcgctcagtgctgctgcttgcctacaagcccatggaaggaaactttgaagagattgctcgagactttaatcccaactggatgagtgctgtggaaatcttggatgatgacaattttctgggggctgaaaatgcctttaacttgtttgtgtgtcaaaaggatagcgctgccaccactgacgaggagcggcagcacctccaggaggttggtcttttccacctgggcgagtttgtcaatgtcttttgccacggctctctggtaatgcagaatctgggtgagacttccacccccacacaaggctcggtgctcttcggcacggtcaacggcatgatagggctggtgacctcactgtcagagagctggtacaacctcctgctggacatgcagaatcgactcaataaagtcatcaaaagtgtggggaagatcgagcactccttctggagatcctttcacaccgagcggaagacagaaccagccacaggtttcatcgacggtgacttgattgagagtttcctggatattagccgccccaagatgcaggaggtggtggcaaacctacagtatgacgatggcagcggtatgaagcgagaggccactgcagacgacctcatcaaggttgtggaggagctaactcggatccattagccaagggcagggggcccctttgctgaccctccccaaaggctttgccctgctgccctccccctcctctccaccatcgtcttcttggccatgggaggcctttccctaagccagctgcccccagagccacagttcccctatgtggaagtggggcgggcttcatagagacttgggaatgagctgaaggtgaaacattttctccctggatttttaccagtctcacatgattccagccatcaccttagaccaccaagccttgattggtgttgccagttgtcctccttccggggaaggattttgcagttctttggctgaaaggaagctgtgcgtgtgtgtgtgtgtatgtgtgtgtgtgtatgtgtatctcacactcatgcattgtcctctttttatttagattggcagtgtagggagttgtgggtagtggggaagagggtcttcacagacaatgaaacgtcgacgcgg

SEQ ID NO: 69748 - DNA, 4187 bp, Homo sapiens
agaggccaggtgaggccgtcccgtgatgccccgcgccccggccgctctggcctgcaacgtgtctctggggcggaggcagcggcagtggagttcgctgcgcgctgttgggggccacctgtcttttcgcttgtgtccctctttctagtgtcgcgctcgagtcccgacgggccgctccaagcctcgacatgtcgtacaactacgtggtaacggcccagaagcccaccgccgtgaacggctgcgtgaccggacactttacttcggccgaagacttaaacctgttgattgccaaaaacacgagattagagatctatgtggtcaccgccgaggggcttcggcccgtcaaagaggtgggcatgtatgggaagattgcggtcatggagcttttcaggcccaagggggagagcaaggacctgctgtttatcttgacagcgaagtacaatgcctgcatcctggagtataaacagagtggcgagagcattgacatcattacgcgagcccatggcaatgtccaggaccgcattggccgcccctcagagaccggcattattggcatcattgaccctgagtgccggatgattggcctgcgtctctatgatggccttttcaaggttattccactagatcgcgataataaagaactcaaggccttcaacatccgcctggaggagctgcatgtcattgatgtcaagttcctatatggttgccaagcacctactatttgctttgtctaccaggaccctcaggggcggcacgtaaaaacctatgaggtgtctctccgagaaaaggaattcaataagggcccttggaaacaggaaaatgtcgaagctgaagcttccatggtgatcgcagtcccagagccctttgggggggccatcatcattggacaggagtcaatcacctatcacaatggtgacaaatacctggctattgcccctcctatcatcaagcaaagcacgattgtgtgccacaatcgagtggaccctaatggctcaagatacctgctgggagacatggaaggccggctcttcatgctgcttttggagaaggaggaacagatggatggcaccgtcactctcaaggatctccgtgtagaactccttggagagacctctattgctgagtgcttgacataccttgataatggtgttgtgtttgtcgggtctcgcctgggtgactcccagcttgtgaagctcaacgttgacagtaatgaacaaggctcctatgtagtggccatggaaacctttaccaacttaggacccattgtcgatatgtgcgtggtggacctggagaggcaggggcaggggcagctggtcacttgctctggggctttcaaggaaggttctttgcggatcatccggaatggaattggaatccacgagcatgccagcattgacttaccaggcatcaaaggattatggccactgcggtctgaccctaatcgtgagactgatgacactttggtgctctcttttgtgggccagacaagagttctcatgttaaatggagaggaggtagaagaaaccgaactgatgggtttcgtggatgatcagcagactttcttctgtggcaacgtggctcatcagcagcttatccagatcacttcagcatcggtgaggttggtctctcaagaacccaaagctctggtcagtgaatggaaggagcctcaggccaagaacatcagtgtggcctcctgcaatagcagccaggtggtggtggctgtaggcagggccctctactatctgcagatccatcctcaggagctccggcagatcagccacacagagatggaacatgaagtggcttgcttggacatcaccccattaggagacagcaatggactgtcccctctttgtgccattggcctctggacggacatctcggctcgtatcttgaagttgccctcttttgaactactgcacaaggagatgctgggtggagagatcattcctcgctccatcctgatgaccacctttgagagtagccattacctcctttgtgccttgggagatggagcgcttttctactttgggctcaacattgagacaggtctgttgagcgaccgtaagaaggtgactttgggcacccagcccaccgtattgaggacttttcgttctctttctaccaccaacgtctttgcttgttctgaccgccccactgtcatctatagcagcaaccacaaattggtcttctcaaatgtcaacctcaaggaagtgaactacatgtgtcccctcaattcagatggctatcctgacagcctggcgctggccaacaatagcaccctcaccattggcaccatcgatgagatccagaagctgcacattcgcacagttcccctctatgagtctccaaggaagatctgctaccaggaagtgtcccagtgtttcggggtcctctccagccgcattgaagtccaagacacgagtgggggcacgacagccttgaggcccagcgctagcacccaggctctgtccagcagtgtaagctccagcaagctgttctccagcagcactgctcctcatgagacctcctttggagaagaggtggaggtgcacaacctacttatcattgaccaacacacctttgaagtgcttcatgcccaccagtttctgcagaatgaatatgccctcagtctggtttcctgcaagctgggcaaagaccccaacacttacttcattgtgggcacagcaatggtgtatcctgaagaggcagagcccaagcagggtcgcattgtggtctttcagtattcggatggaaaactacagactgtggctgaaaaggaagtgaaaggggccgtgtactctatggtggaatttaacgggaagctgttagccagcatcaatagcacggtgcggctctatgagtggacaacagagaaggagctgcgcactgagtgcaaccactacaacaacatcatggccctctacctgaagaccaagggcgacttcatcctggtgggcgaccttatgcgctcagtgctgctgcttgcctacaagcccatggaaggaaactttgaagagattgctcgagactttaatcccaactggatgagtgctgtggaaatcttggatgatgacaattttctgggggctgaaaatgcctttaacttgtttgtgtgtcaaaaggatagcgctgccaccactgacgaggagcggcagcacctccaggaggttggtcttttccacctgggcgagtttgtcaatgtcttttgccacggctctctggtaatgcagaatctgggtgagacttccacccccacacaaggctcggtgctcttcggcacggtcaacggcatgatagggctggtgacctcactgtcagagagctggtacaacctcctgctggacatgcagaatcgactcaataaagtcatcaaaagtgtggggaagatcgagcactccttctggagatcctttcacaccgagcggaagacagaaccagccacaggtttcatcgacggtgacttgattgagagtttcctggatattagccgccccaagatgcaggaggtggtggcaaacctacagtatgacgatggcagcggtatgaagcgagaggccactgcagacgacctcatcaaggttgtggaggagctaactcggatccattagccaagggcagggggcccctttgctgaccctccccaaaggctttgccctgctgccctccccctcctctccaccatcgtcttcttggccatgggaggcctttccctaagccagctgcccccagagccacagttcccctatgtggaagtggggcgggcttcatagagacttgggaatgagctgaaggtgaaacattttctccctggatttttaccagtctcacatgattccagccatcaccttagaccaccaagccttgattggtgttgccagttgtcctccttccggggaaggattttgcagttctttggctgaaaggaagctgtgcgtgtgtgtgtgtgtatgtgtgtgtgtgtatgtgtatctcacactcatgcattgtcctctttttatttagattggcagtgtagggagttgtgggtagtggggaagagggtctttccctcctttctctcgtcctcacatcggaccttatcctttatctctccccctctcttgcggtggcctccccgtcccccctgcaccttcttctctgtctttccttcctcctctcactcgccttgccgttctgccttttccgct

SEQ ID NO: 69749 - DNA, 1999 bp, Homo sapiens
aaactaggctaggtacgaggcctgggtggttccctctatgagtctccaaggaagatctgctaccaggaagtgtcccagtgtttcggggtcctctccagccgcattgaagtccaagacacgagtgggggcacgacagccttgaggcccagcgctagcacccaggctctgtccagcagtgtaagctccagcaagctgttctccagcagcactgctcctcatgagacctcctttggagaagaggtggaggtgcacaacctacttatcattgaccaacacacctttgaagtgcttcatgcccaccagtttctgcagaatgaatatgccctcagtctggtttcctgcaagctgggcaaagaccccaacacttacttcattgtgggcacagcaatggtgtatcctgaagaggcagagcccaagcagggtcgcattgtggtctttcagtattcggatggaaaactacagactgtggctgaaaaggaagtgaaaggggccgtgtactctatggtggaatttaacgggaagctgttagccagcatcaatagcacggtgcggctctatgagtggacaacagagaaggagctgcgcactgagtgcaaccactacaacaacatcatggccctctacctgaagaccaagggcgacttcatcctggtgggcgaccttatgcgctcagtgctgctgcttgcctacaagcccatggaaggaaactttgaagagattgctcgagactttaatcccaactggatgagtgctgtggaaatcttggatgatgacaattttctgggggctgaaaatgcctttaacttgtttgtgtgtcaaaaggatagcgctgccaccactgacgaggagcggcagcacctccaggaggttggtcttttccacctgggcgagtttgtcaatgtcttttgccacggctctctggtaatgcagaatctgggtgagacttccacccccacacaaggctcggtgctcttcggcacggtcaacggcatgatagggctggtgacctcactgtcagagagctggtacaacctcctgctggacatgcagaatcgactcaataaagtcatcaaaagtgtggggaagatcgagcactccttctggagatcctttcacaccgagcggaagacagaaccagccacaggtttcatcgacggtgacttgattgagagtttcctggatattagccgccccaagatgcaggaggtggtggcaaacctacagtatgacgatggcagcggtatgaagcgagaggccactgcagacgacctcatcaaggttgtggaggagctaactcggatccattagccaagggcagggggcccctttgctgaccctccccaaaggctttgccctgctgccctccccctcctctccaccatcgtcttcttggccatgggaggcctttccctaagccagctgcccccagagccacagttcccctatgtggaagtggggcgggcttcatagagacttgggaatgagctgaaggtgaaacattttctccctggatttttaccagtctcacatgattccagccatcaccttagaccaccaagccttgattggtgttgccagttgtcctccttccggggaaggattttgcagttctttggctgaaaggaagctgtgcgtgtgtgtgtgtgtatgtgtgtgtgtgtatgtgtatctcacactcatgcattgtcctctttttatttagattggcagtgtagggagttgtgggtagtggggaagagggttaggagggtttcattgtctgtgaagtgagaccttccttttacttttcttctattgcctctgagagcatcaggcctagaggcctgactgccaagccatgggtagcctgggtgtaaaacctggagatggtggatgatccccacgccacagcccttttgtctctgcaaactgccttcttcggaaagaagaaggtgggaggatgtgaattgttagtttctgagttttaccaaataaagtagaatataagaataagaagaaa

SEQ ID NO: 69750 - DNA, 3670 bp, Homo sapiens
  misc_feature (3664)..(3664): n is a, c, g, or t
agaggccaggtgaggccgtcccgtgatgccccgcgccccggccgctctggcctgcaacgtgtctctggggcggaggcagcggcagtggagttcgctgcgcgctgttgggggccacctgtcttttcgcttgtgtccctctttctagtgtcgcgctcgagtcccgacgggccgctccaagcctcgacatgtcgtacaactacgtggtaacggcccagaagcccaccgccgtgaacggctgcgtgaccggacactttacttcggccgaagacttaaacctgttgattgccaaaaacacgagattagagatctatgtggtcaccgccgaggggcttcggcccgtcaaagaggtgggcatgtatgggaagattgcggtcatggagcttttcaggcccaagggggagagcaaggacctgctgtttatcttgacagcgaagtacaatgcctgcatcctggagtataaacagagtggcgagagcattgacatcattacgcgagcccatggcaatgtccaggaccgcattggccgcccctcagagaccggcattattggcatcattgaccctgagtgccggatgattggcctgcgtctctatgatggccttttcaaggttattccactagatcgcgataataaagaactcaaggccttcaacatccgcctggaggagctgcatgtcattgatgtcaagttcctatatggttgccaagcacctactatttgctttgtctaccaggaccctcaggggcggcacgtaaaaacctatgaggtgtctctccgagaaaaggaattcaataagggcccttggaaacaggaaaatgtcgaagctgaagcttccatggtgatcgcagtcccagagccctttgggggggccatcatcattggacaggagtcaatcacctatcacaatggtgacaaatacctggctattgcccctcctatcatcaagcaaagcacgattgtgtgccacaatcgagtggaccctaatggctcaagatacctgctgggagacatggaaggccggctcttcatgctgcttttggagaaggaggaacagatggatggcaccgtcactctcaaggatctccgtgtagaactccttggagagacctctattgctgagtgcttgacataccttgataatggtgttgtgtttgtcgggtctcgcctgggtgactcccagcttgtgaagctcaacgttgacagtaatgaacaaggctcctatgtagtggccatggaaacctttaccaacttaggacccattgtcgatatgtgcgtggtggacctggagaggcaggggcaggggcagctggtcacttgctctggggctttcaaggaaggttctttgcggatcatccggaatggaattggaatccacgagcatgccagcattgacttaccaggcatcaaaggattatggccactgcggtctgaccctaatcgtgagactgatgacactttggtgctctcttttgtgggccagacaagagttctcatgttaaatggagaggaggtagaagaaaccgaactgatgggtttcgtggatgatcagcagactttcttctgtggcaacgtggctcatcagcagcttatccagatcacttcagcatcggtgaggttggtctctcaagaacccaaagctctggtcagtgaatggaaggagcctcaggccaagaacatcagtgtggcctcctgcaatagcagccaggtggtggtggctgtaggcagggccctctactatctgcagatccatcctcaggagctccggcagatcagccacacagagatggaacatgaagtggcttgcttggacatcaccccattaggagacagcaatggactgtcccctctttgtgccattggcctctggacggacatctcggctcgtatcttgaagttgccctcttttgaactactgcacaaggagatgctgggtggagagatcattcctcgctccatcctgatgaccacctttgagagtagccattacctcctttgtgccttgggagatggagcgcttttctactttgggctcaacattgagacaggtctgttgagcgaccgtaagaaggtgactttgggcacccagcccaccgtattgaggacttttcgttctctttctaccaccaacgtctttgcttgttctgaccgccccactgtcatctatagcagcaaccacaaattggtcttctcaaatgtcaacctcaaggaagtgaactacatgtgtcccctcaattcagatggctatcctgacagcctggcgctggccaacaatagcaccctcaccattggcaccatcgatgagatccagaagctgcacattcgcacagttcccctctatgagtctccaaggaagatctgctaccaggaagtgtcccagtgtttcggggtcctctccagccgcattgaagtccaagacacgagtgggggcacgacagccttgaggcccagcgctagcacccaggctctgtccagcagtgtaagctccagcaagctgttctccagcagcactgctcctcatgagacctcctttggagaagaggtggaggtgcacaacctacttatcattgaccaacacacctttgaagtgcttcatgcccaccagtttctgcagaatgaatatgccctcagtctggtttcctgcaagctgggcaaagaccccaacacttacttcattgtgggcacagcaatggtgtatcctgaagaggcagagcccaagcagggtcgcattgtggtctttcagtattcggatggaaaactacagactgtggctgaaaaggaagtgaaaggggccgtgtactctatggtggaatttaacgggaagctgttagccagcatcaatagcacggtgcggctctatgagtggacaacagagaaggagctgcgcactgagtgcaaccactacaacaacatcatggccctctacctgaagaccaagggcgacttcatcctggtgggcgaccttatgcgctcagtgctgctgcttgcctacaagcccatggaaggaaactttgaagagattgctcgagactttaatcccaactggatgagtgctgtggaaatcttggatgatgacaattttctgggggctgaaaatgcctttaacttgtttgtgtgtcaaaaggatagcgctgccaccactgacgaggagcggcagcacctccaggaggttggtcttttccacctgggcgagtttgtcaatgtcttttgccacggctctctggtaatgcagaatctgggtgagacttccacccccacacaaggctcggtgctcttcggcacggtcaacggcatgatagggctggtgacctcactgtcagagagctggtacaacctcctgctggacatgcagaatcgactcaataaagtcatcaaaagtgtggggaagatcgagcactccttctggagatcctttcacaccgagcggaagacagaaccagccacaggtttcatcgacggtgacttgattgagagtttcctggatattagccgccccaagatgcaggaggtggtggcaaacctacagtatgacgatggcagcggtatgaagcgagaggccactgcagacgacctcatcaaggttgtggaggagctaactcggatccattagccaagggcagggggcccctttgctgaccctcccccaaaagggccgggaattcaagnttgggc

SEQ ID NO: 69751 - DNA, 2293 bp, Homo sapiens
ttacatgatagacttgagttggtacctgaacattcgtgtccctcaattcagatggctatcctgacagcctggcgctggccaacaatagcaccctcaccattggcaccatcgatgagatccagaagctgcacattcgcacagttcccctctatgagtctccaaggaagatctgctaccaggaagtgtcccagtgtttcggggtcctctccagccgcattgaagtccaagacacgagtgggggcacgacagccttgaggcccagcgaatagcaccctcaccattggcaccatcgatgagatccagaagctgcacattcgcacagttcccctctatgagtctccaaggaagatctgctaccaggaagtgtcccagtgtttcggggtcctctccagccgcattgaagtccaagacacgagtgggggcacgacagccttgaggcccagcgctagcacccaggctctgtccagcagtgtaagctccagcaagctgttctccagcagcactgctcctcatgagacctcctttggagaagaggtggaggtgcacaacctacttatcattgaccaacacacctttgaagtgcttcatgcccaccagtttctgcagaatgaatatgccctcagtctggtttcctgcaagctgggcaaagaccccaacacttacttcattgtgggcacagcaatggtgtatcctgaagaggcagagcccaagcagggtcgcattgtggtctttcagtattcggatggaaaactacagactgtggctgaaaaggaagtgaaaggggccgtgtactctatggtggaatttaacgggaagctgttagccagcatcaatagcacggtgcggctctatgagtggacaacagagaaggagctgcgcactgagtgcaaccactacaacaacatcatggccctctacctgaagaccaagggcgacttcatcctggtgggcgaccttatgcgctcagtgctgctgcttgcctacaagcccatggaaggaaactttgaagagattgctcgagactttaatcccaactggatgagtgctgtggaaatcttggatgatgacaattttctgggggctgaaaatgcctttaacttgtttgtgtgtcaaaaggatagcgctgccaccactgacgaggagcggcagcacctccaggaggttggtcttttccacctgggcgagtttgtcaatgtcttttgccacggctctctggtaatgcagaatctgggtgagacttccacccccacacaaggctcggtgctcttcggcacggtcaacggcatgatagggctggtgacctcactgtcagagagctggtacaacctcctgctggacatgcagaatcgactcaataaagtcatcaaaagtgtggggaagatcgagcactccttctggagatcctttcacaccgagcggaagacagaaccagccacaggtttcatcgacggtgacttgattgagagtttcctggatattagccgccccaagatgcaggaggtggtggcaaacctacagtatgacgatggcagcggtatgaagcgagaggccactgcagacgacctcatcaaggttgtggaggagctaactcggatccattagccaagggcagggggcccctttgctgaccctccccaaaggctttgccctgctgccctccccctcctctccaccatcgtcttcttggccatgggaggcctttccctaagccagctgcccccagagccacagttcccctatgtggaagtggggcgggcttcatagagacttgggaatgagctgaaggtgaaacattttctccctggatttttaccagtctcacatgattccagccatcaccttagaccaccaagccttgattggtgttgccagttgtcctccttccggggaaggattttgcagttctttggctgaaaggaagctgtgcgtgtgtgtgtgtgtatgtgtgtgtgtgtatgtgtatctcacactcatgcattgtcctctttttatttagattggcagtgtagggagttgtgggtagtggggaagagggttaggagggtttcattgtctgtgaagtgagaccttccttttacttttcttctattgcctctgagagcatcaggcctagaggcctgactgccaagccatgggtagcctgggtgtaaaacctggagatggtggatgatccccacgccacagcccttttgtctctgcaaactgccttcttcggaaagaagaaggtgggaggatgtgaattgttagtttctgagttttaccaaataaagtagaatataagaataagaagaaa

SEQ ID NO: 69752 - DNA, 1763 bp, Homo sapiens
ccggcagctatccggttcactacactgctgtggccaacacacctttgaagtgcttcatgcccaccagtttctgcagaatgaatatgccctcagtctggtttcctgcaagctgggcaaagaccccaacacttacttcattgtgggcacagcaatggtgtatcctgaagaggcagagcccaagcagggtcgcattgtggtctttcagtattcggatggaaaactacagactgtggctgaaaaggaagtgaaaggggccgtgtactctatggtggaatttaacgggaagctgttagccagcatcaatagcacggtgcggctctatgagtggacaacagagaaggagctgcgcactgagtgcaaccactacaacaacatcatggccctctacctgaagaccaagggcgacttcatcctggtgggcgaccttatgcgctcagtgctgctgcttgcctacaagcccatggaaggaaactttgaagagattgctcgagactttaatcccaactggatgagtgctgtggaaatcttggatgatgacaattttctgggggctgaaaatgcctttaacttgtttgtgtgtcaaaaggatagcgctgccaccactgacgaggagcggcagcacctccaggaggttggtcttttccacctgggcgagtttgtcaatgtcttttgccacggctctctggtaatgcagaatctgggtgagacttccacccccacacaaggctcggtgctcttcggcacggtcaacggcatgatagggctggtgacctcactgtcagagagctggtacaacctcctgctggacatgcagaatcgactcaataaagtcatcaaaagtgtggggaagatcgagcactccttctggagatcctttcacaccgagcggaagacagaaccagccacaggtttcatcgacggtgacttgattgagagtttcctggatattagccgccccaagatgcaggaggtggtggcaaacctacagtatgacgatggcagcggtatgaagcgagaggccactgcagacgacctcatcaaggttgtggaggagctaactcggatccattagccaagggcagggggcccctttgctgaccctccccaaaggctttgccctgctgccctccccctcctctccaccatcgtcttcttggccatgggaggcctttccctaagccagctgcccccagagccacagttcccctatgtggaagtggggcgggcttcatagagacttgggaatgagctgaaggtgaaacattttctccctggatttttaccagtctcacatgattccagccatcaccttagaccaccaagccttgattggtgttgccagttgtcctccttccggggaaggattttgcagttctttggctgaaaggaagctgtgcgtgtgtgtgtgtgtatgtgtgtgtgtgtatgtgtatctcacactcatgcattgtcctctttttatttagattggcagtgtagggagttgtgggtagtggggaagagggttaggagggtttcattgtctgtgaagtgagaccttccttttacttttcttctattgcctctgagagcatcaggcctagaggcctgactgccaagccatgggtagcctgggtgtaaaacctggagatggtggatgatccccacgccacagcccttttgtctctgcaaactgccttcttcggaaagaagaaggtgggaggatgtgaattgttagtttctgagttttaccaaataaagtagaatataagaataagaagaaa

SEQ ID NO: 69753 - DNA, 3443 bp, Homo sapiens
agaggccaggtgaggccgtcccgtgatgccccgcgccccggccgctctggcctgcaacgtgtctctggggcggaggcagcggcagtggagttcgctgcgcgctgttgggggccacctgtcttttcgcttgtgtccctctttctagtgtcgcgctcgagtcccgacgggccgctccaagcctcgacatgtcgtacaactacgtggtaacggcccagaagcccaccgccgtgaacggctgcgtgaccggacactttacttcggccgaagacttaaacctgttgattgccaaaaacacgagattagagatctatgtggtcaccgccgaggggcttcggcccgtcaaagaggtgggcatgtatgggaagattgcggtcatggagcttttcaggcccaagggggagagcaaggacctgctgtttatcttgacagcgaagtacaatgcctgcatcctggagtataaacagagtggcgagagcattgacatcattacgcgagcccatggcaatgtccaggaccgcattggccgcccctcagagaccggcattattggcatcattgaccctgagtgccggatgattggcctgcgtctctatgatggccttttcaaggttattccactagatcgcgataataaagaactcaaggccttcaacatccgcctggaggagctgcatgtcattgatgtcaagttcctatatggttgccaagcacctactatttgctttgtctaccaggaccctcaggggcggcacgtaaaaacctatgaggtgtctctccgagaaaaggaattcaataagggcccttggaaacaggaaaatgtcgaagctgaagcttccatggtgatcgcagtcccagagccctttgggggggccatcatcattggacaggagtcaatcacctatcacaatggtgacaaatacctggctattgcccctcctatcatcaagcaaagcacgattgtgtgccacaatcgagtggaccctaatggctcaagatacctgctgggagacatggaaggccggctcttcatgctgcttttggagaaggaggaacagatggatggcaccgtcactctcaaggatctccgtgtagaactccttggagagacctctattgctgagtgcttgacataccttgataatggtgttgtgtttgtcgggtctcgcctgggtgactcccagcttgtgaagctcaacgttgacagtaatgaacaaggctcctatgtagtggccatggaaacctttaccaacttaggacccattgtcgatatgtgcgtggtggacctggagaggcaggggcaggggcagctggtcacttgctctggggctttcaaggaaggttctttgcggatcatccggaatggaattggaatccacgagcatgccagcattgacttaccaggcatcaaaggattatggccactgcggtctgaccctaatcgtgagactgatgacactttggtgctctcttttgtgggccagacaagagttctcatgttaaatggagaggaggtagaagaaaccgaactgatgggtttcgtggatgatcagcagactttcttctgtggcaacgtggctcatcagcagcttatccagatcacttcagcatcggtgaggttggtctctcaagaacccaaagctctggtcagtgaatggaaggagcctcaggccaagaacatcagtgtggcctcctgcaatagcagccaggtggtggtggctgtaggcagggccctctactatctgcagatccatcctcaggagctccggcagatcagccacacagagatggaacatgaagtggcttgcttggacatcaccccattaggagacagcaatggactgtcccctctttgtgccattggcctctggacggacatctcggctcgtatcttgaagttgccctcttttgaactactgcacaaggagatgctgggtggagagatcattcctcgctccatcctgatgaccacctttgagagtagccattacctcctttgtgccttgggagatggagcgcttttctactttgggctcaacattgagacaggtctgttgagcgaccgtaagaaggtgactttgggcacccagcccaccgtattgaggacttttcgttctctttctaccaccaacgtctttgcttgttctgaccgccccactgtcatctatagcagcaaccacaaattggtcttctcaaatgtcaacctcaaggaagtgaactacatgtgtcccctcaattcagatggctatcctgacagcctggcgctggccaacaatagcaccctcaccattggcaccatcgatgagatccagaagctgcacattcgcacagttcccctctatgagtctccaaggaagatctgctaccaggaagtgtcccagtgtttcggggtcctctccagccgcattgaagtccaagacacgagtgggggcacgacagccttgaggcccagcgctagcacccaggctctgtccagcagtgtaagctccagcaagctgttctccagcagcactgctcctcatgagacctcctttggagaagaggtggaggtgcacaacctacttatcattgaccaacacacctttgaagtgcttcatgcccaccagtttctgcagaatgaatatgccctcagtctggtttcctgcaagctgggcaaagaccccaacacttacttcattgtgggcacagcaatggtgtatcctgaagaggcagagcccaagcagggtcgcattgtggtctttcagtattcggatggaaaactacagactgtggctgaaaaggaagtgaaaggggccgtgtactctatggtggaatttaacgggaagctgttagccagcatcaatagcacggtgcggctctatgagtggacaacagagaaggagctgcgcactgagtgcaaccactacaacaacatcatggccctctacctgaagaccaagggcgacttcatcctggtgggcgaccttatgcgctcagtgctgctgcttgcctacaagcccatggaaggaaactttgaagagattgctcgagactttaatcccaactggatgagtgctgtggaaatcttggatgatgacaattttctgggggctgaaaatgcctttaacttgtttgtgtgtcaaaaggatagcgctgccaccactgacgaggagcggcagcacctccaggaggttggtcttttccacctgggcgagtttgtcaatgtcttttgccacggctctctggtaatgcagaatctgggtgagacttccacccccacacaaggctcggtgctcttcggcacggtcaacggcatgatagggctggtgacctcactgtcagagagctggtacaacctcctgctggacatgcagaatcgactcaataaagtcatcaaaagtgtggggaagatcgagcactcctttctggcagatcctttcacaccgtgcttatctcatccggtacca

SEQ ID NO: 69754 - DNA, 2987 bp, Homo sapiens
agaggccaggtgaggccgtcccgtgatgccccgcgccccggccgctctggcctgcaacgtgtctctggggcggaggcagcggcagtggagttcgctgcgcgctgttgggggccacctgtcttttcgcttgtgtccctctttctagtgtcgcgctcgagtcccgacgggccgctccaagcctcgacatgtcgtacaactacgtggtaacggcccagaagcccaccgccgtgaacggctgcgtgaccggacactttacttcggccgaagacttaaacctgttgattgccaaaaacacgagattagagatctatgtggtcaccgccgaggggcttcggcccgtcaaagaggtgggcatgtatgggaagattgcggtcatggagcttttcaggcccaagggggagagcaaggacctgctgtttatcttgacagcgaagtacaatgcctgcatcctggagtataaacagagtggcgagagcattgacatcattacgcgagcccatggcaatgtccaggaccgcattggccgcccctcagagaccggcattattggcatcattgaccctgagtgccggatgattggcctgcgtctctatgatggccttttcaaggttattccactagatcgcgataataaagaactcaaggccttcaacatccgcctggaggagctgcatgtcattgatgtcaagttcctatatggttgccaagcacctactatttgctttgtctaccaggaccctcaggggcggcacgtaaaaacctatgaggtgtctctccgagaaaaggaattcaataagggcccttggaaacaggaaaatgtcgaagctgaagcttccatggtgatcgcagtcccagagccctttgggggggccatcatcattggacaggagtcaatcacctatcacaatggtgacaaatacctggctattgcccctcctatcatcaagcaaagcacgattgtgtgccacaatcgagtggaccctaatggctcaagatacctgctgggagacatggaaggccggctcttcatgctgcttttggagaaggaggaacagatggatggcaccgtcactctcaaggatctccgtgtagaactccttggagagacctctattgctgagtgcttgacataccttgataatggtgttgtgtttgtcgggtctcgcctgggtgactcccagcttgtgaagctcaacgttgacagtaatgaacaaggctcctatgtagtggccatggaaacctttaccaacttaggacccattgtcgatatgtgcgtggtggacctggagaggcaggggcaggggcagctggtcacttgctctggggctttcaaggaaggttctttgcggatcatccggaatggaattggaatccacgagcatgccagcattgacttaccaggcatcaaaggattatggccactgcggtctgaccctaatcgtgagactgatgacactttggtgctctcttttgtgggccagacaagagttctcatgttaaatggagaggaggtagaagaaaccgaactgatgggtttcgtggatgatcagcagactttcttctgtggcaacgtggctcatcagcagcttatccagatcacttcagcatcggtgaggttggtctctcaagaacccaaagctctggtcagtgaatggaaggagcctcaggccaagaacatcagtgtggcctcctgcaatagcagccaggtggtggtggctgtaggcagggccctctactatctgcagatccatcctcaggagctccggcagatcagccacacagagatggaacatgaagtggcttgcttggacatcaccccattaggagacagcaatggactgtcccctctttgtgccattggcctctggacggacatctcggctcgtatcttgaagttgccctcttttgaactactgcacaaggagatgctgggtggagagatcattcctcgctccatcctgatgaccacctttgagagtagccattacctcctttgtgccttgggagatggagcgcttttctactttgggctcaacattgagacaggtctgttgagcgaccgtaagaaggtgactttgggcacccagcccaccgtattgaggacttttcgttctctttctaccaccaacgtctttgcttgttctgaccgccccactgtcatctatagcagcaaccacaaattggtcttctcaaatgtcaacctcaaggaagtgaactacatgtgtcccctcaattcagatggctatcctgacagcctggcgctggccaacaatagcaccctcaccattggcaccatcgatgagatccagaagctgcacattcgcacagttcccctctatgagtctccaagctccccctcctctccaccatcgtcttcttggccatgggaggcctttccctaagccagctgcccccagagccacagttcccctatgtggaagtggggcgggcttcatagagacttgggaatgagctgaaggtgaaacattttctccctggatttttaccagtctcacatgattccagccatcaccttagaccaccaagccttgattggtgttgccagttgtcctccttccggggaaggattttgcagttctttggctgaaaggaagctgtgcgtgtgtgtgtgtgtatgtgtgtgtgtgtatgtgtatctcacactcatgcattgtcctctttttatttagattggcagtgtagggagttgtgggtagtggggaagagggttaggagggtttcattgtctgtgaagtgagaccttccttttacttttcttctattgcctctgagagcatcaggcctagaggcctgactgccaagccatgggtagcctgggtgtaaaacctggagatggtggatgatccccacgccacagcccttttgtctctgcaaactgccttcttcggaaagaagaaggtgggaggatgtgaattgttagtttctgagttttaccaaataaagtagaatataagaataagaagaaa

SEQ ID NO: 69755 - DNA, 1442 bp, Homo sapiens
atgctcttcccatgtgtgaaaagcccgtgaactgtgaccggtctctgaattgtaaagacccctctacctgaagaccaagggcgacttcatcctggtgggcgaccttatgcgctcagtgctgctgcttgcctacaagcccatggaaggaaactttgaagagattgctcgagactttaatcccaactggatgagtgctgtggaaatcttggatgatgacaattttctgggggctgaaaatgcctttaacttgtttgtgtgtcaaaaggatagcgctgccaccactgacgaggagcggcagcacctccaggaggttggtcttttccacctgggcgagtttgtcaatgtcttttgccacggctctctggtaatgcagaatctgggtgagacttccacccccacacaaggctcggtgctcttcggcacggtcaacggcatgatagggctggtgacctcactgtcagagagctggtacaacctcctgctggacatgcagaatcgactcaataaagtcatcaaaagtgtggggaagatcgagcactccttctggagatcctttcacaccgagcggaagacagaaccagccacaggtttcatcgacggtgacttgattgagagtttcctggatattagccgccccaagatgcaggaggtggtggcaaacctacagtatgacgatggcagcggtatgaagcgagaggccactgcagacgacctcatcaaggttgtggaggagctaactcggatccattagccaagggcagggggcccctttgctgaccctccccaaaggctttgccctgctgccctccccctcctctccaccatcgtcttcttggccatgggaggcctttccctaagccagctgcccccagagccacagttcccctatgtggaagtggggcgggcttcatagagacttgggaatgagctgaaggtgaaacattttctccctggatttttaccagtctcacatgattccagccatcaccttagaccaccaagccttgattggtgttgccagttgtcctccttccggggaaggattttgcagttctttggctgaaaggaagctgtgcgtgtgtgtgtgtgtatgtgtgtgtgtgtatgtgtatctcacactcatgcattgtcctctttttatttagattggcagtgtagggagttgtgggtagtggggaagagggttaggagggtttcattgtctgtgaagtgagaccttccttttacttttcttctattgcctctgagagcatcaggcctagaggcctgactgccaagccatgggtagcctgggtgtaaaacctggagatggtggatgatccccacgccacagcccttttgtctctgcaaactgccttcttcggaaagaagaaggtgggaggatgtgaattgttagtttctgagttttaccaaataaagtagaatataagaataagaagaaa

SEQ ID NO: 69756 - DNA, 2205 bp, Homo sapiens
agaggccaggtgaggccgtcccgtgatgccccgcgccccggccgctctggcctgcaacgtgtctctggggcggaggcagcggcagtggagttcgctgcgcgctgttgggggccacctgtcttttcgcttgtgtccctctttctagtgtcgcgctcgagtcccgacgggccgctccaagcctcgacatgtcgtacaactacgtggtaacggcccagaagcccaccgccgtgaacggctgcgtgaccggacactttacttcggccgaagacttaaacctgttgattgccaaaaacacgagattagagatctatgtggtcaccgccgaggggcttcggcccgtcaaagaggtgggcatgtatgggaagattgcggtcatggagcttttcaggcccaagggggagagcaaggacctgctgtttatcttgacagcgaagtacaatgcctgcatcctggagtataaacagagtggcgagagcattgacatcattacgcgagcccatggcaatgtccaggaccgcattggccgcccctcagagaccggcattattggcatcattgaccctgagtgccggatgattggcctgcgtctctatgatggccttttcaaggttattccactagatcgcgataataaagaactcaaggccttcaacatccgcctggaggagctgcatgtcattgatgtcaagttcctatatggttgccaagcacctactatttgctttgtctaccaggaccctcaggggcggcacgtaaaaacctatgaggtgtctctccgagaaaaggaattcaataagggcccttggaaacaggaaaatgtcgaagctgaagcttccatggtgatcgcagtcccagagccctttgggggggccatcatcattggacaggagtcaatcacctatcacaatggtgacaaatacctggctattgcccctcctatcatcaagcaaagcacgattgtgtgccacaatcgagtggaccctaatggctcaagatacctgctgggagacatggaaggccggctcttcatgctgcttttggagaaggaggaacagatggatggcaccgtcactctcaaggatctccgtgtagaactccttggagagacctctattgctgagtgcttgacataccttgataatggtgttgtgtttgtcgggtctcgcctgggtgactcccagcttgtgaagctcaacgttgacagtaatgaacaaggctcctatgtagtggccatggaaacctttaccaacttaggacccattgtcgatatgtgcgtggtggacctggagaggcaggggcaggggcagctggtcacttgctctggggctttcaaggaaggttctttgcggatcatccggaatggaattggaatccacgagcatgccagcattgacttaccaggcatcaaaggattatggccactgcggtctgaccctaatcgtgagactgatgacactttggtgctctcttttgtgggccagacaagagttctcatgttaaatggagaggaggtagaagaaaccgaactgatgggtttcgtggatgatcagcagactttcttctgtggcaacgtggctcatcagcagcttatccagatcacttcagcatcggtgaggttggtctctcaagaacccaaagctctggtcagtgaatggaaggagcctcaggccaagaacatcagtgtggcctcctgcaatagcagccaggtggtggtggctgtaggcagggccctctactatctgcagatccatcctcaggagctccggcagatcagccacacagagatggaacatgaagtggcttgcttggacatcaccccattaggagacagcaatggactgtcccctctttgtgccattggcctctggacggacatctcggctcgtatcttgaagttgccctcttttgaactactgcacaaggagatgctgggtggagagatcattcctcgctccatcctgatgaccacctttgagagtagccattacctcctttgtgccttgggagatggagcgcttttctactttgggctcaacattgagacaggtctgttgagcgaccgtaagaaggtgactttgggcacccagcccaccgtattgaggacttttcgttctctttctaccaccaacgtctttgcttgttctgaccgccccactgtcatctatagcagcaaccaaaaaagaaataaatattctataaaccttc

SEQ ID NO: 69757 - DNA, 1988 bp, Homo sapiens
agaggccaggtgaggccgtcccgtgatgccccgcgccccggccgctctggcctgcaacgtgtctctggggcggaggcagcggcagtggagttcgctgcgcgctgttgggggccacctgtcttttcgcttgtgtccctctttctagtgtcgcgctcgagtcccgacgggccgctccaagcctcgacatgtcgtacaactacgtggtaacggcccagaagcccaccgccgtgaacggctgcgtgaccggacactttacttcggccgaagacttaaacctgttgattgccaaaaacacgagattagagatctatgtggtcaccgccgaggggcttcggcccgtcaaagaggtgggcatgtatgggaagattgcggtcatggagcttttcaggcccaagggggagagcaaggacctgctgtttatcttgacagcgaagtacaatgcctgcatcctggagtataaacagagtggcgagagcattgacatcattacgcgagcccatggcaatgtccaggaccgcattggccgcccctcagagaccggcattattggcatcattgaccctgagtgccggatgattggcctgcgtctctatgatggccttttcaaggttattccactagatcgcgataataaagaactcaaggccttcaacatccgcctggaggagctgcatgtcattgatgtcaagttcctatatggttgccaagcacctactatttgctttgtctaccaggaccctcaggggcggcacgtaaaaacctatgaggtgtctctccgagaaaaggaattcaataagggcccttggaaacaggaaaatgtcgaagctgaagcttccatggtgatcgcagtcccagagccctttgggggggccatcatcattggacaggagtcaatcacctatcacaatggtgacaaatacctggctattgcccctcctatcatcaagcaaagcacgattgtgtgccacaatcgagtggaccctaatggctcaagatacctgctgggagacatggaaggccggctcttcatgctgcttttggagaaggaggaacagatggatggcaccgtcactctcaaggatctccgtgtagaactccttggagagacctctattgctgagtgcttgacataccttgataatggtgttgtgtttgtcgggtctcgcctgggtgactcccagcttgtgaagctcaacgttgacagtaatgaacaaggctcctatgtagtggccatggaaacctttaccaacttaggacccattgtcgatatgtgcgtggtggacctggagaggcaggggcaggggcagctggtcacttgctctggggctttcaaggaaggttctttgcggatcatccggaatggaattggaatccacgagcatgccagcattgacttaccaggcatcaaaggattatggccactgcggtctgaccctaatcgtgagactgatgacactttggtgctctcttttgtgggccagacaagagttctcatgttaaatggagaggaggtagaagaaaccgaactgatgggtttcgtggatgatcagcagactttcttctgtggcaacgtggctcatcagcagcttatccagatcacttcagcatcggtgaggttggtctctcaagaacccaaagctctggtcagtgaatggaaggagcctcaggccaagaacatcagtgtggcctcctgcaatagcagccaggtggtggtggctgtaggcagggccctctactatctgcagatccatcctcaggagctccggcagatcagccacacagagatggaacatgaagtggcttgcttggacatcaccccattaggagacagcaatggactgtcccctctttgtgccattggcctctggacggacatctcggctcgtatcttgaagttgccctcttttgaactattcatatataggccaggcacggtggctatgcctgtaatcccagaatttggaagaccacgtcaacacacgggtacg

SEQ ID NO: 69758 - DNA, 1971 bp, Homo sapiens
agaggccaggtgaggccgtcccgtgatgccccgcgccccggccgctctggcctgcaacgtgtctctggggcggaggcagcggcagtggagttcgctgcgcgctgttgggggccacctgtcttttcgcttgtgtccctctttctagtgtcgcgctcgagtcccgacgggccgctccaagcctcgacatgtcgtacaactacgtggtaacggcccagaagcccaccgccgtgaacggctgcgtgaccggacactttacttcggccgaagacttaaacctgttgattgccaaaaacacgagattagagatctatgtggtcaccgccgaggggcttcggcccgtcaaagaggtgggcatgtatgggaagattgcggtcatggagcttttcaggcccaagggggagagcaaggacctgctgtttatcttgacagcgaagtacaatgcctgcatcctggagtataaacagagtggcgagagcattgacatcattacgcgagcccatggcaatgtccaggaccgcattggccgcccctcagagaccggcattattggcatcattgaccctgagtgccggatgattggcctgcgtctctatgatggccttttcaaggttattccactagatcgcgataataaagaactcaaggccttcaacatccgcctggaggagctgcatgtcattgatgtcaagttcctatatggttgccaagcacctactatttgctttgtctaccaggaccctcaggggcggcacgtaaaaacctatgaggtgtctctccgagaaaaggaattcaataagggcccttggaaacaggaaaatgtcgaagctgaagcttccatggtgatcgcagtcccagagccctttgggggggccatcatcattggacaggagtcaatcacctatcacaatggtgacaaatacctggctattgcccctcctatcatcaagcaaagcacgattgtgtgccacaatcgagtggaccctaatggctcaagatacctgctgggagacatggaaggccggctcttcatgctgcttttggagaaggaggaacagatggatggcaccgtcactctcaaggatctccgtgtagaactccttggagagacctctattgctgagtgcttgacataccttgataatggtgttgtgtttgtcgggtctcgcctgggtgactcccagcttgtgaagctcaacgttgacagtaatgaacaaggctcctatgtagtggccatggaaacctttaccaacttaggacccattgtcgatatgtgcgtggtggacctggagaggcaggggcaggggcagctggtcacttgctctggggctttcaaggaaggttctttgcggatcatccggaatggaattggaatccacgagcatgccagcattgacttaccaggcatcaaaggtagcttttttggtgggcataggatgtagatcttacatgagggactttggccttgttacatgttgtgaaggcgttttggtgggagccagaggaaagcagatcaagtgaagagtgaaagtcgtaacaacagatcagaagcttaaacatatctgaaagtataaaagtaaactttagaaaaaaaaaaaaaagaaaatactactgatcaaaattggtagtggaatagaggactaggggattaaaagattataaattaaaattaatgttgtttatatgaggcaaccgatagaattcataaagaaaggagagactgaggatattttatgaagatataagtataaatgtggtttctagataaaaaatataaatcttcctaaattccaggagaattttaataaaaaaaagatcagaggctaggcgaggtggcgtggctcatgcctgtcattacagcactttgggaggccaaggtggaaggattgcttaagcccaggagtttgagaccagcctaggcaacgtagacctcatctctataaaaaaaattaaaaattagccaggggtgatggt

SEQ ID NO: 69759 - DNA, 993 bp, Homo sapiens
  misc_feature (951)..(951): n is a, c, g, or t
  misc_feature (957)..(957): n is a, c, g, or t
  misc_feature (982)..(982): n is a, c, g, or t
agaggccaggtgaggccgtcccgtgatgccccgcgccccggccgctctggcctgcaacgtgtctctggggcggaggcagcggcagtggagttcgctgcgcgctgttgggggccacctgtcttttcgcttgtgtccctctttctagtgtcgcgctcgagtcccgacgggccgctccaagcctcgacatgtcgtacaactacgtggtaacggcccagaagcccaccgccgtgaacggctgcgtgaccggacactttacttcggccgaagacttaaacctgttgattgccaaaaacacgagattagagatctatgtggtcaccgccgaggggcttcggcccgtcaaagaggtgggcatgtatgggaagattgcggtcatggagcttttcaggcccaagggggagagcaaggacctgctgtttatcttgacagcgaagtacaatgcctgcatcctggagtataaacagagtggcgagagcattgacatcattacgcgagcccatggcaatgtccaggaccgcattggccgcccctcagagaccggcattattggcatcattgaccctgagtgccggatgattggcctgcgtctctatgatggccttttcaaggttattccactagatcgcgataataaagaactcaaggccttcaacatccgcctggaggagctgcatgtcattgatgtcaagttcctatatggttgccaagcacctactatttgctttgtctaccaggaccctcaggggcggcacgtaaaaacctatgaggtgtctctccgagaaaaggaattcaataagggcccttggaaacaggaaaatgtcgaagctgaagcttccatggtgatcgcagtcccagagccctttgggggggccatcatcattggacaggagtcaatcacctatcacaatggtgacaaatacctggctattgcccctcctatcatcaagaacncaatgngtgcccaatcaatggacctatggtnagaaccgtgga

SEQ ID NO: 69760 - DNA, 2284 bp, Homo sapiens
cttgtacttgtgaatgttgcctcaatgcatattttatttttttacacaaaaatatgagatcctgtttaagtgccttaaaatgtatttgacaagagcgttatttccaaaatatgctttgttgattactgccaggggtggtacaatatttgggggttaattttgctttcctaatgcaggaatcagtcatggtaagtgacaaaaagcaaacatgctttccctgcagcacctttgtgtaatacaaccctatagtagttactgtaatgtttgaaatgaggtcacaccatcaggaaaatgcccttctgatgacagtgaaaatttccaaagtcttattcatgcatactttgatttactgtgtgattctttttttctacgactgtgacatgcctcttccttatcaactcagcaggggtcatagatcgaatagatgctgaaaagcgtaagatatatgcattccttgacatcatttttaaagacattccttcaaatagtttccacacagaaattcctcactcccattatgagagattgtggttatatgtcttaaatttattataagctgcttcaaagaaagggtctgaatgtttgaattatgagtgaaatcatgtgaaattttgagttaaactctgtgatttgattttcagggtctttaaaatatatcttaatatcttcttcctctttattcaataatttctgtcttgcacttacacactcataacagccaaatatgaggcacaaaaatgttacaatcagtttgaaagcagcatcaattaatggtagattctattcacattccacaacccagaccaaatttttttcctattacgcagatgtgctgagcactttccagattgcccctgttggccaaaagcagcctgttacatcctggaattaagcacacttaagatgaaaagaacatgcaaaaccatttaataaccaaaatatcaagtaaaattagttcccaacggggcagcagctttcaaatgagtgtccaatatttgcttctgctatagctgcaagaactgtaactggacccaagtagagaatgaagccacgtatagaactacgagaacacttttctgtgtttcccccatgccgtcctgtcacatcctcttacacgtcctctcttgatttgatagacaatattggcatcctgggtctcactgaggccgtgctatgtcctcagcagctgtttttgttgtttcgttattatgcccacaacaaaaaatcattccttagaaactcaccaagtttatctactgtgtaaatttatattattgttactaccaggtctcatcttttgtcaatgtcattgaataaatttcataagagttattctcagtgtgaattttaaggctaatgccagatcctgcaaaaatctatgctaaccaggctgtagtacacactgttataaagaattttacttgtgtctaaaactacagtaattttgcttaggtaattgtgcttacctatggagcacaggaaggctcttaggttttgttcctacaagtttctttgaattttggagtaaatggaagtgtctgtctgtctgtcatctatctgccctatcataaaaatctttctccctaacattaaaatactgatccccgcccccaacttatctacctctattgtctaacacctatagtaggtgtgatcatgggataaaattcaactgaaaatgctatgataacattttatcgtttgctttaaaaatgtgctttgttttcaaataatctttacatagtgaactttggtggcgttagtgatatgtttatgcctatttcttttttttacacaaattccttggcatattttttcataaagaacaaaaaataaaatcaaaatttatttttaattcatgcttattgggatttaattattcagagcttaaaatatttgttatgtttatacactgtaaagctatctgttttatgcatttgttttgtctaaatgtatttatgaaagaaatacattagattatatttatgtttactcatttttccacctggattttttttaatggttgttacaaaattagattttttaatgggtaataatgttggtattttcatgttttttcttagtattaaaatttttgtgggttttttaaaatttttccctattctgttaaaaattaacacacctctagctaatgttcagtgtttgtgctaaataccaaattttttcaaaaggattggttaagtcataaagtggattatttatgatgactggaagatgaaaataattatatgattaaacaaagaatgtttcagaaatcacaaga

SEQ ID NO: 69761 - DNA, 578 bp, Homo sapiens
aaattttgagttaaactctgtgatttgattttcagggtctttaaaatatatcttaatatcttcttcctctttattcaataatttctgtcttgcacttacacactcataacagccaaatatgaggcacaaaaatgttacaatcagtttgaaagcagcatcaattaatggtagattctattcacattccacaacccagaccaaatttttttcctattacgcagatgtgctgagcactttccagattgcccctgttggccaaaagcagcctgttacatcctggaattaagcacacttaaggtatttgagacaatttattaatgaaaatttccttggcagatttgacaaatgttggcaatatttttttagaagttaaatcatattgctttcatgaataaatgaaaatataaaggtcatggatgcaaacaaatgttacatatacacattctgtctctccagatgaaaagaacatgcaaaaccatttaataaccaaaatatcaagtaaaattagttcccaacggggcagcagctttcaaatgagtgtccaatatttgcttctgctatagctgcaagaactgtaa

SEQ ID NO: 69762 - DNA, 1600 bp, Homo sapiens
  misc_feature (444)..(444): n is a, c, g, or t
  misc_feature (1189)..(1189): n is a, c, g, or t
  misc_feature (1311)..(1311): n is a, c, g, or t
ctgagctcggtcgcggctgcctgtctgctccggcagcaccatgtcgctcttggtcgtcagcatggcgtgtgttgggttcttcttgctgcagggggcctggccacatgagggagtccacagaaaaccttccctcctggcccacccaggtcgcctggtgaaatcagaagagacagtcatcctgcaatgttggtcagatgtcatgtttgaacacttccttctgcacagagaggggatgtttaacgacactttgcgcctcattggagaacaccatgatggggtctccaaggccaacttctccatcagtcgcatgacgcaagacctggcagggacctacagatgctacggttctgttactcactccccctatcaggtgtcagctcccagtgaccctctggacatcgtgatcataggtctatatgagaaaccttctctctcagcccagcngggccccacggttctggcaggagagaatgtgaccttgtcctgcagctcccggagctcctatgacatgtaccatctatccagggaaggggaggcccatgaacgtaggctccctgcagggcccaaggtcaacggaacattccaggctgactttcctctgggccctgccacccacggagggacctacagatgcttcggctctttccatgactctccatacgagtggtcaaagtcaagtgacccactgcttgtttctgtcacaggaaacccttcaaatagttggccttcacccactgaaccaagctccaaaaccggtaacccccgacacctgcacattctgattgggacctcagtggtcatcatcctcttcatcctcctcttctttctccttcatcgctggtgctccaacaaaaaaaatgctgcggtaatggaccaagagtctgcaggaaacagaacagcgaatagcgaggactctgatgaacaagaccctcaggaggtgacatacacacagttgaatcactgcgttttcacacagagaaaaatcactcgcccttctcagaggcccaagacacccccaacagatatcatcgtgtacacggaacttccaaatgctgagtccagatccaaagttgtctcctgcccatgagcaccacagtcaggccttgagggcgtcttctagggagacaacagccctgtctcaaaaccgggttgccagctcccatgtaccagcagctggaatctgaaggcntgagtctgcatcttagggcatcgatcttcctcacaccacaaatctgaatgtgcctctcacttgcttacaaatgtctaaggtccccactgcctgctggagaaaaaacacactcctttgcttancccacagttctccatttcacttgacccctgcccacctctccaacctaactggcttacttcctagtctacttgaggctgcaatcacactgaggaactcacaattccaaacatacaagaggctccctcttaacgcagcacttagacacgtgttgttccaccttccctcatgctgttccacctcccctcagactagctttcagtcttctgtcagcagtaaaacttatatattttttaaaataacttcaatgtagttttccatccttcaaataaacatgtctgcccccatggt

SEQ ID NO: 69763 - DNA, 349 bp, Homo sapiens
cagattagatttgatatcttttattaagttgttatcttttattaattttatgtcttttgcaactagcttacactcattttacttaaaagtatgaaggctatattttttatttattttcttcttcatttttttctgatgtcagatttgccattttgtttcccatgtccctttactctatgggtcttgttttaggtcttctgctcacggtgcttcttggaataaggaaagttctctctagaccagagttctgcccaagaatcggggacagaatgagcaagtatgatctggagaagctatcagtttccactttggtatattatctcggaaagctgttgaagcaaatcagcca

SEQ ID NO: 69764 - DNA, 337 bp, Homo sapiens
actagtacctcagcatgtgattgttttaggaggtaaggcctttgaagaggtaattaaagtaaaatgaggtcatatgggaagacttcatccaagatgactgatgtcctcataagaagcacacagacaaagggaggaccacgtaaagacataggaagaagatgaccatctatagggcaaggacagaggcctccaaagaagctgactttgccaacatcttgacttgggacttctagactcaagaattgtgaaaaataaatttcagttgtttaagctgcccagtctgtgatacttcatcatggcagccataacaaactataatacacccgctgagctaagt

SEQ ID NO: 69765 - DNA, 412 bp, Homo sapiens
taacaaatccttgactcatgtataatcctttattaaaaacgcaggtagaggggccgggcacagtggctcacacctgtaatcccagcactttgggaggcagaggcaggcagatcacttgagccgggagatggaggttgcagtgagccaagattgcgctactgcactccagtctggatgacagagcgagagtccatctaaacaaaaaacaaagagacaaaaaaaaaatgcaagtagagataccatctcacatcactcagaatggctattatcaaaaagtcaaaaaataataggcactggcgaagtggcagagaaaaagcaacacatacacactgttggtaggagtgtaaattagtccaaccattgtgaaaagcagtgtggcaattcctcaaagacctaacaacagaaagaccat

SEQ ID NO: 69766 - DNA, 392 bp, Homo sapiens
gatgatagatgaatgcatgaatgaaggtatggatgaatggatggatgggtgaataggtggagatgtggaaaggtgggtgggatgggctgggtggatggatttgtaggaaaaaaaatgtaagctttgatttctgaaaacctagatctccagccttggccttatgctcgtgtctctaattctcctccctctctcatcttggtgtgcatagcccaggtagctgtgagtgcaaagaacaataggataaacattcagcactctcctgtgggtattatttttagtttccatgctgcagaggtcagagtgtcaaataacaaagagagatcttttcttttctctctcaaggaaagaatcggtcatatctgcgtgggcagcagtggaggtgggtgttagtt

SEQ ID NO: 69767 - DNA, 941 bp, Homo sapiens
tgtcaaagcggtggacggtccggaattcccgggagcggcggtggcggcagcggttgttcctgcctctccgccacctccaccgcggcttatcccctggctggcggcgttggcggggcgggggacagtagttgtagacgcccgcccctgcctcagagaagataccacattgaatgaacaaagactgaactttgtttacagataccttttataaaagatgtctgtggagtagtgttacagttcaaataacaaaggattttgcattatgagatgagtgagagtggagaattggacaaaaattgatttttgatctctgaattgtggtttttagctcaccagttattgtgtagtctcactatttgaaaattcatgctgaaaaactgagtgaatatgatcagatttctccaccaaattctcagcctgataagggtaagtaaggttccattcacctctttattcatctctgtgccatctgtggtcctttggaactggcttctttcacatagcataatgtcttcaagcttcatttgtgttgtagcatatatcagtacttcattcctttttatgctgaataatattatatgaatataccatattttgtttatccatttatcagttgatgggcattggttggttatttctactttttagttgtaatgaatagtgctgctgtgaacatttgtttacaacttcttgcatggacataggttttcattcttttggctatatatgggtggaattgctaagtggaattgatgaaactgctgctaagttattttccaaagtaggtgcaccattttacattcccgcaaacaatgaatgaagtttccaatttttccacattcttgctaacacttactagtatctttttttcactatagccctcctagtagatgtaaagtaaaatctttttattaccaaaaaatttcaaacatacttaaaaa

SEQ ID NO: 69768 - DNA, 1888 bp, Homo sapiens
catggcgtctgtgctgtccagtcataagccggtagtggcggcgacttcccctcaggaagccgggtctccgcctcctcctcccatccagcctgctcggcggcggaggcggcggtggcggcagcggttgttcctgcctctccgccacctccaccgcggcttatcccctggctggcggcgttggcggggcgggggacagtagttgtagacgcccgcccctgcctcagagaagataccacattgaatgaacaaagactgaactttgtttacagataccttttataaaagatgtctgtggagtagtgttacagttcaaataacaaaggattttgcattatgagatgagtgagagtggagaattggacaaaaattgatttttgatctctgaattgtggtttttagctcaccagttattgtgtagtctcactatttgaaaattcatgctgaaaaactgagtgaatatgatcagatttctccaccaaattctcagcctgataaggaaaatcccgttttgtcaacctaatgaagcattcaaagaagacatatgactcttttcaagatgaacttgaagattatattaaagtacagaaagccagaggcttagagccaaagacttgtttcagaaagatgaaaggggactatttggaaacctgtgggtacaaaggagaggttaattccagacccacgtatagaatgtttgaccagagactcccatctgaaaccatccagacctacccaagatcatgcaatattccacaaacagtggaaaatcggttgcctcagtggttaccagcccatgacagcagattgagactagactctctgagctactgtcagttcacgagggactgtttctcagaaaaaccagtacccctgaactttaatcaacaagaatatatttgtggctcacatggtgtagaacatagagtttacaagcacttctcctcagataacagtaccagtactcatcaagccagtcacaaacagatacatcagaagaggaaaaggcacccagaggaaggcagagaaaaatcagaggaggagcggtctaagcataagagaaaaaaaagctgcgaggaaattgacttagacaaacacaagagcatccaaagaaagaaaacagaggtggaaatagaaaccgtacatgtcagtacagaaaagcttaagaatcgaaaggagaaaaaaagccgagatgtagtctctaagaaagaggaacgtaagcgtacaaaaaagaaaaaggaacaaggccaagaaaggacagaggaggaaatgctttgggaccagtctattcttggattttgaagctttcaaagttggttctcccaaagttaaattgaaaaaataggtgagagcttggttttatgatatccgtgttcataccacttttcttatgtgaataggttctttaacttctaacaaaggcctagtaaacaaagtgtttagcatgcttgctctccaacacagaaattgcttttcctcattttctaaaagcattattacattttttgaacatatagtgtaatttcctttaatgaaagtgactctgcttttattcatcaaattgctttgatggtggaaatattttctgttgggaggttatttattttaaattggaggattaatgacctttgcacaatctgtttcttgattgggtttgttatagttttgagttgggtattttatgttcattggtttttctctgtgaagcaatttttttctcctttattagatctaacttgcagtgtattttctaggctggaaagtggaaaatgaaatatattataatcttaggttacataaagtttctaaagtttcaaagagtcttgatacaaaatcagtttatattctgaaaatatttataataaagtattctaatttctacaaaaaaaaa

SEQ ID NO: 69769 - DNA, 1756 bp, Homo sapiens
tgtcaaagcggtggacggtccggaattcccgggagcggcggtggcggcagcggttgttcctgcctctccgccacctccaccgcggcttatcccctggctggcggcgttggcggggcgggggacagtagttgtagacgcccgcccctgcctcagagaagataccacattgaatgaacaaagactgaactttgtttacagataccttttataaaagatgtctgtggagtagtgttacagttcaaataacaaaggattttgcattatgagctcaccagttattgtgtagtctcactatttgaaaattcatgctgaaaaactgagtgaatatgatcagatttctccaccaaattctcagcctgataaggaaaatcccgttttgtcaacctaatgaagcattcaaagaagacatatgactcttttcaagatgaacttgaagattatattaaagtacagaaagccagaggcttagagccaaagacttgtttcagaaagatgaaaggggactatttggaaacctgtgggtacaaaggagaggttaattccagacccacgtatagaatgtttgaccagagactcccatctgaaaccatccagacctacccaagatcatgcaatattccacaaacagtggaaaatcggttgcctcagtggttaccagcccatgacagcagattgagactagactctctgagctactgtcagttcacgagggactgtttctcagaaaaaccagtacccctgaactttaatcaacaagaatatatttgtggctcacatggtgtagaacatagagtttacaagcacttctcctcagataacagtaccagtactcatcaagccagtcacaaacagatacatcagaagaggaaaaggcacccagaggaaggcagagaaaaatcagaggaggagcggtctaagcataagagaaaaaaaagctgcgaggaaattgacttagacaaacacaagagcatccaaagaaagaaaacagaggtggaaatagaaaccgtacatgtcagtacagaaaagcttaagaatcgaaaggagaaaaaaagccgagatgtagtctctaagaaagaggaacgtaagcgtacaaaaaagaaaaaggaacaaggccaagaaaggacagaggaggaaatgctttgggaccagtctattcttggattttgaagctttcaaagttggttctcccaaagttaaattgaaaaaataggtgagagcttggttttatgatatccgtgttcataccacttttcttatgtgaataggttctttaacttctaacaaaggcctagtaaacaaagtgtttagcatgcttgctctccaacacagaaattgcttttcctcattttctaaaagcattattacattttttgaacatatagtgtaatttcctttaatgaaagtgactctgcttttattcatcaaattgctttgatggtggaaatattttctgttgggaggttatttattttaaattggaggattaatgacctttgcacaatctgtttcttgattgggtttgttatagttttgagttgggtattttatgttcattggtttttctctgtgaagcaatttttttctcctttattagatctaacttgcagtgtattttctaggctggaaagtggaaaatgaaatatattataatcttaggttacataaagtttctaaagtttcaaagagtcttgatacaaaatcagtttatattctgaaaatatttataataaagtattctaatttctacaaaaaaaaa

SEQ ID NO: 69770 - DNA, 1504 bp, Homo sapiens
gagatcaaaaatcaatttttgtccaattctccactctcactatttgaaaattcatgctgaaaaactgagtgaatatgatcagatttctccaccaaattctcagcctgataaggaaaatcccgttttgtcaacctaatgaagcattcaaagaagacatatgactcttttcaagatgaacttgaagattatattaaagtacagaaagccagaggcttagagccaaagacttgtttcagaaagatgaaaggggactatttggaaacctgtgggtacaaaggagaggttaattccagacccacgtatagaatgtttgaccagagactcccatctgaaaccatccagacctacccaagatcatgcaatattccacaaacagtggaaaatcggttgcctcagtggttaccagcccatgacagcagattgagactagactctctgagctactgtcagttcacgagggactgtttctcagaaaaaccagtacccctgaactttaatcaacaagaatatatttgtggctcacatggtgtagaacatagagtttacaagcacttctcctcagataacagtaccagtactcatcaagccagtcacaaacagatacatcagaagaggaaaaggcacccagaggaaggcagagaaaaatcagaggaggagcggtctaagcataagagaaaaaaaagctgcgaggaaattgacttagacaaacacaagagcatccaaagaaagaaaacagaggtggaaatagaaaccgtacatgtcagtacagaaaagcttaagaatcgaaaggagaaaaaaagccgagatgtagtctctaagaaagaggaacgtaagcgtacaaaaaagaaaaaggaacaaggccaagaaaggacagaggaggaaatgctttgggaccagtctattcttggattttgaagctttcaaagttggttctcccaaagttaaattgaaaaaataggtgagagcttggttttatgatatccgtgttcataccacttttcttatgtgaataggttctttaacttctaacaaaggcctagtaaacaaagtgtttagcatgcttgctctccaacacagaaattgcttttcctcattttctaaaagcattattacattttttgaacatatagtgtaatttcctttaatgaaagtgactctgcttttattcatcaaattgctttgatggtggaaatattttctgttgggaggttatttattttaaattggaggattaatgacctttgcacaatctgtttcttgattgggtttgttatagttttgagttgggtattttatgttcattggtttttctctgtgaagcaatttttttctcctttattagatctaacttgcagtgtattttctaggctggaaagtggaaaatgaaatatattataatcttaggttacataaagtttctaaagtttcaaagagtcttgatacaaaatcagtttatattctgaaaatatttataataaagtattctaatttctacaaaaaaaaa

SEQ ID NO: 69771 - DNA, 1706 bp, Homo sapiens
ggacacgtccaacatcagaatggtctccaccgcggcttatcccctggctggcggcgttggcggggcgggggacagtagttgtagacgcccgcccctgcctcagagaagataccacattgaatgaacaaagactgaactttgtttacagataccttttataaaagatgtctgtggagtagtgttacagttcaaataacaaaggattttgcattatgagctcaccagttattgtgtagtctcactatttgaaaattcatgctgaaaaactgagtgaatatgatcagatttctccaccaaattctcagcctgataaggaaaatcccgttttgtcaacctaatgaagcattcaaagaagacatatgactcttttcaagatgaacttgaagattatattaaagtacagaaagccagaggcttagagccaaagacttgtttcagaaagatgaaaggggactatttggaaacctgtgggtacaaaggagaggttaattccagacccacgtatagaatgtttgaccagagactcccatctgaaaccatccagacctacccaagatcatgcaatattccacaaacagtggaaaatcggttgcctcagtggttaccagcccatgacagcagattgagactagactctctgagctactgtcagttcacgagggactgtttctcagaaaaaccagtacccctgaactttaatcaacaagaatatatttgtggctcacatggtgtagaacatagagtttacaagcacttctcctcagataacagtaccagtactcatcaagccagtcacaaacagatacatcagaagaggaaaaggcacccagaggaaggcagagaaaaatcagaggaggagcggtctaagcataagagaaaaaaaagctgcgaggaaattgacttagacaaacacaagagcatccaaagaaagaaaacagaggtggaaatagaaaccgtacatgtcagtacagaaaagcttaagaatcgaaaggagaaaaaaagccgagatgtagtctctaagaaagaggaacgtaagcgtacaaaaaagaaaaaggaacaaggccaagaaaggacagaggaggaaatgctttgggaccagtctattcttggattttgaagctttcaaagttggttctcccaaagttaaattgaaaaaataggtgagagcttggttttatgatatccgtgttcataccacttttcttatgtgaataggttctttaacttctaacaaaggcctagtaaacaaagtgtttagcatgcttgctctccaacacagaaattgcttttcctcattttctaaaagcattattacattttttgaacatatagtgtaatttcctttaatgaaagtgactctgcttttattcatcaaattgctttgatggtggaaatattttctgttgggaggttatttattttaaattggaggattaatgacctttgcacaatctgtttcttgattgggtttgttatagttttgagttgggtattttatgttcattggtttttctctgtgaagcaatttttttctcctttattagatctaacttgcagtgtattttctaggctggaaagtggaaaatgaaatatattataatcttaggttacataaagtttctaaagtttcaaagagtcttgatacaaaatcagtttatattctgaaaatatttataataaagtattctaatttctacaaaaaaaaa

SEQ ID NO: 69772 - DNA, 2768 bp, Homo sapiens
catggcgtctgtgctgtccagtcataagccggtagtggcggcgacttcccctcaggaagccgggtctccgcctcctcctcccatccagcctgctcggcggcggaggcggcggtggcggcagcggttgttcctgcctctccgccacctccaccgcggcttatcccctggctggcggcgttggcggggcgggggacagtagttgtagacgcccgcccctgcctcagagaagataccacattgaatgaacaaagactgaactttgtttacagataccttttataaaagatgtctgtggagtagtgttacagttcaaataacaaaggattttgcattatgagatgagtgagagtggagaattggacaaaaattgatttttgatctctgaattgtggtttttagctcaccagttattgtgtagtctcactatttgaaaattcatgctgaaaaactgagtgaatatgatcagatttctccaccaaattctcagcctgataaggaaaatcccgttttgtcaacctaatgaagcattcaaagaagacatatgactcttttcaagatgaacttgaagattatattaaagtacagaaagccagaggcttagagccaaagacttgtttcagaaagatgaaaggggactatttggaaacctgtgggtacaaaggagaggttaattccagacccacgtatagaatgtttgaccagagactcccatctgaaaccatccagacctacccaagatcatgcaatattccacaaacagtggaaaatcggttgcctcagtggttaccagcccatgacagcagattgagactagactctctgagctactgtcagttcacgagggactgtttctcagaaaaaccagtacccctgaactttaatcaacaagaatatatttgtggctcacatggtgtagaacatagagtttacaagcacttctcctcagataacagtaccagtactcatcaagccagtcacaaacagatacatcagaagaggaaaaggcacccagaggaaggcagagaaaaatcagaggaggagcggtctaagcataagagaaaaaaaagctgcgaggaaattgacttagacaaacacaagagcatccaaagaaagaaaacagaggtggaaatagaaaccgtacatgtcagtacagaaaagcttaagaatcgaaaggagaaaaaaagccgagatgtagtctctaagaaagaggaacgtaagcgtacaaaaaagaaaaaggaacaaggccaagaaaggacagaggaggaaatgctttgggaccagtctattcttggattttgaagctttcaaagttggttctcccaaagttaaattgaaaaaataggtgagagcttggttttatgatatccgtgttcataccacttttcttatgtgaataggttctttaacttctaacaaaggcctagtaaacaaagtgtttagcatgcttgctctccaacacagaaattgcttttcctcattttctaaaagcattattacattttttgaacatatagtgtaatttcctttaatgaaagtgactctgcttttattcatcaaattgctttgatggtggaaatattttctgttgggaggttattttagacaaacacaagagcatccaaagaaagaaaacagaggtggaaatagaaaccgtacatgtcagtacagaaaagcttaagaatcgaaaggagaaaaaaagccgagatgtagtctctaagaaagaggaacgtaagcgtacaaaaaagaaaaaggaacaaggccaagaaaggacagaggaggaaatgctttgggaccagtctattcttggattttgaagctttcaaagttggttctcccaaagttaaattgaaaaaataggtgagagcttggttttatgatatccgtgttcataccacttttcttatgtgaataggttctttaacttctaacaaaggcctagtaaacaaagtgtttagcatgcttgctctccaacacagaaattgcttttcctcattttctaaaagcattattacattttttgaacatatagtgtaatttcctttaatgaaagtgactctgcttttattcatcaaattgctttgatggtggaaatattttctgttgggaggttattttagacaaacacaagagcatccaaagaaagaaaacagaggtggaaatagaaaccgtacatgtcagtacagaaaagcttaagaatcgaaaggagaaaaaaagccgagatgtagtctctaagaaagaggaacgtaagcgtacaaaaaagaaaaaggaacaaggccaagaaaggacagaggaggaaatgctttgggaccagtctattcttggattttgaagctttcaaagttggttctcccaaagttaaattgaaaaaataggtgagagcttggttttatgatatccgtgttcataccacttttcttatgtgaataggttctttaacttctaacaaaggcctagtaaacaaagtgtttagcatgcttgctctccaacacagaaattgcttttcctcattttctaaaagcattattacattttttgaacatatagtgtaatttcctttaatgaaagtgactctgcttttattcatcaaattgctttgatggtggaaatattttctgttgggaggttattttagacaaacacaagagcatccaaagaaagaaaacagaggtggaaatagaaaccgtacatgtcagtacagaaaagcttaagaatcgaaaggagaaaaaaagccgagatgtagtctctaagaaagaggaacgtaagcgtac

SEQ ID NO: 69773 - DNA, 1189 bp, Homo sapiens
ctctatggatcccccgtccttcatcatacctacccaagatcatgcaatattccacaaacagtggaaaatcggttgcctcagtggttaccagcccatgacagcagattgagactagactctctgagctactgtcagttcacgagggactgtttctcagaaaaaccagtacccctgaactttaatcaacaagaatatatttgtggctcacatggtgtagaacatagagtttacaagcacttctcctcagataacagtaccagtactcatcaagccagtcacaaacagatacatcagaagaggaaaaggcacccagaggaaggcagagaaaaatcagaggaggagcggtctaagcataagagaaaaaaaagctgcgaggaaattgacttagacaaacacaagagcatccaaagaaagaaaacagaggtggaaatagaaaccgtacatgtcagtacagaaaagcttaagaatcgaaaggagaaaaaaagccgagatgtagtctctaagaaagaggaacgtaagcgtacaaaaaagaaaaaggaacaaggccaagaaaggacagaggaggaaatgctttgggaccagtctattcttggattttgaagctttcaaagttggttctcccaaagttaaattgaaaaaataggtgagagcttggttttatgatatccgtgttcataccacttttcttatgtgaataggttctttaacttctaacaaaggcctagtaaacaaagtgtttagcatgcttgctctccaacacagaaattgcttttcctcattttctaaaagcattattacattttttgaacatatagtgtaatttcctttaatgaaagtgactctgcttttattcatcaaattgctttgatggtggaaatattttctgttgggaggttatttattttaaattggaggattaatgacctttgcacaatctgtttcttgattgggtttgttatagttttgagttgggtattttatgttcattggtttttctctgtgaagcaatttttttctcctttattagatctaacttgcagtgtattttctaggctggaaagtggaaaatgaaatatattataatcttaggttacataaagtttctaaagtttcaaagagtcttgatacaaaatcagtttatattctgaaaatatttataataaagtattctaatttctacaaaaaaaaa

SEQ ID NO: 69774 - DNA, 1791 bp, Homo sapiens
catggcgtctgtgctgtccagtcataagccggtagtggcggcgacttcccctcaggaagccgggtctccgcctcctcctcccatccagcctgctcggcggcggaggcggcggtggcggcagcggttgttcctgcctctccgccacctccaccgcggcttatcccctggctggcggcgttggcggggcgggggacagtagttgtagacgcccgcccctgcctcagagaagataccacattgaatgaacaaagactgaactttgtttacagataccttttataaaagatgtctgtggagtagtgttacagttcaaataacaaaggattttgcattatgagatgagtgagagtggagaattggacaaaaattgatttttgatctctgaattgtggtttttagctcaccagttattgtgtagtctcactatttgaaaattcatgctgaaaaactgagtgaatatgatcagatttctccaccaaattctcagcctgataaggaaaatcccgttttgtcaacctaatgaagcattcaaagaagacatatgactcttttcaagatgaacttgaagattatattaaagtacagaaagccagaggcttagagccaaagacttgtttcagaaagatgaaaggggactatttggaaacctgtgggtacaaaggagaggttaattccagacccacgtatagaatgtttgaccagagactcccatctgaaaccatccagacctacccaagatcatgcaatattccacaaacagtggaaaatcggttgcctcagtggttaccagcccatgacagcagattgagactagactctctgagctactgtcagttcacgagggactgtttctcagaaaaaccagtacccctgaactttaatcaacaagaatatatttgtggctcacatggtgtagaacatagagtttacaagcacttctcctcagataacagtaccagtactcatcaagccagtcacaaacagatacatcagaagaggaaaaggcacccagaggaaggcagagaaaaatcagaggaggagcggtctaagcataagagaaaaaaaagctgcgaggaaattgacttagacaaacacaagagcatccaaagaaagaaaacagaggtggaaatagaaaccgtacatgtcagtacagaaaagcttaagaatcgaaaggagaaaaaaagccgagatgtagtctctaagaaagaggaacgtaagcgtacaaaaaagaaaaaggaacaaggccaagaaaggacagaggaggaaatgctttgggaccagtctattcttggattttgaagctttcaaagttggttctcccaaagttaaattgaaaaaataggtgagagcttggttttatgatatccgtgttcataccacttttcttatgtgaataggttctttaacttctaacaaaggcctagtaaacaaagtgtttagcatgcttgctctccaacacagaaattgcttttcctcatttttgactctgcttttattcatcaaattgctttgatggtggaaatattttctgttgggaggttatttattttaaattggaggattaatgacctttgcacaatctgtttcttgattgggcctgcacaggcttgactcggccactcgactcatcttcctccacgtctgtgatggtcggctcacgttcgtccatgattcaccgttagcatacgcgtccttcacgctataggcgggagtacgtttttgcgtgcatggcgccgtcgggtacctctctccctcgcgcgctggggtcctcgtggcgctacgcgcttaccg

SEQ ID NO: 69775 - DNA, 897 bp, Homo sapiens
tgctctgaggcgactctcagggcttatgccactaacctccagaggaggagcggtctaagcataagagaaaaaaaagctgcgaggaaattgacttagacaaacacaagagcatccaaagaaagaaaacagaggtggaaatagaaaccgtacatgtcagtacagaaaagcttaagaatcgaaaggagaaaaaaagccgagatgtagtctctaagaaagaggaacgtaagcgtacaaaaaagaaaaaggaacaaggccaagaaaggacagaggaggaaatgctttgggaccagtctattcttggattttgaagctttcaaagttggttctcccaaagttaaattgaaaaaataggtgagagcttggttttatgatatccgtgttcataccacttttcttatgtgaataggttctttaacttctaacaaaggcctagtaaacaaagtgtttagcatgcttgctctccaacacagaaattgcttttcctcattttctaaaagcattattacattttttgaacatatagtgtaatttcctttaatgaaagtgactctgcttttattcatcaaattgctttgatggtggaaatattttctgttgggaggttatttattttaaattggaggattaatgacctttgcacaatctgtttcttgattgggtttgttatagttttgagttgggtattttatgttcattggtttttctctgtgaagcaatttttttctcctttattagatctaacttgcagtgtattttctaggctggaaagtggaaaatgaaatatattataatcttaggttacataaagtttctaaagtttcaaagagtcttgatacaaaatcagtttatattctgaaaatatttataataaagtattctaatttctacaaaaaaaaa

SEQ ID NO: 69776 - DNA, 592 bp, Homo sapiens
atccccgatgttatccccaacaccaaccgaggcagtcagcccaatgacctggggcagtgggcctgaagatcctccaagtttctgatctagataattaaacatgatcatattgtacgggatgtgtttactgtgttgggcgataacgtgatgttatctccaacacagaaattgcttttcctcattttctaaaagcattattacattttttgaacatatagtgtaatttcctttaatgaaagtgactctgcttttattcatcaaattgctttgatggtggaaatattttctgttgggaggttatttattttaaattggaggattaatgacctttgcacaatctgtttcttgattgggtttgttatagttttgagttgggtattttatgttcattggtttttctctgtgaagcaatttttttctcctttattagatctaacttgcagtgtattttctaggctggaaagtggaaaatgaaatatattataatcttaggttacataaagtttctaaagtttcaaagagtcttgatacaaaatcagtttatattctgaaaatatttataataaagtattctaatttctacaaaaaaaaa

SEQ ID NO: 69777 - DNA, 1058 bp, Homo sapiens
  misc_feature (929)..(929): n is a, c, g, or t
  misc_feature (934)..(934): n is a, c, g, or t
  misc_feature (938)..(939): n is a, c, g, or t
  misc_feature (945)..(945): n is a, c, g, or t
gcggcggggggatgaaaaacttaggctaggtacgaggcctgggtggtgggttctctctctccagaaggttctgccggttcccccagctctgggtacccggctctgcatcgcgtcgccatgatgggccatcgtccagtgctcgtgctcagccagaacacaaagcgtgaatccggaagaaaagttcaatctggaaacatcaatgctgccaagactattgcagatatcatccgaacatgtttgggacccaagtccatgatgaagatgcttttggacccaatgggaggcattgtgatgaccaatgatggcaatgccattcttcgagagattcaagtccagcatccagcggccaagtccatgatcgaaattagccggacccaggatgaagaggttggagatgggaccacatcagtaattattcttgcaggggaaatgctgtctgtagctgagcacttcctggagcagcagatgcacccaacagtggtgatcagtgcttaccgcaaggcattggatgatatgatcagcaccctaaagaaaataagtatcccagtcgacatcagtgacagtgatatgatgctgaacatcatcaacagctctattactaccaaagccatcagtcggtggtcatctttggcttgcaacattgccctggatgctgtcaagatggtacagtttgaggagaatggtcggaaagagattgacataaaaaaatatgcaagagtggaaaagatacctggaggcatcattgaagactcctgtgtcttgcgtggagtcatgattaacaaggatgtgacccatccacgtatgcggcgctatatcaagaaccctcgcattgtgctgctggattcttctctggaatacaagaaaggagaaagccaggatgccttggattacccgaggtgggttccccgatttccgatggggggaaggantcccncgcnngggggnttttcactgggaccggggtcctgacagggctccatttccggcctgttggggttagcccgcggggggagaaaaacgtgtgtcgggggcgggagcccgagggaaattgccgcggt

SEQ ID NO: 69778 - DNA, 861 bp, Homo sapiens
  misc_feature (9)..(9): n is a, c, g, or t
  misc_feature (405)..(405): n is a, c, g, or t
  misc_feature (425)..(426): n is a, c, g, or t
  misc_feature (471)..(471): n is a, c, g, or t
  misc_feature (493)..(493): n is a, c, g, or t
  misc_feature (515)..(515): n is a, c, g, or t
  misc_feature (523)..(523): n is a, c, g, or t
  misc_feature (533)..(533): n is a, c, g, or t
  misc_feature (543)..(543): n is a, c, g, or t
  misc_feature (558)..(558): n is a, c, g, or t
  misc_feature (573)..(574): n is a, c, g, or t
  misc_feature (599)..(599): n is a, c, g, or t
  misc_feature (617)..(617): n is a, c, g, or t
  misc_feature (657)..(657): n is a, c, g, or t
  misc_feature (669)..(669): n is a, c, g, or t
  misc_feature (677)..(677): n is a, c, g, or t
  misc_feature (684)..(684): n is a, c, g, or t
  misc_feature (697)..(697): n is a, c, g, or t
  misc_feature (701)..(701): n is a, c, g, or t
  misc_feature (703)..(703): n is a, c, g, or t
  misc_feature (709)..(709): n is a, c, g, or t
  misc_feature (714)..(714): n is a, c, g, or t
  misc_feature (724)..(724): n is a, c, g, or t
  misc_feature (736)..(736): n is a, c, g, or t
  misc_feature (744)..(746): n is a, c, g, or t
  misc_feature (748)..(749): n is a, c, g, or t
  misc_feature (758)..(758): n is a, c, g, or t
  misc_feature (772)..(772): n is a, c, g, or t
  misc_feature (783)..(783): n is a, c, g, or t
  misc_feature (797)..(797): n is a, c, g, or t
  misc_feature (852)..(852): n is a, c, g, or t
aggtggtanggtccggaattcccgggatgggttctctctctccagaaggttctgccggttcccccagctctgggtacccggctctgcatcgcgtcgccatgatgggccatcgtccagtgctcgtgctcagccagaacacaaagcgtgaatccggaagaaaagttcaatctggaaacatcaatgctgccaagactattgcagatatcatccgaacatgtttgggacccaagtccatgatgaagatgcttttggacccaatgggaggcattgtgatgaccaatgatggcaatgccattcttcgagagattcaagtccagcatccagcggccaagtccatgatcgaaattagccggacccaggatgaagaggttggagatgggaccacatcagtaattattcttgacngggcactgctgtttgtagannaaaacttcctggagcagacgatgcccccccccgtggtgatccgtncttaccgaccagtcattggctnctctgctccgccccctcccgcncctccgtntacccgtagncacttcgtgnccagtactctgatgntgccactcatccccnnatctacttcctacaacaccgcactncgtaggaggtcctatttngattgaccccttgaactgactgctgtaccgctggtcccgnttgcggagcctngtaggccngcgcttnccctccccccctntgancncgtggnaccgntcactggcgnaataaaaaaaanaaaaaaannntnnagtggcgtnctgcttcccccggntgtgcaccctncccgtctgaggcgntctctcccgccctctcgccttgtgctgctggcttattctctggcctccccgcccngcgcccgcc

SEQ ID NO: 69779 - DNA, 575 bp, Homo sapiens
  misc_feature (509)..(509): n is a, c, g, or t
  misc_feature (511)..(511): n is a, c, g, or t
  misc_feature (537)..(537): n is a, c, g, or t
  misc_feature (552)..(552): n is a, c, g, or t
  misc_feature (557)..(558): n is a, c, g, or t
  misc_feature (566)..(566): n is a, c, g, or t
gtttttctcccatggagccataagaccaccatcagatctaaaataagatcaatagtcccacctaacaaccacttttattcactcatcccaaatgtctctctttatttttttgagacgggtactttggtggacatgaaggaactgggcatatgggagccattggctgtgaagctgcagacttataagacagcagtggagacggcagttctgctactgcgaattgatgacatcgtttcaggccaggagtgagtgctaggcaaggctacttcaatgcacagaaccagcagagtctccccttttcctgagccagagtgccaggaacactgtggacgtctttgttcagaagggatcaggttggggggcagcccccagtccctttctgtcccagctcagttttccaaaagacactgacatgtaattcttctctattgtaaggtttccatttagtttgcttccgatgattaaatctaagtcatttgaaaaaaaaaaaaaaaaaaaaaaaaaaaaananaaaaaaaaaaaaaacaaaaagggggngcggcggcggctaanaaaanntacccccngagggggcg

SEQ ID NO: 69780 - DNA, 724 bp, Homo sapiens
  misc_feature (2)..(2): n is a, c, g, or t
  misc_feature (44)..(44): n is a, c, g, or t
  misc_feature (614)..(614): n is a, c, g, or t
  misc_feature (619)..(619): n is a, c, g, or t
cnacgaaacaagaccctaacggctaggtagcgaggctgggtgtnggcagtgtccagaagacagacaataatcgcattgctagagcctgtggggcccggatagtcagccgaccagaggaactgagagaagatgatgttggaacaggagcaggcctgtaactgtgagacctggggtgtaaatggtgagacgggtactttggtggacatgaaggaactgggcatatgggagccattggctgtgaagctgcagacttataagacagcagtggagacggcagttctgctactgcgaattgatgacatcgtttcaggccacaaaaagaaaggcgatgaccagagccggcaaggcggggctcctgatgctggccaggagtgagtgctaggcaaggctacttcaatgcacagaaccagcagagtctccccttttcctgagccagagtgccaggaacactgtggacgtctttgttcagaagggatcaggttggggggcagcccccagtccctttctgtcccagctcagttttccaaaagacactgacatgtaattcttctctattgtaaggtttccatttagtttgcttccgatgattaaatctaagtcatttgaaaaacacncaaancaaacaaaaaaccccggggcctcaaatgccgggggcggaaacaggggccaccggactgggccctgggccatagcggtctccggacccagtttcctcgcccacgtg

SEQ ID NO: 69781 - DNA, 552 bp, Homo sapiens
ggttgatcggggtttatcgattacagaacaggctcctctagaggggtatgaagcaccgccaggtcctctgagtgttaggtctaccccaggtagacctaaccaggagtgagtgctaggcaaggctacttcaatgcacagaaccagcagagtctccccttttcctgagccagagtgccaggaacactgtggacgtctttgttcagaagggatcaggttggggggcagcccccagtccctttctgtcccagctcagttttccaaaagacactgacatgtaattcttctctattgtaaggtctacctggccaggtagacctaacccacctttccaatggcataactctctacaggtatgctgcccacagagtgcatgtctgagggctacttgatctacctggggtgttttctcaaagacttgaaccacctctaggtataagccagtgttttttaccagagataaattaatgcctacctttcatatgcatgaccccagagggcacacatggcaccctgtaacaaagagtttacagttgttagtctaccagggtagcc

SEQ ID NO: 69782 - DNA, 1057 bp, Homo sapiens
  misc_feature (3)..(3): n is a, c, g, or t
  misc_feature (888)..(888): n is a, c, g, or t
atngctaagtacgaggccggggttaatcggacgagggggttctctctctccagaaggttctgccggttcccccagctctgggtacccggctctgcatcgcgtcgccatgatgggccatcgtccagtgctcgtgctcagccagaacacaaagcgtgaatccggaagaaaagttcaatctggaaacatcaatgctgccaagactattgcagatatcatccgaacatgtttgggacccaagtccatgatgaagatgcttttggacccaatgggaggcattgtgatgaccaatgatggcaatgccattcttcgagagattcaagtccagcatccagcggccaagtccatgatcgaaattagccggacccaggatgaagaggttggagatgggaccacatcagtaattattcttgcaggggaaatgctgtctgtagctgagcacttcctggagcagcagatgcacccaacagtggtgatcagtgcttaccgcaaggcattggatgatatgatcagcaccctaaagaaaataagtatcccagtcgacatcagtgacagtgatatgatgctgaacatcatcaacagctctattactaccaaagccatcagtcggtggtcatctttggcttgcaacattgccctggatgctgtcaagatggtacagtttgaggagaatggtcggaaagagattgacataaaaaaatatgcaagagtggaaaagatacctggaggcatcattgaagactcctgtgtcttgcgtggagtcatgattaacaaggatgtgacccatccacgtatgcggcgctatatcaagaaccctcgcattgtgctgctggattcttctctggaatacaagaaaggagaaagccaggcgactgacttggattcacgaangggactcccgaattccaatgggggaatatccccttgggaggattcacaggaacccggtggctccgaaggggctcaataccagcacagtggggcgaaaccggcagggagaaaatatgtacgtggcaacaccaagaaacaggacgggggaaaataatctgagagaaccgag

SEQ ID NO: 69783 - DNA, 865 bp, Homo sapiens
  misc_feature (761)..(761): n is a, c, g, or t
  misc_feature (804)..(804): n is a, c, g, or t
accgaccccccacctactgctaggtacgaggctgggtggtgggttctctctctccagaaggttctgccggttcccccagctctgggtacccggctctgcatcgcgtcgccatgatgggccatcgtccagtgctcgtgctcagccagaacacaaagcgtgaatccggaagaaaagttcaatctggaaacatcaatgctgccaagactattgcagatatcatccgaacatgtttgggacccaagtccatgatgaagatgcttttggacccaatgggaggcattgtgatgaccaatgatggcaatgccattcttcgagagattcaagtccagcatccagcggccaagtccatgatcgaaattagccggacccaggatgaagaggttggagatgggaccacatcagtaattattcttgcaggggaaatgctgtctgtagctgagcacttcctggagcagcagatgcacccaacagtggtgatcagtgcttaccgcaaggcattggatgatatgatcagcaccctaaagaaaataagtatcccagtcgacatcagtgacagtgatatgatgctgaacatcatcaacagctctattactaccaaagccatcagtcggtggtcatctttggcttgcaacattgccctggatgctgtcaagatggtacagtttgaggagaatggtcggaaagagattgacataaaaaaatatgcaagagtggaaaaggataccgggggctcattgagaacccgggtttgcgggggctcngttaacggggtgtgcccctcacgtttggggtttttagaccccntgggggggggtctctgggagaacaagggggacccgggtgattaccagggggtcccttctag

SEQ ID NO: 69784 - DNA, 2131 bp, Homo sapiens
  misc_feature (2065)..(2065): n is a, c, g, or t
  misc_feature (2067)..(2067): n is a, c, g, or t
  misc_feature (2093)..(2093): n is a, c, g, or t
  misc_feature (2108)..(2108): n is a, c, g, or t
  misc_feature (2113)..(2114): n is a, c, g, or t
  misc_feature (2122)..(2122): n is a, c, g, or t
gcggcggggggatgaaaaacttaggctaggtacgaggcctgggtggtgggttctctctctccagaaggttctgccggttcccccagctctgggtacccggctctgcatcgcgtcgccatgatgggccatcgtccagtgctcgtgctcagccagaacacaaagcgtgaatccggaagaaaagttcaatctggaaacatcaatgctgccaagactattgcagatatcatccgaacatgtttgggacccaagtccatgatgaagatgcttttggacccaatgggaggcattgtgatgaccaatgatggcaatgccattcttcgagagattcaagtccagcatccagcggccaagtccatgatcgaaattagccggacccaggatgaagaggttggagatgggaccacatcagtaattattcttgcaggggaaatgctgtctgtagctgagcacttcctggagcagcagatgcacccaacagtggtgatcagtgcttaccgcaaggcattggatgatatgatcagcaccctaaagaaaataagtatcccagtcgacatcagtgacagtgatatgatgctgaacatcatcaacagctctattactaccaaagccatcagtcggtggtcatctttggcttgcaacattgccctggatgctgtcaagatggtacagtttgaggagaatggtcggaaagagattgacataaaaaaatatgcaagagtggaaaagatacctggaggcatcattgaagactcctgtgtcttgcgtggagtcatgattaacaaggatgtgacccatccacgtatgcggcgctatatcaagaaccctcgcattgtgctgctggattcttctctggaatacaagaaaggagaaagccagactgacattgagattacacgagaggaggacttcacccgaattctccagatggaggaagagtacatccagcagctctgtgaggacattatccaactgaagcccgatgtggtcatcactgaaaagggcatctcagatttagctcagcactaccttatgcgggccaatatcacagccatccgcagagtccggaagacagacaataatcgcattgctagagcctgtggggcccggatagtcagccgaccagaggaactgagagaagatgatgttggaacaggagcaggcctgttggaaatcaagaaaattggagatgaatactttactttcatcactgactgcaaagaccccaaggcctgcaccattctcctccggggggctagcaaagagattctctcggaagtagaacgcaacctccaggatgccatgcaagtgtgtcgcaatgttctcctggaccctcagctggtgccagggggtggggcctccgagatggctgtggcccatgccttgacagaaaaatccaaggccatgactggtgtggaacaatggccatacagggctgttgcccaggccctagaggtcattcctcgtaccctgatccagaactgtggggccagcaccatccgtctacttacctcccttcgggccaagcacacccaggagaactgtgagacctggggtgtaaatggtgagacgggtactttggtggacatgaaggaactgggcatatgggagccattggctgtgaagctgcagacttataagacagcagtggagacggcagttctgctactgcgaattgatgacatcgtttcaggccacaaaaagaaaggcgatgaccagagccggcaaggcggggctcctgatgctggccaggagtgagtgctaggcaaggctacttcaatgcacagaaccagcagagtctccccttttcctgagccagagtgccaggaacactgtggacgtctttgttcagaagggatcaggttggggggcagcccccagtccctttctgtcccagctcagttttccaaaagacactgacatgtaattcttctctattgtaaggtttccatttagtttgcttccgatgattaaatctaagtcatttgaaaaaaaaaaaaaaaaaaaaaaaaaaaaaaaaaaaaaaaaaaaaaaaaaaaaaacaaaaaaaaaaaaaaaaaaaaaaaananaaaaaaaaaaaaaacaaaaagggggngcggcggcggctaanaaaanntacccccngagggggcg

SEQ ID NO: 69785 - DNA, 2125 bp, Homo sapiens
  misc_feature (2)..(2): n is a, c, g, or t
  misc_feature (2059)..(2059): n is a, c, g, or t
  misc_feature (2061)..(2061): n is a, c, g, or t
  misc_feature (2087)..(2087): n is a, c, g, or t
  misc_feature (2102)..(2102): n is a, c, g, or t
  misc_feature (2107)..(2108): n is a, c, g, or t
  misc_feature (2116)..(2116): n is a, c, g, or t
cnacgaaacaagaccctaacggctaggtagcgaggctgggtgggttctctctctccagaaggttctgccggttcccccagctctgggtacccggctctgcatcgcgtcgccatgatgggccatcgtccagtgctcgtgctcagccagaacacaaagcgtgaatccggaagaaaagttcaatctggaaacatcaatgctgccaagactattgcagatatcatccgaacatgtttgggacccaagtccatgatgaagatgcttttggacccaatgggaggcattgtgatgaccaatgatggcaatgccattcttcgagagattcaagtccagcatccagcggccaagtccatgatcgaaattagccggacccaggatgaagaggttggagatgggaccacatcagtaattattcttgcaggggaaatgctgtctgtagctgagcacttcctggagcagcagatgcacccaacagtggtgatcagtgcttaccgcaaggcattggatgatatgatcagcaccctaaagaaaataagtatcccagtcgacatcagtgacagtgatatgatgctgaacatcatcaacagctctattactaccaaagccatcagtcggtggtcatctttggcttgcaacattgccctggatgctgtcaagatggtacagtttgaggagaatggtcggaaagagattgacataaaaaaatatgcaagagtggaaaagatacctggaggcatcattgaagactcctgtgtcttgcgtggagtcatgattaacaaggatgtgacccatccacgtatgcggcgctatatcaagaaccctcgcattgtgctgctggattcttctctggaatacaagaaaggagaaagccagactgacattgagattacacgagaggaggacttcacccgaattctccagatggaggaagagtacatccagcagctctgtgaggacattatccaactgaagcccgatgtggtcatcactgaaaagggcatctcagatttagctcagcactaccttatgcgggccaatatcacagccatccgcagagtccggaagacagacaataatcgcattgctagagcctgtggggcccggatagtcagccgaccagaggaactgagagaagatgatgttggaacaggagcaggcctgttggaaatcaagaaaattggagatgaatactttactttcatcactgactgcaaagaccccaaggcctgcaccattctcctccggggggctagcaaagagattctctcggaagtagaacgcaacctccaggatgccatgcaagtgtgtcgcaatgttctcctggaccctcagctggtgccagggggtggggcctccgagatggctgtggcccatgccttgacagaaaaatccaaggccatgactggtgtggaacaatggccatacagggctgttgcccaggccctagaggtcattcctcgtaccctgatccagaactgtggggccagcaccatccgtctacttacctcccttcgggccaagcacacccaggagaactgtgagacctggggtgtaaatggtgagacgggtactttggtggacatgaaggaactgggcatatgggagccattggctgtgaagctgcagacttataagacagcagtggagacggcagttctgctactgcgaattgatgacatcgtttcaggccacaaaaagaaaggcgatgaccagagccggcaaggcggggctcctgatgctggccaggagtgagtgctaggcaaggctacttcaatgcacagaaccagcagagtctccccttttcctgagccagagtgccaggaacactgtggacgtctttgttcagaagggatcaggttggggggcagcccccagtccctttctgtcccagctcagttttccaaaagacactgacatgtaattcttctctattgtaaggtttccatttagtttgcttccgatgattaaatctaagtcatttgaaaaaaaaaaaaaaaaaaaaaaaaaaaaaaaaaaaaaaaaaaaaaaaaaaaaaacaaaaaaaaaaaaaaaaaaaaaaaananaaaaaaaaaaaaaacaaaaagggggngcggcggcggctaanaaaanntacccccngagggggcg

SEQ ID NO: 69786 - DNA, 2352 bp, Homo sapiens
  misc_feature (2123)..(2123): n is a, c, g, or t
  misc_feature (2126)..(2126): n is a, c, g, or t
  misc_feature (2142)..(2142): n is a, c, g, or t
  misc_feature (2153)..(2153): n is a, c, g, or t
  misc_feature (2160)..(2160): n is a, c, g, or t
  misc_feature (2173)..(2173): n is a, c, g, or t
  misc_feature (2182)..(2183): n is a, c, g, or t
  misc_feature (2185)..(2185): n is a, c, g, or t
  misc_feature (2188)..(2188): n is a, c, g, or t
gcggcggggggatgaaaaacttaggctaggtacgaggcctgggtggtgggttctctctctccagaaggttctgccggttcccccagctctgggtacccggctctgcatcgcgtcgccatgatgggccatcgtccagtgctcgtgctcagccagaacacaaagcgtgaatccggaagaaaagttcaatctggaaacatcaatgctgccaagactattgcagatatcatccgaacatgtttgggacccaagtccatgatgaagatgcttttggacccaatgggaggcattgtgatgaccaatgatggcaatgccattcttcgagagattcaagtccagcatccagcggccaagtccatgatcgaaattagccggacccaggatgaagaggttggagatgggaccacatcagtaattattcttgcaggggaaatgctgtctgtagctgagcacttcctggagcagcagatgcacccaacagtggtgatcagtgcttaccgcaaggcattggatgatatgatcagcaccctaaagaaaataagtatcccagtcgacatcagtgacagtgatatgatgctgaacatcatcaacagctctattactaccaaagccatcagtcggtggtcatctttggcttgcaacattgccctggatgctgtcaagatggtacagtttgaggagaatggtcggaaagagattgacataaaaaaatatgcaagagtggaaaagatacctggaggcatcattgaagactcctgtgtcttgcgtggagtcatgattaacaaggatgtgacccatccacgtatgcggcgctatatcaagaaccctcgcattgtgctgctggattcttctctggaatacaagaaaggagaaagccagactgacattgagattacacgagaggaggacttcacccgaattctccagatggaggaagagtacatccagcagctctgtgaggacattatccaactgaagcccgatgtggtcatcactgaaaagggcatctcagatttagctcagcactaccttatgcgggccaatatcacagccatccgcagagtccggaagacagacaataatcgcattgctagagcctgtggggcccggatagtcagccgaccagaggaactgagagaagatgatgttggaacaggagcaggcctgttggaaatcaagaaaattggagatgaatactttactttcatcactgactgcaaagaccccaaggcctgcaccattctcctccggggggctagcaaagagattctctcggaagtagaacgcaacctccaggatgccatgcaagtgtgtcgcaatgttctcctggaccctcagctggtgccagggggtggggcctccgagatggctgtggcccatgccttgacagaaaaatccaaggccatgactggtgtggaacaatggccatacagggctgttgcccaggccctagaggtcattcctcgtaccctgatccagaactgtggggccagcaccatccgtctacttacctcccttcgggccaagcacacccaggagaactgtgagacctggggtgtaaatggtgagacgggtactttggtggacatgaaggaactgggcatatgggagccattggctgtgaagctgcagacttataagacagcagtggagacggcagttctgctactgcgaattgatgacatcgtttcaggccacaaaaagaaaggcgatgaccagagccggcaaggcggggctcctgatgctggccaggagtgagtgctaggcaaggctacttcaatgcacagaaccagcagagtctccccttttcctgagccagagtgccaggaacactgtggacgtctttgttcagaagggatcaggttggggggcagcccccagtccctttctgtcccagctcagttttccaaaagacactgacatgtaattcttctctattgtaaggtttccatttagtttgcttccgatgattaaatctaagtcatttgaaaaaaaaaaaaaaaaatctcagactagcttctctccagagacgggggaaaacgactcctatcgcggggaaagggccagccgacccagggtgtccaggatgaccgggatgagctcggggcagcctcatacagtgcagnagnggagaacaccggcggnacaccagcctnatgctgngggactaccgggncacgggtgnnanacnggacgtccagcaaagggtgtaccgtcggccggggaacagccgggcgtgtgctggacaattgtccgctgagatcacagagggtcagatggaaccggtagaccgagtggacgcccggggacacggaagggggacgaacgcgtcaacggaccaaagggacctaaagg

SEQ ID NO: 69787 - DNA, 2081 bp, Homo sapiens
  misc_feature (2015)..(2015): n is a, c, g, or t
  misc_feature (2017)..(2017): n is a, c, g, or t
  misc_feature (2043)..(2043): n is a, c, g, or t
  misc_feature (2058)..(2058): n is a, c, g, or t
  misc_feature (2063)..(2064): n is a, c, g, or t
  misc_feature (2072)..(2072): n is a, c, g, or t
gcggcggggggatgaaaaacttaggctaggtacgaggcctgggtggtgggttctctctctccagaaggttctgccggttcccccagctctgggtacccggctctgcatcgcgtcgccatgatgggccatcgtccagtgctcgtgctcagccagaacacaaagcgtgaatccggaagaaaagttcaatctggaaacatcaatgctgccaagactattgcagatatcatccgaacatgtttgggacccaagtccatgatgaagatgcttttggacccaatgggaggcattgtgatgaccaatgatggcaatgccattcttcgagagattcaagtccagcatccagcggccaagtccatgatcgaaattagccggacccaggatgaagaggttggagatgggaccacatcagtaattattcttgcaggggaaatgctgtctgtagctgagcacttcctggagcagcagatgcacccaacagtggtgatcagtgcttaccgcaaggcattggatgatatgatcagcaccctaaagaaaataagtatcccagtcgacatcagtgacagtgatatgatgctgaacatcatcaacagctctattactaccaaagccatcagtcggtggtcatctttggcttgcaacattgccctggatgctgtcaagatggtacagtttgaggagaatggtcggaaagagattgacataaaaaaatatgcaagagtggaaaagatacctggaggcatcattgaagactcctgtgtcttgcgtggagtcatgattaacaaggatgtgacccatccacgtatgcggcgctatatcaagaaccctcgcattgtgctgctggattcttctctggaatacaagaaaggagaaagccagactgacattgagattacacgagaggaggacttcacccgaattctccagatggaggaagagtacatccagcagctctgtgaggacattatccaactgaagcccgatgtggtcatcactgaaaagggcatctcagatttagctcagcactaccttatgcgggccaatatcacagccatccgcagagtccggaagacagacaataatcgcattgctagagcctgtggggcccggatagtcagccgaccagaggaactgagagaagatgatgttggaacaggagcaggcctgttggaaatcaagaaaattggagatgaatactttactttcatcactgactgcaaagaccccaaggcctgcaccattctcctccggggggctagcaaagagattctctcggaagtagaacgcaacctccaggatgccatgcaagtgtgtcgcaatgttctcctggaccctcagctggtgccagggggtggggcctccgagatggctgtggcccatgccttgacagaaaaatccaaggccatgactggtgtggaacaatggccatacagggctgttgcccaggccctagaggtcattcctcgtaccctgatccagaactgtggggccagcaccatccgtctacttacctcccttcgggccaagcacacccaggagaactgtgagacctggggtgtaaatggtgagacgggtactttggtggacatgaaggaactgggcatatgggagccattggctgtgaagctgcagacttataagacagcagtggagacggcagttctgctactgcgaattgatgacatcgtttcaggccacaaaaagaaaggcgatgaccagagccggcaaggcggggctcctgatgctggccaggagtgagtgctaggcaaggctacttcaatgcacagaaccagcagagtctccccttttcctgagccagagtgccaggaacactgtggacgtctttgttcagaagggatcaggttggggggcagcccccagtccctttctgtcccagctcagttttccaaaagacactgacatgtaattcttctctattgtaaggtttccatttagtttgcttccgatgattaaatctaagtcatttgaaaaaaaaaaaaaaaaaaaaaaaaaaaaananaaaaaaaaaaaaaacaaaaagggggngcggcggcggctaanaaaanntacccccngagggggcg

SEQ ID NO: 69788 - DNA, 2077 bp, Homo sapiens
  misc_feature (2011)..(2011): n is a, c, g, or t
  misc_feature (2013)..(2013): n is a, c, g, or t
  misc_feature (2039)..(2039): n is a, c, g, or t
  misc_feature (2054)..(2054): n is a, c, g, or t
  misc_feature (2059)..(2060): n is a, c, g, or t
  misc_feature (2068)..(2068): n is a, c, g, or t
gcggcggggggatgaaaaacttaggctaggtacgaggcctgggtggtgggttctctctctccagaaggttctgccggttcccccagctctgggtacccggctctgcatcgcgtcgccatgatgggccatcgtccagtgctcgtgctcagccagaacacaaagcgtgaatccggaagaaaagttcaatctggaaacatcaatgctgccaagactattgcagatatcatccgaacatgtttgggacccaagtccatgatgaagatgcttttggacccaatgggaggcattgtgatgaccaatgatggcaatgccattcttcgagagattcaagtccagcatccagcggccaagtccatgatcgaaattagccggacccaggatgaagaggttggagatgggaccacatcagtaattattcttgcaggggaaatgctgtctgtagctgagcacttcctggagcagcagatgcacccaacagtggtgatcagtgcttaccgcaaggcattggatgatatgatcagcaccctaaagaaaataagtatcccagtcgacatcagtgacagtgatatgatgctgaacatcatcaacagctctattactaccaaagccatcagtcggtggtcatctttggcttgcaacattgccctggatgctgtcaagatggtacagtttgaggagaatggtcggaaagagattgacataaaaaaatatgcaagagtggaaaagatacctggaggcatcattgaagactcctgtgtcttgcgtggagtcatgattaacaaggatgtgacccatccacgtatgcggcgctatatcaagaaccctcgcattgtgctgctggattcttctctggaatacaagaaaggagaaagccagactgacattgagattacacgagaggaggacttcacccgaattctccagatggaggaagagtacatccagcagctctgtgaggacattatccaactgaagcccgatgtggtcatcactgaaaagggcatctcagatttagctcagcactaccttatgcgggccaatatcacagccatccgcagagtccggaagacagacaataatcgcattgctagagcctgtggggcccggatagtcagccgaccagaggaactgagagaagatgatgttggaacaggagcaggcctgttggaaatcaagaaaattggagatgaatactttactttcatcactgactgcaaagaccccaaggcctgcaccattctcctccggggggctagcaaagagattctctcggaagtagaacgcaacctccaggatgccatgcaagtgtgtcgcaatgttctcctggaccctcagctggtgccagggggtggggcctccgagatggctgtggcccatgccttgacagaggccctagaggtcattcctcgtaccctgatccagaactgtggggccagcaccatccgtctacttacctcccttcgggccaagcacacccaggagaactgtgagacctggggtgtaaatggtgagacgggtactttggtggacatgaaggaactgggcatatgggagccattggctgtgaagctgcagacttataagacagcagtggagacggcagttctgctactgcgaattgatgacatcgtttcaggccacaaaaagaaaggcgatgaccagagccggcaaggcggggctcctgatgctggccaggagtgagtgctaggcaaggctacttcaatgcacagaaccagcagagtctccccttttcctgagccagagtgccaggaacactgtggacgtctttgttcagaagggatcaggttggggggcagcccccagtccctttctgtcccagctcagttttccaaaagacactgacatgtaattcttctctattgtaaggtttccatttagtttgcttccgatgattaaatctaagtcatttgaaaaaaaaaaaaaaaaaaaaaaaaaaaaaaaaaaaaaaaaaaaaaaaaaaaaaacaaaaaaaaaaaaaaaaaaaaaaaananaaaaaaaaaaaaaacaaaaagggggngcggcggcggctaanaaaanntacccccngagggggcg

SEQ ID NO: 69789 - DNA, 1995 bp, Homo sapiens
gcggcggggggatgaaaaacttaggctaggtacgaggcctgggtggtgggttctctctctccagaaggttctgccggttcccccagctctgggtacccggctctgcatcgcgtcgccatgatgggccatcgtccagtgctcgtgctcagccagaacacaaagcgtgaatccggaagaaaagttcaatctggaaacatcaatgctgccaagactattgcagatatcatccgaacatgtttgggacccaagtccatgatgaagatgcttttggacccaatgggaggcattgtgatgaccaatgatggcaatgccattcttcgagagattcaagtccagcatccagcggccaagtccatgatcgaaattagccggacccaggatgaagaggttggagatgggaccacatcagtaattattcttgcaggggaaatgctgtctgtagctgagcacttcctggagcagcagatgcacccaacagtggtgatcagtgcttaccgcaaggcattggatgatatgatcagcaccctaaagaaaataagtatcccagtcgacatcagtgacagtgatatgatgctgaacatcatcaacagctctattactaccaaagccatcagtcggtggtcatctttggcttgcaacattgccctggatgctgtcaagatggtacagtttgaggagaatggtcggaaagagattgacataaaaaaatatgcaagagtggaaaagatacctggaggcatcattgaagactcctgtgtcttgcgtggagtcatgattaacaaggatgtgacccatccacgtatgcggcgctatatcaagaaccctcgcattgtgctgctggattcttctctggaatacaagaaaggagaaagccagactgacattgagattacacgagaggaggacttcacccgaattctccagatggaggaagagtacatccagcagctctgtgaggacattatccaactgaagcccgatgtggtcatcactgaaaagggcatctcagatttagctcagcactaccttatgcgggccaatatcacagccatccgcagagtccggaagacagacaataatcgcattgctagagcctgtggggcccggatagtcagccgaccagaggaactgagagaagatgatgttggaacaggagcaggcctgttggaaatcaagaaaattggagatgaatactttactttcatcactgactgcaaagaccccaaggcctgcaccattctcctccggggggctagcaaagagattctctcggaagtagaacgcaacctccaggatgccatgcaagtgtgtcgcaatgttctcctggaccctcagctggtgccagggggtggggcctccgagatggctgtggcccatgccttgacagaaaaatccaaggccatgactggtgtggaacaatggccatacagggctgttgcccaggccctagaggtcattcctcgtaccctgatccagaactgtggggccagcaccatccgtctacttacctcccttcgggccaagcacacccaggagaactgtgagacctggggtgtaaatggtgagacgggtactttggtggacatgaaggaactgggcatatgggagccattggctgtgaagctgcagacttataagacagcagtggagacggcagttctgctactgcgaattgatgacatcgtttcaggccacaaaaagaaaggcgatgaccagagccggcaaggcggggctcctgatgctggccaggagtgagtgctaggcaaggctacttcaatgcacagaaccagcagagtctccccttttcctgagccagagtgccaggaacactgtggacgtctttgttcagaagggatcaggttggggggcagcccccagtccctttctgtcccagctcagttttccaaaagacactgacatgtaattcttctctattgtaaggtttccatttagtttgcttccgatatacagtccttgtggtggcgctcctttctc

SEQ ID NO: 69790 - DNA, 2137 bp, Homo sapiens
  misc_feature (2071)..(2071): n is a, c, g, or t
  misc_feature (2073)..(2073): n is a, c, g, or t
  misc_feature (2099)..(2099): n is a, c, g, or t
  misc_feature (2114)..(2114): n is a, c, g, or t
  misc_feature (2119)..(2120): n is a, c, g, or t
  misc_feature (2128)..(2128): n is a, c, g, or t
gcggcggggggatgaaaaacttaggctaggtacgaggcctgggtggtgggttctctctctccagaaggttctgccggttcccccagctctgggtacccggctctgcatcgcgtcgccatgatgggccatcgtccagtgctcgtgctcagccagaacacaaagcgtgaatccggaagaaaagttcaatctggaaacatcaatgctgccaagactattgcagatatcatccgaacatgtttgggacccaagtccatgatgaagatgcttttggacccaatgggaggcattgtgatgaccaatgatggcaatgccattcttcgagagattcaagtccagcatccagcggccaagtccatgatcgaaattagccggacccaggatgaagaggttggagatgggaccacatcagtaattattcttgcaggggaaatgctgtctgtagctgagcacttcctggagcagcagatgcacccaacagtggtgatcagtgcttaccgcaaggcattggatgatatgatcagcaccctaaagaaaataagtatcccagtcgacatcagtgacagtgatatgatgctgaacatcatcaacagctctattactaccaaagccatcagtcggtggtcatctttggcttgcaacattgccctggatgctgtcaagatggtacagtttgaggagaatggtcggaaagagattgacataaaaaaatatgcaagagtggaaaagatacctggaggcatcattgaagactcctgtgtcttgcgtggagtcatgattaacaaggatgtgacccatccacgtatgcggcgctatatcaagaaccctcgcattgtgctgctggattcttctctggaatacaagaaaggagaaagccagagccagactgacattgagattacacgagaggaggacttcacccgaattctccagatggaggaagagtacatccagcagctctgtgaggacattatccaactgaagcccgatgtggtcatcactgaaaagggcatctcagatttagctcagcactaccttatgcgggccaatatcacagccatccgcagagtccggaagacagacaataatcgcattgctagagcctgtggggcccggatagtcagccgaccagaggaactgagagaagatgatgttggaacaggagcaggcctgttggaaatcaagaaaattggagatgaatactttactttcatcactgactgcaaagaccccaaggcctgcaccattctcctccggggggctagcaaagagattctctcggaagtagaacgcaacctccaggatgccatgcaagtgtgtcgcaatgttctcctggaccctcagctggtgccagggggtggggcctccgagatggctgtggcccatgccttgacagaaaaatccaaggccatgactggtgtggaacaatggccatacagggctgttgcccaggccctagaggtcattcctcgtaccctgatccagaactgtggggccagcaccatccgtctacttacctcccttcgggccaagcacacccaggagaactgtgagacctggggtgtaaatggtgagacgggtactttggtggacatgaaggaactgggcatatgggagccattggctgtgaagctgcagacttataagacagcagtggagacggcagttctgctactgcgaattgatgacatcgtttcaggccacaaaaagaaaggcgatgaccagagccggcaaggcggggctcctgatgctggccaggagtgagtgctaggcaaggctacttcaatgcacagaaccagcagagtctccccttttcctgagccagagtgccaggaacactgtggacgtctttgttcagaagggatcaggttggggggcagcccccagtccctttctgtcccagctcagttttccaaaagacactgacatgtaattcttctctattgtaaggtttccatttagtttgcttccgatgattaaatctaagtcatttgaaaaaaaaaaaaaaaaaaaaaaaaaaaaaaaaaaaaaaaaaaaaaaaaaaaaaacaaaaaaaaaaaaaaaaaaaaaaaananaaaaaaaaaaaaaacaaaaagggggngcggcggcggctaanaaaanntacccccngagggggcg

SEQ ID NO: 69791 - DNA, 1765 bp, Homo sapiens
  misc_feature (1555)..(1555): n is a, c, g, or t
  misc_feature (1562)..(1562): n is a, c, g, or t
  misc_feature (1571)..(1571): n is a, c, g, or t
  misc_feature (1764)..(1764): n is a, c, g, or t
gcggcggggggatgaaaaacttaggctaggtacgaggcctgggtggtgggttctctctctccagaaggttctgccggttcccccagctctgggtacccggctctgcatcgcgtcgccatgatgggccatcgtccagtgctcgtgctcagccagaacacaaagcgtgaatccggaagaaaagttcaatctggaaacatcaatgctgccaagactattgcagatatcatccgaacatgtttgggacccaagtccatgatgaagatgcttttggacccaatgggaggcattgtgatgaccaatgatggcaatgccattcttcgagagattcaagtccagcatccagcggccaagtccatgatcgaaattagccggacccaggatgaagaggttggagatgggaccacatcagtaattattcttgcaggggaaatgctgtctgtagctgagcacttcctggagcagcagatgcacccaacagtggtgatcagtgcttaccgcaaggcattggatgatatgatcagcaccctaaagaaaataagtatcccagtcgacatcagtgacagtgatatgatgctgaacatcatcaacagctctattactaccaaagccatcagtcggtggtcatctttggcttgcaacattgccctggatgctgtcaagatggtacagtttgaggagaatggtcggaaagagattgacataaaaaaatatgcaagagtggaaaagatacctggaggcatcattgaagactcctgtgtcttgcgtggagtcatgattaacaaggatgtgacccatccacgtatgcggcgctatatcaagaaccctcgcattgtgctgctggattcttctctggaatacaagaaaggagaaagccagactgacattgagattacacgagaggaggacttcacccgaattctccagatggaggaagagtacatccagcagctctgtgaggacattatccaactgaagcccgatgtggtcatcactgaaaagggcatctcagatttagctcagcactaccttatgcgggccaatatcacagccatccgcagagtccggaagacagacaataatcgcattgctagagcctgtggggcccggatagtcagccgaccagaggaactgagagaagatgatgttggaacaggagcaggcctgttggaaatcaagaaaattggagatgaatactttactttcatcactgactgcaaagaccccaaggcctgcaccattctcctccggggggctagcaaagagattctctcggaagtagaacgcaacctccaggatgccatgcaagtgtgtcgcaatgttctcctggaccctcagctggtgccagggggtggggcctccgagatggctgtggcccatgccttgacagaaaaatccaaggccatgactggtgtggaacaatggccatacagggctgttgcccaggccctagaggtcattcctcgtaccctgatccagaactgtggggccagcaccatccgtctacttacctcctcgggcaagacaccggagactgtgagactggggtggattgggncggtctnggggctgangacggcttgggggcccgggggagctgcgatttagacggggaaggggccggcaagggatgggatcttcgccaaaagggcccaaggcaggggtcgggcacgaggaggggagggtgaaacgagccctcgaaaggaagggggagaagggggccccgcaaaaatgtgtggctaaaaaaagtcggcggctgcgcccggna

SEQ ID NO: 69792 - DNA, 1955 bp, Homo sapiens
  misc_feature (1889)..(1889): n is a, c, g, or t
  misc_feature (1891)..(1891): n is a, c, g, or t
  misc_feature (1917)..(1917): n is a, c, g, or t
  misc_feature (1932)..(1932): n is a, c, g, or t
  misc_feature (1937)..(1938): n is a, c, g, or t
  misc_feature (1946)..(1946): n is a, c, g, or t
gcggcggggggatgaaaaacttaggctaggtacgaggcctgggtggtgggttctctctctccagaaggttctgccggttcccccagctctgggtacccggctctgcatcgcgtcgccatgatgggccatcgtccagtgctcgtgctcagccagaacacaaagcgtgaatccggaagaaaagttcaatctggaaacatcaatgctgccaagactattgcagatatcatccgaacatgtttgggacccaagtccatgatgaagatgcttttggacccaatgggaggcattgtgatgaccaatgatggcaatgccattcttcgagagattcaagtccagcatccagcggccaagtccatgatcgaaattagccggacccaggatgaagaggttggagatgggaccacatcagtaattattcttgcaggggaaatgctgtctgtagctgagcacttcctggagcagcagatgcacccaacagtggtgatcagtgcttaccgcaaggcattggatgatatgatcagcaccctaaagaaaataagtatcccagtcgacatcagtgacagtgatatgatgctgaacatcatcaacagctctattactaccaaagccatcagtcggtggtcatctttggcttgcaacattgccctggatgctgtcaagatggtacagtttgaggagaatggtcggaaagagattgacataaaaaaatatgcaagagtggaaaagatacctggaggcatcattgaagactcctgtgtcttgcgtggagtcatgattaacaaggatgtgacccatccacgtatgcggcgctatatcaagaaccctcgcattgtgctgctggattcttctctggaatacaagaaaggagaaagccagagccagactgacattgagattacacgagaggaggacttcacccgaattctccagatggaggaagagtacatccagcagctctgtgaggacattatccaactgaagcccgatgtggtcatcactgaaaagggcatctcagatttagctcagcactaccttatgcgggccaatatcacagccatccgcagagtccggaagacagacaataatcgcattgctagaagtagaacgcaacctccaggatgccatgcaagtgtgtcgcaatgttctcctggaccctcagctggtgccagggggtggggcctccgagatggctgtggcccatgccttgacagaaaaatccaaggccatgactggtgtggaacaatggccatacagggctgttgcccaggccctagaggtcattcctcgtaccctgatccagaactgtggggccagcaccatccgtctacttacctcccttcgggccaagcacacccaggagaactgtgagacctggggtgtaaatggtgagacgggtactttggtggacatgaaggaactgggcatatgggagccattggctgtgaagctgcagacttataagacagcagtggagacggcagttctgctactgcgaattgatgacatcgtttcaggccacaaaaagaaaggcgatgaccagagccggcaaggcggggctcctgatgctggccaggagtgagtgctaggcaaggctacttcaatgcacagaaccagcagagtctccccttttcctgagccagagtgccaggaacactgtggacgtctttgttcagaagggatcaggttggggggcagcccccagtccctttctgtcccagctcagttttccaaaagacactgacatgtaattcttctctattgtaaggtttccatttagtttgcttccgatgattaaatctaagtcatttgaaaaaaaaaaaaaaaaaaaaaaaaaaaaaaaaaaaaaaaaaaaaaaaaaaaaaacaaaaaaaaaaaaaaaaaaaaaaaananaaaaaaaaaaaaaacaaaaagggggngcggcggcggctaanaaaanntacccccngagggggcg

SEQ ID NO: 69793 - DNA, 1998 bp, Homo sapiens
  misc_feature (9)..(9): n is a, c, g, or t
  misc_feature (1932)..(1932): n is a, c, g, or t
  misc_feature (1934)..(1934): n is a, c, g, or t
  misc_feature (1960)..(1960): n is a, c, g, or t
  misc_feature (1975)..(1975): n is a, c, g, or t
  misc_feature (1980)..(1981): n is a, c, g, or t
  misc_feature (1989)..(1989): n is a, c, g, or t
aggtggtanggtccggaattcccgggatgggttctctctctccagaaggttctgccggttcccccagctctgggtacccggctctgcatcgcgtcgccatgatgggccatcgtccagtgctcgtgctcagccagaacacaaagcgtgaatccggaagaaaagttcaatctggaaacatcaatgctgccaagattcaagtccagcatccagcggccaagtccatgatcgaaattagccggacccaggatgaagaggttggagatgggaccacatcagtaattattcttgcaggggaaatgctgtctgtagctgagcacttcctggagcagcagatgcacccaacagtggtgatcagtgcttaccgcaaggcattggatgatatgatcagcaccctaaagaaaataagtatcccagtcgacatcagtgacagtgatatgatgctgaacatcatcaacagctctattactaccaaagccatcagtcggtggtcatctttggcttgcaacattgccctggatgctgtcaagatggtacagtttgaggagaatggtcggaaagagattgacataaaaaaatatgcaagagtggaaaagatacctggaggcatcattgaagactcctgtgtcttgcgtggagtcatgattaacaaggatgtgacccatccacgtatgcggcgctatatcaagaaccctcgcattgtgctgctggattcttctctggaatacaagaaaggagaaagccagactgacattgagattacacgagaggaggacttcacccgaattctccagatggaggaagagtacatccagcagctctgtgaggacattatccaactgaagcccgatgtggtcatcactgaaaagggcatctcagatttagctcagcactaccttatgcgggccaatatcacagccatccgcagagtccggaagacagacaataatcgcattgctagagcctgtggggcccggatagtcagccgaccagaggaactgagagaagatgatgttggaacaggagcaggcctgttggaaatcaagaaaattggagatgaatactttactttcatcactgactgcaaagaccccaaggcctgcaccattctcctccggggggctagcaaagagattctctcggaagtagaacgcaacctccaggatgccatgcaagtgtgtcgcaatgttctcctggaccctcagctggtgccagggggtggggcctccgagatggctgtggcccatgccttgacagaaaaatccaaggccatgactggtgtggaacaatggccatacagggctgttgcccaggccctagaggtcattcctcgtaccctgatccagaactgtggggccagcaccatccgtctacttacctcccttcgggccaagcacacccaggagaactgtgagacctggggtgtaaatggtgagacgggtactttggtggacatgaaggaactgggcatatgggagccattggctgtgaagctgcagacttataagacagcagtggagacggcagttctgctactgcgaattgatgacatcgtttcaggccacaaaaagaaaggcgatgaccagagccggcaaggcggggctcctgatgctggccaggagtgagtgctaggcaaggctacttcaatgcacagaaccagcagagtctccccttttcctgagccagagtgccaggaacactgtggacgtctttgttcagaagggatcaggttggggggcagcccccagtccctttctgtcccagctcagttttccaaaagacactgacatgtaattcttctctattgtaaggtttccatttagtttgcttccgatgattaaatctaagtcatttgaaaaaaaaaaaaaaaaaaaaaaaaaaaaaaaaaaaaaaaaaaaaaaaaaaaaaacaaaaaaaaaaaaaaaaaaaaaaaananaaaaaaaaaaaaaacaaaaagggggngcggcggcggctaanaaaanntacccccngagggggcg

SEQ ID NO: 69794 - DNA, 2134 bp, Homo sapiens
  misc_feature (2068)..(2068): n is a, c, g, or t
  misc_feature (2070)..(2070): n is a, c, g, or t
  misc_feature (2096)..(2096): n is a, c, g, or t
  misc_feature (2111)..(2111): n is a, c, g, or t
  misc_feature (2116)..(2117): n is a, c, g, or t
  misc_feature (2125)..(2125): n is a, c, g, or t
ggtgacaagcctcagattcagtcctcgagcgagggcacggacaccattgccgccatggtatgcgctcaaagccgtggtgccgccagctttctgctgtggatatgtgagcagaactccggaacaccactgggagcaaaataagtggtaccccatggacttttcttgctcttgcaaagattaatacaaaataatacttcgcagagcatcttatggtcgggctcgcaggacgcaatagatcgtagttgacatatggcgcatcggtcgtagctgtttcgctgaccccagcttacttgtacgacagtgcgtacatctagcactggtctccctatattcgagtcgtcattaatcttcgatcaagccatggttcagcctcgcattatgtagaattcgtgtcaagatgggaccacatcagtaattattcttgcaggggaaatgctgtctgtagctgagcacttcctggagcagcagatgcacccaacagtggtgatcagtgcttaccgcaaggcattggatgatatgatcagcaccctaaagaaaataagtatcccagtcgacatcagtgacagtgatatgatgctgaacatcatcaacagctctattactaccaaagccatcagtcggtggtcatctttggcttgcaacattgccctggatgctgtcaagatggtacagtttgaggagaatggtcggaaagagattgacataaaaaaatatgcaagagtggaaaagatacctggaggcatcattgaagactcctgtgtcttgcgtggagtcatgattaacaaggatgtgacccatccacgtatgcggcgctatatcaagaaccctcgcattgtgctgctggattcttctctggaatacaagaaaggagaaagccagactgacattgagattacacgagaggaggacttcacccgaattctccagatggaggaagagtacatccagcagctctgtgaggacattatccaactgaagcccgatgtggtcatcactgaaaagggcatctcagatttagctcagcactaccttatgcgggccaatatcacagccatccgcagagtccggaagacagacaataatcgcattgctagagcctgtggggcccggatagtcagccgaccagaggaactgagagaagatgatgttggaacaggagcaggcctgttggaaatcaagaaaattggagatgaatactttactttcatcactgactgcaaagaccccaaggcctgcaccattctcctccggggggctagcaaagagattctctcggaagtagaacgcaacctccaggatgccatgcaagtgtgtcgcaatgttctcctggaccctcagctggtgccagggggtggggcctccgagatggctgtggcccatgccttgacagaaaaatccaaggccatgactggtgtggaacaatggccatacagggctgttgcccaggccctagaggtcattcctcgtaccctgatccagaactgtggggccagcaccatccgtctacttacctcccttcgggccaagcacacccaggagaactgtgagacctggggtgtaaatggtgagacgggtactttggtggacatgaaggaactgggcatatgggagccattggctgtgaagctgcagacttataagacagcagtggagacggcagttctgctactgcgaattgatgacatcgtttcaggccacaaaaagaaaggcgatgaccagagccggcaaggcggggctcctgatgctggccaggagtgagtgctaggcaaggctacttcaatgcacagaaccagcagagtctccccttttcctgagccagagtgccaggaacactgtggacgtctttgttcagaagggatcaggttggggggcagcccccagtccctttctgtcccagctcagttttccaaaagacactgacatgtaattcttctctattgtaaggtttccatttagtttgcttccgatgattaaatctaagtcatttgaaaaaaaaaaaaaaaaaaaaaaaaaaaaaaaaaaaaaaaaaaaaaaaaaaaaaacaaaaaaaaaaaaaaaaaaaaaaaananaaaaaaaaaaaaaacaaaaagggggngcggcggcggctaanaaaanntacccccngagggggcg

SEQ ID NO: 69795 - DNA, 1068 bp, Homo sapiens
  misc_feature (899)..(899): n is a, c, g, or t
gcggcggggggatgaaaaacttaggctaggtacgaggcctgggtggtgggttctctctctccagaaggttctgccggttcccccagctctgggtacccggctctgcatcgcgtcgccatgatgggccatcgtccagtgctcgtgctcagccagaacacaaagcgtgaatccggaagaaaagttcaatctggaaacatcaatgctgccaagactattgcagatatcatccgaacatgtttgggacccaagtccatgatgaagatgcttttggacccaatgggaggcattgtgatgaccaatgatggcaatgccattcttcgagagattcaagtccagcatccagcggccaagtccatgatcgaaattagccggacccaggatgaagaggttggagatgggaccacatcagtaattattcttgcaggggaaatgctgtctgtagctgagcacttcctggagcagcagatgcacccaacagtggtgatcagtgcttaccgcaaggcattggatgatatgatcagcaccctaaagaaaataagtatcccagtcgacatcagtgacagtgatatgatgctgaacatcatcaacagctctattactaccaaagccatcagtcggtggtcatctttggcttgcaacattgccctggatgctgtcaagatggtacagtttgaggagaatggtcggaaagagattgacataaaaaaatatgcaagagtggaaaagatacctggaggcatcattgaagactcctgtgtcttgcgtggagtcatgattaacaaggatgtgacccatccacgtatgcggcgctatatcaagaaccctcgcattgtgctgctggattcttctctggaatacaagaaaggagaaagccaggcgactgacttggattcacgaangggactcccgaattccaatgggggaatatccccttgggaggattcacaggaacccggtggctccgaaggggctcaataccagcacagtggggcgaaaccggcagggagaaaatatgtacgtggcaacaccaagaaacaggacgggggaaaataatctgagagaaccgag

SEQ ID NO: 69796 - DNA, 1021 bp, Homo sapiens
  misc_feature (921)..(921): n is a, c, g, or t
  misc_feature (957)..(957): n is a, c, g, or t
  misc_feature (962)..(963): n is a, c, g, or t
  misc_feature (972)..(972): n is a, c, g, or t
gcggcggggggatgaaaaacttaggctaggtacgaggcctgggtggtgggttctctctctccagaaggttctgccggttcccccagctctgggtacccggctctgcatcgcgtcgccatgatgggccatcgtccagtgctcgtgctcagccagaacacaaagcgtgaatccggaagaaaagttcaatctggaaacatcaatgctgccaagactattgcagatatcatccgaacatgtttgggacccaagtccatgatgaagatgcttttggacccaatgggaggcattgtgatgaccaatgatggcaatgccattcttcgagagattcaagtccagcatccagcggccaagtccatgatcgaaattagccggacccaggatgaagaggttggagatgggaccacatcagtaattattcttgcaggggaaatgctgtctgtagctgagcacttcctggagcagcagatgcacccaacagtggtgatcagtgcttaccgcaaggcattggatgatatgatcagcaccctaaagaaaataagtatcccagtcgacatcagtgacagtgatatgatgctgaacatcatcaacagctctattactaccaaagccatcagtcggtggtcatctttggcttgcaacattgccctggatgctgtcaagatggtacagtttgaggagaatggtcggaaagagattgacataaaaaaatatgcaagagtggaaaagatacctggaggcatcattgaagactcctgtgtcttgcgtggagtcatgattaacaaggatgtgacccatccacgtatgcggcgctatatcaagaaccctcgcattgtgctgctggattcttctctggaatacaagaaaggagaaagccaggaaggggaagccgactggcttggattaccagaaggggattcccgnattccgatggggaagactccccgctggggattcccncgccnnggttccggngggtccattcgcccattggcatatccccggggcacaatctgcggcgcgc

SEQ ID NO: 69797 - DNA, 1045 bp, Homo sapiens
gcggcggggggatgaaaaacttaggctaggtacgaggcctgggtggtgggttctctctctccagaaggttctgccggttcccccagctctgggtacccggctctgcatcgcgtcgccatgatgggccatcgtccagtgctcgtgctcagccagaacacaaagcgtgaatccggaagaaaagttcaatctggaaacatcaatgctgccaagactattgcagatatcatccgaacatgtttgggacccaagtccatgatgaagatgcttttggacccaatgggaggcattgtgatgaccaatgatggcaatgccattcttcgagagattcaagtccagcatccagcggccaagtccatgatcgaaattagccggacccaggatgaagaggttggagatgggaccacatcagtaattattcttgcaggggaaatgctgtctgtagctgagcacttcctggagcagcagatgcacccaacagtggtgatcagtgcttaccgcaaggcattggatgatatgatcagcaccctaaagaaaataagtatcccagtcgacatcagtgacagtgatatgatgctgaacatcatcaacagctctattactaccaaagccatcagtcggtggtcatctttggcttgcaacattgccctggatgctgtcaagatggtacagtttgaggagaatggtcggaaagagattgacataaaaaaatatgcaagagtggaaaagatacctggaggcatcattgaagactcctgtgtcttgcgtggagtcatgattaacaaggatgtgacccatccacgtatgcggcgctatatcaagaaccctcgcattgtgctgctggattcttctctggaatacaagaaaggagaaagccagccgggatcacggaagggaagcccgatggggttgggattcccgggggggtttcaccgcatttcccgtggggggaggctcccccgcttgggcttttacgagcccgtgggtcccgacagggcctttttggccctttggcgtacccggcggagcgaattgtcggcggcgcgcc

SEQ ID NO: 69798 - DNA, 1143 bp, Homo sapiens
gcggcggggggatgaaaaacttaggctaggtacgaggcctgggtggtgggttctctctctccagaaggttctgccggttcccccagctctgggtacccggctctgcatcgcgtcgccatgatgggccatcgtccagtgctcgtgctcagccagaacacaaagcgtgaatccggaagaaaagttcaatctggaaacatcaatgctgccaagactattgcagatatcatccgaacatgtttgggacccaagtccatgatgaagatgcttttggacccaatgggaggcattgtgatgaccaatgatggcaatgccattcttcgagagattcaagtccagcatccagcggccaagtccatgatcgaaattagccggacccaggatgaagaggttggagatgggaccacatcagtaattattcttgcaggggaaatgctgtctgtagctgagcacttcctggagcagcagatgcacccaacagtggtgatcagtgcttaccgcaaggcattggatgatatgatcagcaccctaaagaaaataagtatcccagtcgacatcagtgacagtgatatgatgctgaacatcatcaacagctctattactaccaaagccatcagtcggtggtcatctttggcttgcaacattgccctggatgctgtcaagatggtacagtttgaggagaatggtcggaaagagattgacataaaaaaatatgcaagagtggaaaagatacctggaggcatcattgaagactcctgtgtcttgcgtggagtcatgattaacaaggatgtgacccatccacgtatgcggcgctatatcaagaaccctcgcattgtgctgctggattcttctctggaatacaagaaaggagaaagccaggcccgcacaggacgctagcagactaccaacgaaaaaggaggaccacaccacagaaataccaccagaatcgagagacacacgtacacatcccaggcaggaacccgagaaggaacacatgaaagcgaagacggaaggccccgaaacgggggacaatcagcgcggaaaaacgagaactactccagaagtagagagtacagacactaacgctcaacagcgagacacacaaaagacagccaacccggcagaagaccgcgcaaaaacagacga

SEQ ID NO: 69799 - DNA, 987 bp, Homo sapiens
gcggcggggggatgaaaaacttaggctaggtacgaggcctgggtggtgggttctctctctccagaaggttctgccggttcccccagctctgggtacccggctctgcatcgcgtcgccatgatgggccatcgtccagtgctcgtgctcagccagaacacaaagcgtgaatccggaagaaaagttcaatctggaaacatcaatgctgccaagactattgcagatatcatccgaacatgtttgggacccaagtccatgatgaagatgcttttggacccaatgggaggcattgtgatgaccaatgatggcaatgccattcttcgagagattcaagtccagcatccagcggccaagtccatgatcgaaattagccggacccaggatgaagaggttggagatgggaccacatcagtaattattcttgcaggggaaatgctgtctgtagctgagcacttcctggagcagcagatgcacccaacagtggtgatcagtgcttaccgcaaggcattggatgatatgatcagcaccctaaagaaaataagtatcccagtcgacatcagtgacagtgatatgatgctgaacatcatcaacagctctattactaccaaagccatcagtcggtggtcatctttggcttgcaacattgccctggatgctgtcaagatggtacagtttgaggagaatggtcggaaagagattgacataaaaaaatatgcaagagtggaaaagatacctggaggcatcattgaagactcctgtgtcttgcgtggagtcatgattaacaaggatgtgacccatccacgtatgcggcgctatatcaagaacctgttgggcggtggtcctctctgatcagaaggaagccgaacgcctggattccgagggtcccgattcaggggaagttcacgctgggattcaggacggggcacgaggattattaccacttggctccccgccgaaaaattcaggcctccgaaaaaaggccgcaagttg

SEQ ID NO: 69800 - DNA, 872 bp, Homo sapiens
  misc_feature (768)..(768): n is a, c, g, or t
  misc_feature (811)..(811): n is a, c, g, or t
gcggcggggggatgaaaaacttaggctaggtacgaggcctgggtggtgggttctctctctccagaaggttctgccggttcccccagctctgggtacccggctctgcatcgcgtcgccatgatgggccatcgtccagtgctcgtgctcagccagaacacaaagcgtgaatccggaagaaaagttcaatctggaaacatcaatgctgccaagactattgcagatatcatccgaacatgtttgggacccaagtccatgatgaagatgcttttggacccaatgggaggcattgtgatgaccaatgatggcaatgccattcttcgagagattcaagtccagcatccagcggccaagtccatgatcgaaattagccggacccaggatgaagaggttggagatgggaccacatcagtaattattcttgcaggggaaatgctgtctgtagctgagcacttcctggagcagcagatgcacccaacagtggtgatcagtgcttaccgcaaggcattggatgatatgatcagcaccctaaagaaaataagtatcccagtcgacatcagtgacagtgatatgatgctgaacatcatcaacagctctattactaccaaagccatcagtcggtggtcatctttggcttgcaacattgccctggatgctgtcaagatggtacagtttgaggagaatggtcggaaagagattgacataaaaaaatatgcaagagtggaaaaggataccgggggctcattgagaacccgggtttgcgggggctcngttaacggggtgtgcccctcacgtttggggtttttagaccccntgggggggggtctctgggagaacaagggggacccgggtgattaccagggggtcccttctag

SEQ ID NO: 69801 - DNA, 1160 bp, Homo sapiens
  misc_feature (931)..(931): n is a, c, g, or t
  misc_feature (934)..(934): n is a, c, g, or t
  misc_feature (950)..(950): n is a, c, g, or t
  misc_feature (961)..(961): n is a, c, g, or t
  misc_feature (968)..(968): n is a, c, g, or t
  misc_feature (981)..(981): n is a, c, g, or t
  misc_feature (990)..(991): n is a, c, g, or t
  misc_feature (993)..(993): n is a, c, g, or t
  misc_feature (996)..(996): n is a, c, g, or t
gcggcggggggatgaaaaacttaggctaggtacgaggcctgggtggtgggttctctctctccagaaggttctgccggttcccccagctctgggtacccggctctgcatcgcgtcgccatgatgggccatcgtccagtgctcgtgctcagccagaacacaaagcgtgaatccggaagaaaagttcaatctggaaacatcaatgctgccaagactattgcagatatcatccgaacatgtttgggacccaagtccatgatgaagatgcttttggacccaatgggaggcattgtgatgaccaatgatggcaatgccattcttcgagagattcaagtccagcatccagcggccaagtccatgatcgaaattagccggacccaggatgaagaggttggagatgggaccacatcagtaattattcttgcaggggaaatgctgtctgtagctgagcacttcctggagcagcagatgcacccaacagtggtgatcagtgcttaccgcaaggcattggatgatatgatcagcaccctaaagaaaataagtatcccagtcgacatcagtgacagtgatatgatgctgaacatcatcaacagctctattactaccaaagccatcagtcggtggtcatctttggcttgcaacattgccctggatgctgtcaagatggtacagtttgaggagaatggtcggaaagagattgacataaaaaaatatgcaagagtggaaaagatgtaattcttctctattgtaaggtttccatttagtttgcttccgatgattaaatctaagtcatttgaaaaaaaaaaaaaaaaatctcagactagcttctctccagagacgggggaaaacgactcctatcgcggggaaagggccagccgacccagggtgtccaggatgaccgggatgagctcggggcagcctcatacagtgcagnagnggagaacaccggcggnacaccagcctnatgctgngggactaccgggncacgggtgnnanacnggacgtccagcaaagggtgtaccgtcggccggggaacagccgggcgtgtgctggacaattgtccgctgagatcacagagggtcagatggaaccggtagaccgagtggacgcccggggacacggaagggggacgaacgcgtcaacggaccaaagggacctaaagg

SEQ ID NO: 69802 - DNA, 1457 bp, Homo sapiens
  misc_feature (9)..(9): n is a, c, g, or t
  misc_feature (1391)..(1391): n is a, c, g, or t
  misc_feature (1393)..(1393): n is a, c, g, or t
  misc_feature (1419)..(1419): n is a, c, g, or t
  misc_feature (1434)..(1434): n is a, c, g, or t
  misc_feature (1439)..(1440): n is a, c, g, or t
  misc_feature (1448)..(1448): n is a, c, g, or t
aggtggtanggtccggaattcccgggatgggttctctctctccagaaggttctgccggttcccccagctctgggtacccggctctgcatcgcgtcgccatgatgggccatcgtccagtgctcgtgctcagccagaacacaaagcgtgaatccggaagaaaagttcaatctggaaacatcaatgctgccaagactattgcagatatcatccgaacatgtttgggacccaagtccatgatgaagatgcttttggacccaatgggaggcattgtgatgaccaatgatggcaatgccattcttcgagagattcaagtccagcatccagcggccaagtccatgatcgaaattagccggacccaggatgaagaggttggagatgggaccacatcagtaattattcttgattctcactctgtcaccatgctggagtgtggtggtgcgatcttggctcactgcaacctctgcctcccaggttcaagcgattctcctgcctcagcctcccaagtagctgggactatagtcacgtgccaccacgcccagctaattttcgtatttttagtagagacagggtttcaccatgttggccagatggtctcgatcctcttaacctcgtgatccgccctccttggcctcccaaagtgctgggattacaggcgtgagccaccacgcctataaagtcaccacaaacactgaattggcaaataataaatcattgcttctataggaaatacagggttagatacctataagcctctggtcacactttcatcaactgataaatatataccttattgtatgtgtttgtcttcaagacacccatttaatatatatagttgatttattagcattgaactcatagcccatagcaatataactcatgcctggacaaagctcacctaacgtattttctctgtaaggcacatcacagccttcttgcacatagaagcattagctagcacttaagcactacacttgtgagccattataaataccgaaatcatcaagaaaaatgtgaaaaacataaccttaaatatactgcataaaggacacttttttttacagtgtgagagctaaaggccttgtttaacctcacctaggaatgtcattgggtgactcaaattttttgccattctgtgaatttccatgaatgactatgaaagtgtcatgaatgttgattttggggttacaaataataagaaatgaaatctttaggataatgaccctgggctatgtaagtttaaagactaatctttctacttcctataggatcataaagaattatttttcaaaaaaaaaacgaaagcgacagaaaaagacaaaaaaaaaaaaaaaaaaaaaaaaaaaaaaaaaaaaaaaaaaaaaaaaacaaaaaaaaaaaaaaaaaaaaaaaananaaaaaaaaaaaaaacaaaaagggggngcggcggcggctaanaaaanntacccccngagggggcg

SEQ ID NO: 69803 - DNA, 606 bp, Homo sapiens
gcgggttgaggtgtaagccctgaggaggcagcgttttctgggcttctgtctggttctctctctccagaaggttctgccggttcccccagctctgggtacccggctctgcatcgcgtcgccatgatgggccatcgtccagtgctcgtgctcagtgagttctggggatgccaggaaatggacccccttttcgccctcttctgtccatacttttcagtgttgccccagctccgtcccccactgaccgggccactgagccttccaatcatcgtcttcattttggaagcccagtgtcccgctttcctctcttctcttaacctgttcgcttctctgcacaaactcaaactggccttattctcgccgagcctctttccttgacgtgtgctcgtcttgggaagctctttcccactccgcgttctgtccctcagcccccacgcttcccccgcccctgcgccctttctagcctgattgtcgctatgtagctgcacgaataacgtttttttttgtttttttttcagttaggtctagctttatattcttggcccatcccttagtagcggtaatttaaatgtttcaatctgtattacggagttaacagtatttcctagt

SEQ ID NO: 69804 - DNA, 307 bp, Homo sapiens
gcctggcctcccaaagtactgggattacaagtgtgagccactgtgcctggccccctgaaaatctttttcaccggacaggcaagacctcttaagtgatgtttccaacaatccacttttgcccttatccctagctacagaccctagagactagggaaatgggtacaagtatctgaaatcatctgattctccccacctcttccgtccattagagcctgtggggcccggatagtcagccgaccagaggaactgagagaagatgatgttggaacaggagcaggcctgttggaaatcaagaaaattggagatg

SEQ ID NO: 69805 - DNA, 1032 bp, Homo sapiens
  misc_feature (890)..(890): n is a, c, g, or t
gcggcggggggatgaaaaacttaggctaggtacgaggcctgggtggtgggttctctctctccagaaggttctgccggttcccccagctctgggtacccggctctgcatcgcgtcgccatgatgggccatcgtccagtgctcgtgctcagccagaacacaaagcgtgaatccggaagaaaagttcaatctggaaacatcaatgctgccaagactattgcagatatcatccgaacatgtttgggacccaagtccatgatgaagatgcttttggacccaatgggaggcattgtgatgaccaatgatggcaatgccattcttcgagagattcaagtccagcatccagcggccaagtccatgatcgaaattagccggacccaggatgaagaggttggagatgggaccacatcagtaattattcttgcaggggaaatgctgtctgtagctgagcacttcctggagcagcagatgcacccaacagtggtgatcagtgcttaccgcaaggcattggatgatatgatcagcaccctaaagaaaataagtatcccagtcgacatcagtgacagtgatatgatgctgaacatcatcaacagctctattactaccaaagccatcagtcggtggtcatctttggcttgcaacattgccctggatgctgtcaagatggtacagtttgaggagaatggtcggaaagagattgacataaaaaaatatgcaagagtggaaaagatacctggaggcatcattgaagactcctgtgtcttgcgtggagtcatgattaacaaggatgtgacccatccacgtatgcggcgctatatcaagaaccctcgcattgtgctgctggattcttctctggaatacaagaaaggagaaagccaggggaagcccacggnttggatcacgagggggctacgcagttccaatgagcacaaaaccagctgggattacacgaccgggcttacgaggtgcatacagcacatggtgacagccgcgaacaatggaggtcggcaccacagatagacggcgaaaatcaac

SEQ ID NO: 69806 - DNA, 856 bp, Homo sapiens
  misc_feature (2)..(2): n is a, c, g, or t
cnacgaaacaagaccctaacggctaggtagcgaggctgggtgggttctctctctccagaaggttctgccggttcccccagctctgggtacccggctctgcatcgcgtcgccatgatgggccatcgtccagtgctcgtgctcagccagaacacaaagcgtgaatccggaagaaaagttcaatctggaaacatcaatgctgccaagactattgcagatatcatccgaacatgtttgggacccaagtccatgatgaagatgcttttggacccaatgggaggcattgtgatgaccaatgatggcaatgccattcttcgagagattcaagtccagcatccagcggccaagtccatgatcgaaattagccggacccaggatgaagaggttggagatgggaccacatcagtaattattcttgcaggggaaatgctgtctgtagctgagcacttcctggagcagcagatgcacccaacagtggtgatcagtgcttaccgcaaggcattggatgatatgatcagcaccctaaagaaaataagtatcccagtcgacatcagtgacagtgatatgatgctgaacatcatcaacagctctattactaccaaagccatcagtcggtggtcatctttggcttgcaacattgccctggatgctgtcaagatggtacagtttgaggagaatggtcggaaagagattgacataaaaaaatatgcaagagtggaaaagtttgccgagtgggaagatccgggggctcatgaagacccggtctgcggggctgtacacgggtggccctcccgttgggggcttttaaaccccgtggggggtcttccgggttcacgaagggagcggggttgtccgaggc

SEQ ID NO: 69807 - DNA, 1054 bp, Homo sapiens
  misc_feature (2)..(2): n is a, c, g, or t
  misc_feature (844)..(844): n is a, c, g, or t
  misc_feature (851)..(851): n is a, c, g, or t
  misc_feature (860)..(860): n is a, c, g, or t
  misc_feature (1053)..(1053): n is a, c, g, or t
cnacgaaacaagaccctaacggctaggtagcgaggctgggtgtgtgtcttgcgtggagtcatgattaacaaggatgtgacccatccacgtatgcggcgctatatcaagaaccctcgcattgtgctgctggattcttctctggaatacaagaaaggagaaagccagactgacattgagattacacgagaggaggacttcacccgaattctccagatggaggaagagtacatccagcagctctgtgaggacattatccaactgaagcccgatgtggtcatcactgaaaagggcatctcagatttagctcagcactaccttatgcgggccaatatcacagccatccgcagagtccggaagacagacaataatcgcattgctagagcctgtggggcccggatagtcagccgaccagaggaactgagagaagatgatgttggaacaggagcaggcctgttggaaatcaagaaaattggagatgaatactttactttcatcactgactgcaaagaccccaaggcctgcaccattctcctccggggggctagcaaagagattctctcggaagtagaacgcaacctccaggatgccatgcaagtgtgtcgcaatgttctcctggaccctcagctggtgccagggggtggggcctccgagatggctgtggcccatgccttgacagaaaaatccaaggccatgactggtgtggaacaatggccatacagggctgttgcccaggccctagaggtcattcctcgtaccctgatccagaactgtggggccagcaccatccgtctacttacctcctcgggcaagacaccggagactgtgagactggggtggattgggncggtctnggggctgangacggcttgggggcccgggggagctgcgatttagacggggaaggggccggcaagggatgggatcttcgccaaaagggcccaaggcaggggtcgggcacgaggaggggagggtgaaacgagccctcgaaaggaagggggagaagggggccccgcaaaaatgtgtggctaaaaaaagtcggcggctgcgcccggna

SEQ ID NO: 69808 - DNA, 1137 bp, Homo sapiens
  misc_feature (1037)..(1037): n is a, c, g, or t
  misc_feature (1073)..(1073): n is a, c, g, or t
  misc_feature (1078)..(1079): n is a, c, g, or t
  misc_feature (1088)..(1088): n is a, c, g, or t
gtctaacttgtctggccgttcttgcgtagggggcgggactaaggctgtcaattggtctgtttttgtgccgatcaatgagatgggtgcggtgattggcgactaccttgagagtagcgggttgaggtgtaagccctgaggaggcagcgttttctgggcttctgtctggttctctctctccagaaggttctgccggttcccccagctctgggtacccggctctgcatcgcgtcgccatgatgggccatcgtccagtgctcgtgctcagccagaacacaaagcgtgaatccggaagaaaagttcaatctggaaacatcaatgctgccaagactattgcagatatcatccgaacatgtttgggacccaagtccatgatgaagatgcttttggacccaatgggaggcattgtgatgaccaatgatggcaatgccattcttcgagagattcaagtccagcatccagcggccaagtccatgatcgaaattagccggacccaggatgaagaggttggagatgggaccacatcagtaattattcttgcaggggaaatgctgtctgtagctgagcacttcctggagcagcagatgcacccaacagtggtgatcagtgcttaccgcaaggcattggatgatatgatcagcaccctaaagaaaataagtatcccagtcgacatcagtgacagtgatatgatgctgaacatcatcaacagctctattactaccaaagccatcagtcggtggtcatctttggcttgcaacattgccctggatgctgtcaagatggtacagtttgaggagaatggtcggaaagagattgacataaaaaaatatgcaagagtggaaaagatacctggaggcatcattgaagactcctgtgtcttgcgtggagtcatgattaacaaggatgtgacccatccacgtatgcggcgctatatcaagaaccctcgcattgtgctgctggattcttctctggaatacaagaaaggagaaagccaggaaggggaagccgactggcttggattaccagaaggggattcccgnattccgatggggaagactccccgctggggattcccncgccnnggttccggngggtccattcgcccattggcatatccccggggcacaatctgcggcgcgc

SEQ ID NO: 69809 - DNA, 830 bp, Homo sapiens
  misc_feature (786)..(787): n is a, c, g, or t
ggagaatggtcggaaagagattgctgatgtggtcccatctcagtaattattcttgcaggggagatgggaccacatcagcatttcccctgcaagaataattactgatgtggtcccatctcagtaattattcttgcaggggaaatgctgtctgtagctgagcacttcctggagcagcagatgcacccaacagtggtgatcagtgcttaccgcaaggcattggatgatatgatcagcaccctaaagaaaataagtatcccagtcgacatcagtgacagtgatatgatgctgaacatcatcaacagctctattactaccaaagccatcagtcggtggtcatctttggcttgcaacattgccctggatgctgtcaagatggtacagtttgaggagaatggtcggaaagagattgacataaaaaaatatgcaagagtggaaaagatacctggaggcatcattgaagactcctgtgtcttgcgtggagtcatgattaacaaggatgtgacccatccacgtatgcggcgctatatcaagaaccctcgcattgtgctgctggattcttctctggaatacaagaaaggagaaagccagactgacattgagattacacgagaggaggacttcacccgaattctccagatggaggaagagtacatccagcagctctgtgaggacattatccaactgaagcccgatgtggtcatcactgaaaagggcatctcagatttaggtcagcatacttatggggggcaatatcacagcatcgcagagtcggaaaagaaaatcggnngagctgggggccgatagtcgggacaaggatggagagtgctttg

SEQ ID NO: 69810 - DNA, 973 bp, Homo sapiens
gtctaacttgtctggccgttcttgcgtagggggcgggactaaggctgtcaattggtctgtttttgtgccgatcaatgagatgggtgcggtgattggcgactaccttgagagtagcgggttgaggtgtaagccctgaggaggcagcgttttctgggcttctgtctggttctctctctccagaaggttctgccggttcccccagctctgggtacccggctctgcatcgcgtcgccatgatgggccatcgtccagtgctcgtgctcagccagaacacaaagcgtgaatccggaagaaaagttcaatctggaaacatcaatgctgccaagactattgcagatatcatccgaacatgtttgggacccaagtccatgatgaagatgcttttggacccaatgggaggcattgtgatgaccaatgatggcaatgccattcttcgagagattcaagtccagcatccagcggccaagtccatgatcgaaattagccggacccaggatgaagaggttggagatgggaccacatcagtaattattcttgcaggggaaatgctgtctgtagctgagcacttcctggagcagcagatgcacccaacagtggtgatcagtgcttaccgcaaggcattggatgatatgatcagcaccctaaagaaaataagtatcccagtcgacatcagtgacagtgatatgatgctgaacatcatcaacagctctattactaccaaagccatcagtcggtggtcatctttggcttgcaacattgccctggatgctgtcaagatggtacagtttgaggagaatggtcggaaagagattgacataaaaaaatatgcaagagtggaaaagctcaaatttgccgagtggaaagatcctgggggctcttgagacccgtgtctgcgcgggtcctgataccggtttgcccccccgtttggcgggcttttaacccccgttgggcggccttctcggacaagggaccc

SEQ ID NO: 69811 - DNA, 2198 bp, Homo sapiens
gcggcggggggatgaaaaacttaggctaggtacgaggcctgggtggtgggttctctctctccagaaggttctgccggttcccccagctctgggtacccggctctgcatcgcgtcgccatgatgggccatcgtccagtgctcgtgctcagccagaacacaaagcgtgaatccggaagaaaagttcaatctggaaacatcaatgctgccaagactattgcagatatcatccgaacatgtttgggacccaagtccatgatgaagatgcttttggacccaatgggaggcattgtgatgaccaatgatggcaatgccattcttcgagagattcaagtccagcatccagcggccaagtccatgatcgaaattagccggacccaggatgaagaggttggagatgggaccacatcagtaattattcttgcaggggaaatgctgtctgtagctgagcacttcctggagcagcagatgcacccaacagtggtgatcagtgcttaccgcaaggcattggatgatatgatcagcaccctaaagaaaataagtatcccagtcgacatcagtgacagtgatatgatgctgaacatcatcaacagctctattactaccaaagccatcagtcggtggtcatctttggcttgcaacattgccctggatgctgtcaagatggtacagtttgaggagaatggtcggaaagagattgacataaaaaaatatgcaagagtggaaaagatacctggaggcatcattgaagactcctgtgtcttgcgtggagtcatgattaacaaggatgtgacccatccacgtatgcggcgctatatcaagaaccctcgcattgtgctgctggattcttctctggaatacaagaaaggagaaagccagactgacattgagattacacgagaggaggacttcacccgaattctccagatggaggaagagtacatccagcagctctgtgaggacattatccaactgaagcccgatgtggtcatcactgaaaagggcatctcagatttagctcagcactaccttatgcgggccaatatcacagccatccgcagagtccggaagacagacaataatcgcattgctagagcctgtggggcccggatagtcagccgaccagaggaactgagagaagatgatgttggaacaggagcaggcctgttggaaatcaagaaaattggagatgaatactttactttcatcactgactgcaaagaccccaaggcctgcaccattctcctccggggggctagcaaagagattctctcggaagtagaacgcaacctccaggatgccatgcaagtgtgtcgcaatgttctcctggaccctcagctggtgccagggggtggggcctccgagatggctgtggcccatgccttgacagaaaaatccaaggccatgactggtgtggaacaatggccatacagggctgttgcccaggccctagaggtcattcctcgtaccctgatccagaactgtggggccagcaccatccgtctacttacctcccttcgggccaagcacacccaggagaactgtgagacctggggtgtaaatggtgagacgggtactttggtggacatgaaggaactgggcatatgggagccattggctgtgaagctgcagacttataagacagcagtggagacggcagttctgctactgcgaattgatgacatcgtttcaggccacaaaaagaaaggcgatgaccagagccggcaaggcggggctcctgatgctggccaggagtgagtgctaggcaaggctacttcaatgcacagaaccagcagagtctccccttttcctgagccagagtgccaggaacactgtggacgtctttgttcagaagggatcaggttggggggcagcccccagtccctttctgtcccagctcagttttccaaaagacactgacatgtaattcttctctattgtaaggtctacctggccaggtagacctaacccacctttccaatggcataactctctacaggtatgctgcccacagagtgcatgtctgagggctacttgatctacctggggtgttttctcaaagacttgaaccacctctaggtataagccagtgttttttaccagagataaattaatgcctacctttcatatgcatgaccccagagggcacacatggcaccctgtaacaaagagtttacagttgttagtctaccagggtagcc

SEQ ID NO: 69812 - DNA, 2070 bp, Homo sapiens
  misc_feature (1916)..(1916): n is a, c, g, or t
gcggcggggggatgaaaaacttaggctaggtacgaggcctgggtggtgggttctctctctccagaaggttctgccggttcccccagctctgggtacccggctctgcatcgcgtcgccatgatgggccatcgtccagtgctcgtgctcagccagaacacaaagcgtgaatccggaagaaaagttcaatctggaaacatcaatgctgccaagactattgcagatatcatccgaacatgtttgggacccaagtccatgatgaagatgcttttggacccaatgggaggcattgtgatgaccaatgatggcaatgccattcttcgagagattcaagtccagcatccagcggccaagtccatgatcgaaattagccggacccaggatgaagaggttggagatgggaccacatcagtaattattcttgcaggggaaatgctgtctgtagctgagcacttcctggagcagcagatgcacccaacagtggtgatcagtgcttaccgcaaggcattggatgatatgatcagcaccctaaagaaaataagtatcccagtcgacatcagtgacagtgatatgatgctgaacatcatcaacagctctattactaccaaagccatcagtcggtggtcatctttggcttgcaacattgccctggatgctgtcaagatggtacagtttgaggagaatggtcggaaagagattgacataaaaaaatatgcaagagtggaaaagatacctggaggcatcattgaagactcctgtgtcttgcgtggagtcatgattaacaaggatgtgacccatccacgtatgcggcgctatatcaagaaccctcgcattgtgctgctggattcttctctggaatacaagaaaggagaaagccagactgacattgagattacacgagaggaggacttcacccgaattctccagatggaggaagagtacatccagcagctctgtgaggacattatccaactgaagcccgatgtggtcatcactgaaaagggcatctcagatttagctcagcactaccttatgcgggccaatatcacagccatccgcagagtccggaagacagacaataatcgcattgctagagcctgtggggcccggatagtcagccgaccagaggaactgagagaagatgatgttggaacaggagcaggcctgttggaaatcaagaaaattggagatgaatactttactttcatcactgactgcaaagaccccaaggcctgcaccattctcctccggggggctagcaaagagattctctcggaagtagaacgcaacctccaggatgccatgcaagtgtgtcgcaatgttctcctggaccctcagctggtgccagggggtggggcctccgagatggctgtggcccatgccttgacagaaaaatccaaggccatgactggtgtggaacaatggccatacagggctgttgcccaggccctagaggtcattcctcgtaccctgatccagaactgtggggccagcaccatccgtctacttacctcccttcgggccaagcacacccaggagaactgtgagacctggggtgtaaatggtgagacgggtactttggtggacatgaaggaactgggcatatgggagccattggctgtgaagctgcagacttataagacagcagtggagacggcagttctgctactgcgaattgatgacatcgtttcaggccacaaaaagaaaggcgatgaccagagccggcaaggcggggctcctgatgctggccaggagtgagtgctaggcaaggctacttcaatgcacagaaccagcagagtctccccttttcctgagccagagtgccaggaacactgtggaacggttctgttgtgtacagaaaaggcgaattcaggcttgtgtggtgtgcaagccccccccaagtacctttatctggttcncaaggctcaacgttattccaataaagaaccatttgacgttggttaatactcctcatatggtacgggctaccaattataggtagggttccgaatggattaacagtctagtcagtttggaaaacaaacacaaacgggcggacgcgtaaagaattcc

SEQ ID NO: 69813 - DNA, 1899 bp, Homo sapiens
  misc_feature (1651)..(1651): n is a, c, g, or t
gcggcggggggatgaaaaacttaggctaggtacgaggcctgggtggtgggttctctctctccagaaggttctgccggttcccccagctctgggtacccggctctgcatcgcgtcgccatgatgggccatcgtccagtgctcgtgctcagccagaacacaaagcgtgaatccggaagaaaagttcaatctggaaacatcaatgctgccaagactattgcagatatcatccgaacatgtttgggacccaagtccatgatgaagatgcttttggacccaatgggaggcattgtgatgaccaatgatggcaatgccattcttcgagagattcaagtccagcatccagcggccaagtccatgatcgaaattagccggacccaggatgaagaggttggagatgggaccacatcagtaattattcttgcaggggaaatgctgtctgtagctgagcacttcctggagcagcagatgcacccaacagtggtgatcagtgcttaccgcaaggcattggatgatatgatcagcaccctaaagaaaataagtatcccagtcgacatcagtgacagtgatatgatgctgaacatcatcaacagctctattactaccaaagccatcagtcggtggtcatctttggcttgcaacattgccctggatgctgtcaagatggtacagtttgaggagaatggtcggaaagagattgacataaaaaaatatgcaagagtggaaaagatacctggaggcatcattgaagactcctgtgtcttgcgtggagtcatgattaacaaggatgtgacccatccacgtatgcggcgctatatcaagaaccctcgcattgtgctgctggattcttctctggaatacaagaaaggagaaagccagactgacattgagattacacgagaggaggacttcacccgaattctccagatggaggaagagtacatccagcagctctgtgaggacattatccaactgaagcccgatgtggtcatcactgaaaagggcatctcagatttagctcagcactaccttatgcgggccaatatcacagccatccgcagagtccggaagacagacaataatcgcattgctagagcctgtggggcccggatagtcagccgaccagaggaactgagagaagatgatgttggaacaggagcaggcctgttggaaatcaagaaaattggagatgaatactttactttcatcactgactgcaaagaccccaaggcctgcaccattctcctccggggggctagcaaagagattctctcggaagtagaacgcaacctccaggatgccatgcaagtgtgtcgcaatgttctcctggaccctcagctggtgccagggggtggggcctccgagatggctgtggcccatgccttgacagaaaaatccaaggccatgactggtgtggaacaatggccatacagggctgttgcccaggccctagaggtcattcctcgtaccctgatccagaactgtggggccagcaccatccgtctacttacctcccttcgggccaagcacacccaggagaactgtgagacctggggtgtaaatggtgagacgggtactttggtggacatgaaggaactgggcatatgggagccattggctgtgaagctgcagacttataagacagcagtggagnacgcgccgcacctgcctactgccgaacccgaccgcaccatcgtttccacggccccacacacacgacccggccgacgaccccagagcccccgccaacgtgccgagagcctccctgacatgcctggccccacggacgctgacgctgccacgggccacagggcttacattcccacctggccccaggaaacccaagccaccaagctccaccaccgcaactaccctcgacgccaagcagctgccaccggacaa

SEQ ID NO: 69814 - DNA, 2225 bp, Homo sapiens
  misc_feature (9)..(9): n is a, c, g, or t
  misc_feature (2159)..(2159): n is a, c, g, or t
  misc_feature (2161)..(2161): n is a, c, g, or t
  misc_feature (2187)..(2187): n is a, c, g, or t
  misc_feature (2202)..(2202): n is a, c, g, or t
  misc_feature (2207)..(2208): n is a, c, g, or t
  misc_feature (2216)..(2216): n is a, c, g, or t
aggtggtanggtccggaattcccgggatgggttctctctctccagaaggttctgccggttcccccagctctgggtacccggctctgcatcgcgtcgccatgatgggccatcgtccagtgctcgtgctcattaggtctagctttatattcttggcccatcccttagtagcggtaatttaaatgtttcaatctgtattacggagttaacagtatttcctagtagaattgtgagaattaaatgaggccagaacacaaagcgtgaatccggaagaaaagttcaatctggaaacatcaatgctgccaagactattgcagatatcatccgaacatgtttgggacccaagtccatgatgaagatgcttttggacccaatgggaggcattgtgatgaccaatgatggcaatgccattcttcgagagattcaagtccagcatccagcggccaagtccatgatcgaaattagccggacccaggatgaagaggttggagatgggaccacatcagtaattattcttgcaggggaaatgctgtctgtagctgagcacttcctggagcagcagatgcacccaacagtggtgatcagtgcttaccgcaaggcattggatgatatgatcagcaccctaaagaaaataagtatcccagtcgacatcagtgacagtgatatgatgctgaacatcatcaacagctctattactaccaaagccatcagtcggtggtcatctttggcttgcaacattgccctggatgctgtcaagatggtacagtttgaggagaatggtcggaaagagattgacataaaaaaatatgcaagagtggaaaagatacctggaggcatcattgaagactcctgtgtcttgcgtggagtcatgattaacaaggatgtgacccatccacgtatgcggcgctatatcaagaaccctcgcattgtgctgctggattcttctctggaatacaagaaaggagaaagccagactgacattgagattacacgagaggaggacttcacccgaattctccagatggaggaagagtacatccagcagctctgtgaggacattatccaactgaagcccgatgtggtcatcactgaaaagggcatctcagatttagctcagcactaccttatgcgggccaatatcacagccatccgcagagtccggaagacagacaataatcgcattgctagagcctgtggggcccggatagtcagccgaccagaggaactgagagaagatgatgttggaacaggagcaggcctgttggaaatcaagaaaattggagatgaatactttactttcatcactgactgcaaagaccccaaggcctgcaccattctcctccggggggctagcaaagagattctctcggaagtagaacgcaacctccaggatgccatgcaagtgtgtcgcaatgttctcctggaccctcagctggtgccagggggtggggcctccgagatggctgtggcccatgccttgacagaaaaatccaaggccatgactggtgtggaacaatggccatacagggctgttgcccaggccctagaggtcattcctcgtaccctgatccagaactgtggggccagcaccatccgtctacttacctcccttcgggccaagcacacccaggagaactgtgagacctggggtgtaaatggtgagacgggtactttggtggacatgaaggaactgggcatatgggagccattggctgtgaagctgcagacttataagacagcagtggagacggcagttctgctactgcgaattgatgacatcgtttcaggccacaaaaagaaaggcgatgaccagagccggcaaggcggggctcctgatgctggccaggagtgagtgctaggcaaggctacttcaatgcacagaaccagcagagtctccccttttcctgagccagagtgccaggaacactgtggacgtctttgttcagaagggatcaggttggggggcagcccccagtccctttctgtcccagctcagttttccaaaagacactgacatgtaattcttctctattgtaaggtttccatttagtttgcttccgatgattaaatctaagtcatttgaaaaaaaaaaaaaaaaaaaaaaaaaaaaaaaaaaaaaaaaaaaaaaaaaaaaaacaaaaaaaaaaaaaaaaaaaaaaaananaaaaaaaaaaaaaacaaaaagggggngcggcggcggctaanaaaanntacccccngagggggcg

SEQ ID NO: 69815 - DNA, 2181 bp, Homo sapiens
  misc_feature (9)..(9): n is a, c, g, or t
  misc_feature (2115)..(2115): n is a, c, g, or t
  misc_feature (2117)..(2117): n is a, c, g, or t
  misc_feature (2143)..(2143): n is a, c, g, or t
  misc_feature (2158)..(2158): n is a, c, g, or t
  misc_feature (2163)..(2164): n is a, c, g, or t
  misc_feature (2172)..(2172): n is a, c, g, or t
aggtggtanggtccggaattcccgggatgggttctctctctccagaaggttctgccggttcccccagctctgggtacccggctctgcatcgcgtcgccatgatgggccatcgtccagtgctcgtgctcagccagaacacaaagcgtgaatccggaagaaaagttcaatctggaaacatcaatgctgccaagactattgcagatatcatccgaacatgtttgggacccaagtccatgatgaagatgcttttggacccaatgggaggcattgtgatgaccaatgatggcaatgccattcttcgagagattcaagtccagcatccagcggccaagtccatgatcgaaattagccggacccaggatgaagaggttggagatgggaccacatcagtaattattcttgattctcactctgtcaccatgctggagtgtggtggtgcgatcttggctcactgcaacctctgcctcccagcaggggaaatgctgtctgtagctgagcacttcctggagcagcagatgcacccaacagtggtgatcagtgcttaccgcaaggcattggatgatatgatcagcaccctaaagaaaataagtatcccagtcgacatcagtgacagtgatatgatgctgaacatcatcaacagctctattactaccaaagccatcagtcggtggtcatctttggcttgcaacattgccctggatgctgtcaagatggtacagtttgaggagaatggtcggaaagagattgacataaaaaaatatgcaagagtggaaaagatacctggaggcatcattgaagactcctgtgtcttgcgtggagtcatgattaacaaggatgtgacccatccacgtatgcggcgctatatcaagaaccctcgcattgtgctgctggattcttctctggaatacaagaaaggagaaagccagactgacattgagattacacgagaggaggacttcacccgaattctccagatggaggaagagtacatccagcagctctgtgaggacattatccaactgaagcccgatgtggtcatcactgaaaagggcatctcagatttagctcagcactaccttatgcgggccaatatcacagccatccgcagagtccggaagacagacaataatcgcattgctagagcctgtggggcccggatagtcagccgaccagaggaactgagagaagatgatgttggaacaggagcaggcctgttggaaatcaagaaaattggagatgaatactttactttcatcactgactgcaaagaccccaaggcctgcaccattctcctccggggggctagcaaagagattctctcggaagtagaacgcaacctccaggatgccatgcaagtgtgtcgcaatgttctcctggaccctcagctggtgccagggggtggggcctccgagatggctgtggcccatgccttgacagaaaaatccaaggccatgactggtgtggaacaatggccatacagggctgttgcccaggccctagaggtcattcctcgtaccctgatccagaactgtggggccagcaccatccgtctacttacctcccttcgggccaagcacacccaggagaactgtgagacctggggtgtaaatggtgagacgggtactttggtggacatgaaggaactgggcatatgggagccattggctgtgaagctgcagacttataagacagcagtggagacggcagttctgctactgcgaattgatgacatcgtttcaggccacaaaaagaaaggcgatgaccagagccggcaaggcggggctcctgatgctggccaggagtgagtgctaggcaaggctacttcaatgcacagaaccagcagagtctccccttttcctgagccagagtgccaggaacactgtggacgtctttgttcagaagggatcaggttggggggcagcccccagtccctttctgtcccagctcagttttccaaaagacactgacatgtaattcttctctattgtaaggtttccatttagtttgcttccgatgattaaatctaagtcatttgaaaaaaaaaaaaaaaaaaaaaaaaaaaaaaaaaaaaaaaaaaaaaaaaaaaaaacaaaaaaaaaaaaaaaaaaaaaaaananaaaaaaaaaaaaaacaaaaagggggngcggcggcggctaanaaaanntacccccngagggggcg

SEQ ID NO: 69816 - DNA, 1675 bp, Homo sapiens
  misc_feature (1609)..(1609): n is a, c, g, or t
  misc_feature (1611)..(1611): n is a, c, g, or t
  misc_feature (1637)..(1637): n is a, c, g, or t
  misc_feature (1652)..(1652): n is a, c, g, or t
  misc_feature (1657)..(1658): n is a, c, g, or t
  misc_feature (1666)..(1666): n is a, c, g, or t
gcggcggggggatgaaaaacttaggctaggtacgaggcctgggtggtgatggatgatatgatcagcaccctaaagaaaataagtatcccagtcgacatcagtgacagtgatatgatgctgaacatcatcaacagctctattactaccaaagccatcagtcggtggtcatctttggcttgcaacattgccctggatgctgtcaagatggtacagtttgaggagaatggtcggaaagagattgacataaaaaaatatgcaagagtggaaaagatacctggaggcatcattgaagactcctgtgtcttgcgtggagtcatgattaacaaggatgtgacccatccacgtatgcggcgctatatcaagaaccctcgcattgtgctgctggattcttctctggaatacaagaaaggagaaagccagactgacattgagattacacgagaggaggacttcacccgaattctccagatggaggaagagtacatccagcagctctgtgaggacattatccaactgaagcccgatgtggtcatcactgaaaagggcatctcagatttagctcagcactaccttatgcgggccaatatcacagccatccgcagagtccggaagacagacaataatcgcattgctagagcctgtggggcccggatagtcagccgaccagaggaactgagagaagatgatgttggaacaggagcaggcctgttggaaatcaagaaaattggagatgaatactttactttcatcactgactgcaaagaccccaaggcctgcaccattctcctccggggggctagcaaagagattctctcggaagtagaacgcaacctccaggatgccatgcaagtgtgtcgcaatgttctcctggaccctcagctggtgccagggggtggggcctccgagatggctgtggcccatgccttgacagaaaaatccaaggccatgactggtgtggaacaatggccatacagggctgttgcccaggccctagaggtcattcctcgtaccctgatccagaactgtggggccagcaccatccgtctacttacctcccttcgggccaagcacacccaggagaactgtgagacctggggtgtaaatggtgagacgggtactttggtggacatgaaggaactgggcatatgggagccattggctgtgaagctgcagacttataagacagcagtggagacggcagttctgctactgcgaattgatgacatcgtttcaggccacaaaaagaaaggcgatgaccagagccggcaaggcggggctcctgatgctggccaggagtgagtgctaggcaaggctacttcaatgcacagaaccagcagagtctccccttttcctgagccagagtgccaggaacactgtggacgtctttgttcagaagggatcaggttggggggcagcccccagtccctttctgtcccagctcagttttccaaaagacactgacatgtaattcttctctattgtaaggtttccatttagtttgcttccgatgattaaatctaagtcatttgaaaaaaaaaaaaaaaaaaaaaaaaaaaaaaaaaaaaaaaaaaaaaaaaaaaaaacaaaaaaaaaaaaaaaaaaaaaaaananaaaaaaaaaaaaaacaaaaagggggngcggcggcggctaanaaaanntacccccngagggggcg

SEQ ID NO: 69817 - DNA, 1445 bp, Homo sapiens
  misc_feature (1379)..(1379): n is a, c, g, or t
  misc_feature (1381)..(1381): n is a, c, g, or t
  misc_feature (1407)..(1407): n is a, c, g, or t
  misc_feature (1422)..(1422): n is a, c, g, or t
  misc_feature (1427)..(1428): n is a, c, g, or t
  misc_feature (1436)..(1436): n is a, c, g, or t
gcggcggggggatgaaaaacttaggctaggtacgaggcctgggtggtgggttctctctctccagaaggttctgccggttcccccagctctgggtacccggctctgcatcgcgtcgccatgatgggccatcgtccagtgctcgtgctcagccagaacacaaagcgtgaatccggaagaaaagttcaatctggaaacatcaatgctgccaagactattgcagatatcatccgaacatgtttgggacccaagtccatgatgaagatgcttttggacccaatgggaggcattgtgatgaccaatgatggcaatgccattcttcgagagattcaagtccagcatccagcggccaagtccatgatcgaaattagccggacccaggatgaagaggttggagatgggaccacatcagtaattattcttgcaggggaaatgctgtctgtagctgagcacttcctggagcagcagatgcacccaacagtggtgatcagtgcttaccgcaaggcattggatgatatgatcagcaccctaaagaaaataagtatcccagtcgacatcagtgacagtgatatgatgctgaacatcatcaacagctctattactaccaaagccatcagtcggtggtcatctttggcttgcaacattgccctggatgctgtcaagatggtacagtttgaggagaatggtcggaaagagattgacataaaaaaatatgcaagagtggaaaagatacctggaggcatcattgaagactcctgtgtcttgcgtggagtcatgattaacaaggatgtgacccatccacgtatgcggcgctatatcaagaaccctcgcattgtgctgctggattcttctctggaatacaagaaaggagaaagccagtgagacgggtactttggtggacatgaaggaactgggcatatgggagccattggctgtgaagctgcagacttataagacagcagtggagacggcagttctgctactgcgaattgatgacatcgtttcaggccacaaaaagaaaggcgatgaccagagccggcaaggcggggctcctgatgctggccaggagtgagtgctaggcaaggctacttcaatgcacagaaccagcagagtctccccttttcctgagccagagtgccaggaacactgtggacgtctttgttcagaagggatcaggttggggggcagcccccagtccctttctgtcccagctcagttttccaaaagacactgacatgtaattcttctctattgtaaggtttccatttagtttgcttccgatgattaaatctaagtcatttgaaaaaaaaaaaaaaaaaaaaaaaaaaaaaaaaaaaaaaaaaaaaaaaaaaaaaacaaaaaaaaaaaaaaaaaaaaaaaananaaaaaaaaaaaaaacaaaaagggggngcggcggcggctaanaaaanntacccccngagggggcg

SEQ ID NO: 69818 - DNA, 1931 bp, Homo sapiens
  misc_feature (9)..(9): n is a, c, g, or t
  misc_feature (1865)..(1865): n is a, c, g, or t
  misc_feature (1867)..(1867): n is a, c, g, or t
  misc_feature (1893)..(1893): n is a, c, g, or t
  misc_feature (1908)..(1908): n is a, c, g, or t
  misc_feature (1913)..(1914): n is a, c, g, or t
  misc_feature (1922)..(1922): n is a, c, g, or t
aggtggtanggtccggaattcccgggatgggttctctctctccagaaggttctgccggttcccccagctctgggtacccggctctgcatcgcgtcgccatgatgggccatcgtccagtgctcgtgctcagccagaacacaaagcgtgaatccggaagaaaagttcaatctggaaacatcaatgctgccaagactattgcagatatcatccgaacatgtttgggacccaagtccatgatgaagatgcttttggacccaatgggaggcattgtgatgaccaatgatggcaatgccattcttcgagagattcaagtccagcatccagcggccaagtccatgatcgaaattagccggacccaggatgaagaggttggagatgggaccacatcagtaattattcttgcaggggaaatgctgtctgtagctgagcacttcctggagcagcagatgcacccaacagtggtgatcagtgcttaccgcaaggcattggatgatatgatcagcaccctaaagaaaataagatacctggaggcatcattgaagactcctgtgtcttgcgtggagtcatgattaacaaggatgtgacccatccacgtatgcggcgctatatcaagaaccctcgcattgtgctgctggattcttctctggaatacaagaaaggagaaagccagagccagactgacattgagattacacgagaggaggacttcacccgaattctccagatggaggaagagtacatccagcagctctgtgaggacattatccaactgaagcccgatgtggtcatcactgaaaagggcatctcagatttagctcagcactaccttatgcgggccaatatcacagccatccgcagagtccggaagacagacaataatcgcattgctagagcctgtggggcccggatagtcagccgaccagaggaactgagagaagatgatgttggaacaggagcaggcctgttggaaatcaagaaaattggagatgaatactttactttcatcactgactgcaaagaccccaaggcctgcaccattctcctccggggggctagcaaagagattctctcggaagtagaacgcaacctccaggatgccatgcaagtgtgtcgcaatgttctcctggaccctcagctggtgccagggggtggggcctccgagatggctgtggcccatgccttgacagaaaaatccaaggccatgactggtgtggaacaatggccatacagggctgttgcccaggccctagaggtcattcctcgtaccctgatccagaactgtggggccagcaccatccgtctacttacctcccttcgggccaagcacacccaggagaactgtgagacctggggtgtaaatggtgagacgggtactttggtggacatgaaggaactgggcatatgggagccattggctgtgaagctgcagacttataagacagcagtggagacggcagttctgctactgcgaattgatgacatcgtttcaggccacaaaaagaaaggcgatgaccagagccggcaaggcggggctcctgatgctggccaggagtgagtgctaggcaaggctacttcaatgcacagaaccagcagagtctccccttttcctgagccagagtgccaggaacactgtggacgtctttgttcagaagggatcaggttggggggcagcccccagtccctttctgtcccagctcagttttccaaaagacactgacatgtaattcttctctattgtaaggtttccatttagtttgcttccgatgattaaatctaagtcatttgaaaaaaaaaaaaaaaaaaaaaaaaaaaaaaaaaaaaaaaaaaaaaaaaaaaaaacaaaaaaaaaaaaaaaaaaaaaaaananaaaaaaaaaaaaaacaaaaagggggngcggcggcggctaanaaaanntacccccngagggggcg

SEQ ID NO: 69819 - DNA, 1902 bp, Homo sapiens
  misc_feature (1836)..(1836): n is a, c, g, or t
  misc_feature (1838)..(1838): n is a, c, g, or t
  misc_feature (1864)..(1864): n is a, c, g, or t
  misc_feature (1879)..(1879): n is a, c, g, or t
  misc_feature (1884)..(1885): n is a, c, g, or t
  misc_feature (1893)..(1893): n is a, c, g, or t
ataggctagtacgagccgcgtgttgaatgcttttggacccaatgggaggcattgtgatgaccaatgatggcaatgccattcttcgagagattcaagtccagcatccagcggccaagtccatgatcgaaattagccggacccaggatgaagaggttggagatgggaccacatcagtaattattcttgcaggggaaatgctgtctgtagctgagcacttcctggagcagcagatgcacccaacagtggtgatcagtgcttaccgcaaggcattggatgatatgatcagcaccctaaagaaaataagtatcccagtcgacatcagtgacagtgatatgatgctgaacatcatcaacagctctattactaccaaagccatcagtcggtggtcatctttggcttgcaacattgccctggatgctgtcaagatggtacagtttgaggagaatggtcggaaagagattgacataaaaaaatatgcaagagtggaaaagatacctggaggcatcattgaagactcctgtgtcttgcgtggagtcatgattaacaaggatgtgacccatccacgtatgcggcgctatatcaagaaccctcgcattgtgctgctggattcttctctggaatacaagaaaggagaaagccagagccagactgacattgagattacacgagaggaggacttcacccgaattctccagatggaggaagagtacatccagcagctctgtgaggacattatccaactgaagcccgatgtggtcatcactgaaaagggcatctcagatttagctcagcactaccttatgcgggccaatatcacagccatccgcagagtccggaagacagacaataatcgcattgctagagcctgtggggcccggatagtcagccgaccagaggaactgagagaagatgatgttggaacaggagcaggcctgttggaaatcaagaaaattggagatgaatactttactttcatcactgactgcaaagaccccaaggcctgcaccattctcctccggggggctagcaaagagattctctcggaagtagaacgcaacctccaggatgccatgcaagtgtgtcgcaatgttctcctggaccctcagctggtgccagggggtggggcctccgagatggctgtggcccatgccttgacagaaaaatccaaggccatgactggtgtggaacaatggccatacagggctgttgcccaggccctagaggtcattcctcgtaccctgatccagaactgtggggccagcaccatccgtctacttacctcccttcgggccaagcacacccaggagaactgtgagacctggggtgtaaatggtgagacgggtactttggtggacatgaaggaactgggcatatgggagccattggctgtgaagctgcagacttataagacagcagtggagacggcagttctgctactgcgaattgatgacatcgtttcaggccacaaaaagaaaggcgatgaccagagccggcaaggcggggctcctgatgctggccaggagtgagtgctaggcaaggctacttcaatgcacagaaccagcagagtctccccttttcctgagccagagtgccaggaacactgtggacgtctttgttcagaagggatcaggttggggggcagcccccagtccctttctgtcccagctcagttttccaaaagacactgacatgtaattcttctctattgtaaggtttccatttagtttgcttccgatgattaaatctaagtcatttgaaaaaaaaaaaaaaaaaaaaaaaaaaaaaaaaaaaaaaaaaaaaaaaaaaaaaacaaaaaaaaaaaaaaaaaaaaaaaananaaaaaaaaaaaaaacaaaaagggggngcggcggcggctaanaaaanntacccccngagggggcg

SEQ ID NO: 69820 - DNA, 1907 bp, Homo sapiens
  misc_feature (9)..(9): n is a, c, g, or t
  misc_feature (1841)..(1841): n is a, c, g, or t
  misc_feature (1843)..(1843): n is a, c, g, or t
  misc_feature (1869)..(1869): n is a, c, g, or t
  misc_feature (1884)..(1884): n is a, c, g, or t
  misc_feature (1889)..(1890): n is a, c, g, or t
  misc_feature (1898)..(1898): n is a, c, g, or t
aggtggtanggtccggaattcccgggatgggttctctctctccagaaggttctgccggttcccccagctctgggtacccggctctgcatcgcgtcgccatgatgggccatcgtccagtgctcgtgctcagccagaacacaaagcgtgaatccggaagaaaagttcaatctggaaacatcaatgctgccaagcaggggaaatgctgtctgtagctgagcacttcctggagcagcagatgcacccaacagtggtgatcagtgcttaccgcaaggcattggatgatatgatcagcaccctaaagaaaataagtatcccagtcgacatcagtgacagtgatatgatgctgaacatcatcaacagctctattactaccaaagccatcagtcggtggtcatctttggcttgcaacattgccctggatgctgtcaagatggtacagtttgaggagaatggtcggaaagagattgacataaaaaaatatgcaagagtggaaaagatacctggaggcatcattgaagactcctgtgtcttgcgtggagtcatgattaacaaggatgtgacccatccacgtatgcggcgctatatcaagaaccctcgcattgtgctgctggattcttctctggaatacaagaaaggagaaagccagagccagactgacattgagattacacgagaggaggacttcacccgaattctccagatggaggaagagtacatccagcagctctgtgaggacattatccaactgaagcccgatgtggtcatcactgaaaagggcatctcagatttagctcagcactaccttatgcgggccaatatcacagccatccgcagagtccggaagacagacaataatcgcattgctagagcctgtggggcccggatagtcagccgaccagaggaactgagagaagatgatgttggaacaggagcaggcctgttggaaatcaagaaaattggagatgaatactttactttcatcactgactgcaaagaccccaaggcctgcaccattctcctccggggggctagcaaagagattctctcggaagtagaacgcaacctccaggatgccatgcaagtgtgtcgcaatgttctcctggaccctcagctggtgccagggggtggggcctccgagatggctgtggcccatgccttgacagaaaaatccaaggccatgactggtgtggaacaatggccatacagggctgttgcccaggccctagaggtcattcctcgtaccctgatccagaactgtggggccagcaccatccgtctacttacctcccttcgggccaagcacacccaggagaactgtgagacctggggtgtaaatggtgagacgggtactttggtggacatgaaggaactgggcatatgggagccattggctgtgaagctgcagacttataagacagcagtggagacggcagttctgctactgcgaattgatgacatcgtttcaggccacaaaaagaaaggcgatgaccagagccggcaaggcggggctcctgatgctggccaggagtgagtgctaggcaaggctacttcaatgcacagaaccagcagagtctccccttttcctgagccagagtgccaggaacactgtggacgtctttgttcagaagggatcaggttggggggcagcccccagtccctttctgtcccagctcagttttccaaaagacactgacatgtaattcttctctattgtaaggtttccatttagtttgcttccgatgattaaatctaagtcatttgaaaaaaaaaaaaaaaaaaaaaaaaaaaaaaaaaaaaaaaaaaaaaaaaaaaaaacaaaaaaaaaaaaaaaaaaaaaaaananaaaaaaaaaaaaaacaaaaagggggngcggcggcggctaanaaaanntacccccngagggggcg

SEQ ID NO: 69821 - DNA, 937 bp, Homo sapiens
  misc_feature (871)..(871): n is a, c, g, or t
  misc_feature (873)..(873): n is a, c, g, or t
  misc_feature (899)..(899): n is a, c, g, or t
  misc_feature (914)..(914): n is a, c, g, or t
  misc_feature (919)..(920): n is a, c, g, or t
  misc_feature (928)..(928): n is a, c, g, or t
aagctagtacgggctggggtgaatcggcagagggcctgcaccattctcctccggggggctagcaaagagattctctcggaagtagaacgcaacctccaggatgccatgcaagtgtgtcgcaatgttctcctggaccctcagctggtgccagggggtggggcctccgagatggctgtggcccatgccttgacagaaaaatccaaggccatgactggtgtggaacaatggccatacagggctgttgcccaggccctagaggtcattcctcgtaccctgatccagaactgtggggccagcaccatccgtctacttacctcccttcgggccaagcacacccaggagaactgtgagacctggggtgtaaatggtgagacgggtactttggtggacatgaaggaactgggcatatgggagccattggctgtgaagctgcagacttataagacagcagtggagacggcagttctgctactgcgaattgatgacatcgtttcaggccacaaaaagaaaggcgatgaccagagccggcaaggcggggctcctgatgctggccaggagtgagtgctaggcaaggctacttcaatgcacagaaccagcagagtctccccttttcctgagccagagtgccaggaacactgtggacgtctttgttcagaagggatcaggttggggggcagcccccagtccctttctgtcccagctcagttttccaaaagacactgacatgtaattcttctctattgtaaggtttccatttagtttgcttccgatgattaaatctaagtcatttgaaaaaaaaaaaaaaaaaaaaaaaaaaaaaaaaaaaaaaaaaaaaaaaaaaaaaacaaaaaaaaaaaaaaaaaaaaaaaananaaaaaaaaaaaaaacaaaaagggggngcggcggcggctaanaaaanntacccccngagggggcg

SEQ ID NO: 69822 - DNA, 857 bp, Homo sapiens
gcggcggggggatgaaaaacttaggctaggtacgaggcctgggtggtgggttctctctctccagaaggttctgccggttcccccagctctgggtacccggctctgcatcgcgtcgccatgatgggccatcgtccagtgctcgtgctcagccagaacacaaagcgtgaatccggaagaaaagttcaatctggaaacatcaatgctgccaagactattgcagatatcatccgaacatgtttgggacccaagtccatgatgaagatgcttttggacccaatgggaggcattgtgatgaccaatgatggcaatgccattcttcgagagattcaagtccagcatccagcggccaagtccatgatcgaaattagccggacccaggatgaagaggttggagatgggaccacatcagtaattattcttgcaggggaaatgctgtctgtagctgagcacttcctggagcagcagatgcacccaacagtggtgatcagtgcttaccgcaaggcattggatgatatgatcagcaccctaaagaaaataagtatcccagtcgacatcagtgacagtgatatgatgctgaacatcatcaacagctctattactaccaaagccatcagtcggtggtcatctttggcttgcaacattgccctggatgctgtcaagatggtacagtttgaggagaatggtcggaaagagattgacataaaaaaatatgcaagagtggaaaagctcaaatttgccgagtggaaagatcctgggggctcttgagacccgtgtctgcgcgggtcctgataccggtttgcccccccgtttggcgggcttttaacccccgttgggcggccttctcggacaagggaccc

SEQ ID NO: 69823 - DNA, 485 bp, Homo sapiens
  misc_feature (9)..(9): n is a, c, g, or t
aggtggtanggtccggaattcccgggatgggttctctctctccagaaggttctgccggttcccccagctctgggtacccggctctgcatcgcgtcgccatgatgggccatcgtccagtgctcgtgctcaccagaacacaaagcgtgaatctggaatacaagaaaggagaaagccactgacattgagattacacgagaggaggacttcacccgaattctccagatggaggaagagtacatccagcagctctgtgaggacattatccaactgaagcccgatgtggtcatcactgaaaagggcatctcagatttagctcagcactaccttatgcgggccaatatcacagccatccgcagagtccggaagacagacaataatcgcattgctagagccttggggccccgattagtaaccgacccagggaccttagaaagtttatgttgacaaggccaggcctttttgaatcaagaatttggattaattct

SEQ ID NO: 69824 - DNA, 469 bp, Homo sapiens
tgcttttcaattacgtgtctcagtcatttttgccccaagtgttggcaaatccttccctggtaaattcttttgtaagcctctagtttgtttcttaaaaatcttttgcagtccaacttaagctttaacaccatcatttctgatttgtctggaggggctaatgactgtttatgttaataaaaataatagctattgatatatactaaactttatgaatcttgtacatatttatatatacattgtatggtatatatgttacagcatacactatagattatgttatatgcaatacacactaaatatacataatatagtatagattgcatacagtatgtagattccatatgttatataatattctcatgaaagctttctagggcttatgataagtcaggcactgagctagacattttacatcattttttccgtttagttctcatctcagcccaatgtcaataaaatgaaataaaat

SEQ ID NO: 69825 - DNA, 265 bp, Homo sapiens
cgctcaggagatggtgccaatgctggaggcctggttgctgctattgctcccaagggctcagagaaggcggctaaggcatcccgcagtgtagccggttccaaaaaggagaaggagaacagctcatctaagagcacgaagggagaagcgaaggagtggggacttgttcagaaaaggatcctggggtcctccagccagttccctcgttcctggctcttagcgtggatggacacataacgcaccagcaactcggggatcgtgagagacg

SEQ ID NO: 69826 - DNA, 590 bp, Homo sapiens
ggaaggtagaggaaaagagaaagcggccaaacaatggtttggttgggctgtgtttcagagtataccttcctcatccccacttttttccctttctctctacttcctcttcttaattggctttggaattgaaatatatttttaaattatttgttgtatttattgaataaagtttttaatgtccctgttcttaaatttagacttagtttgcctttcacacaccacccccacccccaaaatattctaccttctaagttgctttttaaactgtagtgcagccttttgggtaccatatttctttcctgtcagtggtcttcaatagcaaaagttttttttgaaaagggaaatcttgactgggtgatttttttttgaagagggaaatcttgactgggtttccaatttagcctttgtgactctagccgtattgaagaggaatcaccaataggtggcagcagaatctcaagcatgtttcttgggaaaaagtaagggactgagttttgtcttggttctttttcatctgtcttgtcgattccttgtgtttgtttaatatctgcatcctaaactgccagctgcctctaggaattacctgccca

SEQ ID NO: 69827 - DNA, 8646 bp, Homo sapiens
cgctcaggagatggtgccaatgctggaggcctggttgctgctattgctcccaagggctcagagaaggcggctaaggcatcccgcagtgtagccggttccaaaaaggagaaggagaacagctcatctaagagcacgaagggagaagcgaaggagtggggacttgttcagaaaaggatcctggggtcctccagccagttcccttgggaggacggggtggtcagtatgatggaagtgcaggggtggatacaggagctgtggagccacttgggagtatagctattgagcctggggcagcgctcaatcctttgggaactaaaccggagccagaggaaggggagaatgagtgtcgcctgctaaagaaagtcaagtctgaaaagatggagtcccctgtttccacaccagcagtgctgccaatacaccttttggtgccagtggtcaacaatgacatctcatctccttgtgagcagatcatggttcgtacccgatcagttggggtcaacacatgtgatgtggctctggccacagagcctgagtgcttgggcccctgtgaacctggaactagcgtcaaccttgaaggcatcgtgtggcaggaaacagaagatgggatgttggtggtaaatgtaacgtggaggaacaagacatatgtaggtacactccttgactgcacacgacatgattgggcaccccccaggttctgtgactccccgaccagtgacctggaaatgcgcaatggccggggtagaggcaaacgcatgcgtcccaacagtaatacacctgtcaatgagacagccacagcctctgacagcaaagggaccagtaacagcagcaaaacccgggcaggagccaatagcaaaggccgtcggggcagccagaattcttcagagcaccgcccacctgccagcagcacttctgaggatgtcaaggccagcccttcctcagctaataagcggaaaaacaaacccctttcagacatggagctgaattctagctcagaggactccaaagggagcaagcgtgtccgtactaattccatgggctcagccactggcccccttcctgggacaaaggtagaacccactgttctggacagaaactgcccctcccccgtcctaattgactgtccccacccaaactgcaacaagaagtacaagcacatcaatggacttaagtaccaccaagctcatgcccatacagatgatgacagcaagccggaagcggatggggacagtgagtacggagaggaacctattctccatgcagatcttgggagctgcaacggtgcatctgtctcacaaaaaggttccttgtcccctgcccgctcagctacccccaaagttcgacttgtagagccccatagcccttctccttcaagcaaattcagcacaaaaggcctctgtaagaaaaagttgagtggggaaggggacacagaccttggggccttatccaatgatggctctgatgatggaccctcagtgatggatgaaacaagcaatgatgcctttgattctttagaaaggaagtgtatggaaaaagaaaaatgtaaaaaaccctctagtttaaaacctgaaaagattccttccaagagcctaaagtcagcccgtcccattgcccctgccatccccccacagcaaatctacaccttccagacagccaccttcacagcagcgagcccaggctcttcctcaggcttgaccgccacagtggcacaagccatgcccaacagtccccaactcaagcccattcagcccaagcccactgttatgggagaacctttcacagtcaaccctgccttgactccagccaaggacaagaaaaagaaagacaaaaaaaagaaggaatcttcaaaggaacttgaaagtcctctgacccctgggaaggtgtgtcgagcagaggaaggcaaaagcccattcagggaatcttcaggagatgggatgaaaatggaggggctcctaaatggctcatcagacccccaccaaagccgactggctagcatcaaggctgaagccgacaagatctacagtttcacggacaatgcccccagcccttccattggaggcagtagccgccttgaaaacactacccctactcagcccctgactcccttacatgtggtgacccagaatggagctgaagccagctcagtcaaaaccaacagccctgcatactctgacatctctgatgctggggaggatggggagggcaaggtagacagtgtcaaatcaaaggacgccgaacagttggttaaagaaggggctaagaaaactctttttccccctcagcctcagagcaaagactcaccatattaccaaggctttgagagttactattctccaagttatgcacagtccagccctggggctctgaaccccagcagccaggcaggagtggagagccaggccctgaagacaaaaagggatgaggaacctgagagcatagaagggaaagtgaagaacgatatctgtgaagaaaagaagcccgagctgagcagttccagtcagcagccctcggtcatccagcagcgtcccaatatgtacatgcagtccctgtactacaaccagtatgcctatgtacccccctatggctacagcgaccagagttaccacacccaccttctgagcactaacacggcttaccggcagcagtacgaagaacagcagaaacgccagagcttagagcagcagcagcggggagtggacaagaaggcagagatgggcctgaaggagcgggaggcagcactcaaggaagagtggaagcaaaagccgtcaattccaccaactctcaccaaggcccccagcctgacagacctggtgaaatcaggacctggcaaggccaaggagccaggggctgacccagccaaatcagtcatcattcccaagttagatgactcttcaaaactcccgggccaggcccctgaaggccttaaagtgaagctgagtgatgccagccacctaagcaaggaggcctctgaggccaagacaggtgctgagtgtggtcgacaggcagagatggatccaatactctggtaccgacaggaggcagagccccggatgtggacatatgtttatcctgccaagtactcagacatcaagtcagaggatgagcggtggaaggaggagcgggaccgcaaattgaaggaggaaaggagtcggagtaaggactctgtccccaaggaagatgggaaggaaagcacaagtagtgactgcaagctgcccacgtcagaggagtctcgccttgggagcaaggagccccggccaagtgtccatgtgcctgtgtcctccccacttacccagcaccagtcctacatcccctacatgcacggctattcctacagtcagtcctacgaccccaaccaccccagctaccggagcatgcctgctgtgatgatgcagaactacccaggttcctacctgccttccagctactctttttccccatatggcagcaaggtctcaggtggtgaagatgctgacaaggcacgagccagccccagtgtgacttgtaaatccagctcagagtccaaagccctggacatcttgcagcagcatgccagtcactacaagagcaagtctcccacgataagtgataaaacttctcaggagagagatcgaggaggctgtggggtggttgggggtggtggcagctgtagcagcgtcgggggagcaagtgggggtgaacggagtgttgaccggccccgcacctctccttcccagcgcctgatgtccacacaccaccaccaccaccacttggggtactcattgctcccagcacagtacaacttaccctatgcagcagggctttcttctacagccattgttgccagccaacaaggctcaactccctcactctacccaccccccaggaggtgagaatgacaccaagtgcccggataaagtcagcttcacgggcccggactggcttacccaaggaggtgctgaaggtgccgtttagacatcagttaaatggtgttgatcatcctgtttgccgtttccaccatgactgaaggcagacccttggctatctcacctccaccagacctccggactacctgaccctacctcttcctcaggagctggagagctggtacttagcaaaaatatttattctctcagccacagttatgactattgtggcctctgtggagatgaaggcacgggaagcaaccaggggaacatggcctcagcccagagaagccactgctctgttccccaagcccttggtctgctgctggagcagtaccagcccccccgcccaccagggagggacccccacccccaagcactgggtaaggtctgaagacagcacagcagccatacccctcaccatcattaccaccatcaccagattctgcatctccctagtgctttgcaccctgggaattggcagcatgtggaggaactagaatctcaggaaagaaattgggggttgttttctacataattgtgaaaacaaggtcttcaaatgtggagacttctccccatttacatgagcacatataaacgctcacaacctagcctggaaaggaagaccaaggcatctgccccaacatggccttgagctgcctgtgaggcagggggcaggggttccaacaccagcacagggctccccagggacactgggagcaagctggtgctggagcatgaatgacgtctgtgaagtagaacctgcgtccccactaagtcctgctgcttcttattccccaactccttgcccttttcccttccctcctaaccccttggtgcctttcccagggggatccccacactggtcttgcctcttcttttccactgcttggctcttaagcctcaggcagataaactagtattccccccagcttggggaaccttggagtctgccaggtcaccttagggcaaggcccagaaggcagcccctgggagcacccagcagttcttggagatgtcctgtcatctagccatctgatatcttcctcatttgaggccacagatatatacagcccaattcctctgtctacaagtacatgattttatatagctcagtctataacctccatgtgggccaatataagctgtgtttcttggtaacacatattttgtttgaggggccactggccatgggaggttatttgttccttagaccctggaataacacatccaagccattacttattagagtctcagaatgtactcagtggagctgtgctttgaggcagccaacatttctctgctctccttagaaatgcagtctcccaatggaagctttatactctttgtactgggaaagtgaggatgatttggtagctttattggggtcatgtcttccccaaggtgtggggagcttagcttacttggcttttgaggtatcatccctctgttctcccctcctatctttccatgaccctctggattgagagagagagataaagactgacagacaccagtgtaggctggaaaagggagtgtgtgaccagagtgccaaaagtgactaggagcaggaacttggctccgactcagtttggaaaatgggaaataggggacagtaagcacaatgcccagtagtagttgatttccaaggaccctggaaccctacacttgagaggcttagggtcaccatctgctcaagaggatcccctctgatctacaggccttttccctaggtttctgcctcctcgtttttgttcaagttgggttctgagtcctccccaaaaaccattgttttagacctcttggcagggccccaaaacagcctccctcatacccatcattccgtctgccttctgctgccctcatgggcagtgctctgagcagtgacctccctttcctccgtggaagtagctagtgcagacaccgtcatcccaccccacctgagtcaccccaaccaagagggtgactgaatttcagcctgattatgccctcctggggctcctgtgaggtggagccaaggttccctctctgttcctgtttgtttttaaatattgttgtgtgttttgtatctgtggcactggcctgcagcatactctgtatatattgtaaagaaaccgttaggagtaattttcttttgcattgggcaggcatggccctgcattcctgccctttccactcattctgtaacacagaggacgaacttctgtattagctgggcagccttgggttctccagaagagaacaggtttttcttttcctttttaatttttcttcttaaacatttggctctttgatcctcatatccaagtctcccctgaagagtaggagctgctcagaagagcaggtgaaagccaccatggcagatcctgatgcctgccgggcctagtcttccctctgaaataacatgaagcagcagctgtggagattcttgacaagtgctgagtgaaagatttgctgcccacctctacatggggaggagaaacacaggtgggagctacctgtggcatccatgacctagtcagagggatgagatgctcagcaggggtccccatcctatcccaccccacaaacaaaggctggaaaaatttgctaccaagggccaagaccaccagaccaagcctgtttatgagccacccctgcccaggccctcacagacattgctcacggggcttcccatagaggagaagctaaagagggagggggcctcatccccagatagatcaggcaaggcttggagagctgctctttaggatccacatcaactacttcctcattttaaggtatggcagttcccttcatccccttttcctgccttgtacatgtacatgtatgaaatttccttctcttaccgaactctctccacacatcacaaggtcaaagaaccacacgcttagaagggtaagagggcaccctatgaaatgaaatggtgatttcttgagtctcttttttccacgtttaaggggccatggcaggacttagagttgcgagttaagactgcagagggctagagaattatttcatacaggctttgaggccacccatgtcacttatcccgtataccctctcaccatccccttgtctactctgatgcccccaagatgcaactgggcagctagttggccccataattctgggcctttgttgtttgttttaattacttgggcatcccaggaagctttccagtgatctcctaccatgggcccccctcctgggatcaagcccctcccaggccctgtccccagcccctcctgccccagcccacccgcttgccttggtgctcagccctcccattgggagcaggttggggcgagctggaggcccgggctggaggggcagtgttgctgttcatagattttgttccattggcgttgctctgttgaatttaatttcagtcttcctgattcttcccttctgtaaagtgtacattaccaagttccttgtttttttatatatatatataaatatatatatatacaaactgtactctttttgcctttgtacattcaggcaagaagagaaaataaatctttttaagagacaatcacaaatctgtgagggctgctggttatttctcctggagtttgctgctgagctgcctcttccttcctcccaattttcctgttctccctcagctctcctgatcttcctggccctgctccatatgcatcctcagcttcactttccctggctgatggcaagctgttgaatccagtgtccagactacctgccttgtaacccttttctgcccagcattgttttctggcttggccactggcttagcccaggagctttactctgtgccctggcctcccctctcttcacctttagatttccattcaccgaagtggctttggacccctgggtactctgggacctgtttcctggaggccctggcttgggacactcacctgtgaaactatgcagctgggagctctctgcctaagagtttgcactatttaaacctgcctgggagttaggacggatggttttaggaatgaccggaaaactacccctaaaactcccccgacattccagcctctagaatgctctgatccagagctcagtggatgattcccagctggtggactcctgtggctaccccatcagaacaagggctaagggtttatgggtcaagagtatttgatcagaattttaaagggtggtatactctgaaacacagcccaaccaaaccattgtttggccgctttctcttttcctctaccttcctcatccccacttttttccctttctctctacttcctcttcttaattggctttggaattgaaatatatttttaaattatttgttgtatttattgaataaagtttttaatgtccctgttcttaaatttagacttagtttgcctttcacacaccacccccacccccaaaatattctaccttctaagttgctttttaaactgtagtgcagccttttgggtaccatatttctttcctgtcagtggtcttcaatagcaaaagttttttttgaaaagggaaatcttgactgggtgatttttttttgaagagggaaatcttgactgggtttccaatttagcctttgtgactctagccgtattgaagaggaatcaccaataggtggcagcagaatctcaagcatgtttcttgggaaaaagtaagggactgagttttgtcttggttctttttcatctgtcttgtcgattccttgtgtttgtttaatatctgcatcctaaactgccagctgcctctaggaattacctgccca

SEQ ID NO: 69828 - DNA, 8713 bp, Homo sapiens
  misc_feature (624)..(624): n is a, c, g, or t
cgctcaggagatggtgccaatgctggaggcctggttgctgctattgctcccaagggctcagagaaggcggctaaggcatcccgcagtgtagccggttccaaaaaggagaaggagaacagctcatctaagagcacgaagggagaagcgaaggagtggggacttgttcagaaaaggatcctggggtcctccagccagttcccttgggaggacggggtggtcagtatgatggaagtgcaggggtggatacaggagctgtggagccacttgggagtatagctattgagcctggggcagcgctcaatcctttgggaactaaaccggagccagaggaaggggagaatgagtgtcgcctgctaaagaaagtcaagtctgaaaagatggagtcccctgtttccacaccagcagtgctgccaatacaccttttggtgccagtggtcaacaatgacatctcatctccttgtgagcagatcatggttcgtacccgatcagttggggtcaacacatgtgatgtggctctggccacagagcctgagtgcttgggcccctgtgaacctggaactagcgtcaaccttgaaagggtcagtcgatgttgaggcccacgcgggacatagccgagccagacgnaatttgcgggcaatttggttcttgcgcttgggggctataaacttggttatagctgctgtggacgcgcattcaaagaccatatgtagcgtacactcctttgtactgtacatcgacatgattgggcaccccccagggttctgtgactccccgaccagtgacctggaaatgcgcaatggccggggtagaggcaaacgcatgcgtcccaacagtaatacacctgtcaatgagacagccacagcctctgacagcaaagggaccagtaacagcagcaaaacccgggcaggagccaatagcaaaggccgtcggggcagccagaattcttcagagcaccgcccacctgccagcagcacttctgaggatgtcaaggccagcccttcctcagctaataagcggaaaaacaaacccctttcagacatggagctgaattctagctcagaggactccaaagggagcaagcgtgtccgtactaattccatgggctcagccactggcccccttcctgggacaaaggtagaacccactgttctggacagaaactgcccctcccccgtcctaattgactgtccccacccaaactgcaacaagaagtacaagcacatcaatggacttaagtaccaccaagctcatgcccatacagatgatgacagcaagccggaagcggatggggacagtgagtacggagaggaacctattctccatgcagatcttgggagctgcaacggtgcatctgtctcacaaaaaggttccttgtcccctgcccgctcagctacccccaaagttcgacttgtagagccccatagcccttctccttcaagcaaattcagcacaaaaggcctctgtaagaaaaagttgagtggggaaggggacacagaccttggggccttatccaatgatggctctgatgatggaccctcagtgatggatgaaacaagcaatgatgcctttgattctttagaaaggaagtgtatggaaaaagaaaaatgtaaaaaaccctctagtttaaaacctgaaaagattccttccaagagcctaaagtcagcccgtcccattgcccctgccatccccccacagcaaatctacaccttccagacagccaccttcacagcagcgagcccaggctcttcctcaggcttgaccgccacagtggcacaagccatgcccaacagtccccaactcaagcccattcagcccaagcccactgttatgggagaacctttcacagtcaaccctgccttgactccagccaaggacaagaaaaagaaagacaaaaaaaagaaggaatcttcaaaggaacttgaaagtcctctgacccctgggaaggtgtgtcgagcagaggaaggcaaaagcccattcagggaatcttcaggagatgggatgaaaatggaggggctcctaaatggctcatcagacccccaccaaagccgactggctagcatcaaggctgaagccgacaagatctacagtttcacggacaatgcccccagcccttccattggaggcagtagccgccttgaaaacactacccctactcagcccctgactcccttacatgtggtgacccagaatggagctgaagccagctcagtcaaaaccaacagccctgcatactctgacatctctgatgctggggaggatggggagggcaaggtagacagtgtcaaatcaaaggacgccgaacagttggttaaagaaggggctaagaaaactctttttccccctcagcctcagagcaaagactcaccatattaccaaggctttgagagttactattctccaagttatgcacagtccagccctggggctctgaaccccagcagccaggcaggagtggagagccaggccctgaagacaaaaagggatgaggaacctgagagcatagaagggaaagtgaagaacgatatctgtgaagaaaagaagcccgagctgagcagttccagtcagcagccctcggtcatccagcagcgtcccaatatgtacatgcagtccctgtactacaaccagtatgcctatgtacccccctatggctacagcgaccagagttaccacacccaccttctgagcactaacacggcttaccggcagcagtacgaagaacagcagaaacgccagagcttagagcagcagcagcggggagtggacaagaaggcagagatgggcctgaaggagcgggaggcagcactcaaggaagagtggaagcaaaagccgtcaattccaccaactctcaccaaggcccccagcctgacagacctggtgaaatcaggacctggcaaggccaaggagccaggggctgacccagccaaatcagtcatcattcccaagttagatgactcttcaaaactcccgggccaggcccctgaaggccttaaagtgaagctgagtgatgccagccacctaagcaaggaggcctctgaggccaagacaggtgctgagtgtggtcgacaggcagagatggatccaatactctggtaccgacaggaggcagagccccggatgtggacatatgtttatcctgccaagtactcagacatcaagtcagaggatgagcggtggaaggaggagcgggaccgcaaattgaaggaggaaaggagtcggagtaaggactctgtccccaaggaagatgggaaggaaagcacaagtagtgactgcaagctgcccacgtcagaggagtctcgccttgggagcaaggagccccggccaagtgtccatgtgcctgtgtcctccccacttacccagcaccagtcctacatcccctacatgcacggctattcctacagtcagtcctacgaccccaaccaccccagctaccggagcatgcctgctgtgatgatgcagaactacccaggttcctacctgccttccagctactctttttccccatatggcagcaaggtctcaggtggtgaagatgctgacaaggcacgagccagccccagtgtgacttgtaaatccagctcagagtccaaagccctggacatcttgcagcagcatgccagtcactacaagagcaagtctcccacgataagtgataaaacttctcaggagagagatcgaggaggctgtggggtggttgggggtggtggcagctgtagcagcgtcgggggagcaagtgggggtgaacggagtgttgaccggccccgcacctctccttcccagcgcctgatgtccacacaccaccaccaccaccacttggggtactcattgctcccagcacagtacaacttaccctatgcagcagggctttcttctacagccattgttgccagccaacaaggctcaactccctcactctacccaccccccaggaggtgagaatgacaccaagtgcccggataaagtcagcttcacgggcccggactggcttacccaaggaggtgctgaaggtgccgtttagacatcagttaaatggtgttgatcatcctgtttgccgtttccaccatgactgaaggcagacccttggctatctcacctccaccagacctccggactacctgaccctacctcttcctcaggagctggagagctggtacttagcaaaaatatttattctctcagccacagttatgactattgtggcctctgtggagatgaaggcacgggaagcaaccaggggaacatggcctcagcccagagaagccactgctctgttccccaagcccttggtctgctgctggagcagtaccagcccccccgcccaccagggagggacccccacccccaagcactgggtaaggtctgaagacagcacagcagccatacccctcaccatcattaccaccatcaccagattctgcatctccctagtgctttgcaccctgggaattggcagcatgtggaggaactagaatctcaggaaagaaattgggggttgttttctacataattgtgaaaacaaggtcttcaaatgtggagacttctccccatttacatgagcacatataaacgctcacaacctagcctggaaaggaagaccaaggcatctgccccaacatggccttgagctgcctgtgaggcagggggcaggggttccaacaccagcacagggctccccagggacactgggagcaagctggtgctggagcatgaatgacgtctgtgaagtagaacctgcgtccccactaagtcctgctgcttcttattccccaactccttgcccttttcccttccctcctaaccccttggtgcctttcccagggggatccccacactggtcttgcctcttcttttccactgcttggctcttaagcctcaggcagataaactagtattccccccagcttggggaaccttggagtctgccaggtcaccttagggcaaggcccagaaggcagcccctgggagcacccagcagttcttggagatgtcctgtcatctagccatctgatatcttcctcatttgaggccacagatatatacagcccaattcctctgtctacaagtacatgattttatatagctcagtctataacctccatgtgggccaatataagctgtgtttcttggtaacacatattttgtttgaggggccactggccatgggaggttatttgttccttagaccctggaataacacatccaagccattacttattagagtctcagaatgtactcagtggagctgtgctttgaggcagccaacatttctctgctctccttagaaatgcagtctcccaatggaagctttatactctttgtactgggaaagtgaggatgatttggtagctttattggggtcatgtcttccccaaggtgtggggagcttagcttacttggcttttgaggtatcatccctctgttctcccctcctatctttccatgaccctctggattgagagagagagataaagactgacagacaccagtgtaggctggaaaagggagtgtgtgaccagagtgccaaaagtgactaggagcaggaacttggctccgactcagtttggaaaatgggaaataggggacagtaagcacaatgcccagtagtagttgatttccaaggaccctggaaccctacacttgagaggcttagggtcaccatctgctcaagaggatcccctctgatctacaggccttttccctaggtttctgcctcctcgtttttgttcaagttgggttctgagtcctccccaaaaaccattgttttagacctcttggcagggccccaaaacagcctccctcatacccatcattccgtctgccttctgctgccctcatgggcagtgctctgagcagtgacctccctttcctccgtggaagtagctagtgcagacaccgtcatcccaccccacctgagtcaccccaaccaagagggtgactgaatttcagcctgattatgccctcctggggctcctgtgaggtggagccaaggttccctctctgttcctgtttgtttttaaatattgttgtgtgttttgtatctgtggcactggcctgcagcatactctgtatatattgtaaagaaaccgttaggagtaattttcttttgcattgggcaggcatggccctgcattcctgccctttccactcattctgtaacacagaggacgaacttctgtattagctgggcagccttgggttctccagaagagaacaggtttttcttttcctttttaatttttcttcttaaacatttggctctttgatcctcatatccaagtctcccctgaagagtaggagctgctcagaagagcaggtgaaagccaccatggcagatcctgatgcctgccgggcctagtcttccctctgaaataacatgaagcagcagctgtggagattcttgacaagtgctgagtgaaagatttgctgcccacctctacatggggaggagaaacacaggtgggagctacctgtggcatccatgacctagtcagagggatgagatgctcagcaggggtccccatcctatcccaccccacaaacaaaggctggaaaaatttgctaccaagggccaagaccaccagaccaagcctgtttatgagccacccctgcccaggccctcacagacattgctcacggggcttcccatagaggagaagctaaagagggagggggcctcatccccagatagatcaggcaaggcttggagagctgctctttaggatccacatcaactacttcctcattttaaggtatggcagttcccttcatccccttttcctgccttgtacatgtacatgtatgaaatttccttctcttaccgaactctctccacacatcacaaggtcaaagaaccacacgcttagaagggtaagagggcaccctatgaaatgaaatggtgatttcttgagtctcttttttccacgtttaaggggccatggcaggacttagagttgcgagttaagactgcagagggctagagaattatttcatacaggctttgaggccacccatgtcacttatcccgtataccctctcaccatccccttgtctactctgatgcccccaagatgcaactgggcagctagttggccccataattctgggcctttgttgtttgttttaattacttgggcatcccaggaagctttccagtgatctcctaccatgggcccccctcctgggatcaagcccctcccaggccctgtccccagcccctcctgccccagcccacccgcttgccttggtgctcagccctcccattgggagcaggttggggcgagctggaggcccgggctggaggggcagtgttgctgttcatagattttgttccattggcgttgctctgttgaatttaatttcagtcttcctgattcttcccttctgtaaagtgtacattaccaagttccttgtttttttatatatatatataaatatatatatatacaaactgtactctttttgcctttgtacattcaggcaagaagagaaaataaatctttttaagagacaatcacaaatctgtgagggctgctggttatttctcctggagtttgctgctgagctgcctcttccttcctcccaattttcctgttctccctcagctctcctgatcttcctggccctgctccatatgcatcctcagcttcactttccctggctgatggcaagctgttgaatccagtgtccagactacctgccttgtaacccttttctgcccagcattgttttctggcttggccactggcttagcccaggagctttactctgtgccctggcctcccctctcttcacctttagatttccattcaccgaagtggctttggacccctgggtactctgggacctgtttcctggaggccctggcttgggacactcacctgtgaaactatgcagctgggagctctctgcctaagagtttgcactatttaaacctgcctgggagttaggacggatggttttaggaatgaccggaaaactacccctaaaactcccccgacattccagcctctagaatgctctgatccagagctcagtggatgattcccagctggtggactcctgtggctaccccatcagaacaagggctaagggtttatgggtcaagagtatttgatcagaattttaaagggtggtatactctgaaacacagcccaaccaaaccattgtttggccgctttctcttttcctctaccttcctcatccccacttttttccctttctctctacttcctcttcttaattggctttggaattgaaatatatttttaaattatttgttgtatttattgaataaagtttttaatgtccctgttcttaaatttagacttagtttgcctttcacacaccacccccacccccaaaatattctaccttctaagttgctttttaaactgtagtgcagccttttgggtaccatatttctttcctgtcagtggtcttcaatagcaaaagttttttttgaaaagggaaatcttgactgggtgatttttttttgaagagggaaatcttgactgggtttccaatttagcctttgtgactctagccgtattgaagaggaatcaccaataggtggcagcagaatctcaagcatgtttcttgggaaaaagtaagggactgagttttgtcttggttctttttcatctgtcttgtcgattccttgtgtttgtttaatatctgcatcctaaactgccagctgcctctaggaattacctgccca

SEQ ID NO: 69829 - DNA, 8420 bp, Homo sapiens
aagctaaggaaatacaactttcaagggaacaagagacagagtctcactctgccgcccaggctggagtgcagtggtgtgatctgggctcactgcaacctctgcctcctgggttcaagcgattctcctgcttcagcctcctgagtagctgggattacagtgcgtcaccatgcccggctaatttttgtatttttagtggagatggtgtttctccatgttgaccaggctagtctcaaactcctgacttcaggtgattcacccgcctcagcttcccaaagtgctgggattacaggcacgagccatcatgccccgccatcagttcaattaaatctagatatcacattcttcctatccttttttattatacatgtcatgatatgggatgttggtggtaaatgtaacgtggaggaacaagacatatgtaggtacactccttgactgcacacgacatgattgggcaccccccaggttctgtgactccccgaccagtgacctggaaatgcgcaatggccggggtagaggcaaacgcatgcgtcccaacagtaatacacctgtcaatgagacagccacagcctctgacagcaaagggaccagtaacagcagcaaaacccgggcaggagccaatagcaaaggccgtcggggcagccagaattcttcagagcaccgcccacctgccagcagcacttctgaggatgtcaaggccagcccttcctcagctaataagcggaaaaacaaacccctttcagacatggagctgaattctagctcagaggactccaaagggagcaagcgtgtccgtactaattccatgggctcagccactggcccccttcctgggacaaaggtagaacccactgttctggacagaaactgcccctcccccgtcctaattgactgtccccacccaaactgcaacaagaagtacaagcacatcaatggacttaagtaccaccaagctcatgcccatacagatgatgacagcaagccggaagcggatggggacagtgagtacggagaggaacctattctccatgcagatcttgggagctgcaacggtgcatctgtctcacaaaaaggttccttgtcccctgcccgctcagctacccccaaagttcgacttgtagagccccatagcccttctccttcaagcaaattcagcacaaaaggcctctgtaagaaaaagttgagtggggaaggggacacagaccttggggccttatccaatgatggctctgatgatggaccctcagtgatggatgaaacaagcaatgatgcctttgattctttagaaaggaagtgtatggaaaaagaaaaatgtaaaaaaccctctagtttaaaacctgaaaagattccttccaagagcctaaagtcagcccgtcccattgcccctgccatccccccacagcaaatctacaccttccagacagccaccttcacagcagcgagcccaggctcttcctcaggcttgaccgccacagtggcacaagccatgcccaacagtccccaactcaagcccattcagcccaagcccactgttatgggagaacctttcacagtcaaccctgccttgactccagccaaggacaagaaaaagaaagacaaaaaaaagaaggaatcttcaaaggaacttgaaagtcctctgacccctgggaaggtgtgtcgagcagaggaaggcaaaagcccattcagggaatcttcaggagatgggatgaaaatggaggggctcctaaatggctcatcagacccccaccaaagccgactggctagcatcaaggctgaagccgacaagatctacagtttcacggacaatgcccccagcccttccattggaggcagtagccgccttgaaaacactacccctactcagcccctgactcccttacatgtggtgacccagaatggagctgaagccagctcagtcaaaaccaacagccctgcatactctgacatctctgatgctggggaggatggggagggcaaggtagacagtgtcaaatcaaaggacgccgaacagttggttaaagaaggggctaagaaaactctttttccccctcagcctcagagcaaagactcaccatattaccaaggctttgagagttactattctccaagttatgcacagtccagccctggggctctgaaccccagcagccaggcaggagtggagagccaggccctgaagacaaaaagggatgaggaacctgagagcatagaagggaaagtgaagaacgatatctgtgaagaaaagaagcccgagctgagcagttccagtcagcagccctcggtcatccagcagcgtcccaatatgtacatgcagtccctgtactacaaccagtatgcctatgtacccccctatggctacagcgaccagagttaccacacccaccttctgagcactaacacggcttaccggcagcagtacgaagaacagcagaaacgccagagcttagagcagcagcagcggggagtggacaagaaggcagagatgggcctgaaggagcgggaggcagcactcaaggaagagtggaagcaaaagccgtcaattccaccaactctcaccaaggcccccagcctgacagacctggtgaaatcaggacctggcaaggccaaggagccaggggctgacccagccaaatcagtcatcattcccaagttagatgactcttcaaaactcccgggccaggcccctgaaggccttaaagtgaagctgagtgatgccagccacctaagcaaggaggcctctgaggccaagacaggtgctgagtgtggtcgacaggcagagatggatccaatactctggtaccgacaggaggcagagccccggatgtggacatatgtttatcctgccaagtactcagacatcaagtcagaggatgagcggtggaaggaggagcgggaccgcaaattgaaggaggaaaggagtcggagtaaggactctgtccccaaggaagatgggaaggaaagcacaagtagtgactgcaagctgcccacgtcagaggagtctcgccttgggagcaaggagccccggccaagtgtccatgtgcctgtgtcctccccacttacccagcaccagtcctacatcccctacatgcacggctattcctacagtcagtcctacgaccccaaccaccccagctaccggagcatgcctgctgtgatgatgcagaactacccaggttcctacctgccttccagctactctttttccccatatggcagcaaggtctcaggtggtgaagatgctgacaaggcacgagccagccccagtgtgacttgtaaatccagctcagagtccaaagccctggacatcttgcagcagcatgccagtcactacaagagcaagtctcccacgataagtgataaaacttctcaggagagagatcgaggaggctgtggggtggttgggggtggtggcagctgtagcagcgtcgggggagcaagtgggggtgaacggagtgttgaccggccccgcacctctccttcccagcgcctgatgtccacacaccaccaccaccaccacttggggtactcattgctcccagcacagtacaacttaccctatgcagcagggctttcttctacagccattgttgccagccaacaaggctcaactccctcactctacccaccccccaggaggtgagaatgacaccaagtgcccggataaagtcagcttcacgggcccggactggcttacccaaggaggtgctgaaggtgccgtttagacatcagttaaatggtgttgatcatcctgtttgccgtttccaccatgactgaaggcagacccttggctatctcacctccaccagacctccggactacctgaccctacctcttcctcaggagctggagagctggtacttagcaaaaatatttattctctcagccacagttatgactattgtggcctctgtggagatgaaggcacgggaagcaaccaggggaacatggcctcagcccagagaagccactgctctgttccccaagcccttggtctgctgctggagcagtaccagcccccccgcccaccagggagggacccccacccccaagcactgggtaaggtctgaagacagcacagcagccatacccctcaccatcattaccaccatcaccagattctgcatctccctagtgctttgcaccctgggaattggcagcatgtggaggaactagaatctcaggaaagaaattgggggttgttttctacataattgtgaaaacaaggtcttcaaatgtggagacttctccccatttacatgagcacatataaacgctcacaacctagcctggaaaggaagaccaaggcatctgccccaacatggccttgagctgcctgtgaggcagggggcaggggttccaacaccagcacagggctccccagggacactgggagcaagctggtgctggagcatgaatgacgtctgtgaagtagaacctgcgtccccactaagtcctgctgcttcttattccccaactccttgcccttttcccttccctcctaaccccttggtgcctttcccagggggatccccacactggtcttgcctcttcttttccactgcttggctcttaagcctcaggcagataaactagtattccccccagcttggggaaccttggagtctgccaggtcaccttagggcaaggcccagaaggcagcccctgggagcacccagcagttcttggagatgtcctgtcatctagccatctgatatcttcctcatttgaggccacagatatatacagcccaattcctctgtctacaagtacatgattttatatagctcagtctataacctccatgtgggccaatataagctgtgtttcttggtaacacatattttgtttgaggggccactggccatgggaggttatttgttccttagaccctggaataacacatccaagccattacttattagagtctcagaatgtactcagtggagctgtgctttgaggcagccaacatttctctgctctccttagaaatgcagtctcccaatggaagctttatactctttgtactgggaaagtgaggatgatttggtagctttattggggtcatgtcttccccaaggtgtggggagcttagcttacttggcttttgaggtatcatccctctgttctcccctcctatctttccatgaccctctggattgagagagagagataaagactgacagacaccagtgtaggctggaaaagggagtgtgtgaccagagtgccaaaagtgactaggagcaggaacttggctccgactcagtttggaaaatgggaaataggggacagtaagcacaatgcccagtagtagttgatttccaaggaccctggaaccctacacttgagaggcttagggtcaccatctgctcaagaggatcccctctgatctacaggccttttccctaggtttctgcctcctcgtttttgttcaagttgggttctgagtcctccccaaaaaccattgttttagacctcttggcagggccccaaaacagcctccctcatacccatcattccgtctgccttctgctgccctcatgggcagtgctctgagcagtgacctccctttcctccgtggaagtagctagtgcagacaccgtcatcccaccccacctgagtcaccccaaccaagagggtgactgaatttcagcctgattatgccctcctggggctcctgtgaggtggagccaaggttccctctctgttcctgtttgtttttaaatattgttgtgtgttttgtatctgtggcactggcctgcagcatactctgtatatattgtaaagaaaccgttaggagtaattttcttttgcattgggcaggcatggccctgcattcctgccctttccactcattctgtaacacagaggacgaacttctgtattagctgggcagccttgggttctccagaagagaacaggtttttcttttcctttttaatttttcttcttaaacatttggctctttgatcctcatatccaagtctcccctgaagagtaggagctgctcagaagagcaggtgaaagccaccatggcagatcctgatgcctgccgggcctagtcttccctctgaaataacatgaagcagcagctgtggagattcttgacaagtgctgagtgaaagatttgctgcccacctctacatggggaggagaaacacaggtgggagctacctgtggcatccatgacctagtcagagggatgagatgctcagcaggggtccccatcctatcccaccccacaaacaaaggctggaaaaatttgctaccaagggccaagaccaccagaccaagcctgtttatgagccacccctgcccaggccctcacagacattgctcacggggcttcccatagaggagaagctaaagagggagggggcctcatccccagatagatcaggcaaggcttggagagctgctctttaggatccacatcaactacttcctcattttaaggtatggcagttcccttcatccccttttcctgccttgtacatgtacatgtatgaaatttccttctcttaccgaactctctccacacatcacaaggtcaaagaaccacacgcttagaagggtaagagggcaccctatgaaatgaaatggtgatttcttgagtctcttttttccacgtttaaggggccatggcaggacttagagttgcgagttaagactgcagagggctagagaattatttcatacaggctttgaggccacccatgtcacttatcccgtataccctctcaccatccccttgtctactctgatgcccccaagatgcaactgggcagctagttggccccataattctgggcctttgttgtttgttttaattacttgggcatcccaggaagctttccagtgatctcctaccatgggcccccctcctgggatcaagcccctcccaggccctgtccccagcccctcctgccccagcccacccgcttgccttggtgctcagccctcccattgggagcaggttggggcgagctggaggcccgggctggaggggcagtgttgctgttcatagattttgttccattggcgttgctctgttgaatttaatttcagtcttcctgattcttcccttctgtaaagtgtacattaccaagttccttgtttttttatatatatatataaatatatatatatacaaactgtactctttttgcctttgtacattcaggcaagaagagaaaataaatctttttaagagacaatcacaaatctgtgagggctgctggttatttctcctggagtttgctgctgagctgcctcttccttcctcccaattttcctgttctccctcagctctcctgatcttcctggccctgctccatatgcatcctcagcttcactttccctggctgatggcaagctgttgaatccagtgtccagactacctgccttgtaacccttttctgcccagcattgttttctggcttggccactggcttagcccaggagctttactctgtgccctggcctcccctctcttcacctttagatttccattcaccgaagtggctttggacccctgggtactctgggacctgtttcctggaggccctggcttgggacactcacctgtgaaactatgcagctgggagctctctgcctaagagtttgcactatttaaacctgcctgggagttaggacggatggttttaggaatgaccggaaaactacccctaaaactcccccgacattccagcctctagaatgctctgatccagagctcagtggatgattcccagctggtggactcctgtggctaccccatcagaacaagggctaagggtttatgggtcaagagtatttgatcagaattttaaagggtggtatactctgaaacacagcccaaccaaaccattgtttggccgctttctcttttcctctaccttcctcatccccacttttttccctttctctctacttcctcttcttaattggctttggaattgaaatatatttttaaattatttgttgtatttattgaataaagtttttaatgtccctgttcttaaatttagacttagtttgcctttcacacaccacccccacccccaaaatattctaccttctaagttgctttttaaactgtagtgcagccttttgggtaccatatttctttcctgtcagtggtcttcaatagcaaaagttttttttgaaaagggaaatcttgactgggtgatttttttttgaagagggaaatcttgactgggtttccaatttagcctttgtgactctagccgtattgaagaggaatcaccaataggtggcagcagaatctcaagcatgtttcttgggaaaaagtaagggactgagttttgtcttggttctttttcatctgtcttgtcgattccttgtgtttgtttaatatctgcatcctaaactgccagctgcctctaggaattacctgccca

SEQ ID NO: 69830 - DNA, 7929 bp, Homo sapiens
cgctcaggagatggtgccaatgctggaggcctggttgctgctattgctcccaagggctcagagaaggcggctaaggcatcccgcagtgtagccggttccaaaaaggagaaggagaacagctcatctaagagcacgaagggagaagcgaaggagtggggacttgttcagaaaaggatcctggggtcctccagccagttcccttgggaggacggggtggtcagtatgatggaagtgcaggggtggatacaggagctgtggagccacttgggagtatagctattgagcctggggcagcgctcaatcctttgggaactaaaccggagccagaggaaggggagaatgagtgtcgcctgctaaagaaagtcaagtctgaaaagatggagtcccctgtttccacaccagcagtgctgccaatacaccttttggtgccagtggtcaacaatgacatctcatctccttgtgagcagatcatggttcgtacccgatcagttggggtcaacacatgtgatgtggctctggccacagagcctgagtgcttgggcccctgtgaacctggaactagcgtcaaccttgaaggcatcgtgtggcaggaaacagaagatgggatgttggtggtaaatgtaacgtggaggaacaagacatatgtaggtacactccttgactgcacacgacatgattgggcaccccccaggttctgtgactccccgaccagtgacctggaaatgcgcaatggccggggtagaggcaaacgcatgcgtcccaacagtaatacacctgtcaatgagacagccacagcctctgacagcaaagggaccagtaacagcagcaaaacccgggcaggagccaatagcaaaggccgtcggggcagccagaattcttcagagcaccgcccacctgccagcagcacttctgaggatgtcaaggccagcccttcctcagctaataagcggaaaaacaaacccctttcagacatggagctgaattctagctcagaggactccaaagggagcaagcgtgtccgtactaattccatgggctcagccactggcccccttcctgggacaaaggtagaacccactgttctggacagaaactgcccctcccccgtcctaattgactgtccccacccaaactgcaacaagaagtacaagcacatcaatggacttaagtaccaccaagctcatgcccatacagatgatgacagcaagccggaagcggatggggacagtgagtacggagaggaacctattctccatgcagatcttgggagctgcaacggtgcatctgtctcacaaaaaggttccttgtcccctgcccgctcagctacccccaaagttcgacttgtagagccccatagcccttctccttcaagcaaattcagcacaaaaggcctctgtaagaaaaagttgagtggggaaggggacacagaccttggggccttatccaatgatggctctgatgatggaccctcagtgatggatgaaacaagcaatgatgcctttgattctttagaaaggaagtgtatggaaaaagaaaaatgtaaaaaaccctctagtttaaaacctgaaaagattccttccaagagcctaaagtcagcccgtcccattgcccctgccatccccccacagcaaatctacaccttccagacagccaccttcacagcagcgagcccaggctcttcctcaggcttgaccgccacagtggcacaagccatgcccaacagtccccaactcaagcccattcagcccaagcccactgttatgggagaacctttcacagtcaaccctgccttgactccagccaaggacaagaaaaagaaagacaaaaaaaagaaggaatcttcaaaggaacttgaaagtcctctgacccctgggaaggtgtgtcgagcagaggaaggcaaaagcccattcagggaatcttcaggagatgggatgaaaatggaggggctcctaaatggctcatcagacccccaccaaagccgactggctagcatcaaggctgaagccgacaagatctacagtttcacggacaatgcccccagcccttccattggaggcagtagccgccttgaaaacactacccctactcagcccctgactcccttacatgtggtgacccagaatggagctgaagccagctcagtcaaaaccaacagccctgcatactctgacatctctgatgctggggaggatggggagggcaaggtagacagtgtcaaatcaaaggacgccgaacagttggttaaagaaggggctaagaaaactctttttccccctcagcctcagagcaaagactcaccatattaccaaggctttgagagttactattctccaagttatgcacagtccagccctggggctctgaaccccagcagccaggcaggagtggagagccaggccctgaagacaaaaagggatgaggaaaggagtcggagtaaggactctgtccccaaggaagatgggaaggaaagcacaagtagtgactgcaagctgcccacgtcagaggagtctcgccttgggagcaaggagccccggccaagtgtccatgtgcctgtgtcctccccacttacccagcaccagtcctacatcccctacatgcacggctattcctacagtcagtcctacgaccccaaccaccccagctaccggagcatgcctgctgtgatgatgcagaactacccaggttcctacctgccttccagctactctttttccccatatggcagcaaggtctcaggtggtgaagatgctgacaaggcacgagccagccccagtgtgacttgtaaatccagctcagagtccaaagccctggacatcttgcagcagcatgccagtcactacaagagcaagtctcccacgataagtgataaaacttctcaggagagagatcgaggaggctgtggggtggttgggggtggtggcagctgtagcagcgtcgggggagcaagtgggggtgaacggagtgttgaccggccccgcacctctccttcccagcgcctgatgtccacacaccaccaccaccaccacttggggtactcattgctcccagcacagtacaacttaccctatgcagcagggctttcttctacagccattgttgccagccaacaaggctcaactccctcactctacccaccccccaggaggtgagaatgacaccaagtgcccggataaagtcagcttcacgggcccggactggcttacccaaggaggtgctgaaggtgccgtttagacatcagttaaatggtgttgatcatcctgtttgccgtttccaccatgactgaaggcagacccttggctatctcacctccaccagacctccggactacctgaccctacctcttcctcaggagctggagagctggtacttagcaaaaatatttattctctcagccacagttatgactattgtggcctctgtggagatgaaggcacgggaagcaaccaggggaacatggcctcagcccagagaagccactgctctgttccccaagcccttggtctgctgctggagcagtaccagcccccccgcccaccagggagggacccccacccccaagcactgggtaaggtctgaagacagcacagcagccatacccctcaccatcattaccaccatcaccagattctgcatctccctagtgctttgcaccctgggaattggcagcatgtggaggaactagaatctcaggaaagaaattgggggttgttttctacataattgtgaaaacaaggtcttcaaatgtggagacttctccccatttacatgagcacatataaacgctcacaacctagcctggaaaggaagaccaaggcatctgccccaacatggccttgagctgcctgtgaggcagggggcaggggttccaacaccagcacagggctccccagggacactgggagcaagctggtgctggagcatgaatgacgtctgtgaagtagaacctgcgtccccactaagtcctgctgcttcttattccccaactccttgcccttttcccttccctcctaaccccttggtgcctttcccagggggatccccacactggtcttgcctcttcttttccactgcttggctcttaagcctcaggcagataaactagtattccccccagcttggggaaccttggagtctgccaggtcaccttagggcaaggcccagaaggcagcccctgggagcacccagcagttcttggagatgtcctgtcatctagccatctgatatcttcctcatttgaggccacagatatatacagcccaattcctctgtctacaagtacatgattttatatagctcagtctataacctccatgtgggccaatataagctgtgtttcttggtaacacatattttgtttgaggggccactggccatgggaggttatttgttccttagaccctggaataacacatccaagccattacttattagagtctcagaatgtactcagtggagctgtgctttgaggcagccaacatttctctgctctccttagaaatgcagtctcccaatggaagctttatactctttgtactgggaaagtgaggatgatttggtagctttattggggtcatgtcttccccaaggtgtggggagcttagcttacttggcttttgaggtatcatccctctgttctcccctcctatctttccatgaccctctggattgagagagagagataaagactgacagacaccagtgtaggctggaaaagggagtgtgtgaccagagtgccaaaagtgactaggagcaggaacttggctccgactcagtttggaaaatgggaaataggggacagtaagcacaatgcccagtagtagttgatttccaaggaccctggaaccctacacttgagaggcttagggtcaccatctgctcaagaggatcccctctgatctacaggccttttccctaggtttctgcctcctcgtttttgttcaagttgggttctgagtcctccccaaaaaccattgttttagacctcttggcagggccccaaaacagcctccctcatacccatcattccgtctgccttctgctgccctcatgggcagtgctctgagcagtgacctccctttcctccgtggaagtagctagtgcagacaccgtcatcccaccccacctgagtcaccccaaccaagagggtgactgaatttcagcctgattatgccctcctggggctcctgtgaggtggagccaaggttccctctctgttcctgtttgtttttaaatattgttgtgtgttttgtatctgtggcactggcctgcagcatactctgtatatattgtaaagaaaccgttaggagtaattttcttttgcattgggcaggcatggccctgcattcctgccctttccactcattctgtaacacagaggacgaacttctgtattagctgggcagccttgggttctccagaagagaacaggtttttcttttcctttttaatttttcttcttaaacatttggctctttgatcctcatatccaagtctcccctgaagagtaggagctgctcagaagagcaggtgaaagccaccatggcagatcctgatgcctgccgggcctagtcttccctctgaaataacatgaagcagcagctgtggagattcttgacaagtgctgagtgaaagatttgctgcccacctctacatggggaggagaaacacaggtgggagctacctgtggcatccatgacctagtcagagggatgagatgctcagcaggggtccccatcctatcccaccccacaaacaaaggctggaaaaatttgctaccaagggccaagaccaccagaccaagcctgtttatgagccacccctgcccaggccctcacagacattgctcacggggcttcccatagaggagaagctaaagagggagggggcctcatccccagatagatcaggcaaggcttggagagctgctctttaggatccacatcaactacttcctcattttaaggtatggcagttcccttcatccccttttcctgccttgtacatgtacatgtatgaaatttccttctcttaccgaactctctccacacatcacaaggtcaaagaaccacacgcttagaagggtaagagggcaccctatgaaatgaaatggtgatttcttgagtctcttttttccacgtttaaggggccatggcaggacttagagttgcgagttaagactgcagagggctagagaattatttcatacaggctttgaggccacccatgtcacttatcccgtataccctctcaccatccccttgtctactctgatgcccccaagatgcaactgggcagctagttggccccataattctgggcctttgttgtttgttttaattacttgggcatcccaggaagctttccagtgatctcctaccatgggcccccctcctgggatcaagcccctcccaggccctgtccccagcccctcctgccccagcccacccgcttgccttggtgctcagccctcccattgggagcaggttggggcgagctggaggcccgggctggaggggcagtgttgctgttcatagattttgttccattggcgttgctctgttgaatttaatttcagtcttcctgattcttcccttctgtaaagtgtacattaccaagttccttgtttttttatatatatatataaatatatatatatacaaactgtactctttttgcctttgtacattcaggcaagaagagaaaataaatctttttaagagacaatcacaaatctgtgagggctgctggttatttctcctggagtttgctgctgagctgcctcttccttcctcccaattttcctgttctccctcagctctcctgatcttcctggccctgctccatatgcatcctcagcttcactttccctggctgatggcaagctgttgaatccagtgtccagactacctgccttgtaacccttttctgcccagcattgttttctggcttggccactggcttagcccaggagctttactctgtgccctggcctcccctctcttcacctttagatttccattcaccgaagtggctttggacccctgggtactctgggacctgtttcctggaggccctggcttgggacactcacctgtgaaactatgcagctgggagctctctgcctaagagtttgcactatttaaacctgcctgggagttaggacggatggttttaggaatgaccggaaaactacccctaaaactcccccgacattccagcctctagaatgctctgatccagagctcagtggatgattcccagctggtggactcctgtggctaccccatcagaacaagggctaagggtttatgggtcaagagtatttgatcagaattttaaagggtggtatactctgaaacacagcccaaccaaaccattgtttggccgctttctcttttcctctaccttcctcatccccacttttttccctttctctctacttcctcttcttaattggctttggaattgaaatatatttttaaattatttgttgtatttattgaataaagtttttaatgtccctgttcttaaatttagacttagtttgcctttcacacaccacccccacccccaaaatattctaccttctaagttgctttttaaactgtagtgcagccttttgggtaccatatttctttcctgtcagtggtcttcaatagcaaaagttttttttgaaaagggaaatcttgactgggtgatttttttttgaagagggaaatcttgactgggtttccaatttagcctttgtgactctagccgtattgaagaggaatcaccaataggtggcagcagaatctcaagcatgtttcttgggaaaaagtaagggactgagttttgtcttggttctttttcatctgtcttgtcgattccttgtgtttgtttaatatctgcatcctaaactgccagctgcctctaggaattacctgccca

SEQ ID NO: 69831 - DNA, 8367 bp, Homo sapiens
cgctcaggagatggtgccaatgctggaggcctggttgctgctattgctcccaagggctcagagaaggcggctaaggcatcccgcagtgtagccggttccaaaaaggagaaggagaacagctcatctaagagcacgaagggagaagcgaaggagtggggacttgttcagaaaaggatcctggggtcctccagccagttcccttgggaggacggggtggtcagtatgatggaagtgcaggggtggatacaggagctgtggagccacttgggagtatagctattgagcctggggcagcgctcaatcctttgggaactaaaccggagccagaggaaggggagaatgagtgtcgcctgctaaagaaagtcaagtctgaaaagatggagtcccctgtttccacaccagcagtgctgccaatacaccttttggtgccagtggtcaacaatgacatctcatctccttgtgagcagatcatggttcgtacccgatcagttggggtcaacacatgtgatgtggctctggccacagagcctgagtgcttgggcccctgtgaacctggaactagcgtcaaccttgaaggcatcgtgtggcaggaaacagaagatgggatgttggtggtaaatgtaacgtggaggaacaagacatatgtaggtacactccttgactgcacacgacatgattgggcaccccccaggttctgtgactccccgaccagtgacctggaaatgcgcaatggccggggtagaggcaaacgcatgcgtcccaacagtaatacacctgtcaatgagacagccacagcctctgacagcaaagggaccagtaacagcagcaaaacccgggcaggagccaatagcaaaggccgtcggggcagccagaattcttcagagcaccgcccacctgccagcagcacttctgaggatgtcaaggccagcccttcctcagctaataagcggaaaaacaaacccctttcagacatggagctgaattctagctcagaggactccaaagggagcaagcgtgtccgtactaattccatgggctcagccactggcccccttcctgggacaaaggtagaacccactgttctggacagaaactgcccctcccccgtcctaattgactgtccccacccaaactgcaacaagaagtacaagcacatcaatggacttaagtaccaccaagctcatgcccatacagatgatgacagcaagccggaagcggatggggacagtgagtacggagaggaacctattctccatgcagatcttgggagctgcaacggtgcatctgtctcacaaaaaggttccttgtcccctgcccgctcagctacccccaaagttcgacttgtagagccccatagcccttctccttcaagcaaattcagcacaaaaggcctctgtaagaaaaagttgagtggggaaggggacacagaccttggggccttatccaatgatggctctgatgatggaccctcagtgatggatgaaacaagcaatgatgcctttgattctttagaaaggaagtgtatggaaaaagaaaaatgtaaaaaaccctctagtttaaaacctgaaaagattccttccaagagcctaaagtcagcccgtcccattgcccctgccatccccccacagcaaatctacaccttccagacagccaccttcacagcagcgagcccaggctcttcctcaggcttgaccgccacagtggcacaagccatgcccaacagtccccaactcaagcccattcagcccaagcccactgttatgggagaacctttcacagtcaaccctgccttgactccagccaaggacaagaaaaagaaagacaaaaaaaagaaggaatcttcaaaggaacttgaaagtcctctgacccctgggaaggtgtgtcgagcagaggaaggcaaaagcccattcagggaatcttcaggagatgggatgaaaatggaggggctcctaaatggctcatcagacccccaccaaagccgactggctagcatcaaggctgaagccgacaagatctacagtttcacggacaatgcccccagcccttccattggaggcagtagccgccttgaaaacactacccctactcagcccctgactcccttacatgtggtgacccagaatggagctgaagccagctcagtcaaaaccaacagccctgcatactctgacatctctgatgctggggaggatggggagggcaaggtagacagtgtcaaatcaaaggacgccgaacagttggttaaagaaggggctaagaaaactctttttccccctcagcctcagagcaaagactcaccatattaccaaggctttgagagttactattctccaagttatgcacagtccagccctggggctctgaaccccagcagccaggcaggagtggagagccaggccctgaagacaaaaagggatgaggaacctgagagcatagaagggaaagtgaagaacgatatctgtgaagaaaagaagcccgagctgagcagttccagtcagcagccctcggtcatccagcagcgtcccaatatgtacatgcagtccctgtactacaaccagtatgcctatgtacccccctatggctacagcgaccagagttaccacacccaccttctgagcactaacacggcttaccggcagcagtacgaagaacagcagaaacgccagagcttagagcagcagcagcggggagtggacaagaaggcagagatgggcctgaaggagcgggaggcagcactcaaggaagagtggaagcaaaagccgtcaattccaccaactctcaccaaggcccccagcctgacagacctggtgaaatcaggacctggcaaggccaaggagccaggggctgacccagccaaatcagtcatcattcccaagttagatgactcttcaaaactcccgggccaggcccctgaaggccttaaagtgaagctgagtgatgccagccacctaagcaaggaggcctctgaggccaagacaggtgctgagtgtggtcgacaggcagagatggatccaatactctggtaccgacaggaggcagagccccggatgtggacatatgtttatcctgccaagtactcagacatcaagtcagaggatgagcggtggaaggaggagcgggaccgcaaattgaaggaggaaaggagtcggagtaaggactctgtccccaaggaagatgggaaggaaagcacaagtagtgactgcaagctgcccacgtcagaggagtctcgccttgggagcaaggagccccggccaagtgtccatgtgcctgtgtcctccccacttacccagcaccagtcctacatcccctacatgcacggctattcctacagtcagtcctacgaccccaaccaccccagctaccggagcatgcctgctgtgatgatgcagaactacccaggttcctacctgccttccagctactctttttccccatatggcagcaaggtctcaggtggtgaagatgctgacaaggcacgagccagccccagtgtgacttgtaaatccagctcagagtccaaagccctggacatcttgcagcagcatgccagtcactacaagagcaagtctcccacgataagtgataaaacttctcaggagagagatcgaggaggctgtggggtggttgggggtggtggcagctgtagcagcgtcgggggagcaagtgggggtgaacggagtgttgaccggccccgcacctctccttcccagcgcctgatgtccacacaccaccaccaccaccacttggggtactcattgctcccagcacagtacaacttaccctatgcagcagggctttcttctacagccattgttgccagccaacaaggctcaactccctcactctacccaccccccaggaggtgagaatgacaccaagtgcccggataaagtcagcttcacgggcccggactggcttacccaaggaggtgctgaaggtgccgtttagacatcagttaaatggtgttgatcatcctgtttgccgtttccaccatgactgaaggcagacccttggctatctcacctccaccagacctccggactacctgaccctacctcttcctcaggagctggagagctggtacttagcaaaaatatttattctctcagccacagttatgactattgtggcctctgtggagatgaaggcacgggaagcaaccaggggaacatggcctcagcccagagaagccactgctctgttccccaagcccttggtctgctgctggagcagtaccagcccccccgcccaccagggagggacccccacccccaagcactgggtaaggtctgaagacagcacagcagccatacccctcaccatcattaccaccatcaccagattctgcatctccctagtgctttgcaccctgggaattggcagcatgtggaggaactagaatctcaggaaagaaattgggggttgttttctacataattgtgaaaacaaggtcttcaaatgtggagacttctccccatttacatgagcacatataaacgctcacaacctagcctggaaaggaagaccaaggcatctgccccaacatggccttgagctgcctgtgaggcagggggcaggggttccaacaccagcacagggctccccagggacactgggagcaagctggtgctggagcatgaatgacgtctgtgaagtagaacctgcgtccccactaagtcctgctgcttcttattccccaactccttgcccttttcccttccctcctaaccccttggtgcctttcccagggggatccccacactggtcttgcctcttcttttccactgcttggctcttaagcctcaggcagataaactagtattccccccagcttggggaaccttggagtctgccaggtcaccttagggcaaggcccagaaggcagcccctgggagcacccagcagttcttggagatgtcctgtcatctagccatctgatatcttcctcatttgaggccacagatatatacagcccaattcctctgtctacaagtacatgattttatatagctcagtctataacctccatgtgggccaatataagctgtgtttcttggtaacacatattttgtttgaggggccactggccatgggaggttatttgttccttagaccctggaataacacatccaagccattacttattagagtctcagaatgtactcagtggagctgtgctttgaggcagccaacatttctctgctctccttagaaatgcagtctcccaatggaagctttatactctttgtactgggaaagtgaggatgatttggtagctttattggggtcatgtcttccccaaggtgtggggagcttagcttacttggcttttgaggtatcatccctctgttctcccctcctatctttccatgaccctctggattgagagagagagataaagactgacagacaccagtgtaggctggaaaagggagtgtgtgaccagagtgccaaaagtgactaggagcaggaacttggctccgactcagtttggaaaatgggaaataggggacagtaagcacaatgcccagtagtagttgatttccaaggaccctggaaccctacacttgagaggcttagggtcaccatctgctcaagaggatcccctctgatctacaggccttttccctaggtttctgcctcctcgtttttgttcaagttgggttctgagtcctccccaaaaaccattgttttagacctcttggcagggccccaaaacagcctccctcatacccatcattccgtctgccttctgctgccctcatgggcagtgctctgagcagtgacctccctttcctccgtggaagtagctagtgcagacaccgtcatcccaccccacctgagtcaccccaaccaagagggtgactgaatttcagcctgattatgccctcctggggctcctgtgaggtggagccaaggttccctctctgttcctgtttgtttttaaatattgttgtgtgttttgtatctgtggcactggcctgcagcatactctgtatatattgtaaagaaaccgttaggagtaattttcttttgcattgggcaggcatggccctgcattcctgccctttccactcattctgtaacacagaggacgaacttctgtattagctgggcagccttgggttctccagaagagaacaggtttttcttttcctttttaatttttcttcttaaacatttggctctttgatcctcatatccaagtctcccctgaagagtaggagctgctcagaagagcaggtgaaagccaccatggcagatcctgatgcctgccgggcctagtcttccctctgaaataacatgaagcagcagctgtggagattcttgacaagtgctgagtgaaagatttgctgcccacctctacatggggaggagaaacacaggtgggagctacctgtggcatccatgacctagtcagagggatgagatgctcagcaggggtccccatcctatcccaccccacaaacaaaggctggaaaaatttgctaccaagggccaagaccaccagaccaagcctgtttatgagccacccctgcccaggccctcacagacattgctcacggggcttcccatagaggagaagctaaagagggagggggcctcatccccagatagatcaggcaaggcttggagagctgctctttaggatccacatcaactacttcctcattttaaggtatggcagttcccttcatccccttttcctgccttgtacatgtacatgtatgaaatttccttctcttaccgaactctctttgttgtttgttttaattacttgggcatcccaggaagctttccagtgatctcctaccatgggcccccctcctgggatcaagcccctcccaggccctgtccccagcccctcctgccccagcccacccgcttgccttggtgctcagccctcccattgggagcaggttggggcgagctggaggcccgggctggaggggcagtgttgctgttcatagattttgttccattggcgttgctctgttgaatttaatttcagtcttcctgattcttcccttctgtaaagtgtacattaccaagttccttgtttttttatatatatatataaatatatatatatacaaactgtactctttttgcctttgtacattcaggcaagaagagaaaataaatctttttaagagacaatcacaaatctgtgagggctgctggttatttctcctggagtttgctgctgagctgcctcttccttcctcccaattttcctgttctccctcagctctcctgatcttcctggccctgctccatatgcatcctcagcttcactttccctggctgatggcaagctgttgaatccagtgtccagactacctgccttgtaacccttttctgcccagcattgttttctggcttggccactggcttagcccaggagctttactctgtgccctggcctcccctctcttcacctttagatttccattcaccgaagtggctttggacccctgggtactctgggacctgtttcctggaggccctggcttgggacactcacctgtgaaactatgcagctgggagctctctgcctaagagtttgcactatttaaacctgcctgggagttaggacggatggttttaggaatgaccggaaaactacccctaaaactcccccgacattccagcctctagaatgctctgatccagagctcagtggatgattcccagctggtggactcctgtggctaccccatcagaacaagggctaagggtttatgggtcaagagtatttgatcagaattttaaagggtggtatactctgaaacacagcccaaccaaaccattgtttggccgctttctcttttcctctaccttcctcatccccacttttttccctttctctctacttcctcttcttaattggctttggaattgaaatatatttttaaattatttgttgtatttattgaataaagtttttaatgtccctgttcttaaatttagacttagtttgcctttcacacaccacccccacccccaaaatattctaccttctaagttgctttttaaactgtagtgcagccttttgggtaccatatttctttcctgtcagtggtcttcaatagcaaaagttttttttgaaaagggaaatcttgactgggtgatttttttttgaagagggaaatcttgactgggtttccaatttagcctttgtgactctagccgtattgaagaggaatcaccaataggtggcagcagaatctcaagcatgtttcttgggaaaaagtaagggactgagttttgtcttggttctttttcatctgtcttgtcgattccttgtgtttgtttaatatctgcatcctaaactgccagctgcctctaggaattacctgccca

SEQ ID NO: 69832 - DNA, 7445 bp, Homo sapiens
cgctcaggagatggtgccaatgctggaggcctggttgctgctattgctcccaagggctcagagaaggcggctaaggcatcccgcagtgtagccggttccaaaaaggagaaggagaacagctcatctaagagcacgaagggagaagcgaaggagtggggacttgttcagaaaaggatcctggggtcctccagccagttcccttgggaggacggggtggtcagtatgatggaagtgcaggggtggatacaggagctgtggagccacttgggagtatagctattgagcctggggcagcgctcaatcctttgggaactaaaccggagccagaggaaggggagaatgagtgtcgcctgctaaagaaagtcaagtctgaaaagatggagtcccctgtttccacaccagcagtgctgccaatacaccttttggtgccagtggtcaacaatgacatctcatctccttgtgagcagatcatggttcgtacccgatcagttggggtcaacacatgtgatgtggctctggccacagagcctgagtgcttgggcccctgtgaacctggaactagcgtcaaccttgaaggcatcgtgtggcaggaaacagaagatgggatgttggtggtaaatgtaacgtggaggaacaagacatatgtaggtacactccttgactgcacacgacatgattgggcaccccccaggttctgtgactccccgaccagtgacctggaaatgcgcaatggccggggtagaggcaaacgcatgcgtcccaacagtaatacacctgtcaatgagacagccacagcctctgacagcaaagggaccagtaacagcagcaaaacccgggcaggagccaatagcaaaggccgtcggggcagccagaattcttcagagcaccgcccacctgccagcagcacttctgaggatgtcaaggccagcccttcctcagctaataagcggaaaaacaaacccctttcagacatggagctgaattctagctcagaggactccaaagggagcaagcgtgtccgtactaattccatgggctcagccactggcccccttcctgggacaaaggtagaacccactgttctggacagaaactgcccctcccccgtcctaattgactgtccccacccaaactgcaacaagaagtacaagcacatcaatggacttaagtaccaccaagctcatgcccatacagatgatgacagcaagccggaagcggatggggacagtgagtacggagaggaacctattctccatgcagatcttgggagctgcaacggtgcatctgtctcacaaaaaggttccttgtcccctgcccgctcagctacccccaaagttcgacttgtagagccccatagcccttctccttcaagcaaattcagcacaaaaggcctctgtaagaaaaagttgagtggggaaggggacacagaccttggggccttatccaatgatggctctgatgatggaccctcagtgatggatgaaacaagcaatgatgcctttgattctttagaaaggaagtgtatggaaaaagaaaaatgtaaaaaaccctctagtttaaaacctgaaaagattccttccaagagcctaaagtcagcccgtcccattgcccctgccatccccccacagcaaatctacaccttccagacagccaccttcacagcagcgagcccaggctcttcctcaggcttgaccgccacagtggcacaagccatgcccaacagtccccaactcaagcccattcagcccaagcccactgttatgggagaacctttcacagtcaaccctgccttgactccagccaaggacaagaaaaagaaagacaaaaaaaagaaggaatcttcaaaggaacttgaaagtcctctgacccctgggaaggtgtgtcgagcagaggaaggcaaaagcccattcagggaatcttcaggagatgggatgaaaatggaggggctcctaaatggctcatcagacccccaccaaagccgactggctagcatcaaggctgaagccgacaagatctacagtttcacggacaatgcccccagcccttccattggaggcagtagccgccttgaaaacactacccctactcagcccctgactcccttacatgtggtgacccagaatggagctgaagccagctcagtcaaaaccaacagccctgcatactctgacatctctgatgctggggaggatggggagggcaaggtagacagtgtcaaatcaaaggacgccgaacagttggttaaagaaggggctaagaaaactctttttccccctcagcctcagagcaaagactcaccatattaccaaggctttgagagttactattctccaagttatgcacagtccagccctggggctctgaaccccagcagccaggcaggagtggagagccaggccctgaagacaaaaagggatgaggaacctgagagcatagaagggaaagtgaagaacgatatctgtgaagaaaagaagcccgagctgagcagttccagtcagcagccctcggtcatccagcagcgtcccaatatgtacatgcagtccctgtactacaaccagtatgcctatgtacccccctatggctacagcgaccagagttaccacacccaccttctgagcactaacacggcttaccggcagcagtacgaagaacagcagaaacgccagagcttagagcagcagcagcggggagtggacaagaaggcagagatgggcctgaaggagcgggaggcagcactcaaggaagagtggaagcaaaagccgtcaattccaccaactctcaccaaggcccccagcctgacagacctggtgaaatcaggacctggcaaggccaaggagccaggggctgacccagccaaatcagtcatcattcccaagttagatgactcttcaaaactcccgggccaggcccctgaaggccttaaagtgaagctgagtgatgccagccacctaagcaaggaggcctctgaggccaagacaggtgctgagtgtggtcgacaggcagagatggatccaatactctggtaccgacaggaggcagagccccggatgtggacatatgtttatcctgccaagtactcagacatcaagtcagaggatgagcggtggaaggaggagcgggaccgcaaattgaaggaggaaaggagtcggagtaaggactctgtccccaaggaagatgggaaggaaagcacaagtagtgactgcaagctgcccacgtcagaggagtctcgccttgggagcaaggagccccggccaagtgtccatgtgcctgtgtcctccccacttacccagcaccagtcctacatcccctacatgcacggctattcctacagtcagtcctacgaccccaaccaccccagctaccggagcatgcctgctgtgatgatgcagaactacccaggttcctacctgccttccagctactctttttccccatatggcagcaaggtctcaggtggtgaagatgctgacaaggcacgagccagccccagtgtgacttgtaaatccagctcagagtccaaagccctggacatcttgcagcagcatgccagtcactacaagagcaagtctcccacgataagtgataaaacttctcaggagagagatcgaggaggctgtggggtggttgggggtggtggcagctgtagcagcgtcgggggagcaagtgggggtgaacggagtgttgaccggccccgcacctctccttcccagcgcctgatgtccacacaccaccaccaccaccacttggggtactcattgctcccagcacagtacaacttaccctatgcagcagggctttcttctacagccattgttgccagccaacaaggctcaactccctcactctacccaccccccaggaggtgagaatgacaccaagtgcccggataaagtcagcttcacgggcccggactggcttacccaaggaggtgctgaaggtgccgtttagacatcagttaaatggtgttgatcatcctgtttgccgtttccaccatgactgaaggcagacccttggctatctcacctccaccagacctccggactacctgaccctacctcttcctcaggagctggagagctggtacttagcaaaaatatttattctctcagccacagttatgactattgtggcctctgtggagatgaaggcacgggaagcaaccaggggaacatggcctcagcccagagaagccactgctctgttccccaagcccttggtctgctgctggagcagtaccagcccccccgcccaccagggagggacccccacccccaagcactgggtaaggtctgaagacagcacagcagccatacccctcaccatcattaccaccatcaccagattctgcatctccctagtgctttgcaccctgggaattggcagcatgtggaggaactagaatctcaggaaagaaattgggggttgttttctacataattgtgaaaacaaggtcttcaaatgtggagacttctccccatttacatgagcacatataaacgctcacaacctagcctggaaaggaagaccaaggcatctgccccaacatggccttgagctgcctgtgaggcagggggcaggggttccaacaccagcacagggctccccagggacactgggagcaagctggtgctggagcatgaatgacgtctgtgaagtagaacctgcgtccccactaagtcctgctgcttcttattccccaactccttgcccttttcccttccctcctaaccccttggtgcctttcccagggggatccccacactggtcttgcctcttcttttccactgcttggctcttaagcctcaggcagataaactagtattccccccagcttggggaaccttggagtctgccaggtcaccttagggcaaggcccagaaggcagcccctgggagcacccagcagttcttggagatgtcctgtcatctagccatctgatatcttcctcatttgaggccacagatatatacagcccaattcctctgtctacaagtacatgattttatatagctcagtctataacctccatgtgggccaatataagctgtgtttcttggtaacacatattttgtttgaggggccactggccatgggaggttatttgttccttagaccctggaataacacatccaagccattacttattagagtctcagaatgtactcagtggagctgtgctttgaggcagccaacatttctctgctctccttagaaatgcagtctcccaatggaagctttatactctttgtactgggaaagtgaggatgatttggtagctttattggggtcatgtcttccccaaggtgtggggagcttagcttacttggcttttgaggtatcatccctctgttctcccctcctatctttccatgaccctctggattgagagagagagataaagactgacagacaccagtgtaggctggaaaagggagtgtgtgaccagagtgccaaaagtgactaggagcaggaacttggctccgactcagtttggaaaatgggaaataggggacagtaagcacaatgcccagtagtagttgatttccaaggaccctggaaccctacacttgagaggcttagggtcaccatctgctcaagaggatcccctctgatctacaggccttttccctaggtttctgcctcctcgtttttgttcaagttgggttctgagtcctccccaaaaaccattgttttagacctcttggcagggccccaaaacagcctccctcatacccatcattccgtctgccttctgctgccctcatgggcagtgctctgagcagtgacctccctttcctccgtggaagtagctagtgcagacaccgtcatcccaccccacctgagtcaccccaaccaagagggtgactgaatttcagcctgattatgccctcctggggctcctgtgaggtggagccaaggttccctctctgttcctgtttgtttttaaatattgttgtgtgttttgtatctgtggcactggcctgcagcatactctgtatatattgtaaagaaaccgttaggagtaattttcttttgcattgggcaggcatggccctgcattcctgccctttccactcattctgtaacacagaggacgaacttctgtattagctgggcagccttgggttctccagaagagaacaggtttttcttttcctttttaatttttcttcttaaacatttggctctttgatcctcatatccaagtctcccctgaagagtaggagctgctcagaagagcaggtgaaagccaccatggcagatcctgatgcctgccgggcctagtcttccctctgaaataacatgaagcagcagctgtggagattcttgacaagtgctgagtgaaagatttgctgcccacctctacatggggaggagaaacacaggtgggagctacctgtggcatccatgacctagtcagagggatgagatgctcagcaggggtccccatcctatcccaccccacaaacaaaggctggaaaaatttgctaccaagggccaagaccaccagaccaagcctgtttatgagccacccctgcccaggccctcacagacattgctcacggggcttcccatagaggagaagctaaagagggagggggcctcatccccagatagatcaggcaaggcttggagagctgctctttaggatccacatcaactacttcctcattttaaggtatggcagttcccttcatccccttttcctgccttgtacatgtacatgtatgaaatttccttctcttaccgaactctctccacacatcacaaggtcaaagaaccacacgcttagaagggtaagagggcaccctatgaaatgaaatggtgatttcttgagtctcttttttccacgtttaaggggccatggcaggacttagagttgcgagttaagactgcagagggctagagaattatttcatacaggctttgaggccacccatgtcacttatcccgtataccctctcaccatccccttgtctactctgatgcccccaagatgcaactgggcagctagttggccccataattctgggcctttgttgtttgttttaattacttgggcatcccaggaagctttccagtgatctcctaccatgggcccccctcctgggatcaagcccctcccaggccctgtccccagcccctcctgccccagcccacccgcttgccttggtgctcagccctcccattgggagcaggttggggcgagctggaggcccgggctggaggggcagtgttgctgttcatagattttgttccattggcgttgctctgttgaatttaatttcagtcttcctgattcttcccttctgtaaagtgtacattaccaagttccttgtttttttatatatatatataaatatatatatatacaaactgtactctttttgcctttgtacattcaggcaagaagagaaaataaatctttttaagagacaatcaca

SEQ ID NO: 69833 - DNA, 2453 bp, Homo sapiens
cgctcaggagatggtgccaatgctggaggcctggttgctgctattgctcccaagggctcagagaaggcggctaaggcatcccgcagtgtagccggttccaaaaaggagaaggagaacagctcatctaagagcacgaagggagaagcgaaggagtggggacttgttcagaaaaggatcctggggtcctccagccagttcccttgggaggacggggtggtcagtatgatggaagtgcaggggtggatacaggagctgtggagccacttgggagtatagctattgagcctggggcagcgctcaatcctttgggaactaaaccggagccagaggaaggggagaatgagtgtcgcctgctaaagaaagtcaagtctgaaaagatggagtcccctgtttccacaccagcagtgctgccaatacaccttttggtgccagtggtcaacaatgacatctcatctccttgtgagcagatcatggttcgtacccgatcagttggggtcaacacatgtgatgtggctctggccacagagcctgagtgcttgggcccctgtgaacctggaactagcgtcaaccttgaaggcatcgtgtggcaggaaacagaagatgggatgttggtggtaaatgtaacgtggaggaacaagacatatgtaggtacactccttgactgcacacgacatgattgggcaccccccaggttctgtgactccccgaccagtgacctggaaatgcgcaatggccggggtagaggcaaacgcatgcgtcccaacagtaatacacctgtcaatgagacagccacagcctctgacagcaaagggaccagtaacagcagcaaaacccgggcaggagccaatagcaaaggccgtcggggcagccagaattcttcagagcaccgcccacctgccagcagcacttctgaggatgtcaaggccagcccttcctcagctaataagcggaaaaacaaacccctttcagacatggagctgaattctagctcagaggactccaaagggagcaagcgtgtccgtactaattccatgggctcagccactggcccccttcctgggacaaaggtagaacccactgttctggacagaaactgcccctcccccgtcctaattgactgtccccacccaaactgcaacaagaagtacaagcacatcaatggacttaagtaccaccaagctcatgcccatacagatgatgacagcaagccggaagcggatggggacagtgagtacggagaggaacctattctccatgcagatcttgggagctgcaacggtgcatctgtctcacaaaaaggttccttgtcccctgcccgctcagctacccccaaagttcgacttgtagagccccatagcccttctccttcaagcaaattcagcacaaaaggcctctgtaagaaaaagttgagtggggaaggggacacagaccttggggccttatccaatgatggctctgatgatggaccctcagtgatggatgaaacaagcaatgatgcctttgattctttagaaaggaagtgtatggaaaaagaaaaatgtaaaaaaccctctagtttaaaacctgaaaagattccttccaagagcctaaagtcagcccgtcccattgcccctgccatccccccacagcaaatctacaccttccagacagccaccttcacagcagcgagcccaggctcttcctcaggcttgaccgccacagtggcacaagccatgcccaacagtccccaactcaagcccattcagcccaagcccactgttatgggagaacctttcacagtcaaccctgccttgactccagccaaggacaagaaaaagaaagacaaaaaaaagaaggaatcttcaaaggaacttgaaagtcctctgacccctgggaaggtgtgtcgagcagaggaaggcaaaagcccattcagggaatcttcaggagatgggatgaaaatggaggggctcctaaatggctcatcagacccccaccaaagccgactggctagcatcaaggctgaagccgacaagatctacagtttcacggacaatgcccccagcccttccattggaggcagtagccgccttgaaaacactacccctactcagcccctgactcccttacatgtggtgacccagaatggagctgaagccagctcagtcaaaaccaacagccctgcatactctgacatctctgatgctggggaggatggggagggcaaggtagacagtgtcaaatcaaaggacgccgaacagttggttaaagaaggggctaagaaaactctttttccccctcagcctcagagcaaagactcaccatattaccaaggctttgagagttactattctccaagttatgcacagtccagccctggggctctgaaccccattcagcccaagcccactgttatgggagaacctttcacagtcaaccctgccttgactccagccaaggacaagaaaaagaaagac

SEQ ID NO: 69834 - DNA, 6928 bp, Homo sapiens
tgactctgaggatccccagtccgttcgactgagcccactgttatgggagaacctttcacagtcaaccctgccttgactccagccaaggacaagaaaaagaaagacaaaaaaaagaaggaatcttcaaaggaacttgaaagtcctctgacccctgggaaggtgtgtcgagcagaggaaggcaaaagcccattcagggaatcttcaggagatgggatgaaaatggaggggctcctaaatggctcatcagacccccaccaaagccgactggctagcatcaaggctgaagccgacaagatctacagtttcacggacaatgcccccagcccttccattggaggcagtagccgccttgaaaacactacccctactcagcccctgactcccttacatgtggtgacccagaatggagctgaagccagctcagtcaaaaccaacagccctgcatactctgacatctctgatgctggggaggatggggagggcaaggtagacagtgtcaaatcaaaggacgccgaacagttggttaaagaaggggctaagaaaactctttttccccctcagcctcagagcaaagactcaccatattaccaaggctttgagagttactattctccaagttatgcacagtccagccctggggctctgaaccccagcagccaggcaggagtggagagccaggccctgaagacaaaaagggatgaggaacctgagagcatagaagggaaagtgaagaacgatatctgtgaagaaaagaagcccgagctgagcagttccagtcagcagccctcggtcatccagcagcgtcccaatatgtacatgcagtccctgtactacaaccagtatgcctatgtacccccctatggctacagcgaccagagttaccacacccaccttctgagcactaacacggcttaccggcagcagtacgaagaacagcagaaacgccagagcttagagcagcagcagcggggagtggacaagaaggcagagatgggcctgaaggagcgggaggcagcactcaaggaagagtggaagcaaaagccgtcaattccaccaactctcaccaaggcccccagcctgacagacctggtgaaatcaggacctggcaaggccaaggagccaggggctgacccagccaaatcagtcatcattcccaagttagatgactcttcaaaactcccgggccaggcccctgaaggccttaaagtgaagctgagtgatgccagccacctaagcaaggaggcctctgaggccaagacaggtgctgagtgtggtcgacaggcagagatggatccaatactctggtaccgacaggaggcagagccccggatgtggacatatgtttatcctgccaagtactcagacatcaagtcagaggatgagcggtggaaggaggagcgggaccgcaaattgaaggaggaaaggagtcggagtaaggactctgtccccaaggaagatgggaaggaaagcacaagtagtgactgcaagctgcccacgtcagaggagtctcgccttgggagcaaggagccccggccaagtgtccatgtgcctgtgtcctccccacttacccagcaccagtcctacatcccctacatgcacggctattcctacagtcagtcctacgaccccaaccaccccagctaccggagcatgcctgctgtgatgatgcagaactacccaggttcctacctgccttccagctactctttttccccatatggcagcaaggtctcaggtggtgaagatgctgacaaggcacgagccagccccagtgtgacttgtaaatccagctcagagtccaaagccctggacatcttgcagcagcatgccagtcactacaagagcaagtctcccacgataagtgataaaacttctcaggagagagatcgaggaggctgtggggtggttgggggtggtggcagctgtagcagcgtcgggggagcaagtgggggtgaacggagtgttgaccggccccgcacctctccttcccagcgcctgatgtccacacaccaccaccaccaccacttggggtactcattgctcccagcacagtacaacttaccctatgcagcagggctttcttctacagccattgttgccagccaacaaggctcaactccctcactctacccaccccccaggaggtgagaatgacaccaagtgcccggataaagtcagcttcacgggcccggactggcttacccaaggaggtgctgaaggtgccgtttagacatcagttaaatggtgttgatcatcctgtttgccgtttccaccatgactgaaggcagacccttggctatctcacctccaccagacctccggactacctgaccctacctcttcctcaggagctggagagctggtacttagcaaaaatatttattctctcagccacagttatgactattgtggcctctgtggagatgaaggcacgggaagcaaccaggggaacatggcctcagcccagagaagccactgctctgttccccaagcccttggtctgctgctggagcagtaccagcccccccgcccaccagggagggacccccacccccaagcactgggtaaggtctgaagacagcacagcagccatacccctcaccatcattaccaccatcaccagattctgcatctccctagtgctttgcaccctgggaattggcagcatgtggaggaactagaatctcaggaaagaaattgggggttgttttctacataattgtgaaaacaaggtcttcaaatgtggagacttctccccatttacatgagcacatataaacgctcacaacctagcctggaaaggaagaccaaggcatctgccccaacatggccttgagctgcctgtgaggcagggggcaggggttccaacaccagcacagggctccccagggacactgggagcaagctggtgctggagcatgaatgacgtctgtgaagtagaacctgcgtccccactaagtcctgctgcttcttattccccaactccttgcccttttcccttccctcctaaccccttggtgcctttcccagggggatccccacactggtcttgcctcttcttttccactgcttggctcttaagcctcaggcagataaactagtattccccccagcttggggaaccttggagtctgccaggtcaccttagggcaaggcccagaaggcagcccctgggagcacccagcagttcttggagatgtcctgtcatctagccatctgatatcttcctcatttgaggccacagatatatacagcccaattcctctgtctacaagtacatgattttatatagctcagtctataacctccatgtgggccaatataagctgtgtttcttggtaacacatattttgtttgaggggccactggccatgggaggttatttgttccttagaccctggaataacacatccaagccattacttattagagtctcagaatgtactcagtggagctgtgctttgaggcagccaacatttctctgctctccttagaaatgcagtctcccaatggaagctttatactctttgtactgggaaagtgaggatgatttggtagctttattggggtcatgtcttccccaaggtgtggggagcttagcttacttggcttttgaggtatcatccctctgttctcccctcctatctttccatgaccctctggattgagagagagagataaagactgacagacaccagtgtaggctggaaaagggagtgtgtgaccagagtgccaaaagtgactaggagcaggaacttggctccgactcagtttggaaaatgggaaataggggacagtaagcacaatgcccagtagtagttgatttccaaggaccctggaaccctacacttgagaggcttagggtcaccatctgctcaagaggatcccctctgatctacaggccttttccctaggtttctgcctcctcgtttttgttcaagttgggttctgagtcctccccaaaaaccattgttttagacctcttggcagggccccaaaacagcctccctcatacccatcattccgtctgccttctgctgccctcatgggcagtgctctgagcagtgacctccctttcctccgtggaagtagctagtgcagacaccgtcatcccaccccacctgagtcaccccaaccaagagggtgactgaatttcagcctgattatgccctcctggggctcctgtgaggtggagccaaggttccctctctgttcctgtttgtttttaaatattgttgtgtgttttgtatctgtggcactggcctgcagcatactctgtatatattgtaaagaaaccgttaggagtaattttcttttgcattgggcaggcatggccctgcattcctgccctttccactcattctgtaacacagaggacgaacttctgtattagctgggcagccttgggttctccagaagagaacaggtttttcttttcctttttaatttttcttcttaaacatttggctctttgatcctcatatccaagtctcccctgaagagtaggagctgctcagaagagcaggtgaaagccaccatggcagatcctgatgcctgccgggcctagtcttccctctgaaataacatgaagcagcagctgtggagattcttgacaagtgctgagtgaaagatttgctgcccacctctacatggggaggagaaacacaggtgggagctacctgtggcatccatgacctagtcagagggatgagatgctcagcaggggtccccatcctatcccaccccacaaacaaaggctggaaaaatttgctaccaagggccaagaccaccagaccaagcctgtttatgagccacccctgcccaggccctcacagacattgctcacggggcttcccatagaggagaagctaaagagggagggggcctcatccccagatagatcaggcaaggcttggagagctgctctttaggatccacatcaactacttcctcattttaaggtatggcagttcccttcatccccttttcctgccttgtacatgtacatgtatgaaatttccttctcttaccgaactctctccacacatcacaaggtcaaagaaccacacgcttagaagggtaagagggcaccctatgaaatgaaatggtgatttcttgagtctcttttttccacgtttaaggggccatggcaggacttagagttgcgagttaagactgcagagggctagagaattatttcatacaggctttgaggccacccatgtcacttatcccgtataccctctcaccatccccttgtctactctgatgcccccaagatgcaactgggcagctagttggccccataattctgggcctttgttgtttgttttaattacttgggcatcccaggaagctttccagtgatctcctaccatgggcccccctcctgggatcaagcccctcccaggccctgtccccagcccctcctgccccagcccacccgcttgccttggtgctcagccctcccattgggagcaggttggggcgagctggaggcccgggctggaggggcagtgttgctgttcatagattttgttccattggcgttgctctgttgaatttaatttcagtcttcctgattcttcccttctgtaaagtgtacattaccaagttccttgtttttttatatatatatataaatatatatatatacaaactgtactctttttgcctttgtacattcaggcaagaagagaaaataaatctttttaagagacaatcacaaatctgtgagggctgctggttatttctcctggagtttgctgctgagctgcctcttccttcctcccaattttcctgttctccctcagctctcctgatcttcctggccctgctccatatgcatcctcagcttcactttccctggctgatggcaagctgttgaatccagtgtccagactacctgccttgtaacccttttctgcccagcattgttttctggcttggccactggcttagcccaggagctttactctgtgccctggcctcccctctcttcacctttagatttccattcaccgaagtggctttggacccctgggtactctgggacctgtttcctggaggccctggcttgggacactcacctgtgaaactatgcagctgggagctctctgcctaagagtttgcactatttaaacctgcctgggagttaggacggatggttttaggaatgaccggaaaactacccctaaaactcccccgacattccagcctctagaatgctctgatccagagctcagtggatgattcccagctggtggactcctgtggctaccccatcagaacaagggctaagggtttatgggtcaagagtatttgatcagaattttaaagggtggtatactctgaaacacagcccaaccaaaccattgtttggccgctttctcttttcctctaccttcctcatccccacttttttccctttctctctacttcctcttcttaattggctttggaattgaaatatatttttaaattatttgttgtatttattgaataaagtttttaatgtccctgttcttaaatttagacttagtttgcctttcacacaccacccccacccccaaaatattctaccttctaagttgctttttaaactgtagtgcagccttttgggtaccatatttctttcctgtcagtggtcttcaatagcaaaagttttttttgaaaagggaaatcttgactgggtgatttttttttgaagagggaaatcttgactgggtttccaatttagcctttgtgactctagccgtattgaagaggaatcaccaataggtggcagcagaatctcaagcatgtttcttgggaaaaagtaagggactgagttttgtcttggttctttttcatctgtcttgtcgattccttgtgtttgtttaatatctgcatcctaaactgccagctgcctctaggaattacctgccca

SEQ ID NO: 69835 - DNA, 7297 bp, Homo sapiens
cagcagttcttggagatgtcctgtcatctagccatctgatatcttcctcatttgaggccacagatatatacagcccaattcctctgtctacaagtacatgattttatatagctcagtctataacctccatgtgggccaatataagctgtgtttcttggtaacacatattttgtttgaggggccactggccatgggaggttatttgttccttagaccctggaataacacatccaagccattacttattagagtcccattgcccctgccatccccccacagcaaatctacaccttccagacagccaccttcacagcagcgagcccaggctcttcctcaggcttgaccgccacagtggcacaagccatgcccaacagtccccaactcaagcccattcagcccaagcccactgttatgggagaacctttcacagtcaaccctgccttgactccagccaaggacaagaaaaagaaagacaaaaaaaagaaggaatcttcaaaggaacttgaaagtcctctgacccctgggaaggtgtgtcgagcagaggaaggcaaaagcccattcagggaatcttcaggagatgggatgaaaatggaggggctcctaaatggctcatcagacccccaccaaagccgactggctagcatcaaggctgaagccgacaagatctacagtttcacggacaatgcccccagcccttccattggaggcagtagccgccttgaaaacactacccctactcagcccctgactcccttacatgtggtgacccagaatggagctgaagccagctcagtcaaaaccaacagccctgcatactctgacatctctgatgctggggaggatggggagggcaaggtagacagtgtcaaatcaaaggacgccgaacagttggttaaagaaggggctaagaaaactctttttccccctcagcctcagagcaaagactcaccatattaccaaggctttgagagttactattctccaagttatgcacagtccagccctggggctctgaaccccagcagccaggcaggagtggagagccaggccctgaagacaaaaagggatgaggaacctgagagcatagaagggaaagtgaagaacgatatctgtgaagaaaagaagcccgagctgagcagttccagtcagcagccctcggtcatccagcagcgtcccaatatgtacatgcagtccctgtactacaaccagtatgcctatgtacccccctatggctacagcgaccagagttaccacacccaccttctgagcactaacacggcttaccggcagcagtacgaagaacagcagaaacgccagagcttagagcagcagcagcggggagtggacaagaaggcagagatgggcctgaaggagcgggaggcagcactcaaggaagagtggaagcaaaagccgtcaattccaccaactctcaccaaggcccccagcctgacagacctggtgaaatcaggacctggcaaggccaaggagccaggggctgacccagccaaatcagtcatcattcccaagttagatgactcttcaaaactcccgggccaggcccctgaaggccttaaagtgaagctgagtgatgccagccacctaagcaaggaggcctctgaggccaagacaggtgctgagtgtggtcgacaggcagagatggatccaatactctggtaccgacaggaggcagagccccggatgtggacatatgtttatcctgccaagtactcagacatcaagtcagaggatgagcggtggaaggaggagcgggaccgcaaattgaaggaggaaaggagtcggagtaaggactctgtccccaaggaagatgggaaggaaagcacaagtagtgactgcaagctgcccacgtcagaggagtctcgccttgggagcaaggagccccggccaagtgtccatgtgcctgtgtcctccccacttacccagcaccagtcctacatcccctacatgcacggctattcctacagtcagtcctacgaccccaaccaccccagctaccggagcatgcctgctgtgatgatgcagaactacccaggttcctacctgccttccagctactctttttccccatatggcagcaaggtctcaggtggtgaagatgctgacaaggcacgagccagccccagtgtgacttgtaaatccagctcagagtccaaagccctggacatcttgcagcagcatgccagtcactacaagagcaagtctcccacgataagtgataaaacttctcaggagagagatcgaggaggctgtggggtggttgggggtggtggcagctgtagcagcgtcgggggagcaagtgggggtgaacggagtgttgaccggccccgcacctctccttcccagcgcctgatgtccacacaccaccaccaccaccacttggggtactcattgctcccagcacagtacaacttaccctatgcagcagggctttcttctacagccattgttgccagccaacaaggctcaactccctcactctacccaccccccaggaggtgagaatgacaccaagtgcccggataaagtcagcttcacgggcccggactggcttacccaaggaggtgctgaaggtgccgtttagacatcagttaaatggtgttgatcatcctgtttgccgtttccaccatgactgaaggcagacccttggctatctcacctccaccagacctccggactacctgaccctacctcttcctcaggagctggagagctggtacttagcaaaaatatttattctctcagccacagttatgactattgtggcctctgtggagatgaaggcacgggaagcaaccaggggaacatggcctcagcccagagaagccactgctctgttccccaagcccttggtctgctgctggagcagtaccagcccccccgcccaccagggagggacccccacccccaagcactgggtaaggtctgaagacagcacagcagccatacccctcaccatcattaccaccatcaccagattctgcatctccctagtgctttgcaccctgggaattggcagcatgtggaggaactagaatctcaggaaagaaattgggggttgttttctacataattgtgaaaacaaggtcttcaaatgtggagacttctccccatttacatgagcacatataaacgctcacaacctagcctggaaaggaagaccaaggcatctgccccaacatggccttgagctgcctgtgaggcagggggcaggggttccaacaccagcacagggctccccagggacactgggagcaagctggtgctggagcatgaatgacgtctgtgaagtagaacctgcgtccccactaagtcctgctgcttcttattccccaactccttgcccttttcccttccctcctaaccccttggtgcctttcccagggggatccccacactggtcttgcctcttcttttccactgcttggctcttaagcctcaggcagataaactagtattccccccagcttggggaaccttggagtctgccaggtcaccttagggcaaggcccagaaggcagcccctgggagcacccagcagttcttggagatgtcctgtcatctagccatctgatatcttcctcatttgaggccacagatatatacagcccaattcctctgtctacaagtacatgattttatatagctcagtctataacctccatgtgggccaatataagctgtgtttcttggtaacacatattttgtttgaggggccactggccatgggaggttatttgttccttagaccctggaataacacatccaagccattacttattagagtctcagaatgtactcagtggagctgtgctttgaggcagccaacatttctctgctctccttagaaatgcagtctcccaatggaagctttatactctttgtactgggaaagtgaggatgatttggtagctttattggggtcatgtcttccccaaggtgtggggagcttagcttacttggcttttgaggtatcatccctctgttctcccctcctatctttccatgaccctctggattgagagagagagataaagactgacagacaccagtgtaggctggaaaagggagtgtgtgaccagagtgccaaaagtgactaggagcaggaacttggctccgactcagtttggaaaatgggaaataggggacagtaagcacaatgcccagtagtagttgatttccaaggaccctggaaccctacacttgagaggcttagggtcaccatctgctcaagaggatcccctctgatctacaggccttttccctaggtttctgcctcctcgtttttgttcaagttgggttctgagtcctccccaaaaaccattgttttagacctcttggcagggccccaaaacagcctccctcatacccatcattccgtctgccttctgctgccctcatgggcagtgctctgagcagtgacctccctttcctccgtggaagtagctagtgcagacaccgtcatcccaccccacctgagtcaccccaaccaagagggtgactgaatttcagcctgattatgccctcctggggctcctgtgaggtggagccaaggttccctctctgttcctgtttgtttttaaatattgttgtgtgttttgtatctgtggcactggcctgcagcatactctgtatatattgtaaagaaaccgttaggagtaattttcttttgcattgggcaggcatggccctgcattcctgccctttccactcattctgtaacacagaggacgaacttctgtattagctgggcagccttgggttctccagaagagaacaggtttttcttttcctttttaatttttcttcttaaacatttggctctttgatcctcatatccaagtctcccctgaagagtaggagctgctcagaagagcaggtgaaagccaccatggcagatcctgatgcctgccgggcctagtcttccctctgaaataacatgaagcagcagctgtggagattcttgacaagtgctgagtgaaagatttgctgcccacctctacatggggaggagaaacacaggtgggagctacctgtggcatccatgacctagtcagagggatgagatgctcagcaggggtccccatcctatcccaccccacaaacaaaggctggaaaaatttgctaccaagggccaagaccaccagaccaagcctgtttatgagccacccctgcccaggccctcacagacattgctcacggggcttcccatagaggagaagctaaagagggagggggcctcatccccagatagatcaggcaaggcttggagagctgctctttaggatccacatcaactacttcctcattttaaggtatggcagttcccttcatccccttttcctgccttgtacatgtacatgtatgaaatttccttctcttaccgaactctctccacacatcacaaggtcaaagaaccacacgcttagaagggtaagagggcaccctatgaaatgaaatggtgatttcttgagtctcttttttccacgtttaaggggccatggcaggacttagagttgcgagttaagactgcagagggctagagaattatttcatacaggctttgaggccacccatgtcacttatcccgtataccctctcaccatccccttgtctactctgatgcccccaagatgcaactgggcagctagttggccccataattctgggcctttgttgtttgttttaattacttgggcatcccaggaagctttccagtgatctcctaccatgggcccccctcctgggatcaagcccctcccaggccctgtccccagcccctcctgccccagcccacccgcttgccttggtgctcagccctcccattgggagcaggttggggcgagctggaggcccgggctggaggggcagtgttgctgttcatagattttgttccattggcgttgctctgttgaatttaatttcagtcttcctgattcttcccttctgtaaagtgtacattaccaagttccttgtttttttatatatatatataaatatatatatatacaaactgtactctttttgcctttgtacattcaggcaagaagagaaaataaatctttttaagagacaatcacaaatctgtgagggctgctggttatttctcctggagtttgctgctgagctgcctcttccttcctcccaattttcctgttctccctcagctctcctgatcttcctggccctgctccatatgcatcctcagcttcactttccctggctgatggcaagctgttgaatccagtgtccagactacctgccttgtaacccttttctgcccagcattgttttctggcttggccactggcttagcccaggagctttactctgtgccctggcctcccctctcttcacctttagatttccattcaccgaagtggctttggacccctgggtactctgggacctgtttcctggaggccctggcttgggacactcacctgtgaaactatgcagctgggagctctctgcctaagagtttgcactatttaaacctgcctgggagttaggacggatggttttaggaatgaccggaaaactacccctaaaactcccccgacattccagcctctagaatgctctgatccagagctcagtggatgattcccagctggtggactcctgtggctaccccatcagaacaagggctaagggtttatgggtcaagagtatttgatcagaattttaaagggtggtatactctgaaacacagcccaaccaaaccattgtttggccgctttctcttttcctctaccttcctcatccccacttttttccctttctctctacttcctcttcttaattggctttggaattgaaatatatttttaaattatttgttgtatttattgaataaagtttttaatgtccctgttcttaaatttagacttagtttgcctttcacacaccacccccacccccaaaatattctaccttctaagttgctttttaaactgtagtgcagccttttgggtaccatatttctttcctgtcagtggtcttcaatagcaaaagttttttttgaaaagggaaatcttgactgggtgatttttttttgaagagggaaatcttgactgggtttccaatttagcctttgtgactctagccgtattgaagaggaatcaccaataggtggcagcagaatctcaagcatgtttcttgggaaaaagtaagggactgagttttgtcttggttctttttcatctgtcttgtcgattccttgtgtttgtttaatatctgcatcctaaactgccagctgcctctaggaattacctgccca

SEQ ID NO: 69836 - DNA, 3634 bp, Homo sapiens
ccgcccccgattcccgggtcgccccgcgtccgctgtgtttcttggtaacacatattttgtttgaggggccactggccatgggaggttatttgttccttagaccctggaataacacatccaagccattacttattagagtctcagaatgtactcagtggagctgtgctttgaggcagccaacatttctctgctctccttagaaatgcagtctcccaatggaagctttatactctttgtactgggaaagtgaggatgatttggtagctttattggggtcatgtcttccccaaggtgtggggagcttagcttacttggcttttgaggtatcatccctctgttctcccctcctatctttccatgaccctctggattgagagagagagataaagactgacagacaccagtgtaggctggaaaagggagtgtgtgaccagagtgccaaaagtgactaggagcaggaacttggctccgactcagtttggaaaatgggaaataggggacagtaagcacaatgcccagtagtagttgatttccaaggaccctggaaccctacacttgagaggcttagggtcaccatctgctcaagaggatcccctctgatctacaggccttttccctaggtttctgcctcctcgtttttgttcaagttgggttctgagtcctccccaaaaaccattgttttagacctcttggcagggccccaaaacagcctccctcatacccatcattccgtctgccttctgctgccctcatgggcagtgctctgagcagtgacctccctttcctccgtggaagtagctagtgcagacaccgtcatcccaccccacctgagtcaccccaaccaagagggtgactgaatttcagcctgattatgccctcctggggctcctgtgaggtggagccaaggttccctctctgttcctgtttgtttttaaatattgttgtgtgttttgtatctgtggcactggcctgcagcatactctgtatatattgtaaagaaaccgttaggagtaattttcttttgcattgggcaggcatggccctgcattcctgccctttccactcattctgtaacacagaggacgaacttctgtattagctgggcagccttgggttctccagaagagaacaggtttttcttttcctttttaatttttcttcttaaacatttggctctttgatcctcatatccaagtctcccctgaagagtaggagctgctcagaagagcaggtgaaagccaccatggcagatcctgatgcctgccgggcctagtcttccctctgaaataacatgaagcagcagctgtggagattcttgacaagtgctgagtgaaagatttgctgcccacctctacatggggaggagaaacacaggtgggagctacctgtggcatccatgacctagtcagagggatgagatgctcagcaggggtccccatcctatcccaccccacaaacaaaggctggaaaaatttgctaccaagggccaagaccaccagaccaagcctgtttatgagccacccctgcccaggccctcacagacattgctcacggggcttcccatagaggagaagctaaagagggagggggcctcatccccagatagatcaggcaaggcttggagagctgctctttaggatccacatcaactacttcctcattttaaggtatggcagttcccttcatccccttttcctgccttgtacatgtacatgtatgaaatttccttctcttaccgaactctctccacacatcacaaggtcaaagaaccacacgcttagaagggtaagagggcaccctatgaaatgaaatggtgatttcttgagtctcttttttccacgtttaaggggccatggcaggacttagagttgcgagttaagactgcagagggctagagaattatttcatacaggctttgaggccacccatgtcacttatcccgtataccctctcaccatccccttgtctactctgatgcccccaagatgcaactgggcagctagttggccccataattctgggcctttgttgtttgttttaattacttgggcatcccaggaagctttccagtgatctcctaccatgggcccccctcctgggatcaagcccctcccaggccctgtccccagcccctcctgccccagcccacccgcttgccttggtgctcagccctcccattgggagcaggttggggcgagctggaggcccgggctggaggggcagtgttgctgttcatagattttgttccattggcgttgctctgttgaatttaatttcagtcttcctgattcttcccttctgtaaagtgtacattaccaagttccttgtttttttatatatatatataaatatatatatatacaaactgtactctttttgcctttgtacattcaggcaagaagagaaaataaatctttttaagagacaatcacaaatctgtgagggctgctggttatttctcctggagtttgctgctgagctgcctcttccttcctcccaattttcctgttctccctcagctctcctgatcttcctggccctgctccatatgcatcctcagcttcactttccctggctgatggcaagctgttgaatccagtgtccagactacctgccttgtaacccttttctgcccagcattgttttctggcttggccactggcttagcccaggagctttactctgtgccctggcctcccctctcttcacctttagatttccattcaccgaagtggctttggacccctgggtactctgggacctgtttcctggaggccctggcttgggacactcacctgtgaaactatgcagctgggagctctctgcctaagagtttgcactatttaaacctgcctgggagttaggacggatggttttaggaatgaccggaaaactacccctaaaactcccccgacattccagcctctagaatgctctgatccagagctcagtggatgattcccagctggtggactcctgtggctaccccatcagaacaagggctaagggtttatgggtcaagagtatttgatcagaattttaaagggtggtatactctgaaacacagcccaaccaaaccattgtttggccgctttctcttttcctctaccttcctcatccccacttttttccctttctctctacttcctcttcttaattggctttggaattgaaatatatttttaaattatttgttgtatttattgaataaagtttttaatgtccctgttcttaaatttagacttagtttgcctttcacacaccacccccacccccaaaatattctaccttctaagttgctttttaaactgtagtgcagccttttgggtaccatatttctttcctgtcagtggtcttcaatagcaaaagttttttttgaaaagggaaatcttgactgggtgatttttttttgaagagggaaatcttgactgggtttccaatttagcctttgtgactctagccgtattgaagaggaatcaccaataggtggcagcagaatctcaagcatgtttcttgggaaaaagtaagggactgagttttgtcttggttctttttcatctgtcttgtcgattccttgtgtttgtttaatatctgcatcctaaactgccagctgcctctaggaattacctgccca

SEQ ID NO: 69837 - DNA, 1831 bp, Homo sapiens
ggtaccgcttagggcttcgagtgtgcaagagggttacaagtgagtcagcgcttggggctttagagttgcgagttaagactgcagagggctagagaattatttcatacaggctttgaggccacccatgtcacttatcccgtataccctctcaccatccccttgtctactctgatgcccccaagatgcaactgggcagctagttggccccataattctgggcctttgttgtttgttttaattacttgggcatcccaggaagctttccagtgatctcctaccatgggcccccctcctgggatcaagcccctcccaggccctgtccccagcccctcctgccccagcccacccgcttgccttggtgctcagccctcccattgggagcaggttggggcgagctggaggcccgggctggaggggcagtgttgctgttcatagattttgttccattggcgttgctctgttgaatttaatttcagtcttcctgattcttcccttctgtaaagtgtacattaccaagttccttgtttttttatatatatatataaatatatatatatacaaactgtactctttttgcctttgtacattcaggcaagaagagaaaataaatctttttaagagacaatcacaaatctgtgagggctgctggttatttctcctggagtttgctgctgagctgcctcttccttcctcccaattttcctgttctccctcagctctcctgatcttcctggccctgctccatatgcatcctcagcttcactttccctggctgatggcaagctgttgaatccagtgtccagactacctgccttgtaacccttttctgcccagcattgttttctggcttggccactggcttagcccaggagctttactctgtgccctggcctcccctctcttcacctttagatttccattcaccgaagtggctttggacccctgggtactctgggacctgtttcctggaggccctggcttgggacactcacctgtgaaactatgcagctgggagctctctgcctaagagtttgcactatttaaacctgcctgggagttaggacggatggttttaggaatgaccggaaaactacccctaaaactcccccgacattccagcctctagaatgctctgatccagagctcagtggatgattcccagctggtggactcctgtggctaccccatcagaacaagggctaagggtttatgggtcaagagtatttgatcagaattttaaagggtggtatactctgaaacacagcccaaccaaaccattgtttggccgctttctcttttcctctaccttcctcatccccacttttttccctttctctctacttcctcttcttaattggctttggaattgaaatatatttttaaattatttgttgtatttattgaataaagtttttaatgtccctgttcttaaatttagacttagtttgcctttcacacaccacccccacccccaaaatattctaccttctaagttgctttttaaactgtagtgcagccttttgggtaccatatttctttcctgtcagtggtcttcaatagcaaaagttttttttgaaaagggaaatcttgactgggtgatttttttttgaagagggaaatcttgactgggtttccaatttagcctttgtgactctagccgtattgaagaggaatcaccaataggtggcagcagaatctcaagcatgtttcttgggaaaaagtaagggactgagttttgtcttggttctttttcatctgtcttgtcgattccttgtgtttgtttaatatctgcatcctaaactgccagctgcctctaggaattacctgccca

SEQ ID NO: 69838 - DNA, 896 bp, Homo sapiens
cgctcaggagatggtgccaatgctggaggcctggttgctgctattgctcccaagggctcagagaaggcggctaaggcatcccgcagtgtagccggttccaaaaaggagaaggagaacagctcatctaagagcacgaagggagaagcgaaggagtggggacttgttcagaaaaggatcctggggtcctccagccagttcccttgggaggacggggtggtcagtatgatggaagtgcaggggtggatacaggagctgtggagccacttgggagtatagctattgagcctggggcagcgctcaatcctttgggaactaaaccggagccagaggaaggggagaatgagtgtcgcctgctaaagaaagtcaagtctgaaaagatggagtcccctgtttccacaccagcagtgctgccaatacaccttttggtgccagtggtcaacaatgacatctcatctccttgtgagcagatcatggttcgtacccgatcagttggggtcaacacatgtgatgtggctctggccacagagcctgagtgcttgggcccctgtgaacctggaactagcgtcaaccttgaaggcatcgtgtggcaggaaacagaagatgggatgttggtggtaaatgtaacgtggaggaacaagacatatgtaggtacactccttgactgcacacgacatgattgggcaccccccaggttctgtgactccccgaccagtgacctggaaatgcgcaatggccggggtagaggcaaacgcatgcgtcccaacagtaatacacctgtcaatgagacagccacagcctctgacagcaaagggaccagtaacagcagcaaaacccgggcaggagccaatagcaaaggccgtcggggcagccagaccacaaatatcggggtgcgcagc

SEQ ID NO: 69839 - DNA, 1912 bp, Homo sapiens
tgtctaggttcagcctactagggagatctgacacacatctgcactgatcaccgagtaaactgtttcacgttagacctgtaacccaaggagatgtgtatagagctgaaactgaagaaattcctaaaatattccagatactatatgcaaatgaaggtgaatgtagaaaagatgtagagatggaaccagtacaacaagctgaaaaaactaatttccaaaatcacaaaggccatgagtttattcctacactctaccactttcctgccaattgtgatgcctgtgccaaacctctctggcatgtttttaagccaccccctgccctagagtgtcgaagatgccatgttaagtgccacagagatcacttagataagaaagaggacttaatttgtccatgtaaagtaagttatgatgtaacatcagcaagagatatgctgctgttagcatgttctcaggatgaacaaaaaaaatgggtaactcatttagtaaagaaaatccctaagaatccaccatctggttttgttcgtgcttcccctcgaacgctttctacaagatccactgcaaatcagtctttccggaaagtggtcaaaaatacatctggaaaaactagttaaccatgtgaccgagtgccttgtggaatcgtgtgggatgctacctgataaaccaggcttctttaaccatgcagagcagacaggctgtttctttgacacaaatatcacaggcttcagggtgctgcctttttggatttataagaaaatggctgtcagtcgtgatagaacagagttttcctcatatgagtaagaggaagggactttcactttcaagtggaacggccatcactatcaagatcagctcatggaaggagtaaagaaaatatctcaaaatgagacaaactgaagttttgttttttttttaatgacttaagtttttgtgctcttgcaagactatacaaaactattttaagaaagcagtgatatcacttgaacttcagtgccctcactgtagaatttaaaagccttactgttgattgcccatggtggacttgatggagaaattaaatatctttcattatgctttacaaaatactgtatatgtttcagcaagtttggggaatgggagaggacgaaaaaaagttacatttaatctatgcatttttgccaagccatattgagttattttactactagagacattaggaaactaactgtacaaaagaaccaagtttaaaagcattttgtggggtacatcatttctataattgtataatgtatttctttgtggttttaaatgataaagacattaagttaacaaacatataagaaatgtatgcactgtttgaaatgtaaattattcttagaacactttcaatgggggttgcattgtccttttagtgccttaatttgagataattattttactgccatgagtaagtatagaaatttcaaaaaatgtattttcaaaaaattatgtgtgtccgtgagtttttcattgataattggtttaatttaaaatatttagaggtttgttggactttcataaattgagtacaatctttgcatcaaactacctgctacaataatgactttataaaactgcaaaaaatgtagaaggttgcaccaatataaaaaggaaatatggcaatacatccatgatgttttccagttaacataggaattaccagataaatactgttaaactcttgtccggtaacaagagttgattcatatggacagtatgatttattgtttctttttttaaccaaatacctcctcagtaatttataatggctttgcagtaatgtctatcagataagaagcactggaaaaccgatcgtctctaggatgatatgcatgtttcaagtggtattgaaagccgcactgatggatatgtaataataaacatatctgttattaatata

SEQ ID NO: 69840 - DNA, 717 bp, Homo sapiens
gtacatcattatggaggtgctagttgtaatgctttagtgatttaaaatgataaacttttcttttcatacagataaagacacaataaataaaatcagagatttacgaatgaaagctgaagattatgaagtagtgaaggtgattggtagaggtgcatttggagaagttcaattggtaggttattttaatgagaatacaaaaggactttattaaattaaaataatccacttgtgtgtttaacatattatttgggaaaatactgtttttatagaattgttgctttaagttcctttagacattgttgcctgagggtatggaagcctagtgtcaaatctagccatagtgggaagtgttttccccaagtatctgtggcagaaaagaagtgtcaggcatcagaagataaatctttgctcctaatattagactaaaatgctgtagaacagtaagctttataaacaggaagcagcttacatagccgtgtggaggggggaaagtgtcttgtaatataggaaataaaaatttttttaaaacattacttctgataattaaagtcttgacattagctacttggaataatttggcagaagagaagaaataaaaataactgaaacagtaaggctaaattatttagcaagtattcaaagcacttagtaaattgttctgtgaaaccttgagcttaaatgtaacaaaaggttcattattttcccttttcaatttta

SEQ ID NO: 69841 - DNA, 6413 bp, Homo sapiens
cggtctccgtttgtttgaacaggaaggcggacatattagtccctctcagcccccctcgccccaccccccaggcattcgccgccgcgactcgccctttccccggctgggaccgcagcccctcccagaagctcccccatcagcagccgccgggacccaactatcgtcttcctcttcgcccgctctccagcctttcctctgctaagtctccatcgggcatcgacctcgccctgccccaccggacaccgtagcagcagccccagcagcgacgggacaaaatgggagagtgaggctgtcctgcgtggaccagctcgtggccgagactgatcggtgcgtcgggccgggccgagtagagccggggacgcggggctagaccgtctacagcgcctctgagcggagcgggcccggcccgtggcccgagcggcggccgcagctggcacagctcctcacccgccctttgctttcgcctttcctcttctccctcccttgttgcccggagggagtctccaccctgcttctctttctctacccgctcctgcccatctcgggacggggacccctccatggcgacggcggccggggcccgctagactgaagcacctcgccggagcgacgaggctggtggcgacggcgctgtcggctgtcgtgaggggctgccgggtgggatgcgactttgggcgtccgagcggctgtgggtcgctgttgcccccggcccggggtctggagagcggaggtcccctcagtgaggggaagacgggggaaccgggcgcacctggtgaccctgaggttccggctcctccgccccgcggctgcgaacccaccgcggaggaagttggttgaaattgctttccgctgctggtgctggtaagagggcattgtcacagcagcagcaacatgtcgactggggacagttttgagactcgatttgaaaaaatggacaacctgctgcgggatcccaaatcggaagtgaattcggattgtttgctggatggattggatgctttggtatatgatttggattttcctgccttaagaaaaaacaaaaatattgacaactttttaagcagatataaagacacaataaataaaatcagagatttacgaatgaaagctgaagattatgaagtagtgaaggtgattggtagaggtgcatttggagaagttcaattggtaaggcataaatccaccaggaaggtatatgctatgaagcttctcagcaaatttgaaatgataaagagatctgattctgcttttttctgggaagaaagggacatcatggcttttgccaacagtccttgggttgttcagcttttttatgcattccaagatgatcgttatctctacatggtgatggaatacatgcctggtggagatcttgtaaacttaatgagcaactatgatgtgcctgaaaaatgggcacgattctatactgcagaagtagttcttgcattggatgcaatccattccatgggttttattcacagagatgtgaagcctgataacatgctgctggataaatctggacatttgaagttagcagattttggtacttgtatgaagatgaataaggaaggcatggtacgatgtgatacagcggttggaacacctgattatatttcccctgaagtattaaaatcccaaggtggtgatggttattatggaagagaatgtgactggtggtcggttggggtatttttatacgaaatgcttgtaggtgatacacctttttatgcagattctttggttggaacttacagtaaaattatgaaccataaaaattcacttacctttcctgatgataatgacatatcaaaagaagcaaaaaaccttatttgtgccttccttactgacagggaagtgaggttagggcgaaatggtgtagaagaaatcaaacgacatctcttcttcaaaaatgaccagtgggcttgggaaacgctccgagacactgtagcaccagttgtacccgatttaagtagtgacattgatactagtaattttgatgacttggaagaagataaaggagaggaagaaacattccctattcctaaagctttcgttggcaatcaactaccttttgtaggatttacatattatagcaatcgtagatacttatcttcagcaaatcctaatgataacagaactagctccaatgcagataaaagcttgcaggaaagtttgcaaaaaacaatctataagctggaagaacagctgcataatgaaatgcagttaaaagatgaaatggagcagaagtgcagaacctcaaacataaaactagacaagataatgaaagaattggatgaagagggaaatcaaagaagaaatctagaatctacagtgtctcagattgagaaggagaaaatgttgctacagcatagaattaatgagtaccaaagaaaagctgaacaggaaaatgagaagagaagaaatgtagaaaatgaagtttctacattaaaggatcagttggaagacttaaagaaagtcagtcagaattcacagcttgctaatgagaagctgtcccagttacaaaagcagctagaagaagccaatgacttacttaggacagaatcggacacagctgtaagattgaggaagagtcacacagagatgagcaagtcaattagtcagttagagtccctgaacagagagttgcaagagagaaatcgaattttagagaattctaagtcacaaacagacaaagattattaccagctgcaagctatattagaagctgaacgaagagacagaggtcatgattctgagatgattggagaccttcaagctcgaattacatctttacaagaggaggtgaagcatctcaaacataatctcgaaaaagtggaaggagaaagaaaagaggctcaagacatgcttaatcactcagaaaaggaaaagaataatttagagatagatttaaactacaaacttaaatcattacaacaacggttagaacaagaggtaaatgaacacaaagtaaccaaagctcgtttaactgacaaacatcaatctattgaagaggcaaagtctgtggcaatgtgtgagatggaaaaaaagctgaaagaagaaagagaagctcgagagaaggctgaaaatcgggttgttcagattgagaaacagtgttccatgctagacgttgatctgaagcaatctcagcagaaactagaacatttgactggaaataaagaaaggatggaggatgaagttaagaatctaaccctgcaactggagcaggaatcaaataagcggctgttgttacaaaatgaattgaagactcaagcatttgaggcagacaatttaaaaggtttagaaaagcagatgaaacaggaaataaatactttattggaagcaaagagattattagaatttgagttagctcagcttacgaaacagtatagaggaaatgaaggacagatgcgggagctacaagatcagcttgaagctgagcaatatttctcgacactttataaaacccaggtaaaggaacttaaagaagaaattgaagaaaaaaacagagaaaatttaaagaaaatacaggaactacaaaatgaaaaagaaactcttgctactcagttggatctagcagaaacaaaagctgagtctgagcagttggcgcgaggccttctggaagaacagtattttgaattgacgcaagaaagcaagaaagctgcttcaagaaatagacaagagattacagataaagatcacactgttagtcggcttgaagaagcaaacagcatgctaaccaaagatattgaaatattaagaagagagaatgaagagctaacagagaaaatgaagaaggcagaggaagaatataaactggagaaggaggaggagatcagtaatcttaaggctgcctttgaaaagaatatcaacactgaacgaacccttaaaacacaggctgttaacaaattggcagaaataatgaatcgaaaagattttaaaattgatagaaagaaagctaatacacaagatttgagaaagaaagaaaaggaaaatcgaaagctgcaactggaactcaaccaagaaagagagaaattcaaccagatggtagtgaaacatcagaaggaactgaatgacatgcaagcgcaattggtagaagaatgtgcacataggaatgagcttcagatgcagttggccagcaaagagagtgatattgagcaattgcgtgctaaacttttggacctctcggattctacaagtgttgctagttttcctagtgctgatgaaactgatggtaacctcccagagtcaagaattgaaggttggctttcagtaccaaatagaggaaatatcaaacgatatggctggaagaaacagtatgttgtggtaagcagcaaaaaaattttgttctataatgacgaacaagataaggagcaatccaatccatctatggtattggacatagataaactgtttcacgttagacctgtaacccaaggagatgtgtatagagctgaaactgaagaaattcctaaaatattccagatactatatgcaaatgaaggtgaatgtagaaaagatgtagagatggaaccagtacaacaagctgaaaaaactaatttccaaaatcacaaaggccatgagtttattcctacactctaccactttcctgccaattgtgatgcctgtgccaaacctctctggcatgtttttaagccaccccctgccctagagtgtcgaagatgccatgttaagtgccacagagatcacttagataagaaagaggacttaatttgtccatgtaaagtaagttatgatgtaacatcagcaagagatatgctgctgttagcatgttctcaggatgaacaaaaaaaatgggtaactcatttagtaaagaaaatccctaagaatccaccatctggttttgttcgtgcttcccctcgaacgctttctacaagatccactgcaaatcagtctttccggaaagtggtcaaaaatacatctggaaaaactagttaaccatgtgaccgagtgccttgtggaatcgtgtgggatgctacctgataaaccaggcttctttaaccatgcagagcagacaggctgtttctttgacacaaatatcacaggcttcagggttaagattgctgtttttctgtccttgctttggcacaacacactgagggttttttttattgcgggtttgcctacaggtagattagattaattattactatgtaatgcaagtacagttgggggaaagcttaggtagatatattttttttaaaaggtgctgcctttttggatttataagaaaatggctgtcagtcgtgatagaacagagttttcctcatatgagtaagaggaagggactttcactttcaagtggaacggccatcactatcaagatcagctcatggaaggagtaaagaaaatatctcaaaatgagacaaactgaagttttgttttttttttaatgacttaagtttttgtgctcttgcaagactatacaaaactattttaagaaagcagtgatatcacttgaacttcagtgccctcactgtagaatttaaaagccttactgttgattgcccatggtggacttgatggagaaattaaatatctttcattatgctttacaaaatactgtatatgtttcagcaagtttggggaatgggagaggacgaaaaaaagttacatttaatctatgcatttttgccaagccatattgagttattttactactagagacattaggaaactaactgtacaaaagaaccaagtttaaaagcattttgtggggtacatcatttctataattgtataatgtatttctttgtggttttaaatgataaagacattaagttaacaaacatataagaaatgtatgcactgtttgaaatgtaaattattcttagaacactttcaatgggggttgcattgtccttttagtgccttaatttgagataattattttactgccatgagtaagtatagaaatttcaaaaaatgtattttcaaaaaattatgtgtgtccgtgagtttttcattgataattggtttaatttaaaatatttagaggtttgttggactttcataaattgagtacaatctttgcatcaaactacctgctacaataatgactttataaaactgcaaaaaatgtagaaggttgcaccaatataaaaaggaaatatggcaatacatccatgatgttttccagttaacataggaattaccagataaatactgttaaactcttgtccggtaacaagagttgattcatatggacagtatgatttattgtttctttttttaaccaaatacctcctcagtaatttataatggctttgcagtaatgtctatcagataagaagcactggaaaaccgatcgtctctaggatgatatgcatgtttcaagtggtattgaaagccgcactgatggatatgtaataataaacatatctgttattaatata

SEQ ID NO: 69842 - DNA, 6260 bp, Homo sapiens
cggtctccgtttgtttgaacaggaaggcggacatattagtccctctcagcccccctcgccccaccccccaggcattcgccgccgcgactcgccctttccccggctgggaccgcagcccctcccagaagctcccccatcagcagccgccgggacccaactatcgtcttcctcttcgcccgctctccagcctttcctctgctaagtctccatcgggcatcgacctcgccctgccccaccggacaccgtagcagcagccccagcagcgacgggacaaaatgggagagtgaggctgtcctgcgtggaccagctcgtggccgagactgatcggtgcgtcgggccgggccgagtagagccggggacgcggggctagaccgtctacagcgcctctgagcggagcgggcccggcccgtggcccgagcggcggccgcagctggcacagctcctcacccgccctttgctttcgcctttcctcttctccctcccttgttgcccggagggagtctccaccctgcttctctttctctacccgctcctgcccatctcgggacggggacccctccatggcgacggcggccggggcccgctagactgaagcacctcgccggagcgacgaggctggtggcgacggcgctgtcggctgtcgtgaggggctgccgggtgggatgcgactttgggcgtccgagcggctgtgggtcgctgttgcccccggcccggggtctggagagcggaggtcccctcagtgaggggaagacgggggaaccgggcgcacctggtgaccctgaggttccggctcctccgccccgcggctgcgaacccaccgcggaggaagttggttgaaattgctttccgctgctggtgctggtaagagggcattgtcacagcagcagcaacatgtcgactggggacagttttgagactcgatttgaaaaaatggacaacctgctgcgggatcccaaatcggaagtgaattcggattgtttgctggatggattggatgctttggtatatgatttggattttcctgccttaagaaaaaacaaaaatattgacaactttttaagcagatataaagacacaataaataaaatcagagatttacgaatgaaagctgaagattatgaagtagtgaaggtgattggtagaggtgcatttggagaagttcaattggtaaggcataaatccaccaggaaggtatatgctatgaagcttctcagcaaatttgaaatgataaagagatctgattctgcttttttctgggaagaaagggacatcatggcttttgccaacagtccttgggttgttcagcttttttatgcattccaagatgatcgttatctctacatggtgatggaatacatgcctggtggagatcttgtaaacttaatgagcaactatgatgtgcctgaaaaatgggcacgattctatactgcagaagtagttcttgcattggatgcaatccattccatgggttttattcacagagatgtgaagcctgataacatgctgctggataaatctggacatttgaagttagcagattttggtacttgtatgaagatgaataaggaaggcatggtacgatgtgatacagcggttggaacacctgattatatttcccctgaagtattaaaatcccaaggtggtgatggttattatggaagagaatgtgactggtggtcggttggggtatttttatacgaaatgcttgtaggtgatacacctttttatgcagattctttggttggaacttacagtaaaattatgaaccataaaaattcacttacctttcctgatgataatgacatatcaaaagaagcaaaaaaccttatttgtgccttccttactgacagggaagtgaggttagggcgaaatggtgtagaagaaatcaaacgacatctcttcttcaaaaatgaccagtgggcttgggaaacgctccgagacactgtagcaccagttgtacccgatttaagtagtgacattgatactagtaattttgatgacttggaagaagataaaggagaggaagaaacattccctattcctaaagctttcgttggcaatcaactaccttttgtaggatttacatattatagcaatcgtagatacttatcttcagcaaatcctaatgataacagaactagctccaatgcagataaaagcttgcaggaaagtttgcaaaaaacaatctataagctggaagaacagctgcataatgaaatgcagttaaaagatgaaatggagcagaagtgcagaacctcaaacataaaactagacaagataatgaaagaattggatgaagagggaaatcaaagaagaaatctagaatctacagtgtctcagattgagaaggagaaaatgttgctacagcatagaattaatgagtaccaaagaaaagctgaacaggaaaatgagaagagaagaaatgtagaaaatgaagtttctacattaaaggatcagttggaagacttaaagaaagtcagtcagaattcacagcttgctaatgagaagctgtcccagttacaaaagcagctagaagaagccaatgacttacttaggacagaatcggacacagctgtaagattgaggaagagtcacacagagatgagcaagtcaattagtcagttagagtccctgaacagagagttgcaagagagaaatcgaattttagagaattctaagtcacaaacagacaaagattattaccagctgcaagctatattagaagctgaacgaagagacagaggtcatgattctgagatgattggagaccttcaagctcgaattacatctttacaagaggaggtgaagcatctcaaacataatctcgaaaaagtggaaggagaaagaaaagaggctcaagacatgcttaatcactcagaaaaggaaaagaataatttagagatagatttaaactacaaacttaaatcattacaacaacggttagaacaagaggtaaatgaacacaaagtaaccaaagctcgtttaactgacaaacatcaatctattgaagaggcaaagtctgtggcaatgtgtgagatggaaaaaaagctgaaagaagaaagagaagctcgagagaaggctgaaaatcgggttgttcagattgagaaacagtgttccatgctagacgttgatctgaagcaatctcagcagaaactagaacatttgactggaaataaagaaaggatggaggatgaagttaagaatctaaccctgcaactggagcaggaatcaaataagcggctgttgttacaaaatgaattgaagactcaagcatttgaggcagacaatttaaaaggtttagaaaagcagatgaaacaggaaataaatactttattggaagcaaagagattattagaatttgagttagctcagcttacgaaacagtatagaggaaatgaaggacagatgcgggagctacaagatcagcttgaagctgagcaatatttctcgacactttataaaacccaggtaaaggaacttaaagaagaaattgaagaaaaaaacagagaaaatttaaagaaaatacaggaactacaaaatgaaaaagaaactcttgctactcagttggatctagcagaaacaaaagctgagtctgagcagttggcgcgaggccttctggaagaacagtattttgaattgacgcaagaaagcaagaaagctgcttcaagaaatagacaagagattacagataaagatcacactgttagtcggcttgaagaagcaaacagcatgctaaccaaagatattgaaatattaagaagagagaatgaagagctaacagagaaaatgaagaaggcagaggaagaatataaactggagaaggaggaggagatcagtaatcttaaggctgcctttgaaaagaatatcaacactgaacgaacccttaaaacacaggctgttaacaaattggcagaaataatgaatcgaaaagattttaaaattgatagaaagaaagctaatacacaagatttgagaaagaaagaaaaggaaaatcgaaagctgcaactggaactcaaccaagaaagagagaaattcaaccagatggtagtgaaacatcagaaggaactgaatgacatgcaagcgcaattggtagaagaatgtgcacataggaatgagcttcagatgcagttggccagcaaagagagtgatattgagcaattgcgtgctaaacttttggacctctcggattctacaagtgttgctagttttcctagtgctgatgaaactgatggtaacctcccagagtcaagaattgaaggttggctttcagtaccaaatagaggaaatatcaaacgatatggctggaagaaacagtatgttgtggtaagcagcaaaaaaattttgttctataatgacgaacaagataaggagcaatccaatccatctatggtattggacatagataaactgtttcacgttagacctgtaacccaaggagatgtgtatagagctgaaactgaagaaattcctaaaatattccagatactatatgcaaatgaaggtgaatgtagaaaagatgtagagatggaaccagtacaacaagctgaaaaaactaatttccaaaatcacaaaggccatgagtttattcctacactctaccactttcctgccaattgtgatgcctgtgccaaacctctctggcatgtttttaagccaccccctgccctagagtgtcgaagatgccatgttaagtgccacagagatcacttagataagaaagaggacttaatttgtccatgtaaagtaagttatgatgtaacatcagcaagagatatgctgctgttagcatgttctcaggatgaacaaaaaaaatgggtaactcatttagtaaagaaaatccctaagaatccaccatctggttttgttcgtgcttcccctcgaacgctttctacaagatccactgcaaatcagtctttccggaaagtggtcaaaaatacatctggaaaaactagttaaccatgtgaccgagtgccttgtggaatcgtgtgggatgctacctgataaaccaggcttctttaaccatgcagagcagacaggctgtttctttgacacaaatatcacaggcttcagggtgctgcctttttggatttataagaaaatggctgtcagtcgtgatagaacagagttttcctcatatgagtaagaggaagggactttcactttcaagtggaacggccatcactatcaagatcagctcatggaaggagtaaagaaaatatctcaaaatgagacaaactgaagttttgttttttttttaatgacttaagtttttgtgctcttgcaagactatacaaaactattttaagaaagcagtgatatcacttgaacttcagtgccctcactgtagaatttaaaagccttactgttgattgcccatggtggacttgatggagaaattaaatatctttcattatgctttacaaaatactgtatatgtttcagcaagtttggggaatgggagaggacgaaaaaaagttacatttaatctatgcatttttgccaagccatattgagttattttactactagagacattaggaaactaactgtacaaaagaaccaagtttaaaagcattttgtggggtacatcatttctataattgtataatgtatttctttgtggttttaaatgataaagacattaagttaacaaacatataagaaatgtatgcactgtttgaaatgtaaattattcttagaacactttcaatgggggttgcattgtccttttagtgccttaatttgagataattattttactgccatgagtaagtatagaaatttcaaaaaatgtattttcaaaaaattatgtgtgtccgtgagtttttcattgataattggtttaatttaaaatatttagaggtttgttggactttcataaattgagtacaatctttgcatcaaactacctgctacaataatgactttataaaactgcaaaaaatgtagaaggttgcaccaatataaaaaggaaatatggcaatacatccatgatgttttccagttaacataggaattaccagataaatactgttaaactcttgtccggtaacaagagttgattcatatggacagtatgatttattgtttctttttttaaccaaatacctcctcagtaatttataatggctttgcagtaatgtctatcagataagaagcactggaaaaccgatcgtctctaggatgatatgcatgtttcaagtggtattgaaagccgcactgatggatatgtaataataaacatatctgttattaatata

SEQ ID NO: 69843 - DNA, 6368 bp, Homo sapiens
cggtctccgtttgtttgaacaggaaggcggacatattagtccctctcagcccccctcgccccaccccccaggcattcgccgccgcgactcgccctttccccggctgggaccgcagcccctcccagaagctcccccatcagcagccgccgggacccaactatcgtcttcctcttcgcccgctctccagcctttcctctgctaagtctccatcgggcatcgacctcgccctgccccaccggacaccgtagcagcagccccagcagcgacgggacaaaatgggagagtgaggctgtcctgcgtggaccagctcgtggccgagactgatcggtgcgtcgggccgggccgagtagagccggggacgcggggctagaccgtctacagcgcctctgagcggagcgggcccggcccgtggcccgagcggcggccgcagctggcacagctcctcacccgccctttgctttcgcctttcctcttctccctcccttgttgcccggagggagtctccaccctgcttctctttctctacccgctcctgcccatctcgggacggggacccctccatggcgacggcggccggggcccgctagactgaagcacctcgccggagcgacgaggctggtggcgacggcgctgtcggctgtcgtgaggggctgccgggtgggatgcgactttgggcgtccgagcggctgtgggtcgctgttgcccccggcccggggtctggagagcggaggtcccctcagtgaggggaagacgggggaaccgggcgcacctggtgaccctgaggttccggctcctccgccccgcggctgcgaacccaccgcggaggaagttggttgaaattgctttccgctgctggtgctggtaagagggcattgtcacagcagcagcaacatgtcgactggggacagttttgagactcgatttgaaaaaatggacaacctgctgcgggatcccaaatcggaagtgaattcggattgtttgctggatggattggatgctttggtatatgatttggattttcctgccttaagaaaaaacaaaaatattgacaactttttaagcagatataaagacacaataaataaaatcagagatttacgaatgaaagctgaagattatgaagtagtgaaggtgattggtagaggtgcatttggagaagttcaattggtaaggcataaatccaccaggaaggtatatgctatgaagcttctcagcaaatttgaaatgataaagagatctgattctgcttttttctgggaagaaagggacatcatggcttttgccaacagtccttgggttgttcagcttttttatgcattccaagatgatcgttatctctacatggtgatggaatacatgcctggtggagatcttgtaaacttaatgagcaactatgatgtgcctgaaaaatgggcacgattctatactgcagaagtagttcttgcattggatgcaatccattccatgggttttattcacagagatgtgaagcctgataacatgctgctggataaatctggacatttgaagttagcagattttggtacttgtatgaagatgaataaggaaggcatggtacgatgtgatacagcggttggaacacctgattatatttcccctgaagtattaaaatcccaaggtggtgatggttattatggaagagaatgtgactggtggtcggttggggtatttttatacgaaatgcttgtaggtgatacacctttttatgcagattctttggttggaacttacagtaaaattatgaaccataaaaattcacttacctttcctgatgataatgacatatcaaaagaagcaaaaaaccttatttgtgccttccttactgacagggaagtgaggttagggcgaaatggtgtagaagaaatcaaacgacatctcttcttcaaaaatgaccagtgggcttgggaaacgctccgagacactgtagcaccagttgtacccgatttaagtagtgacattgatactagtaattttgatgacttggaagaagataaaggagaggaagaaacattccctattcctaaagctttcgttggcaatcaactaccttttgtaggatttacatattatagcaatcgtagatacttatcttcagcaaatcctaatgataacagaactagctccaatgcagataaaagcttgcaggaaagtttgcaaaaaacaatctataagctggaagaacagctgcataatgaaatgcagttaaaagatgaaatggagcagaagtgcagaacctcaaacataaaactagacaagataatgaaagaattggatgaagagggaaatcaaagaagaaatctagaatctacagtgtctcagattgagaaggagaaaatgttgctacagcatagaattaatgagtaccaaagaaaagctgaacaggaaaatgagaagagaagaaatgtagaaaatgaagtttctacattaaaggatcagttggaagacttaaagaaagtcagtcagaattcacagcttgctaatgagaagctgtcccagttacaaaagcagctagaagaagccaatgacttacttaggacagaatcggacacagctgtaagattgaggaagagtcacacagagatgagcaagtcaattagtcagttagagtccctgaacagagagttgcaagagagaaatcgaattttagagaattctaagtcacaaacagacaaagattattaccagctgcaagctatattagaagctgaacgaagagacagaggtcatgattctgagatgattggagaccttcaagctcgaattacatctttacaagaggaggtgaagcatctcaaacataatctcgaaaaagtggaaggagaaagaaaagaggctcaagacatgcttaatcactcagaaaaggaaaagaataatttagagatagatttaaactacaaacttaaatcattacaacaacggttagaacaagaggtaaatgaacacaaagtaaccaaagctcgtttaactgacaaacatcaatctattgaagaggcaaagtctgtggcaatgtgtgagatggaaaaaaagctgaaagaagaaagagaagctcgagagaaggctgaaaatcgggttgttcagattgagaaacagtgttccatgctagacgttgatctgaagcaatctcagcagaaactagaacatttgactggaaataaagaaaggatggaggatgaagttaagaatctaaccctgcaactggagcaggaatcaaataagcggctgttgttacaaaatgaattgaagactcaagcatttgaggcagacaatttaaaaggtttagaaaagcagatgaaacaggaaataaatactttattggaagcaaagagattattagaatttgagttagctcagcttacgaaacagtatagaggaaatgaaggacagatgcgggagctacaagatcagcttgaagctgagcaatatttctcgacactttataaaacccaggtaaaggaacttaaagaagaaattgaagaaaaaaacagagaaaatttaaagaaaatacaggaactacaaaatgaaaaagaaactcttgctactcagttggatctagcagaaacaaaagctgagtctgagcagttggcgcgaggccttctggaagaacagtattttgaattgacgcaagaaagcaagaaagctgcttcaagaaatagacaagagattacagataaagatcacactgttagtcggcttgaagaagcaaacagcatgctaaccaaagatattgaaatattaagaagagagaatgaagagctaacagagaaaatgaagaaggcagaggaagaatataaactggagaaggaggaggagatcagtaatcttaaggctgcctttgaaaagaatatcaacactgaacgaacccttaaaacacaggctgttaacaaattggcagaaataatgaatcgaaaagattttaaaattgatagaaagaaagctaatacacaagatttgagaaagaaagaaaaggaaaatcgaaagctgcaactggaactcaaccaagaaagagagaaattcaaccagatggtagtgaaacatcagaaggaactgaatgacatgcaagcgcaattggtagaagaatgtgcacataggaatgagcttcagatgcagttggccagcaaagagagtgatattgagcaattgcgtgctaaacttttggacctctcggattctacaagtgttgctagttttcctagtgctgatgaaactgatggtaacctcccagagtcaagaattgaaggttggctttcagtaccaaatagaggaaatatcaaacgatatggctggaagaaacagtatgttgtggtaagcagcaaaaaaattttgttctataatgacgaacaagataaggagcaatccaatccatctatggtattggacatagataaactgtttcacgttagacctgtaacccaaggagatgtgtatagagctgaaactgaagaaattcctaaaatattccagatactatatgcaaatgaaggtgaatgtagaaaagatgtagagatggaaccagtacaacaagctgaaaaaactaatttccaaaatcacaaaggccatgagtttattcctacactctaccactttcctgccaattgtgatgcctgtgccaaacctctctggcatgtttttaagccaccccctgccctagagtgtcgaagatgccatgttaagtgccacagagatcacttagataagaaagaggacttaatttgtccatgtaaagtaagttatgatgtaacatcagcaagagatatgctgctgttagcatgttctcaggatgaacaaaaaaaatgggtaactcatttagtaaagaaaatccctaagaatccaccatctggttttgttcgtgcttcccctcgaacgctttctacaagatccactgcaaatcagtctttccggaaagtggtcaaaaatacatctggaaaaactagctgataaaccaggcttctttaaccatgcagagcagacaggctgtttctttgacacaaatatcacaggcttcagggttaagattgctgtttttctgtccttgctttggcacaacacactgagggttttttttattgcgggtttgcctacaggtagattagattaattattactatgtaatgcaagtacagttgggggaaagcttaggtagatatattttttttaaaaggtgctgcctttttggatttataagaaaatggctgtcagtcgtgatagaacagagttttcctcatatgagtaagaggaagggactttcactttcaagtggaacggccatcactatcaagatcagctcatggaaggagtaaagaaaatatctcaaaatgagacaaactgaagttttgttttttttttaatgacttaagtttttgtgctcttgcaagactatacaaaactattttaagaaagcagtgatatcacttgaacttcagtgccctcactgtagaatttaaaagccttactgttgattgcccatggtggacttgatggagaaattaaatatctttcattatgctttacaaaatactgtatatgtttcagcaagtttggggaatgggagaggacgaaaaaaagttacatttaatctatgcatttttgccaagccatattgagttattttactactagagacattaggaaactaactgtacaaaagaaccaagtttaaaagcattttgtggggtacatcatttctataattgtataatgtatttctttgtggttttaaatgataaagacattaagttaacaaacatataagaaatgtatgcactgtttgaaatgtaaattattcttagaacactttcaatgggggttgcattgtccttttagtgccttaatttgagataattattttactgccatgagtaagtatagaaatttcaaaaaatgtattttcaaaaaattatgtgtgtccgtgagtttttcattgataattggtttaatttaaaatatttagaggtttgttggactttcataaattgagtacaatctttgcatcaaactacctgctacaataatgactttataaaactgcaaaaaatgtagaaggttgcaccaatataaaaaggaaatatggcaatacatccatgatgttttccagttaacataggaattaccagataaatactgttaaactcttgtccggtaacaagagttgattcatatggacagtatgatttattgtttctttttttaaccaaatacctcctcagtaatttataatggctttgcagtaatgtctatcagataagaagcactggaaaaccgatcgtctctaggatgatatgcatgtttcaagtggtattgaaagccgcactgatggatatgtaataataaacatatctgttattaatata

SEQ ID NO: 69844 - DNA, 5266 bp, Homo sapiens
cggtctccgtttgtttgaacaggaaggcggacatattagtccctctcagcccccctcgccccaccccccaggcattcgccgccgcgactcgccctttccccggctgggaccgcagcccctcccagaagctcccccatcagcagccgccgggacccaactatcgtcttcctcttcgcccgctctccagcctttcctctgctaagtctccatcgggcatcgacctcgccctgccccaccggacaccgtagcagcagccccagcagcgacgggacaaaatgggagagtgaggctgtcctgcgtggaccagctcgtggccgagactgatcggtgcgtcgggccgggccgagtagagccggggacgcggggctagaccgtctacagcgcctctgagcggagcgggcccggcccgtggcccgagcggcggccgcagctggcacagctcctcacccgccctttgctttcgcctttcctcttctccctcccttgttgcccggagggagtctccaccctgcttctctttctctacccgctcctgcccatctcgggacggggacccctccatggcgacggcggccggggcccgctagactgaagcacctcgccggagcgacgaggctggtggcgacggcgctgtcggctgtcgtgaggggctgccgggtgggatgcgactttgggcgtccgagcggctgtgggtcgctgttgcccccggcccggggtctggagagcggaggtcccctcagtgaggggaagacgggggaaccgggcgcacctggtgaccctgaggttccggctcctccgccccgcggctgcgaacccaccgcggaggaagttggttgaaattgctttccgctgctggtgctggtaagagggcattgtcacagcagcagcaacatgtcgactggggacagttttgagactcgatttgaaaaaatggacaacctgctgcgggatcccaaatcggaagtgaattcggattgtttgctggatggattggatgctttggtatatgatttggattttcctgccttaagaaaaaacaaaaatattgacaactttttaagcagatataaagacacaataaataaaatcagagatttacgaatgaaagctgaagattatgaagtagtgaaggtgattggtagaggtgcatttggagaagttcaattggtaaggcataaatccaccaggaaggtatatgctatgaagcttctcagcaaatttgaaatgataaagagatctgattctgcttttttctgggaagaaagggacatcatggcttttgccaacagtccttgggttgttcagcttttttatgcattccaagatgatcgttatctctacatggtgatggaatacatgcctggtggagatcttgtaaacttaatgagcaactatgatgtgcctgaaaaatgggcacgattctatactgcagaagtagttcttgcattggatgcaatccattccatgggttttattcacagagatgtgaagcctgataacatgctgctggataaatctggacatttgaagttagcagattttggtacttgtatgaagatgaataaggaaggcatggtacgatgtgatacagcggttggaacacctgattatatttcccctgaagtattaaaatcccaaggtggtgatggttattatggaagagaatgtgactggtggtcggttggggtatttttatacgaaatgcttgtaggtgatacacctttttatgcagattctttggttggaacttacagtaaaattatgaaccataaaaattcacttacctttcctgatgataatgacatatcaaaagaagcaaaaaaccttatttgtgccttccttactgacagggaagtgaggttagggcgaaatggtgtagaagaaatcaaacgacatctcttcttcaaaaatgaccagtgggcttgggaaacgctccgagacactgtagcaccagttgtacccgatttaagtagtgacattgatactagtaattttgatgacttggaagaagataaaggagaggaagaaacattccctattcctaaagctttcgttggcaatcaactaccttttgtaggatttacatattatagcaatcgtagatacttatcttcagcaaatcctaatgataacagaactagctccaatgcagataaaagcttgcaggaaagtttgcaaaaaacaatctataagctggaagaacagctgcataatgaaatgcagttaaaagatgaaatggagcagaagtgcagaacctcaaacataaaactagacaagataatgaaagaattggatgaagagggaaatcaaagaagaaatctagaatctacagtgtctcagattgagaaggagaaaatgttgctacagcatagaattaatgagtaccaaagaaaagctgaacaggaaaatgagaagagaagaaatgtagaaaatgaagtttctacattaaaggatcagttggaagacttaaagaaagtcagtcagaattcacagcttgctaatgagaagctgtcccagttacaaaagcagctagaagaagccaatgacttacttaggacagaatcggacacagctgtaagattgaggaagagtcacacagagatgagcaagtcaattagtcagttagagtccctgaacagagagttgcaagagagaaatcgaattttagagaattctaagtcacaaacagacaaagattattaccagctgcaagctatattagaagctgaacgaagagacagaggtcatgattctgagatgattggagaccttcaagctcgaattacatctttacaagaggaggtgaagcatctcaaacataatctcgaaaaagtggaaggagaaagaaaagaggctcaagacatgcttaatcactcagaaaaggaaaagaataatttagagatagatttaaactacaaacttaaatcattacaacaacggttagaacaagaggtaaatgaacacaaagtaaccaaagctcgtttaactgacaaacatcaatctattgaagaggcaaagtctgtggcaatgtgtgagatggaaaaaaagctgaaagaagaaagagaagctcgagagaaggctgaaaatcgggttgttcagattgagaaacagtgttccatgctagacgttgatctgaagcaatctcagcagaaactagaacatttgactggaaataaagaaaggatggaggatgaagttaagaatctaaccctgcaactggagcaggaatcaaataagcggctgttgttacaaaatgaattgaagactcaagcatttgaggcagacaatttaaaaggtttagaaaagcagatgaaacaggaaataaatactttattggaagcaaagagattattagaatttgagttagctcagcttacgaaacagtatagaggaaatgaaggacagatgcgggagctacaagatcagcttgaagctgagcaatatttctcgacactttataaaacccaggtaaaggaacttaaagaagaaattgaagaaaaaaacagagaaaatttaaagaaaatacaggaactacaaaatgaaaaagaaactcttgctactcagttggatctagcagaaacaaaagctgagtctgagcagttggcgcgaggccttctggaagaacagtattttgaattgacgcaagaaagcaagaaagctgcttcaagaaatagacaagagattacagataaagatcacactgttagtcggcttgaagaagcaaacagcatgctaaccaaagatattgaaatattaagaagagagaatgaagagctaacagagaaaatgaagaaggcagaggaagaatataaactggagaaggaggaggagatcagtaatcttaaggctgcctttgaaaagaatatcaacactgaacgaacccttaaaacacaggctgttaacaaattggcagaaataatgaatcgaaaagattttaaaattgatagaaagaaagctaatacacaagatttgagaaagaaagaaaaggaaaatcgaaagctgcaactggaactcaaccaagaaagagagaaattcaaccagatggtagtgaaacatcagaaggaactgaatgacatgcaagcgcaattggtagaagaatgtgcacataggaatgagcttcagatgcagttggccagcaaagagagtgatattgagcaattgcgtgctaaacttttggacctctcggattctacaagtgttgctagttttcctagtgctgatgaaactgatggtaacctcccagagtcaagaattgaaggttggctttcagtaccaaatagaggaaatatcaaacgatatggctggaagaaacagtatgttgtggtaagcagcaaaaaaattttgttctataatgacgaacaagataaggagcaatccaatccatctatggtattggacatagataaactgtttcacgttagacctgtaacccaaggagatgtgtatagagctgaaactgaagaaattcctaaaatattccagatactatatgcaaatgaaggtgaatgtagaaaagatgtagagatggaaccagtacaacaagctgaaaaaactaatttccaaaatcacaaaggccatgagtttattcctacactctaccactttcctgccaattgtgatgcctgtgccaaacctctctggcatgtttttaagccaccccctgccctagagtgtcgaagatgccatgttaagtgccacagagatcacttagataagaaagaggacttaatttgtccatgtaaagtaagttatgatgtaacatcagcaagagatatgctgctgttagcatgttctcaggatgaacaaaaaaaatgggtaactcatttagtaaagaaaatccctaagaatccaccatctggttttgttcgtgcttcccctcgaacgctttctacaagatccactgcaaatcagtctttccggaaagtggtcaaaaatacatctggaaaaactagccatgtccgataccctgtggcctggcaagtttgcacagcgagaaggtggcatctggagcctcctttccccttctcataacgcctaaggagcttggctatgcctgtgttgcatctctacagtgggacacatgaacacgttagcagcccccctcaggttgctgggttaggagcctgaccaacaacacctttagtacatgtgaagagtctctgatgtgatgattttcagctggaattatttttgatcaaatgaatctggagaccgattcattgtgagcccctgaataaaatgaaaactttgtttccccttggtaaaa

SEQ ID NO: 69845 - DNA, 6109 bp, Homo sapiens
gaatcttcctaactgctttttctctgagcagatttagaaactttcagaatatttataatcctgaagtttcagcagatccaaattcaaagtaatgaccaagcagggctattaactactccaagactagatctccagatgctggtgaagaatcacagatcatgcagaatttgaaaggtttgtttttgtcatagatagtatatgttctaatgattaataccggaaatctgacaaaggtcaaattctgataatgagaatgttaggtaataatatgcatcacacatgtaattaacttcattttactggattttatagactataatgaaggtcagaagactatcacactcaagtaggctattcaaaagtttgtttgctactaaaataaaacatcactgcttaatcttgtaaaatgtccagaatttaattgcaggccaattaagaatgtacgtaaatggcagaaatttcactttgaaaaaaacaagccaactataaaggacaaaataaagtgaattaaaaagtttccaattttggttgggcatggctgctcatgcttgtaatctcagcactttgggaggccaagatcagaggactttttgagcccaggagttcaagaccagcctgggcaacatagcaagaccccacctcaattttttaaaaaagtacccaatttttatgtgttgagatctctttagttatgaggctaacatcacctgcaagtgtcttttaaaagaaaaaacaaaaatattgacaactttttaagcagatataaagacacaataaataaaatcagagatttacgaatgaaagctgaagattatgaagtagtgaaggtgattggtagaggtgcatttggagaagttcaattggtaaggcataaatccaccaggaaggtatatgctatgaagcttctcagcaaatttgaaatgataaagagatctgattctgcttttttctgggaagaaagggacatcatggcttttgccaacagtccttgggttgttcagcttttttatgcattccaagatgatcgttatctctacatggtgatggaatacatgcctggtggagatcttgtaaacttaatgagcaactatgatgtgcctgaaaaatgggcacgattctatactgcagaagtagttcttgcattggatgcaatccattccatgggttttattcacagagatgtgaagcctgataacatgctgctggataaatctggacatttgaagttagcagattttggtacttgtatgaagatgaataaggaaggcatggtacgatgtgatacagcggttggaacacctgattatatttcccctgaagtattaaaatcccaaggtggtgatggttattatggaagagaatgtgactggtggtcggttggggtatttttatacgaaatgcttgtaggtgatacacctttttatgcagattctttggttggaacttacagtaaaattatgaaccataaaaattcacttacctttcctgatgataatgacatatcaaaagaagcaaaaaaccttatttgtgccttccttactgacagggaagtgaggttagggcgaaatggtgtagaagaaatcaaacgacatctcttcttcaaaaatgaccagtgggcttgggaaacgctccgagacactgtagcaccagttgtacccgatttaagtagtgacattgatactagtaattttgatgacttggaagaagataaaggagaggaagaaacattccctattcctaaagctttcgttggcaatcaactaccttttgtaggatttacatattatagcaatcgtagatacttatcttcagcaaatcctaatgataacagaactagctccaatgcagataaaagcttgcaggaaagtttgcaaaaaacaatctataagctggaagaacagctgcataatgaaatgcagttaaaagatgaaatggagcagaagtgcagaacctcaaacataaaactagacaagataatgaaagaattggatgaagagggaaatcaaagaagaaatctagaatctacagtgtctcagattgagaaggagaaaatgttgctacagcatagaattaatgagtaccaaagaaaagctgaacaggaaaatgagaagagaagaaatgtagaaaatgaagtttctacattaaaggatcagttggaagacttaaagaaagtcagtcagaattcacagcttgctaatgagaagctgtcccagttacaaaagcagctagaagaagccaatgacttacttaggacagaatcggacacagctgtaagattgaggaagagtcacacagagatgagcaagtcaattagtcagttagagtccctgaacagagagttgcaagagagaaatcgaattttagagaattctaagtcacaaacagacaaagattattaccagctgcaagctatattagaagctgaacgaagagacagaggtcatgattctgagatgattggagaccttcaagctcgaattacatctttacaagaggaggtgaagcatctcaaacataatctcgaaaaagtggaaggagaaagaaaagaggctcaagacatgcttaatcactcagaaaaggaaaagaataatttagagatagatttaaactacaaacttaaatcattacaacaacggttagaacaagaggtaaatgaacacaaagtaaccaaagctcgtttaactgacaaacatcaatctattgaagaggcaaagtctgtggcaatgtgtgagatggaaaaaaagctgaaagaagaaagagaagctcgagagaaggctgaaaatcgggttgttcagattgagaaacagtgttccatgctagacgttgatctgaagcaatctcagcagaaactagaacatttgactggaaataaagaaaggatggaggatgaagttaagaatctaaccctgcaactggagcaggaatcaaataagcggctgttgttacaaaatgaattgaagactcaagcatttgaggcagacaatttaaaaggtttagaaaagcagatgaaacaggaaataaatactttattggaagcaaagagattattagaatttgagttagctcagcttacgaaacagtatagaggaaatgaaggacagatgcgggagctacaagatcagcttgaagctgagcaatatttctcgacactttataaaacccaggtaaaggaacttaaagaagaaattgaagaaaaaaacagagaaaatttaaagaaaatacaggaactacaaaatgaaaaagaaactcttgctactcagttggatctagcagaaacaaaagctgagtctgagcagttggcgcgaggccttctggaagaacagtattttgaattgacgcaagaaagcaagaaagctgcttcaagaaatagacaagagattacagataaagatcacactgttagtcggcttgaagaagcaaacagcatgctaaccaaagatattgaaatattaagaagagagaatgaagagctaacagagaaaatgaagaaggcagaggaagaatataaactggagaaggaggaggagatcagtaatcttaaggctgcctttgaaaagaatatcaacactgaacgaacccttaaaacacaggctgttaacaaattggcagaaataatgaatcgaaaagattttaaaattgatagaaagaaagctaatacacaagatttgagaaagaaagaaaaggaaaatcgaaagctgcaactggaactcaaccaagaaagagagaaattcaaccagatggtagtgaaacatcagaaggaactgaatgacatgcaagcgcaattggtagaagaatgtgcacataggaatgagcttcagatgcagttggccagcaaagagagtgatattgagcaattgcgtgctaaacttttggacctctcggattctacaagtgttgctagttttcctagtgctgatgaaactgatggtaacctcccagagtcaagaattgaaggttggctttcagtaccaaatagaggaaatatcaaacgatatggctggaagaaacagtatgttgtggtaagcagcaaaaaaattttgttctataatgacgaacaagataaggagcaatccaatccatctatggtattggacatagataaactgtttcacgttagacctgtaacccaaggagatgtgtatagagctgaaactgaagaaattcctaaaatattccagatactatatgcaaatgaaggtgaatgtagaaaagatgtagagatggaaccagtacaacaagctgaaaaaactaatttccaaaatcacaaaggccatgagtttattcctacactctaccactttcctgccaattgtgatgcctgtgccaaacctctctggcatgtttttaagccaccccctgccctagagtgtcgaagatgccatgttaagtgccacagagatcacttagataagaaagaggacttaatttgtccatgtaaagtaagttatgatgtaacatcagcaagagatatgctgctgttagcatgttctcaggatgaacaaaaaaaatgggtaactcatttagtaaagaaaatccctaagaatccaccatctggttttgttcgtgcttcccctcgaacgctttctacaagatccactgcaaatcagtctttccggaaagtggtcaaaaatacatctggaaaaactagttaaccatgtgaccgagtgccttgtggaatcgtgtgggatgctacctgataaaccaggcttctttaaccatgcagagcagacaggctgtttctttgacacaaatatcacaggcttcagggttaagattgctgtttttctgtccttgctttggcacaacacactgagggttttttttattgcgggtttgcctacaggtagattagattaattattactatgtaatgcaagtacagttgggggaaagcttaggtagatatattttttttaaaaggtgctgcctttttggatttataagaaaatggctgtcagtcgtgatagaacagagttttcctcatatgagtaagaggaagggactttcactttcaagtggaacggccatcactatcaagatcagctcatggaaggagtaaagaaaatatctcaaaatgagacaaactgaagttttgttttttttttaatgacttaagtttttgtgctcttgcaagactatacaaaactattttaagaaagcagtgatatcacttgaacttcagtgccctcactgtagaatttaaaagccttactgttgattgcccatggtggacttgatggagaaattaaatatctttcattatgctttacaaaatactgtatatgtttcagcaagtttggggaatgggagaggacgaaaaaaagttacatttaatctatgcatttttgccaagccatattgagttattttactactagagacattaggaaactaactgtacaaaagaaccaagtttaaaagcattttgtggggtacatcatttctataattgtataatgtatttctttgtggttttaaatgataaagacattaagttaacaaacatataagaaatgtatgcactgtttgaaatgtaaattattcttagaacactttcaatgggggttgcattgtccttttagtgccttaatttgagataattattttactgccatgagtaagtatagaaatttcaaaaaatgtattttcaaaaaattatgtgtgtccgtgagtttttcattgataattggtttaatttaaaatatttagaggtttgttggactttcataaattgagtacaatctttgcatcaaactacctgctacaataatgactttataaaactgcaaaaaatgtagaaggttgcaccaatataaaaaggaaatatggcaatacatccatgatgttttccagttaacataggaattaccagataaatactgttaaactcttgtccggtaacaagagttgattcatatggacagtatgatttattgtttctttttttaaccaaatacctcctcagtaatttataatggctttgcagtaatgtctatcagataagaagcactggaaaaccgatcgtctctaggatgatatgcatgtttcaagtggtattgaaagccgcactgatggatatgtaataataaacatatctgttattaatata

SEQ ID NO: 69846 - DNA, 6358 bp, Homo sapiens
cggtctccgtttgtttgaacaggaaggcggacatattagtccctctcagcccccctcgccccaccccccaggcattcgccgccgcgactcgccctttccccggctgggaccgcagcccctcccagaagctcccccatcagcagccgccgggacccaactatcgtcttcctcttcgcccgctctccagcctttcctctgctaagtctccatcgggcatcgacctcgccctgccccaccggacaccgtagcagcagccccagcagcgacgggacaaaatgggagagtgaggctgtcctgcgtggaccagctcgtggccgagactgatcggtgcgtcgggccgggccgagtagagccggggacgcggggctagaccgtctacagcgcctctgagcggagcgggcccggcccgtggcccgagcggcggccgcagctggcacagctcctcacccgccctttgctttcgcctttcctcttctccctcccttgttgcccggagggagtctccaccctgcttctctttctctacccgctcctgcccatctcgggacggggacccctccatggcgacggcggccggggcccgctagactgaagcacctcgccggagcgacgaggctggtggcgacggcgctgtcggctgtcgtgaggggctgccgggtgggatgcgactttgggcgtccgagcggctgtgggtcgctgttgcccccggcccggggtctggagagcggaggtcccctcagtgaggggaagacgggggaaccgggcgcacctggtgaccctgaggttccggctcctccgccccgcggctgcgaacccaccgcggaggaagttggttgaaattgctttccgctgctggtgctggtaagagggcattgtcacagcagcagcaacatgtcgactggggacagttttgagactcgatttgaaaaaatggacaacctgctgcgggatcccaaatcggaagtgaattcggattgtttgctggatggattggatgctttggtatatgatttggattttcctgccttaagaaaaaacaaaaatattgacaactttttaagcagatataaagacacaataaataaaatcagagatttacgaatgaaagctgaagattatgaagtagtgaaggtgattggtagaggtgcatttggagaagttcaattggtaaggcataaatccaccaggaaggtatatgctatgaagcttctcagcaaatttgaaatgataaagagatctgattctgcttttttctgggaagaaagggacatcatggcttttgccaacagtccttgggttgttcagcttttttatgcattccaagatgatcgttatctctacatggtgatggaatacatgcctggtggagatcttgtaaacttaatgagcaactatgatgtgcctgaaaaatgggcacgattctatactgcagaagtagttcttgcattggatgcaatccattccatgggttttattcacagagatgtgaagcctgataacatgctgctggataaatctggacatttgaagttagcagattttggtacttgtatgaagatgaataaggaaggcatggtacgatgtgatacagcggttggaacacctgattatatttcccctgaagtattaaaatcccaaggtggtgatggttattatggaagagaatgtgactggtggtcggttggggtatttttatacgaaatgcttgtaggtgatacacctttttatgcagattctttggttggaacttacagtaaaattatgaaccataaaaattcacttacctttcctgatgataatgacatatcaaaagaagcaaaaaaccttatttgtgccttccttactgacagggaagtgaggttagggcgaaatggtgtagaagaaatcaaacgacatctcttcttcaaaaatgaccagtgggcttgggaaacgctccgagacactgtagcaccagttgtacccgatttaagtagtgacattgatactagtaattttgatgacttggaagaagataaaggagaggaagaaacattccctattcctaaagctttcgttggcaatcaactaccttttgtaggatttacatattatagcaatcgtagatacttatcttcagcaaatcctaatgataacagaactagctccaatgcagataaaagcttgcaggaaagtttgcaaaaaacaatctataagctggaagaacagctgcataatgaaatgcagttaaaagatgaaatggagcagaagtgcagaacctcaaacataaaactagacaagataatgaaagaattggatgaagagggaaatcaaagaagaaatctagaatctacagtgtctcagattgagaaggagaaaatgttgctacagcatagaattaatgagtaccaaagaaaagctgaacaggaaaatgagaagagaagaaatgtagaaaatgaagtttctacattaaaggatcagttggaagacttaaagaaagtcagtcagaattcacagcttgctaatgagaagctgtcccagttacaaaagcagctagaagaagccaatgacttacttaggacagaatcggacacagctgtaagattgaggaagagtcacacagagatgagcaagtcaattagtcagttagagtccctgaacagagagttgcaagagagaaatcgaattttagagaattctaagtcacaaacagacaaagattattaccagctgcaagctatattagaagctgaacgaagagacagaggtcatgattctgagatgattggagaccttcaagctcgaattacatctttacaagaggaggtgaagcatctcaaacataatctcgaaaaagtggaaggagaaagaaaagaggctcaagacatgcttaatcactcagaaaaggaaaagaataatttagagatagatttaaactacaaacttaaatcattacaacaacggttagaacaagaggtaaatgaacacaaagtaaccaaagctcgtttaactgacaaacatcaatctattgaagaggcaaagtctgtggcaatgtgtgagatggaaaaaaagctgaaagaagaaagagaagctcgagagaaggctgaaaatcgggttgttcagattgagaaacagtgttccatgctagacgttgatctgaagcaatctcagcagaaactagaacatttgactggaaataaagaaaggatggaggatgaagttaagaatctaaccctgcaactggagcaggaatcaaataagcggctgttgttacaaaatgaattgaagactcaagcatttgaggcagacaatttaaaaggtttagaaaagcagatgaaacaggaaataaatactttattggaagcaaagagattattagaatttgagttagctcagcttacgaaacagtatagaggaaatgaaggacagatgcgggagctacaagatcagcttgaagctgagcaatatttctcgacactttataaaacccaggtaaaggaacttaaagaagaaattgaagaaaaaaacagagaaaatttaaagaaaatacaggaactacaaaatgaaaaagaaactcttgctactcagttggatctagcagaaacaaaagctgagtctgagcagttggcgcgaggccttctggaagaacagtattttgaattgacgcaagaaagcaagaaagctgcttcaagaaatagacaagagattacagataaagatcacactgttagtcggcttgaagaagcaaacagcatgctaaccaaagatattgaaatattaagaagagagaatgaagagctaacagagaaaatgaagaaggcagaggaagaatataaactggagaaggaggaggagatcagtaatcttaaggctgcctttgaaaagaatatcaacactgaacgaacccttaaaacacaggctgttaacaaattggcagaaataatgaatcgaaaagattttaaaattgatagaaagaaagctaatacacaagatttgagaaagaaagaaaaggaaaatcgaaagctgcaactggaactcaaccaagaaagagagaaattcaaccagatggtagtgaaacatcagaaggaactgaatgacatgcaagcgcaattggtagaagaatgtgcacataggaatgagcttcagatgcagttggccagcaaagagagtgatattgagcaattgcgtgctaaacttttggacctctcggattctacaagtgttgctagttttcctagtgctgatgaaactgatggtaacctcccagagtcaagaattgaaggttggctttcagtaccaaatagaggaaatatcaaacgatatggctggaagaaacagtatgttgtggtaagcagcaaaaaaattttgttctataatgacgaacaagataaggagcaatccaatccatctatggtattggacatagataaactgtttcacgttagacctgtaacccaaggagatgtgtatagagctgaaactgaagaaattcctaaaatattccagatactatatgcaaatgaaggtgaatgtagaaaagatgtagagatggaaccagtacaacaagctgaaaaaactaatttcgtgatgcctgtgccaaacctctctggcatgtttttaagccaccccctgccctagagtgtcgaagatgccatgttaagtgccacagagatcacttagataagaaagaggacttaatttgtccatgtaaagtaagttatgatgtaacatcagcaagagatatgctgctgttagcatgttctcaggatgaacaaaaaaaatgggtaactcatttagtaaagaaaatccctaagaatccaccatctggttttgttcgtgcttcccctcgaacgctttctacaagatccactgcaaatcagtctttccggaaagtggtcaaaaatacatctggaaaaactagttaaccatgtgaccgagtgccttgtggaatcgtgtgggatgctacctgataaaccaggcttctttaaccatgcagagcagacaggctgtttctttgacacaaatatcacaggcttcagggttaagattgctgtttttctgtccttgctttggcacaacacactgagggttttttttattgcgggtttgcctacaggtagattagattaattattactatgtaatgcaagtacagttgggggaaagcttaggtagatatattttttttaaaaggtgctgcctttttggatttataagaaaatggctgtcagtcgtgatagaacagagttttcctcatatgagtaagaggaagggactttcactttcaagtggaacggccatcactatcaagatcagctcatggaaggagtaaagaaaatatctcaaaatgagacaaactgaagttttgttttttttttaatgacttaagtttttgtgctcttgcaagactatacaaaactattttaagaaagcagtgatatcacttgaacttcagtgccctcactgtagaatttaaaagccttactgttgattgcccatggtggacttgatggagaaattaaatatctttcattatgctttacaaaatactgtatatgtttcagcaagtttggggaatgggagaggacgaaaaaaagttacatttaatctatgcatttttgccaagccatattgagttattttactactagagacattaggaaactaactgtacaaaagaaccaagtttaaaagcattttgtggggtacatcatttctataattgtataatgtatttctttgtggttttaaatgataaagacattaagttaacaaacatataagaaatgtatgcactgtttgaaatgtaaattattcttagaacactttcaatgggggttgcattgtccttttagtgccttaatttgagataattattttactgccatgagtaagtatagaaatttcaaaaaatgtattttcaaaaaattatgtgtgtccgtgagtttttcattgataattggtttaatttaaaatatttagaggtttgttggactttcataaattgagtacaatctttgcatcaaactacctgctacaataatgactttataaaactgcaaaaaatgtagaaggttgcaccaatataaaaaggaaatatggcaatacatccatgatgttttccagttaacataggaattaccagataaatactgttaaactcttgtccggtaacaagagttgattcatatggacagtatgatttattgtttctttttttaaccaaatacctcctcagtaatttataatggctttgcagtaatgtctatcagataagaagcactggaaaaccgatcgtctctaggatgatatgcatgtttcaagtggtattgaaagccgcactgatggatatgtaataataaacatatctgttattaatata

SEQ ID NO: 69847 - DNA, 4538 bp, Homo sapiens
attcataagaacttcacagattcctggatagcttattagctgcatgaagtctagaatgtctacaataatataacattatacaatgtcacccattctcacatttcatacaatgtatcaaagtgctatttaagaactgtatatgctcctaagcaattatctcatcggaagagttgatgattttgaggatagtagctcactcagaaggtttcacagtgtagcaatcgtagatacttatcttcagcaaatcctaatgataacagaactagctccaatgcagataaaagcttgcaggaaagtttgcaaaaaacaatctataagctggaagaacagctgcataatgaaatgcagttaaaagatgaaatggagcagaagtgcagaacctcaaacataaaactagacaagataatgaaagaattggatgaagagggaaatcaaagaagaaatctagaatctacagtgtctcagattgagaaggagaaaatgttgctacagcatagaattaatgagtaccaaagaaaagctgaacaggaaaatgagaagagaagaaatgtagaaaatgaagtttctacattaaaggatcagttggaagacttaaagaaagtcagtcagaattcacagcttgctaatgagaagctgtcccagttacaaaagcagctagaagaagccaatgacttacttaggacagaatcggacacagctgtaagattgaggaagagtcacacagagatgagcaagtcaattagtcagttagagtccctgaacagagagttgcaagagagaaatcgaattttagagaattctaagtcacaaacagacaaagattattaccagctgcaagctatattagaagctgaacgaagagacagaggtcatgattctgagatgattggagaccttcaagctcgaattacatctttacaagaggaggtgaagcatctcaaacataatctcgaaaaagtggaaggagaaagaaaagaggctcaagacatgcttaatcactcagaaaaggaaaagaataatttagagatagatttaaactacaaacttaaatcattacaacaacggttagaacaagaggtaaatgaacacaaagtaaccaaagctcgtttaactgacaaacatcaatctattgaagaggcaaagtctgtggcaatgtgtgagatggaaaaaaagctgaaagaagaaagagaagctcgagagaaggctgaaaatcgggttgttcagattgagaaacagtgttccatgctagacgttgatctgaagcaatctcagcagaaactagaacatttgactggaaataaagaaaggatggaggatgaagttaagaatctaaccctgcaactggagcaggaatcaaataagcggctgttgttacaaaatgaattgaagactcaagcatttgaggcagacaatttaaaaggtttagaaaagcagatgaaacaggaaataaatactttattggaagcaaagagattattagaatttgagttagctcagcttacgaaacagtatagaggaaatgaaggacagatgcgggagctacaagatcagcttgaagctgagcaatatttctcgacactttataaaacccaggtaaaggaacttaaagaagaaattgaagaaaaaaacagagaaaatttaaagaaaatacaggaactacaaaatgaaaaagaaactcttgctactcagttggatctagcagaaacaaaagctgagtctgagcagttggcgcgaggccttctggaagaacagtattttgaattgacgcaagaaagcaagaaagctgcttcaagaaatagacaagagattacagataaagatcacactgttagtcggcttgaagaagcaaacagcatgctaaccaaagatattgaaatattaagaagagagaatgaagagctaacagagaaaatgaagaaggcagaggaagaatataaactggagaaggaggaggagatcagtaatcttaaggctgcctttgaaaagaatatcaacactgaacgaacccttaaaacacaggctgttaacaaattggcagaaataatgaatcgaaaagattttaaaattgatagaaagaaagctaatacacaagatttgagaaagaaagaaaaggaaaatcgaaagctgcaactggaactcaaccaagaaagagagaaattcaaccagatggtagtgaaacatcagaaggaactgaatgacatgcaagcgcaattggtagaagaatgtgcacataggaatgagcttcagatgcagttggccagcaaagagagtgatattgagcaattgcgtgctaaacttttggacctctcggattctacaagtgttgctagttttcctagtgctgatgaaactgatggtaacctcccagagtcaagaattgaaggttggctttcagtaccaaatagaggaaatatcaaacgatatggctggaagaaacagtatgttgtggtaagcagcaaaaaaattttgttctataatgacgaacaagataaggagcaatccaatccatctatggtattggacatagataaactgtttcacgttagacctgtaacccaaggagatgtgtatagagctgaaactgaagaaattcctaaaatattccagatactatatgcaaatgaaggtgaatgtagaaaagatgtagagatggaaccagtacaacaagctgaaaaaactaatttccaaaatcacaaaggccatgagtttattcctacactctaccactttcctgccaattgtgatgcctgtgccaaacctctctggcatgtttttaagccaccccctgccctagagtgtcgaagatgccatgttaagtgccacagagatcacttagataagaaagaggacttaatttgtccatgtaaagtaagttatgatgtaacatcagcaagagatatgctgctgttagcatgttctcaggatgaacaaaaaaaatgggtaactcatttagtaaagaaaatccctaagaatccaccatctggttttgttcgtgcttcccctcgaacgctttctacaagatccactgcaaatcagtctttccggaaagtggtcaaaaatacatctggaaaaactagttaaccatgtgaccgagtgccttgtggaatcgtgtgggatgctacctgataaaccaggcttctttaaccatgcagagcagacaggctgtttctttgacacaaatatcacaggcttcagggttaagattgctgtttttctgtccttgctttggcacaacacactgagggttttttttattgcgggtttgcctacaggtagattagattaattattactatgtaatgcaagtacagttgggggaaagcttaggtagatatattttttttaaaaggtgctgcctttttggatttataagaaaatggctgtcagtcgtgatagaacagagttttcctcatatgagtaagaggaagggactttcactttcaagtggaacggccatcactatcaagatcagctcatggaaggagtaaagaaaatatctcaaaatgagacaaactgaagttttgttttttttttaatgacttaagtttttgtgctcttgcaagactatacaaaactattttaagaaagcagtgatatcacttgaacttcagtgccctcactgtagaatttaaaagccttactgttgattgcccatggtggacttgatggagaaattaaatatctttcattatgctttacaaaatactgtatatgtttcagcaagtttggggaatgggagaggacgaaaaaaagttacatttaatctatgcatttttgccaagccatattgagttattttactactagagacattaggaaactaactgtacaaaagaaccaagtttaaaagcattttgtggggtacatcatttctataattgtataatgtatttctttgtggttttaaatgataaagacattaagttaacaaacatataagaaatgtatgcactgtttgaaatgtaaattattcttagaacactttcaatgggggttgcattgtccttttagtgccttaatttgagataattattttactgccatgagtaagtatagaaatttcaaaaaatgtattttcaaaaaattatgtgtgtccgtgagtttttcattgataattggtttaatttaaaatatttagaggtttgttggactttcataaattgagtacaatctttgcatcaaactacctgctacaataatgactttataaaactgcaaaaaatgtagaaggttgcaccaatataaaaaggaaatatggcaatacatccatgatgttttccagttaacataggaattaccagataaatactgttaaactcttgtccggtaacaagagttgattcatatggacagtatgatttattgtttctttttttaaccaaatacctcctcagtaatttataatggctttgcagtaatgtctatcagataagaagcactggaaaaccgatcgtctctaggatgatatgcatgtttcaagtggtattgaaagccgcactgatggatatgtaataataaacatatctgttattaatata

SEQ ID NO: 69848 - DNA, 4344 bp, Homo sapiens
ttttgtgcttcaaaaaatattttgaaaaaaggccataggcttcacttgactgccaaagagatccatggcaccaagaaaggatacaaaactctagttaagtggaaaagtaaggaatgttagtgtttaacactgggcaataagaaatacgtatatttctaatctgtattgcttttgtttttacagaacctcaaacataaaactagacaagataatgaaagaattggatgaagagggaaatcaaagaagaaatctagaatctacagtgtctcagattgagaaggagaaaatgttgctacagcatagaattaatgagtaccaaagaaaagctgaacaggaaaatgagaagagaagaaatgtagaaaatgaagtttctacattaaaggatcagttggaagacttaaagaaagtcagtcagaattcacagcttgctaatgagaagctgtcccagttacaaaagcagctagaagaagccaatgacttacttaggacagaatcggacacagctgtaagattgaggaagagtcacacagagatgagcaagtcaattagtcagttagagtccctgaacagagagttgcaagagagaaatcgaattttagagaattctaagtcacaaacagacaaagattattaccagctgcaagctatattagaagctgaacgaagagacagaggtcatgattctgagatgattggagaccttcaagctcgaattacatctttacaagaggaggtgaagcatctcaaacataatctcgaaaaagtggaaggagaaagaaaagaggctcaagacatgcttaatcactcagaaaaggaaaagaataatttagagatagatttaaactacaaacttaaatcattacaacaacggttagaacaagaggtaaatgaacacaaagtaaccaaagctcgtttaactgacaaacatcaatctattgaagaggcaaagtctgtggcaatgtgtgagatggaaaaaaagctgaaagaagaaagagaagctcgagagaaggctgaaaatcgggttgttcagattgagaaacagtgttccatgctagacgttgatctgaagcaatctcagcagaaactagaacatttgactggaaataaagaaaggatggaggatgaagttaagaatctaaccctgcaactggagcaggaatcaaataagcggctgttgttacaaaatgaattgaagactcaagcatttgaggcagacaatttaaaaggtttagaaaagcagatgaaacaggaaataaatactttattggaagcaaagagattattagaatttgagttagctcagcttacgaaacagtatagaggaaatgaaggacagatgcgggagctacaagatcagcttgaagctgagcaatatttctcgacactttataaaacccaggtaaaggaacttaaagaagaaattgaagaaaaaaacagagaaaatttaaagaaaatacaggaactacaaaatgaaaaagaaactcttgctactcagttggatctagcagaaacaaaagctgagtctgagcagttggcgcgaggccttctggaagaacagtattttgaattgacgcaagaaagcaagaaagctgcttcaagaaatagacaagagattacagataaagatcacactgttagtcggcttgaagaagcaaacagcatgctaaccaaagatattgaaatattaagaagagagaatgaagagctaacagagaaaatgaagaaggcagaggaagaatataaactggagaaggaggaggagatcagtaatcttaaggctgcctttgaaaagaatatcaacactgaacgaacccttaaaacacaggctgttaacaaattggcagaaataatgaatcgaaaagattttaaaattgatagaaagaaagctaatacacaagatttgagaaagaaagaaaaggaaaatcgaaagctgcaactggaactcaaccaagaaagagagaaattcaaccagatggtagtgaaacatcagaaggaactgaatgacatgcaagcgcaattggtagaagaatgtgcacataggaatgagcttcagatgcagttggccagcaaagagagtgatattgagcaattgcgtgctaaacttttggacctctcggattctacaagtgttgctagttttcctagtgctgatgaaactgatggtaacctcccagagtcaagaattgaaggttggctttcagtaccaaatagaggaaatatcaaacgatatggctggaagaaacagtatgttgtggtaagcagcaaaaaaattttgttctataatgacgaacaagataaggagcaatccaatccatctatggtattggacatagataaactgtttcacgttagacctgtaacccaaggagatgtgtatagagctgaaactgaagaaattcctaaaatattccagatactatatgcaaatgaaggtgaatgtagaaaagatgtagagatggaaccagtacaacaagctgaaaaaactaatttccaaaatcacaaaggccatgagtttattcctacactctaccactttcctgccaattgtgatgcctgtgccaaacctctctggcatgtttttaagccaccccctgccctagagtgtcgaagatgccatgttaagtgccacagagatcacttagataagaaagaggacttaatttgtccatgtaaagtaagttatgatgtaacatcagcaagagatatgctgctgttagcatgttctcaggatgaacaaaaaaaatgggtaactcatttagtaaagaaaatccctaagaatccaccatctggttttgttcgtgcttcccctcgaacgctttctacaagatccactgcaaatcagtctttccggaaagtggtcaaaaatacatctggaaaaactagttaaccatgtgaccgagtgccttgtggaatcgtgtgggatgctacctgataaaccaggcttctttaaccatgcagagcagacaggctgtttctttgacacaaatatcacaggcttcagggttaagattgctgtttttctgtccttgctttggcacaacacactgagggttttttttattgcgggtttgcctacaggtagattagattaattattactatgtaatgcaagtacagttgggggaaagcttaggtagatatattttttttaaaaggtgctgcctttttggatttataagaaaatggctgtcagtcgtgatagaacagagttttcctcatatgagtaagaggaagggactttcactttcaagtggaacggccatcactatcaagatcagctcatggaaggagtaaagaaaatatctcaaaatgagacaaactgaagttttgttttttttttaatgacttaagtttttgtgctcttgcaagactatacaaaactattttaagaaagcagtgatatcacttgaacttcagtgccctcactgtagaatttaaaagccttactgttgattgcccatggtggacttgatggagaaattaaatatctttcattatgctttacaaaatactgtatatgtttcagcaagtttggggaatgggagaggacgaaaaaaagttacatttaatctatgcatttttgccaagccatattgagttattttactactagagacattaggaaactaactgtacaaaagaaccaagtttaaaagcattttgtggggtacatcatttctataattgtataatgtatttctttgtggttttaaatgataaagacattaagttaacaaacatataagaaatgtatgcactgtttgaaatgtaaattattcttagaacactttcaatgggggttgcattgtccttttagtgccttaatttgagataattattttactgccatgagtaagtatagaaatttcaaaaaatgtattttcaaaaaattatgtgtgtccgtgagtttttcattgataattggtttaatttaaaatatttagaggtttgttggactttcataaattgagtacaatctttgcatcaaactacctgctacaataatgactttataaaactgcaaaaaatgtagaaggttgcaccaatataaaaaggaaatatggcaatacatccatgatgttttccagttaacataggaattaccagataaatactgttaaactcttgtccggtaacaagagttgattcatatggacagtatgatttattgtttctttttttaaccaaatacctcctcagtaatttataatggctttgcagtaatgtctatcagataagaagcactggaaaaccgatcgtctctaggatgatatgcatgtttcaagtggtattgaaagccgcactgatggatatgtaataataaacatatctgttattaatata

SEQ ID NO: 69849 - DNA, 4173 bp, Homo sapiens
acattaaacatgataatgaagcacttgggctgaatgagggagttgcaacatgggaattcgtatgatatctcatagggtatcatgttgataaggagagattgtagcttcagcatatgaaatataatgaggaccggaagaacgagctgtaactaggaaaattcagagataggaagaacatgtggacattgatgtatctattataaagggatccgttggaagcactggaatcaaagtcacggccacgagatccgagcttgctaatgagaagctgtcccagttacaaaagcagctagaagaagccaatgacttacttaggacagaatcggacacagctgtaagattgaggaagagtcacacagagatgagcaagtcaattagtcagttagagtccctgaacagagagttgcaagagagaaatcgaattttagagaattctaagtcacaaacagacaaagattattaccagctgcaagctatattagaagctgaacgaagagacagaggtcatgattctgagatgattggagaccttcaagctcgaattacatctttacaagaggaggtgaagcatctcaaacataatctcgaaaaagtggaaggagaaagaaaagaggctcaagacatgcttaatcactcagaaaaggaaaagaataatttagagatagatttaaactacaaacttaaatcattacaacaacggttagaacaagaggtaaatgaacacaaagtaaccaaagctcgtttaactgacaaacatcaatctattgaagaggcaaagtctgtggcaatgtgtgagatggaaaaaaagctgaaagaagaaagagaagctcgagagaaggctgaaaatcgggttgttcagattgagaaacagtgttccatgctagacgttgatctgaagcaatctcagcagaaactagaacatttgactggaaataaagaaaggatggaggatgaagttaagaatctaaccctgcaactggagcaggaatcaaataagcggctgttgttacaaaatgaattgaagactcaagcatttgaggcagacaatttaaaaggtttagaaaagcagatgaaacaggaaataaatactttattggaagcaaagagattattagaatttgagttagctcagcttacgaaacagtatagaggaaatgaaggacagatgcgggagctacaagatcagcttgaagctgagcaatatttctcgacactttataaaacccaggtaaaggaacttaaagaagaaattgaagaaaaaaacagagaaaatttaaagaaaatacaggaactacaaaatgaaaaagaaactcttgctactcagttggatctagcagaaacaaaagctgagtctgagcagttggcgcgaggccttctggaagaacagtattttgaattgacgcaagaaagcaagaaagctgcttcaagaaatagacaagagattacagataaagatcacactgttagtcggcttgaagaagcaaacagcatgctaaccaaagatattgaaatattaagaagagagaatgaagagctaacagagaaaatgaagaaggcagaggaagaatataaactggagaaggaggaggagatcagtaatcttaaggctgcctttgaaaagaatatcaacactgaacgaacccttaaaacacaggctgttaacaaattggcagaaataatgaatcgaaaagattttaaaattgatagaaagaaagctaatacacaagatttgagaaagaaagaaaaggaaaatcgaaagctgcaactggaactcaaccaagaaagagagaaattcaaccagatggtagtgaaacatcagaaggaactgaatgacatgcaagcgcaattggtagaagaatgtgcacataggaatgagcttcagatgcagttggccagcaaagagagtgatattgagcaattgcgtgctaaacttttggacctctcggattctacaagtgttgctagttttcctagtgctgatgaaactgatggtaacctcccagagtcaagaattgaaggttggctttcagtaccaaatagaggaaatatcaaacgatatggctggaagaaacagtatgttgtggtaagcagcaaaaaaattttgttctataatgacgaacaagataaggagcaatccaatccatctatggtattggacatagataaactgtttcacgttagacctgtaacccaaggagatgtgtatagagctgaaactgaagaaattcctaaaatattccagatactatatgcaaatgaaggtgaatgtagaaaagatgtagagatggaaccagtacaacaagctgaaaaaactaatttccaaaatcacaaaggccatgagtttattcctacactctaccactttcctgccaattgtgatgcctgtgccaaacctctctggcatgtttttaagccaccccctgccctagagtgtcgaagatgccatgttaagtgccacagagatcacttagataagaaagaggacttaatttgtccatgtaaagtaagttatgatgtaacatcagcaagagatatgctgctgttagcatgttctcaggatgaacaaaaaaaatgggtaactcatttagtaaagaaaatccctaagaatccaccatctggttttgttcgtgcttcccctcgaacgctttctacaagatccactgcaaatcagtctttccggaaagtggtcaaaaatacatctggaaaaactagttaaccatgtgaccgagtgccttgtggaatcgtgtgggatgctacctgataaaccaggcttctttaaccatgcagagcagacaggctgtttctttgacacaaatatcacaggcttcagggttaagattgctgtttttctgtccttgctttggcacaacacactgagggttttttttattgcgggtttgcctacaggtagattagattaattattactatgtaatgcaagtacagttgggggaaagcttaggtagatatattttttttaaaaggtgctgcctttttggatttataagaaaatggctgtcagtcgtgatagaacagagttttcctcatatgagtaagaggaagggactttcactttcaagtggaacggccatcactatcaagatcagctcatggaaggagtaaagaaaatatctcaaaatgagacaaactgaagttttgttttttttttaatgacttaagtttttgtgctcttgcaagactatacaaaactattttaagaaagcagtgatatcacttgaacttcagtgccctcactgtagaatttaaaagccttactgttgattgcccatggtggacttgatggagaaattaaatatctttcattatgctttacaaaatactgtatatgtttcagcaagtttggggaatgggagaggacgaaaaaaagttacatttaatctatgcatttttgccaagccatattgagttattttactactagagacattaggaaactaactgtacaaaagaaccaagtttaaaagcattttgtggggtacatcatttctataattgtataatgtatttctttgtggttttaaatgataaagacattaagttaacaaacatataagaaatgtatgcactgtttgaaatgtaaattattcttagaacactttcaatgggggttgcattgtccttttagtgccttaatttgagataattattttactgccatgagtaagtatagaaatttcaaaaaatgtattttcaaaaaattatgtgtgtccgtgagtttttcattgataattggtttaatttaaaatatttagaggtttgttggactttcataaattgagtacaatctttgcatcaaactacctgctacaataatgactttataaaactgcaaaaaatgtagaaggttgcaccaatataaaaaggaaatatggcaatacatccatgatgttttccagttaacataggaattaccagataaatactgttaaactcttgtccggtaacaagagttgattcatatggacagtatgatttattgtttctttttttaaccaaatacctcctcagtaatttataatggctttgcagtaatgtctatcagataagaagcactggaaaaccgatcgtctctaggatgatatgcatgtttcaagtggtattgaaagccgcactgatggatatgtaataataaacatatctgttattaatata

SEQ ID NO: 69850 - DNA, 2826 bp, Homo sapiens
agacatttgctgtagttcagcagtgtctgacctgtctttatctagcagtatatttaaaggttactgcctgaaatacgagaatagcaaagaggctggagcttaaacttttgtgtgctttgtttagcttgaagaagcaaacagcatgctaaccaaagatattgaaatattaagaagagagaatgaagagctaacagagaaaatgaagaaggcagaggaagaatataaactggagaaggaggaggagatcagtaatcttaaggctgcctttgaaaagaatatcaacactgaacgaacccttaaaacacaggctgttaacaaattggcagaaataatgaatcgaaaagattttaaaattgatagaaagaaagctaatacacaagatttgagaaagaaagaaaaggaaaatcgaaagctgcaactggaactcaaccaagaaagagagaaattcaaccagatggtagtgaaacatcagaaggaactgaatgacatgcaagcgcaattggtagaagaatgtgcacataggaatgagcttcagatgcagttggccagcaaagagagtgatattgagcaattgcgtgctaaacttttggacctctcggattctacaagtgttgctagttttcctagtgctgatgaaactgatggtaacctcccagagtcaagaattgaaggttggctttcagtaccaaatagaggaaatatcaaacgatatggctggaagaaacagtatgttgtggtaagcagcaaaaaaattttgttctataatgacgaacaagataaggagcaatccaatccatctatggtattggacatagataaactgtttcacgttagacctgtaacccaaggagatgtgtatagagctgaaactgaagaaattcctaaaatattccagatactatatgcaaatgaaggtgaatgtagaaaagatgtagagatggaaccagtacaacaagctgaaaaaactaatttccaaaatcacaaaggccatgagtttattcctacactctaccactttcctgccaattgtgatgcctgtgccaaacctctctggcatgtttttaagccaccccctgccctagagtgtcgaagatgccatgttaagtgccacagagatcacttagataagaaagaggacttaatttgtccatgtaaagtaagttatgatgtaacatcagcaagagatatgctgctgttagcatgttctcaggatgaacaaaaaaaatgggtaactcatttagtaaagaaaatccctaagaatccaccatctggttttgttcgtgcttcccctcgaacgctttctacaagatccactgcaaatcagtctttccggaaagtggtcaaaaatacatctggaaaaactagttaaccatgtgaccgagtgccttgtggaatcgtgtgggatgctacctgataaaccaggcttctttaaccatgcagagcagacaggctgtttctttgacacaaatatcacaggcttcagggttaagattgctgtttttctgtccttgctttggcacaacacactgagggttttttttattgcgggtttgcctacaggtagattagattaattattactatgtaatgcaagtacagttgggggaaagcttaggtagatatattttttttaaaaggtgctgcctttttggatttataagaaaatggctgtcagtcgtgatagaacagagttttcctcatatgagtaagaggaagggactttcactttcaagtggaacggccatcactatcaagatcagctcatggaaggagtaaagaaaatatctcaaaatgagacaaactgaagttttgttttttttttaatgacttaagtttttgtgctcttgcaagactatacaaaactattttaagaaagcagtgatatcacttgaacttcagtgccctcactgtagaatttaaaagccttactgttgattgcccatggtggacttgatggagaaattaaatatctttcattatgctttacaaaatactgtatatgtttcagcaagtttggggaatgggagaggacgaaaaaaagttacatttaatctatgcatttttgccaagccatattgagttattttactactagagacattaggaaactaactgtacaaaagaaccaagtttaaaagcattttgtggggtacatcatttctataattgtataatgtatttctttgtggttttaaatgataaagacattaagttaacaaacatataagaaatgtatgcactgtttgaaatgtaaattattcttagaacactttcaatgggggttgcattgtccttttagtgccttaatttgagataattattttactgccatgagtaagtatagaaatttcaaaaaatgtattttcaaaaaattatgtgtgtccgtgagtttttcattgataattggtttaatttaaaatatttagaggtttgttggactttcataaattgagtacaatctttgcatcaaactacctgctacaataatgactttataaaactgcaaaaaatgtagaaggttgcaccaatataaaaaggaaatatggcaatacatccatgatgttttccagttaacataggaattaccagataaatactgttaaactcttgtccggtaacaagagttgattcatatggacagtatgatttattgtttctttttttaaccaaatacctcctcagtaatttataatggctttgcagtaatgtctatcagataagaagcactggaaaaccgatcgtctctaggatgatatgcatgtttcaagtggtattgaaagccgcactgatggatatgtaataataaacatatctgttattaatata

SEQ ID NO: 69851 - DNA, 2402 bp, Homo sapiens
agcactgcctacagggaatttcgacaaatctctgcactgatcacctaggtgatgtaactcttgtctaccctctgcctacagggggcgttgtgaaatatctctgcactgatcacccaggtgatgcaactcttgactaggatctgcctacaggaggtattgtgaaatatctctgcactgatcaactaggtgatgtaactcttgtctaagctctgcctgcaggggcgttttcacatatccctgaactgatgacaaaggtgatgtaactcttgcctaggctttgcctacaggggacattgtgacatatctctgcactgatcacccaggtgatgcaactcttctctgtgctctgcctacagggtacattgtgacatatctctgcacagatcacccagtaaactgtttcacgttagacctgtaacccaaggagatgtgtatagagctgaaactgaagaaattcctaaaatattccagatactatatgcaaatgaaggtgaatgtagaaaagatgtagagatggaaccagtacaacaagctgaaaaaactaatttccaaaatcacaaaggccatgagtttattcctacactctaccactttcctgccaattgtgatgcctgtgccaaacctctctggcatgtttttaagccaccccctgccctagagtgtcgaagatgccatgttaagtgccacagagatcacttagataagaaagaggacttaatttgtccatgtaaagtaagttatgatgtaacatcagcaagagatatgctgctgttagcatgttctcaggatgaacaaaaaaaatgggtaactcatttagtaaagaaaatccctaagaatccaccatctggttttgttcgtgcttcccctcgaacgctttctacaagatccactgcaaatcagtctttccggaaagtggtcaaaaatacatctggaaaaactagttaaccatgtgaccgagtgccttgtggaatcgtgtgggatgctacctgataaaccaggcttctttaaccatgcagagcagacaggctgtttctttgacacaaatatcacaggcttcagggttaagattgctgtttttctgtccttgctttggcacaacacactgagggttttttttattgcgggtttgcctacaggtagattagattaattattactatgtaatgcaagtacagttgggggaaagcttaggtagatatattttttttaaaaggtgctgcctttttggatttataagaaaatggctgtcagtcgtgatagaacagagttttcctcatatgagtaagaggaagggactttcactttcaagtggaacggccatcactatcaagatcagctcatggaaggagtaaagaaaatatctcaaaatgagacaaactgaagttttgttttttttttaatgacttaagtttttgtgctcttgcaagactatacaaaactattttaagaaagcagtgatatcacttgaacttcagtgccctcactgtagaatttaaaagccttactgttgattgcccatggtggacttgatggagaaattaaatatctttcattatgctttacaaaatactgtatatgtttcagcaagtttggggaatgggagaggacgaaaaaaagttacatttaatctatgcatttttgccaagccatattgagttattttactactagagacattaggaaactaactgtacaaaagaaccaagtttaaaagcattttgtggggtacatcatttctataattgtataatgtatttctttgtggttttaaatgataaagacattaagttaacaaacatataagaaatgtatgcactgtttgaaatgtaaattattcttagaacactttcaatgggggttgcattgtccttttagtgccttaatttgagataattattttactgccatgagtaagtatagaaatttcaaaaaatgtattttcaaaaaattatgtgtgtccgtgagtttttcattgataattggtttaatttaaaatatttagaggtttgttggactttcataaattgagtacaatctttgcatcaaactacctgctacaataatgactttataaaactgcaaaaaatgtagaaggttgcaccaatataaaaaggaaatatggcaatacatccatgatgttttccagttaacataggaattaccagataaatactgttaaactcttgtccggtaacaagagttgattcatatggacagtatgatttattgtttctttttttaaccaaatacctcctcagtaatttataatggctttgcagtaatgtctatcagataagaagcactggaaaaccgatcgtctctaggatgatatgcatgtttcaagtggtattgaaagccgcactgatggatatgtaataataaacatatctgttattaatata

SEQ ID NO: 69852 - DNA, 1730 bp, Homo sapiens
cggtctccgtttgtttgaacaggaaggcggacatattagtccctctcagcccccctcgccccaccccccaggcattcgccgccgcgactcgccctttccccggctgggaccgcagcccctcccagaagctcccccatcagcagccgccgggacccaactatcgtcttcctcttcgcccgctctccagcctttcctctgctaagtctccatcgggcatcgacctcgccctgccccaccggacaccgtagcagcagccccagcagcgacgggacaaaatgggagagtgaggctgtcctgcgtggaccagctcgtggccgagactgatcggtgcgtcgggccgggccgagtagagccggggacgcggggctagaccgtctacagcgcctctgagcggagcgggcccggcccgtggcccgagcggcggccgcagctggcacagctcctcacccgccctttgctttcgcctttcctcttctccctcccttgttgcccggagggagtctccaccctgcttctctttctctacccgctcctgcccatctcgggacggggacccctccatggcgacggcggccggggcccgctagactgaagcacctcgccggagcgacgaggctggtggcgacggcgctgtcggctgtcgtgaggggctgccgggtgggatgcgactttgggcgtccgagcggctgtgggtcgctgttgcccccggcccggggtctggagagcggaggtcccctcagtgaggggaagacgggggaaccgggcgcacctggtgaccctgaggttccggctcctccgccccgcggctgcgaacccaccgcggaggaagttggttgaaattgctttccgctgctggtgctggtaagagggcattgtcacagcagcagcaacatgtcgactggggacagttttgagactcgatttgaaaaaatggacaacctgctgcgggatcccaaatcggaagtgaattcggattgtttgctggatggattggatgctttggtatatgatttggattttcctgccttaagaaaaaacaaaaatattgacaactttttaagcagatataaagacacaataaataaaatcagagatttacgaatgaaagctgaagattatgaagtagtgaaggtgattggtagaggtgcatttggagaagttcaattggtaaggcataaatccaccaggaaggtatatgctatgaagcttctcagcaaatttgaaatgataaagagatctgattctgcttttttctgggaagaaagggacatcatggcttttgccaacagtccttgggttgttcagcttttttatgcattccaagatgatcgttatctctacatggtgatggaatacatgcctggtggagatcttgtaaacttaatgagcaactatgatgtgcctgaaaaatgggcacgattctatactgcagaagtagttcttgcattggatgcaatccattccatgggttttattcacaggtaaagataaaagtgctttaaattttctcatttgttgagggaaatagctaaaaataactttaacatttcttactctcagttcacccattcttcttccgtatgacataagtgacctttcagaactcaagactctggccaggcgctgcctcacgcctgtaatcccagagctttgggaggccgaggcaggcagatctcttgagctcaggagtttgacaccagcctggacaacatggtgaaacccatctctac

SEQ ID NO: 69853 - DNA, 527 bp, Homo sapiens
gtaatattttttcttattgtggtaaaatatacgtaacatgaaatttattataacattttaaccatttttatatatacagttcagtgggattaaatgcagttcacaatgtatgcaaccatcatcatataagtggaatcatacagtgtttgtccttttgcgtctggcttttttcacttagcacaatgtcttcaaggtttatccatgttgtgtgtgtcagattttccttcctttttagggctcagtaatattccatggtatgtgtataccacattttgttcatccactcatctatcaatggaaggaatattttataatttttatttttaattgttaaaaatatataacataaaatttaccatcttgaccatttttaagtctaagttaatatatttatgatcatattaccctcataaagaaaatgactttggtgaaaccagaaatggttgcattcttttttattgtttacgtttttttgagataggaacttgctctgttgcacaggctggagtgcagcggcatgatcacag

SEQ ID NO: 69854 - DNA, 724 bp, Homo sapiens
gtatgtaaagataatgtatatttacctttcctcctaatgtttgtttctcgtatttttaaactgagtgcatttcttaaattagtttttcccccctccctcaacagttaaccatgtgaccgagtgccttgtggaatcgtgtgggatgctacctgataaaccaggcttctttaaccatgcagagcagacaggctgtttctttgacacaaatatcacaggcttcagggttaagattgctgtttttctgtccttgctttggcacaacacactgagggttttttttattgcgggtttgcctacaggtagattagattaattattactatgtaatgcaagtacagttgggggaaagcttaggtagatatattttttttaaaaggtgctgcctttttggatttataagaaaatggctgtcagtcgtgatagaacagagttttcctcatatgagtaagaggaagggactttcactttcaagtggaacggccatcactatcaagatcagctcatggaaggagtaaagaaaatatctcaaaatgagacaaactgaagttttgttttttttttaatgacttaagtttttgtgctcttgcaagactatacaaaactattttaagaaagcagtgatatcacttgaacttcagtgccctcactgtagaatttaaaagccttactgttgattgcccatggtggacttgatggagaaattaaatatctttcattatgcttt

SEQ ID NO: 69855 - DNA, 862 bp, Homo sapiens
tccgcccatctcagccttccaaagtgctgggattacaggtgtgagccatagcgcccggctgaatgtgtgtatatttcttaattttaaccactaagactagaagcaataacattttaatagcaatcagcacatctagcattcaaatcttggattcacttttttcttctttaaaaggatacagagctccttggatcaatgcctgattctaggtgcatgcggcagaaagaacaaaatgggtctgagacatctgttgttgttaagaaaataaggaagtctcaactaatgattgagacatgccaaagaacataggagctaactagaagtggctctcagtgacccaaactgagataaattgaacaagggaataaataatgatggcaatagattattcagattaattaaaccaaatacacatgaatccacactaatataaataaataattggataaataagaaaagtgggacaaaggaaagcttttccatacagtagaattctaatcaataaatatagaaagaatagtggaaatagattctcatttcttggcaaataccacataattgttgcagacaagtctgctaaaattagtggatacaattatgagaaacaagatatttacataatctccaagtatctctcaacaaaatactgattttaaaaatggtaactttgaagtggagaaatgtggcagacaatgtcttattcaagtgatcagagttaacgtcaacaatattaggacacaataatatcatgtgcctcctgatatgatgcactgagaaggacaacctcggcattgtggcattcttgccaaaatatattatgtgaatttaaccatgaagaaatattagaaaaaaatcaaacttc

SEQ ID NO: 69856 - DNA, 1074 bp, Homo sapiens
  misc_feature (742)..(742): n is a, c, g, or t
  misc_feature (902)..(902): n is a, c, g, or t
  misc_feature (926)..(926): n is a, c, g, or t
cccctgactagctagacaggtgttacccagtgtcctcaacttactgggtaacacctgtcttgggaatgggcttaacccgtcctttgctttaggaggagaaaaaagcaccctcctgtcacctcctgcatatacacaagaggaacacgtttttaaaactgtgctccataggttcataattacagtaatccatctcctctccgttccttccttaattgtgactggcagtcacgtccccgccctctatgtcagttgagctcaactctgcgcggggcctctcattcctcctcattagtcagtctccttcccctcgccctgtcgggctagtcggggccccgactagcccgacaggtctacggccataccaccctgaacgcgcccgatctcgtctgatctcggaagctaagcagggtcgggcctggttagtacttggatgggagaccgcctgggaataccgggtgctgtaggctttttagacccaaccagccagacagcttcttttctgctggagaagactgtgttgtaatcatttggcatgagaatggccagtggaatgatgttccctgcaattaccatctcacctatacgtgcaagaaaggaacagttgcttgcagccagccccctgttgtagaaaatgccaagacctttggaaagatgaaacctcgttatgaaatcaactccctgattagataccactgcaaagatggtttcattcaacgtcaccttccaactatccggtgcttangaaatggaagatgggctatacctaaaattacctgcatgaacccatctgcataccaaaggacttattctatgaaatactttaaaaattcctcatcagcaaaggacaattcaataaatacatccaaacatgatcatcgttggagccggaggtggcaggagtngaggcgctgatccctaaaatggcnaacatgtgttttcatcatttcagccaaagtcctaacttcctgtgcctttcctatcacctcgagaagtaattatcaagttggtttggatttttggaccaccgttcaatcattttgggttgccggcttccaaaacattttaaatgaaagt

SEQ ID NO: 69857 - DNA, 639 bp, Homo sapiens
cccctgactagctagacaggtgttacccagtgtcctcaacttactgggtaacacctgtcttgggaatgggcttaacccgtcctttgctttaggaggagaaaaaagcaccctcctgtcacctcctgcatatacacaagaggaacacgtttttaaaactgtgctccataggttcataattacagtaatccatctcctctccgttccttccttaattgtgactggcagtcacgtccccgccctctatgtcagttgagctcaactctgcgcggggcctctcattcctcctcattagtcagtctccttcccctcgccctgtcgggctagtcggggccccgactagcccgacaggtctacggccataccaccctgaacgcgcccgatctcgtctgatctcggaagctaagcagggtcgggcctggttagtacttggatgggagaccgcctgggaataccgggtgctgtaggctgaagggagcaagaaagctgtagctgtgtagggctggcagaatgttgaagaccgcctctgctgctctcacatggggactgggcccagatcctgcttggtcacacccagcccagaagacgggtcctccagttccagtgactctttcagggtgtctatgttgggggatcctctag

SEQ ID NO: 69858 - DNA, 609 bp, Homo sapiens
cccctgactagctagacaggtgttacccagtgtcctcaacttactgggtaacacctgtcttgggaatgggcttaacccgtcctttgctttaggaggagaaaaaagcaccctcctgtcacctcctgcatatacacaagaggaacacgtttttaaaactgtgctccataggttcataattacagtaatccatctcctctccgttccttccttaattgtgactggcagtcacgtccccgccctctatgtcagttgagctcaactctgcgcggggcctctcattcctcctcattagtcagtctccttcccctcgccctgtcgggctagtcggggccccgactagcccgacaggtctacggccataccaccctgaacgcgcccgatctcgtctgatctcggaagctaagcagggtcgggcctggttagtacttggatgggagaccgcctgggaataccgggtgctgtaggctcgggctagtcggggctccgactagcccgacagcacaggacttgtctcaaaaacaaaaagaggtctttctgggacactggacctgcttgatcatctgccttccttgcaaaactcttccccaagccctgtcgggctagtcgggg

SEQ ID NO: 69859 - DNA, 285 bp, Homo sapiens
attgcaccactgcactccagcctgggtgacagagcaagacactgtctcaaaaattaaaaattaaaaaatgagggaagctgctgtatctccacttcttccctctctgtgcccagagatatctcttcagttatctcacatgccctacaagtctagagacctcaggtgaggagccagtagctcagtatagaaactaaggatccaagtggacaactgccaccaagtcaccacagggccagctgctttgggagggtgctgcatctgcctcccatacacttctgccaagtt

SEQ ID NO: 69860 - DNA, 1592 bp, Homo sapiens
ctgagcgcgactcggagggctacgcggcggccgcagccatgggtgctgggcctgcgggggcgcggggggtgcgcgaggacctgcggggcggggcgggagagaaggctgccgggaccggccctagacactgagccgcggtgggatccccaccggctctgcgaggccctgcgagcgccagggaggcgccacgagggagccgggcagccgcgggccacttcaggggggcccgcctcgccgcccgggcggtcgagagatccttgggggcacatctcggggtgcggtgacccgcccggcgcatttcgggggtcggggcgcaattgccagggacatctggagcccggccctgcttctgtcgggctccagggtacccctggatggctgcgctgtgccctcgccggccgcccgggcgccgcagcggctgagttcgccgggatcgccgggccgccgcccttgccacccgctgcatgctcggcgcccgggtcgcggcccacctggacgcactgggccccctggtcccctacgtgccgccgccgctgctgccctctatgttctacgtgggcctgttcttcgtcaatgtgctgatcctgtactacgccttcctcatggagtacatcgtcctcaacgtgggcctcgtcttcctgcccgaggacatggaccaggcgctcgtggacctcggcgtgctctccgaccccggctcgggcctttacgatgctgactcggagctcgacgtctttgatgcgtacttggagtagggtctcgactgctgttcccctcttccctacacgatccgcaacccatgccctggaccagccgcccagatcatgccgccgcagctggttgggggcaccatctggacggggatggttccccaggaggagaccctcccctgcctccgaggcctacctgctcccctcaaaagcttcgtgccaacagagaggttcctgtttgaacccaggagagtggaagagagattgggactgagtgctgaggttgggaaggcacctgctcccacagaagggggaacgcaagaggcatcccaagacctcatctgcctgcagtgtcaaatcgatggcctggccttggcttctgattatttgcagctgcgatggatgtttacaggaacccagccagagtttgcctccctgcacttcatcccggagcgcacctgcttcccccacttcaccttcggagaggacacttcaaactgcggacacacgcaaaagcgactcccagctccgtttgatgtgagttgagccttcaggccagctgggtttagcccgaggctggtcttagatgcagcgactgtttcaggggtgactcagaagaaaaagaagctgaggaagctgttggggggctgagggtgggattctcgctccttcatttcaggttactcgttcttcagcaagttggcaaaacagacatcatgctggtgagtgccacgttactcccctggctggaaatgcttttctgaaagtatgagtgttgtgcctacttaattctgataaacctgtctaagcaatacttaggaggcttacttctttggattaaaaaaaaatgtatgcaactccaaaaaaaaaaaaaaaaaaaagaaa

SEQ ID NO: 69861 - DNA, 1456 bp, Homo sapiens
aaaatatttttttttttcccccccggggggaattgccgccagggaggcgccacgagggagccgggcagccgcgggccacttcaggggggcccgcctcgccgcccgggcggtcgagagatccttgggggcacatctcggggtgcggtgacccgcccggcgcatttcgggggtcggggcgcaattgccagggacatctggagcccggccctgcttctgtcgggctccagggtacccctggatggctgcgctgtgccctcgccggccgcccgggcgccgcagcggctgagttcgccgggatcgccgggccgccgcccttgccacccgctgcatgctcggcgcccgggtcgcggcccacctggacgcactgggccccctggtcccctacgtgccgccgccgctgctgccctctatgttctacgtgggcctgttcttcgtcaatgtgctgatcctgtactacgccttcctcatggagtacatcgtcctcaacgtgggcctcgtcttcctgcccgaggacatggaccaggcgctcgtggacctcggcgtgctctccgaccccggctcgggcctttacgatgctgactcggagctcgacgtctttgatgcgtacttggagtagggtctcgactgctgttcccctcttccctacacgatccgcaacccatgccctggaccagccgcccagatcatgccgccgcagctggttgggggcaccatctggacggggatggttccccaggaggagaccctcccctgcctccgaggcctacctgctcccctcaaaagcttcgtgccaacagagaggttcctgtttgaacccaggagagtggaagagagattgggactgagtgctgaggttgggaaggcacctgctcccacagaagggggaacgcaagaggcatcccaagacctcatctgcctgcagtgtcaaatcgatggcctggccttggcttctgattatttgcagctgcgatggatgtttacaggaacccagccagagtttgcctccctgcacttcatcccggagcgcacctgcttcccccacttcaccttcggagaggacacttcaaactgcggacacacgcaaaagcgactcccagctccgtttgatgtgagttgagccttcaggccagctgggtttagcccgaggctggtcttagatgcagcgactgtttcaggggtgactcagaagaaaaagaagctgaggaagctgttggggggctgagggtgggattctcgctccttcatttcaggttactcgttcttcagcaagttggcaaaacagacatcatgctggtgagtgccacgttactcccctggctggaaatgcttttctgaaagtatgagtgttgtgcctacttaattctgataaacctgtctaagcaatacttaggaggcttacttctttggattaaaaaaaaatgtatgcaactccaaaaaaaaaaaaaaaaaaaagaaa

SEQ ID NO: 69862 - DNA, 1450 bp, Homo sapiens
ctgagcgcgactcggagggctacgcggcggccgcagccatgggtgctgggcctgcgggggcgcggggggtgcgcgaggacctgcggggcggggcgggagagaaggctgccgggaccggccctagacactgagccgcggtgggatccccaccggctctgcgaggccctgcgagcgccagggaggcgccacgagggagccgggcagccgcgggccacttcaggggggcccgcctcgccgcccgggcggtcgagagatccttgggggcacatctcggggtgcggtgacccgcccggcgcatttcgggggtcggggcgcaattgccagggacatctggagcccggccctgcttctgtcgggctccagggtacccctggatggctgcgctgtgccctcgccggccgcccgggcgccgcagcggctgagttcgccgggatcgccgggccgccgcccttgccacccgctgcatgctcggcgcccgggtcgcggcccacctggacgcactgggccccctggtcccctacgtgccgccgccgctgctgccctctatgttctacgtgggcctgttcttcgtcaatgtgctgatcctgtactacgccttcctcatggagtacatcgtcctcaacgtgggcctcgtcttcctgcccgaggacatggaccaggcgctcgtggacctcggcgtgctctccgaccccggctcgggcctttacgatgctgactcggagctcgacgtctttgatgcgtacttggagtagggtctcgactgctgttcccctcttccctacacgatccgcaacccatgccctggaccagccgcccagatcatgccgccgcagctggttgggggcaccatctggacggggatggttccccaggaggagaccctcccctgcctccgaggcctacctgctcccctcaaaagcttcgtgccaacagagaggttcctgtttgaacccaggagagtggaagagagattgggactgagtgctgaggttgggaaggcacctgctcccacagaagggggaacgcaagaggcatcccaagacctcatctgcctgcagtgtcaaatcgatggcctggccttggcttctgattatttgcagctgcgatggatgtttacaggaacccagccagagtttgcctccctgcacttcatcccggagcgcacctgcttcccccacttcaccttcggagaggacacttcaaactgcggacacacgcaaaagcgactcccagctccgtttgatgttactcgttcttcagcaagttggcaaaacagacatcatgctggtgagtgccacgttactcccctggctggaaatgcttttctgaaagtatgagtgttgtgcctacttaattctgataaacctgtctaagcaatacttaggaggcttacttctttggattaaaaaaaaatgtatgcaactccaaaaaaaaaaaaaaaaaaaagaaa

SEQ ID NO: 69863 - DNA, 899 bp, Homo sapiens
tcattaaaaagagttttatatttgcagaaagacattttcagcctgagtctggggctcccagtggttccctaaatttgagggatggaggaagacttccctgccccaccccaagcctcccgagcctggtggattggtccctgtccccagccaacctggtggcagggtggggcttccgtgctaataacccccctttttccttcttgttagaccctgctcccctcaaaagcttcgtgccaacagagaggttcctgtttgaacccaggagagtggaagagagattgggactgagtgctgaggttgggaaggcacctgctcccacagaagggggaacgcaagaggcatcccaagacctcatctgcctgcagtgtcaaatcgatggcctggccttggcttctgattatttgcagctgcgatggatgtttacaggaacccagccagagtttgcctccctgcacttcatcccggagcgcacctgcttcccccacttcaccttcggagaggacacttcaaactgcggacacacgcaaaagcgactcccagctccgtttgatgtgagttgagccttcaggccagctgggtttagcccgaggctggtcttagatgcagcgactgtttcaggggtgactcagaagaaaaagaagctgaggaagctgttggggggctgagggtgggattctcgctccttcatttcaggttactcgttcttcagcaagttggcaaaacagacatcatgctggtgagtgccacgttactcccctggctggaaatgcttttctgaaagtatgagtgttgtgcctacttaattctgataaacctgtctaagcaatacttaggaggcttacttctttggattaaaaaaaaatgtatgcaactccaaaaaaaaaaaaaaaaaaaagaaa

SEQ ID NO: 69864 - DNA, 1017 bp, Homo sapiens
ctgagcgcgactcggagggctacgcggcggccgcagccatgggtgctgggcctgcgggggcgcggggggtgcgcgaggacctgcggggcggggcgggagagaaggctgccgggaccggccctagacactgagccgcggtgggatccccaccggctctgcgaggccctgcgagcgccagggaggcgccacgagggagccgggcagccgcgggccacttcaggggggcccgcctcgccgcccgggcggtcgagagatccttgggggcacatctcggggtgcggtgacccgcccggcgcatttcgggggtcggggcgcaattgccagggacatctggagcccggccctgcttctgtcgggctccagggtacccctggatggctgcgctgtgccctcgccggccgcccgggcgccgcagcggctgagttcgccgggatcgccgggccgccgcccttgccacccgctgcatgctcggcgcccgggtcgcggcccacctggacgcactgggccccctggtcccctacgtgccgccgccgctgctgccctctatgttctacgtgggcctgttcttcgtcaatgtgctgatcctgtactacgccttcctcatggagtacatcgtcctcaacgtgggcctcgtcttcctgcccgaggacatggaccaggcgctcgtggacctcggcgtgctctccgaccccggctcgggcctttacgatgctgactcggagctcgacgtctttgatgcgtacttggagtagggtctcgactgctgttcccctcttccctacacgatccgcaacccatgccctggaccagccgcccagatcatgccgccgcagctggttgggggcaccatctggacggggatggttccccaggaggagaccctcccctgcctccgaggcctataagtgccctctctgaacaggatgagggcgggttggggcgctagcaagggagagggaggaattcccaggccaggatacacacccctccctcagcttctaaggggtagccagctca

SEQ ID NO: 69865 - DNA, 793 bp, Homo sapiens
gcaggagacagccagaccccagccatgccttcattctgagataaggtagagaccctcctgccacatagcctgtcaccagcgtggaggatcagaatggctgcaccctgctcccctcaaaagcttcgtgccaacagagaggttcctgtttgaacccaggagagtggaagagagattgggactgagtgctgaggttgggaaggcacctgctcccacagaagggggaacgcaagaggcatcccaagacctcatctgcctgcagtgtcaaatcgatggcctggccttggcttctgattatttgcagctgcgatggatgtttacaggaacccagccagagtttgcctccctgcacttcatcccggagcgcacctgcttcccccacttcaccttcggagaggacacttcaaactgcggacacacgcaaaagcgactcccagctccgtttgatgtgagttgagccttcaggccagctgggtttagcccgaggctggtcttagatgcagcgactgtttcaggggtgactcagaagaaaaagaagctgaggaagctgttggggggctgagggtgggattctcgctccttcatttcaggttactcgttcttcagcaagttggcaaaacagacatcatgctggtgagtgccacgttactcccctggctggaaatgcttttctgaaagtatgagtgttgtgcctacttaattctgataaacctgtctaagcaatacttaggaggcttacttctttggattaaaaaaaaatgtatgcaactccaaaaaaaaaaaaaaaaaaaagaaa

SEQ ID NO: 69866 - DNA, 1130 bp, Homo sapiens
ctgagcgcgactcggagggctacgcggcggccgcagccatgggtgctgggcctgcgggggcgcggggggtgcgcgaggacctgcggggcggggcgggagagaaggctgccgggaccggccctagacactgagccgcggtgggatccccaccggctctgcgaggccctgcgagcgccagggaggcgccacgagggagccgggcagccgcgggccacttcaggggggcccgcctcgccgcccgggcggtcgagagatccttgggggcacatctcggggtgcggtgacccgcccggcgcatttcgggggtcggggcgcaattgccagggacatctggagcccggccctgcttctgtcgggctccagggtacccctggatggctgcgctgtgccctcgccggccgcccgggcgccgcagcggctgagttcgccgggatcgccgggccgccgcccttgccacccgctgcatgctcggcgcccgggtcgcggcccacctggacgcactgggccccctggtcccctacgtgccgccgccgctgctgccctctatgttctacgtgggcctgttcttcgtcaatgtgctgatcctgtactacgccttcctcatggagtacatcgtcctcaacgtgggcctcgtcttcctgcccgaggacatggaccaggcgctcgtggacctcggcgtgctctccgaccccggctcgggcctttacgatgctgactcggagctcgacgtctttgatgcgtacttggagtagggtctcgactgctgttcccctcttccctacacgatccgcaacccatgccctggaccagccgcccagatcatgccgccgcagctggttgggggcaccatctggacggggatggttccccaggaggagaccctcccctgcctccgaggcctacctgctcccctcaaaagcttcgtgccaacagagaggttcctgtttgaacccaggagagtggaagagagattgggactgagtgctgaggttgggaaggcacctgctcccacagaagggggaacgcaagaggcatcccaagacctcatctgcctgcagtgtcaaatcgatggcctggccttggcttctgattatttgcagctgcgtttcacttccgacggaccggtctgt

SEQ ID NO: 69867 - DNA, 471 bp, Homo sapiens
tgaatttaattgaatagaaagaggatgtggtttgtgtctttaaaaaacacacataccaactcgaaacttccttttttgttctttaaaaaacatgtgcataggataatcgtgctggatcagagtgacttgtcagactgattggaattggatcatagacggactcctggcctgagtttgagtgtcctggttgtaagctcctttcttctctttctgcttcagttgctgtcagggcagcagttccagttctgtaagtctcactttgttcagctgccacaatagacatcatcgtttggccctctctgttagcagcacattcaaccatttgttttcagtcagatttctgaaaagtgagaggtagttttgatagtaaaaatttttggttgtgcctagaatggctttggttttgttgatgttaattttcaaaaactttaactcttgttatataataaaatgtttaattttaataacaga

SEQ ID NO: 69868 - DNA, 3462 bp, Homo sapiens
cctacgcagctatacaactgggccgcaccagaagtgatcttacagaaggcagccacagtgaaatcagacatctacagcttttctatgatcatgcaggagattttaacagatgacataccctggaagggcttagatggctcagttgttaaaaaagccgtagtctcggggaattatttagaagctgatgtcaggcttccgaaaccttactatgatattgttaagtcaggcatccacgtcaagcagaaagaccgaactatgaaccttcaagatatccggtatattctgaagaatgacttaaaggattttactggagcccagagaactcaaccaaccgagagccccagagtgcagagatacggactccatcccgatgtcaatgtctatctaggactgacttcagaacaccccagagagacacctgacatggaaatcatagaactaaaggaaatgggcagtcaacctcattcaccaagggttcactctttattcactgaggggacactagatcctcaggccccagatccatgtctgatggccagggagactcagaatcaagatgctccttgccctgctccatttatggcagaagaggccagcagccccagcacaggtcagccaagcctctgcagtttcgaaatcaacgagatctactcaggctgcttgattttggaagatgacatagaagagcctccaggagctgcttcatctttggaggcagacggacctaaccaggtagatgaactgaaatccatggaagaagagctggataagatggagagagaggcgtgttgttttggcagtgaggatgagagctcttcaaaagctgagacagagtactcttttgatgactgggactggcaaaacggttcactcagttcactcagccttcctgagtcaaccagagaagccaagagcaatttgaacaacatgtccacgactgaggagtatctcatcagtaagtgtgtgctggatctaaagattatgcagacaataatgcacgagaatgatgataggctgaggaatatcgagcagatattagatgaagtcgagatgaaacagaaggaacaggaagagcgcatgtctttatgggccacttcaagagagtttacaaatgcctacaagttacctctggccgtgggccctccatctttaaactatattcctcctgtcctacagctttcagggggtcagaagccagacaccagtggcaactacccaaccctaccaagatttccaagaatgctgccgactctttgtgaccctggaaaacagaacacagatgaacaatttcagtgcactcaaggagccaaggacagtttggaaacaagcaggatccaaaataccagtagccagggaagacctagagagtccactgcccaagccaaagccacacagtttaatagtgcactcttcactctgtcaagccaccggcagggaccttctgcatcacccagctgtcactgggactctaccaggatgagtgtggaacctgtttcttctgaaatctataatgcagagtccagaaataaagatgatggaaaggtacacttaaaatggaaaatggaggtgaaagaaatggcaaagaaagcagctactggacagctcacagtacctccttggcatcctcagagtagtctgactttagagagcgaggctgaaaatgagcccgacgccctgctgcagccccccattaggagcccagaaaacacggattggcagcgagttattgagtatcatagggaaaatgatgagcccagaggaaatggcaagtttgacaagacgggcaacaatgactgtgacagtgaccagcatggcagacagcccaggcttggaagcttcaccagtatcaggcacccatctcccagacaaaaggagcaaccagagcatagtgaagccttccaagcaagttctgacacattggtggctgtagagaaatcttacagtacctcgagtcccatagaagaggactttgaaggaatacaaggtgcatttgcccaacctcaagtctctggtgaggaaaagttccaaatgagaaaaattcttggaaagaatgctgagattttgcccaggtctcaatttcaacctgtacgaagtactgaagatgaacaagaagagacatcaaaggagtcaccaaaggaactgaaagagaaagacatatcattgacggatattcaagacctgtctagtatctcctatgaaccagacagctcttttaaggaagcttcatgcaaaacacccaaaataaaccatgcacctaccagtgtcagcactccactcagcccagggtccgtttcttcagctgccagtcagtataaagactgccttgaaagtatcacatttcaggttaagacagagtttgcctcttgctggaacagtcaagaatttattcaaactttgtctgatgactttataagtgtccgagagagagcaaagaaactggattctctccttacttcctctgaaactcccccttcaagactgactggtcttaaaagattgtcttcatttattggggctggatcccccagccttgttaaggcatgtgactcatcaccaccccatgccacccagagaaggagcctgcctaaagtagaagccttctcacagcatcacattgatgagctgccaccaccatctcaggagctacttgatgacattgagctcttgaaacagcagcagggctcatccacggtgttgcatgagaacacagcaagtgatggaggaggcactgcaaatgatcaaaggcacttagaagaacaagaaactgacagtaaaaaagaagatagtagtatgcttttgtccaaagaaactgaagatcttggagaggacacagagagagctcactctactctggatgaggacctggaaagatggctgcagccacctgaggagagcgtggagctacaagaccttcccaagggctctgaaagggagacaaatatcaaagatcaaaaagttggtgaagagaaaagaaaaagggaagatagcattacaccagagagaaggaaatcagagggtgttctagggacttctgaagaagatgaactaaaatcctgtttttggaagcgactaggttggtccgaatcatccaggataatcgtgctggatcagagtgacttgtcagactgattggaattggatcatagacggactcctggcctgagtttgagtgtcctggttgtaagctcctttcttctctttctgcttcagttgctgtcagggcagcagttccagttctgtaagtctcactttgttcagctgccacaatagacatcatcgtttggccctctctgttagcagcacattcaaccatttgttttcagtcagatttctgaaaagtgagaggtagttttgatagtaaaaatttttggttgtgcctagaatggctttggttttgttgatgttaattttcaaaaactttaactcttgttatataataaaatgtttaattttaataacaga

SEQ ID NO: 69869 - DNA, 260 bp, Homo sapiens
tttggttgttcctgaaaggtgttaagtaagtgcagttttcatttctctgtcccaacatgattaaagtttagccccctctgaaaaattctttatcaaccaatgctagcatctattggtgatatgctttgtgctggcctcctatttagaaataaacacacaaattaaacatgagacagtaccaatctttaaaatctccccaccagccatcaacactcagaatatcaaatccctaaacacctgaagttgtggcatgcataaag

SEQ ID NO: 69870 - DNA, 249 bp, Homo sapiens
tttcctttcaacatttagaattttaatctcctgtgagatttttttgttatagcatgaagtgtgcaatacatactactatattgtctttatataattttacataaatgggctcacactgtatttaaagttctgcagcttgcttttttcatgtaatgttacctttccaagatctgtccttgttgataagtataggtctggctagtcatttatctctccattcccctagtaaaagacatttgtatctttttc

SEQ ID NO: 69871 - DNA, 547 bp, Homo sapiens
ttccaaaccacagagccaccatctctgtctttctctatctggctctcacctgtgattgaagagagggaaggatgacagagtgcccactgggaatgcctttccacccagttctcaacaggagtcacggcccaggtcagctctgggccagcatcccctgagcacctgctgtctgctagcctgtgtgagctgctttacagaaggacacaccaatgggaagcagcagccctgccttcaggaaggcccagcctgggacagaactgtgcctggcacttggacagagaggcccgggaggcatcagatgccggcccagcccgaggctgcacctcacaataagcccccacctgcaaagaatgtctgtaaatcctggggctctgcacagagcagccggattgcagggaacggcagcaaatcccaggataaaagcagaagccatcctgttgacaattcattcgtgtttctcccccaaatccatccacaacagaactgttaagctcatgtttcctctcctgttgcaaacaattgtaaaaatgattggtatctgccctca

SEQ ID NO: 69872 - DNA, 613 bp, Homo sapiens
gagtgaaactcccagggttgggctgggagtatttggtgcacgcggtatggggagggctgagctcagtgcctcctgggagacttgtcccgtgtacagtgacccagaaagatgagattccttggcctgaactctgtgatagagtgtgactgagctgctgggggacatgtgagcctcaaatccatagaaagacaaacggccaccttgggtgcccaggatactggtgcccggccccacgtacacccacatacttctcagatggctcccacattttaagattttaaaaatgaaaccaaaaaataaattgaagaaaactgtaaactttaagaataatcagctgggcgcagtggctcatgcttgtaatcacagcactttaggaggctgaggcaggaggactgtttgagcccaggagtttgagaccaacctgagtaaggtggcaaaaccccatctctaccaaaaatacaaagattagccaggcgtggtggtgagcgcctgtagtcccagctacttgggatgctgaggtgggaggatcacttgaacctgggagacacaggctgcagtgggccctgattgagccaccacactgcagcctaggtgacagtcagaccctgtctca

SEQ ID NO: 69873 - DNA, 336 bp, Homo sapiens
tccccccctgtttttttcttattccaaagcaatgcaacaaaaagcacaagaaatcaaaaaggaaaaaatagatattggacttcatcaaaatgaaaaacttttgtgcttcaaaggaaatggaaagaaagtgaaaaaacaactgagggaatggaagaaaatattctcaaatcatcatctaacaaaggttgtgttagtctgttcaggttgctgtaacaaaatatcatttcaggtcaccaggtggcttaaacaacagattcagttggccctccgtatccatgggtttcaggccttcgacttcaaccaacctcaaataaaaaatatttttaaaacccaata

SEQ ID NO: 69874 - DNA, 463 bp, Homo sapiens
aaaaaactttgtcaaaacaactagaggcaattgattctctttgtggctgcctggggtaatgtataacagttggggaaagcaattggctaaataaaaagcctaaaaggagaagctggaaaaagagattttcatagggactttgaaaagcttccaaagtgttattggcaatctagactgccaaatgcataaataggactccatccatgcccaggactgtgcagatgctcaggaaaaacccaagaaagccttaagctctcacttcaagctgatcttgagctctgcacaagccataagtaaagggaatgcagagttgtcaattgcatggcggagtgttgagtgtgcctcagcattcacacagagctccttggcagagactggttgaattattgattccaagtgtttgaggaaatccgtgtacaactattagatgactactaaccaagcagagacttcagtgtccaca

SEQ ID NO: 69875 - DNA, 655 bp, Homo sapiens
gcacacaaacctctgcctattaactctttcaaagaacgtttgttggctgcgaaagtcgtctgggttcattgataaaaaaaaaaaaaaagatattgtctttagggctgctgaatatattaatgagttgtcacggaggacagttaggatttgcaaagggtgatagttaccattcacctacttgttgccttaaaagataaaatcatgtgcaaatgaagacagagctttcaggcacctccgccagaacacacttcatttgaggcgacggcagggatgctactaaaaccccaaagagttaagctgaaatggttaatattcctgtctctgcccgcctcctcctgtattctaatgtatgaacccgctcattcagatgtgagtgggacttggggacagcttgccttccctacgcgattgtgtatggcccccgctgaaatgttcctaaaaacacgattttgtaaacgcttatgctccaccagacatccagcgcatctactggatgcccagcgtctacaccagacgcccagcgtcccgagtggggttcactttgtctcttcacacccagggactctcagcctgaggtgagggaaaggaaggggggttattaagaattctgacaaggtaggctgaataaattgtgttttctttgtgagccttaatc

SEQ ID NO: 69876 - DNA, 1789 bp, Homo sapiens
tcacacagacccctgcagacacatctgtgaggcatatgcattcccaaacacacagacagactcatgataaatttgttcctacccagccatgacttctaaatgcttggggaaaccaagacatagtagaaaggagtgtgcaattatcatttcccatgatgccgttacttaagaactctttgtgtccgtccttctaatggcaccaatgcctcccatcaagccttaaacctcacctaaattatgtcattgggctttttcatccataaatgagcataccaggtgccaagggaatcaatatgccatttcacatgccttagaccagtgtccaaagaaagataaaatgttattctataaaagctttctcccagcatttctattcctttacattttgtgccatatacaactatggttttttaatgatcttatttctgacagctgtttttcttcagaacatcaacagcttctttcctaaattagttttagtatgagttccatttctaattagctcaaattaaagtcctagagagcagcgaggtaatatttaaaccctcaggctaaaatttcggagtaggtgcagaatgttgactctaaatgagtttttcctgtgacataacacgcatgaaagcaggatttctttcatgtgtgaaatgtcttaaatcagacttaccctttgtgattctcttttagctttaaatgtcatttaagaagaaaaaagaaaagaaaattaagcatgacattccccaatatcctctgctcactgtgttataatccctatcactccacaagtgaattggagagagtgaagacacaatgaacagaaacttccctgatgcttcacagaggaagtgttctccgggaccacacagcctccaccatgtccatctacgaagggctgtggcaagccatatacacaaagatgcctgtttcctgtcttctcggttaaaaacaaaaacaaaacaccggaaaaagccaagctgccatgggttgcagagtgccagcccttaagtagtgttgttcatgggtaaacaggagacggataagggcaatttcaagaaataacaaactcaaggcatgaatgtggttatccaaacatcaagggactccttcatttgcatttggataattgtgcagttatatgatttgttacatggagaccagatggaagtaagagagctcatcctcaacttcctgtacctctggaagtctttacacacatgctggagagatagaggagagttcattagcatcaaaccaccatggatttcataatcaattcctaatatctgaatagatgcagaaaagtcacaggcatctagaagtgtggcccaagttctgttcttcaatcagcccacccattatccctatgtatctcgattttgttatctaaaagatcacatgatggaggatgtaagcaagtaacacagccaagacccagtttacagtgtctagtacctaacagactcttgacacgtttcacttgcccttgagtcagtctttccatgtcactgaatattcttccacaacacgattttaatggatatagtcgtccattgtttaaatgtaccattattgaccaatgtaaaaatgttcttttacctcaaatttttatatgtaaaacaaaaacatgtttgaggactaaacccacagtgtagtataaattaaactggatgtaggccaggcatggtgagtcacacctatagtcccagcactttgggaaaccaagacaggaggatggcttgaagccaggagctcaagagcagcctgggcaatacagcaagacctcatctctaca

SEQ ID NO: 69877 - DNA, 4971 bp, Homo sapiens
  misc_feature (1091)..(1092): n is a, c, g, or t
  misc_feature (1095)..(1096): n is a, c, g, or t
  misc_feature (1104)..(1104): n is a, c, g, or t
  misc_feature (1109)..(1109): n is a, c, g, or t
gggcccggaggactctggagctacctctagctgcagcactgcctctggatggggacttccccatgctgtgggctgtggctccatagcgggcactggaagttcctctctctctgcacgtgcggcaagagctgaaaaaggagaaagggtcactgagcaggttttctgtgtctgagccccagagttcaatctctgctgaccagacccccactgaccagacccctgagcggtggtgttcagagtcccctaccaatggcccttctcagtccacagacctctccctcccctcatcagcacccacaggtgactgagagtcttctcgggactggaccccaactccaggacacagggaggggcagtttgtcccaggctccgggtgctgagcttcacgcttgtgccacaaggtcctctgggccatctcaaagggggcagtgatgtggcctcgcacatctggatgcactgtctgggcctattcctgagccacatagccagaggaacaggaagctgtttgtcaacccaggcaccccactctgctgggtctcccagggtccttcccatggaggccagatccagagacacagcacagaggcagcagggtgaccggcccagaacccttgagactaggctggggacgacaggaggactgtccccagacaaccagaagaccctttgctagtttcttgatacttcatttctcacctgctacccttactccaccagaaatccccttcatgcagagtcaatgaggagaggaagacggacacagaatctgtggaaagaaagaaaacaaaagatgggtggggagaagagttgggagtgtaacgttgtaagcgtcctacactatgcgtattatttgagggttgattaattaaaggtgtgccttgtagacaaccattacacacactataaataaattttatatatatatacatatatatatatacatatatatatatgtatatatatatatatggagagagagagagagagacagggtcttgctccgtcacccaggctgaagtgcagtggcccaaacacagctcactacagccttgacttcccaggctcaagcaatcctcccacctcagcctccnnaanngctgggantacangtgtgagccaccgcgacttgccagctctgtctagttgagaggtgcagtgcctctcctgtgggccggtgtgctgtgggacctcccgcccctgccgcccctgccgcccctgccgcctgcccgagggctcacccggctgtagtcctccacgtgctggagctgggtctcctggcagatgcacaggttcaggaagttctgccactccatcttcagggcctcctggtgggcctgggtaccgcagcacggagccctcggaccacgccccgcccccgcacccacgtccaccccccccttccccgcccaccacgtcccttctcactctcgccctgcccccagcgcacctggatgggccccaccgcggggtgccgcagctccaccatgcgcttgccgtcctcctccagctggtttacgctctgctcctggctcagcagctcgtgctgcttgaagtgctgggggcgagtcgggtggggagcggcggtgaggaccaggatggccctggtcgcccccgcctggccccaacctctgccagccgacctcgtattcccgccgcacgcccgcagggtcggccatgaggtcgctccagtcctgctgcaggatgcggcgctgctgctccgccagggcgctcagctgccacgtgcagccctgcagtgcgtgtacaggctgcccaggctctgcccgcgccacgacgccgccctctgtgctcaggacccgccgccagcagcagggtggggagagagaaagtggggggcaaaaggcgccattgggcggcgctcaggaacactggccccgggcagggtccgggcggccacccaggcccacctgcagccaccctgcccgaccctccctcctgctcaccagtaggtctcggtattggctccggatggtggcggcatcctgccttgaccaaggggagaaacaagcccgtgagaggtggggcacagggagacggccccctaagatctgggcaagccataccccacccacccctatccccagggcccagccgatctagctccggctctgactggaaaaacaggggctggggctggccccggatgtaacatcttcccggctcacccaccggccccaccaggctccgcagctgctctccttggtcgttgatctccttctgcacgatgttgagctccgcgatctgttcctccagctccgccatgcccggcccatactggcctgcgcagaccagcttctgcaggagagccggcggctcagtcaccacaggaccagggtggagagccagagaaccccacacgtctcccacccggagaagtggacttggtcatttgggcagagcgtggacgagcctgagagcagcccgggtgcacgccctgcagctcacccagggtgagccattctgctctgcagggtggccactgcagaggccattctgcagtggcccctgagtcccactggttcccagacgctgggctcagcctcagaagtctccagctccatcctgccttgtctgtgacccagcctcagtgcttcctgcctggacacctccagccaagctctagggccctcagaacgccctgctgcacccgggcccttccccactgttcctctattgtcatgatgacaccccttctgtgtggcatcaaagcacaactcctcaaccagggatcagaatgccccatgtcctggctctgcccacctggccagaaatccccacttcccatcgaatcctaggcttcctcctggcaggtgcctttgctccttctttctggaattgtcctctcctcactacttcaccctgacccaaccgagccctctcacccctctgaggtctcttcatgtgcctcctcctacaggaagtcttccctgactgcactgtctcctctgctgtctccctgcccagacccctgagacaccactatacactgactgttcaagcctacagtcaggccctgggttaaatgcagttccgtatcaccctctgatcacactggggtgtgactttgagctcctgacctgtttctgctccagcacgtgtgcccagtcgaccttggatcccacgtcggggcggcagcaccatcttctcgtacagggcacagtactccgcacactcctgggtcacccgctcgtgcagctgctcgatgctgtcaagaaggtggccagcaggtcagggctgggcctgggtcttccccagggacccccagccctgccgcagccccactcactccttctcagtctcctcagcctgcgggtgcttgagccgccgggccttgtccacgtccaggaagaggtccttgagcagcacctcggcctccttcaggctgctgcccgtctcctgctggtgctgcagggcctggctctgctcactgttcagccggtcctgtgggcaggggatgggcagacttgccagggtccagagcccccacacccctgctgcccatcattgtgggcctgagccccacctttgggaccccagctatgctggccaacctcgaggcccacgccaggcacagggtcaggcccagggcgtccatgaggcaggtgacaaagacacaggggagcccagcaaagaaggaagttgagccctctctcccaccgtgtgttaggggacaggcggtgcaggacaaatgtcatctgtcccatcttcaccatcaccagggggcactcagggagtgccaggcctgatgatgggcctcccatgccacccagcctgcccacaccctgccaactgctgccgggttctcacctgctgcagcctcttctgcgtctccaggatgtcccgctccacctggtcggcgttggcttgcatgtgggagatgagcagggtcagctcctgggtggcattcttggtgggtggaggggacagtgggcagctcggtggaagaggcccctctgtgccccatccaggtggcgtcccctgccctctctccaccccatcccgcccccacagcctagcacactgccctgactttggggtctctctctgcaggaggctctgtgagctagacctggttgggggtgttagcactgccccgccacatgaggggtcaaaaggtgagggtctcaggtctgtgtggtgctgggtgtcaggcggcctcggtgtcccagcctcagccagctgtgctggcagtgagttcccgaccccacccagctgcctgccacttcccccctgtgagccggtagtacctgagccagcctggctgggccctgggaggggcagttgggctggctggggcagggaggcagcagcatgccccccacccccacctcctcccactccagccctgtgttcccctatacctcctccaccccagggagctttgccagagtgctggcttcagcagccgtctagaggagcctcacactgtcagagtcggggagcgggggcaggcgcaagagactgctgggcaccctaacattctccagagttgagagttcaaagcccagattgtgccctaacttgctctgagttacgtggtcagggacggaggggaaaccttgcttccaccccagggctttttctgtgcattcgccctgcagcctccatagagcacctgctgtgtgcatgcagtcactctgtggaggtcacaaggccaagcagacctaaaagagggcagattggtccaagccttatgagcacagtgccttatgggggatcattatcctggggcaggggaagccttgaactgggtcaaaggatgggcccccccaggcaacgggacagtgctggtgaaggcacagcagtctggaagaactctgtggccaagacagcctggtttcatctttctccatcattaatgctgtgtgaccttgggcaagttactcaacctctctgtgcctgaggttcctcactcgtaaagcaggattttaataaaaatatctatgccttagg

SEQ ID NO: 69878 - DNA, 286 bp, Homo sapiens
gttgatgaagaaaacagaacgaattcagaagaactatgatcttgtcctgtggtttttctctgactttataaagacctaggcttcatatctttgcttctatggagaccagatgcctcatttccaacatgaagggcttgatcagttgatctctgtgttcctttctcagaggtctaatgttctacaattaaatgccagtcaagtcaagagcaggcatctcagattcttcagaataaccaccatgaaaggaaaagaatggagagaagaagaggagtgactgaaggaataa

SEQ ID NO: 69879 - DNA, 461 bp, Homo sapiens
aaatgaatgaatccaatttcccagtgtaagtgatcagcagtgtttgtgaaataggtaatgtctaagaaaagtctttgaaaatcagaaaaagaagcagagtaccctcaagaagaaaaacaagcaaaggtgaagacagaaagatgagaaggttggagagaggtggtagaaaactaatctgattaggctggggaaatttctcaggagagaaagaagttcccaggtcaattacatttagaaacacttcaaacagtctttttggagacttgcagtgctccttagaatattaacctgctatatggaaatcacaattgagtaactcttattttacctgacagttttttttttcaggggacatatatctattatcattggcataagccaataattgatggacctttcgtagagcctttaaatcagggcaatggcacagtcaatattttgtttcaaacatagccatctaa

SEQ ID NO: 69880 - DNA, 421 bp, Homo sapiens
tatgagtggattaaatatatatttattaaaaaaattatccagcatagatcaattagtttaaagtcaattttcttcgcaactagtccttttcacagcttaccagttaccctcgcagccagtgttaaatccactctaggaaatgggactttagagcaccagattaaaaggaaaactattcttttctctaagggcaactaattgtttctttttatttaaacttttcacagccccattaaattgtaaagcatctcctagtctatgaggaacatcaaaaaaaattgtaaagcatcttttgaaaacaaattcaacatactgagttgtaattataaagttttactgcatcatgtttaaaaatgtactttttctatttaaccatgccagttgagatttttttttttaaactaggttaaaaagttgtgta

SEQ ID NO: 69881 - DNA, 748 bp, Homo sapiens
cagggtgtggctttgtcgcccaggctggagagcagtggtgcaatcacagccgggcaccagagcaagactctgtctctaaataaataaatgaaataaaatgccctccaccatctgactctcagttcactctgcgacttcatctccacttctgctcaatcatttggtgctcgtcacgccagcctccttcttgtttcttgaacaccccaagcacgatcctacctcacgcctttgcactggtggccccctctgctttgcctcaggtcccctgagccctccctcacttcatctaaggttctgttcaaatgtcacctcttcagagaggcctcccagaccactctctaggaaactgcagactctccacccgcagacatatacctgaccctcccatcttcccttccgcttgagttttccccaggacacttacgaccacaaatctgtgattatttgatcaattatatgattgatctcctcaactggactaaaagtccttgagctctgagtcgagtctgttctgttcactgttcccagtgcctaggccagagcctggcacacagcaggaactcataaatgcttcttttgtgaatgaatgaatgaatgaatgagtgaatgaccggagtgcgtgggtgactgcactacactctttttttttttcttatactttaacttctggggtacatgtgcactatgtgcaggtttgatacataggtatacatgtgccattttggtttgctgcacccatcaactcgtc

SEQ ID NO: 69882 - DNA, 700 bp, Homo sapiens
gagcactcttagcatgattagagttgttgtttccacacaacaaaagcgtgatgttattcagaaagagcaatcagaaaataaaaaagatgttgaacatttttttaaataactaaaataaaaataatttactagaaggctaataatggaaattcttcctggtccaagtccagtggtgtttacaactaattgatcacaaccagttactgatttctttgttccttcatttccactgcttcacttgactagcctaaaaaaatgatgatgctgatgatgatggcacttctagcaacacagagggcgaagctgactcattcagatctccctccaggacaaacacacaaaaatgaaggataaaacataacaaatgttcaaataaccttgaaataaagactgtcagaagaatgcagagaaaaatgtttaaaaaagaacaataataataagaaatcctacatgcagcccaagccataggaatttttctgtggaatatagaccctagagtgttgaatgatgaagttgtatcattcaaacctggaaagaaaatttggcttcaggcccacaggagaccaggaccatggaattgaaacactggataagcctggagctctaaagacctgtctagtccattaatagagtattaggcaaactctaaccactacttagggaaacaaggaagtcttgtaggccttgagtgaaagttaaa

SEQ ID NO: 69883 - DNA, 1302 bp, Homo sapiens
gaagggcagagaatctatcaactagggaagacgtctttacaaatacagcatttaatacattcttcttgactaacagttctaagccaagtcactgagcatgttcaaatggggcactagtttaattgctttagtttcaaaattgccattttctatttccagttttcttgggttttctgcagtgccactcactatccttttcatctgaactcagagatgcaaaaaatgtgagccaaactgggtctatcccaactgactactgaaaaccaccccctctccttgctctcttgtgagcagagcttccattgttctgagacaatatgacatttcctccaaacaggtagttagtaaataaaccatcaaatactggaaacgatgtttattttaagtttttcaaagtaccaggggaaaaaaagacgagagatttccacttaagaaagtctattagtcctgtccttatttcaaaaatgttcaattccatgtaatcttttggagtatgatacctaaaggaattttcaatgagacttgagacaggtgcatttccagcttttctcaattgcttggtgtgtacatttccaaggaggagcctgtataccaactaattctaactctcaaagtccattgagaacatttctgcatatgaccaaaatgatcaggctaccaaactggccactatgatcattctagctgttctcataagagattaaattcatgaacaaggtgtcagcttgaatgcttctctggccttacttgacctgccacctcccattcataataatggttaacaataacttgtcatgtgtttgtgaaaacactgtgaacttctccatccaataatattcagtatgtttccagtcacatggtcagggtaaagtcatggctatctcgctcctcacagaaatcaagagagtaacagagccttttgaaagtcacacatgctcagtaaatgaggaaacactggggttgacatcagtaccaaagctggggtaggaagggctactacagagaactggatggagagttagaaaggccctgggcctctgccccattttaaatgaacctcagacaagacctccaaatatctgtcctcaagttgcttcatctacaaagaaaagagaaaacttccccttgtctccatggtacaaaattaatctgagaatgaaatggtattttgtgccaggcatggtggttcacacctgtaaatcctaacactttgggacgttgaggctggagaatcacttgggcccagaagttcaagaccaccctgggcaacatggtgagactcctatctctaaaaaaaaaaaa

SEQ ID NO: 69884 - DNA, 638 bp, Homo sapiens
cctgtgtgcccttggcagaggctgacctggagactgctggtgggccagagacatagccctgttgccctgcctgctgccctctgggggctggagcctgtccttgcactctgtccatgaagagctgaaaagcgagggcccatgcgaagcagggggaggagagagtgcttttggtatgatggggacaggcccacacacaagtctggcctccctgagtggcatgtgtgactgtccttttcttctgtctccagccccttgtcactatgagcaaacagtgagcttctaccagcccagcctgtttagcaaacacctgggccctgaagggcgggccagctgtgtcaggtccccatcaggttggagccagagcccagctggaaggaaacaaaggcgtgggagagggaggggctggttggctgcaggttctggctggagcttggcaacctagaggctggaacttccgggtcaaggggcttctccgtgggcctcaggagtgcccttcagtgggaatagaatgggactttttatggccgaaggcctggccggagcaaggggtacacagcacagcagcataggggtggggaagggcaggtcttctctcttcgaggctctgaggagatcagtgatgtggtttcaaatccagg

SEQ ID NO: 69885 - DNA, 389 bp, Homo sapiens
cccagaaagaaataggaaatatttcccggggaataaaacgttcctcgtctttgcttatatgcagtaaaaagctcagaacttggagagcgcagaaggcggggcagagtgtgtgaaaacggcgccctctgctggctctccctggtgtgaacagtggtagatggcaacgctgagatggccgtggcatcccctgctctttggaggcaggtacagttttaagagactctggtcataaaagtcagattcgggcaacacttggccctcgcttgggttcttttacagcactttgggaggccgaggcgggcggatcacgaggtcaggagatcgagaccatcctggctaacatggtgaaaccccgtctctattaagaatacaaaaaaaaaaagtcgacc

SEQ ID NO: 69886 - DNA, 510 bp, Homo sapiens
cccagaaagaaataggaaatatttcccggggaataaaacgttcctcgtctttgcttatatgcagtaaaaagctcagaacttggagagcgcagaaggcggggcagagtgtgtgaaaacggcgccctctgctggctctccctggtgtgaacagtggtagatggcaacgctgagatggccgtggcatcccctgctctttggaggcaggtacagttttaagagactctggtcataaaagtcagattcgggcaacacttggccctcgcttgggttcttttacagcactggtttcaacaggagtgatttgttgcccaacacttggtactctctggagacattttggaggatcacaagtctggaggtgaggttaaaggaagtctgctgttgacttctggtgggtagaggccaaggatactgctaaacatctcacactgcacagcccagtccagcccagcaacaaagcaacattcagcccaggatgtcaacattgtccagattgagaaaaccttgttt

SEQ ID NO: 69887 - DNA, 265 bp, Homo sapiens
ttttttaataataattctgctgtctgctgtgtactagaacccatgcctactgcttggggtataatgtagtaaatgtagtaaaaacaatatccgccgggcgcggtggctcacgcctgtaattccagcactttgggaggccaaggagggcggatcacgaggtcaggagagcgagaccatcctggctaacatggtgaaaccccgtctctactaaaaataccaaaaattagccaggcgtggtgatggacgcctgtagtcccagctactc

SEQ ID NO: 69888 - DNA, 482 bp, Homo sapiens
ctactggagaatatttttaaattatgtcacttaaccatcttttctataaaaattatttagacaaaatagtaattgccctaatattgtcagatattagctttcttacaattttcatcaaactgaaaaaaagtactgcttttcaatatatgtcatcttttgcttatatcattgagttgacaagatagaaatgccaccaagacagaattacatgtagttaggtaaaggaagtcagtttacttataatttagaattgacccaggctaaattataaatttctctttattaatatcatatggattgctttttgaagtacatgacagaatattaaaatgtattaattttagtgggaaaaaagccttgctatggcagtataacatgctatttatgttcaatattaaatttttgaaaattccttaaaatttgaactgaatctgttataggttgcttttacaaaataattaaactgagtgatttcaagtgtt

SEQ ID NO: 69889 - DNA, 398 bp, Homo sapiens
tgaatgacactattgccagccagccctcggggttctccactgctgcagttttgaaacttttctttcccaggttaagaaactaaagttgtaatggagaaagaaatgggagaaagctacatcccagagcagaggtgacctgccagcactctaaagttattctagacctagtacaggctcaagcttaggacatttgtttcttttccacctgacttcaaggagcttgtcaaagcgcagcctaagttaacaggctctgtcaatgtgagtaccagaagccaggccgccacctgcgctgttccagaagccagggatacaatgaaaaaacacaaacgtttctccccattttgctgtatacattccaattctttcgctagggactgtacaaaatcctgtcttctctg

SEQ ID NO: 69890 - DNA, 471 bp, Homo sapiens
tttttttttgtagttttgtctttttttgtttttgtttttcaagtttccaaacaagaatttattctttctttaaaaaaatttttttttctaaaaaaagtaccaggtacaattttttcctgtttctgttttttcaagtttcagcaaatgcttgttcccctcagcccagccccaggagtcaggactgaggctgggtcagagtctggagtgggggatgggatagttgggagccacatgactgagtctgagagttgccccttagcccagatgaagtaggtgggtcagagtctggccaggtgaaaggaggcaccccagtccttggacctgactctgcttcctggacaccttcctcagtcacaccccaaagtaaggagacacaggtaggaggaaagggacaactggagtctggaactgtaggtgaggggtggttaacctctgtgtgtgtgcatacatgcacactctctttctcacaca

SEQ ID NO: 69891 - DNA, 1690 bp, Homo sapiens
tggcaaagtcctctgtcagtaaactctttaagcttggtgctgcaaagagtctttaaatgggggctgatttcaagtaacctaaaagactgtgttatcagaggaagaggtcccaaatttggagtaaagatgggagaaaataaatatgtgctatttccttggcgagttgggggaatttgccaccttacagagtttgtatcactgaattagctgcttttgttttttttttttttttttttttgccagggctatggagtgggggttgtttgtcaaactgattttcaataattggatttaattttttttaacattgaaaagtgcctgaaaaatggtaaattcttaaatgtgtgtgagattgtcagaatcaacaaaactaggttggttaaacatatctctggtacatcaaggggcatgatacaaaccagtctaaagactgtttataaaggagagagctggcgacttatttttattttttttttttggacagagtctccctttgtcacccaggccggagtgcagtggcatgatcatggttcacttcaacccctacctcctgggctcaagtgttcctctcaccttatcctcctgagcagctgggactacaggcacacaccaccacacctggctaagttttgtattttttgtagagatggggtttctctgtgttgcccagtcttgtctcaaactcctgggctcaagcgatccacccaccttgggctcccaaagtgttgggattacaggtgtgtgtcactgtgcctgacagctgacagttttaactgacaactttgataacagaggctgctatttttgttttagataattggccagtgacagagtttacccttgcctcctttcttggtctgccagctttgtcctttctgagtgattctctttctgtattgagaggaagtgtgggtctacatagggatgtttggatgctatggcaagaatctttttgtgtttggagtgtagtccatttgcaatagaaataaaaaaatccgtcaccaaattgtaacctggatgttatagcccagcatctagaaatcctatgaaatgtattagcacaatatcttgccattgtcccatctaggaaattttttcttgttgtgaggtagggaagtgaggaggaaagccatgccgaagcaaatgttagaatcttaggcatcctatttgttcatgccatgggtatttgctttggacttggagtctgtactttgaaagaggcctttgaaaaacaaataattctgtgtgaattttcttgtagcgtgcttcatgaaaatatctacttatccaggtttgcaaatgtacatgttcatttgaatgtaaatcaccatttcttggaaccccacgttttttcttaaaaattattctgaattaaatgtatatttctttagccttccctacacagtactaataaaagacttttctttctgttcatgaatggatgcctttatgtgatatagagtcatgtgtgtatgtgtagctttaagggcaatttcagaaatgcattagatgaatgacattttataaagcgatcacaattgatatctacaggctattatgtctcatgttgattcatgatccaggaagttttatgtatttaaaaaattgctatcgtgttatatttttccaatttttggagaagaaaatagctgtttaggctctctagccacaataaatgtaagcaggaaat

SEQ ID NO: 69892 - DNA, 441 bp, Homo sapiens
gaaagactcaattaggctctttttctaccaaatcaaaatgtaagagctagccgctatgttaaaaatgtctttagctggaccactgttagattcagagtttctcaggttttacagatgtgcatatgtattttattatcttctaatcaattactgggatatgctcaaacttaagagacttcatctaaaaagaccacaatttgttgtttgttaaatattatgtataactttctccattaaccaaactttttccagtagctctttttatagaaaaataactcatcagacatagaatgctgaaaaattcgattttccattgatattacatatacactaaggaatagtaacaaactggtcaagttcatttttttttttcctaatgccattgctttggttccactgggaatgtcactgaaatgatgattaatttcttacctgggaact

SEQ ID NO: 69893 - DNA, 1252 bp, Homo sapiens
actgcttttggccaatctccatgagagaaagttctcaacctctgattgcaagtttattttgaccatttaccataacttcaacttcaatgctcgtcttgaagggcatgacttgtcatcctaatataattagcccctcttccagcagatcagacccacaatacgccccagcctctggaggacacagagagaatggaagtcgtggagaagaaaagagaaaagtctcagaggaccaggatataccctcaggactagcactgtgcctgccgtagaacggggcctgctcagtgttttttgggttgagctgcatcttagaatgaaatcctacaactgagatggctaaaggaattaaaaatggtatctgtaatgttaaatttcagactgctgcacaatatgtcagttttaggtactttttaaaagatgaacaagtacaagacttcaaagaagtctctcccttgtgaagggtcccttccggcttcactttagagtctctgcacttttagttcatctcatttgggtgtttcaagggaacagagaagccctggtttagatgatgcagggttttctgatgccaaagtgagaatgataaaatgtctgaaggaagaacacgatgctatgcattccaggcagaatctggacttgaaaacaatgaagcacaaatacttttagatgaactgattcacttttattttgtaaacatcctagaagaattccatttgcactgaactgtttgaatcactgcagagctcttgctccttctaatccccaaggaaagtcgatccatcgcgtcctgctacactgtatttcttcactttgccccttttctcaattctttgtgatcagcataaagtttgaaccgtgcctcttctcgccttcctgcctggccacctgtccagccctgcggtcagctgtaccgaccagcagacggtgcctctcttgccaagtggagccgatgctctgtgaccattgttcgtggggccacactgccatccccatcgttgccccttcaggacactcgtcaacagctgtaagaggcttcccatcctcgcccatataaaaggaaggcctgaaaacacttctcggagcatcagttcataggtcaccgcaaccggccgaacaatacgcgattattcaacgggctccaattcattttcctctgctcctcccccaccgttacccttgagagaaaactaatttgcagaaaaatagcccctgccagccaacttcttctcctaaatgtatgctgaccccgaac

SEQ ID NO: 69894 - DNA, 440 bp, Homo sapiens
ttgattcattaattatttgctgaacaatcctaaaaattatgtttatccattacccattcatacttttactatctttctacacccaatatgtatgcagttcaggttttcaaactcttacttgagtaaaaagggagaacaggtatttaaaagcatatttctagccaggcgccgtggctcacacctgtaatcccagcactttgggaggccgaggcaggtgtatcacaaggtcaggacttcgagaccagcctggccaacatagcgaaaccccatctctactaaaaatacaaaaaattagctgggtgtggtggcgggcacctgtaatcccagctacttgggaggctgagacaggagaagagcttgaacccgggaggcggaggttgcagtgggccaagatcacaccactgcactccagcccgggagatagtgagagactccatctc

SEQ ID NO: 69895 - DNA, 422 bp, Homo sapiens
gatgactgaaactgctatagccacatttggacccagaagggagctaacctgagggcaaagccagcacattgaagctgtagaggagaaaggaaaaaacctgcccttgcagagctgctgattcttttttagcttttaagttcaggcgcacatgtgcaggtttgttatataggtaaactcatgtcacaggggtttgttatacagattatttcttcacccgggtattaagtctagtacccattagttatttttcctgatcctctccctcccaccttctaccctctggtaggccccagggtctgtttttcccctctatgtgtccatgtgttcttatcatttagctcctacttataagtaagaacatgcagcatttggttttctgttcctgcattaggttcataaggataattatctccagctccatc

SEQ ID NO: 69896 - DNA, 370 bp, Homo sapiens
cataggcaaataataattttatattcagaatgtgaacagaattacaatgacaaattaggaaatacagttgcactgcaaagtaaaaagatgctatgaaggaaaagttgggattcagcaagtagtgtcagccaatgaaccatcagcattcaagactggctctataaagcagaatccatggcaaataaaacttaaattttctttaaatttacaaaggaaaaccaaaactatgtgtacctgatacagttagttaatttactttctcaaattgtaatgtagaatcaacttggtcatttatgttcccagctattgtgatgtataaccctataggtatagtatatataaatgcagcaacaacattttatcattgagc

SEQ ID NO: 69897 - DNA, 4084 bp, Homo sapiens
cagtcgggggtgcggggctgtgacctagaggcttcagtgtcgatccccgaggtgttcgcgcgcgccagctgtcctcgcggccgcctgcgcgctggccgcctgcgcgctgccagcccgcccgcccgccaggggctccgccgccctcgcctcggcctcgttagcccgccaggagccccgcagctcctccgggagcccgctggtaactcgcgtccctcgcgcttctccggcgcctgaggggcccgcctcgggccatggtgctctcccaggaggagccggactccgcgcggggcacgagcgaggcgcagccgctcggccccgcgcccacgggggccgctccgccgcccggcccgggaccctcggacagccccgaggcggctgtcgagaaggtggaggtggagctggcggggccggcgaccgcggagccccatgagccccccgaaccccccgagggcggctggggctggctggtgatgctggcggccatgtggtgcaacgggtcggtgttcggcatccagaacgcttgcggggtgctcttcgtgtccatgctggaaaccttcggctccaaagacgatgacaagatggtctttaagacagcatgggtaggttctctctccatggggatgattttcttttgctgcccaatagtcagcgtcttcacagacctatttggttgtcggaaaacagctgtcgtgggtgctgctgttggatttgttgggctcatgtccagttcttttgtaagttccatcgagcctctgtaccttacctatggaatcatatttgcctgcggctgctcctttgcataccagccttcattggtcattttgggacactatttcaagaagcgccttggactggtgaatggcattgtcactgctggcagcagtgtcttcacaatcctgctgcctttgctcttaagggttctgattgacagcgtgggcctcttttacacattgagggtgctctgcatcttcatgtttgttctctttctggctggctttacttaccgacctcttgctaccagtaccaaagataaagagagtggaggtagcggatcctccctcttttccaggaaaaagttcagtcctccaaaaaaaattttcaattttgccatcttcaaggtgacagcttatgcagtgtgggcagttggaataccacttgcactttttggatactttgtgccttatgttcacttgatgaaacatgtaaatgaaagatttcaagatgaaaaaaataaagaggttgttctcatgtgcattggcgtcacttcaggagttggacgactgctctttggccggattgcagattatgtgcctggtgtgaagaaggtttatctacaggtactctcctttttcttcattggtctgatgtccatgatgattcctctgtgtagcatctttggggccctcattgctgtgtgcctcatcatgggtctcttcgatggatgcttcatttccattatggctcccatagcctttgagttagttggtgcccaggatgtctcccaagcaattggatttctgctcggattcatgtctatacccatgactgttggcccacccattgcagggttacttcgtgacaaactgggctcctatgatgtggcattctacctcgctggagtccctccccttattggaggtgctgtgctttgttttatcccgtggatccatagtaagaagcaaagagagatcagtaaaaccactggaaaagaaaagatggagaaaatgttggaaaaccagaactctctgctgtcaagttcatctggaatgttcaagaaagaatctgactctattatttaatatcttacatacctccaccagactggacttgctttttgaattttaagcaagtttcctttccttttatacaaattgcaaatttcatatttttttaatcacatcctaggaatagcacaataattgggaaatagaacccttatcactagaagaaccattttctgccactaaatatctctgatgtttccatgagtctgagggcagagactctggtatatgaaaacatgtctgaaagtcacatattgtgaaaatttgaagctatctcagtaaaaagcagctttggaaactgtgaatgatctttagcttgtacaaatgtttaaaaatacctcaggctatactgaaagggttgcagtttggttaggagtggaaatattttgtttgttaatgatgtcttcagttctggtacctctgttttactttcttatgctctttggaaactttttgcaaaatttaagcctgggttctagataataccagatctacctaaacctcaagtctatgttaaagttgctttcctgctgttaaataagctatgatattaagatattctgacttgctccagtgtcaagggaccttctgggagcaggtgctaacatagtgttcagaatcaatatgtgagatgaaaaggatcccctccaggaggatcctgagctgttcagaaatcatttaagtttacagcgttgttccctttgcgtttgcagtgcgttttactcaagtagccagaaacaccccacgtttctgaatttgtttaaactgtaacaataaagtaaaatagaatgcatgaaagatattctggcgattgtaacttagaatttttctgacttctggatttgttggcactagaacctgatatttaaacaaagtcttactgagcagctatcaagtggcagttacaggcacaaattggtggaggctggaggatggggaggggagcaaaaccctttatatttgtgaagaaaatatctgtagctgatagaaataattgcttaaattggtttatgaaattaatgagtctgaaaaggttaaaagcacttataaaaagaaccaagtcctacatttccagaactttctggcaaaaatttgcactcatattatttatcctatgaacattcccattgtttttttttgctatttatatacagattatcataagaaagctctcagtttgaggacccaaaataaaaccaaagtcatgccatgacccatactcatttacaaaaacaagaacactttcctctatccctaaaattatgctttagtacttgaggcctttaaaagttagtgcttttgattgtgaagacattcagcaacttactttgtcatacatgcagttgcaccttaccacttctaatagtgtcatatttcatattcaggggacttagataatttgcctgtggatggttcttttgcaggaaaaaaaaatctacattttgaccatactaccctttcatgttcttattataagcttttagaaaatgatttcattcagtcatgtccagttatataaaacgttactttctcatttttgagaagttcaacaaaacatactactaagaccaatcatcaaacccactattataaatgttaattttggctgggtaaggtggcttgcgcctataatcccagcactttgggaggctgaggagggaagatgcttgagccttgagatggaggctgcagtgagctatgccactgtactctagcctgttcaactgagcagaaccctgtctgtaaaagaaaatcaaaaacaaaaaataaatgttaaattttgttttaagttttagcacagactcccctcaaaacaccttctccccaattttacagaaagtaatttaaaaatgaaaactttactctgtaaagacctctacagtgtttttcttttcaaatttggctgattttaggaaaaaagtgatcatctgaaactaaaagaaattgcttggttagtttccatattaaaacagcagtgacaagtatatataacttagatctcagcatatgtgtttgtatattaaacttcacatatgtagttttcagtttaatggaatgaatcaaactggatctataacactgaaaaagttctattgtaatagactcatacggagaatactctgctataataatataaaattaagaagaaaaagtataaacgtaagatgctaaattccataaatgcatatttagtactatgttttgtgggaaaagttctaaaagtttaaaatgcacaaagaaaatgaaaaatactaatataaaaatttgtgctttaatctagtcaaactaaatcctttcta

SEQ ID NO: 69898 - DNA, 1505 bp, Homo sapiens
cagtcgggggtgcggggctgtgacctagaggcttcagtgtcgatccccgaggtgttcgcgcgcgccagctgtcctcgcggccgcctgcgcgctggccgcctgcgcgctgccagcccgcccgcccgccaggggctccgccgccctcgcctcggcctcgttagcccgccaggagccccgcagctcctccgggagcccgctggtaactcgcgtccctcgcgcttctccggcgcctgaggggcccgcctcgggccatggtgctctcccaggaggagccggactccgcgcggggcacgagcgaggcgcagccgctcggccccgcgcccacgggggccgctccgccgcccggcccgggaccctcggacagccccgaggcggctgtcgagaaggtggaggtggagctggcggggccggcgaccgcggagccccatgagccccccgaaccccccgagggcggctggggctggctggtgatgctggcggccatgtggtgcaacgggtcggtgttcggcatccagaacgcttgcggggtgctcttcgtgtccatgctggaaaccttcggctccaaagacgatgacaagatggtctttaagacagcatgggtaggttctctctccatggggatgattttcttttgctgcccaatagtcagcgtcttcacagacctatttggttgtcggaaaacagctgtcgtgggtgctgctgttggatttgttgggctcatgtccagttcttttgtaagttccatcgagcctctgtaccttacctatggaatcatatttgcctgcggctgctcctttgcataccagccttcattggtcattttgggacactatttcaagaagcgccttggactggtgaatggcattgtcactgctggcagcagtgtcttcacaatcctgctgcctttgctcttaagggttctgattgacagcgtgggcctcttttacacattgagggtgctctgcatcttcatgtttgttctctttctggctggctttacttaccgacctcttgctaccagtaccaaagataaagagagtggaggtagcggatcctccctcttttccaggaaaaagttcagtcctccaaaaaaaattttcaattttgccatcttcaaggtgacagcttatgcagtgtgggcagttggaataccacttgcactttttggatactttgtgccttatgttcacttggcaaaattcagctttgttatactgaaatacgaataattaatgtctagactggggttggtgcctcacgcctgtaatcccaccactttggggggctgatgcaggagttcaagaccagcgtgggcaacataaggagacttcatccctacctggggaaggaaaaaaaaaaaagaaggaagaagcagtgtctaaagtatctgcccctggcaacgtttgttcaaaagtgttcattatgtttcttccttttttcttttgtggctgaaaatgtatttacaattcaccgtaaatgataaaaatggcattggcacacatatt

SEQ ID NO: 69899 - DNA, 1865 bp, Homo sapiens
ccggaattcccgggtcgactacagcgaataaaatcgcggccgagtcgacaccagatctacctaaacctcaagtctatgttaaagttgctttcctgctgttaaataagctatgatattaagatattctgacttgctccagtgtcaagggaccttctgggagcaggtgctaacatagtgttcagaatcaatatgtgagatgaaaaggatcccctccaggaggatcctgagctgttcagaaatcatttaagtttacagcgttgttccctttgcgtttgcagtgcgttttactcaagtagccagaaacaccccacgtttctgaatttgtttaaactgtaacaataaagtaaaatagaatgcatgaaagatattctggcgattgtaacttagaatttttctgacttctggatttgttggcactagaacctgatatttaaacaaagtcttactgagcagctatcaagtggcagttacaggcacaaattggtggaggctggaggatggggaggggagcaaaaccctttatatttgtgaagaaaatatctgtagctgatagaaataattgcttaaattggtttatgaaattaatgagtctgaaaaggttaaaagcacttataaaaagaaccaagtcctacatttccagaactttctggcaaaaatttgcactcatattatttatcctatgaacattcccattgtttttttttgctatttatatacagattatcataagaaagctctcagtttgaggacccaaaataaaaccaaagtcatgccatgacccatactcatttacaaaaacaagaacactttcctctatccctaaaattatgctttagtacttgaggcctttaaaagttagtgcttttgattgtgaagacattcagcaacttactttgtcatacatgcagttgcaccttaccacttctaatagtgtcatatttcatattcaggggacttagataatttgcctgtggatggttcttttgcaggaaaaaaaaatctacattttgaccatactaccctttcatgttcttattataagcttttagaaaatgatttcattcagtcatgtccagttatataaaacgttactttctcatttttgagaagttcaacaaaacatactactaagaccaatcatcaaacccactattataaatgttaattttggctgggtaaggtggcttgcgcctataatcccagcactttgggaggctgaggagggaagatgcttgagccttgagatggaggctgcagtgagctatgccactgtactctagcctgttcaactgagcagaaccctgtctgtaaaagaaaatcaaaaacaaaaaataaatgttaaattttgttttaagttttagcacagactcccctcaaaacaccttctccccaattttacagaaagtaatttaaaaatgaaaactttactctgtaaagacctctacagtgtttttcttttcaaatttggctgattttaggaaaaaagtgatcatctgaaactaaaagaaattgcttggttagtttccatattaaaacagcagtgacaagtatatataacttagatctcagcatatgtgtttgtatattaaacttcacatatgtagttttcagtttaatggaatgaatcaaactggatctataacactgaaaaagttctattgtaatagactcatacggagaatactctgctataataatataaaattaagaagaaaaagtataaacgtaagatgctaaattccataaatgcatatttagtactatgttttgtgggaaaagttctaaaagtttaaaatgcacaaagaaaatgaaaaatactaatataaaaatttgtgctttaatctagtcaaactaaatcctttcta

SEQ ID NO: 69900 - DNA, 1346 bp, Homo sapiens
cagtcgggggtgcggggctgtgacctagaggcttcagtgtcgatccccgaggtgttcgcgcgcgccagctgtcctcgcggccgcctgcgcgctggccgcctgcgcgctgccagcccgcccgcccgccaggggctccgccgccctcgcctcggcctcgttagcccgccaggagccccgcagctcctccgggagcccgctggtaactcgcgtccctcgcgcttctccggcgcctgaggggcccgcctcgggccatggtgctctcccaggaggagccggactccgcgcggggcacgagcgaggcgcagccgctcggccccgcgcccacgggggccgctccgccgcccggcccgggaccctcggacagccccgaggcggctgtcgagaaggtggaggtggagctggcggggccggcgaccgcggagccccatgagccccccgaaccccccgagggcggctggggctggctggtgatgctggcggccatgtggtgcaacgggtcggtgttcggcatccagaacgcttgcggggtgctcttcgtgtccatgctggaaaccttcggctccaaagacgatgacaagatggtctttaagacagcatgggtaggttctctctccatggggatgattttcttttgctgcccaatagtcagcgtcttcacagacctatttggttgtcggaaaacagctgtcgtgggtgctgctgttggatttgttgggctcatgtccagttcttttgtaagaataaggatccccaacccctgtgccacagactggtacgggtccatggcctgttaggaattgggctgcacagcaggaggtgagctgtggttccatcgagcctctgtaccttacctatggaatcatatttgcctgcggctgctcctttgcataccagccttcattggtcattttgggacactatttcaagaagcgccttggactggtgaatggcattgtcactgctggcagcagtgtcttcacaatcctgctgcctttgctcttaagggttctgattgacagcgtgggcctcttttacacattgagggtgctctgcatcttcatgtttgttctctttctggctggctttacttaccgacctcttgctaccagtaccaaagataaagagagtggaggtagcggatcctccctcttttccaggaaaaagttcagtcctccaaaaaaaattttcaattttgccatcttcaaggtgacagcttatgcagtgtgggcagttggaataccacttgcactttttggatactttgtgccttatgttcacttggtgagtatgctccttcactgatcatgaatattactatttaataaagaaaaacttctttgaagaga

SEQ ID NO: 69901 - DNA, 3544 bp, Homo sapiens
cagtcgggggtgcggggctgtgacctagaggcttcagtgtcgatccccgaggtgttcgcgcgcgccagctgtcctcgcggccgcctgcgcgctggccgcctgcgcgctgccagcccgcccgcccgccaggggctccgccgccctcgcctcggcctcgttagcccgccaggagccccgcagctcctccgggagcccgctggtaactcgcgtccctcgcgcttctccggcgcctgaggggcccgcctcgggccatggtgctctcccaggaggagccggactccgcgcggggcacgagcgaggcgcagccgctcggccccgcgcccacgggggccgctccgccgcccggcccgggaccctcggacagccccgaggcggctgtcgagaaggtggaggtggagctggcggggccggcgaccgcggagccccatgagccccccgaaccccccgagggcggctggggctggctggtgatgctggcggccatgtggtgcaacgggtcggtgttcggcatccagaacgcttgcggggtgctcttcgtgtccatgctggaaaccttcggctccaaagacgatgacaagatggtctttaagacagcatgggtaggttctctctccatggggatgattttcttttgctgcccaatagtcagcgtcttcacagacctatttggttgtcggaaaacagctgtcgtgggtgctgctgttggatttgttgggctcatgtccagttcttttgtaagttccatcgagcctctgtaccttacctatggaatcatatttgcctgcggctgctcctttgcataccagccttcattggtcattttgggacactatttcaagaagcgccttggactggtgaatggcattgtcactgctggcagcagtgtcttcacaatcctgctgcctttgctcttaagggttctgattgacagcgtgggcctcttttacacattgagggtgctctgcatcttcatgtttgttctctttctggctggctttacttaccgacctcttgctaccagtaccaaagataaagagagtggaggtagcggatcctccctcttttccaggaaaaagttcagtcctccaaaaaaaattttcaattttgccatcttcaaggtgacagcttatgcagtgtgggcagttggaataccacttgcactttttggatactttgtgccttatgttcacttgatctcaacatctgctgcaatttgactgttcagatgaaacatgtaaatgaaagatttcaagatgaaaaaaataaagaggttgttctcatgtgcattggcgtcacttcaggagttggacgactgctctttggccggattgcagattatgtgcctggtgtgaagaaggtttatctacaggtactctcctttttcttcattggtctgatgtccatgatgattcctctgtgtagcatctttggggccctcattgctgtgtgcctcatcatgggtctcttcgatggatgcttcatttccattatggctcccatagcctttgagttagttggtgcccaggatgtctcccaagcaattggatttctgctcggattcatgtctatacccatgactgttggcccacccattgcagggttacttcgtgacaaactgggctcctatgatgtggcattctacctcgctggagtccctccccttattggaggtgctgtgctttgttttatcccgtggatccatagtaagaagcaaagagagatcagtaaaaccactggaaaagaaaagatggagaaaatgttggaaaaccagaactctctgctgtcaagttcatctggaatgttcaagaaagaatctgactctattatttaatatcttacatacctccaccagactggacttgctttttgaattttaagcaagtttcctttccttttatacaaattgcaaatttcatatttttttaatcacatcctaggaatagcacaataattgggaaatagaacccttatcactagaagaaccattttctgccactaaatatctctgatgtttccatgagtctgagggcagagactctggtatatgaaaacatgtctgaaagtcacatattgtgaaaatttgaagctatctcagtaaaaagcagctttggaaactgtgaatgatctttagcttgtacaaatgtttaaaaatacctcaggctatactgaaagggttgcagtttggttaggagtggaaatattttgtttgttaatgatgtcttcagttctggtacctctgttttactttcttatgctctttggaaactttttgcaaaatttaagcctgggttctagataataccagatctacctaaacctcaagtctatgttaaagttgctttcctgctgttaaataagctatgatattaagatattctgacttgctccagtgtcaagggaccttctgggagcaggtgctaacatagtgttcagaatcaatatgtgagatgaaaaggatcccctccaggaggatcctgagctgttcagaaatcatttaagtttacagcgttgttccctttgcgtttgcagtgcgttttactcaagtagccagaaacaccccacgtttctgaatttgtttaaactgtaacaataaagtaaaatagaatgcatgaaagatattctggcgattgtaacttagaatttttctgacttctggatttgttggcactagaacctgatatttaaacaaagtcttactgagcagctatcaagtggcagttacaggcacaaattggtggaggctggaggatggggaggggagcaaaaccctttatatttgtgaagaaaatatctgtagctgatagaaataattgcttaaattggtttatgaaattaatgagtctgaaaaggttaaaagcacttataaaaagaaccaagtcctacatttccagaactttctggcaaaaatttgcactcatattatttatcctatgaacattcccattgtttttttttgctatttatatacagattatcataagaaagctctcagtttgaggacccaaaataaaaccaaagtcatgccatgacccatactcatttacaaaaacaagaacactttcctctatccctaaaattatgctttagtacttgaggcctttaaaagttagtgcttttgattgtgaagacattcagcaacttactttgtcatacatgcagttgcaccttaccacttctaatagtgtcatatttcatattcaggggacttagataatttgcctgtggatggttcttttgcaggaaaaaaaaatctacattttgaccatactaccctttcatgttcttattataagcttttagaaaatgatttcattcagtcatgtccagttatataaaacgttactttctcatttttgagaagttcaacaaaacatactactaagaccaatcatcaaacccactattataaatgttaattttggctgggtaaggtggcttgcgcctataatcccagcactttgggaggctgaggagggaagattgcttgagcccaggagtttgagaccagcctgggcaacatagcaagatcctgtctctactaaaa

SEQ ID NO: 69902 - DNA, 1258 bp, Homo sapiens
cagtcgggggtgcggggctgtgacctagaggcttcagtgtcgatccccgaggtgttcgcgcgcgccagctgtcctcgcggccgcctgcgcgctggccgcctgcgcgctgccagcccgcccgcccgccaggggctccgccgccctcgcctcggcctcgttagcccgccaggagccccgcagctcctccgggagcccgctggtaactcgcgtccctcgcgcttctccggcgcctgaggggcccgcctcgggccatggtgctctcccaggaggagccggactccgcgcggggcacgagcgaggcgcagccgctcggccccgcgcccacgggggccgctccgccgcccggcccgggaccctcggacagccccgaggcggctgtcgagaaggtggaggtggagctggcggggccggcgaccgcggagccccatgagccccccgaaccccccgagggcggctggggctggctggtgatgctggcggccatgtggtgcaacgggtcggtgttcggcatccagaacgcttgcggggtgctcttcgtgtccatgctggaaaccttcggctccaaagacgatgacaagatggtctttaagacagcatgggtaggttctctctccatggggatgattttcttttgctgcccaatagtcagcgtcttcacagacctatttggttgtcggaaaacagctgtcgtgggtgctgctgttggatttgttgggctcatgtccagttcttttgtaagttccatcgagcctctgtaccttacctatggaatcatatttgcctgcggctgctcctttgcataccagccttcattggtcattttgggacactatttcaagaagcgccttggactggtgaatggcattgtcactgctggcagcagtgtcttcacaatcctgctgcctttgctcttaagggttctgattgacagcgtgggcctcttttacacattgagggtgctctgcatcttcatgtttgttctctttctggctggctttacttaccgacctcttgctaccagtaccaaagataaagagagtggaggtagcggatcctccctcttttccaggaaaaagttcagtcctccaaaaaaaattttcaattttgccatcttcaaggtgacagcttatgcagtgtgggcagttggaataccacttgcactttttggatactttgtgccttatgttcacttggtgagtatgctccttcactgatcatgaatattactatttaataaagaaaaacttctttgaagaga

SEQ ID NO: 69903 - DNA, 5024 bp, Homo sapiens
ggagggaggcacaggcgcttgctttgcaggagtcagctctgccttcctcggctggagtgtgggtggcttggtgagccggtggtcaggaattctctctcctccttgcaattttcctttctgtctgggagcacgccaagatgtcccttgtgactgtccccttctaccagaagagacataggcacttcgaccagtcctaccgtaatattcaaacacggtacctgctggacgaatatgcgtcaaaaaagcgagcttccacccaggcatcttcccagaagtccttgagtcagcggtcgtcttcacagagagcctccagccagacgtccctgggaggaaccatctgcagggtctgtgcgaagcgagtgagcacgcaggaagatgaggagcaggagaacagaagcaggtaccagtccctggtggccgcctatggtgaggccaagcgacagcgcttcctcagcgagctggcccacttggaggaggatgtccacctggcacgctcccaggcccgcgacaagctggacaaatacgccattcagcagatgatggaggacaagctggcctgggagagacacacatttgaagagcggataagcagggctcctgagatcctggtgcggctgcgatcccacaccgtctgggagaggatgtctgtgaaactctgcttcaccgtgcaaggatttcccacgcccgtggtgcagtggtacaaagatggcagtctgatttgccaggcggctgaaccgggaaagtacaggattgagagcaactatggcgtacacacactggagatcaacagggcagactttgacgacactgcgacatactcagcagtggccaccaatgcccacggacaagtgtccaccaacgcggcggtggtggtgagaaggttccggggagacgaggaaccattccgttcggtgggactcccgattggattgcccctgtcatcgatgattccgtacacgcacttcgacgtccagtttttggagaagtttggggtcaccttcaggagggaaggcgagacggtcactctcaagtgcaccatgctggtgacgccggacctgaagcgggtgcagccgcgcgccgagtggtaccgcgatgacttgctgttgaaagagtccaagtggacgaagatgttctttggagaaggccaggcctccctgtccttcagccacctgcacaaggacgacgagggcctgtacaccctgcgcatcgtgtctcggggcggcgtcacggaccacagcgccttcctgtttgtcagagatgctgacccgctggtcacaggggcccccggtgcacccatggacttgcagtgccacgacgccaaccgggactacgtcatcgtgacctggaagccgcccaacaccaccactgagagccccgtcatgggctattttgtggaccgatgtgaagtaggaacgaataattgggtgcagtgcaatgatgcaccggtgaaaatctgcaaatacccggtcacagggctttttgaaggaaggtcttacatattccgagtgagggcagtgaacagtgcgggcatcagccgaccctccagggtctctgatgcggtggctgcacttgaccccttggacctcagaaggttacaagccgttcatttggagggagagaaggagattgccatttatcaggatgaccttgaaggtgacgcccaggttccagggcctcccaccggtgtgcacgcttccgagatcagcagaaactatgtcgtcctcagctgggagccacccactccccgtggcaaggacccgctcatgtacttcattgagaagtcggtggtggggagcggcacgtggcagagagtcaacgcccagacggctgtgagatccccgagatatgccgtgtttgacctcatggaagggaagtcttatgtgttccgagtgctgtcagcaaaccggcatggcctgagcgaaccttcggagataacgtcccccattcaggcccaggatgtgaccgttgtcccttctgctccgggtcgggttcttgcttcccgaaacaccaagacgtcggtggtggtgcagtgggaccgacctaagcatgaggaggacctgctgggctactacgtggactgctgtgtggccggaaccaacctctgggagccctgcaaccacaagcccatcggatacaacaggttcgtggtgcacggcttaaccacgggagagcagtacatcttccgagtcaaggcggtcaatgctgtggggatgagtgaaaattcccaggaatcagacgtcataaaagtgcaggccgcactcaccgtcccgtcccatccttatgggattacgctcctcaactgtgacggccactccatgaccctcggctggaaggtcccgaaattcagtggtggctcgcccatcctgggctactacctggacaagcgtgaagttcaccataaaaactggcacgaggtcaattcctcacccagcaaaccgacaatcctaacggtggacggcttgacggaaggctcactctacgagttcaaaatcgccgccgtcaacctggccggcatcggggagccctcagatcccagtgagcacttcaagtgtgaggcctggaccatgccggagcccggtcctgcctacgacttgacgttctgtgaggtcagggacacgtccttggtcatgctgtggaaggcccctgtgtactccggcagcagccctgtttctggatatttcgtggacttcagggaggaggatgctggagagtggatcactgtcgatcagacgacaacagccagccgttatttaaaggtctctgacctgcagcaaggtaagacctatgtcttcagggtccgggcagtcaatgcaaatggcgtggggaagccctcagacacgtcggagcctgtgctggtagaggcgagaccaggcaccaaggaaatcagtgctggtgtcgatgaacagggcaacatctatctgggcttcgactgccaggaaatgacagacgcgtctcagttcacctggtgtaaatcctacgaggagatttcagatgatgagaggtttaaaatcgaaaccgtgggggatcactccaagctgtacttaaagaatccggataaggaggatttagggacttactccgtgtctgtaagtgatacagacggagtgtcctccagttttgttctggacccagaagagctcgagcgtttgatggcattgagcaatgaaataaagaaccccacaattcctctgaaatcggaattagcttatgagatttttgataaggggcgggttcgcttctggctccaggctgagcacttatcaccagatgccagctaccgatttattattaacgacagagaagtctctgacagcgagatacacagaattaaatgtgacaaagctactggcattattgagatggtgatggatcgatttagtattgaaaatgaggggacctacactgtgcagattcatgatgggaaagccaaaagtcagtcttctctagttcttattggagatgcattcaagactgtgctggaagaggctgagtttcaaaggaaagaatttctcaggaaacaaggccctcattttgctgagtacttgcactgggatgtcacggaagaatgtgaagttcgacttgtttgcaaggttgcaaacaccaagaaagaaaccgttttcaaatggctcaaggatgatgctctgtatgaaacggagacactgcctaacctggagaggggaatctgtgagctcctcatcccaaagttgtcaaagaaggaccacggtgaatacaaggcaaccttgaaagatgacagaggccaagatgtgtccatccttgaaatagctggcaaagtgtatgatgatatgattttggcaatgagtagagtctgtgggaaatctgcttcgccactgaaggtactctgcaccccagaaggaatacgacttcagtgtttcatgaagtattttacagacgaaatgaaagtgaactggtgtcacaaagatgctaagatctcatccagtgagcatatgagaatcggggggagtgaagagatggcttggctgcagatatgtgagccgactgagaaggataaaggaaaatacacttttgagattttcgatggcaaagacaaccatcaacgctcccttgacctgtccggacaagcttttgatgaagcatttgcagaattccagcaattcaaagctgctgcttttgcagagaagaatcgtggcaggttgatcggcggcttgcctgacgtggtgaccatcatggaagggaagaccttgaatctgacctgcacggtgtttggaaaccctgaccccgaagtgatttggttcaagaacgaccaggacatccagctcagcgagcacttctcggtgaaggtggagcaggccaagtacgtcagcatgaccatcaaaggcgtgacctccgaggactcgggcaagtacagcatcaacatcaagaataagtatggcggggagaagatcgacgtgacagtgagcgtgtacaaacacggggagaagatcccggacatggccccgccccagcaagccaagcccaagctcatccccgcgtctgcctcagcggcaggccagtgaaggcgttttcctagcctggagatgggaaaatatgcttggcagagacaggaatgctgtgtgcttgttccaaatgagcagctggcatccgagtggtgtcctgtgtgggctgatagttgatcacacattgtgcttttgatttttgcatttggtgatgaatattttatacccgtctaagggagaaagctaatgttttccacaagactgaacaacgtgtatttacacgagggtagacggcagatgcctgacagagagtgggttggcagacaacacactagcattttcacgggtgtgggcacatgggtgtggcacctggacgtgtgcagcatgtggcggtctgtgtgaagccaccgtgcttctctttggggggccgcgagatctagcatctctgaaatcctggctgtcgaggctttgaagcatgtgttacctggttaagcttgttttctcttgctttaggcaaataaaagtttaaaaatcaaaaaaaagttgtgg

SEQ ID NO: 69904 - DNA, 1781 bp, Homo sapiens
agagatggtaactccagcagggcagtttcatatccaccgagagaaggagatttaggatacacatccagcagttaaaaccagcaggggctggcaagtagctgggtgtgggtgagagggaagtgtactggaggaccgagtgggtgtgatatttcttgagatcagcactgtacggggagggccaagttttagggttttgagaatacattcaatttcacaaagatttagttatatccgtggaatggtcagtaaggcataaccggctcacgacaggacatgtgaacctggcagcaatgggaaagtcatctggagcatgtggattcatgagatatcgtgtgtggattcatgaggttgcaaacaccaagaaagaaaccgttttcaaatggctcaaggatgatgctctgtatgaaacggagacactgcctaacctggagaggggaatctgtgagctcctcatcccaaagttgtcaaagaaggaccacggtgaatacaaggcaaccttgaaagatgacagaggccaagatgtgtccatccttgaaatagctggcaaagtgtatgatgatatgattttggcaatgagtagagtctgtgggaaatctgcttcgccactgaaggtactctgcaccccagaaggaatacgacttcagtgtttcatgaagtattttacagacgaaatgaaagtgaactggtgtcacaaagatgctaagatctcatccagtgagcatatgagaatcggggggagtgaagagatggcttggctgcagatatgtgagccgactgagaaggataaaggaaaatacacttttgagattttcgatggcaaagacaaccatcaacgctcccttgacctgtccggacaagcttttgatgaagcatttgcagaattccagcaattcaaagctgctgcttttgcagagaagaatcgtggcaggttgatcggcggcttgcctgacgtggtgaccatcatggaagggaagaccttgaatctgacctgcacggtgtttggaaaccctgaccccgaagtgatttggttcaagaacgaccaggacatccagctcagcgagcacttctcggtgaaggtggagcaggccaagtacgtcagcatgaccatcaaaggcgtgacctccgaggactcgggcaagtacagcatcaacatcaagaataagtatggcggggagaagatcgacgtgacagtgagcgtgtacaaacacggggagaagatcccggacatggccccgccccagcaagccaagcccaagctcatccccgcgtctgcctcagcggcaggccagtgaaggcgttttcctagcctggagatgggaaaatatgcttggcagagacaggaatgctgtgtgcttgttccaaatgagcagctggcatccgagtggtgtcctgtgtgggctgatagttgatcacacattgtgcttttgatttttgcatttggtgatgaatattttatacccgtctaagggagaaagctaatgttttccacaagactgaacaacgtgtatttacacgagggtagacggcagatgcctgacagagagtgggttggcagacaacacactagcattttcacgggtgtgggcacatgggtgtggcacctggacgtgtgcagcatgtggcggtctgtgtgaagccaccgtgcttctctttggggggccgcgagatctagcatctctgaaatcctggctgtcgaggctttgaagcatgtgttacctggttaagcttgttttctcttgctttaggcaaataaaagtttaaaaatcaaaaaaaagttgtgg

SEQ ID NO: 69905 - DNA, 4610 bp, Homo sapiens
ggagggaggcacaggcgcttgctttgcaggagtcagctctgccttcctcggctggagtgtgggtggcttggtgagccggtggtcaggaattctctctcctccttgcaattttcctttctgtctgggagcacgccaagatgtcccttgtgactgtccccttctaccagaagagacataggcacttcgaccagtcctaccgtaatattcaaacacggtacctgctggacgaatatgcgtcaaaaaagcgagcttccacccaggcatcttcccagaagtccttgagtcagcggtcgtcttcacagagagcctccagccagacgtccctgggaggaaccatctgcagggtctgtgcgaagcgagtgagcacgcaggaagatgaggagcaggagaacagaagcaggtaccagtccctggtggccgcctatggtgaggccaagcgacagcgcttcctcagcgagctggcccacttggaggaggatgtccacctggcacgctcccaggcccgcgacaagctggacaaatacgccattcagcagatgatggaggacaagctggcctgggagagacacacatttgaagagcggataagcagggctcctgagatcctggtgcggctgcgatcccacaccgtctgggagaggatgtctgtgaaactctgcttcaccgtgcaaggatttcccacgcccgtggtgcagtggtacaaagatggcagtctgatttgccaggcggctgaaccgggaaagtacaggattgagagcaactatggcgtacacacactggagatcaacagggcagactttgacgacactgcgacatactcagcagtggccaccaatgcccacggacaagtgtccaccaacgcggcggtggtggtgagaaggttccggggagacgaggaaccattccgttcggtgggactcccgattggattgcccctgtcatcgatgattccgtacacgcacttcgacgtccagtttttggagaagtttggggtcaccttcaggagggaaggcgagacggtcactctcaagtgcaccatgctggtgacgccggacctgaagcgggtgcagccgcgcgccgagtggtaccgcgatgacttgctgttgaaagagtccaagtggacgaagatgttctttggagaaggccaggcctccctgtccttcagccacctgcacaaggacgacgagggcctgtacaccctgcgcatcgtgtctcggggcggcgtcacggaccacagcgccttcctgtttgtcagagatgctgacccgctggtcacaggggcccccggtgcacccatggacttgcagtgccacgacgccaaccgggactacgtcatcgtgacctggaagccgcccaacaccaccactgagagccccgtcatgggctattttgtggaccgatgtgaagtaggaacgaataattgggtgcagtgcaatgatgcaccggtgaaaatctgcaaatacccggtcacagggctttttgaaggaaggtcttacatattccgagtgagggcagtgaacagtgcgggcatcagccgaccctccagggtctctgatgcggtggctgcacttgaccccttggacctcagaaggttacaagccgttcatttggagggagagaaggagattgccatttatcaggatgaccttgaaggtgacgcccaggttccagggcctcccaccggtgtgcacgcttccgagatcagcagaaactatgtcgtcctcagctgggagccacccactccccgtggcaaggacccgctcatgtacttcattgagaagtcggtggtggggagcggcacgtggcagagagtcaacgcccagacggctgtgagatccccgagatatgccgtgtttgacctcatggaagggaagtcttatgtgttccgagtgctgtcagcaaaccggcatggcctgagcgaaccttcggagataacgtcccccattcaggcccaggatgtgaccgttgtcccttctgctccgggtcgggttcttgcttcccgaaacaccaagacgtcggtggtggtgcagtgggaccgacctaagcatgaggaggacctgctgggctactacgtggactgctgtgtggccggaaccaacctctgggagccctgcaaccacaagcccatcggatacaacaggttcgtggtgcacggcttaaccacgggagagcagtacatcttccgagtcaaggcggtcaatgctgtggggatgagtgaaaattcccaggaatcagacgtcataaaagtgcaggccgcactcaccgtcccgtcccatccttatgggattacgctcctcaactgtgacggccactccatgaccctcggctggaaggtcccgaaattcagtggtggctcgcccatcctgggctactacctggacaagcgtgaagttcaccataaaaactggcacgaggtcaattcctcacccagcaaaccgacaatcctaacggtggacggcttgacggaaggctcactctacgagttcaaaatcgccgccgtcaacctggccggcatcggggagccctcagatcccagtgagcacttcaagtgtgaggcctggaccatgccggagcccggtcctgcctacgacttgacgttctgtgaggtcagggacacgtccttggtcatgctgtggaaggcccctgtgtactccggcagcagccctgtttctggatatttcgtggacttcagggaggaggatgctggagagtggatcactgtcgatcagacgacaacagccagccgttatttaaaggtctctgacctgcagcaaggtaagacctatgtcttcagggtccgggcagtcaatgcaaatggcgtggggaagccctcagacacgtcggagcctgtgctggtagaggcgagaccaggcaccaaggaaatcagtgctggtgtcgatgaacagggcaacatctatctgggcttcgactgccaggaaatgacagacgcgtctcagttcacctggtgtaaatcctacgaggagatttcagatgatgagaggtttaaaatcgaaaccgtgggggatcactccaagctgtacttaaagaatccggataaggaggatttagggacttactccgtgtctgtaagtgatacagacggagtgtcctccagttttgttctggacccagaagagctcgagcgtttgatggcattgagcaatgaaataaagaaccccacaattcctctgaaatcggaattagcttatgagatttttgataaggggcgggttcgcttctggctccaggctgagcacttatcaccagatgccagctaccgatttattattaacgacagagaagtctctgacagcgagatacacagaattaaatgtgacaaagctactggcattattgagatggtgatggatcgatttagtattgaaaatgaggggacctacactgtgcagattcatgatgggaaagccaaaagtcagtcttctctagttcttattggagatgcattcaagactgtgctggaagaggctgagtttcaaaggaaagaatttctcaggaaacaaggccctcattttgctgagtacttgcactgggatgtcacggaagaatgtgaagttcgacttgtttgcaaggttgcaaacaccaagaaagaaaccgttttcaaatggctcaaggatgatgctctgtatgaaacggagacactgcctaacctggagaggggaatctgtgagctcctcatcccaaagttgtcaaagaaggaccacggtgaatacaaggcaaccttgaaagatgacagaggccaagatgtgtccatccttgaaatagctggcaaagtgtatgatgatatgattttggcaatgagtagagtctgtgggaaatctgcttcgccactgaaggtactctgcaccccagaaggaatacgacttcagtgtttcatgaagtattttacagacgaaatgaaagtgaactggtgtcacaaagatgctaagatctcatccagtgagcatatgagaatcggggggagtgaagagatggcttggctgcagatatgtgagccgactgagaaggataaaggaaaatacacttttgagattttcgatggcaaagacaaccatcaacgctcccttgacctgtccggacaagcttttgatgaagcatttgcagaattccagcaattcaaagctgctgcttttgcagagaagaatcgtggcaggttgatcggcggcttgcctgacgtggtgaccatcatggaagggaagttttccagctttattctttttgtttgagaagcagcaatgttccttccagctttctgcaccctgggtagaagccggaagctccccaagcagcagactcgcatgcccataggtgatgtctgtgacgcgccacatccaaacgaagagatatcgttggaagacttgaatctagctggaaggccaatgttcttttcaatgtaatgccaaagaaaattcacacttgtttgttctgtagaaaaaagtgacataatattatttttatttttaaatttacttatagtcatatgtgcatgcctgctcaaaaatgctcacccatcatttgcataagtaaatcagtttgtatttaatgttacagtttaagactcatgtttcagaaatacaatttttattaactga

SEQ ID NO: 69906 - DNA, 388 bp, Homo sapiens
tatggataaatattgccattttaatgattcatttttcaactgaacatcacaatttcctgcatcgatttaattaaacattgaaaatgctgctttcggttaaagttacatgtcgtaatggtgcgtatcccttctcattttcagtgtatgatgatatgattttggcaatgagtagagtctgtggtaagtaaatgccttttaattttcaagtcatttggggtgctgaaatcactatttcctgacacgggaagtcactgctgcaaaagagggcaccatggagctgtggtgcgtgttctgtgggaggccctggatggaagggcagggtggtgatctgctgccgatgaagctttttaaaggacttccctcagttttgtctggagtttgagtttta

SEQ ID NO: 69907 - DNA, 929 bp, Homo sapiens
catggctcctgctccgtgggaacgtcccgcagatgttttcctaaccaaggtgctttcccgttgcagatcgtggcaggttgatcggcggcttgcctgacgtggtgaccatcatggaagggaagaccttgaatctgacctgcacggtgtttggaaaccctgaccccgaagtgatttggttcaagaacgaccaggacatccagctcagcgagcacttctcggtgaaggtggagcaggccaagtacgtcagcatgaccatcaaaggcgtgacctccgaggactcgggcaagtacagcatcaacatcaagaataagtatggcggggagaagatcgacgtgacagtgagcgtgtacaaacacggggagaagatcccggacatggccccgccccagcaagccaagcccaagctcatccccgcgtctgcctcagcggcaggccagtgaaggcgttttcctagcctggagatgggaaaatatgcttggcagagacaggaatgctgtgtgcttgttccaaatgagcagctggcatccgagtggtgtcctgtgtgggctgatagttgatcacacattgtgcttttgatttttgcatttggtgatgaatattttatacccgtctaagggagaaagctaatgttttccacaagactgaacaacgtgtatttacacgagggtagacggcagatgcctgacagagagtgggttggcagacaacacactagcattttcacgggtgtgggcacatgggtgtggcacctggacgtgtgcagcatgtggcggtctgtgtgaagccaccgtgcttctctttggggggccgcgagatctagcatctctgaaatcctggctgtcgaggctttgaagcatgtgttacctggttaagcttgttttctcttgctttaggcaaataaaagtttaaaaatcaaaaaaaagttgtgg

SEQ ID NO: 69908 - DNA, 1345 bp, Homo sapiens
aggcagtacctcggcgtgacgcggtgacgcagccgcaggcaggcagtacctcggcgtgacgccatgacgcagccggagagagcttcacgcacaccatctcttcgttcttcctgaactctgtcacggagggggcctttgtttatttatttttgggaaatctgcttcgccactgaaggtactctgcaccccagaaggaatacgacttcagtgtttcatgaagtattttacagacgaaatgaaagtgaactggtgtcacaaagatgctaagatctcatccagtgagcatatgagaatcggggggagtgaagagatggcttggctgcagatatgtgagccgactgagaaggataaaggaaaatacacttttgagattttcgatggcaaagacaaccatcaacgctcccttgacctgtccggacaagcttttgatgaagcatttgcagaattccagcaattcaaagctgctgcttttgcagagaagaatcgtggcaggttgatcggcggcttgcctgacgtggtgaccatcatggaagggaagaccttgaatctgacctgcacggtgtttggaaaccctgaccccgaagtgatttggttcaagaacgaccaggacatccagctcagcgagcacttctcggtgaaggtggagcaggccaagtacgtcagcatgaccatcaaaggcgtgacctccgaggactcgggcaagtacagcatcaacatcaagaataagtatggcggggagaagatcgacgtgacagtgagcgtgtacaaacacggggagaagatcccggacatggccccgccccagcaagccaagcccaagctcatccccgcgtctgcctcagcggcaggccagtgaaggcgttttcctagcctggagatgggaaaatatgcttggcagagacaggaatgctgtgtgcttgttccaaatgagcagctggcatccgagtggtgtcctgtgtgggctgatagttgatcacacattgtgcttttgatttttgcatttggtgatgaatattttatacccgtctaagggagaaagctaatgttttccacaagactgaacaacgtgtatttacacgagggtagacggcagatgcctgacagagagtgggttggcagacaacacactagcattttcacgggtgtgggcacatgggtgtggcacctggacgtgtgcagcatgtggcggtctgtgtgaagccaccgtgcttctctttggggggccgcgagatctagcatctctgaaatcctggctgtcgaggctttgaagcatgtgttacctggttaagcttgttttctcttgctttaggcaaataaaagtttaaaaatcaaaaaaaagttgtgg

SEQ ID NO: 69909 - DNA, 413 bp, Homo sapiens
tgaaattacagccttgggtagctgcttacttgggaggctgggaacagcccggccctgtgcatcacatactaaagctgcatttacagtcccaagagcaaagggacagatcacaaatcagatcatttattgctgctgctagctcagcgaggataacattcccaaggggagagaggtggaggctctggccgtgagtgtaacagtttggtcccagggctcctgaggatcatactgggcaatgctagcgatattggctgaggagagcagtaaacgatgacccacagaagcttgctctctcttctctctctgtgttgtatctctctatattttgctcatccatcaatctatgtgtgagatggggaggctctctgaccaatagtcttcaaaaataaaatgcaatttgccaaacaaacaaa

SEQ ID NO: 69910 - DNA, 441 bp, Homo sapiens
gttctgaaacccctcaagcaccaatgagtggcgtaggtcctgtgagtggtggtcctggtggctttggtagaggaagtcaagggggcaactttgaaggccctaataagcgtcgtagatattaaacattcgttcattcctggctatccagaaaaaaaaagtcagtggtatgcctttatacttttacctgttatctggaagaaatggttttattgttaatgtatgtagacttaaaagttttttttttttgtaaaacttgaggtttttgtatttttctttattcatgagctttgtagattagaatggtaatgatgctcatcattttgaatgttgaaatgtgtttgtgactttagctaaatataagtattccatagtactgtgaaatctatgtagttacttaatctcaataaagaaatcattttggataatttaaaacggttatta

SEQ ID NO: 69911 - DNA, 1828 bp, Homo sapiens
gctaccatgaagcgccttctgcttctgtttttgttctttataacattttcttctgcatttcccttagtccggatgatggaaaatgaagaaaatgtgcaactggctcaggcatatctcaaccagttctactctcttgaaatagaagggaatcatcttgttcaaagcaagaataggagtctcatagatgacaaaattcgggaaatgcaagcattttttggattgacagtgactggaaaactggactcaaacacccttgagatcatgaagacacccaggtgtggggtgcctgatgtgggccagtatggctacaccctccctgggtggagaaaatacaacctcacctacagaataataaactatactccggatatggcacgagctgctgtggatgaggctatccaagaaggtttagaagtgtggagcaaagtcactccactaaaattcaccaagatttcaaaggggattgcagacatcatgattgcctttaggactcgagtccatggtcggtgtcctcgctattttgatggtcccttgggagtgcttggccatgcctttcctcctggtccgggtctgggtggtgacactcattttgatgaggatgaaaactggaccaaggatggagcaggattcaacttgtttcttgtggctgctcatgaatttggtcatgcactggggctctctcactccaatgatcaaacagccttgatgttcccaaattatgtctccctggatcccagaaaatacccactttctcaggatgatatcaatggaatccagtccatctatggaggtctgcctaaggaacctgctaagccaaaggaacccactataccccatgcctgtgaccctgacttgacttttgacgctatcacaactttccgcagagaagtaatgttctttaaaggcaggcacctatggaggatctattatgatatcacggatgttgagtttgaattaattgcttcattctggccatctctgccagctgatctgcaagctgcatacgagaaccccagagataagattctggtttttaaagatgaaaacttctggatgatcagaggatatgctgtcttgccagattatcccaaatccatccatacattaggttttccaggacgtgtgaagaaaatagatgcagccgtctgtgataagaccacaagaaaaacctacttctttgtgggcatttggtgctggaggtttgatgaaatgacccaaaccatggacaaagggttcccgcagagagtggtaaaacactttcctggaatcagtatccgtgttgatgctgctttccagtacaaaggattcttctttttcagccgtggatcaaagcaatttgaatacgacattaagacaaagaatattacccgaatcatgagaactaatacttggtttcaatgcaaagaaccaaagaactcctcatttggttttgatatcaacaaggaaaaagcacattcaggaggcataaagatattgtatcataagagtttaagcttgtttatttttggtattgttcatttgctgaaaaacacttctatttatcaataaattcatagacctaaaataaacctcaacaggtcttttaatataaattctgcttcaaaatagaataaaaccattctttaacaacaagttgctggtcctagttctaaatatccaaattcaatggccattttgagctgcctgattcttttaataggaagttattatgtagaaacaaaaatctctgactgtactttaagcctatttcatgctttgtggacttggagaagacatgtcttataactgaatactgaaacatttattaaaccaatctttagcattctat

SEQ ID NO: 69912 - DNA, 1630 bp, Homo sapiens
gctaccatgaagcgccttctgcttctgtttttgttctttataacattttcttctgcatttcccttagtccggatgatggaaaatgaagaaaatgtgcaactggctcaggcatatctcaaccagttctactctcttgaaatagaagggaatcatcttgttcaaagcaagaataggagtctcatagatgacaaaattcgggaaatgcaagcattttttggattgacagtgactggaaaactggactcaaacacccttgagatcatgaagacacccaggtgtggggtgcctgatgtgggccagtatggctacaccctccctgggtggagaaaatacaacctcacctacagaataataaactatactccggatatggcacgagctgctgtggatgaggctatccaagaaggtttagaagtgtggagcaaagtcactccactaaaattcaccaagatttcaaaggggattgcagacatcatgattgcctttaggactcgagtccatggtcggtgtcctcgctattttgatggtcccttgggagtgcttggccatgcctttcctcctggtccgggtctgggtggtgacactcattttgatgaggatgaaaactggaccaaggatggagcaggattcaacttgtttcttgtggctgctcatgaatttggtcatgcactggggctctctcactccaatgatcaaacagccttgatgttcccaaattatgtctccctggatcccagaaaatacccactttctcaggatgatatcaatggaatccagtccatctatggaggtctgcctaaggaacctgctaagccaaaggaacccactataccccatgcctgtgaccctgacttgacttttgacgctatcacaactttccgcagagaagtaatgttctttaaaggcaggcacctatggaggatctattatgatatcacggatgttgagtttgaattaattgcttcattctggccatctctgccagctgatctgcaagctgcatacgagaaccccagagataagattctggtttttaaagatgaaaacttctggatgatcagaggatatgctgtcttgccagattatcccaaatccatccatacattaggttttccaggacgtgtgaagaaaatagatgcagccgtctgtgataagaccacaagaaaaacctacttctttgtgggcatttggtgctggaggtttgatgaaatgacccaaaccatggacaaagggttcccgcagagagtggtaaaacactttcctggaatcagtatccgtgttgatgctgctttccagtacaaaggattcttctttttcagccgtggatcaaagcaatttgaatacgacattaagacaaagaatattacccgaatcatgagaactaatacttggtttcaatgcaaagaaccaaagaactcctcatttggttttgatatcaacaaggaaaaagcacattcaggaggcataaagatattgtatcataagagtttaagcttgtttatttttggtattgttcatttgctgaaaaacacttctatttatcaataaattcatagacctaaaataaacctcaacaggtcttttaatataaattctgcttcaaaatagaataaaaccattctttaacaac

SEQ ID NO: 69913 - DNA, 341 bp, Homo sapiens
ctgtggttcacatgaatacaccccggcaactctcagctgccagagctggaatctggcaacttccctggacgggaaaggctagcccaccgcccgggaagtgaggtgcgggcaacaaaagaacacagggtggggcccagaaacggacgggacaaatggagcaacacagattttccagaaggcctcatcagcgcaacagccagcaacaggttgcccttgttgcagaagtcacataacctaatcaactctgaatcttttctctcctccccactatctagaaacagctcaggacttaggactctgttaacttctctgtccacaagaaaaacttctctgtgctcaca

SEQ ID NO: 69914 - DNA, 2273 bp, Homo sapiens
tcaccccatttaccttgtatagaggattgttcattctttggggactaagttatagttatggtgagtgtgtatttactgtagttttgcctgatctcactcattgcacttcctggagttaaattttccacagcccatgttgaggaatagcactctgcaggtttttgtttgtttttcggggttttttttaattgaagccctaaaccaggaattatttgtgttctaacaggaggatgaacttgctgaaaataaaactttgctatgtatttactcttttttaaaagacaaaagcaaaaccagactttctacgtactactccaaagactgtgattgtgactataatacatttttggtaatttttttatacctaatttgtataggaagtgctatttctcataggctgtttcttgaaattttaagtttattgctttaaaatggcagtgtttctcccactttgatatgctaacatttagtaagcactggctttatgaaagcggctttttataagtatactgcattttttgagcctatcattaattagcttagtatgaaagataagaaaatctccatgttgtatccatttggctcaggaagattctttgccttacctttcttagaactctttattgcttatcaaaagtttgagtacccgcttggtttttttttggtaattaaatattgtatgatttatctggttcaaggaagatgcactattcagttatctattgagaaattattttgcagtggttttagtgggtgaaaatgtcccatctgcaccagtacacaggcaggcattatcattcttcacctactttttaaatagtggcaacttgggattcattctggtgattctgaaccttgccacatagcttaaagtataaaaaagattcaagagcagtgaggtttgttctttccagtgaatggtggactgagtggtgcgaggtggagggctaacaagaggaaagaactacattcttcagaatacagtgatgaaaattcattttgaaactcaaatattttcattttggatattctcctgtttttattaaaccagtgattacacctggccatccctctaaatgttctaggaaggcatgtctattgtgattttgatgaagacagaattatttttctctgtagaaacacagataccactttatcagggaagttagtcaaatgaaatggaaattggtaaatggacaaaagctagctagtaaaaaggacgacccagcaacatgctttaaccccattgtatgtttgtggaaagagcatagtttaacatcttgagaaatttgggacataaagttttcatggtagacagttcatgcagtatatgaattgacataatggaaataatctgattttatttttacaactaacatccattccccttcatttaaacaccttttgtgttttacttcagtgaggagattggagtctgaatggatctgttttccaagagattctgagaaatttttgtattcagcagttggaaagctctctattctagttgataaaacttcccttttttgatgtagatgcagatattctatacagttctgttgtcttttactaggactgtaaacttttgtgataaaattcaaataagattttatttcttggtaattttggctttcacaatttatctttaaatccttgagcaatctgtatacaattaagagatttctgacatttattcttacactaaatggatcaactctaggatttaggcatgttaacttctgttgtgttttgaatctctccagagttgcatgtagatagcatttatttctgtgcccttaaacccatttagaaaataactacaaagtaaaaatgtagaggaaatagaaatgtattttttcatgaacattttgatacaaatttcatcatttaatgattcaccaatttcttgcattaatttgaatttaagcatttaattcaaagagaggggagcatccattattgatacatgtgggcttttaaaaactccatcctttataaatagtcaaggtttgggccacacaaagtatatttttatcatggaaaaatttcaactcctcaagccgtaatgttgaacagaattggagtattttctttataatttcttgaacaggcaaatgaaagcttattatagaatgcatgtattttcttttatctttggaacatcagcaccagtatattgctggcagctattgtattaaaaaataaagtatattttcactatcataaaggattcttttttcccccctcatgaaaataaacaacaacttggggta

SEQ ID NO: 69915 - DNA, 849 bp, Homo sapiens
tcaccccatttaccttgtatagaggattgttcattctttggggactaagttatagttatggtgagtgtgtatttactgtagttttgcctgatctcactcattgcacttcctggagttaaattttccacagcccatgttgaggaatagcactctgcaggtttttgtttgtttttcggggttttttttaattgaagccctaaaccaggaattatttgtgttctaacaggaggatgaacttgctgaaaataaaactttgctatgtatttactcttttttaaaagacaaaagcaaaaccagactttctacgtactactccaaagactgtgattgtgactataatacatttttggtaatttttttatacctaatttgtataggaagtgctatttctcataggctgtttcttgaaattttaagtttattgctttaaaatggcagtgtttctcccactttgatatgctaacatttagtaagcactggctttatgaaagcggctttttataagtatactgcattttttgagcctatcattaattagcttagtattttctttataatttcttgaacaggcaaatgaaagcttattatagaatgcatgtattttcttttatctttggaacatcagcaccagtatattgctggcagctattgtattaaaaaataaagtatattttcactatcataaaggattcttttttcccccctcatgaaaataaacaacaacttggggtaaaaaaagacaacacaaaacaaccacaaagacacacaagaaaaaaaagaaaaaacacaaagaccaccagcgagcaggcaaccagaaaaaaatacaccaaaccgccacagcacagaaaa

SEQ ID NO: 69916 - DNA, 686 bp, Homo sapiens
tcaccccatttaccttgtatagaggattgttcattctttggggactaagttatagttatggtgagtgtgtatttactgtagttttgcctgatctcactcattgcacttcctggagttaaattttccacagcccatgttgaggaatagcactctgcaggtttttgtttgtttttcggggttttttttaattgaagccctaaaccaggaattatttgtgttctaacaggaggatgaacttgctgaaaataaaactttgctatgtatttactcttttttaaaagacaaaagcaaaaccagactttctacgtactactccaaagactgtgattgtgactataatacatttttggtaatttttttatacctaatttgtataggaagtgctatttctcataggctgtttcttgaaattttaagtttattgctttaaaatggcagtgtttctcccactttgatatgctaacatttagtaagcactggctttatgaaagcggctttttataagtatactgcattttttgagcctatcattaattagcttagtattttctttataatttcttgaacaggcaaatgaaagcttattatagaatgcatgtattttcttttatctttggaacatcagcaccagtatattgctggcagctattgtattaaaaaataaagtatattttcactatcataaa

SEQ ID NO: 69917 - DNA, 313 bp, Homo sapiens
gcggccgcctactactactactactgctcgaattcaagcttctaacgatgtacggggacatgtattttcttttatctttggaacatcagcaccagtatattgctggcagctattgtattaaaaaataaagtatattttcactatcataaaggattcttttttcccccctcatgaaaataaacaacaacttggggtaaaaaaagacaacacaaaacaaccacaaagacacacaagaaaaaaaagaaaaaacacaaagaccaccagcgagcaggcaaccagaaaaaaatacaccaaaccgccacagcacagaaaa

SEQ ID NO: 69918 - DNA, 2227 bp, Homo sapiens
tcaccccatttaccttgtatagaggattgttcattctttggggactaagttatagttatggtgagtgtgtatttactgtagttttgcctgatctcactcattgcacttcctggagttaaattttccacagcccatgttgaggaatagcactctgcaggtttttgtttgtttttcggggttttttttaattgaagccctaaaccaggaattatttgtgttctaacaggaggatgaacttgctgaaaataaaactttgctatgtatttactcttttttaaaagacaaaagcaaaaccagactttctacgtactactccaaagactgtgattgtgactataatacatttttggtaatttttttatacctaatttgtataggaagtgctatttctcataggctgtttcttgaaattttaagtttattgctttaaaatggcagtgtttctcccactttgatatgctaacatttagtaagcactggctttatgaaagcggctttttataagtatactgcattttttgagcctatcattaattagcttagtatgaaagataagaaaatctccatgttgtatccatttggctcaggaagattctttgccttacctttcttagaactctttattgcttatcaaaagtttgagtacccgcttggtttttttttggtaattaaatattgtatgatttatctggttcaaggaagatgcactattcagttatctattgagaaattattttgcagtggttttagtgggtgaaaatgtcccatctgcaccagtacacaggcaggcattatcattcttcacctactttttaaatagtggcaacttgggattcattctggtgattctgaaccttgccacatagcttaaagtataaaaaagattcaagagcagtgaggtttgttctttccagtgaatggtggactgagtggtgcgaggtggagggctaacaagaggaaagaactacattcttcagaatacagtgatgaaaattcattttgaaactcaaatattttcattttggatattctcctgtttttattaaaccagtgattacacctggccatccctctaaatgttctaggaaggcatgtctattgtgattttgatgaagacagaattatttttctctgtagaaacacagataccactttatcagggaagttagtcaaatgaaatggaaattggtaaatggacaaaagctagctagtaaaaaggacgacccagcaacatgctttaaccccattgtatgtttgtggaaagagcatagtttaacatcttgagaaatttgggacataaagttttcatggtagacagttcatgcagtatatgaattgacataatggaaataatctgattttatttttacaactaacatccattccccttcatttaaacaccttttgtgttttacttcagtgaggagattggagtctgaatggatctgttttccaagagattctgagaaatttttgtattcagcagttggaaagctctctattctagttgataaaacttcccttttttgatgtagatgcagatattctatacagttctgttgtcttttactaggactgtaaacttttgtgataaaattcaaataagattttatttcttggtaattttggctttcacaatttatctttaaatccttgagcaatctgtatacaattaagagatttctgacatttattcttacactaaatggatcaactctaggatttaggcatgttaacttctgttgtgttttgaatctctccagagttgcatgtagatagcatttatttctgtgcccttaaacccatttagaaaataactacaaagtaaaaatgtagaggaaatagaaatgtattttttcatgaacattttgatacaaatttcatcatttaatgattcaccaatttcttgcattaatttgaatttaagcatttaattcaaagagaggggagcatccattattgatacatgtgggcttttaaaaactccatcctttataaatagtcaaggtttgggccacacaaagtatatttttatcatggaaaaatttcaactcctcaagccgtaatgttgaacagaattggagtattttctttataatttcttgaacaggcaaatgaaagcttattatagaatgcatgtattttcttttatctttggaacatcagcaccagtatattgctggcagctattgtattaaaaaataaagtatattttcactatcataaa

SEQ ID NO: 69919 - DNA, 1181 bp, Homo sapiens
gacccacgcgtcgtcgacccacgcgtccgaatgttctaggaaggcatgtctattgtgattttgatgaagacagaattatttttctctgtagaaacacagataccactttatcagggaagttagtcaaatgaaatggaaattggtaaatggacaaaagctagctagtaaaaaggacgacccagcaacatgctttaaccccattgtatgtttgtggaaagagcatagtttaacatcttgagaaatttgggacataaagttttcatggtagacagttcatgcagtatatgaattgacataatggaaataatctgattttatttttacaactaacatccattccccttcatttaaacaccttttgtgttttacttcagtgaggagattggagtctgaatggatctgttttccaagagattctgagaaatttttgtattcagcagttggaaagctctctattctagttgataaaacttcccttttttgatgtagatgcagatattctatacagttctgttgtcttttactaggactgtaaacttttgtgataaaattcaaataagattttatttcttggtaattttggctttcacaatttatctttaaatccttgagcaatctgtatacaattaagagatttctgacatttattcttacactaaatggatcaactctaggatttaggcatgttaacttctgttgtgttttgaatctctccagagttgcatgtagatagcatttatttctgtgcccttaaacccatttagaaaataactacaaagtaaaaatgtagaggaaatagaaatgtattttttcatgaacattttgatacaaatttcatcatttaatgattcaccaatttcttgcattaatttgaatttaagcatttaattcaaagagaggggagcatccattattgatacatgtgggcttttaaaaactccatcctttataaatagtcaaggtttgggccacacaaagtatatttttatcatggaaaaatttcaactcctcaagccgtaatgttgaacagaattggagtattttctttataatttcttgaacaggcaaatgaaagcttattatagaatgcatgtattttcttttatctttggaacatcagcaccagtatattgctggcagctattgtattaaaaaataaagtatattttcactatcataaa

SEQ ID NO: 69920 - DNA, 2390 bp, Homo sapiens
tcaccccatttaccttgtatagaggattgttcattctttggggactaagttatagttatggtgagtgtgtatttactgtagttttgcctgatctcactcattgcacttcctggagttaaattttccacagcccatgttgaggaatagcactctgcaggtttttgtttgtttttcggggttttttttaattgaagccctaaaccaggaattatttgtgttctaacaggaggatgaacttgctgaaaataaaactttgctatgtatttactcttttttaaaagacaaaagcaaaaccagactttctacgtactactccaaagactgtgattgtgactataatacatttttggtaatttttttatacctaatttgtataggaagtgctatttctcataggctgtttcttgaaattttaagtttattgctttaaaatggcagtgtttctcccactttgatatgctaacatttagtaagcactggctttatgaaagcggctttttataagtatactgcattttttgagcctatcattaattagcttagtatgaaagataagaaaatctccatgttgtatccatttggctcaggaagattctttgccttacctttcttagaactctttattgcttatcaaaagtttgagtacccgcttggtttttttttggtaattaaatattgtatgatttatctggttcaaggaagatgcactattcagttatctattgagaaattattttgcagtggttttagtgggtgaaaatgtcccatctgcaccagtacacaggcaggcattatcattcttcacctactttttaaatagtggcaacttgggattcattctggtgattctgaaccttgccacatagcttaaagtataaaaaagattcaagagcagtgaggtttgttctttccagtgaatggtggactgagtggtgcgaggtggagggctaacaagaggaaagaactacattcttcagaatacagtgatgaaaattcattttgaaactcaaatattttcattttggatattctcctgtttttattaaaccagtgattacacctggccatccctctaaatgttctaggaaggcatgtctattgtgattttgatgaagacagaattatttttctctgtagaaacacagataccactttatcagggaagttagtcaaatgaaatggaaattggtaaatggacaaaagctagctagtaaaaaggacgacccagcaacatgctttaaccccattgtatgtttgtggaaagagcatagtttaacatcttgagaaatttgggacataaagttttcatggtagacagttcatgcagtatatgaattgacataatggaaataatctgattttatttttacaactaacatccattccccttcatttaaacaccttttgtgttttacttcagtgaggagattggagtctgaatggatctgttttccaagagattctgagaaatttttgtattcagcagttggaaagctctctattctagttgataaaacttcccttttttgatgtagatgcagatattctatacagttctgttgtcttttactaggactgtaaacttttgtgataaaattcaaataagattttatttcttggtaattttggctttcacaatttatctttaaatccttgagcaatctgtatacaattaagagatttctgacatttattcttacactaaatggatcaactctaggatttaggcatgttaacttctgttgtgttttgaatctctccagagttgcatgtagatagcatttatttctgtgcccttaaacccatttagaaaataactacaaagtaaaaatgtagaggaaatagaaatgtattttttcatgaacattttgatacaaatttcatcatttaatgattcaccaatttcttgcattaatttgaatttaagcatttaattcaaagagaggggagcatccattattgatacatgtgggcttttaaaaactccatcctttataaatagtcaaggtttgggccacacaaagtatatttttatcatggaaaaatttcaactcctcaagccgtaatgttgaacagaattggagtattttctttataatttcttgaacaggcaaatgaaagcttattatagaatgcatgtattttcttttatctttggaacatcagcaccagtatattgctggcagctattgtattaaaaaataaagtatattttcactatcataaaggattcttttttcccccctcatgaaaataaacaacaacttggggtaaaaaaagacaacacaaaacaaccacaaagacacacaagaaaaaaaagaaaaaacacaaagaccaccagcgagcaggcaaccagaaaaaaatacaccaaaccgccacagcacagaaaa

SEQ ID NO: 69921 - DNA, 2574 bp, Homo sapiens
tcaccccatttaccttgtatagaggattgttcattctttggggactaagttatagttatggtgagtgtgtatttactgtagttttgcctgatctcactcattgcacttcctggagttaaattttccacagcccatgttgaggaatagcactctgcaggtttttgtttgtttttcggggttttttttaattgaagccctaaaccaggaattatttgtgttctaacaggaggatgaacttgctgaaaataaaactttgctatgtatttactcttttttaaaagacaaaagcaaaaccagactttctacgtactactccaaagactgtgattgtgactataatacatttttggtaatttttttatacctaatttgtataggaagtgctatttctcataggctgtttcttgaaattttaagtttattgctttaaaatggcagtgtttctcccactttgatatgctaacatttagtaagcactggctttatgaaagcggctttttataagtatactgcattttttgagcctatcattaattagcttagtatgaaagataagaaaatctccatgttgtatccatttggctcaggaagattctttgccttacctttcttagaactctttattgcttatcaaaagtttgagtacccgcttggtttttttttggtaattaaatattgtatgatttatctggttcaaggaagatgcactattcagttatctattgagaaattattttgcagtggttttagtgggtgaaaatgtcccatctgcaccagtacacaggcaggcattatcattcttcacctactttttaaatagtggcaacttgggattcattctggtgattctgaaccttgccacatagcttaaagtataaaaaagattcaagagcagtgaggtttgttctttccagtgaatggtggactgagtggtgcgaggtggagggctaacaagaggaaagaactacattcttcagaatacagtgatgaaaattcattttgaaactcaaatattttcattttggatattctcctgtttttattaaaccagtgattacacctggccatccctctaaatgttctaggaaggcatgtctattgtgattttgatgaagacagaattatttttctctgtagaaacacagataccactttatcagggaagttagtcaaatgaaatggaaattggtaaatggacaaaagctagctagtaaaaaggacgacccagcaacatgctttaaccccattgtatgtttgtggaaagagcatagtttaacatcttgagaaatttgggacataaagttttcatggtagacagttcatgcagtatatgaattgacataatggaaataatctgattttatttttacaactaacatccattccccttcatttaaacaccttttgtgttttacttcagtgaggagattggagtctgaatggatctgttttccaagagattctgagaaatttttgtattcagcagttggaaagctctctattctagttgataaaacttcccttttttgatgtagatgcagatattctatacagttctgttgtcttttactaggactgtaaacttttgtgataaaattcaaataagattttatttcttggtaattttggctttcacaatttatctttaaatccttgagcaatctgtatacaattaagagatttctgacatttattcttacactaaatggatcaactctaggatttaggcatgttaacttctgttgtgttttgaatctctccagagttgcatgtagatagcatttatttctgtgcccttaaacccatttagaaaataactacaaagtaaaaatgtagaggaaatagaaatgtattttttcatgaacattttgatacaaatttcatcatttaatgattcaccaatttcttgcattaatttgaatttaagcatttaattcaaagagaggggagcatccattattgatacatgtgggcttttaaaaactccatcctttataaatagtcaaggtttgggccacacaaagtatatttttatcatggaaaaatttcaactcctcaagccgtaatgttgaacagaattggagtattttctttataatttcttgaacaggcaaatgaaagcttattatagaatgcatgtattttcttttatctttggaacatcagcaccagtatattgctggcagctattgtattaaaaaataaagtatattttcactatcataaaaaacaaccaaacaaaaaaaaaaaaagaaaaaaaaaaaaaaaaaaaaaaaaattaaaagaaaatagaaaagaaaaaaagaaaaaaaaaagagaaaaagaaaagaaaaaaaaaatagcaggaggagcaagaacggaaaaagcaaccaaacaaacgaaagagaaacaaaaagaagcaagagaacaagaacaagcagaaatgaacaacacgaagcaaaccagaagaagaaaaaaaaaggaagaaaaaagaaaaaagcgaagagaaagagaaaagcaagaagcgaacaaggagcaaaaaaaatggagggaaaatcaagaccacatgcccaaagcaacagcacaagaaaaaag

SEQ ID NO: 69922 - DNA, 598 bp, Homo sapiens
gatagtgaaaatatactttattttttaatacaatagctgccagcaatatactggtgctgatgttccaaagataaaagaaaatacatgcattctataataagctttcatttgcctgttcaagaaattataaagaaaatactccaattctgttcaacattacggcttgaggagttgaaattttttcatgaacattttgatacaaatttcatcatttaatgattcaccaatttcttgcattaatttgaatttaagcatttaattcaaagagaggggagcatccattattgatacatgtgggcttttaaaaactccatcctttataaatagtcaaggtttgggccacacaaagtatatttttatcatggaaaaatttcaactcctcaagccgtaatgttgaacagaattggagtattttctttataatttcttgaacaggcaaatgaaagcttattatagaatgcatgtattttcttttatctttggaacatcagcaccagtatattgctggcagctattgtattaaaaaataaagtatattttcactatcataaaggattcttttttcccccctcatgaaaataaacaacaacttggggta

SEQ ID NO: 69923 - DNA, 275 bp, Homo sapiens
cagatacacagaggtgccgggaggagaagggacgcattggcccaccgcctcgtgagtccaggcgccgtaattggtgcttcacgcatgtcgtctcagtaatcttcataacagccttgcaagggataagaaaacagaggcccagaaagggtaagtcatttgcttgaggttacataactggcaagatgtcaggaatgaatataaaccagcatcgattgagcacctactattcggcaggatctgtgctgtgattcttatccttgtgcaaaccctcagag

SEQ ID NO: 69924 - DNA, 964 bp, Homo sapiens
gtcagggacccaattgaggaggcagtctgtctgttctcagagcttgaacgccatgctatgagaaccactgctctcttcagtgctgtcagacagggacatttaagtctgcagaagttgtctgctgccttttgtttagctaagccctgcccacagaggttgagtctatagaggcagtaggccttgctgagctggggtgggctccactcagttcaagcttaccagctgctttgtttacctactcaagcctcagcaatggcggacacctgtatgcccgccaggctgcagcctcgcaggtggatctcagactgctgcgctagcagtgagcaaggctccatgggcgtgggatccaccaagccaggcacaggagagaatctcctggtctgccggttgctaagatggtgaggaaagtgcagtatttgggcggaagtgtaccgtttttccaaggatagtctgtcatggctttccttggctaggaaagggaaatcccctgaccccttgtgcttcctgggtgaggtgacataccgccctgcttcggcttcgccctccatgggctgcacccactgtccaaccagttccagtgggatgaaccagatacctcagttggaaatgctgaaatcacctgtcttctgcatcgatctcgctgggagctgcagacgagctgttcctattcggccatctgggaggaccaagaccatgtttaattttataagaaactgccaaactgttttgcaaagtagctgtaccgttttgtattctcaccagaagtgtatgagaatttcagttgtgctgcatcttccttacactctgtgttgtctgtttatatgattttaaacatttttatgtgtgtggtagtatctcattttggttttcattttcatatcactggccatgaatttgaatatcttttaatatgcttatttgccattcatatgtcttctttaataaactgtcttttgaaatcttt

SEQ ID NO: 69925 - DNA, 873 bp, Homo sapiens
cttccgacctcaagtgatccacccgcctcgacttcccaaagtgttgggattacaggtgtgagccaccacaccactgagtcttacagagagaataaacttgagccctttattatgtgctgtcctaacaaatctcaggtatcagaacagcacttatcagtccagaactgggtaaaaagggtctattaaaatgaaggtccaatgattctgggctaaattcagtcttagacatcagaatctgagggctatccttgctaaagaaacaaccaagcagcagcacttacattccaaggatggttttgtactcttagtaaacctccacggggttcaccatcctgagccaaggacccaaatgcacttttagtgatcagaaagaaaacaaaaaacaaaaaacccagccaacaattagaggcatgagggcaattttaaatgcttatcccatatttctgccaatttcagcatttttatttgtgtggatagcagcaacccacagaatagtagcaagcaactacgatattatagttattaggtcataacaagcaaactgcagaagtggccagattactccgatgtacctcaaagtaacagtgtgctataaatgctcagtttactgaggctaaagatggaactaattttctcttaagatcagtggtactaaataatacagcaaagctattcacacccctcaatcataaatctattttcaagaaaacccatgcctgcaggctaacaatgattaaaatatgaagaaaaaatgcactttataccagaattattaaaaattttcctttaaaatgagactgaaactcaacttgtttttcctcccaatacactggaaaacattatgcctacactctaaagtaaccatataatgct

SEQ ID NO: 69926 - DNA, 223 bp, Homo sapiens
ggcagaggttgcagtaagccaagatcaggccgttgcactccagcctgggtgacagagcaagactccatctcaaagcaacaacaataataataataataataataggtggaatgagaatatggctccatcctctaggatacaaaagtgcttctcccatagttgagaaaaatagtaactatttttaccaaaaacacctgtttcagaagcctcttaacaccacaat

SEQ ID NO: 69927 - DNA, 351 bp, Homo sapiens
attttatccattttggcaaatgctttgccattatatcttcagttgttgcttttggcccattgtctctctcccgcttcccctcttagttctattacacatatgcagttttcctaagactcatccatctttggtccttccctgtttctcaaggaagacccttcaaggatttgggctgagagactagtgggtcactctccctcaaacatggaagactgtggcaaatccactatctagatttgagcttggatctttagctcccatatcctgcagctttaaatgtggcaaacatcttggaggactagttggtaggcccagtccctctggggaaatacagtctctcaagcacttgga

SEQ ID NO: 69928 - DNA, 741 bp, Homo sapiens
  misc_feature (489)..(489): n is a, c, g, or t
  misc_feature (492)..(492): n is a, c, g, or t
ccggactataaagagagccgccggcttctgggctcgaccacgcttttcatctgtcccgctgcgtgttttcctcttgatcgggaactcctgcttctccttgcctcgaaatggaccccaactgctcctgctcgcctgttggctcctgtgcctgtgccggctcctgcaaatgcaaagagtgcaaatgcacctcctgcaagaagagctgctgctcctgctgccctgtgggctgtgccaagtgtgcccagggctgcatctgcaaagggacgtcagacaagtgcagctgctgtgcctgatgccaggacagctgtgctctcagatgtaaatagagcaacctatataaacctggatttttttttttttttttttggtacaaccctgacccgtttgctacatctttttttctatgaaatatgtgaatggcaataaattcatctagacttaaaaaaaaaaaaaaaaaaacaaaaaaaaaacttgtgtggcggcggcacnggncccaaagaaagtgttttcacaaccactccgcggtgggggggcgcgccggcccaagataggtgattggacctggggccagagggcgtgcaccaaaggagagaaccggcggcccagagactgggcgggggttccccaccaaagaaaaaacgcgccgggcgaccccggggtgtctgagcaaatccaaggggcgctcgagggcagcagggctcaccagagggccaggagccataaatcgcgcccggagggggg

SEQ ID NO: 69929 - DNA, 460 bp, Homo sapiens
  misc_feature (10)..(10): n is a, c, g, or t
  misc_feature (25)..(25): n is a, c, g, or t
  misc_feature (35)..(35): n is a, c, g, or t
  misc_feature (39)..(39): n is a, c, g, or t
agcaggccancatactactactaanttcgcggccngtcngacttcatctgtcccgctgcgtgttttcctcttgatcgggaactcctgcttctccttgcctcgaaatggaccccaactgctcctgctcgcctgttggctcctgtgcctgtgccggctcctgcaaatgcaaagagtgcaaatgcacctcctgcaagaagagctgctgctcctgctgccctgtgggctgtgccaagtgtgcccagggctgcatctgcaaagggacgtcagacaagtgcagctgctgtgcctgatgccaggacagctgtgctctcagatgtaaatagagcaacctatataaacctggatttttttttttttttttttggtacaaccctgacccgtttgctacatctttttttctatgaaatatgtgaatggcaataaattcatctagactattctggctctgggcacctcattt

SEQ ID NO: 69930 - DNA, 436 bp, Homo sapiens
aagcagtcgtatcaacgcagagtgtccattacggccggggacttcatctgtcccgctgcgtgttttcctcttgatcgggaactcctgcttctccttgcctcgaaatggaccccaactgctcctgctcgcctgttggctcctgtgcctgtgccggctcctgcaaatgcaaagagtgcaaatgcacctcctgcaagaagagctgctgctcctgctgccctgtgggctgtgccaagtgtgcccagggctgcatctgcaaagggacgtcagacaagtgcagctgctgtgcctgatgccaggacagctgtgctctcagatgtaaatagagcaacctatataaacctggatttttttttttttttttttggtacaaccctgacccgtttgctacatctttttttctatgaaatatgtgaatggcaataaattcatctagact

SEQ ID NO: 69931 - DNA, 785 bp, Homo sapiens
ccggactataaagagagccgccggcttctgggctcgaccacgcttttcatctgtcccgctgcgtgttttcctcttgatcgggaactcctgcttctccttgcctcgaaatggaccccaactgctcctgctcgcctgttggctcctgtgcctgtgccggctcctgcaaatgcaaagagtgcaaatgcacctcctgcaagaagagctgctgctcctgctgccctgtgggctgtgccaagtgtgcccagggctgcatctgcaaagggacgtcagacaagtgcagctgctgtgcctgatgccaggacagctgtgctctcagatgtaaatagagcaacctatataaacctggatttttttttttttttttttggtacaaccctgacccgtttgctacatctttttttctatgaaatatgtgaatggcaataaattcatctagactctaaaaaaaaaaaaaaaaaaaaaaaaaaaaaaaaaaaaaaaaaaaaaaaaaaagaaaaagaaaaaaacaaagagggggggggcgagagagaaaatacctcgcacagggggagcgacaaaaacagagcggcacacagccagctcgtgagaggaaagggggcgccaaataagaagagggccgccattaataaaaaaagcaaggagcagcagcgcccgaccgaagaaacaaaaccgcgtccagcgcgcgaagaaacgacccacagcggcagcagagctatcggaaagagaggcgcccacaaccaggaggggggcagcaacagcagacccacaccccgcacaaaagtcag

SEQ ID NO: 69932 - DNA, 463 bp, Homo sapiens
ccggactataaagagagccgccggcttctgggctcgaccacgcttttcatctgtcccgctgcgtgttttcctcttgatcgggaactcctgcttctccttgcctcgaaatggaccccaactgctcctgctcgcctgttggctcctgtgcctgtgccggctcctgcaaatgcaaagagtgcaaatgcacctcctgcaagaagagctgctgctcctgctgccctgtgggctgtgccaagtgtgcccagggctgcatctgcaaagggacgtcagacaagtgcagctgctgtgcctgatgccaggacagctgtgctctcagatgtaaatagagcaacctatataaacctggatttttttttttttttttttggtacaaccctgacccgtttgctacatctttttttctatgaaatatgtgaatggcaataaattcatctagactattctggctctgggcacctcattt

SEQ ID NO: 69933 - DNA, 467 bp, Homo sapiens
ccggactataaagagagccgccggcttctgggctcgaccacgcttttcatctgtcccgctgcgtgttttcctcttgatcgggaactcctgcttctccttgcctcgaaatggaccccaactgctcctgctcgcctgttggctcctgtgcctgtgccggctcctgcaaatgcaaagagtgcaaatgcacctcctgcaagaagagctgctgctcctgctgccctgtgggctgtgccaagtgtgcccagggctgcatctgcaaagggacgtcagacaagtgcagctgctgtgcctgatgccaggacagctgtgctctcagatgtaaatagagcaacctatataaacctggatttttttttttttttttttgttttttttttttttttttttttttttttttttttttttttttttttttttttttttttttttttttttttttttggggggggattttttttattaggggg

SEQ ID NO: 69934 - DNA, 1759 bp, Homo sapiens
aagcagtcgtatcaacgcagagtgtccattacggccggggacttcatctgtcccgctgcgtgttttcctcttgatcgggaactcctgcttctccttgcctcgaaatggaccccaactgctcctgctcgcctggtaagggacacctagctccgcgccttgggatgcccgtttcccagccacagtacagactcttcctgggtttgaagaagtcgcatttaaagttctgagctgaaggggctcctttatttcgttaggtgctttcttcccgatcacgtccctgagaccacttctcgcctccctgtgcctctaagttagagttgagggtactgaggcccaaggctgtcctgctccatgtcacccagttggtcagggggctgctggctgagccccaatgctctgaccaggctctgagcagtcagggtggatgggaagtggggggccattgcctcttcggagttcaggacagaaggttctggcctcctgtcttagccttcctgggctgtgtctggagcctgggaccttgcttgtggggtaaaagcaacagaacacttgcccttcccaaaatgaagggagaggagatggggcttctcttcctctcccctgagtgggaaaggagctctgggggctggtccttcagcacagaggaggggtcactgaagcgttattgaccagctgctgtaccttctgcatctcactccacgctcactgcctttttctcttccttgcagttggctcctgtgcctgtgccggctcctgcaaatgcaaagagtgcaaatgcacctcctgcaagaagagtgagtgcagggccttccctgcgaatctgggggatgggccaagttagagcagggaacccagagctctgcaggcaggggcaggccaatgaccagcttccccaaacccctccttcaacacctgattcagaatcagacctcaaattgccttaaaaatgggtgagtcccagcctcttattaccaaactagaaactgaggcccagagaggttaccagatagtgttgggaacaaagctggaatgtgaacctaggtctcctgcctcctgatgcagccttcttcacccttctgggtcctgaagcacttaaggcccaggatctggaagaccccgggtgatttcaaacctaatgatccagtcctttcctgcaggggtagcccagagcttccctagccttccccagaactgctgtgtcagggatttgccccctgtccggctgtgaagactttcctcatttaagggtaggttttggggaactggcctccttttgttcctgtacccccaatcactacctgtccagtcttctgtcctgtcccagactcaggtggggctgggcagctttttcatataaaaccctcatcccaaagatctaccagttctcttctgacaaagccatgccatcctgaaatgatggtcctctggggctggaggcagggctcgagccaggcctctgttggggcagggaggtgcctgattgagtctgctctgacctctcactctccccttcttctccaggctgctgctcctgctgccctgtgggctgtgccaagtgtgcccagggctgcatctgcaaagggacgtcagacaagtgcagctgctgtgcctgatgccaggacagctgtgctctcagatgtaaatagagcaacctatataaacctggatttttttttttttttttttggtacaaccctgacccgtttgctacatctttttttctatgaaatatgtgaatggcaataaattcatctagact

SEQ ID NO: 69935 - DNA, 1113 bp, Homo sapiens
aagcagtcgtatcaacgcagagtgtccattacggccggggacttcatctgtcccgctgcgtgttttcctcttgatcgggaactcctgcttctccttgcctcgaaatggaccccaactgctcctgctcgcctgttggctcctgtgcctgtgccggctcctgcaaatgcaaagagtgcaaatgcacctcctgcaagaagagtgagtgcagggccttccctgcgaatctgggggatgggccaagttagagcagggaacccagagctctgcaggcaggggcaggccaatgaccagcttccccaaacccctccttcaacacctgattcagaatcagacctcaaattgccttaaaaaggttaccagatagtgttgggaacaaagctggaatgtgaacctaggtctcctgcctcctgatgcagccttcttcacccttctgggtcctgaagcacttaaggcccaggatctggaagaccccgggtgatttcaaacctaatgatccagtcctttcctgcaggggtagcccagagcttccctagccttccccagaactgctgtgtcagggatttgccccctgtccggctgtgaagactttcctcatttaagggtaggttttggggaactggcctccttttgttcctgtacccccaatcactacctgtccagtcttctgtcctgtcccagactcaggtggggctgggcagctttttcatataaaaccctcatcccaaagatctaccagttctcttctgacaaagccatgccatcctgaaatgatggtcctctggggctggaggcagggctcgagccaggcctctgttggggcagggaggtgcctgattgagtctgctctgacctctcactctccccttcttctccaggctgctgctcctgctgccctgtgggctgtgccaagtgtgcccagggctgcatctgcaaagggacgtcagacaagtgcagctgctgtgcctgatgccaggacagctgtgctctcagatgtaaatagagcaacctatataaacctggatttttttttttttttttttggtacaaccctgacccgtttgctacatctttttttctatgaaatatgtgaatggcaataaattcatctagact

SEQ ID NO: 69936 - DNA, 1184 bp, Homo sapiens
aagcagtcgtatcaacgcagagtgtccattacggccggggacttcatctgtcccgctgcgtgttttcctcttgatcgggaactcctgcttctccttgcctcgaaatggaccccaactgctcctgctcgcctggtaagggacacctagctccgcgccttgggatgcccgtttcccagccacagtacagactcttcctgggtttgaagaagtcgcatttaaagttctgagctgaaggggctcctttatttcgttaggtgctttcttcccgatcacgtccctgagaccacttctcgcctccctgtgcctctaagttagagttgagggtactgaggcccaaggctgtcctgctccatgtcacccagttggtcagggggctgctggctgagccccaatgctctgaccaggctctgagcagtcagggtggatgggaagtggggggccattgcctcttcggagttcaggacagaaggttctggcctcctgtcttagccttcctgggctgtgtctggagcctgggaccttgcttgtggggtaaaagcaacagaacacttgcccttcccaaaatgaagggagaggagatggggcttctcttcctctcccctgagtgggaaaggagctctgggggctggtccttcagcacagaggaggggtcactgaagcgttattgaccagctgctgtaccttctgcatctcactccacgctcactgcctttttctcttccttgcagttggctcctgtgcctgtgccggctcctgcaaatgcaaagagtgcaaatgcacctcctgcaagaagagtgagtgcagggccttccctgcgaatctgggggatgggccaagttagagcagggaacccagagctctgcaggcaggggcaggccaatgaccagcttccccaaacccctccttcaacacctgattcagaatcagacctcaaattgccttaaaagctgctgctcctgctgccctgtgggctgtgccaagtgtgcccagggctgcatctgcaaagggacgtcagacaagtgcagctgctgtgcctgatgccaggacagctgtgctctcagatgtaaatagagcaacctatataaacctggatttttttttttttttttttggtacaaccctgacccgtttgctacatctttttttctatgaaatatgtgaatggcaataaattcatctagact

SEQ ID NO: 69937 - DNA, 439 bp, Homo sapiens
ccggactataaagagagccgccggcttctgggctcgaccacgcttttcatctgtcccgctgcgtgttttcctcttgatcgggaactcctgcttctccttgcctcgaaatggaccccaactgctcctgctcgcctgttggctcctgtgcctgtgccggctcctgcaaatgcaaagagtgcaaatgcacctcctgcaagaagagctgctgctcctgctgccctgtgggctgtgccaagtgtgcccagggctgcatctgcaaagggacgtcagacaagtgcagctgctgtgcctgatgccaggacagctgtgctctcagatgtaaatagagcaacctatataaacctggatttttttttttttttttttggtacaaccctgacccgtttgctacatctttttttctatgaaatatgtgaatggcaataaattcatctagact

SEQ ID NO: 69938 - DNA, 464 bp, Homo sapiens
aagcagtcgtatcaacgcagagtgtccattacggccggggacttcatctgtcccgctgcgtgttttcctcttgatcgggaactcctgcttctccttgcctcgaaatggaccccaactgctcctgctcgcctgttggctcctgtgcctgtgccggctcctgcaaatgcaaagagtgcaaatgcacctcctgcaagaagagctgctgctcctgctgccctgtgggctgtgccaagtgtgcccagggctgcatctgcaaagggacgtcagacaagtgcagctgctgtgcctgatgccaggacagctgtgctctcagatgtaaatagagcaacctatataaacctggatttttttttttttttttttgttttttttttttttttttttttttttttttttttttttttttttttttttttttttttttttttttttttttttggggggggattttttttattaggggg

SEQ ID NO: 69939 - DNA, 987 bp, Homo sapiens
ccggactataaagagagccgccggcttctgggctcgaccacgcttttcatctgtcccgctgcgtgttttcctcttgatcgggaactcctgcttctccttgcctcgaaatggaccccaactgctcctgctcgcctgttggctcctgtgcctgtgccggctcctgcaaatgcaaagagtgcaaatgcacctcctgcaagaagagctgctgctcctgctgccctgtgggctgtgccaagtgtgcccagggctgcatctgcaaagggacgtcagacaagtgcagctgctgtgcctgatgccaggacagctgtgctctcagatgtaaatagagcaacctatataaacctggatttttttttttttttttttggtacaaccctgacccgtttgctacatctttttttctatgaaatatgtgaatggcaataaattcatctagactctaaaaaaaaaaaaaaaaaaaaaaaaaaaaaaaaaaaaaaaaaaaaaaaaaaaaaaaaaaaaaaaaagggaggggcggcgcggcgcaaaaaaatatatcccacccgagggggcgccaccacaattaacaccgcgaccacaccagttttgttgcaaaaaagcgggccgccccacaaaagggagcgagcgacataataaaataacaacagcgaggcagcggggccgacccgcgtattaaacacacaccacgctgcgtatgatgtgggagcaaaaaacaaacgctgtccgacgggggaacccattactgggtggagaagaaagacaacccacccacacgtcggggtgcgatcgagcacaaacacatggttgagcaacacaaccccacaccaacgcgaagtaattatcagccgccccgacggcgaccaataaatacaatatgagcatggagtgttaattgggtgtgccaacaacacagcacatatttaatgttggttgcatagaaagatatttcgtccgctcgtaagatatcttgtcacaacattttttacg

SEQ ID NO: 69940 - DNA, 549 bp, Homo sapiens
ccggactataaagagagccgccggcttctgggctcgaccacgcttttcatctgtcccgctgcgtgttttcctcttgatcgggaactcctgcttctccttgcctcgaaatggaccccaactgctcctgctcgcctgttggctcctgtgcctgtgccggctcctgcaaatgcaaagagtgcaaatgcacctcctgcaagaagagctgctgctcctgctgccctgtgggctgtgccaagtgtgcccagggctgcatctgcaaagggacgtcagacaagtgcagctgctgtgcctgatgccaggacagctgtgctctcagatgtaaatagagcaacctatataaacctggatttttttttttttttttttggtacaaccctgacccgtttgctacatctttttttctatgaaatatgtgaatggcaataaattcatctagacttatttagctgttccaaacacagaagctttattgatgcaagtgagggagtcctgatccaaggctgtgtcctgctaggattccccctcctcctgtttcctctccttctcggg

SEQ ID NO: 69941 - DNA, 1163 bp, Homo sapiens
aagcagtcgtatcaacgcagagtgtccattacggccggggacttcatctgtcccgctgcgtgttttcctcttgatcgggaactcctgcttctccttgcctcgaaatggaccccaactgctcctgctcgcctgttggctcctgtgcctgtgccggctcctgcaaatgcaaagagtgcaaatgcacctcctgcaagaagagtgagtgcagggccttccctgcgaatctgggggatgggccaagttagagcagggaacccagagctctgcaggcaggggcaggccaatgaccagcttccccaaacccctccttcaacacctgattcagaatcagacctcaaattgccttaaaaatgggtgagtcccagcctcttattaccaaactagaaactgaggcccagagaggttaccagatagtgttgggaacaaagctggaatgtgaacctaggtctcctgcctcctgatgcagccttcttcacccttctgggtcctgaagcacttaaggcccaggatctggaagaccccgggtgatttcaaacctaatgatccagtcctttcctgcaggggtagcccagagcttccctagccttccccagaactgctgtgtcagggatttgccccctgtccggctgtgaagactttcctcatttaagggtaggttttggggaactggcctccttttgttcctgtacccccaatcactacctgtccagtcttctgtcctgtcccagactcaggtggggctgggcagctttttcatataaaaccctcatcccaaagatctaccagttctcttctgacaaagccatgccatcctgaaatgatggtcctctggggctggaggcagggctcgagccaggcctctgttggggcagggaggtgcctgattgagtctgctctgacctctcactctccccttcttctccaggctgctgctcctgctgccctgtgggctgtgccaagtgtgcccagggctgcatctgcaaagggacgtcagacaagtgcagctgctgtgcctgatgccaggacagctgtgctctcagatgtaaatagagcaacctatataaacctggatttttttttttttttttttggtacaaccctgacccgtttgctacatctttttttctatgaaatatgtgaatggcaataaattcatctagact

SEQ ID NO: 69942 - DNA, 893 bp, Homo sapiens
aagcagtcgtatcaacgcagagtgtccattacggccggggacttcatctgtcccgctgcgtgttttcctcttgatcgggaactcctgcttctccttgcctcgaaatggaccccaactgctcctgctcgcctgttggctcctgtgcctgtgccggctcctgcaaatgcaaagagtgcaaatgcacctcctgcaagaagagtgagtgcagggccttccctgcgaatctgggggatgggccaagttagagcagggaacccagagctctgcaggcaggggcaggccaatgaccagcttccccaaacccctccttcaacacctgattcagaatcagacctcaaattgccttaaaagctgctgctcctgctgccctgtgggctgtgccaagtgtgcccagggctgcatctgcaaagggacgtcagacaagtgcagctgctgtgcctgatgccaggacagctgtgctctcagatgtaaatagagcaacctatataaacctggattccccccccccccggccccccctgacccgcccgcacctctccccctctcaccctctgcccctgccccacctcccctcaccccccccccccccccccccccccccccccccccccccccccccccccccccacaaccccccacacccacccccccccccccccccctccccccccccccccccacccacaacccccctcctcccaccccacccctcccccccacccccccctaccctcaccccacccccacaccgacccacaccacacacaacctcacaccacccaaacaacaacatcactacctctccacactctcaacaccaacaccacacacacctcactcacacaacaacaaccagcacccaccacaccacaaacaccccaacccacccactc

SEQ ID NO: 69943 - DNA, 491 bp, Homo sapiens
tcataggctacaggttacccaagaaaaactattaccagtaaatccataaaaaaggatctgtgctacccttacaagttgagcagtatagtcagtcggatcctacttcgccagtttaaaaagccgtagggacaggaagaggcagtgtggtgtgttggtgaagggcctggacactgaggccgggctgtctagttgaagtcctggccccattgctcaccagttttgaccttgagcaagttctttaactctgtgcctcaagtaagtgagagtaataatagtagcccaccttatggcattgtagagaggattaaatgagttcatacacataaagcacttagaaccatgcttgcctggcagttgtatgtccagtgaatgttagttatcattaatggttttatattaattgtaacaatctagagttacccatcgggtaacttaaatgcttgttaaataaatttgaagttttaaagacttgcgtcccatcattagaccat

SEQ ID NO: 69944 - DNA, 172 bp, Homo sapiens
gaagacgtttctaaaattgaaaagtttgaaacaataaaggaaaagggattgagaatgaggctgcagtggaggaaaggaggaagggtggtactacttggacctttttttgcaaacacagggagattggaaagtcctttttgaggttggcaatagtctactcctctcccccctc

SEQ ID NO: 69945 - DNA, 191 bp, Homo sapiens
aggcatggaaggaacataactcaaattaatagcagctatgtatggaaaacccatagctaacattgtactgaatgagaaaaagttgaaagcatttcctgtaagaactaaaacaagatgatgatgcccacttttaccactcctagtcaacataatactggaagtcctagccagagcagtcaagcaacagaaag

SEQ ID NO: 69946 - DNA, 2472 bp, Homo sapiens
  misc_feature (782)..(782): n is a, c, g, or t
  misc_feature (1071)..(1071): n is a, c, g, or t
  misc_feature (1659)..(1659): n is a, c, g, or t
gtagatacgcatgtgagcgctggtgggagacgccaggctgggatttccgctcgatctgggaatgagcaatgcaacctaatgacacccggagctcctgaatcacctggggaagatgaagagagacactctctggtgggaacgtctcctagaaacaaggcctaagatggggcgaccacagccccacagctgtgtccagatgcagggagcactcgcctgtgctgtgagggacggccggtgtcatcgttggagcttcctaagactcccagaggctgatgcacctcccagacccgcctccgcccggctccctgggccctgctccaggggcttcattgctccctgccccgggtcacccctcggctcaccgtctctcaggtgtggaatatcctgctccaatcaaagccatgtcacctgcgttgtccagtgaaacgtcagcggacaggcgctgcccgggctccagggagctcctcactgaggctcactccctgtgcctctgccatcagcacagggggacatgcctggctgcctgtgggaccagggaggacgcgcggtgcgggagcagagccagccacactgccgctgctgcactgttcatctgagtggcgcaagaacttgtcagtgcctttaatctgagggatgagtcttcaggagagtttgttgtcaggatttaacacttactcttggaaaagcagtaatgtgtgctggaaatgaaccgggcagaccctgctcccatctccatctgcctcaatctcagtgccctccactccccaccagcagcgcctgtnaccaagtcactgcacaacaaccacaaatggagagtggaggagcatcactttccaccccgggatcatgacgagggctctgtaacttcaacaaatgcgcagaagacgcctggcctcgagcttgtgcagcacctccggagcctgccttcccttgtcacccacggcaccatgactttggagggtctcagctcagtcctccctccagaggggctgtcagtgctgggcagaaaatcacccttcaacgaccgggcccagctgcgctctgtcagagagcagagaaagcaggcctccnggaggttctcactccaccaaggagacgtctccacccagcgctcatcctgagcaagggcactgggaggaagaaatgcaattttaaaacctgtgctgcgaatgatgacttctgctgcttccgtctctggagagctctgggcacttaacatccttccacccacatgcccgagtctgtgcagaaacctcacccacgcggaggagactgcatttcccagtagcagattcaagtcctgaacttcctgtaccacaaagtgttacccacactggtgggtgccagcctgagactcaactatcaggaaaaacatgaagaattcagtccatgccctcaaatgcacccatgtggctcccaaacggcaaatctcagcaatgagattctcagctaggaaagtccacactgaactcatgcagaggacaaagtacataggcctggggttcttggcacctgagatctctgagcagttttctgaattttcctatttcctgttgaagacataggaacacgtggcacagaggcacagagacctggaaaccaacaggtgacctcagggaggtttgtgaagcaccctgatgagaagacagttgggcagangtggctggctattccccaagtccattttccctcctgggaccagagctgactccatttctcaatctgccttgcagtgagcatagtcagcttcctggcactgctggacctgtcttgaaggctcttttggccggaaatggatgggcagggatctgagagcacctgctatcgggtgagtcctgctttactcatgtcagagatttagactaaaacaaacacaaaatgcaacaaagacctaagtgtaagagctaaaagtataaaactcttataaaaaaagtaagtgtaaattttcatggtcttggattaggtagcactctcttagatgtgctatcagaagcacatacaaccacaggaaaaaaaatacataaattgaatttcatcaaaatttaaaacttttgtgcattaaagttcatgatcaaaaaagcgagaagaaaacccagagaatgagtgaaatatttgcaaatcatacatctgggacaagtatccagaatatataaaaattcttagaactcaacaatataaagaaaaataaccaaattaaacagtaggcaaaggattcgaagagacctttgtccaaagaagatacacaaatgaccaatgagtacgtgaaaagatactcagcagctactcattatggaagtaccactttccactcatgctgagggctataataaaaaacaaaacagaaatgacaagtgcagtgaagatgtggagaaactggatttctcatagattgctggtgggaaagtaacatggtgcaaccaatgtagaaacagtttggcagttccttaaaaaattaaacagagctaccatctg

SEQ ID NO: 69947 - DNA, 1192 bp, Homo sapiens
aacatctgatcctaaatctgaatctccatgactgtgtagccttttagccctttctaccttctgcccttccagtgcattccagaccttaatccaccccagcaaggatcgcctccatttcctcatgagtctgggatgttttgacatgaatgaattaaaaagtcttcccagaatacagaagagtgatttgtcgtcaagccaaagaggctttctgtcttcctctggtgtcctctaaacccagggggctgccaaatgcccacagagacctcccagggagagtgagagttatacttggactgacttcatcggtcagaaagccttcccctaacagcagcattatttctgctattaaccccatacatctctggataaagaaactgaaaacgtggcctttggaagaatcaacagtaatgttctgaaaaaaatatatattcttttcactgaccgaagtgttttttcaaataaataatcagaaatgttatgctacacaaagtttatggtatcccttctctactaattcaatgactcttcaatgtgatgatcccaagcaaaaaaaaaaaaaaaaaaaaaaaaaatcaactactgatcagatggtcaatttctaaggaaaagatgtagagttattcaaaggtcatctaagtcagttcagtctttgcaaaaagaatatcaggaatgtaacgtccagtggtaaatggaacccacagtatgagaagtaacaagaattaaataggaagcctggaagcctgagactatagatctatcacagaagattcccgtaacatatcccagctctgagttcttagatttgttgatgtcaaggagcccaaatttctgaacacaaatgcctgagtttcagctggcttaagtcagagctggcatccataatgatattttgttaattctaattggttttccccacttgagaaggacccaactagtcctcagataggtacacttgaatgcaaacggttgggtctctgtccatgggtaatagcacgcacatgcaaccaatttaaaatactctgggtaagagagtcttctagagcataaactgtacttgagaaacctttgtgcttctggaaaatgggtttcatcatccttacatctgcaggttcttaggccacttatggtttcaatgctctgagctggcaagtccctataggtctatctttctgccagagagacttgcaggatt

SEQ ID NO: 69948 - DNA, 294 bp, Homo sapiens
ggaggttttccaaaaataaagatttttgtccttactatttttcttagtgtttgtaaaaatcagaagattacttgatgctttagtacatgcccaactctggaacttcttttacggattttcagagcttctgttaatggaatggtcttccgggtgctcttgctttggggagaggctcactcctgctctgtagctggtatctgttgacagtgcattatcttagagcagtgctgtgagattgtcctctggaattcagaaggttgatttccttatgcagcatcttttctttatttacag

SEQ ID NO: 69949 - DNA, 404 bp, Homo sapiens
agaaacttccagggtaaaaaagacaggtgactggcttactctctttgcaaacattacaatatgaactacaggaaaataaactgatattaactaagccctctatgggatcctttgagcaggatgtttatagtaaaccagcagttctcaaagaaagtactttgagaccagcagcatctgagttacctgcaaatttgttagaaatgcaaaacccaagactcactggatcataaactggaggtggggtctagcaaaccctgtttaacaagccctccacgtaatactagtgcaacttcaagtctgagaacgactacagtaaacactctatagatttatgaggcatgactccctgaagaatgtcacacaaaaccatgaggtataaaataaagatgttaggctgggcgcag

SEQ ID NO: 69950 - DNA, 580 bp, Homo sapiens
gacaagtccaagaagcaaaatcctactcatttgtttgtaactttcagttaaaagaaaaaattaaggtaaaagttacctgagtgtggtttccaccgtgatggtaggctaccaattttaatccgacctacgtttaaaacactttacagcgtcagcagagcaaagtgtttccagaacactccaatttttaattagtctccatggccaaggaggtagtatctacatacttctagttaattttagttaaataagggatttaaaagcatttgattttgcaactgagacaaaatatgaaggcaaagtgcaagcttattataaaatgaaaataatattataaaacaaaaccttccaggtgttggattgtctagcaagttctaccgtgggtgctggcccctggcattggttcccctccacagggccaagggcatagctgggtgcagagaccggcagtgccgtggtctctggagtctgaggacataagttaaacaagctagtcaagccccagatgcttgggaggcagaggcaggaggattccttgagcccatcacaccaaaccctaccacaccaccccccagctcacccg

SEQ ID NO: 69951 - DNA, 507 bp, Homo sapiens
caaagtagctacagagaaacatacatgcagaaatccaattgccaagaaatcttttgcatctgaatcacttgggactctgtgtgcctgatcatactacaaacttctgaagttattctacaagcctcaaaatgctaatcagactttgttacacacgcttgtgtcttctaaaactaaattggtgatttcaagttggtatgcatttgctaaaacataaaaatcttcttaagctcccatatttatttgtaacaaatatattcttactgtctgtgatatggtttggctgtgtctccacccaaatctcatcttgaattgtagtttccataatccccacatgttgtgggtgggacccgacccggtgggaagtaactgaattatgggggcagttacccccatgctgctgttattgtgatagtgagttctcacgagatctaatggttttataaggggcttttcccccttttgctcagtacttctccttgatgacaccatgtgaagaaggacatgttt

SEQ ID NO: 69952 - DNA, 367 bp, Homo sapiens
acactcctgacctcaggcaatcctcccacctcagcctcccaaggtgctgggattacaggcatgagccactgcgcccagcctacacacactcttaatagaagaaatgaataatcaaaaaatattattgttggaaaaaatgtttgaatcttattttaaaaataattaacgatttcaataggcatgttgaaccttttttcggctattgttttcagcaattgcagttgaatgagtacaaaatgcaccacagaatagagactgctatctacccaaatattgctggttgttgaatccatggtaggaaattttcatgtattgttacaaccagctataaatacatcccaaaatatgtgtagagctaaaatagatg

SEQ ID NO: 69953 - DNA, 364 bp, Homo sapiens
atggagtcttgccctgttgtccaggctggaatgcagtagcacaatcttggctcaccacaacgttcacctctggggttcaagtgatttccatgcgtcagcctcctgagtggctgggactccaggcatgcgctaccacacgtggctaattttttgtatttttctttttttttttagtagagatggggtttcaccatgctggccaggctggtctcgaactcttgacctcaagtgatccactgcctcagcctcccaaagtgctgggattatagacattcatgatgaattcttattttatgtttaatataaagcaaatacaattattgttagataacaatgcacaaaataaaattcaagggtgaaaaat

SEQ ID NO: 69954 - DNA, 387 bp, Homo sapiens
gttataggtatcactttgaatacagaacttaaatgtttcttttcctgtctcttgtactagtctggtttgttctcacagagcaaagccaggattatgtatcatcgcatgggcatcatttagtatgatgactggcataagtgaggctttcagtacagcatgtcaaattgagctgaatgagcacagctgaaaccaaaaagttaacctacaatgtgaaaatctaattaaccacaagaccattctaggagcattctaattacttgatattttattgcaaatctatcttatcaattagtaaaagatcactggttctcagacttttttatttcatgaactggtaaaatttccaaggaatttttaggaactgacataagcttatcaactttttaa

SEQ ID NO: 69955 - DNA, 575 bp, Homo sapiens
tattttgcagtctggtatattaccatgaaatgaaaagaactgtgcatttctgacctatttcaccatcttctggaaatgattttgcagacttgtaaggagactgagtaaaggaagaggaagaaagcaggcatgagtgttgaagttcggtttgactcatgtcatgtgttctttacgttccttttgaatatattaaatccagtgtggaatagctgccttaggaccttgacccacacttactttaagaaatcgttctagttcttaaatttcaatggtaaagccagaggctggtgcttgaaaagtatttacagtgctcaggcagcactttctgcagttacagattctttactgcccctttttatgtctgaactttacatactggattactcgtgtcaataggagaaggaacagtgccttgatttaacacgtccttgtaatagtcgtggtccttctcttctgggaaaggagaagaaatagtgcccctggagtcccattgccttgggaggcatatggctcgtttcagtgattccttgagaattctggtaagaagtcaaaaataagcatttaaataaaaagaa

SEQ ID NO: 69956 - DNA, 252 bp, Homo sapiens
ggcaaaactttaagggtagaacatgaactggagcccagtcttggagttctgttgaacacctctaaatggactatgagtacattagggttatttattcttaaggggtttaggggttctccttgccggagacctattactgtaatagtagaaaagaatttattaattttgtattcctgaatgtgaaatctcaatgtttatctccagtaagaggacacacatttcactgatattaaataactgtaaagctttacc

SEQ ID NO: 69957 - DNA, 380 bp, Homo sapiens
agacggagtctcactctgtaagcccaggctggagggcaacggcactatctcagctcactgcaacctccatctccagcttcaagtggttctaatgtcttagcctcccaagtagttgtgactgtagccacgagccattatgcctagctaatttttttattttttgtagaaatgaccttttgccatgttgtccaggctggccttgaactcctgggctcaagcaatcctcccaccttggcataccaaagtactgggattacaagtgtgagtcagcacatccagctgctatgtcgtcttctgtctcctcgtgtttctggagagatattcgttgtctctgcccatatagtcccttttgtatccagtgactctttgctgcttcctcg

SEQ ID NO: 69958 - DNA, 2458 bp, Homo sapiens
agcgagattctcgccctgagcaacggcctgacgtcggcggagggaagcaggcgcaggctccgtgaggaggcaagaatccgggctttgcccctgcaatcaacccacggaagctccgggaatggcggccaagcacgcggatcctgacgttcacatatctcagggagttgatgaccttgttttcagaaggtgactcaggtcaacacaggggcccccatctggtcgacagatgcagtggttctaggatctgccaagcatccaggtggagagcctgaggttctgagggggacaggctgacaagtaggacccgaggcactggaggagcattgaaggagaagatctgcctgtgggtcttcattgcccagctcctgcccgcactcctgcctgctgccctgaccagagtcatcatgcctcttgagcagaggagtcagcactgcaagcctgaagaaggccttgaggcccgaggagaggccctgggcctggtgggtgcgcaggctcctgctactgaggagcagcagaccgcttcttcctcttctactctagtggaagttaccctgggggaggtgcctgctgccgactcaccgagtcctccccacagtcctcagggagcctccagcttctcgactaccatcaactacactctttggagacaatccgatgagggctccagcaaccaagaagaggaggggccaagaatgtttcccgacctggagtccgagttccaagcagcaatcagtaggaagatggttgagttggttcattttctgctcctcaagtatcgagccagggagccggtcacaaaggcagaaatgctggagagtgtcctcagaaattgccaggacttctttcccgtgatcttcagcaaagcctccgagtacttgcagctggtctttggcatcgaggtggtggaagtggtccccatcagccacttgtacatccttgtcacctgcctgggcctctcctacgatggcctgctgggcgacaatcaggtcatgcccaagacaggcctcctgataatcgtcctggccataatcgcaatagagggcgactgtgcccctgaggagaaaatctgggaggagctgagtatgttggaggtgtttgaggggagggaggacagtgtcttcgcacatcccaggaagctgctcatgcaagatctggtgcaggaaaactacctggagtaccggcaggtgcccggcagtgatcctgcatgctacgagttcctgtggggtccaagggccctcattgaaaccagctatgtgaaagtcctgcaccatacactaaagatcggtggagaacctcacatttcctacccacccctgcatgaacgggctttgagagagggagaagagtgagtctcagcacatgttgcagccagggccagtgggagggggtctgggccagtgcaccttccagggccccatccattagcttccactgcctcgtgtgatatgaggcccattcctgcctctttgaagagagcagtcagcattcttagcagtgagtttctgttctgttggatgactttgagatttatctttgtttcctgttggaattgttcaaatgttccttttaacaaatggttggatgaacttcagcatccaagtttatgaatgacagtagtcacacatagtgctgtttatatagtttaggggtaagagtcctgttttttattcagattgggaaatccattccattttgtgagttgtcacataataacagcagtggaatatgtatttgcctatattgtgaacgaattagcagtaaaatacatgatacaaggaactcaaaagatagttaattcttgccttatacctcagtctattatgtaaaattaaaaatatgtgtatgtttttgcttctttgagaatgcaaaagaaattaaatctgaataaataattaaaaacacacaacaaaacaaacacaaaaaaaacaacaaaacaacaacaacaaacaacaaaacaacaacacaacacaaaaacaacacaaaacaacaaaacaaacaagaggagggcggcgcgcgcgccgctacgaagatcatccctctcccgcgggaggccgagccacagcatcgagcacgacgagccaccccagctatgtatgcttgtaaacaagaaagaggcgtggcccccacattagacagggagacgcgaagacgaatttataacacaaagacagcgacagagaagggcagcagtcgcgcgctgtacaaaaacacacagcggcctgcgcgagggcgacagcaaacaaacgagatagacaagggggtcggagcataactttagtagagaagagagaccacccccacccaacacacaaagcggggggggggggggaaaaccaaaaagaagacggggaagcaacacaaaaaccacccacaaggagataattcaagaacgcacaccacgacggagacagacaatacaaaaacacaccataagagaagaagcgacaaacgacggccc

SEQ ID NO: 69959 - DNA, 2193 bp, Homo sapiens
agcgagattctcgccctgagcaacggcctgacgtcggcggagggaagcaggcgcaggctccgtgaggaggcaaggcctgtgggtcttcattgcccagctcctgcccgcactcctgcctgctgccctgaccagagtcatcatgcctcttgagcagaggagtcagcactgcaagcctgaagaaggccttgaggcccgaggagaggccctgggcctggtgggtgcgcaggctcctgctactgaggagcagcagaccgcttcttcctcttctactctagtggaagttaccctgggggaggtgcctgctgccgactcaccgagtcctccccacagtcctcagggagcctccagcttctcgactaccatcaactacactctttggagacaatccgatgagggctccagcaaccaagaagaggaggggccaagaatgtttcccgacctggagtccgagttccaagcagcaatcagtaggaagatggttgagttggttcattttctgctcctcaagtatcgagccagggagccggtcacaaaggcagaaatgctggagagtgtcctcagaaattgccaggacttctttcccgtgatcttcagcaaagcctccgagtacttgcagctggtctttggcatcgaggtggtggaagtggtccccatcagccacttgtacatccttgtcacctgcctgggcctctcctacgatggcctgctgggcgacaatcaggtcatgcccaagacaggcctcctgataatcgtcctggccataatcgcaatagagggcgactgtgcccctgaggagaaaatctgggaggagctgagtatgttggaggtgtttgaggggagggaggacagtgtcttcgcacatcccaggaagctgctcatgcaagatctggtgcaggaaaactacctggagtaccggcaggtgcccggcagtgatcctgcatgctacgagttcctgtggggtccaagggccctcattgaaaccagctatgtgaaagtcctgcaccatacactaaagatcggtggagaacctcacatttcctacccacccctgcatgaacgggctttgagagagggagaagagtgagtctcagcacatgttgcagccagggccagtgggagggggtctgggccagtgcaccttccagggccccatccattagcttccactgcctcgtgtgatatgaggcccattcctgcctctttgaagagagcagtcagcattcttagcagtgagtttctgttctgttggatgactttgagatttatctttgtttcctgttggaattgttcaaatgttccttttaacaaatggttggatgaacttcagcatccaagtttatgaatgacagtagtcacacatagtgctgtttatatagtttaggggtaagagtcctgttttttattcagattgggaaatccattccattttgtgagttgtcacataataacagcagtggaatatgtatttgcctatattgtgaacgaattagcagtaaaatacatgatacaaggaactcaaaagatagttaattcttgccttatacctcagtctattatgtaaaattaaaaatatgtgtatgtttttgcttctttgagaatgcaaaagaaattaaatctgaataaataattaaaaacacacaacaaaacaaacacaaaaaaaacaacaaaacaacaacaacaaacaacaaaacaacaacacaacacaaaaacaacacaaaacaacaaaacaaacaagaggagggcggcgcgcgcgccgctacgaagatcatccctctcccgcgggaggccgagccacagcatcgagcacgacgagccaccccagctatgtatgcttgtaaacaagaaagaggcgtggcccccacattagacagggagacgcgaagacgaatttataacacaaagacagcgacagagaagggcagcagtcgcgcgctgtacaaaaacacacagcggcctgcgcgagggcgacagcaaacaaacgagatagacaagggggtcggagcataactttagtagagaagagagaccacccccacccaacacacaaagcggggggggggggggaaaaccaaaaagaagacggggaagcaacacaaaaaccacccacaaggagataattcaagaacgcacaccacgacggagacagacaatacaaaaacacaccataagagaagaagcgacaaacgacggccc

SEQ ID NO: 69960 - DNA, 581 bp, Homo sapiens
ggttggggaaccctcagggagataaggtgttggtgtaaagaggagctgtctgctcatttcagggggttgggggttgagaaagggcagtccctggcaggagtaaagatgagtaacccacaggaggccatcataacgttcaccctagaaccaaaggggtcagccctggacaacgcacgtgggggtaacaggatgtggcccctcctcacttctgtttccagatctcagggagttgatgaccttgttttcagaaggtgactcaggtcaacacaggggcccccatctggtcgacagatgcagtggttctaggatctgccaagcatccaggtggagagcctgaggtaggattgagggtacccctgggccagaatgcagacagggggccccatagaaatctgccctgcccctgcggttacttcagagaccctgggcagggctgtcagctgaagtccctccattatcctgggatctttgatgtcagggaaggggaggccttggtctgaaggggctggagtcaggtcagtagagggagggtctcaggccctgccaggagtggacgtgaggaccaagcggactcgtcaccc

SEQ ID NO: 69961 - DNA, 2259 bp, Homo sapiens
agcgagattctcgccctgagcaacggcctgacgtcggcggagggaagcaggcgcaggctccgtgaggaggcaaggttctgagggggacaggctgacaagtaggacccgaggcactggaggagcattgaaggagaagatctgcctgtgggtcttcattgcccagctcctgcccgcactcctgcctgctgccctgaccagagtcatcatgcctcttgagcagaggagtcagcactgcaagcctgaagaaggccttgaggcccgaggagaggccctgggcctggtgggtgcgcaggctcctgctactgaggagcagcagaccgcttcttcctcttctactctagtggaagttaccctgggggaggtgcctgctgccgactcaccgagtcctccccacagtcctcagggagcctccagcttctcgactaccatcaactacactctttggagacaatccgatgagggctccagcaaccaagaagaggaggggccaagaatgtttcccgacctggagtccgagttccaagcagcaatcagtaggaagatggttgagttggttcattttctgctcctcaagtatcgagccagggagccggtcacaaaggcagaaatgctggagagtgtcctcagaaattgccaggacttctttcccgtgatcttcagcaaagcctccgagtacttgcagctggtctttggcatcgaggtggtggaagtggtccccatcagccacttgtacatccttgtcacctgcctgggcctctcctacgatggcctgctgggcgacaatcaggtcatgcccaagacaggcctcctgataatcgtcctggccataatcgcaatagagggcgactgtgcccctgaggagaaaatctgggaggagctgagtatgttggaggtgtttgaggggagggaggacagtgtcttcgcacatcccaggaagctgctcatgcaagatctggtgcaggaaaactacctggagtaccggcaggtgcccggcagtgatcctgcatgctacgagttcctgtggggtccaagggccctcattgaaaccagctatgtgaaagtcctgcaccatacactaaagatcggtggagaacctcacatttcctacccacccctgcatgaacgggctttgagagagggagaagagtgagtctcagcacatgttgcagccagggccagtgggagggggtctgggccagtgcaccttccagggccccatccattagcttccactgcctcgtgtgatatgaggcccattcctgcctctttgaagagagcagtcagcattcttagcagtgagtttctgttctgttggatgactttgagatttatctttgtttcctgttggaattgttcaaatgttccttttaacaaatggttggatgaacttcagcatccaagtttatgaatgacagtagtcacacatagtgctgtttatatagtttaggggtaagagtcctgttttttattcagattgggaaatccattccattttgtgagttgtcacataataacagcagtggaatatgtatttgcctatattgtgaacgaattagcagtaaaatacatgatacaaggaactcaaaagatagttaattcttgccttatacctcagtctattatgtaaaattaaaaatatgtgtatgtttttgcttctttgagaatgcaaaagaaattaaatctgaataaataattaaaaacacacaacaaaacaaacacaaaaaaaacaacaaaacaacaacaacaaacaacaaaacaacaacacaacacaaaaacaacacaaaacaacaaaacaaacaagaggagggcggcgcgcgcgccgctacgaagatcatccctctcccgcgggaggccgagccacagcatcgagcacgacgagccaccccagctatgtatgcttgtaaacaagaaagaggcgtggcccccacattagacagggagacgcgaagacgaatttataacacaaagacagcgacagagaagggcagcagtcgcgcgctgtacaaaaacacacagcggcctgcgcgagggcgacagcaaacaaacgagatagacaagggggtcggagcataactttagtagagaagagagaccacccccacccaacacacaaagcggggggggggggggaaaaccaaaaagaagacggggaagcaacacaaaaaccacccacaaggagataattcaagaacgcacaccacgacggagacagacaatacaaaaacacaccataagagaagaagcgacaaacgacggccc

SEQ ID NO: 69962 - DNA, 2556 bp, Homo sapiens
agcgagattctcgccctgagcaacggcctgacgtcggcggagggaagcaggcgcaggctccgtgaggaggcaagaatccgggctttgcccctgcaatcaacccacggaagctccgggaatggcggccaagcacgcggatcctgacgttcacatatctcagggagttgatgaccttgttttcagaaggtgactcaggtcaacacaggggcccccatctggtcgacagatgcagtggttctaggatctgccaagcatccaggtggagagcctgaggaatcaggagctccaggaaccaggcagtgaggccttggtctgagtcagtgtcctcaggtcacagagcagaggggacgcagacagtgccaacactgaaggttctgagggggacaggctgacaagtaggacccgaggcactggaggagcattgaaggagaagatctgcctgtgggtcttcattgcccagctcctgcccgcactcctgcctgctgccctgaccagagtcatcatgcctcttgagcagaggagtcagcactgcaagcctgaagaaggccttgaggcccgaggagaggccctgggcctggtgggtgcgcaggctcctgctactgaggagcagcagaccgcttcttcctcttctactctagtggaagttaccctgggggaggtgcctgctgccgactcaccgagtcctccccacagtcctcagggagcctccagcttctcgactaccatcaactacactctttggagacaatccgatgagggctccagcaaccaagaagaggaggggccaagaatgtttcccgacctggagtccgagttccaagcagcaatcagtaggaagatggttgagttggttcattttctgctcctcaagtatcgagccagggagccggtcacaaaggcagaaatgctggagagtgtcctcagaaattgccaggacttctttcccgtgatcttcagcaaagcctccgagtacttgcagctggtctttggcatcgaggtggtggaagtggtccccatcagccacttgtacatccttgtcacctgcctgggcctctcctacgatggcctgctgggcgacaatcaggtcatgcccaagacaggcctcctgataatcgtcctggccataatcgcaatagagggcgactgtgcccctgaggagaaaatctgggaggagctgagtatgttggaggtgtttgaggggagggaggacagtgtcttcgcacatcccaggaagctgctcatgcaagatctggtgcaggaaaactacctggagtaccggcaggtgcccggcagtgatcctgcatgctacgagttcctgtggggtccaagggccctcattgaaaccagctatgtgaaagtcctgcaccatacactaaagatcggtggagaacctcacatttcctacccacccctgcatgaacgggctttgagagagggagaagagtgagtctcagcacatgttgcagccagggccagtgggagggggtctgggccagtgcaccttccagggccccatccattagcttccactgcctcgtgtgatatgaggcccattcctgcctctttgaagagagcagtcagcattcttagcagtgagtttctgttctgttggatgactttgagatttatctttgtttcctgttggaattgttcaaatgttccttttaacaaatggttggatgaacttcagcatccaagtttatgaatgacagtagtcacacatagtgctgtttatatagtttaggggtaagagtcctgttttttattcagattgggaaatccattccattttgtgagttgtcacataataacagcagtggaatatgtatttgcctatattgtgaacgaattagcagtaaaatacatgatacaaggaactcaaaagatagttaattcttgccttatacctcagtctattatgtaaaattaaaaatatgtgtatgtttttgcttctttgagaatgcaaaagaaattaaatctgaataaataattaaaaacacacaacaaaacaaacacaaaaaaaacaacaaaacaacaacaacaaacaacaaaacaacaacacaacacaaaaacaacacaaaacaacaaaacaaacaagaggagggcggcgcgcgcgccgctacgaagatcatccctctcccgcgggaggccgagccacagcatcgagcacgacgagccaccccagctatgtatgcttgtaaacaagaaagaggcgtggcccccacattagacagggagacgcgaagacgaatttataacacaaagacagcgacagagaagggcagcagtcgcgcgctgtacaaaaacacacagcggcctgcgcgagggcgacagcaaacaaacgagatagacaagggggtcggagcataactttagtagagaagagagaccacccccacccaacacacaaagcggggggggggggggaaaaccaaaaagaagacggggaagcaacacaaaaaccacccacaaggagataattcaagaacgcacaccacgacggagacagacaatacaaaaacacaccataagagaagaagcgacaaacgacggccc

SEQ ID NO: 69963 - DNA, 467 bp, Homo sapiens
tctatattcctatgactaaatcattcccatgctacctgacaggcctaaaaaaatctcttctcaatgcatttaaatacatgatgtattttattcatttcattttttgttgaagaaatctttcatggaaccctctgtcttcttccaataggactggttactttggttgcagttcagaaaccaatacccagaaatataacactttgacatgctaaactaaaaaagcagcagcaaggtctctctgacctcctcccctcctcctctcaatccgttatctctcccaaagcacaagatgaggctctccgctgaagctctattatctgcccagaaactggatacccaaagaggaacacaattgccttccatattccctgaaattatctatagcagagaagactaaagaatgcaaccacacagtggacaggcatttcaactaggtattatctgcttctcggctcattcaaattcta

SEQ ID NO: 69964 - DNA, 440 bp, Homo sapiens
cagccacgggaagggatgtgaaggggtttgtggaaaaaacacagtgcctgcagtttcctgagaccgttttcacttaagcctcttgtttctcattgccttcctaggtactcgcacacctgccagagctcatgtttgtatttatggttaggaacattttgtcactgcagttacctgacaaaagaaggttgaacttttttgtggagactttcaaaagcagtaggataataggattggatcttttggtttgttagtttttgtaaagtgacctggtgaagagtgaacaatggattgagtagttaggaggttgtaggaatcaatggggagctgagggtggggggcaggttcacaagagcccaagccctgacttttgtcaagcttggcatttcccagagacaccctgagcacattacattcccagggtacccacagaactgcccccg

SEQ ID NO: 69965 - DNA, 1076 bp, Homo sapiens
cagacatgagccattgtgcctgacctagttctgctttttatgttctaagaagtattatttattctatgctgagcttacatagaatttcttccatgttttctatagctatagtgtatttttaccttttactgttagatctatttcatgtttttattatggataatggaggaggtaaaggttgaattatattttcccccatattattgacccatagtgacaccagttttgggagatgtctttcattttcgcccttacgttgttattggcaccttttgcaaaaatcaattatttatcatgagtatacttctgaaatgatctgtttcatcaatctatttgtcttctcagtagttccacattgtcttaattatagctttagaggaagtcttgaaatttggtagtaagtcttccagttttgttattttaacaaatttctctaggctgggcatggtggctcatgcctataatcccagcactttgggagccccagacaggaggatcacttgagcgcagaagatcaagaccagcctgggaaatatagcaagaccttatctctacaaaaaaatttagaaattagctgggcatggtggcacccatctgtagtcctaactgctcaggaggctgaggtgggaggattgcttgagtccaggagttcaaggctgcagtgagttgtgatcacaccattgcagtccagccaggttgacagaatgagaccctgtctcttaaaaaaaaaaaaaaaaatcctggtgatgcttttctggattaaaaaataaaataaaataaaaattggcctcactactctagcttatttgcattttctaataaatgttcagagtcaccttgtcagttcctaccaaaaagcctgtcggtattataattgagattgcatgaagtctgtagacaaacttgaagagaattgacacttaacagcagtgacttccagtctgtaaccttagcataagttctatttgtctcctttaatttttctcagaaatacctgtagttttctgtatagagatcttgaatgtattttcttaagtttattaatagacattttcacaatatgtaaattcgtttgt

SEQ ID NO: 69966 - DNA, 416 bp, Homo sapiens
gctagttaaatgatctagtttgattttgggttaatttagagggatgccacgtggacttgtttgtgtttgtgtataatgatggccacagcagtgagatcctgaactgactatggtatcccaggggtgtatgggactcaataaaggcatttagggtgagagtgtagggttttgatggacattcagggcaggacacttgacgttaggatcaccaaaggaagggaaatgaaactgagactgttgcataaaactgaaaacataaaaggattctcatttgtgaaaggactttttaaaaactttattcaccagcccagggtagcaacaaggatgcatgtttctattaggagtggaaaaagaaaaaaaaagagtaaatttaaacccaaccctattttgtggggagagtatagctccaagtcaaa

SEQ ID NO: 69967 - DNA, 395 bp, Homo sapiens
  misc_feature (41)..(41): n is a, c, g, or t
ggaaggcaggggaggattggacacaaagggggatgggattntccccagtgggatgacatggtgaaggaaaggaacaggaggaaacagccaagatggcccagagaattcattgcaagtaataattcagagtcagagcaccaagagaaagtcccctgccctaacaccagacacacacacacacacacacccctattcactgccaccaacatcaccaccaccaccaagagcctctagattgttagaaaagacaccagatatactactatatttttcatggggttcatacccattgttgcttaaatcttaaagggcaaagaagtccaagcaattagagatcttggacacatccaagaactaaaatctgagtctgcactctaagcaggccaccctgaact

SEQ ID NO: 69968 - DNA, 475 bp, Homo sapiens
taagccaccgctcatggccttatgtgggtttattaaggatgccacgaataggttagattccccaatatcatcagaacttaattcaatgggtctaaaatttctgtaaattattgagagttcttctgacaaactatgaaaaaaaaattgctttggtaaagcatttgctttgttttgacaagaattacaaacgatttgcctcacattaagttatttggattttaaagcaggaataaatgcagtttgtttgatacctcattgaattacctattaattggcctacctaaaatacctaaaaaatttcaaatgctctaacacttgtaactctgtaacttattttatatatattatatgtatacatatatatgtgtgtatgtgtatgtgtatgtatgtaaagctaatatgataaaaacacattttttttctgttaagagttcattcaccttaaattacttaacatggactgttggaaactgga

SEQ ID NO: 69969 - DNA, 3494 bp, Homo sapiens
cccgggtggggccgaggcagcgggagtcgcggttgctcagcgtgcacctgagacccgacgcccggggtcctcgaagacgcgtccgccgccgtgcccgtcgccatgaaccgcttcagggtgtccaagttccggcacaccgaggctcggccgccccgccgcgagtcctggatcagtgacattcgagcaggaaccgccccttcatgcaggaaccacatcaaatcaagctgcagcttgatcgccttcaactccgaccgtcctggtgtactgggcattgtgcctctgcaaggccaaggagaggacaagcgacgcgtggcccacctgggctgccattcagacctagtcaccgacttggacttctcgccctttgatgacttcctcctggccacaggctcggctgacaggacggtaaaactctggcgactgccagggcctggccaggccctgccctcagcacccggggtggtgctgggccccgaggacctcccagtggaggtactgcagttccaccccacctctgacggcattctggtgagcgcagcaggcaccactgtgaaggtctgggacgcagccaagcagcagcccctgacagagctggcagcccatggggacctggtgcagagcgccgtctggagccgagatggagccctggtgggcacggcgtgcaaggacaagcagctgcagatctttgaccccagaacaaagccgcgggcctctcagagcacgcaggcccatgagaacagcagggatagccggctggcatggatgggcacctgggagcaccttgtgtctactggattcaaccagatgcgtgagcgcgaagtgaagctgtgggacacgcggttcttctccagcgccctggcctccctcaccttggacacctcgcttgggtgtctcgtgcctctgctggaccctgactctgggctcctggtcctggcaggaaagggcgagaggcagctgtactgttacgaggtggtcccgcagcagccggcgctgagcccagtgacccagtgtgtcctggagagcgtgctgcgtggggctgcccttgtgccccggcaggcgctggccgtcatgagctgcgaggtactccgcgtcctacagctgagcgacacagccatcgtgcccatcggctaccatgtgccccgcaaggctgtggagttccacgaggacctgttcccggacactgccggctgtgtgcctgccaccgacccccatggctggtgggctggggacaaccagcaggtgcagaaggtcagcctcaaccccgcctgccggccccacccgagcttcacttcctgtctggtgccccctgcggagcccctccctgacacagcccagcctgcggtgatggagacacccgtgggtgatgcagacgcaagcgagggtttctcttcccctcccagttcgctgacctcgccctccacgccctccagcctggggccctcactctccagcaccagtggcatcgggaccagccccagtttgaggtcgctgcagagcctgctgggccccagttccaagttccgccatgctcagggcactgtcctgcaccgagacagccacatcaccaacctcaaggggctcaacctcaccacacctggtgagagtgacggcttctgtgccaacaagctgcgtgtggccgtgccgctgctcagcagcgggggacaggtggctgtgcttgagctacggaagcctggccgcctgcccgacacggcactgcccacgctgcagaatggggcagctgtgactgatctggcctgggacccctttgacccccatcgcctcgctgtggctggtgaggacgccaggatccgactgtggcgggtacccgcagagggcctggaagaggtgctcaccacgccagagactgtgctcacaggccacacggagaagatctgctccctgcgcttccacccactggcagccaatgtgctggcctcgtcctcctatgacctcactgttcgcatctgggaccttcaggctggagctgatcggctgaagctgcagggccaccaagaccagatcttcagcctggcctggagtcctgatgggcagcagctggccactgtctgcaaggatgggcgtgtgcgggtctacaggccccggagtggccctgagcccctgcaggaaggcccagggcccaagggaggacgcggagctcgcattgtctgggtatgtgatggtcgctgtctgctggtgtctggctttgacagccaaagtgagcgccagctgctcctatatgaagctgaggccctggccggcggacccttggcagtgttgggcctggacgtggctccctcaaccctgctgcccagctacgacccagacactggcctggtgctcctgaccggcaagggcgacacccgtgtattcctgtacgagctgctccccgagtcccctttcttcctggagtgcaacagcttcacgtcgcctgacccccacaagggcctcgtcctcctgcctaagacggagtgcgacgtgcgggaagtggagctgatgcggtgcctgcggctgcgtcagtcctccctggagcctgtggccttccggctgccccgagtccggaaagagttcttccaggatgacgtgttcccagacacggctgtgatctgggagcctgtgctcagtgccgaggcctggctgcaaggcgctaatgggcagccctggcttctcagcctgcagcctcctgacatgagcccagtgagccaagccccccgagaggcccctgctcgtcgggccccatcctcagcgcagtacctggaagaaaagtctgaccagcaaaagaaggaggagctgctgaatgccatggtggcaaaactggggaaccgggaggacccactcccccaggactcctttgaaggcgtggacgaggacgagtgggactagcctgcgcccccgtcacctccacctcacctgtgctgccacttcctagtgcacacctcacggctcatcctcaagctggaagatacctctctggccccggcacatgtcacccctgcactcctgccttcccgtgggcacttccacatcctctgggcctctggcagttcccagggactgttttcacctctgctgtctctggggtcagctgctgctcatcagctgcccgctagcatgtggccaggggtgcagggtggcggggggtcagcagcatgtccctgggcaggccctgggcaccctgtctcccctggtctcactgctgacctgggctggtcccagcctggattggcctcatccaggatctttggtcaccccacgctgccccatcttgcctgctgttccagttctggtcaagggccttgggggctggccccccaccaggccttctagagcagcaccagtctcagggccctgggaccagctgccctacttcccaggtttgtagccaggagaagggggcatcacagagctgatggtccaataaggggggtgtgagccccgcagggactggcccgcacctgccttggatgttttcagcaattaaacttttttaagctggc

SEQ ID NO: 69970 - DNA, 3363 bp, Homo sapiens
cccgggtggggccgaggcagcgggagtcgcggttgctcagcgtgcacctgagacccgacgcccggggtcctcgaagacgcgtccgccgccgtgcccgtcgccatgaaccgcttcagggtgtccaagttccggcacaccgaggctcggccgccccgccgcgagtcctggatcagtgacattcgagcaggaaccgccccttcatgcaggaaccacatcaaatcaagctgcagcttgatcgccttcaactccgaccgtcctggtgtactgggcattgtgcctctgcaaggccaaggagaggacaagcgacgcgtggcccacctgggctgccattcagacctagtcaccgacttggacttctcgccctttgatgacttcctcctggccacaggctcggctgacaggacggtaaaactctggcgactgccagggcctggccaggccctgccctcagcacccggggtggtgctgggccccgaggacctcccagtggaggtactgcagttccaccccacctctgacggcattctggtgagcgcagcaggcaccactgtgaaggtctgggacgcagccaagcagcagcccctgacagagctggcagcccatggggacctggtgcagagcgccgtctggagccgagatggagccctggtgggcacggcgtgcaaggacaagcagctgcagatctttgaccccagaacaaagccgcgggcctctcagagcacgcaggcccatgagaacagcagggatagccggctggcatggatgggcacctgggagcaccttgtgtctactggattcaaccagatgcgtgagcgcgaagtgaagctgtgggacacgcggttcttctccagcgccctggcctccctcaccttggacacctcgcttgggtgtctcgtgcctctgctggaccctgactctgggctcctggtcctggcaggaaagggcgagaggcagctgtactgttacgaggtggtcccgcagcagccggcgctgagcccagtgacccagtgtgtcctggagagcgtgctgcgtggggctgcccttgtgccccggcaggcgctggccgtcatgagctgcgaggtactccgcgtcctacagctgagcgacacagccatcgtgcccatcggctaccatgtgccccgcaaggctgtggagttccacgaggacctgttcccggacactgccggctgtgtgcctgccaccgacccccatggctggtgggctggggacaaccagcaggtgcagaaggtcagcctcaaccccgcctgccggccccacccgagcttcacttcctgtctggtgccccctgcggagcccctccctgacacagcccagcctgcggtgatggagacacccgtgggtgatgcagacgcaagcgagggtttctcttcccctcccagttcgctgacctcgccctccacgccctccagcctggggccctcactctccagcaccagtggcatcgggaccagccccagtttgaggtcgctgcagagcctgctgggccccagttccaagttccgccatgctcagggcactgtcctgcaccgagacagccacatcaccaacctcaaggggctcaacctcaccacacctggtgagagtgacggcttctgtgccaacaagctgcgtgtggccgtgccgctgctcagcagcgggggacaggtggctgtgcttgagctacggaagcctggccgcctgcccgacacggcactgcccacgctgcagaatggggcagctgtgactgatctggcctgggacccctttgacccccatcgcctcgctgtggctggtgaggacgccaggatccgactgtggcgggtacccgcagagggcctggaagaggtgctcaccacgccagagactgtgctcacaggccacacggagaagatctgctccctgcgcttccacccactggcagccaatgtgctggcctcgtcctcctatgacctcactgttcgcatctgggaccttcaggctggagctgatcggctgaagctgcagggccaccaagaccagatcttcagcctggcctggagtcctgatgggcagcagctggccactgtctgcaaggatgggcgtgtgcgggtctacaggccccggagtggccctgagcccctgcaggaaggcccagggcccaagggaggacgcggagctcgcattgtctgggtatgtgatggtcgctgtctgctggtgtctggctttgacagccaaagtgagcgccagctgctcctatatgaagctgaggccctggccggcggacccttggcagtgttgggcctggacgtggctccctcaaccctgctgcccagctacgacccagacactggcctggtgctcctgaccggcaagggcgacacccgtgtattcctgtacgagctgctccccgagtcccctttcttcctggagtgcaacagcttcacgtcgcctgacccccacaagggcctcgtcctcctgcctaagacggagtgcgacgtgcgggaagtggagctgatgcggtgcctgcggctgcgtcagtcctccctggagcctgtggccttccggctgccccgagtccggaaagagttcttccaggatgacgtgttcccagacacggctgtgatctgggagcctgtgctcagtgccgaggcctggctgcaaggcgctaatgggcagccctggcttctcagcctgcagcctcctgacatgagcccaggacccactcccccaggactcctttgaaggcgtggacgaggacgagtgggactagcctgcgcccccgtcacctccacctcacctgtgctgccacttcctagtgcacacctcacggctcatcctcaagctggaagatacctctctggccccggcacatgtcacccctgcactcctgccttcccgtgggcacttccacatcctctgggcctctggcagttcccagggactgttttcacctctgctgtctctggggtcagctgctgctcatcagctgcccgctagcatgtggccaggggtgcagggtggcggggggtcagcagcatgtccctgggcaggccctgggcaccctgtctcccctggtctcactgctgacctgggctggtcccagcctggattggcctcatccaggatctttggtcaccccacgctgccccatcttgcctgctgttccagttctggtcaagggccttgggggctggccccccaccaggccttctagagcagcaccagtctcagggccctgggaccagctgccctacttcccaggtttgtagccaggagaagggggcatcacagagctgatggtccaataaggggggtgtgagccccgcagggactggcccgcacctgccttggatgttttcagcaattaaacttttttaagctggc

SEQ ID NO: 69971 - DNA, 2909 bp, Homo sapiens
cccgggtggggccgaggcagcgggagtcgcggttgctcagcgtgcacctgagacccgacgcccggggtcctcgaagacgcgtccgccgccgtgcccgtcgccatgaaccgcttcagggtgtccaagttccggcacaccgaggctcggccgccccgccgcgagtcctggatcagtgacattcgagcaggaaccgccccttcatgcaggaaccacatcaaatcaagctgcagcttgatcgccttcaactccgaccgtcctggtgtactgggcattgtgcctctgcaaggccaaggagaggacaagcgacgcgtggcccacctgggctgccattcagacctagtcaccgacttggacttctcgccctttgatgacttcctcctggccacaggctcggctgacaggacggtaaaactctggcgactgccagggcctggccaggccctgccctcagcacccggggtggtgctgggccccgaggacctcccagtggaggtactgcagttccaccccacctctgacggcattctggtgagcgcagcaggcaccactgtgaaggtctgggacgcagccaagcagcagcccctgacagagctggcagcccatggggacctggtgcagagcgccgtctggagccgagatggagccctggtgggcacggcgtgcaaggacaagcagctgcagatctttgaccccagaacaaagccgcgggcctctcagagcacgcaggcccatgagaacagcagggatagccggctggcatggatgggcacctgggagcaccttgtgtctactggattcaaccagatgcgtgagcgcgaagtgaagctgtgggacacgcggttcttctccagcgccctggcctccctcaccttggacacctcgcttgggtgtctcgtgcctctgctggaccctgactctgggctcctggtcctggcaggaaagggcgagaggcagctgtactgttacgaggtggtcccgcagcagccggcgctgagcccagtgacccagtgtgtcctggagagcgtgctgcgtggggctgcccttgtgccccggcaggcgctggccgtcatgagctgcgaggtactccgcgtcctacagctgagcgacacagccatcgtgcccatcggctaccatgtgccccgcaaggctgtggagttccacgaggacctgttcccggacactgccggctgtgtgcctgccaccgacccccatggctggtgggctggggacaaccagcaggtgcagaaggtcagcctcaaccccgcctgccggccccacccgagcttcacttcctgtctggtgccccctgcggagcccctccctgacacagcccagcctgcggtgatggagacacccgtgggtgatgcagacgcaagcgagggtttctcttcccctcccagttcgctgacctcgccctccacgccctccagcctggggccctcactctccagcaccagtggcatcgggaccagccccagtttgaggtcgctgcagagcctgctgggccccagttccaagttccgccatgctcagggcactgtcctgcaccgagacagccacatcaccaacctcaaggggctcaacctcaccacacctggtgagagtgacggcttctgtgccaacaagctgcgtgtggccgtgccgctgctcagcagcgggggacaggtggctgtgcttgagctacggaagcctggccgcctgcccgacacggcactgcccacgctgcagaatggggcagctgtgactgatctggcctgggacccctttgacccccatcgcctcgctgtggctggtgaggacgccaggatccgactgtggcgggtacccgcagagggcctggaagaggtgctcaccacgccagagactgtgctcacaggccacacggagaagatctgctccctgcgcttccacccactggcagccaatgtgctggcctcgtcctcctatgacctcactgttcgcatctgggaccttcaggctggagctgatcggctgaagctgcagggccaccaagaccagatcttcagcctggcctggagtcctgatgggcagcagctggccactgtctgcaaggatgggcgtgtgcgggtctacaggccccggagtggccctgagcccctgcaggaaggcccagggcccaagggaggacgcggagctcgcattgtctgggtatgtgatggtcgctgtctgctggtgtctggctttgacagccaaagtgagcgccagctgctcctatatgaagctgaggccctggccggcggacccttggcagtgttgggcctggacgtggctccctcaaccctgctgcccagctacgacccagacactggcctggtgctcctgaccggcaagggcgacacccgtgtattcctgtacgagctgctccccgagtcccctttcttcctggagtgcaacagcttcacgtcgcctgacccccacaagggcctcgtcctcctgcctaagacggagtgcgacgtgcgggaagtggagctgatgcggtgcctgcggctgcgtcagtcctccctggagcctgtggccttccggctgccccgagtccggaaagagttcttccaggatgacgtgttcccagacacggctgtgatctgggagcctgtgctcagtgccgaggcctggctgcaaggcgctaatgggcagccctggcttctcagcctgcagcctcctgacatgagcccaggtgcaccgagggactgggtgtggggaggaagcgggatgggggttggagaaagggacagaaggcccaggttgaagttccattcctgttggcacgcagaatcctctggcctttgggagggtggagtggctgtgtcaatcagtctctgagccagtggagggcagggctcgtggtctgtgttttcatcacaggtccccaccccccacacacacacaca

SEQ ID NO: 69972 - DNA, 2899 bp, Homo sapiens
cccgggtggggccgaggcagcgggagtcgcggttgctcagcgtgcacctgagacccgacgcccggggtcctcgaagacgcgtccgccgccgtgcccgtcgccatgaaccgcttcagggtgtccaagttccggcacaccgaggctcggccgccccgccgcgagtcctggatcagtgacattcgagcaggaaccgccccttcatgcaggaaccacatcaaatcaagctgcagcttgatcgccttcaactccgaccgtcctggtgtactgggcattgtgcctctgcaaggccaaggagaggacaagcgacgcgtggcccacctgggctgccattcagacctagtcaccgacttggacttctcgccctttgatgacttcctcctggccacaggctcggctgacaggacggtaaaactctggcgactgccagggcctggccaggccctgccctcagcacccggggtggtgctgggccccgaggacctcccagtggaggtactgcagttccaccccacctctgacggcattctggtgagcgcagcaggcaccactgtgaaggtctgggacgcagccaagcagcagcccctgacagagctggcagcccatggggacctggtgcagagcgccgtctggagccgagatggagccctggtgggcacggcgtgcaaggacaagcagctgcagatctttgaccccagaacaaagccgcgggcctctcagagcacgcaggcccatgagaacagcagggatagccggctggcatggatgggcacctgggagcaccttgtgtctactggattcaaccagatgcgtgagcgcgaagtgaagctgtgggacacgcggttcttctccagcgccctggcctccctcaccttggacacctcgcttgggtgtctcgtgcctctgctggaccctgactctgggctcctggtcctggcaggaaagggcgagaggcagctgtactgttacgaggtggtcccgcagcagccggcgctgagcccagtgacccagtgtgtcctggagagcgtgctgcgtggggctgcccttgtgccccggcaggcgctggccgtcatgagctgcgaggtactccgcgtcctacagctgagcgacacagccatcgtgcccatcggctaccatgtgccccgcaaggctgtggagttccacgaggacctgttcccggacactgccggctgtgtgcctgccaccgacccccatggctggtgggctggggacaaccagcaggtgcagaaggtcagcctcaaccccgcctgccggccccacccgagcttcacttcctgtctggtgccccctgcggagcccctccctgacacagcccagcctgcggtgatggagacacccgtgggtgatgcagacgcaagcgagggtttctcttcccctcccagttcgctgacctcgccctccacgccctccagcctggggccctcactctccagcaccagtggcatcgggaccagccccagtttgaggtcgctgcagagcctgctgggccccagttccaagttccgccatgctcagggcactgtcctgcaccgagacagccacatcaccaacctcaaggggctcaacctcaccacacctggtgagagtgacggcttctgtgccaacaagctgcgtgtggccgtgccgctgctcagcagcgggggacaggtggctgtgcttgagctacggaagcctggccgcctgcccgacacggcactgcccacgctgcagaatggggcagctgtgactgatctggcctgggacccctttgacccccatcgcctcgctgtggctggtgaggacgccaggatccgactgtggcgggtacccgcagagggcctggaagaggtgctcaccacgccagagactgtgctcacaggccacacggagaagatctgctccctgcgcttccacccactggcagccaatgtgctggcctcgtcctcctatgacctcactgttcgcatctgggaccttcaggctggagctgatcggctgaagctgcagggccaccaagaccagatcttcagcctggcctggagtcctgatgggcagcagctggccactgtctgcaaggatgggcgtgtgcgggtctacaggccccggagtggccctgagcccctgcaggaaggcccagggcccaagggaggacgcggagctcgcattgtctgggtatgtgatggtcgctgtctgctggtgtctggctttgacagccaaagtgagcgccagctgctcctatatgaagctgaggccctggccggcggacccttggcagtgttgggcctggacgtggctccctcaaccctgctgcccagctacgacccagacactggcctggtgctcctgaccggcaagggcgacacccgtgtattcctgtacgagctgctccccgagtcccctttcttcctggagtgcaacagcttcacgtcgcctgacccccacaaggtgaggccaccctggcgcctcgtccccgatgggaccacaaggctgccctgccccctggtggccatgtgggcaagtacaggagcctgtgggtcgggggtcagagtcctgggctggggctgggcctggggctgtgcccagtgactggcaagaagagttgctgctggaattatttaggaattttgagagccattgtcatactcaaccattattaaaaatcatactgtaggccgggtacggtggcctggaatcccaacacttcggaaggctgaggcaggagaattgcttgagcccaggagttcaagaccagcctgggcaacatagcaagaccccatctctacaaaacaaacaaaaaattacactagataaggttaaactatatgaacctacaatatgaacctaaaaataatattaaaaaccaaagtaataaacactcagtttatcacttctaaaaaaaaaa

SEQ ID NO: 69973 - DNA, 1108 bp, Homo sapiens
cccgggtggggccgaggcagcgggagtcgcggttgctcagcgtgcacctgagacccgacgcccggggtcctcgaagacgcgtccgccgccgtgcccgtcgccatgaaccgcttcagggtgtccaagttccggcacaccgaggctcggccgccccgccgcgagtcctggatcagtgacattcgagcaggaaccgccccttcatgcaggaaccacatcaaatcaagctgcagcttgatcgccttcaactccgaccgtcctggtgtactgggcattgtgcctctgcaaggccaaggagaggacaagcgacgcgtggcccacctgggctgccattcagacctagtcaccgacttggacttctcgccctttgatgacttcctcctggccacaggctcggctgacaggacggtaaaactctggcgactgccagggcctggccaggccctgccctcagcacccggggtggtgctgggccccgaggacctcccagtggaggtactgcagttccaccccacctctgacggcattctggtgagcgcagcaggcaccactgtgaaggtctgggacgcagccaagcagcagcccctgacagagctggcagcccatggggacctggtgcagagcgccgtctggagccgagatggagccctggtgggcacggcgtgcaaggacaagcagctgcagatctttgaccccagaacaaagccgcgggcctctcagagcacgcaggcccatgagaacagcagggatagccggctggcatggatgggcacctgggagcaccttgtgtctactggattcaaccagatgcgtgagcgcgaagtgaagctgtgggacacgcggttcttctccagcgccctggcctccctcaccttggacacctcgcttgggtaggagctgcggcacgcaggtgggctggggggctgatgacccaaggcgccgcaggtgagggcacctgatccggcctgtcagtgaggcgggctgatctccggggtgttctggggtacctgatctgggctgcaaggccttgcaacagacacctggccctgtacccccggagcttccagatgtcacgagcagcaggtgctcaggtgcccctctggcccctggt

SEQ ID NO: 69974 - DNA, 489 bp, Homo sapiens
cccagttccaagttccgccatgctcagggcactgtcctgcaccgagacagccacatcaccaacctcaaggggctcaacctcaccacacctggtgagagtgacggcttctgtgccaacaagctgcgtgtggccgtgccgctgctcagcagcgggggacaggtggctgtgcttgaggtgagggccccaccccaccagggctgcccctcagttccctgcctgtggcaaagacgcggagggccttagctacccacacaacacagggagcacaaaccttgtgtcaggctcctgcccgcctgtcctgtgatcctcccagccacctgccatggggcctgccacttttatccccattttacagatgagggagaagaggcacagagaggtttagtgacctgcccgggtcacacagctgtgtaagtggtggagctgggatccgaagcccggccacctgagccctaagccggagcttttcccgccagttcacgctgctgc

SEQ ID NO: 69975 - DNA, 3616 bp, Homo sapiens
cccgggtggggccgaggcagcgggagtcgcggttgctcagcgtgcacctgagacccgacgcccggggtcctcgaagacgcgtccgccgccgtgcccgtcgccatgaaccgcttcagggtgtccaagttccggcacaccgaggctcggccgccccgccgcgagtcctggatcagtgacattcgagcaggaaccgccccttcatgcaggaaccacatcaaatcaagctgcagcttgatcgccttcaactccgaccgtcctggtgtactgggcattgtgcctctgcaaggccaaggagaggacaagcgacgcgtggcccacctgggctgccattcagacctagtcaccgacttggacttctcgccctttgatgacttcctcctggccacaggctcggctgacaggacggtaaaactctggcgactgccagggcctggccaggccctgccctcagcacccggggtggtgctgggccccgaggacctcccagtggaggtactgcagttccaccccacctctgacggcattctggtgagcgcagcaggcaccactgtgaaggtctgggacgcagccaagcagcagcccctgacagagctggcagcccatggggacctggtgcagagcgccgtctggagccgagatggagccctggtgggcacggcgtgcaaggacaagcagctgcagatctttgaccccagaacaaagccgcgggcctctcagagcacgcaggcccatgagaacagcagggatagccggctggcatggatgggcacctgggagcaccttgtgtctactggattcaaccagatgcgtgagcgcgaagtgaagctgtgggacacgcggttcttctccagcgccctggcctccctcaccttggacacctcgcttgggtgtctcgtgcctctgctggaccctgactctgggctcctggtcctggcaggaaagggcgagaggcagctgtactgttacgaggtggtcccgcagcagccggcgctgagcccagtgacccagtgtgtcctggagagcgtgctgcgtggggctgcccttgtgccccggcaggcgctggccgtcatgagctgcgaggtactccgcgtcctacagctgagcgacacagccatcgtgcccatcggctaccatgtgccccgcaaggctgtggagttccacgaggacctgttcccggacactgccggctgtgtgcctgccaccgacccccatggctggtgggctggggacaaccagcaggtgcagaaggtcagcctcaaccccgcctgccggccccacccgagcttcacttcctgtctggtgccccctgcggagcccctccctgacacagcccagcctgcggtgatggagacacccgtgggtgatgcagacgcaagcgagggtttctcttcccctcccagttcgctgacctcgccctccacgccctccagcctggggccctcactctccagcaccagtggcatcgggaccagccccagtttgaggtcgctgcagagcctgctgggccccagttccaagttccgccatgctcagggcactgtcctgcaccgagacagccacatcaccaacctcaaggggctcaacctcaccacacctggtgagagtgacggcttctgtgccaacaagctgcgtgtggccgtgccgctgctcagcagcgggggacaggtggctgtgcttgagctacggaagcctggccgcctgcccgacacggcactgcccacgctgcagaatggggcagctgtgactgatctggcctgggacccctttgacccccatcgcctcgctgtggctggtgaggacgccaggatccgactgtggcgggtacccgcagagggcctggaagaggtgctcaccacgccagagactgtgctcacaggccacacggagaagatctgctccctgcgcttccacccactggcagccaatgtgctggcctcgtcctcctatgacctcactgttcgcatctgggaccttcaggctggagctgatcggctgaagctgcagggccaccaagaccagatcttcagcctggcctggagtcctgatgggcagcagctggccactgtctgcaaggatgggcgtgtgcgggtctacaggccccggagtggccctgagcccctgcaggaaggcccagggcccaagggaggacgcggagctcgcattgtctgggtatgtgatggtcgctgtctgctggtgtctggctttgacagccaaagtgagcgccagctgctcctatatgaagctgaggccctggccggcggacccttggcagtgttgggcctggacgtggctccctcaaccctgctgcccagctacgacccagacactggcctggtgctcctgaccggcaagggcgacacccgtgtattcctgtacgagctgctccccgagtcccctttcttcctggagtgcaacagcttcacgtcgcctgacccccacaagggcctcgtcctcctgcctaagacggagtgcgacgtgcgggaagtggagctgatgcggtgcctgcggctgcgtcagtcctccctggagcctgtggccttccggctgccccgagtccggaaagagttcttccaggatgacgtgttcccagacacggctgtgatctgggagcctgtgctcagtgccgaggcctggctgcaaggcgctaatgggcagccctggcttctcagcctgcagcctcctgacatgagcccagtgagccaagccccccgagaggcccctgctcgtcgggccccatcctcagcgcagtacctggaagaaaagtctgaccagcaaaagaaggaggagctgctgaatgccatggtggcaaaactggggaaccgggaggacccactcccccaggactcctttgaaggcgtggacgaggacgagtgggtgagtagtgagtggcctcacttcccggcaggcagcgcggtccctcgcacatgccacggtgcatgcctcctcccttcccaggccctcctgactccctcccacctcttggtgtttcgccccaggactagcctgcgcccccgtcacctccacctcacctgtgctgccacttcctagtgcacacctcacggctcatcctcaagctggaagatacctctctggccccggcacatgtcacccctgcactcctgccttcccgtgggcacttccacatcctctgggcctctggcagttcccagggactgttttcacctctgctgtctctggggtcagctgctgctcatcagctgcccgctagcatgtggccaggggtgcagggtggcggggggtcagcagcatgtccctgggcaggccctgggcaccctgtctcccctggtctcactgctgacctgggctggtcccagcctggattggcctcatccaggatctttggtcaccccacgctgccccatcttgcctgctgttccagttctggtcaagggccttgggggctggccccccaccaggccttctagagcagcaccagtctcagggccctgggaccagctgccctacttcccaggtttgtagccaggagaagggggcatcacagagctgatggtccaataaggggggtgtgagccccgcagggactggcccgcacctgccttggatgttttcagcaattaaacttttttaagctggc

SEQ ID NO: 69976 - DNA, 4176 bp, Homo sapiens
cccgggtggggccgaggcagcgggagtcgcggttgctcagcgtgcacctgagacccgacgcccggggtcctcgaagacgcgtccgccgccgtgcccgtcgccatgaaccgcttcagggtgtccaagttccggcacaccgaggctcggccgccccgccgcgagtcctggatcagtgacattcgagcaggaaccgccccttcatgcaggaaccacatcaaatcaagctgcagcttgatcgccttcaactccgaccgtcctggtgtactgggcattgtgcctctgcaaggccaaggagaggacaagcgacgcgtggcccacctgggctgccattcagacctagtcaccgacttggacttctcgccctttgatgacttcctcctggccacaggctcggctgacaggacggtaaaactctggcgactgccagggcctggccaggccctgccctcagcacccggggtggtgctgggccccgaggacctcccagtggaggtactgcagttccaccccacctctgacggcattctggtgagcgcagcaggcaccactgtgaaggtctgggacgcagccaagcagcagcccctgacagagctggcagcccatggggacctggtgcagagcgccgtctggagccgagatggagccctggtgggcacggcgtgcaaggacaagcagctgcagatctttgaccccagaacaaagccgcgggcctctcagagcacgcaggcccatgagaacagcagggatagccggctggcatggatgggcacctgggagcaccttgtgtctactggattcaaccagatgcgtgagcgcgaagtgaagctgtgggacacgcggttcttctccagcgccctggcctccctcaccttggacacctcgcttgggtgtctcgtgcctctgctggaccctgactctgggctcctggtcctggcaggaaagggcgagaggcagctgtactgttacgaggtggtcccgcagcagccggcgctgagcccagtgacccagtgtgtcctggagagcgtgctgcgtggggctgcccttgtgccccggcaggcgctggccgtcatgagctgcgaggtactccgcgtcctacagctgagcgacacagccatcgtgcccatcggctaccatgtgccccgcaaggctgtggagttccacgaggacctgttcccggacactgccggctgtgtgcctgccaccgacccccatggctggtgggctggggacaaccagcaggtgcagaaggtcagcctcaaccccgcctgccggccccacccgagcttcacttcctgtctggtgccccctgcggagcccctccctgacacagcccagcctgcggtgatggagacacccgtgggtgatgcagacgcaagcgagggtttctcttcccctcccagttcgctgacctcgccctccacgccctccagcctggggccctcactctccagcaccagtggcatcgggaccagccccagtttgaggtcgctgcagagcctgctgggccccagttccaagttccgccatgctcagggcactgtcctgcaccgagacagccacatcaccaacctcaaggggctcaacctcaccacacctggtgagagtgacggcttctgtgccaacaagctgcgtgtggccgtgccgctgctcagcagcgggggacaggtggctgtgcttgagctacggaagcctggccgcctgcccgacacggcactgcccacgctgcagaatggggcagctgtgactgatctggcctgggacccctttgacccccatcgcctcgctgtggctggtgaggacgccaggatccgactgtggcgggtacccgcagagggcctggaagaggtgctcaccacgccagagactgtgctcacaggccacacggagaagatctgctccctgcgcttccacccactggcagccaatgtgctggcctcgtcctcctatgacctcactgttcgcatctgggaccttcaggctggagctgatcggctgaagctgcagggccaccaagaccagatcttcagcctggcctggagtcctgatgggcagcagctggccactgtctgcaaggatgggcgtgtgcgggtctacaggccccggagtggccctgagcccctgcaggaaggcccagggcccaagggaggacgcggagctcgcattgtctgggtatgtgatggtcgctgtctgctggtgtctggctttgacagccaaagtgagcgccagctgctcctatatgaagctgaggccctggccggcggacccttggcagtgttgggcctggacgtggctccctcaaccctgctgcccagctacgacccagacactggcctggtgctcctgaccggcaagggcgacacccgtgtattcctgtacgagctgctccccgagtcccctttcttcctggagtgcaacagcttcacgtcgcctgacccccacaagggcctcgtcctcctgcctaagacggagtgcgacgtgcgggaagtggagctgatgcggtgcctgcggctgcgtcagtcctccctggagcctgtggccttccggctgccccgagtccggaaagagttcttccaggatgacgtgttcccagacacggctgtgatctgggagcctgtgctcagtgccgaggcctggctgcaaggcgctaatgggcagccctggcttctcagcctgcagcctcctgacatgagcccagtgagccaagccccccgagaggcccctgctcgtcgggccccatcctcagcgcagtacctggaagaaaagtctgaccagcaaaagaaggaggagctgctgaatgccatggtggcaaaactggggaaccgggaggacccactcccccaggactcctttgaaggcgtggacgaggacgagtgggactagcctgcgcccccgtcacctccacctcacctgtgctgccacttcctagtgcacacctcacggctcatcctcaagctggaagatacctctctggccccggcacatgtcacccctgcactcctgccttcccgtgggcacttccacatcctctgggcctctggcagttcccagggactgttttcacctctgctgtctctggggtcagctgctgctcatcagctgcccgctagcatgtggccaggggtgcagggtggcggggggtcagcagcatgtccctgggcaggccctgggcaccctgtctcccctggtctcactgctgacctgggctggtcccagcctggattggcctcatccaggatctttggtcaccccacgctgccccatcttgcctgctgttccagttctggtcaagggccttgggggctggccccccaccaggccttctagagcagcaccagtctcagggccctgggaccagctgccctacttcccaggtttgtagccaggagaagggggcatcacagagctgatggtccaataaggggggtgtgagccccgcagggactggcccgcacctgccttggatgttttcagcaattaaacttttttaagctggcaaaaaaaaaaaaaaaaaaaaaaaaaaaaaaaaaaaaaaaaaaaaaaaaaaaaaaaaaaaaaaaaaaaaaaaacaacaaaaaaagagggggggcgcgccccaaaacagttacccgcggaggccgcgacactaaatcgcacgaaccccgcttctttttaagaaaggaggggcccccatagcgagggagataaacaaacaaaacgggggcgcgggcgcatcaacaacctagctgagacgagaaaaacgttatgcgcgagcgatcctaggaagagacaccccactctggggggggggcaacactggggcacccaaccacaaagaaaaaaacgcaccgcaagcacaaaaaaaccaactcagccgggcgacgcgaggagcggaacccaccacgacaattcatgccggcagaaaacaatcgggcacgcaagattataaaaaaaaataacagcggtgcgtcgattaaaacaacgcaaccaacgcagcgccccacagacactgacagagccacaacgcaataggacacccagacactgaactaccagaagctgcagcaagcgagctaaaacaacgacgagacagacaaaccacgggacaccaccgaagcagcacacacagacgaggcaaagcaaacaccacagcatcgcaccgacgagaacgcaaacgaaacacaacaaacagacacacgg

SEQ ID NO: 69977 - DNA, 2930 bp, Homo sapiens
cccgggtggggccgaggcagcgggagtcgcggttgctcagcgtgcacctgagacccgacgcccggggtcctcgaagacgcgtccgccgccgtgcccgtcgccatgaaccgcttcagggtgtccaagttccggcacaccgaggctcggccgccccgccgcgagtcctggatcagtgacattcgagcaggaaccgccccttcatgcaggaaccacatcaaatcaagctgcagcttgatcgccttcaactccgaccgtcctggtgtactgggcattgtgcctctgcaaggccaaggagaggacaagcgacgcgtggcccacctgggctgccattcagacctagtcaccgacttggacttctcgccctttgatgacttcctcctggccacaggctcggctgacaggacggtaaaactctggcgactgccagggcctggccaggccctgccctcagcacccggggtggtgctgggccccgaggacctcccagtggaggtactgcagttccaccccacctctgacggcattctggtgagcgcagcaggcaccactgtgaaggtctgggacgcagccaagcagcagcccctgacagagctggcagcccatggggacctggtgcagagcgccgtctggagccgagatggagccctggtgggcacggcgtgcaaggacaagcagctgcagatctttgaccccagaacaaagccgcgggcctctcagagcacgcaggcccatgagaacagcagggatagccggctggcatggatgggcacctgggagcaccttgtgtctactggattcaaccagatgcgtgagcgcgaagtgaagctgtgggacacgcggttcttctccagcgccctggcctccctcaccttggacacctcgcttgggtgtctcgtgcctctgctggaccctgactctgggctcctggtcctggcaggaaagggcgagaggcagctgtactgttacgaggtggtcccgcagcagccggcgctgagcccagtgacccagtgtgtcctggagagcgtgctgcgtggggctgcccttgtgccccggcaggcgctggccgtcatgagctgcgaggtactccgcgtcctacagctgagcgacacagccatcgtgcccatcggctaccatgtgccccgcaaggctgtggagttccacgaggacctgttcccggacactgccggctgtgtgcctgccaccgacccccatggctggtgggctggggacaaccagcaggtgcagaaggtcagcctcaaccccgcctgccggccccacccgagcttcacttcctgtctggtgccccctgcggagcccctccctgacacagcccagcctgcggtgatggagacacccgtgggtgatgcagacgcaagcgagggtttctcttcccctcccagttcgctgacctcgccctccacgccctccagcctggggccctcactctccagcaccagtggcatcgggaccagccccagtttgaggtcgctgcagagcctgctgggccccagttccaagttccgccatgctcagggcactgtcctgcaccgagacagccacatcaccaacctcaaggggctcaacctcaccacacctggtgagagtgacggcttctgtgccaacaagctgcgtgtggccgtgccgctgctcagcagcgggggacaggtggctgtgcttgagctacggaagcctggccgcctgcccgacacggcactgcccacgctgcagaatggggcagctgtgactgatctggcctgggacccctttgacccccatcgcctcgctgtggctggtgaggacgccaggatccgactgtggcgggtacccgcagagggcctggaagaggtgctcaccacgccagagactgtgctcacaggccacacggagaagatctgctccctgcgcttccacccactggcagccaatgtgctggcctcgtcctcctatgacctcactgttcgcatctgggaccttcaggctggagctgatcggctgaagctgcagggccaccaagaccagatcttcagcctggcctggagtcctgatgggcagcagctggccactgtctgcaaggatgggcgtgtgcgggtctacaggccccggagtggccctgagcccctgcaggaaggcccagggcccaagggaggacgcggagctcgcattgtctgggtatgtgatggtcgctgtctgctggtgtctggctttgacagccaaagtgagcgccagctgctcctatatgaagctgaggccctggccggcggacccttggcagtgttgggcctggacgtggctccctcaaccctgctgcccagctacgacccagacactggcctggtgctcctgaccggcaagggcgacacccgtgtattcctgtacgagctgctccccgagtcccctttcttcctggagtgcaacagcttcacgtcgcctgacccccacaagggcctcgtcctcctgcctaagacggagtgcgacgtgcgggaagtggagctgatgcggtgcctgcggctgcgtcagtcctccctggagcctgtggccttccggctgccccgagtccggaaagagttcttccaggatgacgtgttcccagacacggctgtgatctgggagcctgtgctcagtgccgaggcctggctgcaaggcgctaatgggcagccctggcttctcagcctgcagcctcctgacatgagcccagtgagccaagccccccgagaggcccctgctcgtcgggccccatcctcagcgcagtacctggaagaaaagtctgaccagcaaaagaaggaggagctgctgaatgccatggtggcaaaactggggaaccgggaggacccactcccccaggactcctttgaaggcgtggacgaggacgagtgggactagcctgcgcccccgtcacctccacctaggggtttgtgaatactcccacctag

SEQ ID NO: 69978 - DNA, 673 bp, Homo sapiens
  misc_feature (66)..(67): n is a, c, g, or t
atgctgaggtatctagaggatccggtgaggtggaggtgacgggggcgcaggctagtccactcgtcnncgtcacgcctccacctcacctgtgctgccacttcctagtgcacacctcacggctcatcctcaagctggaagatacctctctggccccggcacatgtcacccctgcactcctgccttcccgtgggcacttccacatcctctgggcctctggcagttcccagggactgttttcacctctgctgtctctggggtcagctgctgctcatcagctgcccgctagcatgtggccaggggtgcagggtggcggggggtcagcagcatgtccctgggcaggccctgggcaccctgtctcccctggtctcactgctgacctgggctggtcccagcctggattggcctcatccaggatctttggtcaccccacgctgccccatcttgcctgctgttccagttctggtcaagggccttgggggctggccccccaccaggccttctagagcagcaccagtctcagggccctgggaccagctgccctacttcccaggtttgtagccaggagaagggggcatcacagagctgatggtccaataaggggggtgtgagccccgcagggactggcccgcacctgccttggatgttttcagcaattaaacttttttaagctggc

SEQ ID NO: 69979 - DNA, 430 bp, Homo sapiens
ggagaaagaacagaggcatcctattcttatcctattcctattacgtggctcttccccttgtggctgactcagaaatatctctctttttaaaatttatttttattttctagagacagggtctcactctgttgcccaggctggagtggtacgatgatggctcactgcagccttgacttccagggcccaagtgatccttccttctcagccttccaagtagctgagaccacaggtgcatgccatcacacccagctcatttttaaaaaaaaaaaaaaaaaattagccgagcctggtagcatgcctgtagtcccagctactgagaaggctgaggtgagaggatggcgtgagtccaggagtcagggctgcagaggatatggtaagctatatcatgccactgcactccagcctggggaagacagcgagaccctatctc

SEQ ID NO: 69980 - DNA, 460 bp, Homo sapiens
cagccacatttgtatgggtgagtgggtacaaaacagagcttccatttgtgaaaaatggaggatatttatgaagatacaggtgtcaatgccctttcgacaaagactacctagaacatatccgtagtgttacaaattaggcttattttatatatatatattttatatatatataaaggcaaccagatatcatataaaatctgtttctgttatctaataggaacagggaaagaaaaaagctctgctatgcaaaatggtcaaaatatatgattatttaattcataaataaaattgcacaaatgcaaatttatgcacaaactcactggtaatcagagaagtaataatgagagctttgagatcagtttttccattccttgttacaaattaaaatgattggtcataattagtactgctaagtattgtggtacagggagagcgtcttcattaattactagtgaaagaa

SEQ ID NO: 69981 - DNA, 345 bp, Homo sapiens
tacaatactaaatagtgtggagtaatgactgtcgaatgctgtgtttggggttatagaatctcccctataggctttaagctccctgataactttatttccctccctccctcccacccatctagtacagtgcctgacttatagtaaagcactctaggaacaaatggttgaaggaagaaaccccaagtgggaaattagtaggggaacaattccctagcctgaaagtgtatccaagaagaatgatgtttttctggtgcttatatttattgcctaggatggacagctttctgcttcagaggattgggagtgttcatccaagcaagattgacatagacatttgatgctgtg

SEQ ID NO: 69982 - DNA, 590 bp, Homo sapiens
gaggtgctccccaagacctggactccttccctcaccctcctcccatcactctcctcactgtagctatggccaggtgagggctcagggctacttgaggaccttgctcagcccagggcctccatcccaggcattgtttccaaactctgtaagggctgtctctgaatctgtagaaacagttatttctatgtgcccaggactgggttagagggcaccaaccccaccccttgcaaactgctcctcacctcttagcgccccagtgaggagaagaaagagttagaaatcaggaatctactcagggctcccctctctcccctttcccagcctcccctggctttctctttctacagaaacaccaaggaggcagccaccaaggacgaggggaggcccaggcattataccaggcagcggagccagccagtccccccagatggtggagggaggtggtggaggtgtctgggaccagaaaatagtgaggaccctcttactgaagtgaggacgggtggcataaactgaggcccagatggtggaccagatctcctgagccatctactcatttcttcgtgtgttccagtttgggtaagaataggcta

SEQ ID NO: 69983 - DNA, 292 bp, Homo sapiens
gcaagaaatgttaaaggatattcttcagaaacaaaatgatgtcagatgaaaatctggaccaatacgaaggaataaagagcaccaaagtggtaactatatgagcaaacatcttttaaattttttattatttaaatctctaagagatacatgtttaataaaaaaacagcaaaatgttacagagtttataacatatgtaaaagtcaaatgcatggcagcaatagcacaaagtgcaggagggaggaaaagaaagtaaatgaaggaatgcttttattatagatgaagtgtacaatat

SEQ ID NO: 69984 - DNA, 438 bp, Homo sapiens
ctcgtggtagggttggtgcccttgtaagaagagactccagcaagcttgctctctctctctcgccgtcatgtgaagacacagcaagacgatggccattcacagccaggaagaaaggcctcgccagaacccgatcacactggcaccctgatcttggaattccaggctccaaaactgtgagaaaataaatctctgttgtttaagccaccagtctgtttctgttacagcagcctgatatggtttggctctgtgtccccacccgaatctcatcttgaattgtagctcccacaattcccatgtgttgtgggagggacccagtgggaggtaattgaatgataggggtggttctttctcgtgctgttctcatgatagtgaataagtctcaggagatctgatggttttataaagaggagttcccctgtacaagctctctctgtttgc

SEQ ID NO: 69985 - DNA, 1453 bp, Homo sapiens
  misc_feature (1138)..(1138): n is a, c, g, or t
tgcgtcctggggactccaacgctgggtgacattgagctcaccagcgccaccgtccccggcgaagttctgcgctggtcggcggagtagcaagtggccatggggagcctcagcggtctgcgcctggcagcaggaagctgttttaggttatgtgaaagagatgtttcctcatctctaaggcttaccagaagctctgatttgaagagaataaatggattttgcacaaaaccacaggaaagtcccggagctccatcccgcacttacaacagagtgcctttacacaaacctacggattggcagaaaaagatcctcatatggtcaggtcgcttcaaaaaggaagatgaaatcccagagactgtctcgttggagatgcttgatgctgcaaagaacaagatgcgagtgaagatcagctatctaatgattgccctgacggtggtaggatgcatcttcatggttattgagggcaagaaggctgcccaaagacacgagactttaacaagcttgaacttagaaaagaaagctcgtctgaaagaggaagcagctatgaaggccaaaacagagtagcagaggtatccgtgttggctggattttgaaaatccaggaattatgttataacgtgcctgtattaaaaaggatgtggtatgaggatccatttcataaagtatgatttgcccaaacctgtaccatttccgtatttctgctgtagaagtagaaataaattttcttaaataatgactgtgttttattgttttgatccaagtcaagtgtagcctctcagccttttggagaaaaatgaaacaatttatttcaacttgaataccaactcttcagagaagcaggtaccatatcttacttctcttcccattatcaaagtaacctctccacaggcgaactcattttgaggagataaggaaggccagttgagtatatggcccaggtgcagcttggagggccagccttctcaaatgtcctggtgtactggtggggaggctgccccctaatagagcgagcgctgagaagcagccagaccacattctataatctttgaacatgctggcagatggaggcttttaggagaatagttttttaaacattctgacaaggtccagccaggaatttctaaggacttagaaatcccagngtcatggagttgcttggggtcaacacaagtcacctcttagcttcatgccttagaattctcaactggctgtttttcttaccacctgagaaactaaatttctcaattataaaaatctcatgtattattactgttagaagtatttgcacctcatatatatctcatttacagtttgaccttgggatatcgagttgtctcatatttaggtatgaatacaggtttctattttaaacattgattctcacatgcttcttaattattcatggatgacaagccattatagtagtcccttcttatccacggctttgttttctgtgg

SEQ ID NO: 69986 - DNA, 727 bp, Homo sapiens
tgcgtcctggggactccaacgctgggtgacattgagctcaccagcgccaccgtccccggcgaagttctgcgctggtcggcggagtagcaagtggccatggggagcctcagcggtctgcgcctggcagcaggaagctgttttaggttatgtgaaagagatgtttcctcatctctaaggcttaccagaagctctgatttgaagagaataaatggattttgcacaaaaccacaggaaagtcccggagctccatcccgcacttacaacagagtgcctttacacaaacctacggattggcagaaaaagatcctcatatggtcaggtcgcttcaaaaaggaagatgaaatcccagagactgtctcgttggagatgcttgatgctgcaaagaacaagatgcgagtgaagatcagctatctaatgattgccctgacggtggtaggatgcatcttcatggttattgagggcaagaaggctgcccaaagacacgagactttaacaagcttgaacttagaaaagaaagctcgtctgaaagaggaagcagctatgaaggccaaaacagagtagcagaggtatccgtgttggctggattttgaaaatccaggaattatgttataacgtgcctgtattaaaaaggatgtggtatgaggatccatttcataaagtatgatttgcccaaacctgtaccatttccgtatttctgctgtagaagtagaaataaattttcttaaat

SEQ ID NO: 69987 - DNA, 1169 bp, Homo sapiens
taaaagagaagtggggtggaatgagaagaaagtataagagaaaaggagaggataaagactgaaagaaaggggccagaagggaagaaaaaggagaggtgtggcacttcttacttatgcttgagtggatgagctgctgttcttggaagcgtacgaggaagttgaagcacatagaggaaactgccgtgctcagtgtccaagcagcagaggactccatgcctccatgcctctgttaacctgctgtcatcagtgcaaggtaaagacaccctcccctgaccagcatacaaatcacctgttcaaatctgttttgctttaggctgcccaaagacacgagactttaacaagcttgaacttagaaaagaaagctcgtctgaaagaggaagcagctatgaaggccaaaacagagtagcagaggtatccgtgttggctggattttgaaaatccaggaattatgttataacgtgcctgtattaaaaaggatgtggtatgaggatccatttcataaagtatgatttgcccaaacctgtaccatttccgtatttctgctgtagaagtagaaataaattttcttaaataaaaaaaaacaaaaaacacaaacacaacaacaaaacacacaaacacacaaaacacacacaacaaacacacaaaaacaaaaaaaacaaacacaacacacacaaacacaacacaagaaaacaacaagaaaagaaaaaagacaaaaaaaagaaaagaaagaagagagagagaggagccgcgcgcgcggcgcgccagacaagatctctctcccgcgcggcgcggggcgcggcccaagcgccgccgcgccgcgcccgccactgtctattgggacagcgagggggcgcggcccatatcaagaaggcgggtgtgtgtaaatataatttatgaagggaaagggaggaggcggggagcggagggaagaggctatcacataaacacaaaccagagacgggtgttgtgagtgatgagaggggcggagagaaagaggatgcgatgggtcaggctggcgagggggacgcgttagtgtggtgagagaggtgaggcgcgcggcagcacacctaatcagtacatgagtagaggcggggagcagaggggagacatcagcctactaattgatagtcgggcagccgcgtccgcaacactgggcatacggggtagat

SEQ ID NO: 69988 - DNA, 887 bp, Homo sapiens
tgcgtcctggggactccaacgctgggtgacattgagctcaccagcgccaccgtccccggcgaagttctgcgctggtcggcggagtagcaagtggccatggggagcctcagcggtctgcgcctggcagcaggttggttcatgtgatcctggttaatggaacataagtgagattttatgggtgacagggagagagatcaggcttgacttgagagcacgtgggaaaagaagggggctatctcttcgcaaagatttaagtatcttataagaactgtttgccagtgcaattatgagaagctgttttaggttatgtgaaagagatgtttcctcatctctaaggcttaccagaagctctgatttgaagagaataaatggattttgcacaaaaccacaggaaagtcccggagctccatcccgcacttacaacagagtgcctttacacaaacctacggattggcagaaaaagatcctcatatggtcaggtcgcttcaaaaaggaagatgaaatcccagagactgtctcgttggagatgcttgatgctgcaaagaacaagatgcgagtgaagatcagctatctaatgattgccctgacggtggtaggatgcatcttcatggttattgagggcaagaaggctgcccaaagacacgagactttaacaagcttgaacttagaaaagaaagctcgtctgaaagaggaagcagctatgaaggccaaaacagagtagcagaggtatccgtgttggctggattttgaaaatccaggaattatgttataacgtgcctgtattaaaaaggatgtggtatgaggatccatttcataaagtatgatttgcccaaacctgtaccatttccgtatttctgctgtagaagtagaaataaattttcttaaat

SEQ ID NO: 69989 - DNA, 764 bp, Homo sapiens
tgcgtcctggggactccaacgctgggtgacattgagctcaccagcgccaccgtccccggcgaagttctgcgctggtcggcggagtagcaagtggccatggggagcctcagcggtctgcgcctggcagcaggaagctgttttaggttatgtgaaagagatgtttcctcatctctaaggcttaccagaagctctgatttgaagagaataaatggattttgcacaaaaccacaggaaagtcccggagctccatcccgcacttacaacagagtgcctttacacaaacctacggattggcagaaaaagatcctcatatggtcaggtcgcttcaaaaaggaagatgaaatcccagagactgtctcgttggagatgcttgatgctgcaaagaacaagatgcgagtgaagatcagctatctaatgattgccctgacggtggtaggatgcatcttcatggttattgagggcaagaaggctgcccaaagacacgagactttaacaagcttgaacttagaaaagaaagctcgtctgaaagaggaagcagctatgaaggccaaaacagagtagcagaggtatccgtgttggctggattttgaaaatccaggaattatgttataacgtgcctgtattaaaaaggatgtggtatgaggatccatttcataaagtatgatttgcccaaacctgtaccatttccgtatttctgctgtagaagtagaaataaattttcttaaataaaaaaagtcgacgcggccgcgaatttagtagtagta

SEQ ID NO: 69990 - DNA, 763 bp, Homo sapiens
tgcgtcctggggactccaacgctgggtgacattgagctcaccagcgccaccgtccccggcgaagttctgcgctggtcggcggagtagcaagtggccatggggagcctcagcggtctgcgcctggcagcaggaagctgttttaggttatgtgaaagagatgtttcctcatctctaaggcttaccagaagctctgatttgaagagaataaatggattttgcacaaaaccacaggaaagtcccggagctccatcccgcacttacaacagagtgcctttacacaaacctacggattggcagaaaaagatcctcatatggtcaggtcgcttcaaaaaggaagatgaaatcccagagactgtctcgttggagatgcttgatgctgcaaagaacaagatgcgagtgaagatcagctatctaatgattgccctgacggtggtaggatgcatcttcatggttattgagggcaagaaggctgcccaaagacacgagactttaacaagcttgaacttagaaaagaaagctcgtctgaaagaggaagcagctatgaaggccaaaacagagtagcagaggtatccgtgttggctggattttgaaaatccaggaattatgttataacgtgcctgtattaaaaaggatgtggtatgaggatccatttcataaagtatgatttgcccaaacctgtaccatttccgtatttctgctgtagaagtagaaataaattttcttaaatcaaaaaaaaatatcctgcgccccatttgggctactg

SEQ ID NO: 69991 - DNA, 580 bp, Homo sapiens
tgcgtcctggggactccaacgctgggtgacattgagctcaccagcgccaccgtccccggcgaagttctgcgctggtcggcggagtagcaagtggccatggggagcctcagcggtctgcgcctggcagcaggaagctgttttaggttatgtgaaagagatgtttcctcatctctaaggcttaccagaagctctgatttgaagagaataaatggattttgcacaaaaccacaggaaagtcccggagctccatcccgcacttacaacagagtgcctttacacaaacctacggattggcagaaaaagatcctcatatggtcaggtcgcttcaaaaaggaagatgaaatcccagagactgtctcgttggagatgcttgatgctgcaaagaacaagatgcgagtgaagatcagctatctaatgattgccctgacggtggtaggatgcatcttcatggttattgagggcaagaagcttgcccaaagcaccaggactttacaaggttgaccttaaaaagaagcttgtttaaagaggacccctttttaagccaaaaagagttcccagggtttccgtttggtggatttgg

SEQ ID NO: 69992 - DNA, 572 bp, Homo sapiens
taaaagagaagtggggtggaatgagaagaaagtataagagaaaaggagaggataaagactgaaagaaaggggccagaagggaagaaaaaggagaggtgtggcacttcttacttatgcttgagtggatgagctgctgttcttggaagcgtacgaggaagttgaagcacatagaggaaactgccgtgctcagtgtccaagcagcagaggactccatgcctccatgcctctgttaacctgctgtcatcagtgcaaggtaaagacaccctcccctgaccagcatacaaatcacctgttcaaatctgttttgctttaggctgcccaaagacacgagactttaacaagcttgaacttagaaaagaaagctcgtctgaaagaggaagcagctatgaaggccaaaacagagtagcagaggtatccgtgttggctggattttgaaaatccaggaattatgttataacgtgcctgtattaaaaaggatgtggtatgaggatccatttcataaagtatgatttgcccaaacctgtaccatttccgtatttctgctgtagaagtagaaataaattttcttaaat

SEQ ID NO: 69993 - DNA, 576 bp, Homo sapiens
  misc_feature (277)..(277): n is a, c, g, or t
ctgtagtcccagcagcttgggaggctgaggctggagaatggtgtgaacccaggaggcggagcttgcagtgagccaagatcgcgccactgcactccagcccgggtgacagagcaagactccgtctcaaaaaaaaaaaaaaaaaaaaaaaaaaaaaaaaaaacctcgtgccgaattcggcacgaggttccactgatgcagcttagaaccacacccctgagagtcgtggcaaacctttcacaacctggaaaatgttgaaagcaaccattcctatttttgnttggtttttattaaatcttgcctcgtgccgaattcggcacgctgcccaaagacacgagactttaacaagcttgaacttagaaaagaaagctcgtctgaaagaggaagcagctatgaaggccaaaacagagtagcagaggtatccgtgttggctggattttgaaaatccaggaattatgttataacgtgcctgtattaaaaaggatgtggtatgaggatccatttcataaagtatgatttgcccaaacctgtaccatttccgtatttctgctgtagaagtagaaataaattttcttaaat

SEQ ID NO: 69994 - DNA, 509 bp, Homo sapiens
tgcgtcctggggactccaacgctgggtgacattgagctcaccagcgccaccgtccccggcgaagttctgcgctggtcggcggagtagcaagtggccatggggagcctcagcggtctgcgcctggcagcaggtgagacgccggtcgggatatgggaggaagctgttttaggttatgtgaaagagatgtttcctcatctctaaggcttaccagaagctctgatttgaagagaataaatggattttgcacaaaaccacaggaaagtcccggagctccatcccgcacttacaacagagtgcctttacacaaacctacggattggcagaaaaagatcctcatatggtcaggtcgcttcaaaaaggaagatgaaatcccagagactgtctcgttggagatgcttgatgctgcaaagaacaagatgcgagtgaagatcagctatctaatgattgccctgacggtggtaggatgcatcttcatggttattgagggcaagaaggtgagaaggggtttc

SEQ ID NO: 69995 - DNA, 1613 bp, Homo sapiens
  misc_feature (1298)..(1298): n is a, c, g, or t
tgcgtcctggggactccaacgctgggtgacattgagctcaccagcgccaccgtccccggcgaagttctgcgctggtcggcggagtagcaagtggccatggggagcctcagcggtctgcgcctggcagcaggttggttcatgtgatcctggttaatggaacataagtgagattttatgggtgacagggagagagatcaggcttgacttgagagcacgtgggaaaagaagggggctatctcttcgcaaagatttaagtatcttataagaactgtttgccagtgcaattatgagaagctgttttaggttatgtgaaagagatgtttcctcatctctaaggcttaccagaagctctgatttgaagagaataaatggattttgcacaaaaccacaggaaagtcccggagctccatcccgcacttacaacagagtgcctttacacaaacctacggattggcagaaaaagatcctcatatggtcaggtcgcttcaaaaaggaagatgaaatcccagagactgtctcgttggagatgcttgatgctgcaaagaacaagatgcgagtgaagatcagctatctaatgattgccctgacggtggtaggatgcatcttcatggttattgagggcaagaaggctgcccaaagacacgagactttaacaagcttgaacttagaaaagaaagctcgtctgaaagaggaagcagctatgaaggccaaaacagagtagcagaggtatccgtgttggctggattttgaaaatccaggaattatgttataacgtgcctgtattaaaaaggatgtggtatgaggatccatttcataaagtatgatttgcccaaacctgtaccatttccgtatttctgctgtagaagtagaaataaattttcttaaataatgactgtgttttattgttttgatccaagtcaagtgtagcctctcagccttttggagaaaaatgaaacaatttatttcaacttgaataccaactcttcagagaagcaggtaccatatcttacttctcttcccattatcaaagtaacctctccacaggcgaactcattttgaggagataaggaaggccagttgagtatatggcccaggtgcagcttggagggccagccttctcaaatgtcctggtgtactggtggggaggctgccccctaatagagcgagcgctgagaagcagccagaccacattctataatctttgaacatgctggcagatggaggcttttaggagaatagttttttaaacattctgacaaggtccagccaggaatttctaaggacttagaaatcccagngtcatggagttgcttggggtcaacacaagtcacctcttagcttcatgccttagaattctcaactggctgtttttcttaccacctgagaaactaaatttctcaattataaaaatctcatgtattattactgttagaagtatttgcacctcatatatatctcatttacagtttgaccttgggatatcgagttgtctcatatttaggtatgaatacaggtttctattttaaacattgattctcacatgcttcttaattattcatggatgacaagccattatagtagtcccttcttatccacggctttgttttctgtgg

SEQ ID NO: 69996 - DNA, 1229 bp, Homo sapiens
  misc_feature (25)..(25): n is a, c, g, or t
  misc_feature (42)..(42): n is a, c, g, or t
  misc_feature (914)..(914): n is a, c, g, or t
accgagctacgggtcccactcagtnaacggaccgccagtgtnggtggtgttccacaaacctacggattggcagaaaaagatcctcatatggtcaggtcgcttcaaaaaggaagatgaaatcccagagactgtctcgttggagatgcttgatgctgcaaagaacaagatgcgagtgaagatcagctatctaatgattgccctgacggtggtaggatgcatcttcatggttattgagggcaagaaggctgcccaaagacacgagactttaacaagcttgaacttagaaaagaaagctcgtctgaaagaggaagcagctatgaaggccaaaacagagtagcagaggtatccgtgttggctggattttgaaaatccaggaattatgttataacgtgcctgtattaaaaaggatgtggtatgaggatccatttcataaagtatgatttgcccaaacctgtaccatttccgtatttctgctgtagaagtagaaataaattttcttaaataatgactgtgttttattgttttgatccaagtcaagtgtagcctctcagccttttggagaaaaatgaaacaatttatttcaacttgaataccaactcttcagagaagcaggtaccatatcttacttctcttcccattatcaaagtaacctctccacaggcgaactcattttgaggagataaggaaggccagttgagtatatggcccaggtgcagcttggagggccagccttctcaaatgtcctggtgtactggtggggaggctgccccctaatagagcgagcgctgagaagcagccagaccacattctataatctttgaacatgctggcagatggaggcttttaggagaatagttttttaaacattctgacaaggtccagccaggaatttctaaggacttagaaatcccagngtcatggagttgcttggggtcaacacaagtcacctcttagcttcatgccttagaattctcaactggctgtttttcttaccacctgagaaactaaatttctcaattataaaaatctcatgtattattactgttagaagtatttgcacctcatatatatctcatttacagtttgaccttgggatatcgagttgtctcatatttaggtatgaatacaggtttctattttaaacattgattctcacatgcttcttaattattcatggatgacaagccattatagtagtcccttcttatccacggctttgttttctgtgg

SEQ ID NO: 69997 - DNA, 642 bp, Homo sapiens
tgcgtcctggggactccaacgctgggtgacattgagctcaccagcgccaccgtccccggcgaagttctgcgctggtcggcggagtagcaagtggccatggggagcctcagcggtctgcgcctggcagcaggaagctgttttaggttatgtgaaagagatgtttcctcatctctaaggcttaccagaagctctgatttgaagagaataaatggattttgcacaaaaccacaggaaagtcccggagctccatcccgcacttacaacagagtgcctttacacaaacctacggattggcagaaaaagatcctcatatggtcaggtcgcttcaaaaaggaagatgaaatcccagagactgtctcgttggagatgcttgatgctgcaaagaacaagatgcgagtgaagatcagctatctaatgattgccctgacggtggtaggatgcatcttcatggttattgagggcaagaaggctgcccaaagacacgagactttaacaagcttgaacttagaaaagaaagctcgtctgaaagaggaagcagctatgaaggccaaaacagagtagcagaggtatccgtgttggctggattttgaaaatccaggaattatgttataacgtgtaccgatcaggggatccttctagagt

SEQ ID NO: 69998 - DNA, 1399 bp, Homo sapiens
  misc_feature (1084)..(1084): n is a, c, g, or t
tgcgtcctggggactccaacgctgggtgacattgagctcaccagcgccaccgtccccggcgaagttctgcgctggtcggcggagtagcaagtggccatggggagcctcagcggtctgcgcctggcagcaggaagctgttttaggttatgtgaaagagatgtttcctcatctctaaggcttaccagaagctctgatttgaagagaataaatggattttgcacaaaaccacaggaaagtcccggagctccatcccgcacttacaacagagtgcctttacacaaacctacggattggcagaaaaagatcctcatatggtcaggtcgcttcaaaaaggaagatgaaatcccagagactgtctcgttggagatgcttgatgctgcaaagaacaagatgcgagtgaagatcagctatctaatgattgccctgacggtggtaggatgcatcttcatggttattgagggcaagaaggctgcccaaagacacgagactttaacaagcttgaacttagaaaagaaagctcgtctgaaagaggaagaaaatccaggaattatgttataacgtgcctgtattaaaaaggatgtggtatgaggatccatttcataaagtatgatttgcccaaacctgtaccatttccgtatttctgctgtagaagtagaaataaattttcttaaataatgactgtgttttattgttttgatccaagtcaagtgtagcctctcagccttttggagaaaaatgaaacaatttatttcaacttgaataccaactcttcagagaagcaggtaccatatcttacttctcttcccattatcaaagtaacctctccacaggcgaactcattttgaggagataaggaaggccagttgagtatatggcccaggtgcagcttggagggccagccttctcaaatgtcctggtgtactggtggggaggctgccccctaatagagcgagcgctgagaagcagccagaccacattctataatctttgaacatgctggcagatggaggcttttaggagaatagttttttaaacattctgacaaggtccagccaggaatttctaaggacttagaaatcccagngtcatggagttgcttggggtcaacacaagtcacctcttagcttcatgccttagaattctcaactggctgtttttcttaccacctgagaaactaaatttctcaattataaaaatctcatgtattattactgttagaagtatttgcacctcatatatatctcatttacagtttgaccttgggatatcgagttgtctcatatttaggtatgaatacaggtttctattttaaacattgattctcacatgcttcttaattattcatggatgacaagccattatagtagtcccttcttatccacggctttgttttctgtgg

SEQ ID NO: 69999 - DNA, 1399 bp, Homo sapiens
  misc_feature (1084)..(1084): n is a, c, g, or t
tgcgtcctggggactccaacgctgggtgacattgagctcaccagcgccaccgtccccggcgaagttctgcgctggtcggcggagtagcaagtggccatggggagcctcagcggtctgcgcctggcagcaggaagctgttttaggttatgtgaaagagatgtttcctcatctctaaggcttaccagaagctctgatttgaagagaataaatggattttgcacaaaaccacaggaaagtcccggagctccatcccgcacttacaacagagtgcctttacacaaacctacggattggcagaaaaagatcctcatatggtcaggtcgcttcaaaaacaagatgcgagtgaagatcagctatctaatgattgccctgacggtggtaggatgcatcttcatggttattgagggcaagaaggctgcccaaagacacgagactttaacaagcttgaacttagaaaagaaagctcgtctgaaagaggaagcagctatgaaggccaaaacagagtagcagaggtatccgtgttggctggattttgaaaatccaggaattatgttataacgtgcctgtattaaaaaggatgtggtatgaggatccatttcataaagtatgatttgcccaaacctgtaccatttccgtatttctgctgtagaagtagaaataaattttcttaaataatgactgtgttttattgttttgatccaagtcaagtgtagcctctcagccttttggagaaaaatgaaacaatttatttcaacttgaataccaactcttcagagaagcaggtaccatatcttacttctcttcccattatcaaagtaacctctccacaggcgaactcattttgaggagataaggaaggccagttgagtatatggcccaggtgcagcttggagggccagccttctcaaatgtcctggtgtactggtggggaggctgccccctaatagagcgagcgctgagaagcagccagaccacattctataatctttgaacatgctggcagatggaggcttttaggagaatagttttttaaacattctgacaaggtccagccaggaatttctaaggacttagaaatcccagngtcatggagttgcttggggtcaacacaagtcacctcttagcttcatgccttagaattctcaactggctgtttttcttaccacctgagaaactaaatttctcaattataaaaatctcatgtattattactgttagaagtatttgcacctcatatatatctcatttacagtttgaccttgggatatcgagttgtctcatatttaggtatgaatacaggtttctattttaaacattgattctcacatgcttcttaattattcatggatgacaagccattatagtagtcccttcttatccacggctttgttttctgtgg

SEQ ID NO: 70000 - DNA, 1103 bp, Homo sapiens
  misc_feature (788)..(788): n is a, c, g, or t
gcacgagatccacttaagttctttgatttgtcccatcccttcaaataaagaaatttgctatctaatgattgccctgacggtggtaggatgcatcttcatggttattgagggcaagaaggctgcccaaagacacgagactttaacaagcttgaacttagaaaagaaagctcgtctgaaagaggaagcagctatgaaggccaaaacagagtagcagaggtatccgtgttggctggattttgaaaatccaggaattatgttataacgtgcctgtattaaaaaggatgtggtatgaggatccatttcataaagtatgatttgcccaaacctgtaccatttccgtatttctgctgtagaagtagaaataaattttcttaaataatgactgtgttttattgttttgatccaagtcaagtgtagcctctcagccttttggagaaaaatgaaacaatttatttcaacttgaataccaactcttcagagaagcaggtaccatatcttacttctcttcccattatcaaagtaacctctccacaggcgaactcattttgaggagataaggaaggccagttgagtatatggcccaggtgcagcttggagggccagccttctcaaatgtcctggtgtactggtggggaggctgccccctaatagagcgagcgctgagaagcagccagaccacattctataatctttgaacatgctggcagatggaggcttttaggagaatagttttttaaacattctgacaaggtccagccaggaatttctaaggacttagaaatcccagngtcatggagttgcttggggtcaacacaagtcacctcttagcttcatgccttagaattctcaactggctgtttttcttaccacctgagaaactaaatttctcaattataaaaatctcatgtattattactgttagaagtatttgcacctcatatatatctcatttacagtttgaccttgggatatcgagttgtctcatatttaggtatgaatacaggtttctattttaaacattgattctcacatgcttcttaattattcatggatgacaagccattatagtagtcccttcttatccacggctttgttttctgtgg

SEQ ID NO: 70001 - DNA, 1298 bp, Homo sapiens
  misc_feature (983)..(983): n is a, c, g, or t
taaaagagaagtggggtggaatgagaagaaagtataagagaaaaggagaggataaagactgaaagaaaggggccagaagggaagaaaaaggagaggtgtggcacttcttacttatgcttgagtggatgagctgctgttcttggaagcgtacgaggaagttgaagcacatagaggaaactgccgtgctcagtgtccaagcagcagaggactccatgcctccatgcctctgttaacctgctgtcatcagtgcaaggtaaagacaccctcccctgaccagcatacaaatcacctgttcaaatctgttttgctttaggctgcccaaagacacgagactttaacaagcttgaacttagaaaagaaagctcgtctgaaagaggaagcagctatgaaggccaaaacagagtagcagaggtatccgtgttggctggattttgaaaatccaggaattatgttataacgtgcctgtattaaaaaggatgtggtatgaggatccatttcataaagtatgatttgcccaaacctgtaccatttccgtatttctgctgtagaagtagaaataaattttcttaaataatgactgtgttttattgttttgatccaagtcaagtgtagcctctcagccttttggagaaaaatgaaacaatttatttcaacttgaataccaactcttcagagaagcaggtaccatatcttacttctcttcccattatcaaagtaacctctccacaggcgaactcattttgaggagataaggaaggccagttgagtatatggcccaggtgcagcttggagggccagccttctcaaatgtcctggtgtactggtggggaggctgccccctaatagagcgagcgctgagaagcagccagaccacattctataatctttgaacatgctggcagatggaggcttttaggagaatagttttttaaacattctgacaaggtccagccaggaatttctaaggacttagaaatcccagngtcatggagttgcttggggtcaacacaagtcacctcttagcttcatgccttagaattctcaactggctgtttttcttaccacctgagaaactaaatttctcaattataaaaatctcatgtattattactgttagaagtatttgcacctcatatatatctcatttacagtttgaccttgggatatcgagttgtctcatatttaggtatgaatacaggtttctattttaaacattgattctcacatgcttcttaattattcatggatgacaagccattatagtagtcccttcttatccacggctttgttttctgtgg

SEQ ID NO: 70002 - DNA, 537 bp, Homo sapiens
cattttgaatttatacacagccttttatcctgagcaacttcagaaagggaaaagttaataactttctctcatgatctcattgtattactaggttggagatgcttgatgctgcaaagaacaagatgcgagtgaagatcagctatctaatgattgccctgacggtggtaggatgcatcttcatggttattgagggcaagaaggtgagaaggggtttcttctctatccagtatgtatgttctccaccaagaacctagagtaaatcagggattgacccttgtatttaccctctgagaagaggaggctactttctacattacatgagaaaagataagcaaaaaaataagacatattgggaacaagcctggaatatcatccttggggatagatagcaaatcctaactttggcgtggtgaagaaggactagattcattttgtgtaatgtaaatttaaaaagtgtttctgatgacaggtgtcataatgtaaattaagaaataggacactggcatatttaatcacccactgcatatttccagagtg

SEQ ID NO: 70003 - DNA, 201 bp, Homo sapiens
acagagacgtgtactagagatatttcattttcctcttaagaaaaacagtagcacaagcataatgatgacaactgacatttgacctcattttctggagcatcatagaaaggatgcagtggctcacacctgtaatcctagcactttgggaggctgaggcgggcagatcacttgaggtcagaagttcgaaaccaccctagccaa

SEQ ID NO: 70004 - DNA, 372 bp, Homo sapiens
gaaagaaagaaagaaagaaagaaagaaagaaagaaaatggccccatagtgcttaagtcctcagacatgtgtcctggtgctggggacagggcttctgacattctctcaggtcagtatttgcaggtcatccaccttcgacttcaacacatgtgaccagaaaccttcccaaggcagccatccactttgctgtccctccgacggccatggctgaccactgctgctgctgtgtatcctcggtgacatctggccttggcagcctatggatttctgccattctcctggcatgaaatcactccttcttgttgttttaatttgcatttcttcagttaccagcgcagttgagcatcttttcatacacttactgaccattcta

SEQ ID NO: 70005 - DNA, 502 bp, Homo sapiens
agattttttaaatctgtggtttcatacacacacatacacacacacattgttttttctttgcttatttaagaaactgagttatttgatctatagggtttccaacagtttgggttttgctgatattacttatgatgctctgtaacctgttcttctgtcacttatatttcctatgaatttgtagttatgtctagaagattgattcgattcaggttcaatgtttttggcaagaacacttcatagcaagtgccatgaatttctatcagaaggaagatactgtctgattttctctttttgtgatgttatcagtcactggaaagactgctgaccatcatttcactagaggttgcaaaataatgacttcctaattccattccatctttttatttttcttttttgagatggagtctcgctctatcacccaggctgagtgcagtgagccgagatcgcgccaatggcactccattcagcttgagtgacagaggtgagactcccatctcaaggt

SEQ ID NO: 70006 - DNA, 513 bp, Homo sapiens
actgctttctgtgattctgtagttaccgcagacagatgtgtgcacaaacggcatagactattattttgttgtctgaaattttgcaggaagatgagcgcaacatgtgataccttctatgtgtatttttcattccactttaaacacatcagtacacgcacatggagttcatctggatggctgtatagtactgtgttgtatgaataacccactctgcagctgttcccctcttggggatgatttgtttctgcttcctctctctctcatgcagggctgcagtggaatgagcctcaaagctctacttggtgttgccacattgctccccagaggcgccatagcttcaccttccctcgggactgtgtgagagttctcagttccctccatccttaccaaaacctcacacctggaatcccagcacttagggaggcagaggcaggaggatcgcttgagcccaggagttcaagacctgcctggcaacatggcaacacctcattctccacaaaatggaaaaaaaaa

SEQ ID NO: 70007 - DNA, 519 bp, Homo sapiens
gttgcctttccctatttaggaaagttttaagttgttagccagtcaggtttaatttaaattgtgaggtccagctccagccaatggagacaggacacagtagcagggacaagctgcataagggataaaaattgcttccctcctttgtttgggtgtgctgttgccattgtttcacctgtgaggagcaccctttctgcagaaagtaaaattgccttgctgaaaacactttttgtctaaatgctgatttttccttgcagtactgaggagcaagcattctgtttctaaataaacactttacttataacaagcccactttaaattatgtattagaacacattgagtccacttggaaaagccgattaagtcttgggctgctgtggttcctgagcatgagctttgttaagctttgtcaagtcttcctaaatactatgccaggagtttcttttgaccagatgattcctgcttattgctttgatcctggcttcatatctagatattatagatgtcctacactttttctga

SEQ ID NO: 70008 - DNA, 1280 bp, Homo sapiens
acctcaaactcctgcactcaaggaatcctcttgccttggcctcccaaagtgctgtgattacaggtgtgatccactataatcacacttggacaccacacttggccaaattcccattaaattttgtttacttgggtttcagtttttaaatagatctagtttgacaatcagcaggaaatccaatcatctttttaagcaatactggctaaatatctcaaaatttccaaaaattcctattttaccttcacattacaaaatatcaaaagctcaaaagatcaaattcaaaagatcagttcaaaagatcaaaagctacctcttatggtctgttccgaagtcataaataaaattttgctgtttcttaaaaactgtctatcatagccctactgctttttttacagctattataaaaataaaactttttccttaagtctaaaaatccattgcctccactcttgatcaataataaaaagctgactatatgagtttcctggtcactaaatgcctacttaccactcaccatatttttttttttttaaaaaggtgatcagccatataagctctgcttttaatgtaaagcacacaccagacatagtgctttaaaacaatcaaagtaaagctgtggttagcaaggcttccaaagcccagagttctttatagactcaaacttacacaggaaaaaaaaaaaaaaaaaaatcataaagctccatttactggaaggaccaaaaaagagtgagactgagagaatcaacaaattactaaactttagaaataactaagcctgtgcccttcttaacaaatgaggaaaggaaagcaccacaaagacaaaggttaagaaaatgactttcttaggccacacaattggtttacaccagacaacaggctagcatttgagtcttaagggtcatcctctcgttatcaccacaccacattgcttcacaaataaaaagcaaaaatccaattcacggcacaacctatactgaaatttaaaatgcaaatatcccttgattcagcaattccaatccttggtatttatctccagatacacaggagatagatgattgatagatagatagacagacagataggcagggcgcggtggttcacgcctgtaatcccagcactttgggaggccgaggcgggcagatcacctgaggtcgggagttggagaccagcctggccaacatggagaaaccctgtctctacttaaaaataaaaaattagccgggcgtggtggcgcatgcttgtaatcccagctactcgggaggctgaggcaggagaatcac

SEQ ID NO: 70009 - DNA, 359 bp, Homo sapiens
catgtggtgtttggttttctgctcttgtgttagtttgctgagaatgatggtttccagggaagccatgttttaaatagtcgagcaaccagttaaatacatttttatgttacgaatttataaatttatgttagcatcacttttcagtaataatgtagcattcattattagaaaaatattaggagagcctgttccttttaaaataataaagcaaataataaagcatttctcattttcatttctacaacatgggccaaacttttaatagatgcagcatatgaatttctttttctgcttcactttttaaatttccttcctacctttacctctggttggatgggaatctttctacaaaaagttat

SEQ ID NO: 70010 - DNA, 2693 bp, Homo sapiens
  misc_feature (687)..(687): n is a, c, g, or t
  misc_feature (703)..(703): n is a, c, g, or t
tgagagaccgtgttgcaatgtggtgggctggatttctcaccatggctgctggagaagttgccaactttggagcctacgcatttgcacctgcaacagtcgtcacgcctctgggagcgctgagtgtcctcataagtgccatcctctcctcatatttcctgagggagagtctgaacctgctggggaagctgggctgtgtgatctgtgtggccggaagcacagtgatggtgatacatgctcctgaggaagagaaggtcactaccatcatggagatggcttccaagatgaaagacacagggttcatcgtgtttgctgtgcttctgctggtgtcatgcctcatcctcatctttgtcattgccccacgttacgggcaaaggaatatcctcatctacatcatcatctgctctgtgatcggggccttctctgtggctgctgtcaaggggctgggcatcaccatcaagaacttcttccaggggctgccagttgtccggcacccgctcccctacatcctgtccctcatcctggcactgtccctcagcactcaggtcaacttcctcaacagagcactggacattttcaacacttccctggtgttccccatctactacgtgttcttcaccacggtggtcgttacctcgtccatcatcctcttcaaggagtggtacagcatgtctgctgtggacattgcangcaccctctcgggctngtcaccatcatcttgggcgtgttcatgctgcatgctttcaaagacctggacatcagctgcgccagcttgccccacatgcacaaaaacccacccccttctcccgccccggaacccactgttattagactggaagacaagaacgtccttgtggacaatatagaacttgccagcacctcatcaccagaagagaaacccaaagtatttataatccattcctgaagcttggaatatgtgagtgagaggatgagtccgatggtacagcctgccctcccaatttcaaaaccacctggttattttccagtgcaactgttaccaatgggctctcttttcttgagaagttcatttatacctcatcactgtttccaggagaaaaatctttacccaaatagcaatggtggcagaacttcctggaaacagattcagtgaccaaatacccaagtttacatcagtgcctgcaggttccctggaccttccttctcattcattctttcggtgccatctctatgccgttgggaagaagatggagtctgacccactgaatgtagcacagtccaaggacttctctaagatattggtcattggaagttccttcacaccaattctcctcctgagacggaatctccgttgttgttgttgttgttgttttctagcccaaggatgacatagagctggctcccagaggcccacagagcaattggccatgcctccctatccagagctgacagggacacaaccagtgtaaaatatcctgttgcctttgtcacttcctctttggaggcagaagcaagacctcagctgaccttcttactgtgaaagccacttgatgtctcagggaaaaatttcaaccagctcattccccgagcactccagcctggcagtcagcacctcggcatccacccagtccatcccaccatcaccccttccccctctacttacatcctaaggagtcggtcactgagacataaaggcagtaatcgcagaactggaaacaaaacaataatagagccacagccaaactctggtggccaaacccagtgttgcattttgtcttactctgaaagaagaacagcaaattcactgcttcaaagtggcctggctgccaagctagaatttggcagaacgcactttactattcctcaaggagtcaaccaacctatgatctggggaggtgggaagaggatgaggagcaaagttgggatttggcagaaggcagtcccaggctctctggatactaggggctaacttttgtgttgactctggtgctcatctgggaacttaggagaaacgagctcaggggtaatttctgggttgcagccttaaaggcttggacagctgtgaatctcaatggccaactggaggtgcagacttggcatggggtgcattctagctgttgaccagattgctaccgagtcccctcctccactgatgagctgcccacactgggaagcagcatgccctgactgttccaacaccacctgctatggggagtacctttggtcccctcacatttggccagaggcatacaaaaaaccagagcagctggagagggagataattactattccttcccttcccatctcctttctagccacaagagtgtgggggttggagaagaaccattagaaagggaaattagtgggctggtgtatctggaaagagggaagacttgatcctcagccccgaggttggtgcagggcctcccctgtgtgactctacctgcactctgtgtttatatcctgtgccctaagtgggccaagcccaggtaaattcctgctggccttggaactccaaggtttggctgaccagcagactggctccctgactcttcagcctcaaatccccagtttttgatgaatgtggatttctgtctgtaattaaaagcaatgcaacaagttggctcttgagaatggcagtaaactgagggccctaagagtgtggtctgcagggtcaagaataaagattacagattatatttacttgaaaaaaaaat

SEQ ID NO: 70011 - DNA, 3091 bp, Homo sapiens
  misc_feature (1)..(1): n is a, c, g, or t
  misc_feature (1085)..(1085): n is a, c, g, or t
  misc_feature (1101)..(1101): n is a, c, g, or t
nttctcgcgcgcgagccacgcgggggacaagtcgcggccacctgctccggagctggggagcccgggcgccgtccgcccgcgcgtcggttcgtgtgccccgggccccatggagctgcgggtcagcaacaccagctgcgagaacggttccctgctccacctctactgctcctcccaagaagtcctgtgccagattgtcaatgacctcagccctgaggtgcccagcaatgccacctttcacagctggcaggaaagaatcaggcagaactatggcttctacatcggcctgggcctggcattcctgtctagcttcctcatcggcagcagcgtcatcctcaagaagaaaggcctcttgcgactcgtggccacgggagccactcgagctgtggatggaggcttcggctacctgaaagatgcaatgtggtgggctggatttctcaccatggctgctggagaagttgccaactttggagcctacgcatttgcacctgcaacagtcgtcacgcctctgggagcgctgagtgtcctcataagtgccatcctctcctcatatttcctgagggagagtctgaacctgctggggaagctgggctgtgtgatctgtgtggccggaagcacagtgatggtgatacatgctcctgaggaagagaaggtcactaccatcatggagatggcttccaagatgaaagacacagggttcatcgtgtttgctgtgcttctgctggtgtcatgcctcatcctcatctttgtcattgccccacgttacgggcaaaggaatatcctcatctacatcatcatctgctctgtgatcggggccttctctgtggctgctgtcaaggggctgggcatcaccatcaagaacttcttccaggggctgccagttgtccggcacccgctcccctacatcctgtccctcatcctggcactgtccctcagcactcaggtcaacttcctcaacagagcactggacattttcaacacttccctggtgttccccatctactacgtgttcttcaccacggtggtcgttacctcgtccatcatcctcttcaaggagtggtacagcatgtctgctgtggacattgcangcaccctctcgggctngtcaccatcatcttgggcgtgttcatgctgcatgctttcaaagacctggacatcagctgcgccagcttgccccacatgcacaaaaacccacccccttctcccgccccggaacccactgttattagactggaagacaagaacgtccttgtggacaatatagaacttgccagcacctcatcaccagaagagaaacccaaagtatttataatccattcctgaagcttggaatatgtgagtgagaggatgagtccgatggtacagcctgccctcccaatttcaaaaccacctggttattttccagtgcaactgttaccaatgggctctcttttcttgagaagttcatttatacctcatcactgtttccaggagaaaaatctttacccaaatagcaatggtggcagaacttcctggaaacagattcagtgaccaaatacccaagtttacatcagtgcctgcaggttccctggaccttccttctcattcattctttcggtgccatctctatgccgttgggaagaagatggagtctgacccactgaatgtagcacagtccaaggacttctctaagatattggtcattggaagttccttcacaccaattctcctcctgagacggaatctccgttgttgttgttgttgttgttttctagcccaaggatgacatagagctggctcccagaggcccacagagcaattggccatgcctccctatccagagctgacagggacacaaccagtgtaaaatatcctgttgcctttgtcacttcctctttggaggcagaagcaagacctcagctgaccttcttactgtgaaagccacttgatgtctcagggaaaaatttcaaccagctcattccccgagcactccagcctggcagtcagcacctcggcatccacccagtccatcccaccatcaccccttccccctctacttacatcctaaggagtcggtcactgagacataaaggcagtaatcgcagaactggaaacaaaacaataatagagccacagccaaactctggtggccaaacccagtgttgcattttgtcttactctgaaagaagaacagcaaattcactgcttcaaagtggcctggctgccaagctagaatttggcagaacgcactttactattcctcaaggagtcaaccaacctatgatctggggaggtgggaagaggatgaggagcaaagttgggatttggcagaaggcagtcccaggctctctggatactaggggctaacttttgtgttgactctggtgctcatctgggaacttaggagaaacgagctcaggggtaatttctgggttgcagccttaaaggcttggacagctgtgaatctcaatggccaactggaggtgcagacttggcatggggtgcattctagctgttgaccagattgctaccgagtcccctcctccactgatgagctgcccacactgggaagcagcatgccctgactgttccaacaccacctgctatggggagtacctttggtcccctcacatttggccagaggcatacaaaaaaccagagcagctggagagggagataattactattccttcccttcccatctcctttctagccacaagagtgtgggggttggagaagaaccattagaaagggaaattagtgggctggtgtatctggaaagagggaagacttgatcctcagccccgaggttggtgcagggcctcccctgtgtgactctacctgcactctgtgtttatatcctgtgccctaagtgggccaagcccaggtaaattcctgctggccttggaactccaaggtttggctgaccagcagactggctccctgactcttcagcctcaaatccccagtttttgatgaatgtggatttctgtctgtaattaaaagcaatgcaacaagttggctcttgagaatggcagtaaactgagggccctaagagtgtggtctgcagggtcaagaataaagattacagattatatttacttgaaaaaaaaat

SEQ ID NO: 70012 - DNA, 1826 bp, Homo sapiens
  misc_feature (687)..(687): n is a, c, g, or t
  misc_feature (703)..(703): n is a, c, g, or t
  misc_feature (1772)..(1772): n is a, c, g, or t
  misc_feature (1775)..(1775): n is a, c, g, or t
  misc_feature (1779)..(1779): n is a, c, g, or t
  misc_feature (1790)..(1791): n is a, c, g, or t
  misc_feature (1794)..(1794): n is a, c, g, or t
tgagagaccgtgttgcaatgtggtgggctggatttctcaccatggctgctggagaagttgccaactttggagcctacgcatttgcacctgcaacagtcgtcacgcctctgggagcgctgagtgtcctcataagtgccatcctctcctcatatttcctgagggagagtctgaacctgctggggaagctgggctgtgtgatctgtgtggccggaagcacagtgatggtgatacatgctcctgaggaagagaaggtcactaccatcatggagatggcttccaagatgaaagacacagggttcatcgtgtttgctgtgcttctgctggtgtcatgcctcatcctcatctttgtcattgccccacgttacgggcaaaggaatatcctcatctacatcatcatctgctctgtgatcggggccttctctgtggctgctgtcaaggggctgggcatcaccatcaagaacttcttccaggggctgccagttgtccggcacccgctcccctacatcctgtccctcatcctggcactgtccctcagcactcaggtcaacttcctcaacagagcactggacattttcaacacttccctggtgttccccatctactacgtgttcttcaccacggtggtcgttacctcgtccatcatcctcttcaaggagtggtacagcatgtctgctgtggacattgcangcaccctctcgggctngtcaccatcatcttgggcgtgttcatgctgcatgctttcaaagacctggacatcagctgcgccagcttgccccacatgcacaaaaacccacccccttctcccgccccggaacccactgttattagactggaagacaagaacgtccttgtggacaatatagaacttgccagcacctcatcaccagaagagaaacccaaagtatttataatccattcctgaagcttggaatatgtgagtgagaggatgagtccgatggtacagcctgccctcccaatttcaaaaccacctggttattttccagtgcaactgttaccaatgggctctcttttcttgagaagttcatttatacctcatcactgtttccaggagaaaaatctttacccaaatagcaatggtggcagaacttcctggaaacagattcagtgaccaaatacccaagtttacatcagtgcctgcaggttccctggaccttccttctcattcattctttcggtgccatctctatgccgttgggaagaagatggagtctgacccactgaatgtagcacagtccaaggacttctctaagatattggtcattggaagttccttcacaccaattctcctcctgagacggaatctccgttgttgttgttgttgttgttttctagcccaaggatgacatagagctggctcccagaggcccacagagcaattggccatgcctccctatccagagctgacagggacacaaccagtgtaaaatatcctgttgcctttgtcacttcctctttggaggcagaagcaagacctcagctgaccttcttactgtgaaagccacttgatgtctcagggaaaaatttcaaccagctcattccccgagcactccagcctggcagtcagcacctcggcatccacccagtccatcccaccatcaccccttccccctctacttacatcctaaggagtcggtcactgagacataaaggcagtaatcgcagaactggaaacaaaacaataatagagccacagccaaactctggtggccaaacccagtgttgcattttgtcttactctgaaagaagaacgnatnctgntcaagggcggnncantaattgggaagctttatctcggggacacactg

SEQ ID NO: 70013 - DNA, 1482 bp, Homo sapiens
agcccgcggggtgaaatgacttgctcatggtctggtagctaatcgcagatctgctctctaactcctacttccaagacccaggaatctacgggtgttggagaagacccctcctgaaatcctccagaagagctttttgagggagcttgtggctcctgttcacccagccccggttcacttcttcaactgagatggacatgatataatctccattgagtcaaagaatggcatctagtcctgagcttcccaccgaagatgaacagggttcctggggcatcgacgatctccatatttcattgcaagctgaacaggaagacacccagaagaaagccttcacgtgctggataaactcacagttggccaggcacacttctccctcagttatatccgacctattcacagacattaaaaaggggcatgtcctcctggatctgctagaagtactttctgggcaacagttgcctcgggataaaggatctaataccttccagtgtagaatcaatatagaacatgccttgacattcctaagaaaccgatcaattaagctaataaatattcatgttactgatatcattgatggaaacccatccattatccttggcctaatttggacaattatcctgcactttcatattgagaagcttgcccagactctttcttgcaattacaatcagccttccctggatgatgtgagtgtggttgactcatctcctgcctcaagtcctccagctaagaaatgctctaaagtgcaagcaagatggcaaatgtctgcaagaaaggcccttcttttgtgggctcaggaacaatgcgccacctatgagtctgtcaatgtgaccgattttaagtcaagttggagaaatgggatggcttttttggccatcattcatgccttgcgaccagacctaattgacatgaagagtgtgaagcatagatccaacaaagacaatctgagagaggccttcagaattgcagaacaagaattaaaaatccccagattgctggaaccagaagatgtggatgttgttgatcctgatgaaaagtccatcatgacctatgtggcacagtttctgcagtattccaaagatgcccctgggactggagaggaggctcagggaaaggtgaaagatgctatgggctggttaactctgcaaaaggaaaaactacagaagttgctaaaggattcagagaatgatacctactttaaaaagtataatagcctgctgtcctttatggagtcattcaatgaagaaaaaaagtcctttttggatgtcctgtcaataaaacgggatctggatgagctggacaaggatcatttacagttgagagaagcctgggatggcctcgatcaccagattaatgcatggaaaataaagctaaattatgccttgcccccacccctccatcaaactgaagcttggctccaggaggtagaagagcttatggatgaagatttgtcagcctcccaggatcactctcaagccgtga

SEQ ID NO: 70014 - DNA, 427 bp, Homo sapiens
agaatggcatgaacttgggaggtggagcttgcagtgagctgacatcgtgccactgcactccagcctgggcgacagagcaagactccatctcagaaaaaaaaaaaaaaaaacagtccgttttagatttcccaaaactgagaaaaatatctgagaaacctttccagctccttcatggttcactaagaaatcaacaatatcatgaagactacttacatttccaaagtatcttgaaatacggtgtcctagatagcaggcacaagtaatatggttaccagaaagatgtactcacccaccacaaatttgtaaattggcactctagatcaatgctgtcagtagaacttttggcaataatagaaacgttcgacatgtgcactgtccaatagatatcttgtagccaccaggggcgtctaagcatttgaaatgtagt

SEQ ID NO: 70015 - DNA, 122 bp, Homo sapiens
tcttaataaatcagtgttgttcttctctgttaattatatattggggtttggggagattagatttcagaagcagggaaagaccttctttacaagcagttgagtggtagactacaacttgtaaa

SEQ ID NO: 70016 - DNA, 217 bp, Homo sapiens
aatagcgcagataatgggagcaatacaaagcccatcacggctacaacagaaggactcagaaggaaatctttgtgaaacaagttaatattggccttgaataccatataagaataaaaagacagtcatttgtgttctcacttctcatattttagagtagagaatatgaagtgaacaatatttttttttttaaaaaggaagggtctcaagactttttgct

SEQ ID NO: 70017 - DNA, 715 bp, Homo sapiens
ctgtttgggttttgtagagtctggtcaacattcctaaggagaggagggatgttgcagacagcagcagttattttagcactggtatgcatttttaggtcactgcatgctacaatgcactttgtggtcacatacccagaaaacattttcacaacaggtaactccacatcttgttttctacttaatttaagggactaatagatttagtttgttttggacacatgttatatagagatgtaattatgtgatatcaacagctgaaaggggtgggggacagggcagttaaggagcagtttttgtatctttttcaaattaagctgctataaatttatgttagaagcttccttatttaggatgtcaaatgtaatcccatgataacacaaagaaaatagctaaaagaagataagaaaggaagttaaaagtttcattacaaaaatcaactaaacatgaaagaagacagataagaaatgaggaaccaaaaaaagctgcaatatatatagaaaatagcaaaatgacagaattccctcatcagtaattattttaaatgtaaatgggttaaacttcagtgaaaagacagagattagaagaatgggttttaaaaaaccatgattcaagactcctgtgccacataacatttcagtcaatgatggaatgcacataggatggtaatacaatggtaagattataataacgtatttttactatatattttctatgt

SEQ ID NO: 70018 - DNA, 442 bp, Homo sapiens
gcgctgcagccaggacagcccatggcatgaccacgaggaagctgctataaatttatgttagaagcttccttatttaggatgtcaaatgtaatcccatgataacacaaagaaaatagctaaaagaagataagaaaggaagttaaaagtttcattacaaaaatcaactaaacatgaaagaagacagataagaaatgaggaaccaaaaaaagctgcaatatatatagaaaatagcaaaatgacagaattccctcatcagtaattattttaaatgtaaatgggttaaacttcagtgaaaagacagagattagaagaatgggttttaaaaaaccatgattcaagactcctgtgccacataacatttcagtcaatgatggaatgcacataggatggtaatacaatggtaagattataataacgtatttttactatatattttctatgt

SEQ ID NO: 70019 - DNA, 588 bp, Homo sapiens
cacctgagagcaggaagtcctggtacgtaaaaactgaatgtagatgtagggaattgccctcctacgaactaagtaaaaacagattcgaaactttatcctaattggaattaaactactgcattttaagtcaaaggtgtggaggtaaatgaacaaccaaatgagaccaaggaaaggctattattcagagcttgcatacaaaggaatcctccaccccaccacaccactagcattttgacggaaacataaagattctgtggatgaataattcagaaacgttccagttggatggactgattcagggtctctcatgatgctgcagccaaggtaaaaataaagagatagaatatggacacttgggaaataataagaaaagtgagacagcactgctactgatttaaagtcagaaaaagaccactcctgggagaaacacaagttacatggtattgctcttctcacatgaaccatctccacaaccaacgtgccctgaatcccagtgcttggccaaccccatcactagtaatcaaccatcatcccaagaagcgaacataatcagaagctaaatcaaataaatatgtcttactctctgtt

SEQ ID NO: 70020 - DNA, 765 bp, Homo sapiens
cacctgagagcaggaagtcctggtacgtaaaaactgaatgtagatgtagggaattgccctcctacgaactaagtaaaaacagattcgaaactttatcctaattggaattaaactactgcattttaagtcaaaggtgtggaggtaaatgaacaaccaaatgagaccaaggaaaggctattattcagagcttgcatacaaaggaatcctccaccccaccacaccactagcattttgacggaaacataaagattctgtggatgaataattcagaaacgttccagttggatggactgattcagggtctctcatgatgctgcagccaaggtttctattacatgaagtaaagcatctgtaacctagaaatgatgggtaacgttcaaagctgatatcccagatgattctgctatgacagacttcccctgcctattgaaatcttaaggttgtctaaccccaaaattctagactatgaaaagttgtattgtaattttaaattcaggctacagaaataaaaacaaacaatctttaggaagctaaactaaggtataaccattttccaaaattcccgatttcatctattttagaaaaagaccactcctgggagaaacacaagttacatggtattgctcttctcacatgaaccatctccacaaccaacgtgccctgaatcccagtgcttggccaaccccatcactagtaatcaaccatcatcccaagaagcgaacataatcagaagctaaatcaaataaatatgtcttactctctgtt

SEQ ID NO: 70021 - DNA, 489 bp, Homo sapiens
cagacacttggggaaggggaacatctaaataaacacacctgcccctgcagcaagtgctgctgcgggaataaaggagtgaaggaaggagactgtgtatttccagtcgcatgatcagaagagcctgtctgaggcagagcgggagtttgtcgggggaaggacattggtagcacaaggaacaaggccaggtctaggatggggacagactgttgacaggagtcttggtacagtggggcacacgcctcaagggtttgggaaatacagtggtgttttggttgccggagggttgaaagctggtccaggaaagcaacttgcaagaggcagtttctccattgctcttgaagggaggagtacctcttacccaggcccagggatggtgagaggagggtgttccaggcagaagaaacagcctgtgcacaggcccaaagcagttgagggtggagagacatgcacagtgtggccgtggtatagactggatgtggtggtggggat

SEQ ID NO: 70022 - DNA, 1613 bp, Homo sapiens
  misc_feature (304)..(304): n is a, c, g, or t
  misc_feature (580)..(580): n is a, c, g, or t
  misc_feature (586)..(586): n is a, c, g, or t
gttataagggacttgtatccataatttttacaagacacttacagcttaataataaaaagatgaataattaataagatgagaaaagcacttgaatagacctttctccaaagaagatacacaaaagtcctataaggacacaaaaaatttcttaacattattagtcattcgggaaatgcaagtcaaaatcacagttaacatactacctcacacccaccatattgactagaataaaacataatagacaataacaagtattggcaaggatatagagaaatttgaacctttacacatagctggtgagatnggaaaatggtgtgccttctttggaaaacagtttggcaactcctcaaaatgttaaacatggggttaccgcgttgtcagaggtgtgtgagccagagcaaccccatcttgagtagaagctgggtaaaatgagcctaaaacctactgggctgcattcccagacagttaaggcactctaattcacagaataagataggaagtcagcacaagatgcagatcataaagaccttgctaataaaacaggtttcagtaaagaacccagctaaaacccaccaaaacnaatacnatatggtgacaagagtgacctctggtcgtcctcactgctatactcccaccagcaccatgacagtttacaaatgccacggcaacatcaggaagttaccctaaatggtgtaaaaacggaaggtatgaataagccaccccttgcttagcatataatcaggaaataaataaccatcagtatgggcaaccagcagccctgggggctgctctgtctatggagtagccattctttagtcctttactttcttaatacacttgctttcactttactctgtggactcgccttgaattctttcttgtgtgatatccaagaaccctctcttggggtctggatcaggacccctttcttgtaactgtatgacctagcaattctgctcctaggtgcatacccaagagaattggaaacacatgtctatacaaaaacttacacacaaaggttgatagcattattattcatgatattcaaaaagtgcaaacaacccaagtggtcatcagctgatggatgggtaaataaaatgtggtatattcatacaataaaatattacttgactttaaaatgggtgaaggacttgatatatgctacaacatggatgactttgaaagcattttgttaagtaaataaaagtaaaatgacacatattgtgtgatttcatttacatgaagtatataaaacagacaaatctatatatagagaaagtaaattagtgaaggaggacagtggagaaggtgagtgactattaagagtgtgggctgggcacggtggctcatgcttataatcccagcacttcgggaggctgaggcaggcggatcacctgaagtcagaagtttgagagcagcctgcccaacatggtgaaaccccatccctactaaaaatacaaaaaattagccaggtgtggtggcacatgcctgtagtcctacctactcaggaggctgagggaagagaattgcttgaacctgggagacagaggttgcagcgggccaagatcgtgccactgcactccagcctgagcaacagagcaagactccatctc

SEQ ID NO: 70023 - DNA, 906 bp, Homo sapiens
gagaagggcagccggaacagaagactcacaccacctttaaatgcctcagctgcgtgaaagttctaaaaaatgttaagtttatgaatcacgtgaagcatcatttggaatttgagaagcagaggaacgacagctgggaaaaccacaccacctgccagcactgccaccggcagtttcccactcccttccagctacagtgtcacatcgaaaatgtccacactgcccaggagccctctactgtctgtaaaatctgtgaattgtcatttgaaacagatcaggtcctcttacaacacatgaaggaccatcataagcctggcgaaatgccctatgtgtgccaggtttgccattatagatcgtcggtctttgctgatgtagaaacacattttagaacgtgccatgaaaacacaaagaatttgctttgtcccttttgtctcaaaattttcaaaacagcaacaccatacatgtgtcattataggggccactggggaaagagtgcacaccagtgttccaagtgccggctacagtttttaactttcaaggagaaaatggagcacaagacccagtgtcatcaaatgtttaagaagcctaagcaactagaaggattacctcctgaaacaaaagttactattcaagtgtcgctggaacctcttcagccaggatcagtggatgtagcatccataactgtgagcacatctgactctgaaccatcactccccaggtctaaaagcaaaatttcaaaaaagtcccattaattctagtttcagtaaatctaaagcaagtatttcaaaccaaattaaaaaacctcataaaacaaaaaatacaaaccatacattattcagtagcaccaaaaatagtgaaactagtggattatatatgactttttaaacaagattcaggatatatattatt

SEQ ID NO: 70024 - DNA, 454 bp, Homo sapiens
gggaaaaaaccagtacagtgaatttcaaattttaaaacttgtgctctatgaggccagatgtggtgggtcatgcctgtaatcccaacacttagagaggcagaggctggaggatcacttgagcccaggagttcaagaccaacctggacaacataataggaccctgtccttacaaaaaacaaaaacaaaaacaaaagccaggaatggtggtacaagcctgtaaccaaagctacttgggaggctgaagcagaaggatcacttgagaccatgatagaaggatcacagtgagccatgatagcacaactgcacgccagcctgggtgacagagtgagactatcttcaaaacaatgaaaaaaaaaaaacagggagtatgggagggaacctgtgctctgtggccaggtatgacggtatgcaccactacactacagcctgggcaacactgcaggaccctgtcttt

SEQ ID NO: 70025 - DNA, 3074 bp, Homo sapiens
  misc_feature (2)..(3): n is a, c, g, or t
  misc_feature (604)..(604): n is a, c, g, or t
  misc_feature (968)..(968): n is a, c, g, or t
  misc_feature (1430)..(1430): n is a, c, g, or t
  misc_feature (1484)..(1484): n is a, c, g, or t
  misc_feature (1620)..(1620): n is a, c, g, or t
  misc_feature (1631)..(1631): n is a, c, g, or t
  misc_feature (1911)..(1911): n is a, c, g, or t
  misc_feature (2844)..(2844): n is a, c, g, or t
  misc_feature (3033)..(3033): n is a, c, g, or t
tnncgataaatttagatttcatagtattccattgtctagctgtctggttattataggaacttaagtctttcaatttattatataaaagatatgattttagagtggaattgctggatgaaaagggatgggcatttttaagacttatagtacatattgtacatatagtacttttagcacacttcttcagaaagattatactaattgttaaatttaattattattcataatagcattgatagtgttatttcataaaggataattatactccactgaaggattttgtatttgtattgaagttttcattcattgacagtggataaaagataaattatgcagtttttcttgggcctgtttatggcaattaccttgtgtccctgaaaattgtgtccctagtgcatgaacatgctgttataggttggcattgccaaaaataccatttatccatgagaaaataatgtctaccttacaagtttctgagaagtaaaataacccatatgatgcagttgtcataaggtcttgctcatggaaaatgcccaggaaatgatcattgaacttagttcaaagaaatagtgttcttttattaccacttaaggagcaaatgctnttaaaaagtggattattatgttaaagtctaatgaattgaggtactcaagttacttccactgatttttttttttttggagggttttttttaatcattcataatgtttttatataggcccttttacctgttgcccctttctccatttagccatttcaacagtctgatatatattctttcacataaccatttataaaaatagacacatacatatagggatttttgattatgcttttgtaaataaaaggcctattatatttttcattttccttttttccccataatacactgtcaagctagatcaaactacaatagttatacatctacatagcagtccctaaacaatattaatttccttttcctttantaattgctttaaaattcattatatttgttactatggagttatttctggatattggtgccattactaagtcttcttaagccatcttgctcacacatgaattcaaaatggtgtttggaaataatgtattatatctggagatatacaatgatcttattgtatgtcttttttaaaactagaatttttttaaggattattcaaatggagtaacctctccctgtctttaaggtcatgtttctgaaaatcccaaaggtaaaatgtattaaagaagttgaagactaggttgaaataaggattacgccgaatctatgaaggcctgtgtatgtgtattctattgtcactaaaaacagtgtgtggcacctaaatatacagaatattaataaattttgatgccttttaaatttgattaatacagtttaattttcatttatcatctctgattctagaacccttgaagttttcagnaaggtccttataaacctttttttccttatttcagctcatgcatactatgaaatntttatttctcctgaactttttcttgtctccaagtgtgcactatttttctgatttttatgaccagagttgattctcactgctagtttccacattaatttagaagagcactggtacttgtgttagactgcttggattnagatttcaacngaaccaactactagctgtgtggcctttagcaaattacttaacactatgccacagtttcctcatttgcaaaagtagggttatagttcttattttttctggtggttgcaatgctgaatgagccattatagcatatattaagtcattatagcatttcttggtgcgtggttggtacttactcaatttagattattctgcattgctgaggagatatttctcaaatacacattcctagctttgcttataaataatatgcccaagcttaggacagaagaattaatgngatttattagggagggacgcaagggtagatagttccagggatggggatataaatgagatctctcagagagagtttgggataaatgaaagagaagtcctagggcagaatggtaaaaaaacaccaatgtatttgtttagtgtgggtttttttccttgttattttttgaaggttgtatactgttttcattctgtaaagcaaaaaggccttgttttgtaggctgtcctatttctagtccaacaaagttttcagtcacagtaataatattttcaaataaaatataaatctcctttttaaaggaaaattattagtaacaagaattcttagtgctatagaatggtcataatatgataatttaaattcattgcatgtattagattataaattttgcatatactacctcaacgtatataatccaatgtaatatgtagattgaatttatttaaatgtctttgttttaaaaaattgctggttcagtgttatttacataaaattgaaatctggtctcagtgaatcttttaggttgttttcttctagtgtgataggaggctggatgctttataatggatttgatgaggcaagttatgctataaagctgctttaaagtgagaaaataattcataacaaataaatcacagccaatgcaacagtgctattgaaggaagtggtttattctccatagccgaggtggtgtactttctgaatgtacatctggtaactagaatttaaatgtttagtcagattcagtgaaatgatttcatattttaagtagtgtttttttcattggaaatttagcactgatttctttgaaattttgaaaatcttaatttgtgtgtgtgtacgtgtatctgtatgtactggcatattgaaacatttataggaaaaatagcaattgatggcaaaagtgtacgtacctggaaaacccctgtttttttntttgtttgtttgtttgtttttaaataagcttgaatgttgttttcaccaaggcattttgatctgaatgactttaaattgtgaatttgtcttagattaaaaatctgttgtgaatttgttttgaatgtttctaagccatataaatataaaaaaattccccattttgaaatctttcagatcaccttttcacantgtcagagtaatatattaatgtaataaaagggaaaaaggtc

SEQ ID NO: 70026 - DNA, 3561 bp, Homo sapiens
  misc_feature (2)..(3): n is a, c, g, or t
  misc_feature (604)..(604): n is a, c, g, or t
  misc_feature (968)..(968): n is a, c, g, or t
  misc_feature (1430)..(1430): n is a, c, g, or t
  misc_feature (1484)..(1484): n is a, c, g, or t
  misc_feature (1620)..(1620): n is a, c, g, or t
  misc_feature (1631)..(1631): n is a, c, g, or t
  misc_feature (1911)..(1911): n is a, c, g, or t
  misc_feature (2844)..(2844): n is a, c, g, or t
  misc_feature (3033)..(3033): n is a, c, g, or t
tnncgataaatttagatttcatagtattccattgtctagctgtctggttattataggaacttaagtctttcaatttattatataaaagatatgattttagagtggaattgctggatgaaaagggatgggcatttttaagacttatagtacatattgtacatatagtacttttagcacacttcttcagaaagattatactaattgttaaatttaattattattcataatagcattgatagtgttatttcataaaggataattatactccactgaaggattttgtatttgtattgaagttttcattcattgacagtggataaaagataaattatgcagtttttcttgggcctgtttatggcaattaccttgtgtccctgaaaattgtgtccctagtgcatgaacatgctgttataggttggcattgccaaaaataccatttatccatgagaaaataatgtctaccttacaagtttctgagaagtaaaataacccatatgatgcagttgtcataaggtcttgctcatggaaaatgcccaggaaatgatcattgaacttagttcaaagaaatagtgttcttttattaccacttaaggagcaaatgctnttaaaaagtggattattatgttaaagtctaatgaattgaggtactcaagttacttccactgatttttttttttttggagggttttttttaatcattcataatgtttttatataggcccttttacctgttgcccctttctccatttagccatttcaacagtctgatatatattctttcacataaccatttataaaaatagacacatacatatagggatttttgattatgcttttgtaaataaaaggcctattatatttttcattttccttttttccccataatacactgtcaagctagatcaaactacaatagttatacatctacatagcagtccctaaacaatattaatttccttttcctttantaattgctttaaaattcattatatttgttactatggagttatttctggatattggtgccattactaagtcttcttaagccatcttgctcacacatgaattcaaaatggtgtttggaaataatgtattatatctggagatatacaatgatcttattgtatgtcttttttaaaactagaatttttttaaggattattcaaatggagtaacctctccctgtctttaaggtcatgtttctgaaaatcccaaaggtaaaatgtattaaagaagttgaagactaggttgaaataaggattacgccgaatctatgaaggcctgtgtatgtgtattctattgtcactaaaaacagtgtgtggcacctaaatatacagaatattaataaattttgatgccttttaaatttgattaatacagtttaattttcatttatcatctctgattctagaacccttgaagttttcagnaaggtccttataaacctttttttccttatttcagctcatgcatactatgaaatntttatttctcctgaactttttcttgtctccaagtgtgcactatttttctgatttttatgaccagagttgattctcactgctagtttccacattaatttagaagagcactggtacttgtgttagactgcttggattnagatttcaacngaaccaactactagctgtgtggcctttagcaaattacttaacactatgccacagtttcctcatttgcaaaagtagggttatagttcttattttttctggtggttgcaatgctgaatgagccattatagcatatattaagtcattatagcatttcttggtgcgtggttggtacttactcaatttagattattctgcattgctgaggagatatttctcaaatacacattcctagctttgcttataaataatatgcccaagcttaggacagaagaattaatgngatttattagggagggacgcaagggtagatagttccagggatggggatataaatgagatctctcagagagagtttgggataaatgaaagagaagtcctagggcagaatggtaaaaaaacaccaatgtatttgtttagtgtgggtttttttccttgttattttttgaaggttgtatactgttttcattctgtaaagcaaaaaggccttgttttgtaggctgtcctatttctagtccaacaaagttttcagtcacagtaataatattttcaaataaaatataaatctcctttttaaaggaaaattattagtaacaagaattcttagtgctatagaatggtcataatatgataatttaaattcattgcatgtattagattataaattttgcatatactacctcaacgtatataatccaatgtaatatgtagattgaatttatttaaatgtctttgttttaaaaaattgctggttcagtgttatttacataaaattgaaatctggtctcagtgaatcttttaggttgttttcttctagtgtgataggaggctggatgctttataatggatttgatgaggcaagttatgctataaagctgctttaaagtgagaaaataattcataacaaataaatcacagccaatgcaacagtgctattgaaggaagtggtttattctccatagccgaggtggtgtactttctgaatgtacatctggtaactagaatttaaatgtttagtcagattcagtgaaatgatttcatattttaagtagtgtttttttcattggaaatttagcactgatttctttgaaattttgaaaatcttaatttgtgtgtgtgtacgtgtatctgtatgtactggcatattgaaacatttataggaaaaatagcaattgatggcaaaagtgtacgtacctggaaaacccctgtttttttntttgtttgtttgtttgtttttaaataagcttgaatgttgttttcaccaaggcattttgatctgaatgactttaaattgtgaatttgtcttagattaaaaatctgttgtgaatttgttttgaatgtttctaagccatataaatataaaaaaattccccattttgaaatctttcagatcaccttttcacantgtcagagtaatatattaatgtaataaaagggaaaaaggtcactcatgattttcttaccttgagataacataatttatctttgccttattttttcagtttttgtctatgcgtttctattctttatgttgttaaggttatattatacatacatttctgtatcctatattttcctccttttctttatatatttttaaatgtggaataaatttttagatttcaatttgattcagaatacttccaaaatattgattaagagttataaaggcatttttaatttaaaacaaaaactagtgttctacattagtgtttcacatctctagagatactaattaaaattgaaattacttaatgccacaagtttacttttaaaaattctcccttgtaatatttcttacattcagttgaggattttatgtgaagaaagaaaccgaacttgatggtttggattgcatttaagaacattatccctaggcaacagtttttattaactagtaccctattttatgtcaatgatagtattaaaatgt

SEQ ID NO: 70027 - DNA, 1760 bp, Homo sapiens
  misc_feature (1712)..(1712): n is a, c, g, or t
  misc_feature (1760)..(1760): n is a, c, g, or t
gtcgaccctttccacccctggaagatggaaataaacctgcgtgtgggtggagtgttaggacaaaaaaaaaaaaaaaaaagtctagagccaccgtccagggagcaggtagctgctgggctccggggacactttgcgttcgggctgggagcgtgctttccacgacggtgacacgcttccctggattggcagccagactgccttccgggtcactgccatggaggagccgcagtcagatcctagcgtcgagccccctctgagtcaggaaacattttcagacctatggaaactacttcctgaaaacaacgttctgtcccccttgccgtcccaagcaatggatgatttgatgctgtccccggacgatattgaacaatggttcactgaagacccaggtccagatgaagctcccagaatgccagaggctgctccccccgtggcccctgcaccagcagctcctacaccggcggcccctgcaccagccccctcctggcccctgtcatcttctgtcccttcccagaaaacctaccagggcagctacggtttccgtctgggcttcttgcattctgggacagccaagtctgtgacttgcacgtactcccctgccctcaacaagatgttttgccaactggccaagacctgccctgtgcagctgtgggttgattccacacccccgcccggcacccgcgtccgcgccatggccatctacaagcagtcacagcacatgacggaggttgtgaggcgctgcccccaccatgagcgctgctcagatagcgatggtctggcccctcctcagcatcttatccgagtggaaggaaatttgcgtgtggagtatttggatgacagaaacacttttcgacatagtgtggtggtgccctatgagccgcctgaggttggctctgactgtaccaccatccactacaactacatgtgtaacagttcctgcatgggcggcatgaaccggaggcccatcctcaccatcatcacactggaagactccagtggtaatctactgggacggaacagctttgaggtgcgtgtttgtgcctgtcctgggagagaccggcgcacagaggaagagaatctccgcaagaaaggggagcctcaccacgagctgcccccagggagcactaagcgagcactgcccaacaacaccagctcctctccccagccaaagaagaaaccactggatggagaatatttcacccttcagatccgtgggcgtgagcgcttcgagatgttccgagagctgaatgaggccttggaactcaaggatgcccaggctgggaaggagccaggggggagcagggctcactccagccacctgaagtccaaaaagggtcagtctacctcccgccataaaaaactcatgttcaagacagaagggcctgactcagactgacattctccacttcttgttccccactgacagcctcccacccccatctctccctcccctgccattttgggttttgggtctttgaacccttgcttgcaataggtgtgcgtcagaagcacccaggacttccatttgctttgtcccggggctccactgaacaagttggcctgcactggtgttttgttgtggggaggaggatggggagtaggacataccagcttagattttaaggtttttactgtgagggatgtttgggagatgtaagaaatgttcttgcagttaagggttagtttacaatcagccacattctaggtagggncccacttcaccgtactaaccagggaagctgtccctcactgttgaattn

SEQ ID NO: 70028 - DNA, 1356 bp, Homo sapiens
gtcgaccctttccacccctggaagatggaaataaacctgcgtgtgggtggagtgttaggacaaaaaaaaaaaaaaaaaagtctagagccaccgtccagggagcaggtagctgctgggctccggggacactttgcgttcgggctgggagcgtgctttccacgacggtgacacgcttccctggattggcagccagactgccttccgggtcactgccatggaggagccgcagtcagatcctagcgtcgagccccctctgagtcaggaaacattttcagacctatggaaactacttcctgaaaacaacgttctgtcccccttgccgtcccaagcaatggatgatttgatgctgtccccggacgatattgaacaatggttcactgaagacccaggtccagatgaagctcccagaatgccagaggctgctccccccgtggcccctgcaccagcagctcctacaccggcggcccctgcaccagccccctcctggcccctgtcatcttctgtcccttcccagaaaacctaccagggcagctacggtttccgtctgggcttcttgcattctgggacagccaagtctgtgacttgcacgtactcccctgccctcaacaagatgttttgccaactggccaagacctgccctgtgcagctgtgggttgattccacacccccgcccggcacccgcgtccgcgccatggccatctacaagcagtcacagcacatgacggaggttgtgaggcgctgcccccaccatgagcgctgctcagatagcgatggtctggcccctcctcagcatcttatccgagtggaaggaaatttgcgtgtggagtatttggatgacagaaacacttttcgacatagtgtggtggtgccctatgagccgcctgaggtctggtttgcaactggggtctctgggaggaggggttaagggtggttgtcagtggccctccaggtgagcagtaggggggctttctcctgctgcttatttgacctccctataaccccatgagatgtgcaaagtaaatgggtttaactattgcacagttgaaaaaactgaagcttacaggcgtgagccaccgcacccggcctgcctagcctacttttattttatttttaatggagacagcatcttgctctgttgcccaggctggattacagtgatgtgatcatagctcattataccctcctgggctcaagcaatccccctaactctgcctccccagtagctaggaccacaggcatacaccaccatacccagctaatttttaaaattttttgtagatagatggaggctgcagtgagctgtgaaagcatcactgtactcctatttgcccggcggaacaagtccctatcgaaata

SEQ ID NO: 70029 - DNA, 1354 bp, Homo sapiens
gtcgaccctttccacccctggaagatggaaataaacctgcgtgtgggtggagtgttaggacaaaaaaaaaaaaaaaaaagtctagagccaccgtccagggagcaggtagctgctgggctccggggacactttgcgttcgggctgggagcgtgctttccacgacggtgacacgcttccctggattggcagccagactgccttccgggtcactgccatggaggagccgcagtcagatcctagcgtcgagccccctctgagtcaggaaacattttcagacctatggaaactacttcctgaaaacaacgttctgtcccccttgccgtcccaagcaatggatgatttgatgctgtccccggacgatattgaacaatggttcactgaagacccaggtccagatgaagctcccagaatgccagaggctgctccccccgtggcccctgcaccagcagctcctacaccggcggcccctgcaccagccccctcctggcccctgtcatcttctgtcccttcccagaaaacctaccagggcagctacggtttccgtctgggcttcttgcattctgggacagccaagtctgtgacttgcacgtactcccctgccctcaacaagatgttttgccaactggccaagacctgccctgtgcagctgtgggttgattccacacccccgcccggcacccgcgtccgcgccatggccatctacaagcagtcacagcacatgacggaggttgtgaggcgctgcccccaccatgagcgctgctcagatagcgatggtctggcccctcctcagcatcttatccgagtggaaggaaatttgcgtgtggagtatttggatgacagaaacacttttcgacatagtgtggtggtgccctatgagccgcctgaggtctggtttgcaactggggtctctgggaggaggggttaagggtggttgtcagtggccctccaggtgagcagtaggggggctttctcctgctgcttatttgacctccctataaccccatgagatgtgcaaagtaaatgggtttaactattgcacagttgaaaaaactgaagcttacaggcgtgagccaccgcacccggcctgcctagcctacttttattttatttttaatggagacagcatcttgctctgttgcccaggctggattacagtgatgtgatcatagctcattataccctcctgggctcaagcaatccccctaactctgcctccccagtagctaggaccacaggcatacaccaccatacccagctaatttttaaaattttttgtagatagatggaggctgcagtgagctgtgatcacaccactgtgctccagcctgagtgacagagcaagaccctatctcaa

SEQ ID NO: 70030 - DNA, 321 bp, Homo sapiens
ttttcttttctctggctttgggacctcttaacctgtggcttctcctccacctacctggagctggagcttaggctccagaaaggacaagggtggttgggagtagatggagcctggttttttaaatgggacaggtaggacctgatttccttactgcctcttgcttctcttttcctatcctgagtagtggtaatctactgggacggaacagctttgaggtgcgtgtttgtgcctgtcctgggagagaccggcgcacagaggaagagaatctccgcaagaaaggggagcctcaccacgagctgcccccagggagcactaagcgag

SEQ ID NO: 70031 - DNA, 234 bp, Homo sapiens
ttaaaattcaagatacccttcagtgtcccagatttaggaagactccccagagcagaggatgaaggacatgtgagttagacagagggaacagcttgggcgtcacgtgagaggaccacagctcaccaagagatgcagatttgatactcagactttacattcaggatcgtaggaatcaattctgctgtcggcacagtctcaggccgtctgtgtgaagttgagagaagccacagctgg

SEQ ID NO: 70032 - DNA, 405 bp, Homo sapiens
attaattccacaggtcagtttctctgaaacattttttcactaaattctaagtcttcctggagttgcaagtgcctatctcctagacaaggcaattactcaccaactaaaatcactgtcaatctgagatttcggctgggcatgagaccatggtcaggggatgctttgaacagcctctgaggaaattagtgagtttgaaaaatggaaagatttttattactcacttggcagtaaaacctgatggggacagacgtcaggctgtttaagatcctcagaagaaaaagttgatagtgtgaatattcctaaatttgccacacgaagatgtacatgtgattataaggtgctgttgcagaagcccctgggggtgttatgggatatacactatatgggccactttaccttcctaaa

SEQ ID NO: 70033 - DNA, 2375 bp, Homo sapiens
  misc_feature (340)..(340): n is a, c, g, or t
atacatacccaaaagaaaggcagagactcaaaacatgcttacatgcgggtgttcctagtaattcacaacagacaaacattagatagaaacaatcaagtgttcattagcagatgaaaggatacgacgtgatacatagactaacaatacaatattcagccttcaaagggagtgaaattctgatacatgctacaacatggatgaaccttgagaatattacatgaaataagccaggagcaggacacatattttatgattccacatatactagggtacccagaatggtcaaattcatacagacagaaactggaatagtagttaccagggactgtttggtggtgtncggggtgggagtgggtgttaagtttctgtttgggaagatgaaaatgttctggagacgtatagtggtgatagttgcacagaaatgtggatgtacttaaagacactgcattatacttgtaaaatggttaaaatagtaagtttgatgctgcgtatactttaccagggtaaaaacaatgcaagagaaagattgccagtgcatgctgaaaattaagattactaggaggatatttttcactcttgagactaatgacaacaattgaatgttgggaagcacagtatgtgggagtgtgtaagtgggtcttgctagtaggggatgtcactttagcaaaatctgttggaagttgcttatcttttgtgtgtattaacatgaagattttctcagttgaataaaacaagttaaagaatactttctttgttgtaaaacagcatatttatatacatttataaatgcattaagttctagaaggatacatgagtaaaaatatgaatttaaaaattaaagtcacagatttaggtgttgtcacctacctaccttatggttttttcctactacacttacatacctcttcataatctgctctatgtttcccatgtaacaccactattacaaaatagataaagcaggctgcctttgtagcagtaatttgagtttcatgtgtccccatgtcctgctcagtattacagcaactgtcaaaacacaacaggaaagtaatgattagaagtgcacttattaccagtatcattttagatcttctgtatattgaaaaggatttgagataccagaaaaatataggtaagaaataaagtttgactttagtttatgctctttacagtagtttgcaagggtacctataacaagagttgaagtgataatattttaaaccctagaaagaggttatagcaacagatttttatgcgtctagtctttggtaggctgccctgccccagcagaatttggaaatacaagtgaataatttataattataaagcattaagaagttttgtctcttaaatacatagaatttaaaatcaaagggtgatatttacagcacatatcaaataattggtcagatatacaagtcacagaaatgtcaaatgggagagtgaaggaaagtttaaaatagcttaggaagagatcacaaaatatcctttgaaagatcataggcacacacaagtcaacactagagctaaaaccagatattattccattactaaagagtgattttgaaagaccatttaaagtaggagtatccaatcttttggcttccctgggccacattggaagaagaagaattgtcttggtccacacgtaaaataaactaatgatagctgatgagcttttaaaaaaattgcatgttttaagaaaatttacaaatttgtgtcgagccacattcaaagctgtcctaggcttcatgtggcccgtggcccatgggttggacgagcttgatctatagtagtctaggtttccttaatgcttggaaaagtttgcattgaagcagtgagagtagggctgatatattcttcaagcgcagaagaaagcattgaactgactttttaatgaaaaacactacattctctcacgtaaattcattctttgtgtttagctcttttcaaagatgtggattttctgtttatgttcagtttgttgcaaacatgtaaaacatgttattaagcatattagcctcatatcctaacaaattagacaaaaaggtttcagacaaatgaagttgttaattaaaattatgtatttgtaggccaggtgcggtagctcacgcctgtaatcccagcactttgggagactgaagcaggtggatccacgaggtcaggagatcgagaccatcctggctagcacggtgaaaaccccatctctactaaaaatacaaaaaattagccggtcgaggtggcaggcgcctgtagtcccagctactcgggaggctgaggcaggagaatggcgtgaacccgggaggcagatcttgcagttagctgagattgcaccactgcgctccagcctgggtgacagagcaagactccgtctc

SEQ ID NO: 70034 - DNA, 1703 bp, Homo sapiens
ggaaggacagggctacttgtaggaatgttactgatgaggcaagatgccaaggacttccctgcagggtatcaaagatcaggacacgaccccttcctcacacacccacctcagacctgggagaggactgtgtgtcccccactgccccatcggatgctctgggctctgcctcagggaactcgggtttggggaaatgtctatttcagaagtactggagtggccagtgtggcagtggccactcagggtgggctgggtcctgagacccatccccgacacctctcctgctgaaccctcaggctgctccccacaccagggtgtgactgaggggtacacaggcctggatttctggtgtgaggaaggggctagcacctcccctgttgtgtagccagcacaggcacaatttgtgggtttggtggcaggtaggtggtgcgtgggagaaaggacagtgttagaggtccccactccgtggtctaggatcatgaaaggtgaacacacaagtacacaaatgtgccatgccctggcatggggcttatgtgtgcacaggcaaggcactcggtgtgtgtgtgcggaccccagggtcccaggtcatgtgaagcgtacgtgtgtgtgcattgtatgtgtgtgtacattgtgtgtgcattgtgtgtgcatgtggccaaacagatgtgacctcccagaacacagtacccctccacctctacccgagctcagacagccgagctctcccttgtcctgtgtgtgtgtcagtgtggccacgtgcgtaaccccaggtgggctgtcctgagctgggggcctgcctgtcccttcccagaacgcccctctgcaggacaggaagtctgccccaagtctggccacggcctcctgctcccatctcgggctgcttgggagacatcagagcaggccccagcccccagtcccctcttccggccgcctggacaggacccccattcagcccaggtgtttccggaagtcccacggccttggggccacaggagaagggttgaagcgtggctggggcaccactccccccacctggagtggcattgggcccacagctgcccatctctgggcctcaggtggaccaggggatctctaagggtctgctgtgccctttctatgcgtcctccacatcctatgatgtgcctgcttgttggctgctgtctgtgtgcgtcctggcatgttgtctggaggctggtgtcttttgcatgttcttggacaaatgtgtgctacctgcccaggcgcctgcaaccattgagcccacatgtgccccacgtgtgccctgcgggtggtcccgggcctggccagggctcagtgctcctcttccccctcctccctgttcccacccctcatgaagcacatgcgtgtccatcccatgtacccgtgggtcgacgcacgctcttgccacgccctgagcgtgtacacatgatgtgttctatgcattcaccctgccccccagcccgccctgcagaggacaagatgggtggccccggctccctttcccctaaccgcccctgcccgctgtgcagccgtgtgcgttggcgtgtgtttctgtgtcactggcgtgtcacgtgatgtagccgtgtttgctgacatgagcccctgcccccttctctgtttctccgttggtttctagagctctctccctccccttctcagaggggacaggacatgcagggaggaagggagaaatagcaaccaatccaaca

SEQ ID NO: 70035 - DNA, 1914 bp, Homo sapiens
ggaaggacagggctacttgtaggaatgttactgatgaggcaagatgccaaggacttccctgcagggtatcaaagatcaggacacgaccccttcctcacacacccacctcagacctgggagaggactgtgtgtcccccactgccccatcggatgctctgggctctgcctcagggaactcgggtttggggaaatgtctatttcagaagtactggagtggccagtgtggcagtggccactcagggtgggctgggtcctgagacccatccccgacacctctcctgctgaaccctcaggctgctccccacaccagggtgtgactgaggggtacacaggcctggatttctggtgtgaggaaggggctagcacctcccctgttgtgtagccagcacaggcacaatttgtgggtttggtggcaggtaggtggtgcgtgggagaaaggacagtgttagaggtccccactccgtggtctaggatcatgaaaggtgaacacacaagtacacaaatgtgccatgccctggcatggggcttatgtgtgcacaggcaaggcactcggtgtgtgtgtgcggaccccagggtcccaggtcatgtgaagcgtacgtgtgtgtgcattgtatgtgtgtgtacattgtgtgtgcattgtgtgtgcatgtggccaaacagatgtgacctcccagaacacagtacccctccacctctacccgagctcagacagccgagctctcccttgtcctgtgtgtgtgtcagtgtggccacgtgcgtaaccccaggtgggctgtcctgagctgggggcctgcctgtcccttcccagaacgcccctctgcaggacaggaagtctgccccaagtctggccacggcctcctgctcccatctcgggctgcttgggagacatcagagcaggccccagcccccagtcccctcttccggccgcctggacaggacccccattcagcccaggtgtttccggaagtcccacggccttggggccacaggagaagggttgaagcgtggctggggcaccactccccccacctggagtggcattgggcccacagctgcccatctctgggcctcaggtggaccaggggatctctaagggtctgctgtgccctttctatgcgtcctccacatcctatgatgtgcctgcttgttggctgctgtctgtgtgcgtcctggcatgttgtctggaggctggtgtcttttgcatgttcttggacaaatgtgtgctacctgcccaggcgcctgcaaccattgagcccacatgtgccccacgtgtgccctgcgggtggtcccgggcctggccagggctcagtgctcctcttccccctcctccctgttcccacccctcatgaagcacatgcgtgtccatcccatgtacccgtgggtcgacgcacgctcttgccacgccctgagcgtgtacacatgatgtgttctatgcattcaccctgccccccagcccgccctgcagaggacaagatgggtggccccggctccctttcccctaaccgcccctgcccgctgtgcagccgtgtgcgttggcgtgtgtttctgtgtcactggcgtgtcacgtgatgtagccgtgtttgctgacatgagcccctgcccccttctctgtttctccgttggtttctagagctctctccctccccttctcagaggggacaggactcctggggcctggctggggcccagagccaggccgccctctcctgttagccctcagagtcccatttctgttagccctcagagtcccatttctattggtgaccaacttgcaaatggataaaacacaggaaaatcctgccccccccttcctccctgcatgtcctgtccccagagccccccaccccaccctgggccaggtcaggccctgtgggacgggagaaatagcaaccaatccaacagcgggaaaaaaaa

SEQ ID NO: 70036 - DNA, 1890 bp, Homo sapiens
ggaaggacagggctacttgtaggaatgttactgatgaggcaagatgccaaggacttccctgcagggtatcaaagatcaggacacgaccccttcctcacacacccacctcagacctgggagaggactgtgtgtcccccactgccccatcggatgctctgggctctgcctcagggaactcgggtttggggaaatgtctatttcagaagtactggagtggccagtgtggcagtggccactcagggtgggctgggtcctgagacccatccccgacacctctcctgctgaaccctcaggctgctccccacaccagggtgtgactgaggggtacacaggcctggatttctggtgtgaggaaggggctagcacctcccctgttgtgtagccagcacaggcacaatttgtgggtttggtggcaggtaggtggtgcgtgggagaaaggacagtgttagaggtccccactccgtggtctaggatcatgaaaggtgaacacacaagtacacaaatgtgccatgccctggcatggggcttatgtgtgcacaggcaaggcactcggtgtgtgtgtgcggaccccagggtcccaggtcatgtgaagcgtacgtgtgtgtgcattgtatgtgtgtgtacattgtgtgtgcattgtgtgtgcatgtggccaaacagatgtgacctcccagaacacagtacccctccacctctacccgagctcagacagccgagctctcccttgtcctgtgtgtgtgtcagtgtggccacgtgcgtaaccccaggtgggctgtcctgagctgggggcctgcctgtcccttcccagaacgcccctctgcaggacaggaagtctgccccaagtctggccacggcctcctgctcccatctcgggctgcttgggagacatcagagcaggccccagcccccagtcccctcttccggccgcctggacaggacccccattcagcccaggtgtttccggaagtcccacggccttggggccacaggagaagggttgaagcgtggctggggcaccactccccccacctggagtggcattgggcccacagctgcccatctctgggcctcaggtggaccaggggatctctaagggtctgctgtgccctttctatgcgtcctccacatcctatgatgtgcctgcttgttggctgctgtctgtgtgcgtcctggcatgttgtctggaggctggtgtcttttgcatgttcttggacaaatgtgtgctacctgcccaggcgcctgcaaccattgagcccacatgtgccccacgtgtgccctgcgggtggtcccgggcctggccagggctcagtgctcctcttccccctcctccctgttcccacccctcatgaagcacatgcgtgtccatcccatgtacccgtgggtcgacgcacgctcttgccacgccctgagcgtgtacacatgatgtgttctatgcattcaccctgccccccagcccgccctgcagaggacaagatgggtggccccggctccctttcccctaaccgcccctgcccgctgtgcagccgtgtgcgttggcgtgtgtttctgtgtcactggcgtgtcacgtgatgtagccgtgtttgctgacatgagcccctgcccccttctctgtttctccgttggtttctagagctctctccctccccttctcagaggggacaggactcctggggcctggctggggcccagagccaggccgccctctcctgttagccctcagagtcccatttctattggtgaccaacttgcaaatggataaaacacaggaaaatcctgccccccccttcctccctgcatgtcctgtccccagagccccccaccccaccctgggccaggtcaggccctgtgggacgggagaaatagcaaccaatccaacagcgggaaaaaaaa

SEQ ID NO: 70037 - DNA, 1423 bp, Homo sapiens
ggaaggacagggctacttgtaggaatgttactgatgaggcaagatgccaaggacttccctgcagggtatcaaagatcaggacacgaccccttcctcacacacccacctcagacctgggagaggactgtgtgtcccccactgccccatcggatgctctgggctctgcctcagggaactcgggtttggggaaatgtctatttcagaagtactggagtggccagtgtggcagtggccactcagggtgggctgggtcctgagacccatccccgacacctctcctgctgaaccctcaggctgctccccacaccagggtgtgactgaggggtacacaggcctggatttctggtgtgaggaaggggctagcacctcccctgttgtgtagccagcacaggcacaatttgtgggtttggtggcaggtaggtggtgcgtgggagaaaggacagtgttagaggtccccactccgtggtctaggatcatgaaaggtgaacacacaagtacacaaatgtgccatgccctggcatggggcttatgtgtgcacaggcaaggcactcggtgtgtgtgtgcggaccccagggtcccaggtcatgtgaagcgtacgtgtgtgtgcattgtatgtgtgtgtacattgtgtgtgcattgtgtgtgcatgtggccaaacagatgtgacctcccagaacacagtacccctccacctctacccgagctcagacagccgagctctcccttgtcctgtgtgtgtgtcagtgtggccacgtgcgtaaccccaggtgggctgtcctgagctgggggcctgcctgtcccttcccagaacgcccctctgcaggacaggaagtctgccccaagtctggccacggcctcctgctcccatctcgggctgcttgggagacatcagagcaggccccagcccccagtcccctcttccggccgcctggacaggacccccattcagcccaggtgtttccggaagtcccacggccttggggccacaggagaagggttgaagcgtggctggggcaccactccccccacctggagtggcattgggcccacagctgcccatctctgggcctcaggtggaccaggggatctctaagggtctgctgtgccctttctatgcgtcctccacatcctatgatgtgcctgcttgttggctgctgtctgtgtgcgtcctggcatgttgtctggaggctggtgtcttttgcatgttcttggacaaatgtgtgctacctgcccaggcgcctgcaaccattgagcccacatgtgccccacgtgtgccctgcgggtggtcccgggcctggccagggctcagtgctccccttcctccctgcatgtcctgtccccagagccccccaccccaccctgggccaggtcaggccctgtgggacgggagaaatagcaaccaatccaacagcgggaaaaaaaa

SEQ ID NO: 70038 - DNA, 1697 bp, Homo sapiens
cagcaccttctctgccttgggtccgcgcttgttgtcataggacacttggtcgaggttttcatagttcctttttttactcttggactcacgctcctccagcagcgtctccaggcgtttctgagccgcccggccctcgtggtcgtcgctgaccagcaggatgatgtggttccagctgtagacacgcatcatctcaaaccacacgctggactggtgggagaaaggacagtgttagaggtccccactccgtggtctaggatcatgaaaggtgaacacacaagtacacaaatgtgccatgccctggcatggggcttatgtgtgcacaggcaaggcactcggtgtgtgtgtgcggaccccagggtcccaggtcatgtgaagcgtacgtgtgtgtgcattgtatgtgtgtgtacattgtgtgtgcattgtgtgtgcatgtggccaaacagatgtgacctcccagaacacagtacccctccacctctacccgagctcagacagccgagctctcccttgtcctgtgtgtgtgtcagtgtggccacgtgcgtaaccccaggtgggctgtcctgagctgggggcctgcctgtcccttcccagaacgcccctctgcaggacaggaagtctgccccaagtctggccacggcctcctgctcccatctcgggctgcttgggagacatcagagcaggccccagcccccagtcccctcttccggccgcctggacaggacccccattcagcccaggtgtttccggaagtcccacggccttggggccacaggagaagggttgaagcgtggctggggcaccactccccccacctggagtggcattgggcccacagctgcccatctctgggcctcaggtggaccaggggatctctaagggtctgctgtgccctttctatgcgtcctccacatcctatgatgtgcctgcttgttggctgctgtctgtgtgcgtcctggcatgttgtctggaggctggtgtcttttgcatgttcttggacaaatgtgtgctacctgcccaggcgcctgcaaccattgagcccacatgtgccccacgtgtgccctgcgggtggtcccgggcctggccagggctcagtgctcctcttccccctcctccctgttcccacccctcatgaagcacatgcgtgtccatcccatgtacccgtgggtcgacgcacgctcttgccacgccctgagcgtgtacacatgatgtgttctatgcattcaccctgccccccagcccgccctgcagaggacaagatgggtggccccggctccctttcccctaaccgcccctgcccgctgtgcagccgtgtgcgttggcgtgtgtttctgtgtcactggcgtgtcacgtgatgtagccgtgtttgctgacatgagcccctgcccccttctctgtttctccgttggtttctagagctctctccctccccttctcagaggggacaggactcctggggcctggctggggcccagagccaggccgccctctcctgttagccctcagagtcccatttctgttagccctcagagtcccatttctattggtgaccaacttgcaaatggataaaacacaggaaaatcctgccccccccttcctccctgcatgtcctgtccccagagccccccaccccaccctgggccaggtcaggccctgtgggacgggagaaatagcaaccaatccaacagcgggaaaaaaaa

SEQ ID NO: 70039 - DNA, 720 bp, Homo sapiens
ggaaggacagggctacttgtaggaatgttactgatgaggcaagatgccaaggacttccctgcagggtatcaaagatcaggacacgaccccttcctcacacacccacctcagacctgggagaggactgtgtgtcccccactgccccatcggatgctctgggctctgcctcagggaactcgggtttggggaaatgtctatttcagaagtactggagtggccagtgtggcagtggccactcagggtgggctgggtcctgagacccatccccgacacctctcctgctgaaccctcaggctgctccccacaccagggtgtgactgaggggtacacaggcctggatttctggtgtgaggaaggggctagcacctcccctgttgtgtagccagcacaggcacaatttgtgggtttggtggcaggtaggtggtgcgtgggagaaaggacagtgttagaggtccccactccgtggtctaggatcatgaaaggtgaacacacaagtacacaaatgtgccatgccctggcatggggcttatgtgtgcacaggcaaggcactcggtgtgtgtgtgcggaccccagggtcccaggtcatgtgaagcgtacgtgtgtgtgcattgtatgtgtgtgtacattgtgtgtgcattgtgtgtgcatgtggccaaacagatgtgacctcccagaacacacacatacaatgcacacatccgtactgcccgggtaccggtc

SEQ ID NO: 70040 - DNA, 179 bp, Homo sapiens
tttgttacatagaatgaggaatttaaaatgaggccatcgcatgtctacaattacaaaatgatgcaaaaatgaaaaaaacatgtgtaatacactacctggttttctcataagccccacaagtatgtcaaacagagggtaagtgaaagctaggctatggctgctaggagaggtgtgattct

SEQ ID NO: 70041 - DNA, 949 bp, Homo sapiens
actcctggccctgaagcagtcctcccaccttgatctcccaaagtgctgggattacaggtgtgagccatcacacccggcctaacatttattctgtttttttttttggagacagagtcttgctctgtcatccaggctgagtgcagtggtgcaatctcggctcactgtagcctccacctgcgggattcaagcaattctcctgcctcagcctcccaagtaccttggaattacaagtgtgtaccaccatgcccggctaatttttgtatttttgatagcgatggggtttcaccactgacatttattcttaatgttacctttattctactgttttggcagttgtatcagccaatgatattttaaattatgtccaccataattacatgattctcctctttctatcaatgtttaagtggctccgtgactcacctactgctaatcttgagtaagttacttaacccctgtgtgcctcggtttttaggctcacaaaatgggataatgatatctcattagattgttgtaagaattaaatgataatacctgcaatcatgctggtatagtacttactcatagcaagcactcaataagtacagttattatcattatatactacctgtggatcttttgttgctccccacgtggaattgtacagataaatggaaaaaggtttagtgccttacactgttatgtgactggatgcatctgtatatgtgaagtgtaaaaagatgtcagtgtacatgctgttaacttggactagtggtagaaggcaggaaataagaacaaattttaagctattaaacattttgtgtaatactaaatttaaaaaatttttagccttgtgaatacacagatttgatctatctttaccttatttcttttccatgtatatatttaatgtgcaaagtatctatgtaatggtcaaaatatatttaataaatagaaacaatttttctat

SEQ ID NO: 70042 - DNA, 5388 bp, Homo sapiens
tttctttctcttgtactctacacccaaaacatcagaaaatccttttgactctgacatcaaaagacatccagaatatgacccatttttacaattcctcttgctacatagctggctcaagccacaatcatcttagagctagattaagagcctaggtattataacagattattgttataataggtcattgtgatagatctccttgcttctgccctggttccctataggtttacactcaacatagcagttaagagcttttccttgaatatattaggtcatgtcactctaaataaaagccctgaatggtttcccagcttcctcagagtgaaagtcaaagtccttacagtgacctataacaaactcaaactataacaaaacaaagttttcttccctcaccttgcttctctgaccttagctattactattctccacttctcattctgttgcagacatcctggtctccttttggccctcagagactccaaccaaactcccacctcatagcatttgtgtcctgctgttccctttgccttgactgctcatccccaagctacccagaatgtttgtttccttgtttttctcccctcagttctattcttaaacataacttattttattttattttgttttatttttgagacagtcttgctctgttgcccaggctggagtgcagtggtgcaatctcggctcactgcaacctccacctcccggcttcaagtgattctcttgcctcagcctcccgagtagctgggattacaggtgcacaccatcaaggctggctaatatttgtatttttagtagaggtgaggtttcaccatgttgaccaggctggtctcgaactcctcacctcaagtgacctacctgtctaggcctccccaaatgctgggattacaggactcagccaccacgtccagctacataactttattatagaaacccctgaacactttacatcaaaaagcatcactcactctaaccctgtcagagccccccaccctgctctgcttctcttcataacacttaataccattcagcactatgcattttctggttttttcctgtccttcctcactaacacgtaagcttgatagaaggagaagctgtatgtgttttgctcagtgttgattctccaccacccagaacacctcctagcataaggtcagcactcagtaagttgctgaaggaaagaagggatgggtttgagcagagtggagatggagatcagctgatgaacttttgagatctagtaggtggcagaatagtcagattgtgatgaattgttgggtattgagcaggaaaagggagatgaaggaaataagagggctctaggaggctctccaagtttctgccctacacactgagttgatggtatactgttccctgaaatagagaagatgggaaaaggatttgattaaggacagggacagagaaggataatttcaactttgaggaagttgagattcaggttattaggacatattcaactgaagatatcctggaggtagctggctctagaactattaactgagtttgtgctgaacactcatctctgttaggtacaaaactgcatggaaaggagatgaagagagactgtatagtattgagtcattttccagggaaaagctaaatccttttcaccccttcaggtgaacttaccaaaccagctgctactcagaagctcacagcctttcagaaaaaggtattctccaagcctccaaggagtcttattgtctcaaggcaaccatttttcagtttgactctaggggtgcgtgtttgccattcagaacctactatattttaccgcacctcctgacattgttacacaacatttattgaaagcacatttgatggtaatgaagtttctattaactatgattaaatctcataaagcacctgaagataatttaagatgtgcagaagcagaaaatgaaacattcggtttagtacattaggaaacgtaattgattaaattatctcatttacaataagtgctttcatgagctatgcagtgcacatattttccccagtttgtcattatgatttgccaacagatatcttaagacttcactttctttttacacctccccgcaactctaagctcgtgcctctgcctgcctgctcatggagcactctgtgcagagctctgagtgatgttttctatctgccaggccttatggaagatcatgtgtatggctatatataggcacaggttgtttctcaattatcttcataattgactttgattttgcattagtgatgattcatgtagtctcacattaagcccctctttcactgaacaactgcagcctgaatttctataatgcactcctaaccatgcagcttacagaaccccgattggattcctctgggagccttttgcaatcacattgattctctaaggtcttatttttagagaaatcacaaattaaaacagtttaagcgattccgttgcagtatccagcaattaagcatggtgctcaggaacgagaaccccaagcaaaaactaattctgaagtccctaaggactggaaatggcttctgcggggtttatgcctggaagtacagatgtaaccaaattagaatggcacaggactcacaaactaagtgtgaaattaattttaaaaacacatacatgcatttctaagtaactctcacattggccaccccatggatacctatgatcttttttgtgctatatgacagaatcagtggacagcatgcaccatgtggccgggagcaaggtaagagtccacttactccacctgtcatcctgagggtcctgacacaagcacaggccaaatattcagtgatctgtttatttctctctccctcaatgcccatacacatgaacacacatatacacagccaggtgcccccaaactcagtcttcccataaattcaaaatcaaacatgcatgatgtcagaggaccaatacttaagtagtaatgattttttttaatgggcagcagacagcagggaaataagtttaaatgtttatttttgctgttttcccaaattcttagactttgcaagtaatgatatctttgtatctccagccttcctgaagcaacataaggaaataggaacagaatggctttactggatttttccctcatgtcttgtgacccctgtcccaagttacctatttctgtctatcctcacagggtcttaattctctcaaagaagttagctcataatagctattaactcttccaagctctttgaattttaataccctaagatttaaaagatcaaaagtcattcagttgatactagaatgagagatgctaggcagggacgtctttcacaagctttacaaaccaaaccagccaggccgttgtctaatctcctactaatgagagctgtattaatgttgccccagtatcttgaagtttccctagcgtcctttacatatttctgatgtatgagaatgacttggggaacatattaacacatagattcttaggagctcctcaaccaggaattcaaatttatttgttctgttctgaggtggtgcatatttaatttaacaagctccagccacactctgagattctgatgcatgtggattctgatccaccttttgagaaacatttttctaaaatcatggttctcagccccacctgcaccttggagtcacctgaggagctttgaaaaatagagatacctgggtcctgaaaaccctccaccttaaattccaatagccttgatacagcctggaaattgggaattttaaaaggcctacaggtgatactaaagagcataaggtcaaatgccatactgctagccattccagccatctcctctctccagctctgcaggaagcataaaatgaagacaatgcaaaggcctctcccataagcaagcctgggtacaacgagcctaagccagtaccaacaccccaatcctcagctcgtcattatttcaccatggagttctggatcctaatctgcccagctgccatggattccacaggagattcttatcaggatgagaaaagcagtgagctttcagcctgtcactctattatatacaaccagaagcctgctcaggaacgaagattactctgggtagcagaatgaaactccattaaaaacaggattgaaaggctgggtcttacagaggagatcagatcatgaggactctcccctcatgaatgaatgaaagaatggattaatgaattaatgggttatcatagaagggaaactggtggcttcacaacaagatgagagatctgacctcgaatatttgcctgctcagcctcattgccatgtgatgccatgtcctgtgccacctctggactctgcagggagtccccaccagcaagaaggctctcaccagacatagctcctcgaccttggatttctcagcctccagaacggctctacagattgattttaaagccacctacactgcagtttcttcaatttagctctacttatctgattatgcatcacaaaaggaagcagaaattcagcttaattgtgaagccattgcagcagaaccaagcaaatgatagaaaacctcatgatcacagacagaatcacactcactgatgctgaatgaaatgacagacatccgtccctctgcagaagcctgaatactgatcacagaattttacgttctgacattgtgtgtctcttgtcagatagtgttgtcctttactttccccgcttcagttgtgaaagtcaggtgcagtctcatactatttttttttaaaattcattatgacaagtaaatggtctctgggaaagcgaacatcctcatccactgtttactgaaactgtaacactgtcatgagtgaagaatgaaacatgtttaatgtaaagagtttgcagaatgatgatcagaggaaaagaacattaaacagaagaaacataaatataagaatggggagagagatgtaatcaaaagacagcttgtaagggaggttacatgctgccatttgcttttcagctgtgttttccatagtgggacagatcttgctctttgttacttctacttttgctttttcccatctgcaaagagggaaacaatctgcttttgaatctctggtgaagcatcacctagaagctgctgccaaagcttgatatccagagtgctctaaaacatagtgtgatgtgccctttcatcttaaaggattatttttggctgggcagacctctctaagatagattataaggagctggcttttaaaggcaatgaaaactgcttctgtattcacatttaccccctccctccattatctgaggtatgtaaataatgttttaaagtggtgatgtgagaatattaattatgttttcatttcttgttcctgttaccatgtaatatatcttcaagtgctgagaaaacatcttacaaaaccattaaagattccaaatgttcatacat

SEQ ID NO: 70043 - DNA, 1108 bp, Homo sapiens
ctgtctgcaccggcagcaccatgtcgctcacggtcgtcagcatggcgtgtgttgggttcttcttgctgcagggggcctggccacatgagggagtccacagaaaaccttccctcctggcccacccaggtcgcctggtgaaatcagaagagacagtcatcctgcaatgttggtcagatgtcatgtttgaacacttccttctgcacagagaggggatgtttaacgacactttgcgcctcattggagaacaccatgatggggtctccaaggccaacttctccatcagtcgcatgaagcaagacctggcagggacctacagatgctacggttctgttactcactccccctatcagttgtcagctcccagtgaccctctggacatcgtgatcataggtctatatgagaaaccttctctctcagcccagccgggccccacggttctggcaggagagaatgtgaccttgtcctgcagctcccggagctcctatgacatgtaccatctatccagggaaggggaggcccatgaacgtaggctccctgcagggaccaaggtcaacggaacattccaggccaactttcctctgggccctgccacccatggagggacctacagatgcttcggctctttccgtgactctccatacgagtggtcaaagtcaagtgacccactgcttgtttctgtcacaggaaacccttcaaatagttggccttcacccactgaaccaagctccgaaaccggtaaccccagacacctacatgttctgattgggacctcagtggtcaaaatccctttcaccatcctcctcttctttctccttcatcgctggtgctccgacaaaaaaaatgctgctgtaatggaccaagagcctgcagggaacagaacagtgaacagcgaggattctgatgaacaagaccatcaggaggtgtcatacgcataattggatcactgtgttttcacacagagaaaaatcactcgcccttctgagaggcccaagacacccccaacagataccagcatgtacatagaacttccaaatgctgagcccagatccaaagttgtcttctgtccacgagcaccacagtcaggccttgaggggatcttctagggaga

SEQ ID NO: 70044 - DNA, 587 bp, Homo sapiens
gggaggcagagagcagaccaacccagtagtaaggaagatatgatttgctacaacctatttacctgacatgaaaaccagaatgcatcattgttacattttattagtgttcaggctggatattataccatggtagcatgtcgtttgacatcactggtagatcttgttttttcttgtataataaaataaaagataggacatttcctttgtatcagttttgctgtctttcctctgcaccagtaacaaaaagtaaatgttctaaaagtatgcaaatatgaatctaaattgatgcaaactgaatgtgaagacagagtcacatttatctactacggttagaaataccaaactggggaggattaaacatcatcatagattggacccccagctgttgtaatgggcaggatcatagaaggaagatcaccaacgaaaagaggaactcatttcagttaaaaagaaaggtcccttggccagtctcagctactggggaggctgaggcaggagaatggcgtgaacccgggaggcggagcttgcagtgagccgagatcgcaccgccgcactgcagcctgggcgacagagcaagactctgtctc

SEQ ID NO: 70045 - DNA, 445 bp, Homo sapiens
tatttcatttaacttgaaactaaaatgaagctagctattttctccctcctgcccttccttccttgtttccttctttccttctttccttctttccttccttccttccttccttccttccttccttccttccttccttccttcccactgaagccccatcattaatgcaaatccaccctctcctctcccctacttctctacatccacacagctgtcttttcccagctttgaaaatatgtacattagctgaactagagagctaaggtatttcactattcaaagaagagtatttcttacatatatccatatcacaaggcttttaaactatttttgactcctataatttctataactctttacaagtctgatgtagacaccagttggagaacttgagaattaagtttaatgtaaaggatatcaaagagataaaagataatagaatttcaaa

SEQ ID NO: 70046 - DNA, 419 bp, Homo sapiens
agagacagttctgtggttaggataataaactcagcgtgagactgaattggtggtgctttaaaccagattgttacccgctgcaaagcacagtaagatgaggtatagcatagtgcagtaggcttaacaatttactaagccatgaatgcatttggacttatttacaaagtaagaaaataatattcggatattctgtgaagtttagatatcttgctaacataatttttttcttttctttttctatgcctcgccaggatagattgccttttttcatgataagaatgttgtaatttgctttgagaagttctcatattggttcttttgttaatttatatctctgtaagagttattctctgttcttatccatgcttttgtgtgcctggtaatgtttatgtttctttgccaaaaaaacaacttattta

SEQ ID NO: 70047 - DNA, 169 bp, Homo sapiens
ttaaaaacaaaaaaaaatgcagagctgcgctttgattaattcagtgaacaaaacatatgctgttggttctgttctatgaaattcatatatgatcaataaaatcttttaaaagagcaactttggcttttagaattatactgccgaccatgttttttgtcccagttaactc

SEQ ID NO: 70048 - DNA, 319 bp, Homo sapiens
acagctggactctgctcccagaatggactgacttcagcttcagggatgacacagagactctgggaccttcttaggaaggacacaaggagggattttcagaggctttggagtacagtgtgtgtttgcttctcaactttgcccccacttgggctgtctgctttagagtggggacagtgaactaggcatggtggctcacacatgcaatcccagcactttggaaggtcaaagcagaaggatcacttgagcccaggagcttgacaccagcctgggccacatagtaagaccccgtctgtactaaaaataaacattttgaaaatta

SEQ ID NO: 70049 - DNA, 479 bp, Homo sapiens
aagtgatcatgtaaaatatgcataaaatatacacataaaatagtcaatagttgctcatttgttttagccactgaaaattgactgagttctccacttggaacatgtaaggtagtgttgactttacttgaaaggctgacatccatttcagataacggtgtctctttttattttatcatcctattatattctcttctacgtgatttgccttctctgcttttcatgttgtgtaaaattttcatatttttctaaaagaaattttggaacatgaagaatgcatacaagcggtctgcagacccatctaaactttgttagtagactttatatctcactgcggctcaatgacctggaagataaactggccctgtctgttccatcagaacaacaggaatttcccgagttcaggcaaacagaagtttgcttttgtctgatactcaaatttctctctcaatcactcagattctccagataattgcctggct

SEQ ID NO: 70050 - DNA, 471 bp, Homo sapiens
tttgagcaggaatggggccaaaccacccaattacattccattattttggaggaaccttttaacttttgaaccctagttgtactgttaatttgaaggtatagctactaccaaatagtctttgagagaaataactggaacagattggtttgactgaaaacagtaaaggaaatagaatcagttgtctgactactagctttaaatttagacgtttaaaattcctgaatattttacactttagtttcatctttagtctaaagaggcccatcaagggaagatgcctctatccctttagaaacaacagggaaacttggttttagaaaggcaagaaacaaagtatattggaaagttttccttctcgggtaactggagtgtttaagaaagaaggtcattctatgagcatggcattttagaataattgtactttaccagaaacctggttctcaaaaaatcttccagctttttaaaaaaaaa

SEQ ID NO: 70051 - DNA, 2263 bp, Homo sapiens
  misc_feature (2108)..(2108): n is a, c, g, or t
gagagacaacagtgaatgacaaggaggggccatccaatccctgctgccacctcctgggatggagccctagggagcccctgtgctgcccctgccgtggcaggactcacagccccaccgctgcactgaagcccagggctgtggagcagcctctctccttggacctcctctcggccctaaagggactgggcagagccttccaggactatggttggactgaagccttcagacgtgcctcccaccatggctgtgaagttcctgggggcaggcacagcagcctgttttgctgacctcgttacctttccactggacacagccaaggtccgcctgcagatccagggggagaaccaggcggtccagacggcccggctcgtgcagtaccgtggcgtgctgggcaccatcctgaccatggtgcggactgagggtccctgcagcccctacaatgggctggtggccggcctgcagcgccagatgagcttcgcctccatccgcatcggcctctatgactccgtcaagcaggtgtacacccccaaaggcgcggacaactccagcctcactacccggattttggccggctgcaccacaggagccatggcggtgacctgtgcccagcccacagatgtggtgaaggtccgatttcaggccagcatacacctcgggccatccaggagcgacagaaaatacagcgggactatggacgcctacagaaccatcgccagggaggaaggagtcaggggcctgtggaaaggaactttgcccaacatcatgaggaatgctatcgtcaactgtgctgaggtggtgacctacgacatcctcaaggagaagctgctggactaccacctgctcactgacaacttcccctgccactttgtctctgcctttggagccggcttctgtgccacagtggtggcctccccggtggacgtggtgaagacccggtatatgaactcacctccaggccagtacttcagccccctcgactgtatgataaagatggtggcccaggagggccccacagccttctacaagggatttacaccctcctttttgcgtttgggatcctggaacgtggtgatgttcgtaacctatgagcagctgaaacgggccctgatgaaagtccagatgttacgggaatcaccgttttgaacaagacaagaaggccactggtagctaacgtgtccgaaaccagttaagaatggaagaaaacggtgcatccacgcacacatggacacagacccacacatgtttacagaactgttgtttacttgttgctgattcaagaaacagaagtagaagaggaggagggattctggtcttcactgccatgcctcaagaacacctttgttttgcactgacaagatggaaaataaattatattaatttttgaaacccattaggcatgcctaatatttaggcaagagaaaataaaccaagatagatccatttggacaaaatggaaggttggagacgtgtatccccgtgaaatctggttagataatgaatgataagcaggaaggatggcaagcacgggacaggaggggcccacaatggagtgggagatcagccacggagcctggagggatgccacccagcaacacagagctggcgactgcagctgcaccatcacacatgcatcatcagcctatttgtaatatgtctgccacagagagtcctttgggattctaggaaacccaaggaacaagagaaaaaactagagcctgtgctaaagaagccctgctgggcccatgtgaggctggggctcgtaaatattccctgacgacactgaagaatcaagagggcagcccccactttcctacaaaatggagggagccatcccttccctgtccacctcaccaggggtgctatgacatgcaagtgagaagctgggcatgaacgcactttataaaagcaaaagctctgtgtaaatctaactacaaggacaatgccttgggagagattttgtcgggacagagaggagttgccagggaagaaggtttgaaagatacggttgtctagaggtgagaccaaaggatccagagacttggggaccagaggtgacagtggatgacgtgaagccacaggagccccacccccatgcagcctcttccccnccccccccaccacgcgctcaatcatgagtacctcaaaggattgttgggcttgggggaaaagaggtggattcctgggcaagaacctaaagtagcaggactcggaattctcgggaaattattatgactcaataaaagaattcacaccttaggtgtgg

SEQ ID NO: 70052 - DNA, 1967 bp, Homo sapiens
  misc_feature (1802)..(1802): n is a, c, g, or t
gagagacaacagtgaatgacaaggaggggccatccaatccctgctgccacctcctgggatggagccctagggagcccctgtgctgcccctgccgtggcaggactcacagccccaccgctgcactgaagcccagggctgtggagcagcctctctccttggacctcctctcggccctaaagggactgggcagagccttccaggactatggttggactgaagccttcagacgtgcctcccaccatggctgtgaagttcctgggggcaggcacagcagcctgttttgctgacctcgttacctttccactggacacagccaaggtccgcctgcagatccagggggagaaccaggcggtccagacggcccggctcgtgcagtaccgtggcgtgctgggcaccatcctgaccatggtgcggactgagggtccctgcagcccctacaatgggctggtggccggcctgcagcgccagatgagcttcgcctccatccgcatcggcctctatgactccgtcaagcaggtgtacacccccaaaggcgcggacaacaacttcccctgccactttgtctctgcctttggagccggcttctgtgccacagtggtggcctccccggtggacgtggtgaagacccggtatatgaactcacctccaggccagtacttcagccccctcgactgtatgataaagatggtggcccaggagggccccacagccttctacaagggatttacaccctcctttttgcgtttgggatcctggaacgtggtgatgttcgtaacctatgagcagctgaaacgggccctgatgaaagtccagatgttacgggaatcaccgttttgaacaagacaagaaggccactggtagctaacgtgtccgaaaccagttaagaatggaagaaaacggtgcatccacgcacacatggacacagacccacacatgtttacagaactgttgtttacttgttgctgattcaagaaacagaagtagaagaggaggagggattctggtcttcactgccatgcctcaagaacacctttgttttgcactgacaagatggaaaataaattatattaatttttgaaacccattaggcatgcctaatatttaggcaagagaaaataaaccaagatagatccatttggacaaaatggaaggttggagacgtgtatccccgtgaaatctggttagataatgaatgataagcaggaaggatggcaagcacgggacaggaggggcccacaatggagtgggagatcagccacggagcctggagggatgccacccagcaacacagagctggcgactgcagctgcaccatcacacatgcatcatcagcctatttgtaatatgtctgccacagagagtcctttgggattctaggaaacccaaggaacaagagaaaaaactagagcctgtgctaaagaagccctgctgggcccatgtgaggctggggctcgtaaatattccctgacgacactgaagaatcaagagggcagcccccactttcctacaaaatggagggagccatcccttccctgtccacctcaccaggggtgctatgacatgcaagtgagaagctgggcatgaacgcactttataaaagcaaaagctctgtgtaaatctaactacaaggacaatgccttgggagagattttgtcgggacagagaggagttgccagggaagaaggtttgaaagatacggttgtctagaggtgagaccaaaggatccagagacttggggaccagaggtgacagtggatgacgtgaagccacaggagccccacccccatgcagcctcttccccnccccccccaccacgcgctcaatcatgagtacctcaaaggattgttgggcttgggggaaaagaggtggattcctgggcaagaacctaaagtagcaggactcggaattctcgggaaattattatgactcaataaaagaattcacaccttaggtgtgggagtaagaac

SEQ ID NO: 70053 - DNA, 2273 bp, Homo sapiens
  misc_feature (2108)..(2108): n is a, c, g, or t
gagagacaacagtgaatgacaaggaggggccatccaatccctgctgccacctcctgggatggagccctagggagcccctgtgctgcccctgccgtggcaggactcacagccccaccgctgcactgaagcccagggctgtggagcagcctctctccttggacctcctctcggccctaaagggactgggcagagccttccaggactatggttggactgaagccttcagacgtgcctcccaccatggctgtgaagttcctgggggcaggcacagcagcctgttttgctgacctcgttacctttccactggacacagccaaggtccgcctgcagatccagggggagaaccaggcggtccagacggcccggctcgtgcagtaccgtggcgtgctgggcaccatcctgaccatggtgcggactgagggtccctgcagcccctacaatgggctggtggccggcctgcagcgccagatgagcttcgcctccatccgcatcggcctctatgactccgtcaagcaggtgtacacccccaaaggcgcggacaactccagcctcactacccggattttggccggctgcaccacaggagccatggcggtgacctgtgcccagcccacagatgtggtgaaggtccgatttcaggccagcatacacctcgggccatccaggagcgacagaaaatacagcgggactatggacgcctacagaaccatcgccagggaggaaggagtcaggggcctgtggaaaggaactttgcccaacatcatgaggaatgctatcgtcaactgtgctgaggtggtgacctacgacatcctcaaggagaagctgctggactaccacctgctcactgacaacttcccctgccactttgtctctgcctttggagccggcttctgtgccacagtggtggcctccccggtggacgtggtgaagacccggtatatgaactcacctccaggccagtacttcagccccctcgactgtatgataaagatggtggcccaggagggccccacagccttctacaagggatttacaccctcctttttgcgtttgggatcctggaacgtggtgatgttcgtaacctatgagcagctgaaacgggccctgatgaaagtccagatgttacgggaatcaccgttttgaacaagacaagaaggccactggtagctaacgtgtccgaaaccagttaagaatggaagaaaacggtgcatccacgcacacatggacacagacccacacatgtttacagaactgttgtttacttgttgctgattcaagaaacagaagtagaagaggaggagggattctggtcttcactgccatgcctcaagaacacctttgttttgcactgacaagatggaaaataaattatattaatttttgaaacccattaggcatgcctaatatttaggcaagagaaaataaaccaagatagatccatttggacaaaatggaaggttggagacgtgtatccccgtgaaatctggttagataatgaatgataagcaggaaggatggcaagcacgggacaggaggggcccacaatggagtgggagatcagccacggagcctggagggatgccacccagcaacacagagctggcgactgcagctgcaccatcacacatgcatcatcagcctatttgtaatatgtctgccacagagagtcctttgggattctaggaaacccaaggaacaagagaaaaaactagagcctgtgctaaagaagccctgctgggcccatgtgaggctggggctcgtaaatattccctgacgacactgaagaatcaagagggcagcccccactttcctacaaaatggagggagccatcccttccctgtccacctcaccaggggtgctatgacatgcaagtgagaagctgggcatgaacgcactttataaaagcaaaagctctgtgtaaatctaactacaaggacaatgccttgggagagattttgtcgggacagagaggagttgccagggaagaaggtttgaaagatacggttgtctagaggtgagaccaaaggatccagagacttggggaccagaggtgacagtggatgacgtgaagccacaggagccccacccccatgcagcctcttccccnccccccccaccacgcgctcaatcatgagtacctcaaaggattgttgggcttgggggaaaagaggtggattcctgggcaagaacctaaagtagcaggactcggaattctcgggaaattattatgactcaataaaagaattcacaccttaggtgtgggagtaagaac

SEQ ID NO: 70054 - DNA, 396 bp, Homo sapiens
aagccttcagacgtgcctcccaccatggctgtgaagttcctgggggcaggcacagcagcctgttttgctgacctcgttacctttccactggacacagccaaggtccgcctgcaggtaggtgccctttggccaagggtcattgatcacatggaaggaggggctagttctctcccatatcccccatgacgtgtgcccacatgcccttcctcagaaccctgacaaagactctcactccactgcttaggacccttccttgcctcctcccatcaccatccaccaggacaaaaaaatctaaattctttgcatgatgtgacagggccctttatgggctaggccctactttgtaaagcatgcagtgtgaggtaaaagtaaggaattaactgtgtgaccttgggc

SEQ ID NO: 70055 - DNA, 1422 bp, Homo sapiens
gagagacaacagtgaatgacaaggaggggccatccaatccctgctgccacctcctgggatggagccctagggagcccctgtgctgcccctgccgtggcaggactcacagccccaccgctgcactgaagcccagggctgtggagcagcctctctccttggacctcctctcggccctaaagggactgggcagagccttccaggactatggttggactgaagccttcagacgtgcctcccaccatggctgtgaagttcctgggggcaggcacagcagcctgttttgctgacctcgttacctttccactggacacagccaaggtccgcctgcagatccagggggagaaccaggcggtccagacggcccggctcgtgcagtaccgtggcgtgctgggcaccatcctgaccatggtgcggactgagggtccctgcagcccctacaatgggctggtggccggcctgcagcgccagatgagcttcgcctccatccgcatcggcctctatgactccgtcaagcaggtgtacacccccaaaggcgcggacaactccagcctcactacccggattttggccggctgcaccacaggagccatggcggtgacctgtgcccagcccacagatgtggtgaaggtccgatttcaggccagcatacacctcgggccatccaggagcgacagaaaatacagcgggactatggacgcctacagaaccatcgccagggaggaaggagtcaggggcctgtggaaaggaactttgcccaacatcatgaggaatgctatcgtcaactgtgctgaggtggtgacctacgacatcctcaaggagaagctgctggactaccacctgctcactgacaacttcccctgccactttgtctctgcctttggagccggcttctgtgccacagtggtggcctccccggtggacgtggtgaagacccggtatatgaactcacctccaggccagtacttcagccccctcgactgtatgataaagatggtggcccaggagggccccacagccttctacaaggggtgagcctcctcctgcctccagcactccctcccagagaacaggggcttctttcttttcgaatgtggctaccgtgggtcaacctgggatgtagcggtgaagagtacagatgtaaatgccacaaagaagaagtttaaaaaaccatgcaagtaaaagaaaaaaagtgaaccatacctgatggggagggttagggaagcctgactgagaacaaacactccaggaataggtaaaagtactgcctgtctccagaggaagttagcaatcctgagacctcctggacctcctgccatggccattgagcaccacactgaccatggccagtgccttcctcactgtctccacacgctccacgttttcttgcacttactgctccctctgcgtggaatgcctcatcat

SEQ ID NO: 70056 - DNA, 5388 bp, Homo sapiens
  misc_feature (3)..(3): n is a, c, g, or t
  misc_feature (6)..(6): n is a, c, g, or t
  misc_feature (10)..(11): n is a, c, g, or t
  misc_feature (1917)..(1919): n is a, c, g, or t
  misc_feature (2343)..(2343): n is a, c, g, or t
  misc_feature (3360)..(3360): n is a, c, g, or t
  misc_feature (3475)..(3475): n is a, c, g, or t
  misc_feature (3491)..(3491): n is a, c, g, or t
  misc_feature (3505)..(3505): n is a, c, g, or t
  misc_feature (3532)..(3532): n is a, c, g, or t
  misc_feature (3626)..(3626): n is a, c, g, or t
  misc_feature (4707)..(4707): n is a, c, g, or t
  misc_feature (4733)..(4733): n is a, c, g, or t
ccnagngtcnnctgagaaggagttatctgtgttctctttcccatactgttttaccagtaaagatgatgatgagagaggtggtggtgatggtgttgagagtgatggggttggtggaggtgatgggagttgtactagttttctaggactgttacaataaagtagcacaaaccaggtggcttaaaacaatagaagtgtattctctcataggacctgaggctacatgtttgaaatcaaggtgttgggatgtacctctccctctgaaggctctagggaataattctttcttgcttcttttagattctagtggttgctggcaatccttggcattccttggcttgtagatttatccctccaatctccacctccttcttcacatagtcttctcatttgtgcatctatgtttctatgttcaaatttctttcttttttaaaacacactggccattttgggtttaaggcccattctactccagtctgaccttattttcattgcatctgcaaaggccccattttcaaataagatcacattcacaggttctgggtggccatgaattcttggggggatgttgttcaacccagaacatgagtggtggtaatggagatgggatggtggtattaacgggtatggtagtctgtggtgagggtgttggtgatattgatggtagtgatgatgtgggggtatccaagggttccatctcacatgatatgtactcagttgtagcaaaaatacttattgtacattgatccaaaattggctgcaaacctgtgactggttcttggcacatgcatcactacagagtaacaacaacataaaaggcctattgatgatgtcttaagggctctttgagaagtaaggggaggcagaaagcagttgtatcctcatgacaccgaggcagatgtttccgtctttaggaaggaagacagcatttctctgtacaaagcactttcagtttttacagagcaataatatttaaatgtaagacattcaacttgtaatcaaaatgggaaatagataataagacctttaaaggaaatatgcgtgatgcttttgtagtccatgttcaggatcatcttcctcttatttcttataagaaattttacaaggtctgtcctcatgtcattcagtgggcctgaaattgtatctgtttttccccttgctctaaaagttatattgaaggaatgattttgcactattgcacactaaaaaagcccctactcagaaattttaaaaacatctaaactcatattcagatatagtggagtaaatgaataattgtttcagccagagggttttctcaattagcattttaaggtcaaaatttaccctagaatcctgtagaatcagtggctgtgagtcacctactctttcctttcacataatctatttcttgctgtccacctactaggcaccaagtgaaataataccctttttatgtttctcagctctagcttgcagagaagagtaaagagaaataactactcagggcaggaagatatttgcaagaaggtagcaaacccccaaatccctttgacggtgggaacatcaaactgagcccttgaagactagagttctgggtactcaataatgttcaaagtaaaaatacttcagcaaattggatcaacactaatttataaactaaattaaacaacatgcattaaatgtaatctatgggaagccacaaaatattttgctttgcatattttttaaccttagtgataacaattcttagaccaaaatagaaatctccagtgttgcctgtttgtcaaggaagccttcttcattatatttcaggtggaactaaggagcacaattattttgataaacttcttttttactttttcattttctagagatagtgtcttgatctcttatgcaggctggagtgcagtggcgcgatcatagctcactgtatcctcnnnctcctgggctcaagtgacccttccacctatgtctgtctcctgagtagctgggactacagatgcatgccaccatgcccagctaatttttattttattttattttatagagaaagaatcttgcaatgttgcccaggcagatcttgaactcctagcctcaatcatcctcctacctcagcctcccaaagctttgtgattgcaggtatgagccactgtgccaggcctctttcttacaactttagaatttttccataagatttctcctgtaggtaaagccaggttattcagtggaacttatccttggaatatatgtaaatttgtgccagcagatttttttgtcttttttatttggttgccaatgttatgatagccatttctttctcatcagtttggttcatgctgaatgccttgtgttggtgaaccttantgctatgtctttattagcaaagcctcagaggtatttcggcatttggccaaatatttgcaaaatgtgccagttagtcaagtggagaattcatttatttttgggcaaataatgggtttttaaaatgggattttcaggtaaagtgctactacatagtgaaagcctgctatggtgcaaagcctgctatggtgcaaagcctaggagatcaccaagaaccagcccttcccttccctccatttcctgggaatcacagtgtcccaggaagctctcatctttcattagctattgactgagagagatttttgcagctgcaatggaaatgccctctcgacagtgtcacttgcttttggtttaagcccgaaaaaggtacagcaggtcaagtcccatttgctgctgtttgactggagtgtgggcttgtgtgtgtcttcaccctctagcacagacttgttttttttttttttttttttttttttgatgagactacaaggaagaacacttttccttcactgcatgtattttactgttattattgttgaaaccattccttccacctccaacctttccccgttaccacacacacacacacacaccccaaacccgaaaccaaccacaacagcaaaaaacccaaattatataaagggcaaaggtaatgcagttaatctctgaattactttggattcctaacaaagaaagaacctaaacaagaacagcatctgtttaaagtaaaagaatgttttcttacaaaaaatattgttattgcttattttagaattgccattatgcttctgaaacgtactatgagagtaataaatgttaattaccagagattagaaagtgcaggcaaggagaaagataaaaaaagtctccaaaattatactcaccagaaaaaaacaatcaccgttagaaatctcagggtaatgctttccagatacttctttttctttttccttacttttcacatttttttcttttactttttgtattttattttatgctttggatggggatgtaggtatatgngagtgtatttgagtgaacacaagtatgttttttcatataggtcatgatgatgatgatgatgattacaggcagtctttctctgttgctcagactggagttcaggggtgcagtcatngctcaccgtagcctgnaactgctgggctgnagtgatcctcctgcctcagcctcctgngtagctgggaccacaggtgtgtaacaccaaacctggtagatttttaaattttttgtagagatgaggtctccttatgtttcccaggctggtctcnaactcctgggttcaagggattctcttgccgtggcttcccaaagtactgggattacaggcatgagccaccatgcccagcctatacagaatattattttgtatcgattattctaaaacggcttaattctttcatgttctggtgggggagcaggtagcagagtgttataagagagaatatcccagaataagtgaccagagaaatcctttttggtgaatgacatttatggtgagatattaaggttgagatctgttgtcatgctaagaatggggagacgaactttgtaggtagcagggatcccagttgacaaggcctttgggtggaaggagagcttggctcactcatgcatctgaaagaaccagggggctgaagcacacaggaaactggagagacaagatagaaggtgggcagggatcagatcatccaggcatcttcaaggccatgcttgtttaacttaatgtattgtgactgtctttctgtggtcaacattctaaaagcggtagattttggtgttaagagcctggccactggagtcaaataaatccattgtgtaaacttagacaagctaattaatgtcccctagttttaatttccaaatctttaaagggagatgattgtaggcaatgtctgaagggaccattggggaaaaaaagtcagattatacgtataaaacaatgaagaggctggcaccacttttaatcagttttatggttgaatttattcaacactcattgatggagtaaccaagggcttggtcaagaaaggttatttagcagaagctataatggagcttcaaagagcagagcagtgaaacttgtacttctcctcctcaccacctttggaataatgagcccaggtgctccattgaccagcgtcctcatgcagagccaagtgctattactgtctttttaagttcttaagggcagaaccgtggcttttcttacttgttcttacccagcaccatactctcactcaggacttttttcttttttttttttctttgagacagagtctcactctgctttccaggctggagtgcagtggtgtgttctcggctcactgcaacctctgcctcccgggttcnagtgattctcctgcctcagcctcccnagtagctgggattacaagcacgcaccatcaggcccagctaatttttgtatttttggtagaggtggggtttcaccatgttggccaggctggtctcgaactcgtggcctcaggtgatctgcccacctcagcctcccaaagtgctgggattacaggcatgagccaccgctcccagccagcacttttgaagtagagatggttggtgaatccacgtggaatgtctgataaataacgaaagccaccgtgaatcacagccttttctttccagaagggagatcacacttttactccagtgcagactttatgtatatagaaaaattgaaacatactttaaaagatgtttaaaatatatttcagcttttaaaaaggaggttgaaaatctgtaaaattgtatgattccattaaaaacatggcatacatccagagctcttgtggcacttgtatcaagcggtacagctatgcacactctctaaggcgggcagctgtaagggctgtcctctgcttctggcatgccacattggctaaatatatcgaccatcacctctgcatgcacagcagtaattattgacgtattcctgatggttttctctggctgtgaaattatgggaaattaaatatagtttatatttttacaatgaacacgtattacctttataat

SEQ ID NO: 70057 - DNA, 453 bp, Homo sapiens
tcacagagttaaaattttcttttgattgagcagtttggaaactctctttttgtaggatctgcaagtggacatttgcagtgctttgagttcaatggtggaaaaggaaatatcttcacataagaactagacagaagaattctgagaaacttctttgtgatgtgtgcgttcatctcacagagttgaacttttctttttattgagccgtttgaaaacactgtttttgtagaatctgcaagtggacatttgtagcactttggagccaatggtagaaaaggaaatatcttgacgcaaaatctacacagaagcaatctgggaaacttctttgtgatgtgcgcgctcatctcacaaagttaaacctttcttttgattgagcagttttgaaactctctttttgtagattctgcaagtgaacgtttggagcggtttgagacctacggtggaaaaggaaatata

SEQ ID NO: 70058 - DNA, 318 bp, Homo sapiens
aatcagaagacttgatattgttaagatgtcaattttctcaaactaatctatagattctacagatttgatagatctatagatccaaggctctctcactcaaaatctcagcatgaattttttaaaaaacttcataaactgattctaaaatttatatgcaaaagcaaagaaactaacaattttggaaaaaagaacaaacctggaggactcatatttcaagattactattaaccagtaatcaagactgcattgctgggcgaggcgcagtggctaatgcctgtaattccaacactttgggaggccgaggcaggtggatcatgt

SEQ ID NO: 70059 - DNA, 998 bp, Homo sapiens
acactcaaagggaatgttcatcgagcatttaggattaccgatgttcagatttgggatactcaactggtaaatataagccaaatatttcaatatttgaaatccaaaacacttgtcccaaggatttcagataacgggtactcaaccaataatgacacatgattctatttttttttaaacaagggtagggaagacagattaaaccagtaaaattaaaatctcagggacttttaaagtcaatgttttgtaaaaataagactggactagataatgttggaccattttattgttttatcatttttatggattgtagaagcttaacacaaagttaaaatgagaatgaaatgacaggattttgtttcaagaaggaaggtataacagctgccatttattatctactgtgttccaggtgtgatgtggttgatagataatgtcatcagtgaatgttgaacattactatttatttaaaattatcgtggtttgaacaaaacaggacaagcacagcgcacagttgtcttgagttttcctcttgattgccacattgtaataatatataaggctcaaacttacagatctttttctaatatatatggagtttctattattttgttattccttgccaaaaaaaaaaatcactagttaattctagtactgattacaaaagaatgacttaaacttctaaattggccattcacatgtactcatattattattgtgagttactttgctttaggaggaaaaaaaaggggattgatttcaagtttgaattaagtttgacaatgttgggaagagtcattagtcaggcccttatattgctagggctagttgagaacccaaaagttaaaaactttggaaatagcaaagacatttcactccaaagtaaaatgcaagtttaatttttttggctgtacagggtttctggcttcatctttgaatgccaatatccttcaaccttttatcctcaagtatctatgatactcattgctgactcctgaaagcag

SEQ ID NO: 70060 - DNA, 605 bp, Homo sapiens
aaaatcttgaatgaactgtcttgggcaaacaaaggaattctagttttttatctgccagcttttaaaaatttcccatctttgaaaggaaagtgttacattaatcacaaactcccatggtcaaggtgatagcaaaacaacactgtattctggttggaaccttggaacattcagaccttggagagaacaagcaaaacattttcataattatgatgtcatgtgggttgaaagcagagtcttgatttgagttcctctgctgcccataaacagctgggtgggaatttgggtcaatcccttcacttctctatagctccctttcctcatccccaaaatgagatgcttgtttgatttcagagtttcctgctaggtctacaattctgtgattagcatctctgctctctggaatattcttttatgtccggtgacttaaatcagattatcaaatatttattgaacacctgctatgtgtccagaaactgaaattatttgaaaaattggatctgtgggggaaagaaggggctgagaagggacaaatactagtaaagagaaatggatggagctcaacaactaagaatttttgaactctaataaatgtttctactttctcg

SEQ ID NO: 70061 - DNA, 173 bp, Homo sapiens
ttgcatccaatgttgttttagatattaagtagtataatgtgggattataccacatattgcattactcaaatcttaaggaaaaaaaggttgctatctaaaatgtgaatataagataagtatgtttttcttgggggagaggataaacctgtaaggtcagcattacattgaatcta

SEQ ID NO: 70062 - DNA, 679 bp, Homo sapiens
gctttggacattcatagttacttgggacaacagttttagcagggctctctttctcctttcctgatctctctgttaagctgcctggctcatttgatatcacatccaaattatcagctgattgctctattgttttggacaatgccctgaagcataccaaaatgtgtctggaattggtgggttcttggtcttactgactttaagaatgaagttgcggacttttgcgtaagaagaaagcccaaagacaaaaccagaggcaactggctgctgcatcgcccacctagtggcagtagtgtgagctatggacaaaagatctaagtctccaggacaaagagttgtgcagctgctcattttcctgttgacttctgtctaagacttggagatgtttgtaagattgggacctacctacagagctccagagggaagtgagaaggatgttcacttgctggtgagagaaggagctggttccatccattacgcagtcccctgggagcgctaaatgcaactttatctcaacggggagtggacgatgagcaggacgtcgctagagggaaagagcctcacttcccgtttcctttggcagcgcccttttcccgacctaagggagcagaccttcgttggttggcgtgaggactggcgggagaggttttgtgccaggatccgcactgtctggggtgaacgc

SEQ ID NO: 70063 - DNA, 853 bp, Homo sapiens
gctttggacattcatagttacttgggacaacagttttagcagggctctctttctcctttcctgatctctctgttaagctgcctggctcatttgatatcacatccaaattatcagctgattgctctattgttttggacaatgccctgaagcataccaaaatgtgtctggaattggtgggttcttggtcttactgactttaagaatgaagttgcggacttttgcggtgatccaccctaccacatattgtctcctaatggccgtccagtttatcctggagcccttgcatgacacaggcctatcgaagcataggagatgccaatattttacctcttgggtactttctgtgtagaagattcataacaagaacaatacttattctgcaattctttatataaagtaagaagaaagcccaaagacaaaaccagaggcaactggctgctgcatcgcccacctagtggcagtagtgtgagctatggacaaaagatctaagtctccaggacaaagagttgtgcagctgctcattttcctgttgacttctgtctaagacttggagatgtttgtaagattgggacctacctacagagctccagagggaagtgagaaggatgttcacttgctggtgagagaaggagctggttccatccattacgcagtcccctgggagcgctaaatgcaactttatctcaacggggagtggacgatgagcaggacgtcgctagagggaaagagcctcacttcccgtttcctttggcagcgcccttttcccgacctaagggagcagaccttcgttggttggcgtgaggactggcgggagaggttttgtgccaggatccgcactgtctggggtgaacgc

SEQ ID NO: 70064 - DNA, 1013 bp, Homo sapiens
gctttggacattcatagttacttgggacaacagttttagcagggctctctttctcctttcctgatctctctgttaagctgcctggctcatttgatatcacatccaaattatcagctgattgctctattgttttggacaatgccctgaagcataccaaaatgtgtctggaattggtgggttcttggtcttactgactttaagaatgaagttgcggacttttgcggtgatccaccctaccacatattgtctcctaatggccgtccagtttatcctggagcccttgcatgacacaggcctatcgaagcataggagatgccaatattttacctcttgggtactttctgtgtagaagattcataacaagaacaatacttattctgcaattctttatataaagctaaaagaaaatgcattctgccaacaactaatgagcttggaagagaactccaaaccccagaagaggcctgtcacattggctaacaccttgatttccacccactgagaccttgagcagagacttcagttacaccccacccagacttctgacctgcaaaacttaagaagaaagcccaaagacaaaaccagaggcaactggctgctgcatcgcccacctagtggcagtagtgtgagctatggacaaaagatctaagtctccaggacaaagagttgtgcagctgctcattttcctgttgacttctgtctaagacttggagatgtttgtaagattgggacctacctacagagctccagagggaagtgagaaggatgttcacttgctggtgagagaaggagctggttccatccattacgcagtcccctgggagcgctaaatgcaactttatctcaacggggagtggacgatgagcaggacgtcgctagagggaaagagcctcacttcccgtttcctttggcagcgcccttttcccgacctaagggagcagaccttcgttggttggcgtgaggactggcgggagaggttttgtgccaggatccgcactgtctggggtgaacgc

SEQ ID NO: 70065 - DNA, 1029 bp, Homo sapiens
cttttctgctgctaccaggagacctgggagatttaatcttaacttttctaaatgtctctctcttcccctctttactcatctgtcaaggttaccttctttctgacacttcattgatgaccttctcccagccccactccagacaaaattagccactcctttctctgtactgtcttatagagtacaccttctgctgtagcaaatagcatattacattttggttattcatgtacatgtcattttcaaatcgagctattcaaaggcaggaactgtcatcttaaaaccataatgtattgagtattttacatatattatctcattcagtttttacaataaacctaagagctcaggggggttaaatatcatgctccactgaaatgtaattactcagcaaaaatagggcttgaaactaggtcaggatttatatctatacctagcacagtgcttggcatcaggtgtgtagagggtcaataaatgcccaacaagtaagtaattaaatgtacaaactgtatgttacaagaaagtcttttggccatcagatgaaaacaagtcctttcagttactccccacagctgtgagtatgctgcggactttaattcaaaccagaccttaatacctaggagaagaaggatatatcacaaagccgaattaccgggaacaatgctgtaaccacctcagttaaggtcatctaccgagcttggccttcccaataatgttgttgacatcagaaaaatcatttaaagattcaatttaaaatgttaatactgcagtgtcagaaacatacaaacatgaaacaagaaaaaaagccttccttccattgtgtgaaatgagctttgtcatgccctgtgttcagatggaagattttcttttgctaaaatattaagacctacttaatgaactttgacaaagcaatgcacttttccaagtttgcatagtttgcgtggttatctgtttttggtaccactatctcctgtgttcctgaaggagtttcttgccatgatttgaatgaataaagatcttttcgaactaaaa

SEQ ID NO: 70066 - DNA, 1108 bp, Homo sapiens
ttttttttttttaaagcctttatcggtatgaaaggttgaatgctctaggtttgagcactgctttctcggcttgctcttctggtgcagtataggcacacctagagggccacgtcagtctttgcgatcaccaaatctggttctgagaaataggcactggcaatttacacatgccttgctgtgtaatctcactatatttgctcaggcaaagtgggagaagcagccttaggttttcattctagagatgccggctttcccacctgatcggcttagagttcacgattgactgttttgggcttcatttcaccctctacataacaagcgggtggactagatgccttagcaagggtccgtgttgtgtggtgtctccagccacgcactcagctcaatcttagcacagttaaaaaatgcctttctagcaagttatctgcccagtgcctgaaaagtatcatttcttgtgttcaataaaaagcctcctaatttaatcaaggacctatgagataactgtcttttagttgtggcattgcaaggatacaaatgcagagatattttaaagtgatccttctgtaagagtgaaccaacgatatgatctgaaagcaacttcacaggtaattcaggcttatgattttactgtgtatgtatttgggagaagaaattctgtcagctcccaaaggataaaccagcagttgctttattggtcttcagatgtggctgcaaacacttgagactgaactaagcttaaaacacggtacttagcaatcgggttgccagcaaagcactggatgcaagccttgccttccagaagcttaccagtcgggttgccagcaaagcagtggatgcaagacttgccctccaggagcttaccatcacaacgaagaagacaaataaatgcataatatatagacgacataaatccatactgtacacatttaagaataaacagtccagtagtaagaggcagtacatattcaatctgctgagaaatgtagacaataactactataagaatcctaatgctacagaagtcactggctgctgggaaaccggggaaaacttggctatggacgtgggggcttgtgtcggactctgaataaagagcagaatgattggc

SEQ ID NO: 70067 - DNA, 1293 bp, Homo sapiens
ttttttttttttaaagcctttatcggtatgaaaggttgaatgctctaggtttgagcactgctttctcggcttgctcttctggtgcagtataggcacacctagagggccacgtcagtctttgcgatcaccaaatctggttctgagaaataggcactggcaatttacacatgccttgctgtgtaatctcactatatttgctcaggcaaagtgggagaagcagccttaggttttcattctagagatgccggctttcccacctgatcggcttagagttcacgattgactgttttgggcttcatttcaccctctacataacaagcgggtggactagatgccttagcaagggtccgtgttgtgtggtgtctccagccacgcactcagctcaatcttagcacagttaaaaaatgcctttctagcaagttatctgcccagtgcctgaaaagtatcatttcttgtgttcaataaaaagcctcctaatttaatcaaggacctatgagataactgtcttttagttgtggcattgcaaggatacaaatgcagagatattttaaagtgatccttctgtaagagtgaaccaacgatatgatctgaaagcaacttcacaggtaattcaggcttatgattttactgtgtatgtatttgggagaagaaattctgtcagctcccaaaggataaaccagcagttgctttattggtcttcagatgtggctgcaaacacttgagactgaactaagcttaaaacacggtacttagcaatcgggttgccagcaaagcactggatgcaagccttgccttccagaagcttaccagtcgggttgccagcaaagcagtggatgcaagacttgccctccaggagcttaccatcacaacgaagaagacaaataaatgcataatatatagacgacataaatccatactgtacacatttaagaataaacagtccagtagtaagaggcagtacatattcaatctgctgagaaatgtagacaataactactataagaatcctaatgctacagaagtcactggctgctgggaaaccggggaaaacttggctatggacgtgggggcttgtgtcggactctgaataaagagcagaatgattggcgtcctactgagatacatagtaaagggggcgagggcagggaggaagtggcaagaataacatttgtgaagatgtccaggtgagaaatagaggttttaatgctcaagatgtttccttttcccttttaaatctgacctgtgatttccagcattgctatttcgaatatcactgattgtttttaactttaa

SEQ ID NO: 70068 - DNA, 1246 bp, Homo sapiens
ttgacttctgcaaaggtgtgatcggaagatacatgataaccttggccgatatgataatcatatgcaaagtatgaaaaacacttgtttttcctactatgtagagactagatggaaactttggatcgtatgttcccccccctcaaactgacccacttcttatttggagagttggttcttctgaagtctgtattctcttgtaaaccatctctgtaagtaaatttctatattgtcttggcctcattttgatactgcttattggctctccccttacttggctttctctgatccataacatcaagggtacagctgggctccagcggtcatgtccggcagaggaaagggcggaaaaggcttaggcaaagggggcgctaagcgccaccgcaaggtcttgagagacaacattcagggcatcaccaagcctgccattcggcgtctagctcggcgtggcggcgttaagcggatctctggcctcatttacgaggagacccgcggtgtgctgaaggtgttcctggagaatgtgattcgggacgcagtcacctacaccgagcacgccaagcgcaagaccgtcacagccatggatgtggtgtacgcgctcaagcgccaggggcgcaccctgtacggcttcggaggctaggccgccgctccagctttgcacgtttcgatcccaaaggccctttttagggccgaccacttgctcatctgaggagttggacacttgactgcgtaaagtgcaacagtaacgatgttggaaggcttatgattttactgtgtatgtatttgggagaagaaattctgtcagctcccaaaggataaaccagcagttgctttattggtcttcagatgtggctgcaaacacttgagactgaactaagcttaaaacacggtacttagcaatcgggttgccagcaaagcactggatgcaagccttgccttccagaagcttaccagtcgggttgccagcaaagcagtggatgcaagacttgccctccaggagcttaccatcacaacgaagaagacaaataaatgcataatatatagacgacataaatccatactgtacacatttaagaataaacagtccagtagtaagaggcagtacatattcaatctgctgagaaatgtagacaataactactataagaatcctaatgctacagaagtcactggctgctgggaaaccggggaaaacttggctatggacgtgggggcttgtgtcggactctgaataaagagcagaatgattggc

SEQ ID NO: 70069 - DNA, 415 bp, Homo sapiens
agttcacgattgactgttttgggcttcatttcaccctctacataacaagcgggtggactagatgccttagcaagggtccgtgttgtgtggtgtctccagccacgcactcagctcaatcttagcacagttaaaaaatgcctttctagcaagttatctgcccagtgcctgaaaagtatcatttcttgtgttcaataaaaagcctcctaatttaatcaaggacctatgagataactgtcttttagttgtggcattgcaaggatacaaatgcagagatattttaaagtgatccttctgtaagagtgaaccaacgatatgatctgaaagcaacttcacaggtaattcaggtatgtgacttctacctcttagggcctgttgtagcttagaatgagagacctgcagaaacatgcccaccatc

SEQ ID NO: 70070 - DNA, 968 bp, Homo sapiens
taagggctatcgtcgacccacgccgtcgaggggctccagcggtcatgtccggcagaggaaagggcggaaaaggcttaggcaaagggggcgctaagcgccaccgcaaggtcttgagagacaacattcagggcatcaccaagcctgccattcggcgtctagctcggcgtggcggcgttaagcggatctctggcctcatttacgaggagacccgcggtgtgctgaaggtgttcctggagaatgtgattcgggacgcagtcacctacaccgagcacgccaagcgcaagaccgtcacagccatggatgtggtgtacgcgctcaagcgccaggggcgcaccctgtacggcttcggaggctaggccgccgctccagctttgcacgtttcgatcccaaaggccctttttagggccgaccacttgctcatctgaggagttggacacttgactgcgtaaagtgcaacagtaacgatgttggaaggcttatgattttactgtgtatgtatttgggagaagaaattctgtcagctcccaaaggataaaccagcagttgctttattggtcttcagatgtggctgcaaacacttgagactgaactaagcttaaaacacggtacttagcaatcgggttgccagcaaagcactggatgcaagccttgccttccagaagcttaccagtcgggttgccagcaaagcagtggatgcaagacttgccctccaggagcttaccatcacaacgaagaagacaaataaatgcataatatatagacgacataaatccatactgtacacatttaagaataaacagtccagtagtaagaggcagtacatattcaatctgctgagaaatgtagacaataactactataagaatcctaatgctacagaagtcactggctgctgggaaaccggggaaaacttggctatggacgtgggggcttgtgtcggactctgaataaagagcagaatgattggc

SEQ ID NO: 70071 - DNA, 1053 bp, Homo sapiens
aaaaaaaaggggggatgtcctttttctttttttaagggccagggggttggtcaaattccccatcgattaatttttttcttctgtggggatttttttcaactttttaacaaggcccaactaattgcccatgggacaatctacttttccccccaatttatcgttttgagtagggaaaggttcattttttttcattccccggctttaagttaaagaattcattattttgcatacatttgagtcattctgtgacctataaagtgtttttgtaactatctaattctaatggttgcaaagcaaagcacatgactgtaaaaccaagcaaggtgttttagtaactttttccctgaatacttggtagtttccattgatactattccaaaacaaattctgctgttttaggttgtatatttactttgcttttgttctaagaaaaagccaaggactaaatcaacttgtttttgtgtttcagtaatcagtttaaaatctaagatttttttttaaattagactatttaatgaagtgccatgtaattgtagcttgctagtgtttaatgtttaatagactggttctgtaggtgttttaaccatttaacactctctgccatccctggagaaagtggttctactcttactgaacacattctctctgacaaaatcaccagctgctttatttttctatttattacagttaaacagttgatgaggtctgaatcttgaccaaaactgctcagctgagatgtttttcacaatagacactgtacaaagtgtgcgtgcaaaaggacacggttggtagtattttttcattaatgtgaacattgactaaaaaaaagcagtcctgccttttaaatcttgtggcagctcagaagggaggtgcttaagaaccttaactactatgtcagataacaaaatatttttttccattttggagattggttactgctcacacatgatgtatagggctaaatatatgcttgtttccttgcacctgtgtacttcccctctctccctccctttccttcccctgtaggcaataaatggccattttgcaactgca

SEQ ID NO: 70072 - DNA, 1216 bp, Homo sapiens
aaaaaaaaggggggatgtcctttttctttttttaagggccagggggttggtcaaattccccatcgattaatttttttcttctgtggggatttttttcaactttttaacaaggcccaactaattgcccatgggacaatctacttttccccccaatttatcgttttgagtagggaaaggttcattttttttcattccccggctttaagttaaagaattcattattttgcatacatttgagtcattctgtgacctataaagtgtttttgtaactatctaattctaatggttgcaaagcaaagcacatgactgtaaaaccaagcaaggtgttttagtaactttttccctgaatacttggtagtttccattgatactattccaaaacaaattctgctgttttaggttgtatatttactttgcttttgttctaagaaaaagccaaggactaaatcaacttgtttttgtgtttcagtaatcagtttaaaatctaagatttttttttaaattagactatttaatgaagtgccatgtaattgtagcttgctagtgtttaatgtttaatagactggttctgtaggtgttttaaccatttaacactctctgccatccctggagaaagtggttctactcttactgaacacattctctctgacaaaatcaccagctgctttatttttctatttattacagttaaacagttgatgaggtctgaatcttgaccaaaactgctcagctgagatgtttttcacaatagacactgtacaaagtgtgcgtgcaaaaggacacggttggtagtattttttcattaatgtgaacattgactaaaaaaaagcagtcctgccttttaaatcttgtggcagctcagaagggaggtgcttaagaaccttaactactatgtcagataacaaaatatttttttccattttggagattggttactgctcacacatgatgtatagggctaaatatatgcttgtttccttgcacctgtgtacttcccctctctccctccctttccttcccctgtaggcaataaatggccattttgcaactgcaaaaaaaaaaaaaaaaaaacaccagaatcgacaccaaaagcggaaaaacatagaacatgcaaacaaaacaaagggggggggtaaacaacagggggagaacacccctttaagggggcacaagtaacaaagggggaagggagaattgtaaacgcttgggagaccca

SEQ ID NO: 70073 - DNA, 822 bp, Homo sapiens
  misc_feature (765)..(765): n is a, c, g, or t
  misc_feature (787)..(787): n is a, c, g, or t
aaaaaaaaggggggatgtcctttttctttttttaagggccagggggttggtcaaattccccatcgattaatttttttcttctgtggggatttttttcaactttttaacaaggcccaactaattgcccatgggacaatctacttttccccccaatttatcgttttgagtagggaaaggttcattttttttcattccccggctttaagttaaagaattcattattttgcatacatttgagtcattctgtgacctataaagtgtttttgtaactatctaattctaatggttgcaaagcaaagcacatgactgtaaaaccaagcaaggtgttttagtaactttttccctgaatacttggtagtttccattgatactattccaaaacaaattctgctgttttaggttgtatatttactttgcttttgttctaagaaaaagccaaggactaaatcaacttgtttttgtgtttcagtaatcagtttaaaatctaagatttttttttaaattagactatttaatgaagtgccatgtaattgtagcttgctagtgtttaatgtttaatagactggttctgtaggtgttttaaccatttaacactctctgccatccctggagaaagtggttctactcttactgaacacattctctctgacaaaatcaccagctgctttatttttctatttattacagttaaacagttgatgaggtctgaatcttgaccaaaactgctcagctgagatgtttttcacaataaaaccttgtcccagnccgcgccaaaaagccccccggnggcagttttttttttttggggcccgtcctaaaaaa

SEQ ID NO: 70074 - DNA, 235 bp, Homo sapiens
ggaggcagaagttgcagtgagccaagatcacaccattgcactccaacctgggcaacaagagcgaaattccacctcaaaaaaaaaaaggtaaagattgtccaactggataaaaaggcaagacccaagtatatgctgtttataagaaaaacattttaaatataaagataccaatgggttaaatacaaaagggtagaaaagttatagcatgcaaatattaactgtaaaaatctggttt

SEQ ID NO: 70075 - DNA, 876 bp, Homo sapiens
caagtgcgatgcgtcgtcccccagactacagtaatactcaacaatgatcggcagaacgccattgtagccaagatggaagaccccttgagcaacagggcaccggattccctggaaaatgtcattagcaacgctgtgcctgggcgtcggcagaacaccattgtggtgaaggtgccgggccaagaagacagccaccacgaggacggggagagcggctcggaggccagcgactctgtgtccagctgtgggcaggcgggcagtcagagcatcgggagcaacgtcacgctcatcaccctgaactcggaagaggactaccccaatggcacctggctgggcgacgagaacaaccccgagatgcgggtacgctgcgccatcatcccctccgacatgctgcacatcagcaccaactgccgcacggccgagaagatggcgctcacgctgctggactacctcttccaccgcgaggtgcaggctgtgtccaacctctcggggcagggcaagcacgggaagaagcagctggacccgctcaccatctacggcatccggtgtcaccttttctataaatttggcatcacagaatccgactggtaccgaatcaagcagagcatcgactccaagtgccgcacggcgtggcggcgcaagcagcggggccagagcctggcggtcaagagcttctcgcggagaacgcccaactcgtcctcctactggccctcagagccgatgatgaagcaaccacacctcctgccagcgaagctcctgcagccacagccgcagccgcaggccctgcactacgcgctggccaacgtgcagcaggtgcagatccacagaatcggagaagacggacaggtgcaagtagtacgtaccctctccacctcgcac

SEQ ID NO: 70076 - DNA, 796 bp, Homo sapiens
cgttgcccagggtggcatgactgtagccagccctgggccttggagactctggcagagcgtggtgtccctcctaggtcccggccccttgtgggaggtattcaggtttctacctttccacaggggaggacgtgctgggggaggggagactctggcagcctccctttggttcaacttcagggtcagaagagattgtttgggaagctgctgagcttccaagcaggagtaggactaccccaatggcacctggctgggcgacgagaacaaccccgagatgcgggtacgctgcgccatcatcccctccgacatgctgcacatcagcaccaactgccgcacggccgagaagatggcgctcacgctgctggactacctcttccaccgcgaggtgcaggctgtgtccaacctctcggggcagggcaagcacgggaagaagcagctggacccgctcaccatctacggcatccggtgtcaccttttctataaatttggcatcacagaatccgactggtaccgaatcaagcagagcatcgactccaagtgccgcacggcgtggcggcgcaagcagcggggccagagcctggcggtcaagagcttctcgcggagaacgcccaactcgtcctcctactggccctcagagccgatgatgaagcaaccacacctcctgccagcgaagctcctgcagccacagccgcagccgcaggccctgcactacgcgctggccaacgtgcagcaggtgcagatccacagaatcggagaagacggacaggtgcaagtagtacgtaccctctccacctcgcac

SEQ ID NO: 70077 - DNA, 434 bp, Homo sapiens
tctcaggccctaggccaggcctcgttcccatcagataaagcctggggcggccggacgcagtgcaagcaatcgtgcctgactcacaggaagggaggaaaacaggaattcacgcagaagctagtcctccggaggctgagagcaaacggctgcactaggaacccagcagtcagaccggcccccaccctggagtgaacacatcgccactgccaggcatcgcagggatcgtggctgagcaaatgcagccgatgaaatggaagagcaaggggtgaagaaatgagtgaggtgcccacgcagccctcataatgccggggccatcggagagaagaccgggatgagtttttaggtggctgcttcctttggcccggaagcgcggcccaccctgcctgacttccagcactccgttcctcggcttctccatgaaaaggagaacgtgt

SEQ ID NO: 70078 - DNA, 1321 bp, Homo sapiens
ctggctgggaccgtgtgaaagcagctctctgctgcctctcatccagcccgctgtgtccttccacagcactcatctcaatttgtggttatttgacttttctcctgtccctctgggccgtccgcccccttcgttagaatgtaaactgtgtggagtgcaggcctcgcctgtgttactgtgccctcatctcaagctcagcaccgcgtcctgccctgggggcccccatgaacatgtgccgaatgaacgagcggaggaatgggggttggggcatttttattagttttccattcgcccaatcatttctaatgtggatcattttctttcaaatgataagagcgatgtttacttttctatgtttgaaaataagataaaataaaacaaaagacgcctgttgttttctcgggcagggatctgaagggagccgagctccttctgcagaagggcgctgagaagggagctggaaggaaaagaaggaaacattccttcctcaactggaggaagacacgcggccacacacagaaccagcggccccaggaccgtcaccctgcgtgcccgggcctgtccctcctgaccccaggattatagtggcgaggcagggtgttagccaagcggattgagccaggacacaacaccgcggagccctgcaggcgagtcctccggaggctgagagcaaacggctgcactaggaacccagcagtcagaccggcccccaccctggagtgaacacatcgccactgccaggcatcgcagggaggactaccccaatggcacctggctgggcgacgagaacaaccccgagatgcgggtacgctgcgccatcatcccctccgacatgctgcacatcagcaccaactgccgcacggccgagaagatggcgctcacgctgctggactacctcttccaccgcgaggtgcaggctgtgtccaacctctcggggcagggcaagcacgggaagaagcagctggacccgctcaccatctacggcatccggtgtcaccttttctataaatttggcatcacagaatccgactggtaccgaatcaagcagagcatcgactccaagtgccgcacggcgtggcggcgcaagcagcggggccagagcctggcggtcaagagcttctcgcggagaacgcccaactcgtcctcctactggccctcagagccgatgatgaagcaaccacacctcctgccagcgaagctcctgcagccacagccgcagccgcaggccctgcactacgcgctggccaacgtgcagcaggtgcagatccacagaatcggagaagacggacaggtgcaagtagtacgtaccctctccacctcgcac

SEQ ID NO: 70079 - DNA, 368 bp, Homo sapiens
ctcaccatctacggcatccggtgtaagtcgggccccatcttgggggactggggtgtgcggggagctgggtcaggacccacatttcactgctgagggtgctggcatcagtagcactggcacggggctgcgtttctccaggcggtttgaaatctcagcccgaggatcagtgctcgaggggatggatgcccggttgaccctgatgtgctcattactcatggcatgcctgtaccaaaatacctcatataccccatcatatatatacctactgtgtacccttagaaggtaaaaaactcctcgcctcctgtctgtaggccactcttgaggaagagagaggaggaggagagccagggccttccctgctgtcctgg

SEQ ID NO: 70080 - DNA, 350 bp, Homo sapiens
tgagatagggtctcactctgtcacccaggcgtgccatggttcgatcatggctcactgtactccagcctgggtgacagaatgagactttaataataataataataataattcagttcaaaagacaggttttaaagctttacggttgtagggaaaatccttttaaattcaatatgtagacttttttgttgttgtaaggagtataaataaaaaagtgcgattaaagacttaaatctaaaaatatcatattagaattatgcaggggaaatataatgaaaaaagttcacagagaaaaaaaggacaatgtaaaatttccaacttttaaagacacacttttcatgtgtatttttaaa

SEQ ID NO: 70081 - DNA, 173 bp, Homo sapiens
ggattacagacaagagccaccgcgaagggcttattttttaaaaaacactggagtcatggcatgtgtgtaaactttaaatatgcaaataactatgtcaaaaaaaaaaacaaaacggagctggatgtatcttgaggtccaaacatcataggtccatgatggaggcaggagtccaa

SEQ ID NO: 70082 - DNA, 415 bp, Homo sapiens
gttcctgagcgctgaggagtatcagcagaagatcatccctgtggtggtcaagatgttctcatccactgaccgggccatgcgcatccgcctcctgcagcagatggagcagttcatccagtaccttgacgagccaacagtcaacacccagatcttcccccacgtcgtacatggcttcctggacaccaaccctgccatccgggagcagacggtcaagtccatgctgctcctggccccaaagctgaacgaggccacaacctctactcaatgaacgactgtgcccagaagatcctgcctgtgctctgcggtctcactgtagatcctgagaaatccgtgcgagaccaggccttcaaggccattcggagcttcctgtccaaattggagtctgtgtcggaggacccgacccagctggaggaag

SEQ ID NO: 70083 - DNA, 801 bp, Homo sapiens
cttcctgggaagtaaggcataaccgagacctagcctcccggtagggaagttcatccgtttagtaaacagccccaactacgtgcggaccctcacggggatacgaagaattcaaccagggctggacaagtcagagtgggccaaggacaagtgagcattccagagaatttctacatgaccagctgttcattcttttaagaggatgacattcttcagctcatctggaaaggatacttcctttaagtctgttattcacagtctccaagggcaggtgtagttgggaaagacatttcatatggaaaaacaaacttgatagggtaaaaaaaaaaaaaatgagatgtaatctggaggcccaagtcattttcttaggagaaactcaaatgtgtttggtgttatctaaccttctgcagtttatcagtctgaaacaaatgcattctattctcatttgaaaatgtctgaacagccaccaattttcaaaatcacccatttaactagagactttaaagcccagaatttgcagttacgtatttcagaatgatttagtaattttgtgagcagctcagaggttaagtctacaatgtctgactacggtgcattattgaaaatatcagtagtgtaaggatcccgtagattggtgataactttgctcttgttatttcaacagttaccaccaacagttggtgacttaacaaattaagagcatagttgccatatgctcatatttggcaaatatgtcaaaatggccatatttgccaatttttaagacaataaattcacagaaaatgcattacagaaaataactta

SEQ ID NO: 70084 - DNA, 1837 bp, Homo sapiens
ttgttgatcttttgttttcctcgtattttcgtggtacttttcgctgctgtttgttgattttcgttggatggttttctgtcactggacattttaaagcccttggtagaagattcctcacactattttttagaggctccttttcgttgcttccagtgtaacaagattctcccggctggcgtcttatttaagagattattcggctctttgttggacctttctgttgggattcagcatcttgggtcgttgaaagacgtaattcccaggcccatttagttacaacataagcttacacttgaaaggaacaattccaagaggatctcgtggtgcaacgttgctgtgtaggcaaaaccgttccaccagaagccgataggcagtagtgtttttcagagtactgccacatgttttttgttttcatgccgttgctacattgctcttgtatacggtatttaaatagtcgtagcgtgccatccgccttgaagtaacctctccacgagtaagggctggcacgcatatcttgtagacccctttgagttcctcatgtgaacaggacaacgttcatctaccgtgaaaaattcgtccaaaacctttctacacagtgtcaagagggtttccagaattcaggctctgattatttagtggtgacaaaaaggtagcgtgtctccgatactaattttactgtacttagatacattctatcgcccatattttgcttcacacgacactctataggagtgtgcatagtcgtactcgtctgaactcatcagtatacagttctttgttgactgtttttttttttttattctatttttgtttctttttgtctattttttttctttttttttttttttttttttttttttttttttttttttttttttttttttttttttttttgtagtcagaacaaaggacaacttttatacacgagggcgtcctgaatattcatctaagaaacaatgtctgatcaaacgggacaatccagccagcaatcctgagtcccaccggattatgcttggccagctttctagccttcacattgttaatttattagcaatcttttcaggagaaaggcaattattaaaattatgtggacttctagtaaaattatctcgaagatttacaattatgtataccaataacaaaaaaactacatgttttctgctcccctgcctttgtaggacaagtgagcattccagagaatttctacatgaccagctgttcattcttttaagaggatgacattcttcagctcatctggaaaggatacttcctttaagtctgttattcacagtctccaagggcaggtgtagttgggaaagacatttcatatggaaaaacaaacttgatagggtaaaaaaaaaaaaaatgagatgtaatctggaggcccaagtcattttcttaggagaaactcaaatgtgtttggtgttatctaaccttctgcagtttatcagtctgaaacaaatgcattctattctcatttgaaaatgtctgaacagccaccaattttcaaaatcacccatttaactagagactttaaagcccagaatttgcagttacgtatttcagaatgatttagtaattttgtgagcagctcagaggttaagtctacaatgtctgactacggtgcattattgaaaatatcagtagtgtaaggatcccgtagattggtgataactttgctcttgttatttcaacagttaccaccaacagttggtgacttaacaaattaagagcatagttgccatatgctcatatttggcaaatatgtcaaaatggccatatttgccaatttttaagacaataaattcacagaaaatgcattacagaaaataactta

SEQ ID NO: 70085 - DNA, 358 bp, Homo sapiens
gtaagagttacggctgctactgtgcccacgttggaacagatagattagttcatctgctagttgtgtggcaagagcaaagaattcaagaggggaagagaaagtgagaggagcttagagagctaagcaagaatcgaatcctttgtgtgtcatggtaagaaattcgaacttaataccaaggtagtcagaacaaaggacaacttttatacacgagggcgtcctgaatattcatctaagaaacaatgtctgatcaaacgggacaatccagccagcaatcctgagtcccaccggattatgcttggccagctttctagccttcacattgttaatttattagcaatcttttcaggagaaaggcaat

SEQ ID NO: 70086 - DNA, 937 bp, Homo sapiens
gcccacccaccgtgctccttgggcccagcccaagctgggaccacttcaaatgatggggtgcctcctcaccttcatagcctccaagggatgccaggacttgacctttcatttttctacagactaaagggaccctggaattccaggagggagacctgaagatatggagtgggggtgatggaggatgggcccccatctttgggaatctcagatcagggtcgtgttcttcctccttgccctggaggtttgcagagaccccactgggacaggagccactctcggcctggtgacccctgtggcatagagagggtaagtagtgaataatgaagggacaggctccaggaaggccttgctcccctcactctccagcttctcaggacctgcccccggccccagaatctagcctggcccctaacagccttttcagcccaggggcccagccaaatacttcctgtcacagtggctggaccgagaaggtccagggattatctcagcccctccaagtaaagtagaagagggaaggagcagacatcataacaaaaggagtgcaggctagacacccagaaggacttccctcagcacaggttttggctcttagaatgggttttttaaaaaaaggatctttcttaattccaggactcctgagttgggggcagggcagccgattcttgctgcccgctcccggggaacgggcgccctgcaaaagaggtggaaacggtagggtccgtatcccctggccaccaccctctcccttcctctccaagagctactccgcccccgcgtgccgtcctctcctggctggagagccggcgtcctaggtccccgggctgcgggccggcaggggaggagttaactccggaggtaccggctgggctcactgtacctgccgccgccgccgccgccgccggtgggagggacgaggaagcgggagccgcctggg

SEQ ID NO: 70087 - DNA, 932 bp, Homo sapiens
ttcatgtctcgatttcttgtctgtaaaatagagatagtaacatttgtaaaagagggtgatttaatggttaaaaaagcgggaatctgtgtatggtatctagctcagtcctcgcctccaactccgcagctggtaaataacggtcgttttagtgtgatctgataggcgctgcagtggagatggggacaaagggctaagaaaacagaggtctgtgagacagggaagggcaagagggcaaggttcccggtgagaagctctgtccccacacagtgaaggaggaaactaggggaccacaggcagaaactaggagaaaccacaggaggaaactaggggtcttgaatcctggagcaggaacttactgtttctcttagaatatttcctggtcgtttatgtgatatttttctgatcataaaaagtacatatactgtagaaagtgtgcacgtgttttagtctctttcctctatctcctcaccctttccccaggccatttaagttagtattctcattaaagatgtgtaaccggtaccactcgaaattcttccaaaatgtcccctttttttgcgggaggaagtcagcacactttttctcatccaccttatctgtaggtgactcctgctgggatcagaaactttgttttcgtcacactgagcctcttagagctgacctggctcagatcccaaactctgggcccatcatttacacatgaagaccccttgtttctacagttcatatcttgaccttcctaggctgccaatgcacttaacatccaaataattgtatgatatttggatcgttcaaaagactgaaatgcatataggtgtgtgtgttcatgtatgcatacatgttatgcagtataccagtacaatgaaagctggaaatctgtcacccagcctaagttagaatgttcccagtataatttgtcaaaaatgtaatgc

SEQ ID NO: 70088 - DNA, 770 bp, Homo sapiens
caggagatgagcctagcactctgactcgtaggccagcgcaatctccaggacaccatgcggctttgtgatgttttcagataagaggcggaagagggtactggttaagagcccaggttctggcaccagccaacctgcattccaatcccatctccaccacctactaaccacctgatcttgtgtgagttccttaacctccccaaacctgtttccttacctgcacaatgggggtgggagagaacagtcttactccatagagttagagtgatgattaagtgagatgatgaacataaagtactcaaattcatgtactcaaaaaatgtgagtggcaggcacagtgcaggacccacaacagagatcaaggaacacagtcctgctctcacggagcttagactttaggcaaaccatacacagaaaaaagtaaacagataaaatacttacaaagtgtgttaagaatgattaaggtgcagggcgcagtggctcacgcctgtaatcctatcactttgggaggccgggtcaggcagatcacctgaggtcgggagtttgagaccagcctgataaacatggagaaatcccgtctctacaaaaaacaaaattagccccaagcttattgggcatggtggcgcatgccagtaatcccagctactcgggaggctgaggcaggagaattgcttgaacccgggaggcggagactgcagtgagcagaggtcgcaccactgcactccagcctgggcaacaagagcgaaactctgtctcaaaaaaaagaatgatta

SEQ ID NO: 70089 - DNA, 306 bp, Homo sapiens
tttttgtgggataggtggaaaagttggaatttgggcagctggcattgttttacaggaaactgctttttgattttatgttttatcttcgaaattctttataaaaatatcttgtttgtattcttcaagaactctttcttgttctctgcttattgttttaattgtaactctgttctcatttcaaggacatactgtcttctctggggacatttattatggctttttaatatgtattccagggagaatattacatctttttaaaaagtatttctcttcccattgcattgacttttacttctacttctttaa

SEQ ID NO: 70090 - DNA, 3483 bp, Homo sapiens
  misc_feature (1)..(1): n is a, c, g, or t
  misc_feature (4)..(4): n is a, c, g, or t
  misc_feature (9)..(9): n is a, c, g, or t
ngcncgagngctgggtcacagcccgggccgcacagcccgggccgcaccgcccgctccgcgaggaagtgacgactgcgccgtcccgagagcaacaaagttagagtctgcgggccgcactcgcctgcgccccgcacccctccgagcagcccggggatccagcacgcaggtgccagaaccctgtggagcatcatgaactgggaagagtagctgagccccagagcctctctggaagagaaaggaagagccagcagttctttctcccagtgtccgacctcactgtccagcgtcttcctctgcccctgctctgccctccctggctcctggactagagcccggcttccagcaggacgtttccccaggggatgggcgactgttgaaggggatctcaccgccagggctcagttggccacatcatgaacctccaggcccagcccaaggctcagaacaagcggaagcgttgcctcttcgggggccaggaaccagctcccaaggagcagccccctcccctgcagcccccccagcagtccatcagagtgaaggaggagcagtacctcgggcacgagggtccaggaggggcagtctccacctctcagcctgtggaactgccccctcctagcagcctggccctgctgaactctgtggtgtatgggcctgagcggacctcagcagccatgctgtcccagcaggtggcctcagtaaagtggcccaactctgtgatggctccagggcggggcccggagcgtggaggaggtgggggtgtcagtgacagcagctggcagcagcagccaggccagcctccaccccattcaacatggaactgccacagtctgtccctctacagtgcaaccaaggggagcccgcatcctggagtgggagtcccgacttactataaccaccctgaggcactgaagcgggagaaagcggggggcccacagctggaccgctatgtgcgaccaatgatgccacagaaggtgcagctggaggtagggcggccccaggcacccctgaattctttccacgcagccaagaaacccccaaaccagtcactgcccctgcaacccttccagctggcattcggccaccaggtgaaccggcaggtcttccggcagggcccaccgcccccaaacccggtggctgccttccctccacagaagcagcagcagcagcagcaaccacagcagcagcagcagcagcagcaggcagccctaccccagatgccgctctttgagaacttctattccatgccgcagcaaccctcgcagcaaccccaggactttggcctgcagccagctgggccactgggacagtcccacctggctcaccacagcatggcaccctaccccttcccccccaacccagatatgaacccagaactgcgcaaggcccttctgcaggactcagccccgcagccagcgctacctcaggtccagatccccttcccccgccgctcccgccgcctctctaaggagggtatcctgcctcccagcgccctggatggggctggcacccagcctgggcaggaggccactggcaacctgttcctacatcactggcccctgcagcagccgccacctggctccctggggcagccccatcctgaagctctgggattcccgctggagctgagggagtcgcagctactgcctgatggggagagactagcacccaatggccgggagcgagaggctcctgccatgggcagcgaggagggcatgagggcagtgagcacaggggactgtgggcaggtgctacggggcggagtgatccagagcacgcgacggaggcgccgggcatcccaggaggccaatttgctgaccctggcccagaaggctgtggagctggcctcactgcagaatgcaaaggatggcagtggttctgaagagaagcggaaaagtgtattggcctcaactaccaagtgtggggtggagttttctgagccttccttagccaccaagcgagcacgagaagacagtgggatggtacccctcatcatcccagtgtctgtgcctgtgcgaactgtggacccaactgaggcagcccaggctggaggtcttgatgaggacgggaagggtcctgaacagaaccctgctgagcacaagccatcagtcatcgtcacccgcaggcggtccacccgaatccccgggacagatgctcaagctcaggcggaggacatgaatgtcaagttggagggggagccttccgtgcggaaaccaaagcagcggcccaggcccgagcccctcatcatccccaccaaggcgggcactttcatcgcccctcccgtctactccaacatcaccccataccagagccacctgcgctctcccgtgcgcctagctgaccacccctctgagcggagctttgagctacctccctacacgccgccccccatcctcagccctgtgcgggaaggctctggcctctacttcaatgccatcatatcaaccagcaccatccctgcccctcctcccatcacgcctaagagtgcccatcgcacgctgctccggactaacagtgctgaagtaaccccgcctgtcctctctgtgatgggggaggccaccccagtgagcatcgagccacggatcaacgtgggctcccggttccaggcagaaatccccttgatgagggaccgtgccctggcagctgcagatccccacaaggctgacttggtgtggcagccatgggaggacctagagagcagccgggagaagcagaggcaagtggaagacctgctgacagccgcctgctccagcattttccctggtgctggcaccaaccaggagctggccctgcactgtctgcacgaatccagaggagacatcctggaaacgctgaataagctgctgctgaagaagcccctgcggccccacaaccatccgctggcaacttatcactacacaggctctgaccagtggaagatggccgagaggaagctgttcaacaaaggcattgccatctacaagaaggatttcttcctggtgcagaagctgatccagaccaagaccgtggcccagtgcgtggagttctactacacctacaagaagcaggtgaaaatcggccgcaatgggactctaacctttggggatgtggatacgagcgatgagaagtcggcccaggaagaggttgaagtggatattaagacttcccaaaagttcccaagggtgcctcttcccagaagagagtccccaagtgaagagaggctggagcccaagagggaggtgaaggagcccaggaaggagggggaggaggaggtgccagagatccaagagaaggaggagcaggaagaggggcgagagcgcagcaggcgggcagcggcagtcaaagccacgcagacactacaggccaatgagtcggccagtgacatcctcatcctccggagccacgagtccaacgcccctgggtctgccggtggccaggcctcggagaagccaagggaagggacagggaagtcacgaagggcactacctttttcagagaagaagaaaa

SEQ ID NO: 70091 - DNA, 461 bp, Homo sapiens
cagccaggcgagcaggactagctggggctggtgaaccccccggccgggtcagaatctgtgctacagcagtgagacagagctctaggctcactgcccttgttcttgttccccatagacttcccaaaagttcccaagggtgcctcttcccagaagagagtccccaagtgaagagaggctggagcccaagagggaggtgaaggagcccaggaaggagggggaggaggaggtgccagagatccaagagaaggaggagcaggaagaggggcgagagcgcagcaggcgggcagcggcagtcaaagccacgcagacactacaggccaatgagtcggccagtgacatcctcatcctccggagccacgagtccaacgcccctgggtctgccggtggccaggcctcggagaagccaagggaagggacagggaagtcacgaagggcactacctttttcagagaagaagaaaa

SEQ ID NO: 70092 - DNA, 187 bp, Homo sapiens
ccgggttttgctgtgcagtgtcctcctgtccattcccatccctgattctgggtcagtggactcagactggatggttgctgagagccttctccagcagtgctgcctcccttggggccatggactctcttaagaggacctgaggtctgttttctgggcagccccccccctgtgatctcaccaccccagt

SEQ ID NO: 70093 - DNA, 3954 bp, Homo sapiens
  misc_feature (2562)..(2562): n is a, c, g, or t
gtagagctggttcctgctcgccgcggtgccgcgcgcgccggccggccgctgggcgctccgcgctcccagcctcgagttgtgcaatcctttgtagcacgccagagtcctcctcctccgctgttgcctctcgccctctctctttttttttttttcaagctgtgagctcaaccgatgagtcagagccgtgcaatcctgacactgcatcgcaggactgggggtgacacggagggaggcagagcgctcgcgaggcggacggcacgggtgcggggcgcgccgaggctcctgcatcgcaagcggggggtgacagcccgcgcgtcccgcccgggccctgccagcaaacttctcagcctcgggaggcgcgggctggcggaagccccgcgagcgccgcggggaggcgacggcgcctgtttgtttttaaaatcgggagtgcgtgcaggcggctggagtcccggaggcgaccgaaggcggcgacccgcggcggaagggggacagccgagcccggagcccggagcccgggcaagagctgggtgccagaaccctgtggagcatcatgaactgggaagagtagctgagccccagagcctctctggaagagaaaggaagagccagcagttctttctcccagtgtccgacctcactgtccagcgtcttcctctgcccctgctctgccctccctggctcctggactagagcccggcttccagcaggacgtttccccaggggatgggcgactgttgaaggggatctcaccgccagggctcagttggccacatcatgaacctccaggcccagcccaaggctcagaacaagcggaagcgttgcctcttcgggggccaggaaccagctcccaaggagcagccccctcccctgcagcccccccagcagtccatcagagtgaaggaggagcagtacctcgggcacgagggtccaggaggggcagtctccacctctcagcctgtggaactgccccctcctagcagcctggccctgctgaactctgtggtgtatgggcctgagcggacctcagcagccatgctgtcccagcaggtggcctcagtaaagtggcccaactctgtgatggctccagggcggggcccggagcgtggaggaggtgggggtgtcagtgacagcagctggcagcagcagccaggccagcctccaccccattcaacatggaactgccacagtctgtccctctacagtgcaaccaaggggagcccgcatcctggagtgggagtcccgacttactataaccaccctgaggcactgaagcgggagaaagcggggggcccacagctggaccgctatgtgcgaccaatgatgccacagaaggtgcagctggaggtagggcggccccaggcacccctgaattctttccacgcagccaagaaacccccaaaccagtcactgcccctgcaacccttccagctggcattcggccaccaggtgaaccggcaggtcttccggcagggcccaccgcccccaaacccggtggctgccttccctccacagaagcagcagcagcagcagcaaccacagcagcagcagcagcagcagcaggcagccctaccccagatgccgctctttgagaacttctattccatgccgcagcaaccctcgcagcaaccccaggactttggcctgcagccagctgggccactgggacagtcccacctggctcaccacagcatggcaccctaccccttcccccccaacccagatatgaacccagaactgcgcaaggcccttctgcaggactcagccccgcagccagcgctacctcaggtccagatccccttcccccgccgctcccgccgcctctctaaggagggtatcctgcctcccagcgccctggatggggctggcacccagcctgggcaggaggccactggcaacctgttcctacatcactggcccctgcagcagccgccacctggctccctggggcagccccatcctgaagctctgggattcccgctggagctgagggagtcgcagctactgcctgatggggagagactagcacccaatggccgggagcgagaggctcctgccatgggcagcgaggagggcatgagggcagtgagcacaggggactgtgggcaggtgctacggggcggagtgatccagagcacgcgacggaggcgccgggcatcccaggaggccaatttgctgaccctggcccagaaggctgtggagctggcctcactgcagaatgcaaaggatggcagtggttctgaagagaagcggaaaagtgtattggcctcaactaccaagtgtggggtggagttttctgagccttccttagccaccaagcgagcacgagaagacagtgggatggtacccctcatcatcccagtgtctgtgcctgtgcgaactgtggacccaactgaggcagcccaggctggaggtcttgatgaggacgggaagggtcctgaacagaaccctgctgagcacaagccatcagtcatcgtcacccgcaggcggtccacccgaatccccgggacagatgctcaagctcagaaaaagtttgctgacttctgccctagaggagatgataanaagggcttttggacctgctccttttttcaggcttgccttggtgggtgtggtaggcagactaagttccaaaggcggaggacatgaatgtcaagttggagggggagccttccgtgcggaaaccaaagcagcggcccaggcccgagcccctcatcatccccaccaaggcgggcactttcatcgcccctcccgtctactccaacatcaccccataccagagccacctgcgctctcccgtgcgcctagctgaccacccctctgagcggagctttgagctacctccctacacgccgccccccatcctcagccctgtgcgggaaggctctggcctctacttcaatgccatcatatcaaccagcaccatccctgcccctcctcccatcacgcctaagagtgcccatcgcacgctgctccggactaacagtgctgaagtaaccccgcctgtcctctctgtgatgggggaggccaccccagtgagcatcgagccacggatcaacgtgggctcccggttccaggcagaaatccccttgatgagggaccgtgccctggcagctgcagatccccacaaggctgacttggtgtggcagccatgggaggacctagagagcagccgggagaagcagaggcaagtggaagacctgctgacagccgcctgctccagcattttccctggtgctggcaccaaccaggagctggccctgcactgtctgcacgaatccagaggagacatcctggaaacgctgaataagctgctgctgaagaagcccctgcggccccacaaccatccgctggcaacttatcactacacaggctctgaccagtggaagatggccgagaggaagctgttcaacaaaggcattgccatctacaagaaggatttcttcctggtgcagaagctgatccagaccaagaccgtggcccagtgcgtggagttctactacacctacaagaagcaggtgaaaatcggccgcaatgggactctaacctttggggatgtggatacgagcgatgagaagtcggcccaggaagaggttgaagtggatattaagacttcccaaaagttcccaagggtgcctcttcccagaagagagtccccaagtgaagagaggctggagcccaagagggaggtgaaggagcccaggaaggagggggaggaggaggtgccagagatccaagagaaggaggagcaggaagaggggcgagagcgcagcaggcgggcagcggcagtcaaagccacgcagacactacaggccaatgagtcggccagtgacatcctcatcctccggagccacgagtccaacgcccctgggtctgccggtggccaggcctcggagaagccaagggaagggacagggaagtcacgaagggcactacctttttcagagaagaagaaaa

SEQ ID NO: 70094 - DNA, 5113 bp, Homo sapiens
gtagagctggttcctgctcgccgcggtgccgcgcgcgccggccggccgctgggcgctccgcgctcccagcctcgagttgtgcaatcctttgtagcacgccagagtcctcctcctccgctgttgcctctcgccctctctctttttttttttttcaagctgtgagctcaaccgatgagtcagagccgtgcaatcctgacactgcatcgcaggactgggggtgacacggagggaggcagagcgctcgcgaggcggacggcacgggtgcggggcgcgccgaggctcctgcatcgcaagcggggggtgacagcccgcgcgtcccgcccgggccctgccagcaaacttctcagcctcgggaggcgcgggctggcggaagccccgcgagcgccgcggggaggcgacggcgcctgtttgtttttaaaatcgggagtgcgtgcaggcggctggagtcccggaggcgaccgaaggcggcgacccgcggcggaagggggacagccgagcccggagcccggagcccgggcaagagctgggtgccagaaccctgtggagcatcatgaactgggaagagtagctgagccccagagcctctctggaagagaaaggaagagccagcagttctttctcccagtgtccgacctcactgtccagcgtcttcctctgcccctgctctgccctccctggctcctggactagagcccggcttccagcaggacgtttccccaggggatgggcgactgttgaaggggatctcaccgccagggctcagttggccacatcatgaacctccaggcccagcccaaggctcagaacaagcggaagcgttgcctcttcgggggccaggaaccagctcccaaggagcagccccctcccctgcagcccccccagcagtccatcagagtgaaggaggagcagtacctcgggcacgagggtccaggaggggcagtctccacctctcagcctgtggaactgccccctcctagcagcctggccctgctgaactctgtggtgtatgggcctgagcggacctcagcagccatgctgtcccagcaggtggcctcagtaaagtggcccaactctgtgatggctccagggcggggcccggagcgtggaggaggtgggggtgtcagtgacagcagctggcagcagcagccaggccagcctccaccccattcaacatggaactgccacagtctgtccctctacagtgcaaccaaggggagcccgcatcctggagtgggagtcccgacttactataaccaccctgaggcactgaagcgggagaaagcggggggcccacagctggaccgctatgtgcgaccaatgatgccacagaaggtgcagctggaggtagggcggccccaggcacccctgaattctttccacgcagccaagaaacccccaaaccagtcactgcccctgcaacccttccagctggcattcggccaccaggtgaaccggcaggtcttccggcagggcccaccgcccccaaacccggtggctgccttccctccacagaagcagcagcagcagcagcaaccacagcagcagcagcagcagcagcaggcagccctaccccagatgccgctctttgagaacttctattccatgccgcagcaaccctcgcagcaaccccaggactttggcctgcagccagctgggccactgggacagtcccacctggctcaccacagcatggcaccctaccccttcccccccaacccagatatgaacccagaactgcgcaaggcccttctgcaggactcagccccgcagccagcgctacctcaggtccagatccccttcccccgccgctcccgccgcctctctaaggagggtatcctgcctcccagcgccctggatggggctggcacccagcctgggcaggaggccactggcaacctgttcctacatcactggcccctgcagcagccgccacctggctccctggggcagccccatcctgaagctctgggattcccgctggagctgagggagtcgcagctactgcctgatggggagagactagcacccaatggccgggagcgagaggctcctgccatgggcagcgaggagggcatgagggcagtgagcacaggggactgtgggcaggtgctacggggcggagtgatccagagcacgcgacggaggcgccgggcatcccaggaggccaatttgctgaccctggcccagaaggctgtggagctggcctcactgcagaatgcaaaggatggcagtggttctgaagagaagcggaaaagtgtattggcctcaactaccaagtgtggggtggagttttctgagccttccttagccaccaagcgagcacgagaagacagtgggatggtacccctcatcatcccagtgtctgtgcctgtgcgaactgtggacccaactgaggcagcccaggctggaggtcttgatgaggacgggaagggtcctgaacagaaccctgctgagcacaagccatcagtcatcgtcacccgcaggcggtccacccgaatccccgggacagatgctcaagctcaggcggaggacatgaatgtcaagttggagggggagccttccgtgcggaaaccaaagcagcggcccaggcccgagcccctcatcatccccaccaaggcgggcactttcatcgcccctcccgtctactccaacatcaccccataccagagccacctgcgctctcccgtgcgcctagctgaccacccctctgagcggagctttgagctacctccctacacgccgccccccatcctcagccctgtgcgggaaggctctggcctctacttcaatgccatcatatcaaccagcaccatccctgcccctcctcccatcacgcctaagagtgcccatcgcacgctgctccggactaacagtgctgaagtaaccccgcctgtcctctctgtgatgggggaggccaccccagtgagcatcgagccacggatcaacgtgggctcccggttccaggcagaaatccccttgatgagggaccgtgccctggcagctgcagatccccacaaggctgacttggtgtggcagccatgggaggacctagagagcagccgggagaagcagaggcaagtggaagacctgctgacagccgcctgctccagcattttccctggtgctggcaccaaccaggagctggccctgcactgtctgcacgaatccagaggagacatcctggaaacgctgaataagctgctgctgaagaagcccctgcggccccacaaccatccgctggcaacttatcactacacaggctctgaccagtggaagatggccgagaggaagctgttcaacaaaggcattgccatctacaagaaggatttcttcctggtgcagaagctggtgagctgggctctgtttcagggcaaatgagggccaggagctgcctgtgtgactttggggctccctctgccagtgaccaatccctcttaaaaagcagtcaggtcaatgctactgagtagcctcagagagaatttcctaaacaatacaagaaagagaaagataggtctcttttcccttttggttctaagcatcctttcctcacttcagggtagggtggccaagctctggggtctcaatccagaaggaggcctaagtgggcatcagacttaaaataggcaggaggaagatgcggaggagggtggcaagtagaggtgagccattccccagaggaagatgcagggggagggcaccctggggtgaaggccactgagagccagcaagtgcctgcggagctgacctgggggcctctgcccacttcctttgacccagagttgccttccagtaactcagctgttcaagcccacattccctagatttatcttgtcctctctccatattcttctggaaaagcagatgctctgctaatccaaggaattgcatctttccagccctgtctcacaaaatctgggctgtggggagagagaattgtgtggactgccaagggaaaagagtttttaaaaagagcatgccctttcctcttgggattgtagattgtattgggaacagccctggggactagacaaagtgctgatgatgaattcccctacaagggccctgttgtgaggagtcctttgctgtgttttagtaacacgctattccctgattgggcaatactgacgggaagtacacgcccgtgaaattcacggaggcgcccctaatgcctaatgaaatgagcagacctttagtcagtcaaacaaagggtcagagagaattgacagtaaatgtgtaaatggcctaattaatacatgtgtggtagcagagtcaggaggaagacttaggcctttcgcttcctcctcaggttttccagggctttcttgtgagtttcccttgagttcctcccccgacaggggacactgtgacatttctgtatgctcacttctcagccactgctccctggagagaaatgaaattgtttgcctggattaatgaaaagcgtctgtgttgccaggtcagggctggctttggatgtagatggtgcccagaccttttccctcaacttttcagtttgaaaaatttcaaacttagaggaaaatggaaagaacagtagaatgaacacccatccaccccggacttagatttagcaatcgttaacattggctatatttgctttctctttctctatgtctaaacatagacacacacatatacagctctctcttgttctctgattcagctaatcattaaaagtaagtcacagtcatcctgtcacatgactaaaacctttcagcacgtatctcctaaaaaccaagatattctacaaaaccacagtaccattagcacgcccacgaaatttaacctgataaaataattcaggccaggcgaggtagctcacgcctgtgattccagcactttgggaggcagaggcagacggatcactcctgaggccaggagtttgagaccaggctggccaacatggcaaaaccccatgtctactaaaaatatttaaaaaaaactagctggttgtggtggcacacacctgtaatcccagctactcaggaagctgaggcacgagaattatttgaacctgggaggcggaggttgcagtgagccaaaatcgcgtcactgcactccagcctgagtgacagagcgagactctgtctccaaa

SEQ ID NO: 70095 - DNA, 179 bp, Homo sapiens
cacaagccatcagtcatcgtcacccgcaggcggtccacccgaatccccgggacagatgctcaagctcaggtatgagaggcgccccttctaaacacctccagcgcgtgagtgctcagggggcccaggaccctatggggaaaggagaacatggcaatgtaggaaggtatcagggaacctgt

SEQ ID NO: 70096 - DNA, 452 bp, Homo sapiens
tcgcaggactgggggtgacacggagggaggcagagcgctcgcgaggcggacggcacgggtgcggggcgcgccgaggctcctgcatcgcaagcggggggtgacagcccgcgcgtcccgcccgggccctgccagcaaacttctcagcctcgggaggcgcgggctggcggaagccccgcgagcgccgcggggaggcgacggcgcctgtttgtttttaaaatcgggagtgcgtgcaggcggctggagtcccggaggcgaccgaaggcggcgacccgcggcggaagggggacagccgagcccggagcccggagcccgggcaagagctgggtaagtggggctgcctggccggcggccgaggcctgcacgcggcggggccggcgaggggaccccaggcggcgcgcgagctgtggctgctcgcacggcgggttgcagctctgcaggcgcggcccggagag

SEQ ID NO: 70097 - DNA, 358 bp, Homo sapiens
ctgggcagccccccccctgtgatctcaccaccccagtggaccccttatctctcagcagttaagggggcaagagtaagtgtccaccctactcgggattttatcagggcctagaatgctccgtccaccaccgacacccctgtcagtgccctgacccttccctcacttcccctccaggaaacgctgaataagctgctgctgaagaagcccctgcggccccacaaccatccgctggcaacttatcactacacaggtgggcctggctgcggtgggcatggtgcctggagcctcaagaggtctccagcatccatggggccctgctcagtgctgagtcacagccctgggtgggggcgggaggagg

SEQ ID NO: 70098 - DNA, 3844 bp, Homo sapiens
gtagagctggttcctgctcgccgcggtgccgcgcgcgccggccggccgctgggcgctccgcgctcccagcctcgagttgtgcaatcctttgtagcacgccagagtcctcctcctccgctgttgcctctcgccctctctctttttttttttttcaagctgtgagctcaaccgatgagtcagagccgtgcaatcctgacactgcatcgcaggactgggggtgacacggagggaggcagagcgctcgcgaggcggacggcacgggtgcggggcgcgccgaggctcctgcatcgcaagcggggggtgacagcccgcgcgtcccgcccgggccctgccagcaaacttctcagcctcgggaggcgcgggctggcggaagccccgcgagcgccgcggggaggcgacggcgcctgtttgtttttaaaatcgggagtgcgtgcaggcggctggagtcccggaggcgaccgaaggcggcgacccgcggcggaagggggacagccgagcccggagcccggagcccgggcaagagctgggtgccagaaccctgtggagcatcatgaactgggaagagtagctgagccccagagcctctctggaagagaaaggaagagccagcagttctttctcccagtgtccgacctcactgtccagcgtcttcctctgcccctgctctgccctccctggctcctggactagagcccggcttccagcaggacgtttccccaggggatgggcgactgttgaaggggatctcaccgccagggctcagttggccacatcatgaacctccaggcccagcccaaggctcagaacaagcggaagcgttgcctcttcgggggccaggaaccagctcccaaggagcagccccctcccctgcagcccccccagcagtccatcagagtgaaggaggagcagtacctcgggcacgagggtccaggaggggcagtctccacctctcagcctgtggaactgccccctcctagcagcctggccctgctgaactctgtggtgtatgggcctgagcggacctcagcagccatgctgtcccagcaggtggcctcagtaaagtggcccaactctgtgatggctccagggcggggcccggagcgtggaggaggtgggggtgtcagtgacagcagctggcagcagcagccaggccagcctccaccccattcaacatggaactgccacagtctgtccctctacagtgcaaccaaggggagcccgcatcctggagtgggagtcccgacttactataaccaccctgaggcactgaagcgggagaaagcggggggcccacagctggaccgctatgtgcgaccaatgatgccacagaaggtgcagctggaggtagggcggccccaggcacccctgaattctttccacgcagccaagaaacccccaaaccagtcactgcccctgcaacccttccagctggcattcggccaccaggtgaaccggcaggtcttccggcagggcccaccgcccccaaacccggtggctgccttccctccacagaagcagcagcagcagcagcaaccacagcagcagcagcagcagcagcaggcagccctaccccagatgccgctctttgagaacttctattccatgccgcagcaaccctcgcagcaaccccaggactttggcctgcagccagctgggccactgggacagtcccacctggctcaccacagcatggcaccctaccccttcccccccaacccagatatgaacccagaactgcgcaaggcccttctgcaggactcagccccgcagccagcgctacctcaggtccagatccccttcccccgccgctcccgccgcctctctaaggagggtatcctgcctcccagcgccctggatggggctggcacccagcctgggcaggaggccactggcaacctgttcctacatcactggcccctgcagcagccgccacctggctccctggggcagccccatcctgaagctctgggattcccgctggagctgagggagtcgcagctactgcctgatggggagagactagcacccaatggccgggagcgagaggctcctgccatgggcagcgaggagggcatgagggcagtgagcacaggggactgtgggcaggtgctacggggcggagtgatccagagcacgcgacggaggcgccgggcatcccaggaggccaatttgctgaccctggcccagaaggctgtggagctggcctcactgcagaatgcaaaggatggcagtggttctgaagagaagcggaaaagtgtattggcctcaactaccaagtgtggggtggagttttctgagccttccttagccaccaagcgagcacgagaagacagtgggatggtacccctcatcatcccagtgtctgtgcctgtgcgaactgtggacccaactgaggcagcccaggctggaggtcttgatgaggacgggaagggtcctgaacagaaccctgctgagcacaagccatcagtcatcgtcacccgcaggcggtccacccgaatccccgggacagatgctcaagctcaggcggaggacatgaatgtcaagttggagggggagccttccgtgcggaaaccaaagcagcggcccaggcccgagcccctcatcatccccaccaaggcgggcactttcatcgcccctcccgtctactccaacatcaccccataccagagccacctgcgctctcccgtgcgcctagctgaccacccctctgagcggagctttgagctacctccctacacgccgccccccatcctcagccctgtgcgggaaggctctggcctctacttcaatgccatcatatcaaccagcaccatccctgcccctcctcccatcacgcctaagagtgcccatcgcacgctgctccggactaacagtgctgaagtaaccccgcctgtcctctctgtgatgggggaggccaccccagtgagcatcgagccacggatcaacgtgggctcccggttccaggcagaaatccccttgatgagggaccgtgccctggcagctgcagatccccacaaggctgacttggtgtggcagccatgggaggacctagagagcagccgggagaagcagaggcaagtggaagacctgctgacagccgcctgctccagcattttccctggtgctggcaccaaccaggagctggccctgcactgtctgcacgaatccagaggagacatcctggaaacgctgaataagctgctgctgaagaagcccctgcggccccacaaccatccgctggcaacttatcactacacaggctctgaccagtggaagatggccgagaggaagctgttcaacaaaggcattgccatctacaagaaggatttcttcctggtgcagaagctgatccagaccaagaccgtggcccagtgcgtggagttctactacacctacaagaagcaggtgaaaatcggccgcaatgggactctaacctttggggatgtggatacgagcgatgagaagtcggcccaggaagaggttgaagtggatattaagacttcccaaaagttcccaagggtgcctcttcccagaagagagtccccaagtgaagagaggctggagcccaagagggaggtgaaggagcccaggaaggagggggaggaggaggtgccagagatccaagagaaggaggagcaggaagaggggcgagagcgcagcaggcgggcagcggcagtcaaagccacgcagacactacaggccaatgagtcggccagtgacatcctcatcctccggagccacgagtccaacgcccctgggtctgccggtggccaggcctcggagaagccaagggaagggacagggaagtcacgaagggcactacctttttcagagaagaagaaaa

SEQ ID NO: 70099 - DNA, 2982 bp, Homo sapiens
tggagttttctgacccttccttagccaccaagcgagcacgagaagacagtgggatggtacccctcatcatcccagtgtctgtgcctgtgcgacctgtggaactgccccctcctagcagcctggccctgctgaactctgtggtgtatgggcctgagcggacctcagcagccatgctgtcccagcaggtggcctcagtaaagtggcccaactctgtgatggctccagggcggggcccggagcgtggaggaggtgggggtgtcagtgacagcagctggcagcagcagccaggccagcctccaccccattcaacatggaactgccacagtctgtccctctacagtgcaaccaaggggagcccgcatcctggagtgggagtcccgacttactataaccaccctgaggcactgaagcgggagaaagcggggggcccacagctggaccgctatgtgcgaccaatgatgccacagaaggtgcagctggaggtagggcggccccaggcacccctgaattctttccacgcagccaagaaacccccaaaccagtcactgcccctgcaacccttccagctggcattcggccaccaggtgaaccggcaggtcttccggcagggcccaccgcccccaaacccggtggctgccttccctccacagaagcagcagcagcagcagcaaccacagcagcagcagcagcagcagcaggcagccctaccccagatgccgctctttgagaacttctattccatgccgcagcaaccctcgcagcaaccccaggactttggcctgcagccagctgggccactgggacagtcccacctggctcaccacagcatggcaccctaccccttcccccccaacccagatatgaacccagaactgcgcaaggcccttctgcaggactcagccccgcagccagcgctacctcaggtccagatccccttcccccgccgctcccgccgcctctctaaggagggtatcctgcctcccagcgccctggatggggctggcacccagcctgggcaggaggccactggcaacctgttcctacatcactggcccctgcagcagccgccacctggctccctggggcagccccatcctgaagctctgggattcccgctggagctgagggagtcgcagctactgcctgatggggagagactagcacccaatggccgggagcgagaggctcctgccatgggcagcgaggagggcatgagggcagtgagcacaggggactgtgggcaggtgctacggggcggagtgatccagagcacgcgacggaggcgccgggcatcccaggaggccaatttgctgaccctggcccagaaggctgtggagctggcctcactgcagaatgcaaaggatggcagtggttctgaagagaagcggaaaagtgtattggcctcaactaccaagtgtggggtggagttttctgagccttccttagccaccaagcgagcacgagaagacagtgggatggtacccctcatcatcccagtgtctgtgcctgtgcgaactgtggacccaactgaggcagcccaggctggaggtcttgatgaggacgggaagggtcctgaacagaaccctgctgagcacaagccatcagtcatcgtcacccgcaggcggtccacccgaatccccgggacagatgctcaagctcaggcggaggacatgaatgtcaagttggagggggagccttccgtgcggaaaccaaagcagcggcccaggcccgagcccctcatcatccccaccaaggcgggcactttcatcgcccctcccgtctactccaacatcaccccataccagagccacctgcgctctcccgtgcgcctagctgaccacccctctgagcggagctttgagctacctccctacacgccgccccccatcctcagccctgtgcgggaaggctctggcctctacttcaatgccatcatatcaaccagcaccatccctgcccctcctcccatcacgcctaagagtgcccatcgcacgctgctccggactaacagtgctgaagtaaccccgcctgtcctctctgtgatgggggaggccaccccagtgagcatcgagccacggatcaacgtgggctcccggttccaggcagaaatccccttgatgagggaccgtgccctggcagctgcagatccccacaaggctgacttggtgtggcagccatgggaggacctagagagcagccgggagaagcagaggcaagtggaagacctgctgacagccgcctgctccagcattttccctggtgctggcaccaaccaggagctggccctgcactgtctgcacgaatccagaggagacatcctggaaacgctgaataagctgctgctgaagaagcccctgcggccccacaaccatccgctggcaacttatcactacacaggctctgaccagtggaagatggccgagaggaagctgttcaacaaaggcattgccatctacaagaaggatttcttcctggtgcagaagctgatccagaccaagaccgtggcccagtgcgtggagttctactacacctacaagaagcaggtgaaaatcggccgcaatgggactctaacctttggggatgtggatacgagcgatgagaagtcggcccaggaagaggttgaagtggatattaagacttcccaaaagttcccaagggtgcctcttcccagaagagagtccccaagtgaagagaggctggagcccaagagggaggtgaaggagcccaggaaggagggggaggaggaggtgccagagatccaagagaaggaggagcaggaagaggggcgagagcgcagcaggcgggcagcggcagtcaaagccacgcagacactacaggccaatgagtcggccagtgacatcctcatcctccggagccacgagtccaacgcccctgggtctgccggtggccaggcctcggagaagccaagggaagggacagggaagtcacgaagggcactacctttttcagagaagaagaaaa

SEQ ID NO: 70100 - DNA, 3830 bp, Homo sapiens
gtagagctggttcctgctcgccgcggtgccgcgcgcgccggccggccgctgggcgctccgcgctcccagcctcgagttgtgcaatcctttgtagcacgccagagtcctcctcctccgctgttgcctctcgccctctctctttttttttttttcaagctgtgagctcaaccgatgagtcagagccgtgcaatcctgacactgcatcgcaggactgggggtgacacggagggaggcagagcgctcgcgaggcggacggcacgggtgcggggcgcgccgaggctcctgcatcgcaagcggggggtgacagcccgcgcgtcccgcccgggccctgccagcaaacttctcagcctcgggaggcgcgggctggcggaagccccgcgagcgccgcggggaggcgacggcgcctgtttgtttttaaaatcgggagtgcgtgcaggcggctggagtcccggaggcgaccgaaggcggcgacccgcggcggaagggggacagccgagcccggagcccggagcccgggcaagagctgggtgccagaaccctgtggagcatcatgaactgggaagagtagctgagccccagagcctctctggaagagaaaggaagagccagcagttctttctcccagtgtccgacctcactgtccagcgtcttcctctgcccctgctctgccctccctggctcctggactagagcccggcttccagcaggacgtttccccaggggatgggcgactgttgaaggggatctcaccgccagggctcagttggccacatcatgaacctccaggcccagcccaaggctcagaacaagcggaagcgttgcctcttcgggggccaggaaccagctcccaaggagcagccccctcccctgcagcccccccagcagtccatcagagtgaaggaggagcagtacctcgggcacgagggtccaggaggggcagtctccacctctcagcctgtggaactgccccctcctagcagcctggccctgctgaactctgtggtgtatgggcctgagcggacctcagcagccatgctgtcccagcaggtggcctcagtaaagtggcccaactctgtgatggctccagggcggggcccggagcgtggaggaggtgggggtgtcagtgacagcagctggcagcagcagccaggccagcctccaccccattcaacatggaactgccacagtctgtccctctacagtgcaaccaaggggagcccgcatcctggagtgggagtcccgacttactataaccaccctgaggcactgaagcgggagaaagcggggggcccacagctggaccgctatgtgcgaccaatgatgccacagaaggtgcagctggaggtagggcggccccaggcacccctgaattctttccacgcagccaagaaacccccaaaccagtcactgcccctgcaacccttccagctggcattcggccaccaggtgaaccggcaggtcttccggcagggcccaccgcccccaaacccggtggctgccttccctccacagaagcagcagcagcagcagcaaccacagcagcagcagcagcagcagcaggcagccctaccccagatgccgctctttgagaacttctattccatgccgcagcaaccctcgcagcaaccccaggactttggcctgcagccagctgggccactgggacagtcccacctggctcaccacagcatggcaccctaccccttcccccccaacccagatatgaacccagaactgcgcaaggcccttctgcaggactcagccccgcagccagcgctacctcaggtccagatccccttcccccgccgctcccgccgcctctctaaggagggtatcctgcctcccagcgccctggatggggctggcacccagcctgggcaggaggccactggcaacctgttcctacatcactggcccctgcagcagccgccacctggctccctggggcagccccatcctgaagctctgggattcccgctggagctgagggagtcgcagctactgcctgatggggagagactagcacccaatggccgggagcgagaggctcctgccatgggcagcgaggagggcatgagggcagtgagcacaggggactgtgggcaggtgctacggggcggagtgatccagagcacgcgacggaggcgccgggcatcccaggaggccaatttgctgaccctggcccagaaggctgtggagctggcctcactgcagaatgcaaaggatggcagtggttctgaagagaagcggaaaagtgtattggcctcaactaccaagtgtggggtggagttttctgagccttccttagccaccaagcgagcacgagaagacagtgggatggtacccctcatcatcccagtgtctgtgcctgtgcgaactgtggacccaactgaggcagcccaggctggaggtcttgatgaggacgggaagggtcctgaacagaaccctgctgagcacaagccatcagtcatcgtcacccgcaggcggtccacccgaatccccgggacagatgctcaagctcaggcggaggacatgaatgtcaagttggagggggagccttccgtgcggaaaccaaagcagcggcccaggcccgagcccctcatcatccccaccaaggcgggcactttcatcgcccctcccgtctactccaacatcaccccataccagagccacctgcgctctcccgtgcgcctagctgaccacccctctgagcggagctttgagctacctccctacacgccgccccccatcctcagccctgtgcgggaaggctctggcctctacttcaatgccatcatatcaaccagcaccatccctgcccctcctcccatcacgcctaagagtgcccatcgcacgctgctccggactaacagtgctgaagtaaccccgcctgtcctctctgtgatgggggaggccaccccagtgagcatcgagccacggatcaacgtgggctcccggttccaggcagaaatccccttgatgagggaccgtgccctggcagctgcagatccccacaaggctgacttggtgtggcagccatgggaggacctagagagcagccgggagaagcagaggcaagtggaagacctgctgacagccgcctgctccagcattttccctggtgctggcaccaaccaggagctggccctgcactgtctgcacgaatccagaggagacatcctggaaacgctgaataagctgctgctgaagaagcccctgcggccccacaaccatccgctggcaacttatcactacacaggctctgaccagtggaagatggccgagaggaagctgttcaacaaaggcattgccatctacaagaaggatttcttcctggtgcagaagctgatccagaccaagaccgtggcccagtgcgtggagttctactacacctacaagaagcaggtgaaaatcggccgcaatgggactctaacctttggggatgtggatacgagcgatgagaagtcggcccaggaagaggttgaagtggatattaaggtgactccttttccaacctcagctgcatagagcctgggctgggtctgggaccaggcctgagctgggagcccgagcccgagctctccaggagcctgcagagggcaggttgaggaagacagtgtccctgacagccgcaaggagccctggaccgctgggttctcctctctatactgctggtgtcatagtaataatacattgtgttgatacacagggtaattttcccacaagattcacaccagcatcatcttcctatctccgcttagcagacctctaacactgtttctcaaacctcagtcattcttgtatcacctttttgatttctgccatatctg

SEQ ID NO: 70101 - DNA, 365 bp, Homo sapiens
gaaatgtggtatattctatatgtctatgatgtagatctttagaaaacacttcttatgttttgaaattcagccaagtaagcatggtggtattaagcacatgatttcaattttgaaggtcagtttaatatagataaaagacaacaggcacctaaaaccggatgccatttgacccagccaccctacttcactggggaggaagttttacacatgggtgtgtgctcagaaggggttatgctaatctttgtcatagtgttatttgtaatggtgaaaattttgacttaacctgggtttttaacacaagaataaattaagttatatattgtattagtctgttgtcacgctgctaataaagacatattcaagtc

SEQ ID NO: 70102 - DNA, 353 bp, Homo sapiens
aaatacgaaagcaggggctgtcagttgcctccattgaccgtcagctccttgaggacaagggaccctttttacccagagcaggctgcataaaataaattctaaggaatatttattgggtggaactgaattaaattaggaggctgggcagagaaagaggaggctgagccgttctgagcctgcatcctccaaaagatgagaatagtaatacctgggctgagaggaccgggtatgggatggcttataaccatctgggcagggcctccctgccaccctcagaattattgtcatctctctgtcccagctctactgttatttttatttttattattttgagacagagtctcgctttgtca

SEQ ID NO: 70103 - DNA, 139 bp, Homo sapiens
gaaagaaagaaagaaagaaagaaactggctctcattggctcccatgcaggtgcaagctttgctctcagccagcccacaccccaatggccactaaaaggcgagatgtggtgaccgcaggtggatgtcttgtcagctgagg

SEQ ID NO: 70104 - DNA, 222 bp, Homo sapiens
catgttattcctcatgaggcggaggttgcagtgagccgagattccgccactgtactccagcctgggcaacagagcgagactccatctcagaaaacaaagaagttccaagtacaatacaaagaaattccctcccaatttgagagtaagttgccgatataccctatgaccgccccccccccgccaatacttcagtgggtatttcctatgaacaacgacattctc

SEQ ID NO: 70105 - DNA, 478 bp, Homo sapiens
ccaagattgcaccactgccctccggcctgggccgcagagtaactgagactttgtctccaaaaaccaacaaaccaacaaaagttctctgctctctatctggctcacttccccactgtcctagatagccatctttgccctgtgcgcctgtggctgagctgaatcctgagcatccagtgggttctgctaggtgacttatctgcctgcatcattagacctgagctctttcaatgtaggggctgtatctttctgtttgttaaatgaagacttgtcctcaagaacttacaatacaatcagtatgcaaatgagtataacagacagagggttttacacttaggtctgtgttttccatatgcagtgttcttcaaaagtcttggtgcaggttgaagctttcataacttcagaagtctaaatgctacaaacttcaccaaaaaaatttcaaagtctatttaaattttgcataatgaatgtttccctctta

SEQ ID NO: 70106 - DNA, 385 bp, Homo sapiens
tatgtggaagctaagaaagtgccctttgagaatccctggtcacttctgaaattgtaattcctaggaagttactggagctaagacttctttttagagggaaacagaaaaaaaataataggactatgaagatcaggtcttgatcctttcagagttgctaatgctaatgtcactgttcttcttttttttttttttttttccttccaaagatagaatgacactagttagaaaaataaaagtctgttatttaacatttcagattatgcctccaaatcctacagaagtataacaaccatagaacagacaaacaccaacagcatcaacaacagagaaactcagtccaggaggatatgaaaccctttgtaataaagaaagcaacatccatgaa

SEQ ID NO: 70107 - DNA, 387 bp, Homo sapiens
gattctgtgcattcatcttctcgcagggaccatttcagtagagccttttaagacacatgttttggaatacagtcaaatgcgtgctgctgtatgaccagcctatttgaactacttaagcatcaactaattaatctgcaagtgaagaatacttccagcattactctataattagacaatctcaggaggaaacaagaggatttcaaaggggagtcagatggtttcgcagaccgctacatcatttattttttcatcactcagattatgcctccaaatcctacagaagtataacaaccatagaacagacaaacaccaacagcatcaacaacagagaaactcagtccaggaggatatgaaaccctttgtaataaagaaagcaacatccatgaa

SEQ ID NO: 70108 - DNA, 323 bp, Homo sapiens
aagttgcagactgcgctcagcaagacctcacaacatggaggaaaattaaagagataagtggtccatggagtatccccttaccccaccataaattggcataattttgtgcacaatccagggagaagaaaaagaagaccagaagcttgcaaaccattcgagagaaggaagggagctttgtcatgttgccatctgagattatgcctccaaatcctacagaagtataacaaccatagaacagacaaacaccaacagcatcaacaacagagaaactcagtccaggaggatatgaaaccctttgtaataaagaaagcaacatccatgaa

SEQ ID NO: 70109 - DNA, 620 bp, Homo sapiens
agcaaaggaatgacaggttttgtcaagctgcaggtgactataagatacagacagctgacaattgtggactcctcaggcgtggtgaaagattgagctactatcattagggttggctggctaggaccccggcaggcacctggggatagtagtgctgggaagttctggggagttgcacttctgaatgctggcatgacactgcctcaagacatctctctatccaaatggaaaaaacaaccacatcctttgtcagctaaggagagttagcaaactgtttttattaaatactgatgtctggccgggcacggtggctcacgcctgtcatgctagcactttgggaggccgaggcgggtggatcacttgaggccagtagttcaagaccagcctggccaacatggtgaaaccccatctctactaaaaatacaaaattagccgggcgtggtggcgggcgcttgtaatcccagctacccgggagactgagttaggagaatcgcgtgaacccaggaggcggaggttgcagtgagccgagatcgcgccactgcactccagcctgggtgacggagtgggactctgtctctaaatacataaataaataaataaataaataaataaataaataaata

SEQ ID NO: 70110 - DNA, 430 bp, Homo sapiens
tatttacttatttgagatgtgggggctgtgttgcctaggctgtctcaaactcctgggttcaagtgattctcctgcctcagcgtcccaaatagctgggactacaggcacacaccattgcacctggcctttgatcattattttaatgcctttgtagtattaaattgaatagtactgtagtttgtttagccagtctaccactgatggtcatttagattatttttccattttatttgtctgtctgtctgtctgtctgtctatctatctatctatctatctatctatctatctatctatctaatctttagaggcgctgtcacccaggctggtcttgatctcttggcctcaagtgaacctgggcctccaaagtgctgggattataggcgtgagccactgagcttggtcagttatatttattttttctaatggttta

SEQ ID NO: 70111 - DNA, 772 bp, Homo sapiens
agaggtcttccatggtcttccatcagatagggaggaagctaaaggcgagcatcacgtccatcattttccctgcgcgtggagttgtgaggggtaggttttccttccctaaacctgagtatatagaggatttagggattttccctcaagaactaaacatttcctcacgggaggaaaacatatcccccattggactccttaggacaaatcttgcagattatcatacaaaaatgaacagcctgaagtctaaactgactcactaaggggtatttccatccttgggttctggcttaatactttctcccctccccaactactcactgcccagcctggcctctccccagactccgcagcagcctcctcgctgcccccttcactttcttattcctgagggtgtagatgagcgggttgagagcaggtgtgaccacggtgtagaagagcgatacgaacttgccccgtgcctggttgtagcgctgcgcgggctgcaggtaggtgtagatggccgagccgtagaacaggcagacggctgtcaggtgggacccacacgtgcccaccgccctcctccggcctccgctgaaccgcatgcaacagacagctcgggccacggcaccgtaggaggccaggatgacggcaaacggcagcagcaggatgaccacgcgggcggcgaacatctggttctcggtagtgtctccgtcgcctccgcaggccagcttgagcaacgccggcagctcacagatgaagtggtccagcaggcggggcgcgcacagcggccgct

SEQ ID NO: 70112 - DNA, 533 bp, Homo sapiens
gataagattggcatggctttatttgtttttttgttttgttttgtttttttggttttttttggcttgactcaggatttaaaaactggaacggtgaaggtgacagcagtcggttggagcgagcatcccccaaagttctacaatgtggccgaggactttgattgcacattgttgtttttttaatagtcattccaaaatatgagatgcgttgttacaggaagtcccttgccatcctaaaagccaccccacttctgtctaaggagaatggcccagtcctctcccaagtccacacaggggaggtgatagcattgctttcgtgtaaattatgtaatgcaaaatttttttaatcttcgccttaatactttcttattttgttttattttgaatgatgagccttcgtgcccccccttcccccttttttgtcccccaacttgagatgtatgaaggcttttggtctccctgggagtgggtggaggcagccagggcttacctgtacactgacttgagaccagttgaataaaagtgcacaccttaca

SEQ ID NO: 70113 - DNA, 511 bp, Homo sapiens
gaaacaggaaatatgatgcaaacctaccaaaaagaggctgaaaagaaaagctagaagggctgggcaaagaaaagcccgagagtttgagaaagcgaggttgaagaaggcagaataacagtttctactctaacaatggtgggtgagtttacttccactaaagcacaaatgttacaagaaaggggtcccaatccagatcaccacagagggttcttggacctcgtgcaagaaagaattcagggcgagtccatagagtaaagtgaaagcaagtttattaagaaagtaaaggaacaaaagaatggctactccatagacagagcagccccgagggctgctggttgcctatttttatagttatttcttgattatatgctaaacaaggggtggattattcatgcctcccctttttagaccatatagggtaacttcctgatgttgccatggcatttgtaaactgtcgtggagctggtgggagtgcagcagtgaggacaaccagaggtcactttcgttgcta

SEQ ID NO: 70114 - DNA, 229 bp, Homo sapiens
ggagaagcttctagaaggggagcagtccctttgcaacctcgaggacatccacatgagcctggagaaggacgttaccgccatgaccaacagtctcttcatcgaccgccagaagtgcatggcccatcgtacttgctaccccaccatcctgcagctggctggctaccagtgagcagcggcacggtgcttccccccaatcccccaaataaacagtgcattagctttctgcaca

SEQ ID NO: 70115 - DNA, 712 bp, Homo sapiens
ccccgcaggctgagggcaggtgggaagcaaacccggacgcatcgcagcagcagcagcagcagcagaagcagcagcagcagcctccgcagtccctccagagacatggatccccagacagcaccttcccgggcgctcctgctcctgctcttcttgcatctggctttcctgggaggtcgttcccacccgctgggcagccccggttcagcctcggacttggaaacgtccgggttacaggagcagcgcaaccatttgcagggcaaactgtcggagctgcaggtggagcagacatccctggagcccctccaggagagcccccgtcccacaggtgtctggaagtcccgggaggtagccaccgagggcatccgtgggcaccgcaaaatggtcctctacaccctgcgggcaccacgaagccccaagatggtgcaagggtctggctgctttgggaggaagatggaccggatcagctcctccagtggcctgggctgcaaagtgctgaggcggcattaagaggaagtcctggctgcagacacctgcttctgattccacaaggggctttttcctcaaccctgtggccgcctttgaagtgactcattttttttaatgtatttatgtatttatttgattgttttatataagatggtttcttacctttgagcacaaaatttccacggtgaaataaagtcaacattataagctttatcttttgaaactg

SEQ ID NO: 70116 - DNA, 444 bp, Homo sapiens
ccccgcaggctgagggcaggtgggaagcaaacccggacgcatcgcagcagcagcagcagcagcagaagcagcagcagcagcctccgcagtccatccgtgggcaccgcaaaatggtcctctacaccctgcgggcaccacgaagccccaagatggtgcaagggtctggctgctttgggaggaagatggaccggatcagctcctccagtggcctgggctgcaaagtgctgaggcggcattaagaggaagtcctggctgcagacacctgcttctgattccacaaggggctttttcctcaaccctgtggccgcctttgaagtgactcattttttttaatgtatttatgtatttatttgattgttttatataagatggtttcttacctttgagcacaaaatttccacggtgaaataaagtcaacattataagctttatcttttgaaactg

SEQ ID NO: 70117 - DNA, 137 bp, Homo sapiens
tggtcctctacaccctgcgggcaccacgaagccccaagatggtgcaagggtctggctgctttgggaggaagatggaccggatcagctcctccagtggcctgggctgcaaaggtaagcaccccctgccaccccggccg

SEQ ID NO: 70118 - DNA, 512 bp, Homo sapiens
ccccgcaggctgagggcaggtgggaagcaaacccggacgcatcgcagcagcagcagcagcagcagaagcagcagcagcagcctccgcagtccctccagagacatggatccccagacagcaccttcccgggcgctcctgctcctgctcttcttgcatctggctttcctgggaggtcgttcccacccgctgggcagccccggttcagcctcggacttggaaacgtccgggttacaggagcagcgcaaccatttgcagggcaaactgtcggagctgcaggtggagcagacatccctggagcccctccaggagagcccccgtcccacaggtgtctggaagtcccgggaggtagccaccgagggcatccgtgggcaccgcaaaatggtcctctacaccctgcgggcaccacgaagcccagatgtcaggtctgctcttggagagatgacgatactcccatgcctggtcaatctaggcataagagcctcgtcacaccctttatccagggttttcacact

SEQ ID NO: 70119 - DNA, 571 bp, Homo sapiens
tcaagcttgattaaagctggcttttgtgacatcccctgattccatgtggtgttggtagttttaggcgattggttgtacagctcccttttccccctcagaggcaatcactcctgcagccatttcctgacatatgccagggaggaactgatgtttctctgtggctggtgacctagtgcacagtaaggtcattcctaaaaagctggctgagggagaatttaactcttcagatcaaatatatttgttccacccctggctctgcctcctgatcaaagtcaggggtgatttcagagaggtggcccttcactcagtcagatgctgtgcgcctgctctctctccacgggcattaaaaacaaggcactcatgtgaaaccatgtcctcatcatggcagccgacctcggtttatcacagagtcgaggcccacatctttgatcctcctcataaaactgtctgagagagttgcacaaacccacggatgtcttttattgtttttctaatcacttttaatgtgttttcccacagtttttgtaggtgttgatgtctcagcctggctgtgtcagcaaaaaaaaaaaga

SEQ ID NO: 70120 - DNA, 527 bp, Homo sapiens
gcaaacacaatttttaagagttttacttacagtagcttgattattctaagcttatttttctctttcttcctttttttaaccaaatacccagacttcaatattctaagcttatacagaaaggaaaagaaactagaagagctaaaacaatttgaaaaacaaaacagtacacataataactctacccaaaaagtaaatgggaaaaaaaaaaacctcagtctatgtctcacactgtgcaataaggattaattaactcagcaaaagtctgggtttcccacaccgtgcacgttccgagaaagatttggcccttgcccagctcctaggaagtaacctctaagcccttggaatgtccagcctagtaagaaagtctttctttacctgggggttttaggccactccatatagtctatgctaataatgtgattaatggtgggggccttggaccaaatggtatcagcttgagggctgcagacggaggtcatccatgagggcagtcaaccacacctacataccgacctaccaaaaaaccc

SEQ ID NO: 70121 - DNA, 487 bp, Homo sapiens
aataaaagcatcagcatgacagaacaactttttatcagagatattgtactttgtacaactggggaaggaaggtacatgtagaatcatttttcctacataacatgacaggattcgagtcccaagaaaaagcaaaagttcatggttctcttgtttcttttaacttggtcctgtttcatttcaagccacattaattcacatcatcaatgtatgtgaatgccctccaaatgcctagatctgtgctagatgctggggtgccaagatacaaagaaaagatcattcagactggagaatgaaaagcctcagaaggttatagcaaactactagacctgtgtctgtggcttatgaggatatattagcatttaacctgtcttctcaagaaagcacggtaaagctaaagcataatagtgcgtttatattacggtttaaggagaccggtgtcctgatgaccactcaggcttctctgtccatgaaatccagcaggtttttc

SEQ ID NO: 70122 - DNA, 397 bp, Homo sapiens
catttctggccaggcacggtggctcatgcctgtaatcccagcactttgggaggccgaggcaggcggatcacgaggtcaggagatggtctagaccatcctggctaacacagtgaaaccctgtctctactaaaaatacaaaaaattagctgggcgtggtggcgcgttagtatttccttaaataacaggttacaatagaaagatactgcctggaagttatccttttcattttggttcattttcagtttttgtttatgatttacatagctgtttaattcatttgcttatagtacaatcctgccataaagtattaaagcacaagatacctgttattccttcaacatctgcatttttcaagttttatactctatatccacagtatgtcagcagttcttgactg

SEQ ID NO: 70123 - DNA, 133 bp, Homo sapiens
actcatctcctgcaggtaatcagtttcatttctgggttattcttcctgtatatctttttgcaaaaataagcaaatgaatcatctgcgtatatgtaatgtatatatgtacattcttatttcccctttttcctaa

SEQ ID NO: 70124 - DNA, 550 bp, Homo sapiens
  misc_feature (84)..(84): n is a, c, g, or t
atttcggcacgataaaattcatatcaatatggctgggcgcggtgactcacgcctgtactcccaacactttgggagccaaggcgngcggatcgttgagctcaggagttagagaccaacctgggcaatatggtgaaatgtcatctcccaaaaagcccggccgactattttttatttcaccaaaaagcatgcaagttgtcatgaggactgtagggagaggcccaaagcctttgtaaatctcttctaccaacattttcctcctcaatatagtagtaggtaggcaaggtagggaaagagaatgtcgaggggatttaacttttaatgtttagatcacacacaagtttggttctcttctcaaactttaaaccaagtttattcctacagattgaaaatcaatttagatcttttaattgggggaaagatatcatgtctcttctcaattaaatgaatttgtaattataaagggtttagaatgatatgtgacagtggtaagcactatataaatatatgttaaatataaagtgtgtacgtgtatgcagaactcttgttcatc

SEQ ID NO: 70125 - DNA, 1266 bp, Homo sapiens
agaaaagaacggatactgggacaaagcagctgctctgctagcaaaggaagatctttgtaatagtgagccgtctcactgaggaacattctatagctcctgcttatagttttcttcatatagatgacagctatttattaaatttgattctaactgactccttgactgaactctttgcttttcagttgatattcacactaattccagatttataatcatacattccggaaatcatgatacaggttgagcatcccccagaaccgaagctttctgagtgccaacatgatgcataaagaaagtacgcattggagcatttggatttgggtttttggttttgggatgctggcagtatccaaaggaaatattccaaactcaaaaaatctgaaatctgaaacacttttggtcctaaacatttcagataaggaatacttaacctgtaattgtttccttccagagagttatactactgtctcccttccccaccctttataaaattagttcattggctgtaccttcagaacatcaagcaatagtagtaataggaaacttagtcttatatccaatttggtaccaagatatatgaatagatttattactattatatatctagagcggaccaggcttgcttgtaggttaattgcttagtacctgtgtagtgctggataatatttaatgctgatatgtaacttgcgtttcttatgagatccacagtaaatttcttattgtattgtttgtactattatgtttgtattatttgttatcgcaggattgttattaatgtgataaaatgaattgggatgctttctgtattttctattctgaaataagtgtgggatattgcattggaatggtctgttccttgaaagttgcagagtctgtgatgccagatggaccagaactcctgagttaattctccggcagctttttttttccttcttgattactcatgtatttcttccattttcttaatttcaatataggacagtgctaaaaacataaacattaataaatatctattgaataaatgaacgtatgggtgaacaaattttataactattaatttcctagaagaaactttaaggaattatatttttaaagcatattttacactactcttacgtatctgagatcctcttccttttctagatcctaattttatggatttccttttaaattagtaaaaagatgtttcccattgattccttcctcctcctttccttgaaagtttttattttcatatattaaataaaacatttctagaaagttatt

SEQ ID NO: 70126 - DNA, 357 bp, Homo sapiens
tgattaacccttgccactgaaatatgagtaaaagcatgtttgtcacctctaggccaaggcactgagatccagtcggccacctccatgctttctcttccattcaacagcaaacatggagaacccacattgaggtgtggagccacatgatggaaacaacctggttccctaggtcactgccaacccacttcaggttttatgtgcacgaaaaaagaaacatttatcatgttaacccattcatatttcaaggtttttgttgttgttgttgttggatcagttagcatttactttatttgagtaatatacacaactactatttctattgtctgtcaggcctattaaaaatattttaatcacaaa

SEQ ID NO: 70127 - DNA, 367 bp, Homo sapiens
tgaggtggagtttcgcttttattgcccaggctggagtgcagtggtacaatctcagctcactgcaacctccgcctcctgagttcaagtgattctcctgcccaagcttctcgagtagctgggattacaggcatccaccaccaggcccagcaatttttgtatttttagtagagacggggtttcaccatgttggccaggttggtctcaaactctggacctcaagtgatccgtctgccacggcctcccaaagtgctgggattacaggcatgagccaccaggcccggcccattttagtgctatttcttagtatttaatgtgctaaatatagtatttggtaaagaatgaaatcatcaaatttgtgtgtatactg

SEQ ID NO: 70128 - DNA, 617 bp, Homo sapiens
agaaactgtgacaaactcaagtccttccacctgtccccccgaggaccacccacatctgagcccccacctgtgccagccaacaagcccaagttcctgaagatagctgaagaggaccccccaagggaggcagccatgcccggactctttgtgccccccgtggctccccggcctcctgcgctgaagctgccagtgcctgaggccatggcgcggcccgcagtcctgcccaggccagagaagccgcagctcccgcacctccagcgatcaccccccgatgggcagagtttcaggagcttctcctttgaaaagccccggcaaccctcacaggctgacactggcggggacgactcggacgaggactatgagaaggtgccactgcccaactcggtcttcgtcaacaccacggagtcctgcgaagtggaaaggttgttcaaggctacaagcccccggggagagccccaggatggactctactgcatccggaactcctctaccaagtcggggaaggtcctggttgtgtgggacgaaacctctaacaaagtgaggaactatcgcatttttgagaaggactctaagttctacctggagggcgaggtcctgtttgtgagtgtgggcagcat

SEQ ID NO: 70129 - DNA, 2947 bp, Homo sapiens
ctcagttctcctcagggtcctggaggcttcattgagctgctgagcagaagctgaaacacagaattctaagcgttgctgagacccactgacctgcagacctcatagtgggtgcccaggatgttgtcctacggagagaggctggggtcccctgctgtctccccactcccagtccgtggggggcatgtgatgcgagggacggcctttgcctacgtgcccagccctcaggtcctacacaggatcccggggacctctgcctatgccttccccagcctgggccctgtggcccttgctgagcacacctgcccctgtggggaggtcctggagcgccatgaaccactgcctgccaagctggccctggaggaggagcagaagccagagtccaggctggtccccaagctgcgccaggctggcgccatgctgctcaaggtgccactgatgctcaccttcctctacctcttcgtctgctccctggacatgctcagctcggccttccagctggctggagggaaggtggctggtgacatcttcaaggataacgccatcctgtccaacccggtggccgggctggtggtggggatcctggtgaccgtgctggtgcagagctccagcacctccacatccatcatcgtcagcatggtctcctctggcttgctggaggtgagctctgccatccccatcatcatgggctccaacatcggcacctctgtcaccaacaccatcgtggccctgatgcaggcgggggacaggactgacttccggcgggccttcgcgggggccacggtgcatgactgctttaactggctgtcagtgctggtcctgctgcccctggaggctgccactggctacctgcaccacatcactcgacttgtggtggcctccttcaacatccatggtggccgtgatgctcctgacctgctcaagatcatcacagagcccttcacgaagctcatcatccagctggacgagtctgtgataaccagcattgccactggtgatgagtccctgaggaaccacagtctcatccagatctggtgccacccagactccttacaggctcccacctccatgtccagagcagaggccaactccagccagacccttggaaatgccaccatggagaaatgcaaccacatctttgtggacactggcctaccggacctggctgtggggctcatcctgctggcaggatccctggtgctgctgtgcacctgcctcatcctcctagtcaagatgctcaactccctgctcaagggccaagtggccaaggtcatccagaaggtcatcaatacggacttccctgcccccttcacctgggtcacaggctactttgccatggtggtgggcgccagcatgaccttcgtggtccagagcagttctgtgttcacctcggccatcaccccactcatcggtcttggtgtgatcagcattgagagggcctacccgctcacactgggttccaacatcggcaccaccaccacggccatcctggctgccctggccagccccagggagaagctgtccagcgctttccagattgccctctgtcacttcttcttcaacatctcgggtatccttctgtggtacccggtgccctgcacacgcctgcccatccgcatggccaaggcgctggggaaacgcacggccaagtaccgctggtttgccgtcctctatctccttgtctgcttcctgctgctgccctcactggtgtttggcatctccatggcaggctggcaggtcatggtaggtgtgggcacgcccttcggggccctgctggccttcgtggtgctcatcaatgtcctgcagagtcggagtcccgggcacctgcccaagtggttacagacatgggacttcctgcctcgctggatgcactccctgaagcccctggaccacctcatcacccgcgccaccctatgctgtgccaggcctgagccccgctcacccccgctgccccccagggtcttcctggaggagctaccccctgccacaccctccccccgtcttgcactgcctgctcaccacaatgccacccgcctctaggctgtgggcccagactacagcctggaatggggaaggcctggtgtggaaaggcaggggagggagggtgtgtgtaggtatgtgcatgtgcctgtgccaccctgggtgccagtctctccttctgtagctccgcaaagctctgggcttgtgtgagagtgtcggtgtgtgtgcatgtgtgggggtgagtctgcatgtgcacctgtcatgtgtagaagcttgtatttgtgtacaggtgtgccagcccatgcaggtgtacacagacacacctgtgggaggctgtgtgcaggctgcaggatatctgggtatgatttcaggtcctctgcacgtgtacacatgactaggataggcaggagtaagggtgggtctgggtatatgactgtgcagctgtttgtgcatagatgttggtgcctgcgttactgaatttgcacacctccttgccaccttccttcctccaagataccatctcctcatcctaacccaggtcttcggccaccaccacaattaattcccttcccaacacttgcctgatgaaaaaaaaacaaaggaattaaaactctcctcaggcattcggaagtctttttgctctccatcaatggcaaagggaagaccaagccagggggttcagcagcaccatctcccctcaaagactggctgcaagagcagcctgccctgcccaggccaggtgcagttccagagaagccagccctgcaggctcaccccaaccatctgcctggccctaccttagtgagtccaaaccacaattcaaactccctggaagcccctcctaggcctggggccacccccaaggcaagtgtaaggaggattctgcacccccaccccctgacccccacctggctgaacttcctctggtctccctctgccctctaaattcacccacctcagccacacatca

SEQ ID NO: 70130 - DNA, 1780 bp, Homo sapiens
ctcagttctcctcagggtcctggaggcttcattgagctgctgagcagaagctgaaacacagaattctaagcgttgctgagacccactgacctgcagacctcatagtgggtgcccaggatgttgtcctacggagagaggctggggtcccctgctgtctccccactcccagtccgtggggggcatgtgatgcgagggacggcctttgcctacgtgcccagccctcaggtcctacacaggatcccggggacctctgcctatgccttccccagcctgggccctgtggcccttgctgagcacacctgcccctgtggggaggtcctggagcgccatgaaccactgcctgccaagctggccctggaggaggagcagaagccagagtccaggctggtccccaagctgcgccaggctggcgccatgctgctcaaggtgccactgatgctcaccttcctctacctcttcgtctgctccctggacatgctcagctcggccttccagctggctggagggaaggtggctggtgacatcttcaaggataacgccatcctgtccaacccggtggccgggctggtggtggggatcctggtgaccgtgctggtgcagagctccagcacctccacatccatcatcgtcagcatggtctcctctggcttgctggaggtgagctctgccatccccatcatcatgggctccaacatcggcacctctgtcaccaacaccatcgtggccctgatgcaggcgggggacaggactgacttccggcgggccttcgcgggggccacggtgcatgactgctttaactggctgtcagtgctggtcctgctgcccctggaggctgccactggctacctgcaccacatcactcgacttgtggtggcctccttcaacatccatggtggccgtgatgctcctgacctgctcaagatcatcacagagcccttcacgaagctcatcatccagctggacgagtctgtgataaccagcattgccactggtgatgagtccctgaggaaccacagtctcatccagatctggtgccacccagactccttacaggctcccacctccatgtccagagcagaggccaactccagccagacccttggaaatgccaccatggagaaatgcaaccacatctttgtggacactggcctaccggacctggctgtggggctcatcctgctggcaggatccctggtgctgctgtgcacctgcctcatcctcctagtcaagatgctcaactccctgctcaagggccaagtggccaaggtcatccagaaggtcatcaatacggacttccctgcccccttcacctgggtcacaggctactttgccatggtggtgggcgccagcatgaccttcgtggtccagagcagttctgtgttcacctcggccatcaccccactcatcggtcttggtgtgatcagcattgagagggcctacccgctcacactgggttccaacatcggcaccaccaccacggccatcctggctgccctggccagccccagggagaagctgtccagcgctttccaggtgcgctgggagtgtagcctcgcctggggcaggatggagctgcctctggggtgtggggcctcacaaaggtgtgacaacatggaacaaatattttgactgcctactaagggccacctaatatgctcaatgaaaccattatgggcaaagtagacccaataccaccctcgagaccttagcatctaatagggagacactgctcataattacaccaataaatagcagtgagtcggatttgcaccataaggaa

SEQ ID NO: 70131 - DNA, 2078 bp, Homo sapiens
gccatgtcctgcaatttatgtactatggaactatagagctgagtatgaataccgttcatgagattcttcaggctgccatgtatgttcaacttatagaagtggtgaagttctgctgctcttttctcttagcgaagatctgcctagaaaattgtgcagaaattatgagactcttagatgatttcggcgtaaacatcgagggagtcagggagaagttagacacctttctgctagacaactttgtgccactcatgtctaggcctgactttctgtcctatctgagctttgagaagctcatgtcttacttggataatgatcatctgagcaggttcccagagatagagctgtacgaggctgtgcagtcttggctgcggcatgatagaagacgctggagacataccgataccatcattcagaatatccggttttgcttgatgaccccaaccagcgtttttgagaaggttaagacatcagaattttatagatactcccgacagctccgttacgaagttgaccaagcattgaattactttcagaatgttcaccagcagcctttgttggatatgaagtcaagccgcatccgttctgcaaacaccgcaaactacagtatttcgaggaatgattggacatagcatggttaacagtaaaatacttctcttaaagaaaccaagagtctggtgggagctagaaggcccacaagtacctctgcgacctgactgccttgctatcgtcaataattttgtgttcctgttaggcggggaagagctgggcccggatggtgaattccatgcttcttccaaagtattcaggtatgacccgagacagaactcctggctgcagatggcagatatgtctgtaccacgctctgaatttgctgtaggtgttattgggaagtttatttacgccgtagcaggcagaaccagagatgagactttctattcaactgagagatatgacatcaccaacgataaatgggaatttgtggatccttatccagttaacaaatatggacatgaggggacagtgctcaataacaaattgtttatcaccggtggaatcacctcatcttccacctccaagcaagtgtgcgtgtttgaccccagcaaagaagggaccatagaacaacggaccaggagaactcaagtggttaccaactgttgggagaataagagcaagatgaattacgcgagatgctttcacaagatgatttcttacaatggcaagctttatgtcttcggtggtgtctgtgtgatcttgagggcctctttcgaatctcagggatgcccttctacagaagtatacaacccagagactgatcagtggaccatcttggcatccatgccgattggtagaagtggccatggtgtgactgtgctggacaaacaaataatggttcttggaggcctttgttataatggtcattacagcgattccatcctcacttttgatccggatgaaaacaagtggaaggaagatgagtaccctcggatgccctgcaagctggatggtttacaagtatgcaacctgcattttccggactatgtactggatgaggtcaggcgttgcaactaatgacatcctcctccctaaaaaaagaggcaaacaaagtatttgtttgcacagagtaattaattaaaacatataaagaaaaacctcaccagttttactatcaaagccattggtctaacattgtaagaatttttcattctgtgctagcatcctttttttcttttcagtggcctcaaactcatgcaataagttaattctaagtgctagctcttgaaactacttccagaagcagttgaatagaatgctccacttatctgggatattgattttctgctttaaacatttctttcagatgttagcgtaggagtcatgtgtcttctaagagaagacccgataagtgtcactggatgtgatttcagtctctgtctctatctgaaacctttttgaagatttatttcagtgtatttcagtctgttatactttttagttttattatttaaaagtttaaaactcttgacctttttgcatggctttttgctgaaaatgcaaaaatataaattttctacaaaatt

SEQ ID NO: 70132 - DNA, 5769 bp, Homo sapiens
  misc_feature (2426)..(2426): n is a, c, g, or t
gccatgtcctgcaatttatgtactatggaactatagagctgagtatgaataccgttcatgagattcttcaggctgccatgtatgttcaacttatagaagtggtgaagttctgctgctcttttctcttagcgaagatctgcctagaaaattgtgcagaaattatgagactcttagatgatttcggcgtaaacatcgagggagtcagggagaagttagacacctttctgctagacaactttgtgccactcatgtctaggcctgactttctgtcctatctgagctttgagaagctcatgtcttacttggataatgatcatctgagcaggttcccagagatagagctgtacgaggctgtgcagtcttggctgcggcatgatagaagacgctggagacataccgataccatcattcagaatatccggttttgcttgatgaccccaaccagcgtttttgagaaggttaagacatcagaattttatagatactcccgacagctccgttacgaagttgaccaagcattgaattactttcagaatgttcaccagcagcctttgttggatatgaagtcaagccgcatccgttctgcaaacaccgcaaactacagtatttcgaggaatgattggacatagcatggttaacagtaaaatacttctcttaaagaaaccaagagtctggtgggagctagaaggcccacaagtacctctgcgacctgactgccttgctatcgtcaataattttgtgttcctgttaggcggggaagagctgggcccggatggtgaattccatgcttcttccaaagtattcaggtatgacccgagacagaactcctggctgcagatggcagatatgtctgtaccacgctctgaatttgctgtaggtgttattgggaagtttatttacgccgtagcaggcagaaccagagatgagactttctattcaactgagagatatgacatcaccaacgataaatgggaatttgtggatccttatccagttaacaaatatggacatgaggggacagtgctcaataacaaattgtttatcaccggtggaatcacctcatcttccacctccaagcaagtgtgcgtgtttgaccccagcaaagaagggaccatagaacaacggaccaggagaactcaagtggttaccaactgttgggagaataagagcaagatgaattacgcgagatgctttcacaagatgatttcttacaatggcaagctttatgtcttcggtggtgtctgtgtgatcttgagggcctctttcgaatctcagggatgcccttctacagaagtatacaacccagagactgatcagtggaccatcttggcatccatgccgattggtagaagtggccatggtgtgactgtgctggacaaacaaataatggttcttggaggcctttgttataatggtcattacagcgattccatcctcacttttgatccggatgaaaacaagtggaaggaagatgagtaccctcggatgccctgcaagctggatggtttacaagtatgcaacctgcattttccggactatgtactggatgaggtcaggcgttgcaactaatgacatcctcctccctaaaaaaagaggcaaacaaagtatttgtttgcacagagtaattaattaaaacatataaagaaaaacctcaccagttttactatcaaagccattggtctaacattgtaagaatttttcattctgtgctagcatcctttttttcttttcagtggcctcaaactcatgcaataagttaattctaagtgctagctcttgaaactacttccagaagcagttgaatagaatgctccacttatctgggatattgattttctgctttaaacatttctttcagatgttagcgtaggagtcatgtgtcttctaagagaagacccgataagtgtcactggatgtgatttcagtctctgtctctatctgaaacctttttgaagatttatttcagtgtatttcagtctgttatactttttagttttattatttaaaagtttaaaactcttgacctttttgcatggctttttgctgaaaatgcaaaaatataaattttctacaaaattaactttttatattcaaaacactatttctaagctgccttctcttatccgcattgtgttagtgaaagcatattcatactcgcatacaacctataaatacacaaggcacatcccttttatgcgtggttaggattctatatttttaagctagtgcacttacttgcacacacagttcgccatacttgttgaattttagatgtaacgtcttttcacatattaacatttttagaaagttgaaataactggagtcctcatttgctatcaaagtagcctatcttcagtccatactgattcagtaatatttgaactccttatatttctgaaacatgtatggttatgaaaactaacacnttatattttattttcaaaagtaaatgttagtgttctttgtcgatgtatgtcttttctttttgaaaatgtttttctttgcagtctgtttaacgttaccctgtttttagtgagaatcggagtggtatatgacaagttctggccctgcagcatgcaagcacttttaaagagcatttaggtaataccagactcctaaatcaaggccccttaaaagtaagtgcaactcccattttttacattcagtaaggctgctgcatttgttattgaatggaaggtagaaactcttagaaaatttgacctcagttttgacttagaggtaagaaatagaattataatgttactggttttatctacttgtttattttgtacaaaatacccagcgacactagggatgtaagccctcagtttttgttttatttactgaaagctattagcatgaaggatagtaaccacaaagttcagaatggatcaagaatagctgtttaaaagcatttataataagtgttttaggattagctgcacctttcaactctttaaatgcagaggaaaaaacatagttgacaaagttaagcaagaataacctgggagtggatcattgaaattgatgccatttgcgcatgagtagtctatatctgatacagactagatctatactggcaaaacttgccagatcttagaatattggtgcaatattgcaatgccttctatatggctgctgatgtataaattttctagtttcactttgtttggtgttttttgtttttttgtttgtttgtttgtttttttgctgctgccaccattgaacataaaatggaagtgtgaagtcatggaaatgtgaagactttggtttttgggggttttttgggcagttattagacatactatgagattaaacctgatcttcaaactccagaattggaggcatttgggtttaagaaaccaggtacataagtagcttttgaaaaaaccattggcattgatttcaaaaatcaataataatcttattttatatatgagacttatattttcattaactagtcctgtcatttacttacagtttccaaacatgaaatttggtatcttgtttcccatggtaatatgggtaaaagtctttttctacatttaaaaaatacattattttatttttgaaagttaggaataagttagccatttaatttttttctacattagtttagtggctttgtatgtgtgctattttgctttaaagaaaataacgtcttcattattttcctcattgatgtcttttgctagaaaagaccaagaaagagccatcaggccaggtatccacatcaaagcctttacactatagtggtggttctctttaattgcttagatatgacttcatgaccctagtcagggtgacatctgggcaaacatttgagtattcttggtcttccattttaaagacagaggccaagatcaaagttcatgttttgtaaaattcgtaaaatcttaacttgaactaactctgggttcagctttacgtaagtcacgtcggacctgatgttagctgtaatcagttttgagctttaaggatagttgctgttgcttgggttctgaatgtatgagaaaactccctgtttatatgtagttctaatttaggttattttaaatccatgattaacttacattcccttttaaaattatggttttattgctgcaagagatttatttttgttatactaaactatggaaaagtttttcatagcatttttttcaagtttatttttgtgtgcttcatttggagtttttgtttatatacattgcgctcaaaaaagtagttttttgaaaaattcagtaagatttgaatctatacagtttaactgttatgacctttatgcgtgttgttttcactttatatctcaaatgccagagttcacaaaaatagctgatcttcattaattacatcttaattagaaccatttgttctcttccgtgtctttgaccttctaagttttgattttaaagaaattccttgcactacagccttttcttaaaatgcaagattctcactttgaaggttttgtgttggaagaaatgctactggtttttaaaaagcaaagcttaactaatagaattattagcttttcttgagacagctttctgtgtcctcattactctgctctgtgtgagtgttactagaatttgtgaaatactgactgagcccttcacttatcttttctaaagcagcacctttggacacctcattctgggaagcctgctcgagtcatagtaaaggacacacgctttatgtggggagaagtggtaaaaatggagttttgtcttaattacatgaaactaagctttaaaatattttataacagattatttgagctgcataatctaaacatgtcaaacgttcagtgggactatttttatatatgtatatgtgggtgtaggtcataacatttcagtttataatataaattgttatttcagtttataagctatctctcagaggagactagctcttttgagaattcataatttaaagttttagactgaagtaaaatgcaacatagataatagtgtaaatcagatataattgagggctatatggcagtaaaactgctagtgccagttttcttgtttgcctgttatacatttttgatttttgtttttgtattctgaacattttgagagatcatatgtttgttcaattacatttagagttggtttgggaataaatatcttctaaaaagagatttatcttaaaaatggaagtcctaaaaattagtttatccagagtttataaagtcaaatattcagtaggcatagactggaatagataaattcatggaaatcatatcctttcagtacaccgtataacttcaatattacacaagtaacattgaggagaatgccatcagctttgttctcccttaaattctttggttttctttttacattttgggaacaactgcatttaaaatgttattagtcagtatatagtaaggattaggtgtttgctttctgaaggaatggtccagtgaggtgattgggagaggttattttctacctaacttgtatatgccctatacctcttgggcatactttgtctatagaaaaatattttgacctttaggtacattttgggccagtagtcaaataatcctagggccgatataaaaatcttagaataatttaaggtttgccttttatacctgttttgaaagcctttacatttttgtcaggtaatttttcccaagccgtggatataatctattcaaacatgtttatgctatccattctgtttttaaattgaaaaaaatgttaaaagtgtttatgaagaaaagtttaaataaaatatttttaatctttaaaa

SEQ ID NO: 70133 - DNA, 6551 bp, Homo sapiens
  misc_feature (2426)..(2426): n is a, c, g, or t
gccatgtcctgcaatttatgtactatggaactatagagctgagtatgaataccgttcatgagattcttcaggctgccatgtatgttcaacttatagaagtggtgaagttctgctgctcttttctcttagcgaagatctgcctagaaaattgtgcagaaattatgagactcttagatgatttcggcgtaaacatcgagggagtcagggagaagttagacacctttctgctagacaactttgtgccactcatgtctaggcctgactttctgtcctatctgagctttgagaagctcatgtcttacttggataatgatcatctgagcaggttcccagagatagagctgtacgaggctgtgcagtcttggctgcggcatgatagaagacgctggagacataccgataccatcattcagaatatccggttttgcttgatgaccccaaccagcgtttttgagaaggttaagacatcagaattttatagatactcccgacagctccgttacgaagttgaccaagcattgaattactttcagaatgttcaccagcagcctttgttggatatgaagtcaagccgcatccgttctgcaaacaccgcaaactacagtatttcgaggaatgattggacatagcatggttaacagtaaaatacttctcttaaagaaaccaagagtctggtgggagctagaaggcccacaagtacctctgcgacctgactgccttgctatcgtcaataattttgtgttcctgttaggcggggaagagctgggcccggatggtgaattccatgcttcttccaaagtattcaggtatgacccgagacagaactcctggctgcagatggcagatatgtctgtaccacgctctgaatttgctgtaggtgttattgggaagtttatttacgccgtagcaggcagaaccagagatgagactttctattcaactgagagatatgacatcaccaacgataaatgggaatttgtggatccttatccagttaacaaatatggacatgaggggacagtgctcaataacaaattgtttatcaccggtggaatcacctcatcttccacctccaagcaagtgtgcgtgtttgaccccagcaaagaagggaccatagaacaacggaccaggagaactcaagtggttaccaactgttgggagaataagagcaagatgaattacgcgagatgctttcacaagatgatttcttacaatggcaagctttatgtcttcggtggtgtctgtgtgatcttgagggcctctttcgaatctcagggatgcccttctacagaagtatacaacccagagactgatcagtggaccatcttggcatccatgccgattggtagaagtggccatggtgtgactgtgctggacaaacaaataatggttcttggaggcctttgttataatggtcattacagcgattccatcctcacttttgatccggatgaaaacaagtggaaggaagatgagtaccctcggatgccctgcaagctggatggtttacaagtatgcaacctgcattttccggactatgtactggatgaggtcaggcgttgcaactaatgacatcctcctccctaaaaaaagaggcaaacaaagtatttgtttgcacagagtaattaattaaaacatataaagaaaaacctcaccagttttactatcaaagccattggtctaacattgtaagaatttttcattctgtgctagcatcctttttttcttttcagtggcctcaaactcatgcaataagttaattctaagtgctagctcttgaaactacttccagaagcagttgaatagaatgctccacttatctgggatattgattttctgctttaaacatttctttcagatgttagcgtaggagtcatgtgtcttctaagagaagacccgataagtgtcactggatgtgatttcagtctctgtctctatctgaaacctttttgaagatttatttcagtgtatttcagtctgttatactttttagttttattatttaaaagtttaaaactcttgacctttttgcatggctttttgctgaaaatgcaaaaatataaattttctacaaaattaactttttatattcaaaacactatttctaagctgccttctcttatccgcattgtgttagtgaaagcatattcatactcgcatacaacctataaatacacaaggcacatcccttttatgcgtggttaggattctatatttttaagctagtgcacttacttgcacacacagttcgccatacttgttgaattttagatgtaacgtcttttcacatattaacatttttagaaagttgaaataactggagtcctcatttgctatcaaagtagcctatcttcagtccatactgattcagtaatatttgaactccttatatttctgaaacatgtatggttatgaaaactaacacnttatattttattttcaaaagtaaatgttagtgttctttgtcgatgtatgtcttttctttttgaaaatgtttttctttgcagtctgtttaacgttaccctgtttttagtgagaatcggagtggtatatgacaagttctggccctgcagcatgcaagcacttttaaagagcatttaggtaataccagactcctaaatcaaggccccttaaaagtaagtgcaactcccattttttacattcagtaaggctgctgcatttgttattgaatggaaggtagaaactcttagaaaatttgacctcagttttgacttagaggtaagaaatagaattataatgttactggttttatctacttgtttattttgtacaaaatacccagcgacactagggatgtaagccctcagtttttgttttatttactgaaagctattagcatgaaggatagtaaccacaaagttcagaatggatcaagaatagctgtttaaaagcatttataataagtgttttaggattagctgcacctttcaactctttaaatgcagaggaaaaaacatagttgacaaagttaagcaagaataacctgggagtggatcattgaaattgatgccatttgcgcatgagtagtctatatctgatacagactagatctatactggcaaaacttgccagatcttagaatattggtgcaatattgcaatgccttctatatggctgctgatgtataaattttctagtttcactttgtttggtgttttttgtttttttgtttgtttgtttgtttttttgctgctgccaccattgaacataaaatggaagtgtgaagtcatggaaatgtgaagactttggtttttgggggttttttgggcagttattagacatactatgagattaaacctgatcttcaaactccagaattggaggcatttgggtttaagaaaccaggtacataagtagcttttgaaaaaaccattggcattgatttcaaaaatcaataataatcttattttatatatgagacttatattttcattaactagtcctgtcatttacttacagtttccaaacatgaaatttggtatcttgtttcccatggtaatatgggtaaaagtctttttctacatttaaaaaatacattattttatttttgaaagttaggaataagttagccatttaatttttttctacattagtttagtggctttgtatgtgtgctattttgctttaaagaaaataacgtcttcattattttcctcattgatgtcttttgctagaaaagaccaagaaagagccatcaggccaggtatccacatcaaagcctttacactatagtggtggttctctttaattgcttagatatgacttcatgaccctagtcagggtgacatctgggcaaacatttgagtattcttggtcttccattttaaagacagaggccaagatcaaagttcatgttttgtaaaattcgtaaaatcttaacttgaactaactctgggttcagctttacgtaagtcacgtcggacctgatgttagctgtaatcagttttgagctttaaggatagttgctgttgcttgggttctgaatgtatgagaaaactccctgtttatatgtagttctaatttaggttattttaaatccatgattaacttacattcccttttaaaattatggttttattgctgcaagagatttatttttgttatactaaactatggaaaagtttttcatagcatttttttcaagtttatttttgtgtgcttcatttggagtttttgtttatatacattgcgctcaaaaaagtagttttttgaaaaattcagtaagatttgaatctatacagtttaactgttatgacctttatgcgtgttgttttcactttatatctcaaatgccagagttcacaaaaatagctgatcttcattaattacatcttaattagaaccatttgttctcttccgtgtctttgaccttctaagttttgattttaaagaaattccttgcactacagccttttcttaaaatgcaagattctcactttgaaggttttgtgttggaagaaatgctactggtttttaaaaagcaaagcttaactaatagaattattagcttttcttgagacagctttctgtgtcctcattactctgctctgtgtgagtgttactagaatttgtgaaatactgactgagcccttcacttatcttttctaaagcagcacctttggacacctcattctgggaagcctgctcgagtcatagtaaaggacacacgctttatgtggggagaagtggtaaaaatggagttttgtcttaattacatgaaactaagctttaaaatattttataacagattatttgagctgcataatctaaacatgtcaaacgttcagtgggactatttttatatatgtatatgtgggtgtaggtcataacatttcagtttataatataaattgttatttcagtttataagctatctctcagaggagactagctcttttgagaattcataatttaaagttttagactgaagtaaaatgcaacatagataatagtgtaaatcagatataattgagggctatatggcagtaaaactgctagtgccagttttcttgtttgcctgttatacatttttgatttttgtttttgtattctgaacattttgagagatcatatgtttgttcaattacatttagagttggtttgggaataaatatcttctaaaaagagatttatcttaaaaatggaagtcctaaaaattagtttatccagagtttataaagtcaaatattcagtaggcatagactggaatagataaattcatggaaatcatatcctttcagtacaccgtataacttcaatattacacaagtaacattgaggagaatgccatcagctttgttctcccttaaattctttggttttctttttacattttgggaacaactgcatttaaaatgttattagtcagtatatagtaaggattaggtgtttgctttctgaaggaatggtccagtgaggtgattgggagaggttattttctacctaacttgtatatgccctatacctcttgggcatactttgtctatagaaaaatattttgacctttaggtacattttgggccagtagtcaaataatcctagggccgatataaaaatcttagaataatttaaggtttgccttttatacctgttttgaaagcctttacatttttgtcaggtaatttttcccaagccgtggatataatctattcaaacatgtttatgctatccattctgtttttaaattgaaaaaaatgttaaaagtgtttatgaagaaaagtttaaataaaatatttttaatctttaaaaaaaaaaaaaaaaaaaaaaaaaaaaaaaaaaaaaaaaaaaaaaaaaaaaaaaagaaaagaaaagaaacaaagagagagaaaaaaaaaaaataaagataagaacaagaaagaagaaagaacaaacaaaagagaaacaaagaaaaaagagagagagcagcgagacagcaaacaaaagaagagagagagagaggcggggcgacgcgcgcgcaacaacaagcacctgcggcgacgcagcaccaacacaaccgagaaaacgaacgaagagcaaaatcctggacagaaagggagagacagcagcgactccatgcgaacgaagccaaaacaaagataaagacaacacaagacgacacacggatagagcgaaaaagaaaacaaaaacaacacaaagaaagggacaaactagagagggcgaaaaagacggagaacgcgtcgcacaatcacgcgtcggcaaaaacagagaagaaatagaaaataacaaaacccccaaccaacgcgaccgagacacgacagagaggacagagaaaccaaaacacaagaagtatagctgaaatatagaacagtagtagattttgaggtaaacacatataaaaaaaaataaaaataaaaaacaaaagatagtgacaacagacagaggaagaacaaacggcgacacagaggaggacagaagtgatcggcagaataaaagggaaaagagaagggccctaacggcgaaaaaaaaagaagaaaaagagagaaagacaacgggcacgcaggggagaacagaagggaagggacacgggggga

SEQ ID NO: 70134 - DNA, 4167 bp, Homo sapiens
  misc_feature (2426)..(2426): n is a, c, g, or t
gccatgtcctgcaatttatgtactatggaactatagagctgagtatgaataccgttcatgagattcttcaggctgccatgtatgttcaacttatagaagtggtgaagttctgctgctcttttctcttagcgaagatctgcctagaaaattgtgcagaaattatgagactcttagatgatttcggcgtaaacatcgagggagtcagggagaagttagacacctttctgctagacaactttgtgccactcatgtctaggcctgactttctgtcctatctgagctttgagaagctcatgtcttacttggataatgatcatctgagcaggttcccagagatagagctgtacgaggctgtgcagtcttggctgcggcatgatagaagacgctggagacataccgataccatcattcagaatatccggttttgcttgatgaccccaaccagcgtttttgagaaggttaagacatcagaattttatagatactcccgacagctccgttacgaagttgaccaagcattgaattactttcagaatgttcaccagcagcctttgttggatatgaagtcaagccgcatccgttctgcaaacaccgcaaactacagtatttcgaggaatgattggacatagcatggttaacagtaaaatacttctcttaaagaaaccaagagtctggtgggagctagaaggcccacaagtacctctgcgacctgactgccttgctatcgtcaataattttgtgttcctgttaggcggggaagagctgggcccggatggtgaattccatgcttcttccaaagtattcaggtatgacccgagacagaactcctggctgcagatggcagatatgtctgtaccacgctctgaatttgctgtaggtgttattgggaagtttatttacgccgtagcaggcagaaccagagatgagactttctattcaactgagagatatgacatcaccaacgataaatgggaatttgtggatccttatccagttaacaaatatggacatgaggggacagtgctcaataacaaattgtttatcaccggtggaatcacctcatcttccacctccaagcaagtgtgcgtgtttgaccccagcaaagaagggaccatagaacaacggaccaggagaactcaagtggttaccaactgttgggagaataagagcaagatgaattacgcgagatgctttcacaagatgatttcttacaatggcaagctttatgtcttcggtggtgtctgtgtgatcttgagggcctctttcgaatctcagggatgcccttctacagaagtatacaacccagagactgatcagtggaccatcttggcatccatgccgattggtagaagtggccatggtgtgactgtgctggacaaacaaataatggttcttggaggcctttgttataatggtcattacagcgattccatcctcacttttgatccggatgaaaacaagtggaaggaagatgagtaccctcggatgccctgcaagctggatggtttacaagtatgcaacctgcattttccggactatgtactggatgaggtcaggcgttgcaactaatgacatcctcctccctaaaaaaagaggcaaacaaagtatttgtttgcacagagtaattaattaaaacatataaagaaaaacctcaccagttttactatcaaagccattggtctaacattgtaagaatttttcattctgtgctagcatcctttttttcttttcagtggcctcaaactcatgcaataagttaattctaagtgctagctcttgaaactacttccagaagcagttgaatagaatgctccacttatctgggatattgattttctgctttaaacatttctttcagatgttagcgtaggagtcatgtgtcttctaagagaagacccgataagtgtcactggatgtgatttcagtctctgtctctatctgaaacctttttgaagatttatttcagtgtatttcagtctgttatactttttagttttattatttaaaagtttaaaactcttgacctttttgcatggctttttgctgaaaatgcaaaaatataaattttctacaaaattaactttttatattcaaaacactatttctaagctgccttctcttatccgcattgtgttagtgaaagcatattcatactcgcatacaacctataaatacacaaggcacatcccttttatgcgtggttaggattctatatttttaagctagtgcacttacttgcacacacagttcgccatacttgttgaattttagatgtaacgtcttttcacatattaacatttttagaaagttgaaataactggagtcctcatttgctatcaaagtagcctatcttcagtccatactgattcagtaatatttgaactccttatatttctgaaacatgtatggttatgaaaactaacacnttatattttattttcaaaagtaaatgttagtgttctttgtcgatgtatgtcttttctttttgaaaatgtttttctttgcagtctgtttaacgttaccctgtttttagtgagaatcggagtggtatatgacaagttctggccctgcagcatgcaagcacttttaaagagcatttaggtaataccagactcctaaatcaaggccccttaaaagtaagtgcaactcccattttttacattcagtaaggctgctgcatttgttattgaatggaaggtagaaactcttagaaaatttgacctcagttttgacttagaggtaagaaatagaattataatgttactggttttatctacttgtttattttgtacaaaatacccagcgacactagggatgtaagccctcagtttttgttttatttactgaaagctattagcatgaaggatagtaaccacaaagttcagaatggatcaagaatagctgtttaaaagcatttataataagtgttttaggattagctgcacctttcaactctttaaatgcagaggaaaaaacatagttgacaaagttaagcaagaataacctgggagtggatcattgaaattgatgccatttgcgcatgagtagtctatatctgatacagactagatctatactggcaaaacttgccagatcttagaatattggtgcaatattgcaatgccttctatatggctgctgatgtataaattttctagtttcactttgtttggtgttttttgtttttttgtttgtttgtttgtttttttgctgctgccaccattgaacataaaatggaagtgtgaagtcatggaaatgtgaagactttggtttttgggggttttttgggcagttattagacatactatgagattaaacctgatcttcaaactccagaattggaggcatttgggtttaagaaaccaggtacataagtagcttttgaaaaaaccattggcattgatttcaaaaatcaataataatcttattttatatatgagacttatattttcattaactagtcctgtcatttacttacagtttccaaacatgaaatttggtatcttgtttcccatggtaatatgggtaaaagtctttttctacatttaaaaaatacattattttatttttgaaagttaggaataagttagccatttaatttttttctacattagtttagtggctttgtatgtgtgctattttgctttaaagaaaataacgtcttcattattttcctcattgatgtcttttgctagaaaagaccaagaaagagccatcaggccaggtatccacatcaaagcctttacactatagtggtggttctctttaattgcttagatatgacttcatgaccctagtcagggtgacatctgggcaaacatttgagtattcttggtcttccattttaaagacagaggccaagatcaaagttcatggcatatgtatgtgagcatggatatgatcgggggatgacttcagacccctaataaactcaagaaaatgccttaagaaggttgcttgtcttcccttttgtacttttctgtgggatatcttctgccatagtaaaagaaaatatggctcttgtgagcacatgaactagcgtattattacctgacgtttctcttggaccacgcttcttatttcaggttaatagcttgttctgtaagtatcacaactgcaggctctctggctcaacactggtattgatgtactggcaaagatagtgcc

SEQ ID NO: 70135 - DNA, 209 bp, Homo sapiens
caaacattgatggtaaatgtcttattcttaaagagatcttattctgaaacaacttgaatctttgtttttatgctgtgatattagtggctgtggcagtgcctagaattgtttaattgcctaatgcacaaaggtgagcactttgattgatgtgtattcagagaagtactttaataattttataaataaagaactctccagatgactgaatg

SEQ ID NO: 70136 - DNA, 472 bp, Homo sapiens
gtgttcaaataccacctccgctcacaggtgctgcctgtctgaatttaggctccaggcttctcatcttttcaacggaagggataataacgttcacctgcacagtgctcttttgaacaagaaacaagattacgtatgcaaatatcttaagtgccattacttttaaacaaatggagtttgttaattttattatttctacttttattattccccaagtcattatttgaacacctagaatggtgcttggcaaatagtagtcacacaatacatatttgtagaacagatctttgaacaaatacatagtaaaatgaatgaattaatgaataccaaattactgtgaaaaacgttcagaccgaagaaaaatttgctgaaaaggaaccagcttccctttcgtgtctctcccagctcaggcaagcagcccacaagggggcgctccctgagccttctagaggcagagcggcctgttgggaaaggt

SEQ ID NO: 70137 - DNA, 274 bp, Homo sapiens
aggacggccagacacctggaagccggaaaatggactcagtggcctttgaggatgtggcagtgaacttcacccaggaggagtgggctttgctggatccttggcagaaaaaactctacagagatgtgatgctggaaacctataggaacctggcttcagtaggtgatgacgacaacattccttcacttagagaacaagttgcccatcaacgatatttcaagacctggcatgtggaaagggaatacttcagtaaataaaccaagcatggtgacagcta

SEQ ID NO: 70138 - DNA, 320 bp, Homo sapiens
cctacttatagcggagactacagtcaaaacaaaataaaacaaatcctctaatgctatcagagccaagaaatctatcaatcatatatacattttttaaatccaggagtgtttacatttcagcatataaatcttatcaagctaaaatagagtatatattctgatgttgtaactgatagatcataccctcactggctttgagagtccccaaacatttattgtaaaggtttccaactacactagcaatcttttgtaattgaataaaatgccaatttatatttgttgaataaaagattatctggggtactgctccttccgaaatg

SEQ ID NO: 70139 - DNA, 406 bp, Homo sapiens
taatgtattagtcatactgctcacaacagtagtccagataactctgttgacaatgatttttacctatataaaacagattgagatgataaaggtcctaggttcttaaattaagataatattgatgtgatctctttggaccctccctaacgggaaatgtgtacccttcccctataattgttgctttggtagacaaatttgtcttaaataataaagaaattaaaacaatgaatattatttataacctcagagaagtgagcaatgactatcttgaatttgatctgaaatcttttttttaaatgtcctgggtcttttagcctgtgtacactcattagaaggcatgctctttttttttttctttaataaacactgaaccctttccaagagtttgacaattatgcagagtttc

SEQ ID NO: 70140 - DNA, 342 bp, Homo sapiens
gaattcccccccccccccccccccccaaaacaagtgtgtgctgcaggcagagttagaacctggggtggctgatactcagaccccatctctatacataccattatactgtggtggatctggtgtgctatttttcagactgtggggtatagccactagtgggatatgaagtccaattattgatctttttcttttgcattggaaaaccaaggaaatggaagaggagagaaaaagcagaatgcattttaaatgtggcttctggaaacttttgtttgggagaaatgcaaagaagcagatgtgggtcagtgtcaaaaagtgtgaaagccgttgcatccaggctagggg

SEQ ID NO: 70141 - DNA, 184 bp, Homo sapiens
ctttcttcattaatgggagaaatgtaactaagcttcattcatccaggtagaattggaatgttgtccagtctttttattctctgcttccttttctctgctagaaatgtcttgtctcttaggaagttacactataatcatgttatgtgttgtcattttatcttatagttctcttaagactttattg

SEQ ID NO: 70142 - DNA, 500 bp, Homo sapiens
cgacagattgctgggagctgctatgcacaggcatggatgaggttgtttttcccctgctaaatgtaattacagaggaattcagaagtctcagatattactgagaaaaaaaaaacatgtttatttatttatatgtacttgtacctttcagaatacagtgtcctttttttacagtgtcagattttttagtcaggaaagccttgaaaagtcatcagcatttccctttcccacacatttgtagccatagtcaaaaactctctagtagattttccatgtgtgcaaagaaagatatttcttggatgttaggagagaatgcccccagttttttccaaactgattattcctgggtatttaaatatgtttcttatcagtgtttcgtaacgtataatgattgtgaaagcaaagagcatgatgatatttgggggaaagaatcgcctacaaatatctgaagtgtttatttaaccacagactgatactctaataaaataaagaagtaatgctat

SEQ ID NO: 70143 - DNA, 497 bp, Homo sapiens
atggggctatgcatagcctaagagttataggcttaaagatgtcgagtaactaaaaactgtattgctggccgggcgcggtggctcacgcctgtaatcccagcactttgggaggccaaggcgggcagaccatgaggtcaggagattgagaccatcctggccaacatggtgaaaccctgtctctactaaaaatacaaaaatgagctgggtgtggtggcacgtgcctgtagtcccagctactcgagaggctaaggcaggaaaatcgcttgaacccaggaggcagagactgcagtgagccaagattgcgccagtgcactccagctgggcgacagagcgagactccatctcaaaaaacaaacaaacaaacaaatctcaaatcaatcaatcaatctaatgattagtattataattcaggtatgctctagatctccaagaatttagaaaatacaaggcagatgtcaactgtgtgcctatatatttagatatcacttttaataata

SEQ ID NO: 70144 - DNA, 330 bp, Homo sapiens
cctgaattcagatggaatagaattgtttcctttgattttttcactttgagcactccctggcctactttcttcccttaacttttaatagtgctatgactttactcaagggaggatgtgttctttagaccaaccctatcatagctggaataaatctgtataactctcttcccctggatttaggtagctggatcaggtttcctagctgtagccagttccttgttcactaacttgcttgagctgatgagctgtgggtctttctagagagaagtaacccttgatatttatatctgtgaaaaaaatatcaataaatttgaaatgttaaatgatcta

SEQ ID NO: 70145 - DNA, 1032 bp, Homo sapiens
  misc_feature (1032)..(1032): n is a, c, g, or t
ggggtgggggtggggagggggcggtcaggcggcggggtgggctggtggagaggcaggagagctctgcccgggctgctcccacagcccaggcggctgcccgcaaacccgcgcgtgcgcagtaggcggcccacctgctggtacctgggccggctctgggatccccgggatgcccaggaaagaatggcagttctccgctgtgtggagtctctcaccgggcctaggcctagaaggcaggaatcccaggccggtcagcccggtggagggggcggggcggagacacgcccctccgtagccagccaggcgttccccgcgaaagagaggccaccgccctgccccgaaccacccgaccccgtcccaaccccgcgtcctaaagctcctccagcagagcccggtattcttcctcgctgaggggtgcttccagcgaggcggcctcttccgaggcctccagctcccccggggcctccgtttctaggagagggttagacacagataaactgtttcacgttagacctgtaagccaaggagatgtgtatagagctgaaactgaagaaatgcctaaaaatattccagatactatatgcaaaatgacggtgaatgtagaaaagattgtacgagaatggaaccagtacaagaaggtgaaaaaaataatttccaaaaatcaccaaaggcgcatgaaagttatcctacagtctaacacgttactgccagttgttgatgccgtgccagacctctcgggatgtataagacaacctggcctagaatgtgaagaaggcagtaagtgccacaaggccctagaaaaaaacgagcgagagcacggacgcacgcagtggggaatacaaagaaaaagctgcggcagatgcccaggaggaacacaagagggcacaagagaaccggagaaccaaggtagggagagaccagaagagggcagcaaggaagcatcggaggggaaatggcagaaccgtaagacaaggcgagaacaaaaaaacgaggaagaaaaagaggcgacaagaggctgcgcattgtgtgtcgggn

SEQ ID NO: 70146 - DNA, 3723 bp, Homo sapiens
cgatcactcttcagcatccgcagagtgattttcaaaacatttactaacgctttcaattatttaccccattaatggaatttgtcaacagactggagtccttgacaggattgtgaatgcatagaggatgcaaagaaatggacacactgaggtagctatgccagtggtctgcatgcgcaggcagtaaactgaagacatttgagcggtgaattacttggcatttggaaacaccaccgtctgtgtcgggaaagcagaataactctccagtatctcgtcattagcttgctggaagcaggagggctatgttcctgggactcgggcgcttttctcgccttgttctctggtttgcggctttcaggaaactgctgggacaccatggccttgcatctgccaagttcctgtggtgcttgtgccttctgtctgtcatgtcccttccgcagcaggtgtggacactcccctacaagataggggtggtgggcccttgggcttgtgattcgctgttttcaaaggccctgcctgaggttgctgcgcgattagccattgagcgaatcaaccgggacccatcttttgacctgagttattcttttgaatacgtgattctcaatgaagactgccagacttcgagggctctctccagtttcatttcccaccaccagatggcctcaggatttattggacctaccaaccctggctactgcgaggcagcctcgctcctgggaaacagctgggacaaaggaattttctcttgggcttgtgtgaattatgaattagacaataaaattagctacccgaccttttctcggacactcccttctcccatccgggtgcttgtaactgtcatgaaatatttccagtgggctcatgctggagtcatttcctcagatgaagacatttgggtgcatacagccaatcgagtcgcaagtgctcttcggagccacggcttacctgtaggggtcgtcctgaccacaggacaagacagccaaagcatgcggaaagccctccagaggattcaccaggcagacagaattcgcataatcatcatgtgtatgcattcagctttgattgggggagagactcagatgcatctcttggaatgtgctcatgatctgaaaatgactgatggaacctacgtctttgttccttatgatgccctgctctacagtttaccttataagcacaccccctaccaggtcctaaggaacaacccaaagctccgggaagcctatgatgcagtgttgaccattacagtggagtcccaagaaaagaccttctatcaagccttcacagaggcagcagcaagaggtgaaattcctgagaagctggagttcgatcaagtttcaccgttgtttggaaccatctacaattcaatttactttatcgcacaagccatgaataatgctatgaaagaaaatggacaggctggtgctgccagcctggttcagcattccagaaacatgcagttccatggattcaaccagttgatgaggacagattcaaatggaaatggaatttcagaatatgtaatcctggacaccaacttgaaagaatgggaactccatagcacctacactgtggacatggaaatggagctgctacgtttcggagggacccctattcacttccctggtggcaggccccctagagcagatgcaaaatgctggtttgcagaagggaagatctgccatggaggcatcgaccctgcctttgccatgatggtctgccttactttgcttatagccctgctgtctattaatggatttgcttactttataaggcgtcgtataaataaaatccagttgatcaaaggacccaatagaattctactgactttggaggatgtaacgtttatcaatccccactttggcagtaagagaggaagtcgtgccagtgtaagcttccagattacctcagaggtccaaagtgggaggtccccaagactctccttttcttcagggagtctaactccagctacctatgaaaactccaacatagcgatttatgagggtgattgggtgtggctgaaaaagttctcccttggagattttggagaccttaagtccatcaaatcaagagcaagtgatgtgttcgaaatgatgaaggacttgcgtcatgagaatattaaccctttattgggtttcttctatgattcggggatgtttgccattgtgacagaattctgttcccgagggagcctagaagacatactgacaaatcaagatgtgaaacttgactggatgtttaaatcatcactcttgctggatctcataaagggcatgaagtacttacaccacagagagtttgttcatgggaggctaaagtctcgaaactgtgtggtagatgggcgttttgtactaaaagtgacagattatggctttaacgacatcttagaaatgctgagactctctgaagaggaatcttctatggaagagctgctgtggacggcccctgaactgttgagagctccaagaggcagcaggttaggttcttttgcaggagatgtctatagctttgccatcatcatgcaagaagtgatggtccggggtaccccattctgcatgatggatctgccagctcaagaaatcataaacagacttaagaagcctcctcctgtgtacagaccagtagttcctcctgagcatgcccctccagaatgtctccagctgatgaagcagtgctgggctgaggctgcagaacaacgaccaacttttgatgaaatatttaaccagtttaaaacttttaataaagggaagaagaccaatattattgattctatgcttcggatgttggagcaatattctagcaacttggaagatttgattcgggagcggactgaagagctggaaattgaaaaacagaaaacggaaaagcttctaacacagatgctaccaccatcagttgctgaatctctcaaaaagggctgcacagttgaacctgagggctttgacttggtcaccttgtacttcagcgacattgtgggcttcacaaccatttcagccatgagtgagcccattgaggtcgtggatcttctgaatgacctgtacacactctttgatgcaataattggcagtcatgatgtctacaaggtagagaccattggagatgcctacatggtggcttcaggcctcccaaagaggaatggcagtaggcatgcagctgagattgcaaacatgtccttagatatcctgagctctgtgggcactttcaagatgcggcacatgccagaagtgccggtccgaattcgaattggccttcactcagggccggttgttgctggagtggtgggcctcaccatgcccagatactgcttgtttggagacactgtgaacacagcttctcggatggaatctacaggcttaccttatcgcattcatgtcagtctcagcactgttacaattcttcaaaatctgagtgagggctatgaagtggagcttcgaggaagaacagagctcaagggcaaaggcacagaggaaaccttctggctgattgggaaaaaaggcttcatgaagccccttcctgtgcccccaccagtggacaaagatgggcaagtgggccatggcctgcaaccagtggagattgcagccttccaaagaagaaaagcagaaaggcagttggtgagaaacaagccataaggggcaaagggctccaggatttgaatcttctcttggtgaggcaatgggaaagctcacttcagttcaagaaattgttctgcctgggcaagaaattacg

SEQ ID NO: 70147 - DNA, 1521 bp, Homo sapiens
ggcggggccggcgcctgcgcagaccgcctgttatggcggccgcctaagtcccacagagacgggagtcgggtgggatcccaggctgggccccgcggcggctggattctcttccctggccaagtctctgagatcttctcccagggcgatgcaaagctactcgctaccagcttggacctgtctgcagtatctcctctgggacctgccatgctgaggacccattctcacctctgagggactcctgtcctaggactaaggtggagcctgggccatggtacagctggctcctgcggcagccatggacgaggtcacctttaggagcgacactgtgctgtcagatgtccacctctataccccgaaccatagacatctcatggtacggctgaacagcgtggggcagccagttttcctgtcccaattcaagcttctatggagccaagactcttggacagattcaggagccaagggtggcagtcacagagatgttcacacaaaggagcctccttctgctgagacaggcagcacagggtcccctccaggaagtggccatggtaatgagggtttctccctccaggccgggactgacaccactggccaggaagtggctgaagctcagctggatgaggatggggatttggacgtggtgagaagaccacgagccgcctctgattccaacccagcagggcctctgagagacaaggtacatcccatgattctagcacaggaagaagacgacgtcctgggagaggaagcacaaggcagcccgcacgatatcatcagaataggtgtggcggggcgccctgctcctggcagactacatcctgttccgacaggacctcttccgaggatgtacagcgctggagctcggggccggcacggggctcgctagcatcatcgcagccaccatggcacggaccgtttattgtacagatgtcggtgcagatctcttgtccatgtgccagcgaaacattgccctcaacagccacctggctgccactggaggtggtatagttagggtcaaagaactggactggctgaaggacgacctctgcacagatcccaaggtccccttcagttggtcacaagaggaaatttctgacctgtacgatcacaccaccatcctgtttgcagccgaagtgttttacgacgacgacttgactgatgctgtgtttaaaacgctctcccgactcgcccacagattgaaaaatgcctgcacagccatactgtcggtggagaagaggctcaacttcacactgagacacttggacgtcacatgtgaagcctacgatcacttccgctcctgcctgcacgcgctggagcagctcacagatggcaagctgcgcttcgtggtggagcccgtggaggcctccttcccacagctcctggtttacgagcgcctccagcagctggagctctggaagatcatcgcagaaccagtaacatgacccatcgcctccaccaggcgcggcgtctcgactgttcttagagtgtatttctagtaaaatcagaagctcaccaaagcaa

SEQ ID NO: 70148 - DNA, 2022 bp, Homo sapiens
  misc_feature (598)..(598): n is a, c, g, or t
  misc_feature (899)..(899): n is a, c, g, or t
  misc_feature (920)..(920): n is a, c, g, or t
  misc_feature (968)..(968): n is a, c, g, or t
  misc_feature (1001)..(1001): n is a, c, g, or t
  misc_feature (1168)..(1168): n is a, c, g, or t
  misc_feature (1225)..(1225): n is a, c, g, or t
  misc_feature (1524)..(1524): n is a, c, g, or t
  misc_feature (1682)..(1682): n is a, c, g, or t
  misc_feature (1922)..(1922): n is a, c, g, or t
  misc_feature (1996)..(1996): n is a, c, g, or t
gagaatacttatactacttttcaacgtttttaaaaaggatgtaaatttaaacttatttttttgttaacttctaatgtagatttctaagtatgagaaaataatgaagttaagtatgtttctcagtataagaaaatacttttgaatgaattgtgattattagtagtatataaattaatatattatgattgtaactttgcaattattggtcatgaaaaaagtagtgcactgcatgtgggtgcaattaaattgcgtgaaaacctaattgtgaccctccctagccttgggctgtagggcagagatacccagttacatgaaggagtgtgagccccattccaaaaagctcccatcctctgagtggtgctcaaaagtcgcctcctaaccagtagcacagcctgtgtttctgctgctgtctagaatgcctcattccaacctctgacgcccatctgaccgtgctggcggttgccacactgtcctgtcttgtggttttctgtccatccccatttcacagtgggcatttctcttggtttctgtcccatccagagcacaccatggccacgcccctggaggatgttggcaagcaggtgggtaggtcttgtcngcttcctgtggccctgatgggtccctgcagagcctcacgctgcttgtcgctccttgtcctcttccctccaggtgtggcggggcgccctgctcctggcagactacatcctgttccgacaggacctcttccgaggatgtacagcgctggagctcggggccggcacggggctcgctagcatcatcgcagccaccatggcacggaccgtttattgtacaggtaatgaggtgacatctcaggctgcagggaagtagtcaccttcacaaagcatgcactgactgtataaaaaaagaggcagaggcantggaaattggatgttagctgntgttgattttgccatcctggtcccctggccctctccactctccatttnttctcagtgacatcaaaatgacccagcaatacncactcagcagcagcagcgtcacccagtggctataaggccattgagcttcaggaggtgcctagcgcccctgctggtacctctctccccactcctgagaaagagcaaatatctccaaaaacaggaggaatatacccttttagaagcctttgaaagcaagtttattattnttttcctgggtatagaagccttgcccattctttgtaggaggtttttaaaacagtacntaaaaattactcataattttacaatccctagattgaatcaacaatatgcaacttatgggtcacctcccgtgtgccactcatttctagatgtaggaggccctgcggtgaatggagctgactaggcactgccctcagggcgcttacgttgtaagaatctcctccaaatgatagctgaaatcaagctgcagcagcactgtattctgctgaaaatgttgaaaaacatttttaagagcattttcttttttaaatatgtatatatttagggggtacaagtgcgggtttctgatgtgcagctatantgcagtgatgacatccgtctgggcttttagtggaccttccactcaaatagtgaacattgtacccaatagggaagctttaatcccccacccctcccaccgtgtcaccttctggaatccccagtgtctgtgtttccactcagtatgtccatgtttacccnttgtttagctcccactcataagtgagaacattttaagagcattttctcatgccattaaaaaattattatataggccaggtgcggtggctgacatctgtaatcccagccctttgggaggctgaggcaggcagatcacctgaggtcaggagtttgagaacagccaggccaacatggtgaaaccctgtctgtactaaaaatacaagaattaaccagatgtggtagcggcgggcacctgtaatnccagctacttgggaggcttgaacctgggaggcagaggttgcagtgagctgagattgcaccactgcactccagtntgggccacagagtgagactctgtctc

SEQ ID NO: 70149 - DNA, 695 bp, Homo sapiens
ctgtctcttacttttccacagggatgtcggtgcagatctcttgtccatgtgccagcgaaacattgccctcaacagccacctggctgccactggaggtggtatagttagggtcaaagaactggactggctgaaggacgacctctgcacagatcccaaggtccccttcagttggtcacaagaggaaatttctgacctgtacgatcacaccaccatcctgtttgcagccgaagtgttttacgacgacgacttgactgatgctgtgtttaaaacgctctcccgactcgcccacagattgaaaaatgcctgcacagccatactgtcggtggagaagaggtgagctttgcgccacgggaaccgtgctgacgtcccgagtgtcagcggaactctcacctcctaattgtgtccttgttagtgtcattatgattgttactcagtgccacttattgagcacctactatgtgccaggtctgtgctcatcctttgtgtacgttactgcactgaatctgcatcctagccctgtgtgcaggcgctgctgtcccacttgactgatgaagagaggaaggctggaaagcatcaggggccttggccagggcacggctagttagtgatagacaaggacttgaatgcagactgtactggaacctcaactcttggccagcacacactgtcgagagcttctcttcctgaatgttctc

SEQ ID NO: 70150 - DNA, 1382 bp, Homo sapiens
gacaggcgctcagtaaaagcccgtccaggggatatgagatcagtgagggataggaaagcaaggtgggtagaaacagcaaaacccttcccattgatgatggcagtttgtgcgtccggctggctggtttgcaggctcaacttcacactgagacacttggacgtcacatgtgaagcctacgatcacttccgctcctgcctgcacgcgctggagcagctcacagatggcaagctgcgcttcgtggtggagcccgtggaggcctccttcccacagctcctggtttacgagcgcctccagcagctggtaggtccaggccccgaagcagggccgttggttgctttactgtgaagcgggtgactccagggcaaagaggtgatgaagcaagccctccaagcacaggctccaccctagtcctgcagggggtgaagcctgcgtgcctggcaccatctgtagtggaacctgttgggggagctacatcctgttcttagcagccaccatgtctggagacgggcctacaggcgaaccttgtcttttactttatagcacatattccccccgttggacagttcagactccagaggaggcaagaccgaggcagaggttgtttggggaacaggaagtcagtggagggaagtttgtgggttgcagatcttggtgcaggcgccccgctgtggtggccgctgctcacatcttcactgtggaaggataccagcccctctcggactgaactggcttttctattaactggagtccaaagattgagaattaacttcttttgttctgtttgccttttggctgtggcctccctttctctatgtctgtggagacccgggcctagttctaaggaaaaagggaggaagagggagtcacgaggagctgccgcccttgcactctgtctcgcgtcctgagggagggcagcatggaattcgtgtggttttgtgtgcgaggaggatcttgtatttattgctctgccacttctgggcagcattaagaatagcgtcacatgaccaagaacacacatttcttacaagtcagcagccccaatacatgatgcctaagacgtcccaaaaaggccaggtacggtggctcccacctgtaatcccagcactctgggaggccatggtcggagggttgcttgaagctaggagttcgagaccagcctgggcatcacagaccctatctcgacaaaaatcaagaaaaaaaattagccatgcatggtggtgcacacctgtggtcccagctactctggaagctgaggtgggaggattgcttgagcccagaagttcaaggctgcagcaagctgtgatggtgccactgcactccagactgggcaacagaatgagatcctgtctctaaaataaaattgtttataaagatctccccca

SEQ ID NO: 70151 - DNA, 982 bp, Homo sapiens
ggcggggccggcgcctgcgcagaccgcctgttatggcggccgcctaagtcccacagagacgggagtcgggtgggatcccaggctgggccccgcggcgggtaagtgcctgggagaggcggcgggatagggtagggtgcagggaacctcctggcgccgagcctgactttgaaatccgagctcccacagatcggaggcccagatccctaaggcccgaccccactcttagcgtcagtttccccttctcaacacgggtgttggggaaagaagtccacgtcctcacctgggtttccatcctgggtccaggcacctctccttcggttctagattaggaagggagggcagtgcccgacctgtgactgttttttgagagggcaatagttaacccacaagggtggcgtcaggaaggcgacaagacaaagagaacgagtagccccacgggggacgtccccggagcccctcactaccactctacgcaccgtggccaggccacgtctttcctgctcccatcctgggccttcacaccctgccctccccagctcctggcctaaatcgtcatgggatcgcgccaaattcttgattgttgagtgagttgcagttatcagaaagaaagatgaggagggaagttatttcaacaccgtgatcccagcacactgcttatttgggacaactgactggggacctataggagaagaaagctggtagcgtctcagtctagcccccacagccttagaagagccaagaacacgttagctcctgctgcagggatgagcctgcagccctatggagaggtggtggggcaggtccccatctgcaacctgggtctcctttctcagctctgcccagtaaagagaggagcccgaagcccatacagaccctgcatttccggaaagagacttttcctgactagagaaactgttaccttttttctttcttcccagcattcactttaatcattattatattgctataatgatagtattta

SEQ ID NO: 70152 - DNA, 139 bp, Homo sapiens
gcggccgcctactactactactgctcgaattcaagcttctaacgatgtacggggacatgacccatcgcctccaccaggcgcggcgtctcgactgttcttagagtgtatttctagtaaaatcagaagctcaccaaagcaa

SEQ ID NO: 70153 - DNA, 1777 bp, Homo sapiens
ggcggggccggcgcctgcgcagaccgcctgttatggcggccgcctaagtcccacagagacgggagtcgggtgggatcccaggctgggccccgcggcggctggattctcttccctggccaagtctctgagatcttctcccagggcgatgcaaagctactcgctaccagcttggacctgtctgcagtatctcctctgggacctgccatgctgaggacccattctcacctctgagggactcctgtcctaggactaaggtggagcctgggccatggtacagctggctcctgcggcagccatggacgaggtcacctttaggagcgacactgtgctgtcagatgtccacctctataccccgaaccatagacatctcatggtacggctgaacagcgtggggcagccagttttcctgtcccaattcaagcttctatggagccaagactcttggacagattcaggagccaagggtggcagtcacagagatgttcacacaaaggagcctccttctgctgagacaggcagcacagggtcccctccaggaagtggccatggtaatgagggtttctccctccaggccgggactgacaccactggccaggaagtggctgaagctcagctggatgaggatggggatttggacgtggtgagaagaccacgagccgcctctgattccaacccagcagggcctctgagagacaaggtacatcccatgattctagcacaggaagaagacgacgtcctgggagaggaagcacaaggcagcccgcacgatatcatcagaataggtgtggcggggcgccctgctcctggcagactacatcctgttccgacaggacctcttccgaggatgtacagcgctggagctcggggccggcacggggctcgctagcatcatcgcagccaccatggcacggaccgtttattgtacagatgtcggtgcagatctcttgtccatgtgccagcgaaacattgccctcaacagccacctggctgccactggaggtggtatagttagggtcaaagaactggactggctgaaggacgacctctgcacagatcccaaggtccccttcagttggtcacaagaggaaatttctgacctgtacgatcacaccaccatcctgtttgcagccgaagtgttttacgacgacgacttgactgatgctgtgtttaaaacgctctcccgactcgcccacagattgaaaaatgcctgcacagccatactgtcggtggagaagaggctcaacttcacactgagacacttggacgtcacatgtgaagcctacgatcacttccgctcctgcctgcacgcgctggagcagctcacagatggcaagctgcgcttcgtggtggagcccgtggaggcctccttcccacagctcctggtttacgagcgcctccagcagctggagctctggaagatcatcgcagaaccagtaacatgacccatcgcctccaccaggcgcggcgtctcgactgttcttagagtgtatttctagtaaaatcagaagctcaccaaagcaaaaaaaaaaaaaaaaaaaaaaaaaaattgtggcgggcgcgccgggacccgggaaaaagtttctcaacaccttctcgttggggggcgggggcgcccaagagggttagtgaacacggccaagaggtctcccaaggagaaccccggcccggaccacgtggtggcttccccaccaataaaaaacgcggggacacgggggttctgacaatccggagggtcggaggcatcggactcacacggggccagaacggaaaaaagcga

SEQ ID NO: 70154 - DNA, 1394 bp, Homo sapiens
ggcggggccggcgcctgcgcagaccgcctgttatggcggccgcctaagtcccacagagacgggagtcgggtgggatcccaggctgggccccgcggcggctggattctcttccctggccaagtctctgagatcttctcccagggcgatgcaaagctactcgctaccagcttggacctgtctgcagtatctcctctgggacctgccatgctgaggacccattctcacctctgagggactcctgtcctaggactaaggtggagcctgggccatggtacagctggctcctgcggcagccatggacgaggtcacctttaggagcgacactgtgctgtcagatgtccacctctataccccgaaccatagacatctcatggtacggctgaacagcgtggggcagccagttttcctgtcccaattcaagcttctatggagccaagactcttggacagattcaggagccaagggtggcagtcacagagatgttcacacaaaggagcctccttctgctgagacaggcagcacagggtcccctccaggaagtggccatgcacaggaagaagacgacgtcctgggagaggaagcacaaggcagcccgcacgatatcatcagaatagagcacaccatggccacgcccctggaggatgttggcaagcaggtgtggcggggcgccctgctcctggcagactacatcctgttccgacaggacctcttccgaggatgtacagcgctggagctcggggccggcacggggctcgctagcatcatcgcagccaccatggcacggaccgtttattgtacagatgtcggtgcagatctcttgtccatgtgccagcgaaacattgccctcaacagccacctggctgccactggaggtggtatagttagggtcaaagaactggactggctgaaggacgacctctgcacagatcccaaggtccccttcagttggtcacaagaggaaatttctgacctgtacgatcacaccaccatcctgtttgcagccgaagtgttttacgacgacgacttgactgatgctgtgtttaaaacgctctcccgactcgcccacagattgaaaaatgcctgcacagccatactgtcggtggagaagaggctcaacttcacactgagacacttggacgtcacatgtgaagcctacgatcacttccgctcctgcctgcacgcgctggagcagctcacagatggcaagctgcgcttcgtggtggagcccgtggaggcctccttcccacagctcctggtttacgagcgcctccagcagctggagctctggaagatcatcgcagaaccagtaacatgacccatcgcctccaccaggcgcggcgtctcgactgttcttagagtgtatttctagtaaaatcagaagctcaccaaagcaa

SEQ ID NO: 70155 - DNA, 1599 bp, Homo sapiens
ggcggggccggcgcctgcgcagaccgcctgttatggcggccgcctaagtcccacagagacgggagtcgggtgggatcccaggctgggccccgcggcggctggattctcttccctggccaagtctctgagatcttctcccagggcgatgcaaagctactcgctaccagcttggacctgtctgcagtatctcctctgggacctgccatgctgaggacccattctcacctctgagggactcctgtcctaggactaaggtggagcctgggccatggtacagctggctcctgcggcagccatggacgaggtcacctttaggagcgacactgtgctgtcagatgtccacctctataccccgaaccatagacatctcatggtacggctgaacagcgtggggcagccagttttcctgtcccaattcaagcttctatggagccaagactcttggacagattcaggagccaagggtggcagtcacagagatgttcacacaaaggagcctccttctgctgagacaggcagcacagggtcccctccaggaagtggccatggtaatgagggtttctccctccaggccgggactgacaccactggccaggaagtggctgaagctcagctggatgaggatggggatttggacgtggtgagaagaccacgagccgcctctgattccaacccagcagggcctctgagagacaaggtacatcccatgattctagcacaggaagaagacgacgtcctgggagaggaagcacaaggcagcccgcacgatatcatcagaataggtgtggcggggcgccctgctcctggcagactacatcctgttccgacaggacctcttccgaggatgtacagcgctggagctcggggccggcacggggctcgctagcatcatcgcagccaccatggcacggaccgtttattgtacagatgtcggtgcagatctcttgtccatgtgccagcgaaacattgccctcaacagccacctggctgccactggaggtggtatagttagggtcaaagaactggactggctgaaggacgacctctgcacagatcccaaggtccccttcagttggtcacaagaggaaatttctgacctgtacgatcacaccaccatcctgtttgcagccgaagtgttttacgacgacgacttgactgatgctgtgtttaaaacgctctcccgactcgcccacagattgaaaaatgcctgcacagccatactgtcggtggagaagaggtgagctttgcgccacgggaaccgtgctgacgtcccgagtgtcagcggaactctcacctcctaattgtgtccttgttagtgtcattatgattgttactcagtgccacttattgagcacctactatgtgccaggtctgtgctcatcctttgtgtacgttactgcactgaatctgcatcctagccctgtgtgcaggcgctgctgtcccacttgactgatgaagagaggaaggctggaaagcatcaggggccttggccagggcacggctagttagtgatagacaaggacttgaatgcagactgtactggaacctcaactcttggccagcacacactgtcgagagcttctcttcctgaatgttctc

SEQ ID NO: 70156 - DNA, 1761 bp, Homo sapiens
ggcggggccggcgcctgcgcagaccgcctgttatggcggccgcctaagtcccacagagacgggagtcgggtgggatcccaggctgggccccgcggcggctggattctcttccctggccaagtctctgagatcttctcccagggcgatgcaaagctactcgctaccagcttggacctgtctgcagtatctcctctgggacctgccatgctgaggacccattctcacctctgagggactcctgtcctaggactaaggtggagcctgggccatggtacagctggctcctgcggcagccatggacgaggtcacctttaggagcgacactgtgctgtcagatgtccacctctataccccgaaccatagacatctcatggtacggctgaacagcgtggggcagccagttttcctgtcccaattcaagcttctatggagccaagactcttggacagattcaggagccaagggtggcagtcacagagatgttcacacaaaggagcctccttctgctgagacaggcagcacagggtcccctccaggaagtggccatggtaatgagggtttctccctccaggccgggactgacaccactggccaggaagtggctgaagctcagctggatgaggatggggatttggacgtggtgagaagaccacgagccgcctctgattccaacccagcagggcctctgagagacaaggtacatcccatgattctagcacaggaagaagacgacgtcctgggagaggaagcacaaggcagcccgcacgatatcatcagaataggtgtggcggggcgccctgctcctggcagactacatcctgttccgacaggacctcttccgaggatgtacagcgctggagctcggggccggcacggggctcgctagcatcatcgcagccaccatggcacggaccgtttattgtacagatgtcggtgcagatctcttgtccatgtgccagcgaaacattgccctcaacagccacctggctgccactggaggtggtatagttagggtcaaagaactggactggctgaaggacgacctctgcacagatcccaaggtccccttcagttggtcacaagaggaaatttctgacctgtacgatcacaccaccatcctgtttgcagccgaagtgttttacgacgacgacttgactgatgctgtgtttaaaacgctctcccgactcgcccacagattgaaaaatgcctgcacagccatactgtcggtggagaagaggctcaacttcacactgagacacttggacgtcacatgtgaagcctacgatcacttccgctcctgcctgcacgcgctggagcagctcacagatggcaagctgcgcttcgtggtggagcccgtggaggcctccttcccacagctcctggtttacgagcgcctccagcagctgcctctctgccacagtaaaacagaacagcccagagcaacaaagaaaggaggaagccgctcgtccgctcctgccccagctcgcctgctccgtggctgacgtgttgtctaactactctccttgcctgctccgtggctgacgtgttgtctaactactctccttggtgaatcactttccttaatgaaattgtgatgctcttgtatgtgcacttcagaaacctgttcttttctctatttgctgcaggagctctggaagatcatcgcagaaccagtaacatgacccatcgcctccaccaggcgcggcgtctcgactgttcttagagtgtatttctagtaaaatcagaagctcaccaaagcaa

SEQ ID NO: 70157 - DNA, 1721 bp, Homo sapiens
ggcggggccggcgcctgcgcagaccgcctgttatggcggccgcctaagtcccacagagacgggagtcgggtgggatcccaggctgggccccgcggcggctggattctcttccctggccaagtctctgagatcttctcccagggcgatgcaaagctactcgctaccagcttggacctgtctgcagtatctcctctgggacctgccatgctgaggacccattctcacctctgagggactcctgtcctaggactaaggtggagcctgggccatggtacagctggctcctgcggcagccatggacgaggtcacctttaggagcgacactgtgctgtcagatgtccacctctataccccgaaccatagacatctcatggtacggctgaacagcgtggggcagccagttttcctgtcccaattcaagcttctatggagccaagactcttggacagattcaggagccaagggtggcagtcacagagatgttcacacaaaggagcctccttctgctgagacaggcagcacagggtcccctccaggaagtggccatggtaatgagggtttctccctccaggccgggactgacaccactggccaggaagtggctgaagctcagctggatgaggatggggatttggacgtggtgagaagaccacgagccgcctctgattccaacccagcagggcctctgagagacaaggtacatcccatgattctagcacaggaagaagacgacgtcctgggagaggaagcacaaggcagcccgcacgatatcatcagaataggtgtggcggggcgccctgctcctggcagactacatcctgttccgacaggacctcttccgaggatgtacagcgctggagctcggggccggcacggggctcgctagcatcatcgcagccaccatggcacggaccgtttattgtacagatgtcggtgcagatctcttgtccatgtgccagcgaaacattgccctcaacagccacctggctgccactggaggtggtatagttagggtcaaagaactggactggctgaaggacgacctctgcacagatcccaaggtccccttcagttggtcacaagaggaaatttctgacctgtacgatcacaccaccatcctgtttgcagccgaagtgttttacgacgacgacttgactgatgctgtgtttaaaacgctctcccgactcgcccacagattgaaaaatgcctgcacagccatactgtcggtggagaagaggctcaacttcacactgagacacttggacgtcacatgtgaagcctacgatcacttccgctcctgcctgcacgcgctggagcagctcacagatggcaagctgcgcttcgtggtggagcccgtggaggcctccttcccacagctcctggtttacgagcgcctccagcagctgcctctctgccacagtaaaacagaacagcccagagcaacaaagaaaggaggaagccgctcgtccgctcctgccccagctcgcctgctccgtggctgacgtgttgtctaactactctccttgcctgctccgtggctgacgtgttgtctaactactctccttgcctgctccgtggctgacgtgttgtctaactactctccttggagctctggaagatcatcgcagaaccagtaacatgacccatcgcctccaccaggcgcggcgtctcgactgttcttagagtgtatttctagtaaaatcagaagctcaccaaagcaa

SEQ ID NO: 70158 - DNA, 1408 bp, Homo sapiens
  misc_feature (598)..(598): n is a, c, g, or t
gagaatacttatactacttttcaacgtttttaaaaaggatgtaaatttaaacttatttttttgttaacttctaatgtagatttctaagtatgagaaaataatgaagttaagtatgtttctcagtataagaaaatacttttgaatgaattgtgattattagtagtatataaattaatatattatgattgtaactttgcaattattggtcatgaaaaaagtagtgcactgcatgtgggtgcaattaaattgcgtgaaaacctaattgtgaccctccctagccttgggctgtagggcagagatacccagttacatgaaggagtgtgagccccattccaaaaagctcccatcctctgagtggtgctcaaaagtcgcctcctaaccagtagcacagcctgtgtttctgctgctgtctagaatgcctcattccaacctctgacgcccatctgaccgtgctggcggttgccacactgtcctgtcttgtggttttctgtccatccccatttcacagtgggcatttctcttggtttctgtcccatccagagcacaccatggccacgcccctggaggatgttggcaagcaggtgggtaggtcttgtcngcttcctgtggccctgatgggtccctgcagagcctcacgctgcttgtcgctccttgtcctcttccctccaggtgtggcggggcgccctgctcctggcagactacatcctgttccgacaggacctcttccgaggatgtacagcgctggagctcggggccggcacggggctcgctagcatcatcgcagccaccatggcacggaccgtttattgtacagatgtcggtgcagatctcttgtccatgtgccagcgaaacattgccctcaacagccacctggctgccactggaggtggtatagttagggtcaaagaactggactggctgaaggacgacctctgcacagatcccaaggtccccttcagttggtcacaagaggaaatttctgacctgtacgatcacaccaccatcctgtttgcagccgaagtgttttacgacgacgacttgactgatgctgtgtttaaaacgctctcccgactcgcccacagattgaaaaatgcctgcacagccatactgtcggtggagaagaggctcaacttcacactgagacacttggacgtcacatgtgaagcctacgatcacttccgctcctgcctgcacgcgctggagcagctcacagatggcaagctgcgcttcgtggtggagcccgtggaggcctccttcccacagctcctggtttacgagcgcctccagcagctggagctctggaagatcatcgcagaaccagtaacatgacccatcgcctccaccaggcgcggcgtctcgactgttcttagagtgtatttctagtaaaatcagaagctcaccaaagcaa

SEQ ID NO: 70159 - DNA, 1135 bp, Homo sapiens
ggcggggccggcgcctgcgcagaccgcctgttatggcggccgcctaagtcccacagagacgggagtcgggtgggatcccaggctgggccccgcggcggctggattctcttccctggccaagtctctgagatcttctcccagggcgatgcaaagctactcgctaccagcttggacctgtctgcagtatctcctctgggacctgccatgctgaggacccattctcacctctgagggactcctgtcctaggactaaggtggagcctgggccatggtacagctggctcctgcggcagccatggacgaggtcacctttaggagcgacactgtgctgtcagatgtccacctctataccccgaaccatagacatctcatggtacggctgaacagcgtggggcagccagttttcctgtcccaattcaagcttctatggagccaagactcttggacagattcaggagccaagggtggcagtcacagagatgttcacacaaaggagcctccttctgctgagacaggcagcacagggtcccctccaggaagtggccatggtaatgagggtttctccctccaggccgggactgacaccactggccaggaagtggctgaagctcagctggatgaggatggggatttggacgtggtgagaagaccacgagccgcctctgattccaacccagcagggcctctgagagacaaggtacatcccatgattctagcacaggaagaagacgacgtcctgggagaggaagcacaaggcagcccgcacgatatcatcagaataggtggtatagttagggtcaaagaactggactggctgaaggacgacctctgcacagatcccaaggtccccttcagttggtcacaagaggaaatttctgacctgtacgatcacaccaccatcctgtttgcagccgaagtgttttacgacgacgacttgactgatgctgtgtttaaaacgctctcccgactcgcccacagattgaaaaatgcctgcacagccatactgtcggtggagaagaggagctctggaagatcatcgcagaaccagtaacatgacccatcgcctccaccaggcgcggcgtctcgactgttcttagagtgtatttctagtaaaatcagaagctcaccaaagcaa

SEQ ID NO: 70160 - DNA, 937 bp, Homo sapiens
ggcggggccggcgcctgcgcagaccgcctgttatggcggccgcctaagtcccacagagacgggagtcgggtgggatcccaggctgggccccgcggcggctggattctcttccctggccaagtctctgagatcttctcccagggcgatgcaaagctactcgctaccagcttggacctgtctgcagtatctcctctgggacctgccatgctgaggacccattctcacctctgagggactcctgtcctaggactaaggtggagcctgggccatggtacagctggctcctgcggcagccatggacgaggtcacctttaggagcgacactgtgctgtcagatgtccacctctataccccgaaccatagacatctcatggtacggctgaacagcgtggggcagccagttttcctgtcccaattcaagcttctatggagccaagactcttggacagattcaggagccaagggtggcagtcacagagatgttcacacaaaggagcctccttctgctgagacaggcagcacagggtcccctccaggaagtggccatggtaatgagggtttctccctccaggccgggactgacaccactggccaggaagtggctgaagctcagctggatgaggatggggatttggacgtggtgagaagaccacgagccgcctctgattccaacccagcagggcctctgagagacaaggtacatcccatgattctagcacaggaagaagacgacgtcctgggagaggaagcacaaggcagcccgcacgatatcatcagaataggtaaatagaggtgtgatgtggcccacctgtcaccaaggcaactccgcagtgtcactgctcagggctcagtatgatctgagcgtggactctgcaggcccaggcagcacaggttatgagaaccagctcgggtgagactggggaagctctccacaacc

SEQ ID NO: 70161 - DNA, 717 bp, Homo sapiens
ctgaaatccgcccgctgctcactggctagagcagacactcagcagaaaaggcacctcttccaccatgactctgcacccgggcagcagtgggcctgaagcagggagtctggtctgcctggtggtgcccactgcaccgagctacccccagccctgtttcttctcttgaagtgccttttggtcagtcccagtgagagttggtggccaggagagaaggcaatgggcacaaagtgtgcttttgttctttcttagatcccaaggtccccttcagttggtcacaagaggaaatttctgacctgtacgatcacaccaccatcctgtttgcagccgaagtgttttacgacgacgacttgactgatgctgtgtttaaaacgctctcccgactcgcccacagattgaaaaatgcctgcacagccatactgtcggtggagaagaggctcaacttcacactgagacacttggacgtcacatgtgaagcctacgatcacttccgctcctgcctgcacgcgctggagcagctcacagatggcaagctgcgcttcgtggtggagcccgtggaggcctccttcccacagctcctggtttacgagcgcctccagcagctggagctctggaagatcatcgcagaaccagtaacatgacccatcgcctccaccaggcgcggcgtctcgactgttcttagagtgtatttctagtaaaatcagaagctcaccaaagcaa

SEQ ID NO: 70162 - DNA, 878 bp, Homo sapiens
ctgggtgcttgctctttctttgtataaagatgtctttttttttttccctgtcagatggcagatgggaaaagtcgttccttgagtactggtcacctgcctagcactttgcgcaccataggcccttcggccctcccaatagtcctgtgaggaagtagtactgtgccctttctatcccaaggtccccttcagttggtcacaagaggaaatttctgacctgtacgatcacaccaccatcctgtttgcagccgaagtgttttacgacgacgacttgactgatgctgtgtttaaaacgctctcccgactcgcccacagattgaaaaatgcctgcacagccatactgtcggtggagaagaggctcaacttcacactgagacacttggacgtcacatgtgaagcctacgatcacttccgctcctgcctgcacgcgctggagcagctcacagatggcaagctgcgcttcgtggtggagcccgtggaggcctccttcccacagctcctggtttacgagcgcctccagcagctgcctctctgccacagtaaaacagaacagcccagagcaacaaagaaaggaggaagccgctcgtccgctcctgccccagctcgcctgctccgtggctgacgtgttgtctaactactctccttgcctgctccgtggctgacgtgttgtctaactactctccttggtgaatcactttccttaatgaaattgtgatgctcttgtatgtgcacttcagaaacctgttcttttctctatttgctgcaggagctctggaagatcatcgcagaaccagtaacatgacccatcgcctccaccaggcgcggcgtctcgactgttcttagagtgtatttctagtaaaatcagaagctcaccaaagcaa

SEQ ID NO: 70163 - DNA, 1062 bp, Homo sapiens
  misc_feature (1062)..(1062): n is a, c, g, or t
ggcggggccggcgcctgcgcagaccgcctgttatggcggccgcctaagtcccacagagacgggagtcgggtgggatcccaggctgggccccgcggcggctggattctcttccctggccaagtctctgagatcttctcccagggcgatgcaaagctactcgctaccagcttggacctgtctgcagtatctcctctgggacctgccatgctgaggacccattctcacctctgagggactcctgtcctaggactaaggtggagcctgggccatggtacagctggctcctgcggcagccatggacgaggtcacctttaggagcgacactgtgctgtcagatgtccacctctataccccgaaccatagacatctcatggtacggctgaacagcgtggggcagccagttttcctgtcccaattcaagcttctatggagccaagactcttggacagattcaggagccaagggtggcagtcacagagatgttcacacaaaggagcctccttctgctgagacaggcagcacagggtcccctccaggaagtggccatggtaatgagggtttctccctccaggccgggactgacaccactggccaggaagtggctgaagctcagctggatgaggatggggatttggacgtggtgagaagaccacgagccgcctctgattccaacccagcagggcctctgagagacaaggtacatcccatgattctagcacaggaagaagacgacgtcctgggagaggaagcacaaggcagcccgcacgatatcatcagaatagagcacaccatggccccgccctggaggatgttggcagcaggtgtggcgggcgcctgtcctgggactactcctgtccgacagactctcgaggtgtcagcgctggactcggggccgcggtcgtgctatcgcgcccagggcggccgttgtccagtcgggcgttctggccgtgccggaattgcccacccggtgcgggggtttgcgccccgggggggccgcccccccgggggtgcccgggcggcgtggccccccaggggggaccgcttctgttgtgacgtcctggn

SEQ ID NO: 70164 - DNA, 415 bp, Homo sapiens
gacaggcgctcagtaaaagcccgtccaggggatatgagatcagtgagggataggaaagcaaggtgggtagaaacagcaaaacccttcccattgatgatggcagtttgtgcgtccggctggctggtttgcaggctcaacttcacactgagacacttggacgtcacatgtgaagcctacgatcacttccgctcctgcctgcacgcgctggagcagctcacagatggcaagctgcgcttcgtggtggagcccgtggaggcctccttcccacagctcctggtttacgagcgcctccagcagctggagctctggaagatcatcgcagaaccagtaacatgacccatcgcctccaccaggcgcggcgtctcgactgttcttagagtgtatttctagtaaaatcagaagctcaccaaagcaa

SEQ ID NO: 70165 - DNA, 1650 bp, Homo sapiens
  misc_feature (840)..(840): n is a, c, g, or t
ggcggggccggcgcctgcgcagaccgcctgttatggcggccgcctaagtcccacagagacgggagtcgggtgggatcccaggctgggccccgcggcggctggattctcttccctggccaagtctctgagatcttctcccagggcgatgcaaagctactcgctaccagcttggacctgtctgcagtatctcctctgggacctgccatgctgaggacccattctcacctctgagggactcctgtcctaggactaaggtggagcctgggccatggtacagctggctcctgcggcagccatggacgaggtcacctttaggagcgacactgtgctgtcagatgtccacctctataccccgaaccatagacatctcatggtacggctgaacagcgtggggcagccagttttcctgtcccaattcaagcttctatggagccaagactcttggacagattcaggagccaagggtggcagtcacagagatgttcacacaaaggagcctccttctgctgagacaggcagcacagggtcccctccaggaagtggccatggtaatgagggtttctccctccaggccgggactgacaccactggccaggaagtggctgaagctcagctggatgaggatggggatttggacgtggtgagaagaccacgagccgcctctgattccaacccagcagggcctctgagagacaaggtacatcccatgattctagcacaggaagaagacgacgtcctgggagaggaagcacaaggcagcccgcacgatatcatcagaatagagcacaccatggccacgcccctggaggatgttggcaagcaggtgggtaggtcttgtcngcttcctgtggccctgatgggtccctgcagagcctcacgctgcttgtcgctccttgtcctcttccctccaggtgtggcggggcgccctgctcctggcagactacatcctgttccgacaggacctcttccgaggatgtacagcgctggagctcggggccggcacggggctcgctagcatcatcgcagccaccatggcacggaccgtttattgtacagatgtcggtgcagatctcttgtccatgtgccagcgaaacattgccctcaacagccacctggctgccactggaggtggtatagttagggtcaaagaactggactggctgaaggacgacctctgcacagatcccaaggtccccttcagttggtcacaagaggaaatttctgacctgtacgatcacaccaccatcctgtttgcagccgaagtgttttacgacgacgacttgactgatgctgtgtttaaaacgctctcccgactcgcccacagattgaaaaatgcctgcacagccatactgtcggtggagaagaggctcaacttcacactgagacacttggacgtcacatgtgaagcctacgatcacttccgctcctgcctgcacgcgctggagcagctcacagatggcaagctgcgcttcgtggtggagcccgtggaggcctccttcccacagctcctggtttacgagcgcctccagcagctggagctctggaagatcatcgcagaaccagtaacatgacccatcgcctccaccaggcgcggcgtctcgactgttcttagagtgtatttctagtaaaatcagaagctcaccaaagcaa

SEQ ID NO: 70166 - DNA, 1660 bp, Homo sapiens
ggcggggccggcgcctgcgcagaccgcctgttatggcggccgcctaagtcccacagagacgggagtcgggtgggatcccaggctgggccccgcggcggcttttgctgccccacagcaaccacttaaatgtaggaactccagcagtgtactgggatcattaggacagcctgagtcatgatgacctcattttgcagttgaagaagtgggggccctgaagatttcatgacatctacccagctggattctcttccctggccaagtctctgagatcttctcccagggcgatgcaaagctactcgctaccagcttggacctgtctgcagtatctcctctgggacctgccatgctgaggacccattctcacctctgagggactcctgtcctaggactaaggtggagcctgggccatggtacagctggctcctgcggcagccatggacgaggtcacctttaggagcgacactgtgctgtcagatgtccacctctataccccgaaccatagacatctcatggtacggctgaacagcgtggggcagccagttttcctgtcccaattcaagcttctatggagccaagactcttggacagattcaggagccaagggtggcagtcacagagatgttcacacaaaggagcctccttctgctgagacaggcagcacagggtcccctccaggaagtggccatggtaatgagggtttctccctccaggccgggactgacaccactggccaggaagtggctgaagctcagctggatgaggatggggatttggacgtggtgagaagaccacgagccgcctctgattccaacccagcagggcctctgagagacaaggtacatcccatgattctagcacaggaagaagacgacgtcctgggagaggaagcacaaggcagcccgcacgatatcatcagaataggtgtggcggggcgccctgctcctggcagactacatcctgttccgacaggacctcttccgaggatgtacagcgctggagctcggggccggcacggggctcgctagcatcatcgcagccaccatggcacggaccgtttattgtacagatgtcggtgcagatctcttgtccatgtgccagcgaaacattgccctcaacagccacctggctgccactggaggtggtatagttagggtcaaagaactggactggctgaaggacgacctctgcacagatcccaaggtccccttcagttggtcacaagaggaaatttctgacctgtacgatcacaccaccatcctgtttgcagccgaagtgttttacgacgacgacttgactgatgctgtgtttaaaacgctctcccgactcgcccacagattgaaaaatgcctgcacagccatactgtcggtggagaagaggctcaacttcacactgagacacttggacgtcacatgtgaagcctacgatcacttccgctcctgcctgcacgcgctggagcagctcacagatggcaagctgcgcttcgtggtggagcccgtggaggcctccttcccacagctcctggtttacgagcgcctccagcagctggagctctggaagatcatcgcagaaccagtaacatgacccatcgcctccaccaggcgcggcgtctcgactgttcttagagtgtatttctagtaaaatcagaagctcaccaaagcaa

SEQ ID NO: 70167 - DNA, 2488 bp, Homo sapiens
ggcggggccggcgcctgcgcagaccgcctgttatggcggccgcctaagtcccacagagacgggagtcgggtgggatcccaggctgggccccgcggcggctggattctcttccctggccaagtctctgagatcttctcccagggcgatgcaaagctactcgctaccagcttggacctgtctgcagtatctcctctgggacctgccatgctgaggacccattctcacctctgagggactcctgtcctaggactaaggtggagcctgggccatggtacagctggctcctgcggcagccatggacgaggtcacctttaggagcgacactgtgctgtcagatgtccacctctataccccgaaccatagacatctcatggtacggctgaacagcgtggggcagccagttttcctgtcccaattcaagcttctatggagccaagactcttggacagattcaggagccaagggtggcagtcacagagatgttcacacaaaggagcctccttctgctgagacaggcagcacagggtcccctccaggaagtggccatggtaatgagggtttctccctccaggccgggactgacaccactggccaggaagtggctgaagctcagctggatgaggatggggatttggacgtggtgagaagaccacgagccgcctctgattccaacccagcagggcctctgagagacaaggtacatcccatgattctagcacaggaagaagacgacgtcctgggagaggaagcacaaggcagcccgcacgatatcatcagaataggtgtggcggggcgccctgctcctggcagactacatcctgttccgacaggacctcttccgaggatgtacagcgctggagctcggggccggcacggggctcgctagcatcatcgcagccaccatggcacggaccgtttattgtacagatgtcggtgcagatctcttgtccatgtgccagcgaaacattgccctcaacagccacctggctgccactggaggtggtatagttagggtcaaagaactggactggctgaaggacgacctctgcacagatcccaaggtccccttcagttggtcacaagaggaaatttctgacctgtacgatcacaccaccatcctgtttgcagccgaagtgttttacgacgacgacttgactgatgctgtgtttaaaacgctctcccgactcgcccacagattgaaaaatgcctgcacagccatactgtcggtggagaagaggctcaacttcacactgagacacttggacgtcacatgtgaagcctacgatcacttccgctcctgcctgcacgcgctggagcagctcacagatggcaagctgcgcttcgtggtggagcccgtggaggcctccttcccacagctcctggtttacgagcgcctccagcagctggtaggtccaggccccgaagcagggccgttggttgctttactgtgaagcgggtgactccagggcaaagaggtgatgaagcaagccctccaagcacaggctccaccctagtcctgcagggggtgaagcctgcgtgcctggcaccatctgtagtggaacctgttgggggagctacatcctgttcttagcagccaccatgtctggagacgggcctacaggcgaaccttgtcttttactttatagcacatattccccccgttggacagttcagactccagaggaggcaagaccgaggcagaggttgtttggggaacaggaagtcagtggagggaagtttgtgggttgcagatcttggtgcaggcgccccgctgtggtggccgctgctcacatcttcactgtggaaggataccagcccctctcggactgaactggcttttctattaactggagtccaaagattgagaattaacttcttttgttctgtttgccttttggctgtggcctccctttctctatgtctgtggagacccgggcctagttctaaggaaaaagggaggaagagggagtcacgaggagctgccgcccttgcactctgtctcgcgtcctgagggagggcagcatggaattcgtgtggttttgtgtgcgaggaggatcttgtatttattgctctgccacttctgggcagcattaagaatagcgtcacatgaccaagaacacacatttcttacaagtcagcagccccaatacatgatgcctaagacgtcccaaaaaggccaggtacggtggctcccacctgtaatcccagcactctgggaggccatggtcggagggttgcttgaagctaggagttcgagaccagcctgggcatcacagaccctatctcgacaaaaatcaagaaaaaaaattagccatgcatggtggtgcacacctgtggtcccagctactctggaagctgaggtgggaggattgcttgagcccagaagttcaaggctgcagcaagctgtgatggtgccactgcactccagactgggcaacagaatgagatcctgtctctaaaataaaattgtttataaagatctccccca

SEQ ID NO: 70168 - DNA, 1801 bp, Homo sapiens
ggcggggccggcgcctgcgcagaccgcctgttatggcggccgcctaagtcccacagagacgggagtcgggtgggatcccaggctgggccccgcggcggctggattctcttccctggccaagtctctgagatcttctcccagggcgatgcaaagctactcgctaccagcttggacctgtctgcagtatctcctctgggacctgccatgctgaggacccattctcacctctgagggactcctgtcctaggactaaggtggagcctgggccatggtacagctggctcctgcggcagccatggacgaggtcacctttaggagcgacactgtgctgtcagatgtccacctctataccccgaaccatagacatctcatggtacggctgaacagcgtggggcagccagttttcctgtcccaattcaagcttctatggagccaagactcttggacagattcaggagccaagggtggcagtcacagagatgttcacacaaaggagcctccttctgctgagacaggcagcacagggtcccctccaggaagtggccatggtaatgagggtttctccctccaggccgggactgacaccactggccaggaagtggctgaagctcagctggatgaggatggggatttggacgtggtgagaagaccacgagccgcctctgattccaacccagcagggcctctgagagacaaggtacatcccatgattctagcacaggaagaagacgacgtcctgggagaggaagcacaaggcagcccgcacgatatcatcagaataggtgtggcggggcgccctgctcctggcagactacatcctgttccgacaggacctcttccgaggatgtacagcgctggagctcggggccggcacggggctcgctagcatcatcgcagccaccatggcacggaccgtttattgtacagatgtcggtgcagatctcttgtccatgtgccagcgaaacattgccctcaacagccacctggctgccactggaggtggtatagttagggtcaaagaactggactggctgaaggacgacctctgcacagatcccaaggtccccttcagttggtcacaagaggaaatttctgacctgtacgatcacaccaccatcctgtttgcagccgaagtgttttacgacgacgacttgactgatgctgtgtttaaaacgctctcccgactcgcccacagattgaaaaatgcctgcacagccatactgtcggtggagaagaggctcaacttcacactgagacacttggacgtcacatgtgaagcctacgatcacttccgctcctgcctgcacgcgctggagcagctcacagatggcaagctgcgcttcgtggtggagcccgtggaggcctccttcccacagctcctggtttacgagcgcctccagcagctgcctctctgccacagtaaaacagaacagcccagagcaacaaagaaaggaggaagccgctcgtccgctcctgccccagctcgcctgctccgtggctgacgtgttgtctaactactctccttgcctgctccgtggctgacgtgttgtctaactactctccttgcctgctccgtggctgacgtgttgtctaactactctccttggtgaatcactttccttaatgaaattgtgatgctcttgtatgtgcacttcagaaacctgttcttttctctatttgctgcaggagctctggaagatcatcgcagaaccagtaacatgacccatcgcctccaccaggcgcggcgtctcgactgttcttagagtgtatttctagtaaaatcagaagctcaccaaagcaa

SEQ ID NO: 70169 - DNA, 1140 bp, Homo sapiens
ggcggggccggcgcctgcgcagaccgcctgttatggcggccgcctaagtcccacagagacgggagtcgggtgggatcccaggctgggccccgcggcggctggattctcttccctggccaagtctctgagatcttctcccagggcgatgcaaagctactcgctaccagcttggacctgtctgcagtatctcctctgggacctgccatgctgaggacccattctcacctctgagggactcctgtcctaggactaaggtggagcctgggccatggtacagctggctcctgcggcagccatggacgaggtcacctttaggagcgacactgtgctgtcagatgtccacctctataccccgaaccatagacatctcatggtacggctgaacagcgtggggcagccaggtgtggcggggcgccctgctcctggcagactacatcctgttccgacaggacctcttccgaggatgtacagcgctggagctcggggccggcacggggctcgctagcatcatcgcagccaccatggcacggaccgtttattgtacagatgtcggtgcagatctcttgtccatgtgccagcgaaacattgccctcaacagccacctggctgccactggaggtggtatagttagggtcaaagaactggactggctgaaggacgacctctgcacagatcccaaggtccccttcagttggtcacaagaggaaatttctgacctgtacgatcacaccaccatcctgtttgcagccgaagtgttttacgacgacgacttgactgatgctgtgtttaaaacgctctcccgactcgcccacagattgaaaaatgcctgcacagccatactgtcggtggagaagaggctcaacttcacactgagacacttggacgtcacatgtgaagcctacgatcacttccgctcctgcctgcacgcgctggagcagctcacagatggcaagctgcgcttcgtggtggagcccgtggaggcctccttcccacagctcctggtttacgagcgcctccagcagctggagctctggaagatcatcgcagaaccagtaacatgacccatcgcctccaccaggcgcggcgtctcgactgttcttagagtgtatttctagtaaaatcagaagctcaccaaagcaa

SEQ ID NO: 70170 - DNA, 1042 bp, Homo sapiens
ggcggggccggcgcctgcgcagaccgcctgttatggcggccgcctaagtcccacagagacgggagtcgggtgggatcccaggctgggccccgcggcggctggattctcttccctggccaagtctctgagatcttctcccagggcgatgcaaagctactcgctaccagcttggacctgtctgcagtatctcctctgggacctgccatgctgaggacccattctcacctctgagggactcctgtcctaggactaaggtggagcctgggccatggtacagctggctcctgcggcagccatggacgaggtcacctttaggagcgacactgtgctgtcagatgtccacctctataccccgaaccatagacatctcatggtacggctgaacagcgtggggcagccagttttcctgtcccaattcaagcttctatggagccaagactcttggacagattcaggagccaagggtggcagtcacagagatgttcacacaaaggagcctccttctgctgagacaggcagcacagggtcccctccaggaagtggccatggtaatgagggtttctccctccaggccgggactgacaccactggccaggaagtggctgaagctcagctggatgaggatggggatttggacgtggtgagaagaccacgagccgcctctgattccaacccagcagggcctctgagagacaaggtacatcccatgattctagcacaggaagaagacgacgtcctgggagaggaagcacaaggcagcccgcacgatatcatcagaataggtgtggcggggcgccctgctcctggcagactacatcctgttccgacaggacctcttccgaggatgtacagcgctggagctcggggccggcacggggctcgctagcatcatcgcagccaccatggcacggaccgtttattgtacagatgtcggtgcagatctcttgtccatgtgccagcgaaacattgccctcaacagccacctggctgccactggaggtgaggcccagggggtcttctgccagggagggaggtttctctg

SEQ ID NO: 70171 - DNA, 638 bp, Homo sapiens
ctgggtgcttgctctttctttgtataaagatgtctttttttttttccctgtcagatggcagatgggaaaagtcgttccttgagtactggtcacctgcctagcactttgcgcaccataggcccttcggccctcccaatagtcctgtgaggaagtagtactgtgccctttctatcccaaggtccccttcagttggtcacaagaggaaatttctgacctgtacgatcacaccaccatcctgtttgcagccgaagtgttttacgacgacgacttgactgatgctgtgtttaaaacgctctcccgactcgcccacagattgaaaaatgcctgcacagccatactgtcggtggagaagaggctcaacttcacactgagacacttggacgtcacatgtgaagcctacgatcacttccgctcctgcctgcacgcgctggagcagctcacagatggcaagctgcgcttcgtggtggagcccgtggaggcctccttcccacagctcctggtttacgagcgcctccagcagctggagctctggaagatcatcgcagaaccagtaacatgacccatcgcctccaccaggcgcggcgtctcgactgttcttagagtgtatttctagtaaaatcagaagctcaccaaagcaa

SEQ ID NO: 70172 - DNA, 330 bp, Homo sapiens
  misc_feature (27)..(27): n is a, c, g, or t
aattcgcggccgcgtcgaccgggcganaagacgacagaagggattgtaatattcatgtctgtgaagcttttaaacattacacttgagatcagtcatgacttgatattcaggtaaattttcttttccaagaagcttttgaataagcatatttcctccaaaggtctctctctttctctctctttttttgagtgtagattattttaaagcactaattgcattacattggtaactgcaatataaaatagccattattgttttgtgaagcatggttgaaattagctagtggtcccttttgaatttcatgagcctctcaaaaaagaaaaacttaaa

SEQ ID NO: 70173 - DNA, 6135 bp, Homo sapiens
atagtgagggtaataatgacttgttggttgattgtagatattgggctgtttggacctgcattattaaaagatctcagtttatttaaagactgtgaacctgaaagcatttctgattggacttttgatgaaaactgtttattctgttgcttgagaagagataaagtaaagacagtccctgggtctccgaccccaatattcccctagtggcccgtgagatcatgcagcgaatgatccaacaatttgctgctgaatatacctcaaaaaatagctctactcaggaccccagccagcccaatagcacaaagaaccaaagcctgccgaaagcatctccagtcaccacctctcccacggctgcaactactcagaaccctgtgctcagcaaacttctcatggctgaccaagactcacctctggaccttactgtcagaaagtctcagtcagaacctagcgaacaagacggtgtacttgatctgtccactaagaaaagtccatgtgctggcagcacttccctgagccactctccaggctgctccagtactcaagggaacggtgagaactcaacagaggcaaaagcagtagattctaacaatcagtcgaagtccccactggagaaatttatggtcaaactgtgtactcatcatcaaaagcaattcattcgtgttctgaacgacctgtacactgaatctcaaccaggcactgaggacctgcagccttctgattcgggagcaatggatgtatccacttgcaatgctggctgtgcccagctcagcaccaaacataaggaaaaagatgctctgtgtctcgatatgaagtcttctgcttctgtagatttgttcgtagactcgtcagactctcacagccctctacacttgacggaacagaccccgaagaagcctcctcctgagataaaccctgtagatggaagagagaatgccttgactgttgtccagaaagattcctctgaacttccaaccactaaatcgaattctattaatagcagttcagtggatagtttcactccgggatacctcactgcatctaattgttcctcagtgaacttccaccacatccctaaaatcttggaggggcagaccactggacaagagcaagacacaaatgtgaacatatgtgaggatggtaaagaccatatgcagagttcagctttagtagaaagtctaattacagtaaaaatggcagctgagaatagtgaggaaggcaatacctgtattattcctcaaagaaatttgttcaaagctttatcagaagaggcttggaactcagggtttatggggaactcatctagaactgctgacaaagagaatactttacagtgtccaaaaacacctttgcgccaggatttagaggcaaatgaacaagatgcaaggccaaagcaagagaaccatcttcactctctgggaagaaataaggtgggttaccatttacatcccagtgataagggccagtttgatcattccaaagatggttggttaggccccggccctatgccagctgtacacaaagcggcaaatggacactcaagaaccaagatgatatcaacctccatcaagacagctcggaaaagtaaaagggcatcagggctgaggataaatgattatgataaccagtgtgatgttgtttatatcagtcaaccaataacagaatgccactttgagaatcaaaaatcaatattatcttctcggaaaacagccagaaagagtactcgaggatactttttcaatggtgactgttgtgagctgccaactgttcgtacactggccagaaatttacactcccaggaaaaagcaagctgctcagcattggcatcagaggcagttttcactcctaagcagacccttacaattccagcccctagacatacagtagatgtgcagcttcccagagaagacaaccctgaagaacctagcaaggaaatcacctctcacgaggaaggaggtggagacgtttcacctcgaaaagaacctcaagagcctgaggtttgccccacaaagattaagccgaacctgagcagctcccctaggtcagaggaaacgacagcctccagcctggtgtggcctctccctgctcaccttcctgaagaggacctgccagaaggtggctccacagtctcagctcccacagcaagtgggatgtcttctcctgaacacaaccaaccaccagttgcactgttggatacggaggagatgagtgtaccccaggactgtcacctccttccctccactgaaagcttttccgggggagtcagtgaagatgtcatttctaggcctcattctcctcctgaaatagtcagtagagaagaaagtcctcagtgctcagaaaatcagagttccccaatgggcttggagccccccatgagtctgggaaaggctgaggacaaccaaagcatcagtgctgaggttgagtctggagacacccaggagctaaatgtcgacccactcttgaaggaaagcagcacttttactgatgaaaaccccagtgaaactgaggaaagtgaggcagcaggtggtataggaaaattagagggagaggacggtgatgtaaaatgcctgtcagaaaaagacacgtatgatacaagcattgactcactcgaagagaatttggacaagaagaaaaaaggtaaaaaattccctgaggcctctgataggtgcctaagaagtcaactttcggattcttcctctgctgacagatgcctaagaaatcagagttcagattcttcctcagcttgtcttgaaatcaaagttcctaaaaatcctagtgcaaaacgttcaaaaaaagaagggcaccctggtgggacaacacctaagggccttctacctgacagtttccacacggaaactctggaggacacagaaaagccaagtgtcaatgaacgcccctctgagaaagatgctgagcaggagggcgaaggcggggggatcatcaccaggcagactttgaaaaacatgctggacaaagaagtcaaggagttacgaggagagattttccccagcagggaccccataaccacagctggacagccactgcctggagagagattggaaatctatgttcagtctaaaatggatgagaagaatgctcatatcccctcagaaagtattgcttgtaagagggacccagaacaggcaaaagaagagccagggcatattcccacacagcatgtggaggaggctgtgaatgaggtagacaacgaaaacacccagcagaaagatgatgagagtgatgccccatgcagctctcttgggttgtcgagtagtggaagtggtgatgctgctagggcaccaaaatcggtgccaaggcctaaaagattgacctcttcaacctacaacctaagacacgctcattctctgggctccttggatgcttcaaaagtgacttcagaaaaggaagctgcacaagtaaaccccataatgccaaaggaaaatggagcttcagagagtggagaccccctagatgaggacgatgttgacaccgtggtagatgaacagccaaagtttatggaatggtgtgctgaggaggagaaccaagagctcatcgccaacttcaatgcccagtacatgaaagttcagaagggctggatccagttggagaaagaaggacagccaacaccaagagcaaggaacaaatcagataaactgaaagagatttggaaaagcaagaaaaggtcacggaaatgtaggagttcattggagagtcagaagtgttctcctgttcagatgctctttatgacaaactttaaattatctaatgtttgtaaatggttcttagagacaactgaaacccggtctctagtcattgtgaagaagctcaatactcgccttccaggagacgttccccctgtcaagcatcctcttcagaaatacgctccttccagcctatatcccagttcactacaggctgagcgcttgaaaaagcacttgaagaaatttcctggagctacccctgctaagaataattggaaaatgcagaagctctgggccaaatttcgagagaatcctgatcaagtggagccagaagatggcagtgatgtcagccccggccctaattctgaagacagcatagaggaagtcaaggaagatagaaacagtcatcctccagcaaacctgcccactccagccagtacccggattcttagaaaatattccaatattcgaggaaagctcagagcccagcaacgtttaatcaagaatgagaaaatggaatgcccagatgctctggctgtggaaagtaagccaagtcgtaagagcgtatgcatcaaccctctgatgtcccccaagcttgccctgcaagtggatgcagatgggtttcctgttaagcccaagagtactgaaggaatgaagggaaggaaggggaagcaggtgtctgaaatcttgcctaaagcagaagttcagagtaaacgcaagagaacagaaggcagcagccctccagatagtaagaacaaggggcctacggtgaaagccagcaaagaaaagcatgctgatggagccaccaaaacccctgctgccaagaggccagctgcaagggacagaagcagccaaccccccaaaaagacgtctttgaaagagaataaagtgaagatccctaaaaagtccgctgggaagagctgccctccctccaggaaagaaaaagagaatacaaacaaaaggccttcccagtctattgcctcggaaacactgacgaaacctgcaaaacagaagggggccggtgaatcctcttcaaggcctcagaaagccacgaataggaagcagagtagtggaaagactcgggccagaccctcaacgaaaaccccagagagcagtgcagctcagagaaagcgaaagctgaaggcaaagctggactgttcgcacagcaaacggaggcggctggatgcaaagtgattggaaagatggtagccaagagtaaaactgttctatagaagtaaccttttattttgcattaactaaatctgcttttataagcttatcaagcctttcaaatttacagttaatggagaacaccgtaatttgagatgtcagaaaatgcatctcagatggagaagggaacttgcagagtccttctctgaggctaagggaagttatatattatattctggttgttccttgggttttaaacttggaaccaagcagttttcgtttttaaaagtacagtgccttatttatcctttttgtttttaaatttacaaaagctaaaaagctgatctatgtgattaaaggcttgtattttatacttgatgcacaagcacttgtactgtagccgagaagaccaccatcatgcacataaaaggagcttttcagcagccaccctgcagcatctgcccacgaacagatgcccttctttgcaaaccccagcagtgaacttccctctctgtcttgtttgtttgtttagatgatgtttgaaagctaaaccaaatcattttatggtatgcagaggatttataattataaaagattactatttctgttacccccttttaaaaaagatcatgttcattgttggtccctcctctcacctttgatgttttgtcatttgagagcatgtattctaaattatgtgcccatgggacaagagatatgtcacaagtgttaatttttgtttacaaactctaaaaaatcatttgcatccccaaactgtattactaattctcaccatcttcttcatttctggtcttgctagcactcctgcaaggcttccatcctacttcgggaggaaaaagcctaggattttttttttccatcttgtagctgtaatttgatgattaggatgaaaatgactcttattttctttcttacccagagtacttccatattcaaagaaagccgaactattatttccagtaatagaaaggtttaagaatatgtatgtccatgtgtgtttgggtgcatttgcatgtggttatcagccacaaatgtctcccaatcccaattttacagtaaaattttttccctatgcagtgtgcttgggtgtccctgagttgagtaattagcaaaggacagatggtttaaaagtagcccagtgtctctgtgagcatccccaataccactttggtaccagactcagaaagatctaaaacagcatggagttatgtaaaggttagagcagccttgcagttggaggaagcag

SEQ ID NO: 70174 - DNA, 5487 bp, Homo sapiens
atagtgagggtaataatgacttgttggttgattgtagatattgggctgtttggacctgcattattaaaagatctcagtttatttaaagactgtgaacctgaaagcatttctgattggacttttgatgaaaactgtttattctgttgcttgagaagagataaagtaaagacagtccctgggtctccgaccccaatattcccctagtggcccgtgagatcatgcagcgaatgatccaacaatttgctgctgaatatacctcaaaaaatagctctactcaggaccccagccagcccaatagcacaaagaaccaaagcctgccgaaagcatctccagtcaccacctctcccacggctgcaactactcagaaccctgtgctcagcaaacttctcatggctgaccaagactcacctctggaccttactgtcagaaagtctcagtcagaacctagcgaacaagacggtgtacttgatctgtccactaagaaaagtccatgtgctggcagcacttccctgagccactctccaggctgctccagtactcaagggaacggtgagaactcaacagaggcaaaagcagtagattctaacaatcagtcgaagtccccactggagaaatttatggtcaaactgtgtactcatcatcaaaagcaattcattcgtgttctgaacgacctgtacactgaatctcaaccaggcactgaggacctgcagccttctgattcgggagcaatggatgtatccacttgcaatgctggctgtgcccagctcagcaccaaacataaggaaaaagatgctctgtgtctcgatatgaagtcttctgcttctgtagatttgttcgtagactcgtcagactctcacagccctctacacttgacggaacagaccccgaagaagcctcctcctgagataaaccctgtagatggaagagagaatgccttgactgttgtccagaaagattcctctgaacttccaaccactaaatcgaattctattaatagcagttcagtggatagtttcactccgggatacctcactgcatctaattgttcctcagtgaacttccaccacatccctaaaatcttggaggggcagaccactggacaagagcaagacacaaatgtgaacatatgtgaggatggtaaagaccatatgcagagttcagctttagtagaaagtctaattacagtaaaaatggcagctgagaatagtgaggaaggcaatacctgtattattcctcaaagaaatttgttcaaagctttatcagaagaggcttggaactcagggtttatggggaactcatctagaactgctgacaaagagaatactttacagtgtccaaaaacacctttgcgccaggatttagaggcaaatgaacaagatgcaaggccaaagcaagagaaccatcttcactctctgggaagaaataaggtgggttaccatttacatcccagtgataagggccagtttgatcattccaaagatggttggttaggccccggccctatgccagctgtacacaaagcggcaaatggacactcaagaaccaagatgatatcaacctccatcaagacagctcggaaaagtaaaagggcatcagggctgaggataaatgattatgataaccagtgtgatgttgtttatatcagtcaaccaataacagaatgccactttgagaatcaaaaatcaatattatcttctcggaaaacagccagaaagagtactcgaggatactttttcaatggtgactgttgtgagctgccaactgttcgtacactggccagaaatttacactcccaggaaaaagcaagctgctcagcattggcatcagaggcagttttcactcctaagcagacccttacaattccagcccctagacatacagtagatgtgcagcttcccagagaagacaaccctgaagaacctagcaaggaaatcacctctcacgaggaaggaggtggagacgtttcacctcgaaaagaacctcaagagcctgaggtttgccccacaaagattaagccgaacctgagcagctcccctaggtcagaggaaacgacagcctccagcctggtgtggcctctccctgctcaccttcctgaagaggacctgccagaaggtggctccacagtctcagctcccacagcaagtgggatgtcttctcctgaacacaaccaaccaccagttgcactgttggatacggaggagatgagtgtaccccaggactgtcacctccttccctccactgaaagcttttccgggggagtcagtgaagatgtcatttctaggcctcattctcctcctgaaatagtcagtagagaagaaagtcctcagtgctcagaaaatcagagttccccaatgggcttggagccccccatgagtctgggaaaggctgaggacaaccaaagcatcagtgctgaggttgagtctggagacacccaggagctaaatgtcgacccactcttgaaggaaagcagcacttttactgatgaaaaccccagtgaaactgaggaaagtgaggcagcaggtggtataggaaaattagagggagaggacggtgatgtaaaatgcctgtcagaaaaagacacgtatgatacaagcattgactcactcgaagagaatttggacaagaagaaaaaaggtaaaaaattccctgaggcctctgataggtgcctaagaagtcaactttcggattcttcctctgctgacagatgcctaagaaatcagagttcagattcttcctcagcttgtcttgaaatcaaagttcctaaaaatcctagtgcaaaacgttcaaaaaaagaagggcaccctggtgggacaacacctaagggccttctacctgacagtttccacacggaaactctggaggacacagaaaagccaagtgtcaatgaacgcccctctgagaaagatgctgagcaggagggcgaaggcggggggatcatcaccaggcagactttgaaaaacatgctggacaaagaagtcaaggagttacgaggagagattttccccagcagggaccccataaccacagctggacagccactgcctggagagagattggaaatctatgttcagtctaaaatggatgagaagaatgctcatatcccctcagaaagtattgcttgtaagagggacccagaacaggcaaaagaagagccagggcatattcccacacagcatgtggaggaggctgtgaatgaggtagacaacgaaaacacccagcagaaagatgatgagagtgatgccccatgcagctctcttgggttgtcgagtagtggaagtggtgatgctgctagggcaccaaaatcggtgccaaggcctaaaagattgacctcttcaacctacaacctaagacacgctcattctctgggctccttggatgcttcaaaagtgacttcagaaaaggaagctgcacaagtaaaccccataatgccaaaggaaaatggagcttcagagagtggagaccccctagatgaggacgatgttgacaccgtggtagatgaacagccaaagtttatggaatggtgtgctgaggaggagaaccaagagctcatcgccaacttcaatgcccagtacatgaaagttcagaagggctggatccagttggagaaagaaggacagccaacaccaagagcaaggaacaaatcagataaactgaaagagatttggaaaagcaagaaaaggtcacggaaatgtaggagttcattggagagtcagaagtgttctcctgttcagatgctctttatgacaaactttaaattatctaatgtttgtaaatggttcttagagacaactgaaacccggtctctagtcattgtgaagaagctcaatactcgccttccaggagacgttccccctgtcaagcatcctcttcagaaatacgctccttccagcctatatcccagttcactacaggctgagcgcttgaaaaagcacttgaagaaatttcctggagctacccctgctaagaataattggaaaatgcagaagctctgggccaaatttcgagagaatcctgatcaagtggagccagaagatggcagtgatgtcagccccggccctaattctgaagacagcatagaggaagtcaaggaagatagaaacagtcatcctccagcaaacctgcccactccagccagtacccggattcttagaaaatattccaatattcgaggaaagctcagagcccagcaacgtttaatcaagaatgagaaaatggaatgcccagatgctctggctgtggaaagtaagccaagtcgtaagagcgtatgcatcaaccctctgatgtcccccaagcttgccctgcaagtggatgcagatgggtttcctgttaagcccaagagtactgaaggaatgaagggaaggaaggggaagcaggtgtctgaaatcttgcctaaagcagaagttcagagtaaacgcaagagaacagaaggcagcagccctccagatagtaagaacaaggggcctacggtgaaagccagcaaagaaaagcatgctgatggagccaccaaaacccctgctgccaagaggccagctgcaagggacagaagcagccaaccccccaaaaagacgtctttgaaagagaataaagtgaagatccctaaaaagtccgctgggaagagctgccctccctccaggaaagaaaaagagaatacaaacaaaaggccttcccagtctattgcctcggaaacactgacgaaacctgcaaaacagaagggggccggtgaatcctcttcaaggcctcagaaagccacgaataggaagcagagtagtggaaagactcgggccagaccctcaacgaaaaccccagagagcagtgcagctcagagaaagcgaaagctgaaggcaaagctggactgttcgcacagcaaacggaggcggctggatgcaaagtgattggaaagatggtagccaagagtaaaactgttctatagaagtaaccttttattttgcattaactaaatctgcttttataagcttatcaagcctttcaaatttacagttaatggagaacaccgtaatttgagatgtcagaaaatgcatctcagatggagaagggaacttgcagagtccttctctgaggctaagggaagttatatattatattctggttgttccttgggttttaaacttggaaccaagcagttttcgtttttaaaagtacagtgccttatttatcctttttgtttttaaatttacaaaagctaaaaagctgatctatgtgattaaaggcttgtattttatacttgatgcacaagcacttgtactgtagccgagaagaccaccatcatgcacataaaaggagcttttcagcagccaccctgcagcatctgcccacgaacagatgcccttctttgcaaaccccagcagtgaacttccctctctgtcttgtttgtttgtttagatgatgtttgaaagctaaaccaaatcattttatggtatgcagaggatttataattataaaagattactatttctgttaccccctttt

SEQ ID NO: 70175 - DNA, 1048 bp, Homo sapiens
atagtgagggtaataatgacttgttggttgattgtagatattgggctgtttggacctgcattattaaaagatctcagtttatttaaagactgtgaacctgaaagcatttctgattggacttttgatgaaaactgtttattctgttgcttgagaagagataaagtaaagacagtccctgggtctccgaccccaatattcccctagtggcccgtgagatcatgcagcgaatgatccaacaatttgctgctgaatatacctcaaaaaatagctctactcaggaccccagccagcccaatagcacaaagaaccaaagcctgccgaaagcatctccagtcaccacctctcccacggctgcaactactcagaaccctgtgctcagcaaacttctcatggctgaccaagactcacctctggaccttactgtcagaaagtctcagtcagaacctagcgaacaagacggtgtacttgatctgtccactaagaaaagtccatgtgctggcagcacttccctgagccactctccaggctgctccagtactcaagggaacggtggatgacaatcgagcagcagaagaatggtgtgcctaccctttaatgctgcagtttaagagaacttgtattgtgtcatttcagattgtaggctgagagttgtaaatagtgaaaatttgagtacttctattatttgttttggttagaaagtgaatttaaaaaacaaaccaaactctaaactttctcagattaaaagtcctgagacctgaagattgtaatattcatgtctgtgaagcttttaaacattacacttgagatcagtcatgacttgatattcaggtaaattttcttttccaagaagcttttgaataagcatatttcctccaaaggtctctctctttctctctctttttttgagtgtagattattttaaagcactaattgcattacattggtaactgcaatataaaatagccattattgttttgtgaagcatggttgaaattagctagtggtcccttttgaatttcatgagcctctcaaaaaagaaaaacttaaa

SEQ ID NO: 70176 - DNA, 518 bp, Homo sapiens
atagtgagggtaataatgacttgttggttgattgtagatattgggctgtttggacctgcattattaaaagatctcagtttatttaaagactgtgaacctgaaagcatttctgattggacttttgatgaaaactgtttattctgttgcttgagaagagataaagtaaaggtaactaagaagcctgtgaaacttttatttagtgtagtattttaaagttttcatcttttaaaacattgtgttactttgttggaggatttgtaggaaaaggaaggtatggtttcatacttagttatgaaagagtttgatagtaatcctgggttttgcaatttaagttatttccatcctgttgattagcctattaagaaacctatatcctaccatgcatttattgttgttattttgtttttttgcttttttgttttttttttattttgagacggagtctctctgtgatgcccaggctggagtgaaatggcacgatctctgctcactgcagccgccgcctcctgggttcaagc

SEQ ID NO: 70177 - DNA, 4765 bp, Homo sapiens
atggccgcggggggcagcggctgcacttcctcagcgggcggcggtggccggggagttaatcctcgacgcacgggtcccgtttccctctgtgcggcggccggcgggaccataagggcttaactcatatatttaacccccctccaaaaaggtttgaaagtattcttgaagggctgtttggacctgcattattaaaagatctcagtttatttaaagactgtgaacctgaaagcatttctgattggacttttgatgaaaactgtttattctgttgcttgagaagagataaagtaaagggacacttagtcggtctggatgaaccagcttcgggagctgggcaagaagctctgcttaaacaagagcaagcaaaaatcattcgattcgagagacaagcagaagaattcctcaatgcagtcttttatagaaaagacagtccctgggtctccgaccccaatattcccctagtggcccgtgagatcatgcagcgaatgatccaacaatttgctgctgaatatacctcaaaaaatagctctactcaggaccccagccagcccaatagcacaaagaaccaaagcctgccgaaagcatctccagtcaccacctctcccacggctgcaactactcagaaccctgtgctcagcaaacttctcatggctgaccaagactcacctctggaccttactgtcagaaagtctcagtcagaacctagcgaacaagacggtgtacttgatctgtccactaagaaaagtccatgtgctggcagcacttccctgagccactctccaggctgctccagtactcaagggaacgggcgacctgggagacccagccagtaccgcccagacggacttcggagtggtgatggggtacctccaagaagcttacaggatggaaccagggaaggttttggacactccacatcactcaaagttccactggctcgatccctgcagattagtgaagaactactgagcagaaaccaattgtccacagctgccagccttgggccatctggattacagaatcatggacaacacttaatattatccagggaagcctcttgggcaaaaccacattacgagttcaacctcagccgtatgaagttcaggggaaatggtgcactcagcaacatcagtgaccttccttttcttgcagaaaactctgcctttccaaaaatggcacttcaagcaaaacaagatggaaaaaaggatgtgagccattcatctcctgtagatttaaagataccacaagttcgaggaatggatctttcttgggagtctcgcactggtgatcagtacagctatagctctttggtaatgggttcacaaacggagagcgcgcttagtaaaaaattaagggctattcttccaaaacaaagtagaaaaagcatgttagatgctggacccgattcttggggctcagatgctgagcagtctacctctggacagccatatcccacatcggatcaagaaggagaccctggctccaagcagcctcggaagaaaagagggcgttacagacagtacaacagtgagatactggaggaagcaatctcagtggttatgagtggaaaaatgagtgtttccaaagctcagagtatttatgggattccccacagtacactggagtacaaagtaaaggagaggctgggcactttgaaaaaccctccaaagaaaaagatgaaattaatgaggtcggaggggccagatgtttctgtaaagattgaattagatccccagggagaggcagcacaaagtgcaaatgaatcaaaaaacgagtaggaatactgtagagtgccaattactgtacaaactgggtgagcactactgcatcattgttcagctatcattgcttgcacgtaatttcatttactgtgacacttgcttctttgcagattttgcattgacttgtgtgtacagagatgaaatgtgcattctgaatgttgcatattttaaatttttcatgtgcagtatggctcggaatatgtttggccttttgcatgtttctctacaaaagagaattgagttacctcacagagaacagatacatggaagtggactccttgcctgtagagcctgcatgcttttttgtttttttttgttgttgttgttttttcttaagttatatttgtttttactttttaaaaaagaagaggaaacaaagcccccttttagaaactacgtctgtcatactgggagctttatcactgcaaattggaaagccatcttatacaaaattattcacatttttcatctacgattcaactaatcgaaggattaaactaaagaaaaaactaagaagaacaatgaacctttgactttgagaaatttggttattcactgacataattattgggtcatttatagttacattttataattttcttctcactattaaatttatttaaattagcaagctattagtgctcacccagaggggaaggtggtggaaaatgtgcacacactaccttcagaaatgcttcagttaattactttgaacactacctttgctgtaatttcatttgagattttctaagggtagaatttggtctcaccaacaagtgaggatatagccttatctcatggaggacgagctccgtatttactcaggagcagtcagggtacattacataaaacaatggaggatgcctcattttagcaaactaggtttctttgtattcttcagtccttttacagaattgatgtgctaactgaatatcattgcagcaactagactaagatattcaagatctctttattggggatgggagaaatagggaaagaaatgtgtataagtaattatgatattgcaaaagtgatacttagattttacagcctcagtagtctgcccagtgtccacattaatgaaggatccatgtttgtagtgagagaaaaaaaccccaaggtaacccgatatgatttaggatgcatatcagttctaacaattcaatcagaagtcaagctcattggaattccttttttaactgatccaaatactagtagaagggggagggagaggtgttgggttttttttttaagtttttatttaattttgttggttagaatttttttctgtttttggcatcctacataataccccccttcttgactttttctgataattagctgatattcatggttgtttagcacacagttcaggacctttgagatcatgtttgtataagcactccttgaagaatatctaagctttttctgagatgggcttttaaaattataataagggaagtttattttctgcggtttttgcaagaataagcaaagcccatggaatttaatttttcattgtgatcagattaaaattactatttgtgcaaaacaaattccacaccacatgtactgtatattctaatctgctgagaaaggtggtcaggcccttctaaatgcttaaccaaaaacaaacattattggagtttcagtgtaaaataaaattaaaattggagggttggttagattgatttcagatggatactaacagtttgaggggaggtccagatatttccaaggcataaattcttgcctggaaactttggagcaattaattaaattaggttaagttttccctcagcaacctgtgtgttcaaaggttaggcacaccattgctgttactaaaatacatgcactgctcattcttgacatagcttgggtgtgggttcctcttgttttggttattttgtgtagcagtttaatcagtggataactgagcctgtttcctcttagctttctagacttcttaacagaaaaaacagtttgggttcaatagcattttatgattctacaatattttgtcacctagctggaagttgcaataaaaattccttatgaaatatatggttttcatctgtaattgaaggaaatcatagaaagtttgctgaaagcaaagggctaagcttatgaaggaatgcctcctttgttacacactcaagaatttgtcagcacacaattaattgcagccatagtacctttttgcgtaatgtttgggatattcagtagcccaggattgctacaaaaaggtcctttgagaaaattaatttgtgcttgcttttatcccctctcagaaagacatcactaaaggcccattaaaaatctggccctaaaagttcaacttttgtagagtttattgttcagagaggtttaatcctatgtggtagtctatataagtgatgtatgagttgagttatgtaaattttgtcattgtagtgtacatggagtgatcattttactaacataaatattttctatgtgtgtttcagtggatgacaatcgagcagcagaagaatggtgtgcctaccctttaatgctgcagtttaagagaacttgtattgtgtcatttcagattgtaggctgagagttgtaaatagtgaaaatttgagtacttctattatttgttttggttagaaagtgaatttaaaaaacaaaccaaactctaaactttctcagattaaaagtcctgagacctgaagattgtaatattcatgtctgtgaagcttttaaacattacacttgagatcagtcatgacttgatattcaggtaaattttcttttccaagaagcttttgaataagcatatttcctccaaaggtctctctctttctctctctttttttgagtgtagattattttaaagcactaattgcattacattggtaactgcaatataaaatagccattattgttttgtgaagcatggttgaaattagctagtggtcccttttgaatttcatgagcctctcaaaaaagaaaaacttaaa

SEQ ID NO: 70178 - DNA, 5349 bp, Homo sapiens
atagtgagggtaataatgacttgttggttgattgtagatattgggctgtttggacctgcattattaaaagatctcagtttatttaaagactgtgaacctgaaagcatttctgattggacttttgatgaaaactgtttattctgttgcttgagaagagataaagtaaagacagtccctgggtctccgaccccaatattcccctagtggcccgtgagatcatgcagcgaatgatccaacaatttgctgctgaatatacctcaaaaaatagctctactcaggaccccagccagcccaatagcacaaagaaccaaagcctgccgaaagcatctccagtcaccacctctcccacggctgcaactactcagaaccctgtgctcagcaaacttctcatggctgaccaagactcacctctggaccttactgtcagaaagtctcagtcagaacctagcgaacaagacggtgtacttgatctgtccactaagaaaagtccatgtgctggcagcacttccctgagccactctccaggctgctccagtactcaagggaacggtgagaactcaacagaggcaaaagcagtagattctaacaatcagtcgaagtccccactggagaaatttatggtcaaactgtgtactcatcatcaaaagcaattcattcgtgttctgaacgacctgtacactgaatctcaaccaggcactgaggacctgcagccttctgattcgggagcaatggatgtatccacttgcaatgctggctgtgcccagctcagcaccaaacataaggaaaaagatgctctgtgtctcgatatgaagtcttctgcttctgtagatttgttcgtagactcgtcagactctcacagccctctacacttgacggaacagaccccgaagaagcctcctcctgagataaaccctgtagatggaagagagaatgccttgactgttgtccagaaagattcctctgaacttccaaccactaaatcgaattctattaatagcagttcagtggatagtttcactccgggatacctcactgcatctaattgttcctcagtgaacttccaccacatccctaaaatcttggaggggcagaccactggacaagagcaagacacaaatgtgaacatatgtgaggatggtaaagaccatatgcagagttcagctttagtagaaagtctaattacagtaaaaatggcagctgagaatagtgaggaaggcaatacctgtattattcctcaaagaaatttgttcaaagctttatcagaagaggcttggaactcagggtttatggggaactcatctagaactgctgacaaagagaatactttacagtgtccaaaaacacctttgcgccaggatttagaggcaaatgaacaagatgcaaggccaaagcaagagaaccatcttcactctctgggaagaaataaggtgggttaccatttacatcccagtgataagggccagtttgatcattccaaagatggttggttaggccccggccctatgccagctgtacacaaagcggcaaatggacactcaagaaccaagatgatatcaacctccatcaagacagctcggaaaagtaaaagggcatcagggctgaggataaatgattatgataaccagtgtgatgttgtttatatcagtcaaccaataacagaatgccactttgagaatcaaaaatcaatattatcttctcggaaaacagccagaaagagtactcgaggatactttttcaatggtgactgttgtgagctgccaactgttcgtacactggccagaaatttacactcccaggaaaaagcaagctgctcagcattggcatcagaggcagttttcactcctaagcagacccttacaattccagcccctagacatacagtagatgtgcagcttcccagagaagacaaccctgaagaacctagcaaggaaatcacctctcacgaggaaggaggtggagacgtttcacctcgaaaagaacctcaagagcctgaggtttgccccacaaagattaagccgaacctgagcagctcccctaggtcagaggaaacgacagcctccagcctggtgtggcctctccctgctcaccttcctgaagaggacctgccagaaggtggctccacagtctcagctcccacagcaagtgggatgtcttctcctgaaatagtcagtagagaagaaagtcctcagtgctcagaaaatcagagttccccaatgggcttggagccccccatgagtctgggaaaggctgaggacaaccaaagcatcagtgctgaggttgagtctggagacacccaggagctaaatgtcgacccactcttgaaggaaagcagcacttttactgatgaaaaccccagtgaaactgaggaaagtgaggcagcaggtggtataggaaaattagagggagaggacggtgatgtaaaatgcctgtcagaaaaagacacgtatgatacaagcattgactcactcgaagagaatttggacaagaagaaaaaaggtaaaaaattccctgaggcctctgataggtgcctaagaagtcaactttcggattcttcctctgctgacagatgcctaagaaatcagagttcagattcttcctcagcttgtcttgaaatcaaagttcctaaaaatcctagtgcaaaacgttcaaaaaaagaagggcaccctggtgggacaacacctaagggccttctacctgacagtttccacacggaaactctggaggacacagaaaagccaagtgtcaatgaacgcccctctgagaaagatgctgagcaggagggcgaaggcggggggatcatcaccaggcagactttgaaaaacatgctggacaaagaagtcaaggagttacgaggagagattttccccagcagggaccccataaccacagctggacagccactgcctggagagagattggaaatctatgttcagtctaaaatggatgagaagaatgctcatatcccctcagaaagtattgcttgtaagagggacccagaacaggcaaaagaagagccagggcatattcccacacagcatgtggaggaggctgtgaatgaggtagacaacgaaaacacccagcagaaagatgatgagagtgatgccccatgcagctctcttgggttgtcgagtagtggaagtggtgatgctgctagggcaccaaaatcggtgccaaggcctaaaagattgacctcttcaacctacaacctaagacacgctcattctctgggctccttggatgcttcaaaagtgacttcagaaaaggaagctgcacaagtaaaccccataatgccaaaggaaaatggagcttcagagagtggagaccccctagatgaggacgatgttgacaccgtggtagatgaacagccaaagtttatggaatggtgtgctgaggaggagaaccaagagctcatcgccaacttcaatgcccagtacatgaaagttcagaagggctggatccagttggagaaagaaggacagccaacaccaagagcaaggaacaaatcagataaactgaaagagatttggaaaagcaagaaaaggtcacggaaatgtaggagttcattggagagtcagaagtgttctcctgttcagatgctctttatgacaaactttaaattatctaatgtttgtaaatggttcttagagacaactgaaacccggtctctagtcattgtgaagaagctcaatactcgccttccaggagacgttccccctgtcaagcatcctcttcagaaatacgctccttccagcctatatcccagttcactacaggctgagcgcttgaaaaagcacttgaagaaatttcctggagctacccctgctaagaataattggaaaatgcagaagctctgggccaaatttcgagagaatcctgatcaagtggagccagaagatggcagtgatgtcagccccggccctaattctgaagacagcatagaggaagtcaaggaagatagaaacagtcatcctccagcaaacctgcccactccagccagtacccggattcttagaaaatattccaatattcgaggaaagctcagagcccagcaacgtttaatcaagaatgagaaaatggaatgcccagatgctctggctgtggaaagtaagccaagtcgtaagagcgtatgcatcaaccctctgatgtcccccaagcttgccctgcaagtggatgcagatgggtttcctgttaagcccaagagtactgaaggaatgaagggaaggaaggggaagcaggtgtctgaaatcttgcctaaagcagaagttcagagtaaacgcaagagaacagaaggcagcagccctccagatagtaagaacaaggggcctacggtgaaagccagcaaagaaaagcatgctgatggagccaccaaaacccctgctgccaagaggccagctgcaagggacagaagcagccaaccccccaaaaagacgtctttgaaagagaataaagtgaagatccctaaaaagtccgctgggaagagctgccctccctccaggaaagaaaaagagaatacaaacaaaaggccttcccagtctattgcctcggaaacactgacgaaacctgcaaaacagaagggggccggtgaatcctcttcaaggcctcagaaagccacgaataggaagcagagtagtggaaagactcgggccagaccctcaacgaaaaccccagagagcagtgcagctcagagaaagcgaaagctgaaggcaaagctggactgttcgcacagcaaacggaggcggctggatgcaaagtgattggaaagatggtagccaagagtaaaactgttctatagaagtaaccttttattttgcattaactaaatctgcttttataagcttatcaagcctttcaaatttacagttaatggagaacaccgtaatttgagatgtcagaaaatgcatctcagatggagaagggaacttgcagagtccttctctgaggctaagggaagttatatattatattctggttgttccttgggttttaaacttggaaccaagcagttttcgtttttaaaagtacagtgccttatttatcctttttgtttttaaatttacaaaagctaaaaagctgatctatgtgattaaaggcttgtattttatacttgatgcacaagcacttgtactgtagccgagaagaccaccatcatgcacataaaaggagcttttcagcagccaccctgcagcatctgcccacgaacagatgcccttctttgcaaaccccagcagtgaacttccctctctgtcttgtttgtttgtttagatgatgtttgaaagctaaaccaaatcattttatggtatgcagaggatttataattataaaagattactatttctgttaccccctttt

SEQ ID NO: 70179 - DNA, 213 bp, Homo sapiens
gaaaggagttattttaggagaaataaaagaaagggctagttttgaagcaggtaggtcatagataagagctctggaattcagctccttctagtttttattccaagttctccagtgctgggagtttaagatcacaggcattgcatcttatcctatgactcagtttcctcatctgcacattggaaataatgacagtatcaacctcatagtgttgtt

SEQ ID NO: 70180 - DNA, 612 bp, Homo sapiens
tttttaaacaaccagctcttatgggaattaatagaacaagaacttactcactcccctgatcctagagaggatatcaatctattcatgagtgacttgccccccatgacccaaacacctcccattaagcaccacctccaacactggggatcaaatttcgacatgagatttggaggggtcaaaaaaaccaaaccttatggggtatgtgtattttttctaccctttttttcttttttctttctttctttttttttttttgagacagagttttgctcttgttgcccaggcagaagtgcaacggcgtgatctcagctcactgcaacctcgacctcccaggttcaagcaattctgttgcctcagcctcccaagcagctgggatcacaaggatacgccaccatgcccagctaattttgtactttcagtagagacggggtttctccatgttggtcaggctggtcctgaactcctgacctcaggtgatccacccaccctggcctcccaaagtgctgggatgacaggtgtgagccaccacgcccagcctaccctttactttttaaaagtatcagtatatcactccccatcagtatgtagagaatttcttcattcctttgtcga

SEQ ID NO: 70181 - DNA, 597 bp, Homo sapiens
ctctttatcccttgggactccttcctgtaatttgaaagggggggctaatgttggtggcagttgttgctaaggatctctgcacagagttagggcttcactctcggcttcctggttagatggggccatgtgactagtcctagtcagtgagctgtgaccagaagtgatgtatgtaccctcgggaccagagcatttatgtgctggtacaagcctctccataatgacgggcaacacatgagatggtggctgctgcagccatctgggtctctagccaacccaaaatggggacataacacaagcaagaaataaacatttgttcttataaatcaccaagattttggggttctcagtggctgcaacataacctagactatcctgatacaggcttatcaccatgttctggatgtgtggtgaccaggatggtagccactactcacaagtggctatttaaatttaagttactttaaaaaataaaataaaaaattcagttcctcagttgtatgagttacatttcaaatgctcgacagtcacatgtacatcacttttcaaattatgtgaaattaaaactgaaaagcttgtgtgaaagtctagagagtatgg

SEQ ID NO: 70182 - DNA, 475 bp, Homo sapiens
caccatatttaggagggggctaaatatcaacataatattcctacttctgcatttcctatttctctctttgcattttaaattcaggggaagttatctcatttattaattgtaacatttaaatagtatacatttctgtcatttaaaagtggtactgacaatgtagttaaacctttattatcttttattggtttaataaataaaagtgcatgactaaaaacaggccacaaatatcaatgattttggggatttcgccctacaggaaaatcatacaatgcatttggaaaaaggtaattctgacttgtcctctacgaaatgctaaatttctgcacaaaagcttaaagcacaagtgtttacaggattcttggtgacaagaaaagtgatagtaaatgtgctttagcactaaaattcatgtatccatggaaacctgtgaagttctgtaagcacacacacacggcctgcggtatttattgaagag

SEQ ID NO: 70183 - DNA, 250 bp, Homo sapiens
ggtgctcaaagaggcgatgtgaccggcctagaaggccaaaacccagagctgcgcctgggagcaccccctcctcccctttctctagcatcagaagcagcccagatccaacaagatcagggccaatggaggcaggacttcacccaaggcagggaccaagatggattggttctgcagtgtcccgggactccgtgggctacagaaggctccaccttgaggacaggcttgctgagtgaacgcctgctggtgacag

SEQ ID NO: 70184 - DNA, 366 bp, Homo sapiens
  misc_feature (142)..(142): n is a, c, g, or t
  misc_feature (243)..(243): n is a, c, g, or t
aactcactaccatcagacctgtcccccttactttcctttttttttgtttactttttaaaatttttttgaaatagagtcttgctgtgtcacccaggctggagtgcagtggcatgatctcagctcactgcaacctccacctccngggttcaagcaattctcatgcctcagcctcccgagtagctgggattacagatgtctaccaccacgcccggctaatttttctatttttagtagagacagggnttcgccatgttggccaggctggtcttaaactcctggcttcaagtgatctgcccgcctcggcctcccaaagtgctgggattacaggtgtgagccaccacgccccagcctactttcttgattgtt

SEQ ID NO: 70185 - DNA, 1600 bp, Homo sapiens
  misc_feature (798)..(798): n is a, c, g, or t
  misc_feature (1086)..(1086): n is a, c, g, or t
ggccaagagggagaaggggcctcccccaacactcagaggtgaactcgaacaacagtggtgaagggaaattctcagcatgagcctgggaagctgaaggttgggggccggaacagcctgaagtcttatttactcacatgaggggctgtcacatgggaccctggctgggcctcttgcctgaaacatctccctgtggcttctccctgtgggcagggcttcttcacagtgtgtcactgggttgcacaggtgagcatctgaaaagtgagagaggcaggcacagaagtcaggtgcatcactttgaccacatcctgttcattcacctgccaggttcaagggaaggagaaaaatcgtccacctgtaaatgggggagcacacgtgggaccagaaatattgctgcatcctcaatgggaaaatgcttctgcaacacggttgagagttgccaatattatcttcattttgccatcaacctgccacgtttcagggaattttctacttgtttggattggcaattttccaccttctctttttctcaaatataggttgcagaattcgagtcacaaatagcgtgagggcaaacaacgcgggcacagtggacttcagagaagcattaatgaaactttaaatcgcacgtggcctcaggatatcccacacagtgtctgtggcaatatgcaaatttgtggtatatgaaattaggagtgtcttatttcaaactccaaattggccttcaggaaattgcttctgaagttactgtattagtttgctagggctgctatagcaaaataaaacaactaggtgacctgnacagcagaaatttattttcttacaattctgggggctggaagtccaagatcaaggtgttagcagggtcaggtgttagcagggttagatcaaggtgttagaaggccctctcctgggcttctggatggcctcttcctctggtgtccacacatcgtcttccatctttgcatgtttctgtcttaatctcctcttcttataaggataccagtcgtactggattagaggccactctaatgacctcctttaccttaattaactctttaaagaccctgtttccaaatatggttacantatgagttattggggtggggggctttagaacttgaatatacaaatttgggaagacaaaattagctgcaataatcactgctatagaaagtcttatgacagtgaccttgtaggctactccggagtcacattttcatctgtcttctagacattttgtgtctgataatcttcctttcctcaatgcttcctaatcctgatttttctgtgtctgtttagaatatctcatcctctcaaggcatcaggacaaaaatgaataaataaaaaatagtaactaaacaaaaatctccagtgttaactataattttctgtctttttttttttttttgtatcctaagtcctcatgattattcctttgaagtaacttccatttttgtcccttcttacttctccatctcacttctggcttttctcatggtttttgtcttttatcagattgatacagtgtgttacattaatttgtttaaaacattaaaccaaccctgcatccttaggataaatcctactttttaatgtgctt

SEQ ID NO: 70186 - DNA, 306 bp, Homo sapiens
tgcctgtaatcccgggtactcgggaggctaaggccagaggattgcttgaaccagggaggcggaggttgcagtaagctgagattgtgccactgcactctagcctgagcagcagagtgaggctccatcagcaaaaaaaaaaaaaaaaaaaaagatcagagtgcatcacacataattaaggtagcttatgttttgtgaaactttgtgagtacgggttgtcatttttaatgtagccctaaatgttttttagggaagaaaaagttggcttttaataagtattcagtgagaatgaatttgaagggtgtggag

SEQ ID NO: 70187 - DNA, 374 bp, Homo sapiens
cagcgtaaagtaaccctgaaagaagatgctttgcctgaatcaagtttagcgtcagagcagccataatcctctgccgagattcttcagaactatgcagttggaggggtagaagccaggctcattctttcagggatggaatcaaatggtaattaaaagcaaatgattgccaaggtcgttagagatgccagagcctcaggatcagactcgtaagcaaatggaattggtctttctccaaaatcctgcactgatttaaccacaggatcgtaaatcaaaggggctgtctgaaaaccagacagccttccccaggctgtgcatctgaaatactcgatcccagcacatgtacagcaggggagctacacacgggagggagaaaa

SEQ ID NO: 70188 - DNA, 466 bp, Homo sapiens
aaacaatatttcctggcaattttaaagttagactacagtatgtttttgtatttgtagtataatatttagccccttaaccccttacaggcactcgaatattagttcttcccctccaccctggaagagtttccctttgtccacttgagttgaatatatgtgccgtactaaaggagaaaaactaccatctacccagttattgaagccaagatcttgaagttacaccagactctctaatttctcattttctgcatccgtcgatttctggagttcctcagtgatgcacactgggggtctcagggatgacagtttttcatgaccctaggttgaaactgggagtcatagaagacgaaaaaacgagaattggattgggagttgactctgttgcccaggctggagtacggtggttgcagtgagccgagatcgcgccacttcactccagcctggggacaagagcgagactctgtct

SEQ ID NO: 70189 - DNA, 312 bp, Homo sapiens
tttgcattcaaataatgcatcttatcggtcacttggaactcctttttttcaaataaaaaggaaagaataatttagtggtttgccgtcctgatcatgtcttagactcatctgggagacttaaaataggctgatacttggaatctaccctctgagaatctgatccaactggtttgggctggggtcttgttgtcagtgttatttttaaagcccagtgatttttaaatatataatcagtagaggactgcctatctaatttgaaatagtaaataaagaagagctaaagaaatgaatgcatctcatcattgtgtctca

SEQ ID NO: 70190 - DNA, 110 bp, Homo sapiens
tagaatactattcttccagaagtctattagaaaatcagaaaagcaaatcgtaccttcaacaattgagaaaacaaaaatgctagttaaaaaaaaaaaagtagagggaagga

SEQ ID NO: 70191 - DNA, 319 bp, Homo sapiens
tgaatccttgtctgtacagacacagagaaaagtgcatggatggctgcaaatctggatcaggcatatggaagatgaggcatagccacaaatgctgtgcaccactaagtagaaaatttgctgagaaccaagatgcaatgaggatgggtgctataagaaattagaagaagggggagatcagtgaaaggatcagggaaaccttcacagagaaaatggtatttgcaggatggatatgattttaacaagccagtctaaaatggaaagtaacagaaggctaaaagactgcatgaacatatgtaataaatatgttgagatttggcca

SEQ ID NO: 70192 - DNA, 355 bp, Homo sapiens
ggagaggccctagttctgctcagaagattcaagtccatattcagggaggggtcactgtccacacccccaggtccaagtgagggatggtaggaggagggaggcgaggctggggggccccggctcaggacaggatgggggacaagcaagcaaagcaaaacatgactccacatcagcagaacaaagacaaacacaagtgttactatgaaaatccgcatacataaatattaaataatagaacctaataaaagacagatcccaaacatgaaaggttattttgttactgtaacttactaaactgacttaatctaataaaaatactatttcttcatagtagtcaggtaacaataaaaaacat

SEQ ID NO: 70193 - DNA, 339 bp, Homo sapiens
tcttaaatcttttttaaagtagtactagctcatggaggatttggaaacttacgtagcacaaagaaaggagagagaaaagagtgtgtatgtgtgtttactcagtaaatatttaacaaatgagtgaatcacaattgaattaataattaattcaattaatattagtaatattctttcagactctgcaaacgcatataatcctattttttaaaagagaaatggtataatactgtacgtcatgttttgtagcttgctcttttcacttcagggtttttctcaaacatttccatatgataaacatgatctctattatcatgctagtgttttcatagttttttaatt

SEQ ID NO: 70194 - DNA, 3486 bp, Homo sapiens
  misc_feature (2968)..(2968): n is a, c, g, or t
gttcaagacactctctctgagtagtgctttaccattttgtggagctttcacttacattatttcacttaccatggcaatcaaggtgtgtcaactttatatgtaaggaatctgttcatccgatacactattcagtcttgttccaagactgacttttatttcagaataagattctgtcctgttctttttgtttcttcatgacatacattatcagtttttctgtttattgattgttcatttattcattcataatcttattgaatacctcctctgtgctacccataatacacacttctagggatatagtggtggacaaggctctggtttttatgagttttatgtcatgttcagttgcattccttggtgatttttgtgtcgtagagagcagatatgaaggaagaaatcaataaaataagagtacagcaaaattaaaagagaaaatgttatatatcagttgaaggatttaaatacatgaatttatggagcaaatacctgtacataaaaaaactttgaaaggtaatagtagaaaagtagtatggtgaagtacaaaatagagtgtaactcaattatgtcagccacaggtgaattactcagtcctttaacaaagatttattaagcctataatcctaggattattagtaataaaatgagtgtggggagaaggatgggctcataagatcaattcttgcacctcccatgaccatagctgggtgctccacctgctgtattcctaagtaaaggcaatttgcaggccattctaatttccttttaagtaccccacaaatccttcatgaggtggattgctgccaatagcattctataacatttgggttgagtggaagatgtcttagtagtattgctttgaataatttcatacctataattaaaggcaagaggctatggagcttttaagaaactaatgttacacaccgcatgaggtcattgaaacatgagcccaggagccctatagataagtggcattcagtatatgccacttaaataccaaagcaatgaagtgcattggtcttacttaatacagtgtgggcagaggccttaaaaataaaagaggaactaattttcttatttcaaaatgaaatgcaatgggacaattttactcttaaaaaactgcatactgggtgtcagcatgaacatcatactttctataatatcattgacaactgcctatcaacaccaagcagctatctctattctttgctgggtaagcaacaaatgaatgtaataaatggttatgttacaggtttatttcaatgtagtttaagccataattttggagatacagtggaaataagtgtattaaaatgtgagataaaatatgtcttacaaaactatttagtaattggacaactgtctgaagaccttgagtgtcatttgatgaatcagacacttcaacaattgatttctggggttgggatgctgaggattgagcgtgacattttcctcctatttatttctgttttcttaggtcagggaacacgtttcagaaccatgtctttagaataatagacttaggattgggtcacaaatttgaagttggaatggaaaaatgttatttgttcattcatcattaattcatttaagaagcacttgctgatgctttgttaagtagtgttccaggcactgcattagaccctgaggacacagtggtgagcaagactttcagttatggagagagtgctctcagcactccttggcagtgtgtacctatgggatagatctgtgatctttctgaaagatggggcagtggctgttaatgacatcttgtttgggagataatagtaagtccatgatgttgatagagggttgaatcaatctttcctggcactgtcacctggaagcccagacttagtaatgtgtaataactcattcaggcttcaaacaggaggtttccctgcccggtgtaacatacagtgagaatggatctgagaaaatccagatgctgcctgagtaaagtgctgaaaatgccaaacagggcccaaaggaccttgcatgcacccttagaaataaggctttagaaccagagcagacacagaggttggagaatctactttccacagaagtacttgtaggagctctccctaggaagacctccccactccacactttattagcaaattcctgacatttcacttttagaattttactcagactgaagttgaaggatgttagaatgcaaatgcacataattcagagcagtaaccccatagcatgaatgaggttttagattcttcctgaaagtcatatgggtagagggagcaatgcagactcgtagggcccttagtacatgatcagggttggcaggttttgtaaggaaggctttttttttttatctgagctggatagtcaagggcaggaaaccaggtttcgcctattccactgttgtgtttggcatgaacacagtcttactggcctgtgagagagttgtggttttctaaggcagcttcaccttagaaatggttatctttgatccaagatctatttatgtctatactgttctatttatgtctagactgttgcttatgacacctccttgctgcaaatcattgacttgctgtgatgtgactaatttatgttttttcttagtttgatttgaaatttcctaactggaaaaaaaaagtttgtggaggaggcagggaaggaaaaataaaagaaaaacttgctaattttctttgattggaaaaatatatttcttctagatgttctaagaatgatggcataatttagtactttttattgataatttggcagaaagcttaggatgttcataggtttcccaaaatatcttctgaaagataactaataactggtacttaatccagcatttaccatgtacccgacattgtgccaaaactttacattattaaacccatttcacacagggagaagctgaggcttaaggttattattaagtaatctgcctcaggtcacatagctagtaaatgttggagtgaangttcaaacccaggttttctgatattcaacccaccctcttgtcaataactctataggatgttagtaagatttagagtgaaatgagtcctatggtcagacaggcctggaaaacactgaggtaagagtgagtttaacaggtcttctcctaatcctctactgtgcatgagaatctttaagaagaagaatgtaatatgcagcattctccaaactgatttcaccaaggaacccctttcttcatgaagctcttgccactgtactgtgccagaagatctgttttagaaaatgcttccttgggacctgtttccttcgaattaaagatgttgctgaccatttggagttatgttttatcaccagataaacagttttcacccaacaaattatctactaaaggccaaaaccttttacagaaatctcttctttatatctatgtttccctttcgtctattctatcttttcctttcatctattttctacacccttctattaactgtatcataaaataaaattcacttgagccct

SEQ ID NO: 70195 - DNA, 606 bp, Homo sapiens
gtcgtggtttttgaagtttagtggtctctcctatccctggccaaggaagtatgcaaattgtattgtggtttttgaagtttaggtgatctcttccttctatccctagccaaggaagttcatcctgactccccaacaagcatatcaaaaggagtgtttcgtcacctttttcctcttaccctttacatccttttagcaataaagtgttcagaacaaactggttttcctttactgtgctttgcaaaacttattcatgttttattgggtgactttgtatttacactttcctcagatagtctgttgtcagatgactttgaccaatgattgggaggaaccaaatacagaggattttatcctatgcctaatctatattgtctacagagtaaatcaggtatgaatttgtgaacagtaatgaaacaattttccaactaatcagaagaattgtttgttaagtaaccttaattactcagtttttggtgaattgtttgcggcttaacttgtaaataatttcttattctttttttaaatgtatgaaatatttctagttattttgttcaatgtgactgataaaagtttatattggaatagctgtgaaatggaaaaagtcta

SEQ ID NO: 70196 - DNA, 1385 bp, Homo sapiens
ggcagcccttttctagatggagaaaacagaacctgaagacacccgtttccctaaactgctctcgctcatgtttctacaaggcctggagctgataggaaaaacctcccttctttcccaaatggtccccagctgccccgttcactgaaggccctgcagtcaggaacggtcaggacttcacacccagttgttgtgggtgtttggccgacacgacacttcctcttgtgtgattcatggacccgcagcattgcgtcacctgggagcttttggtattgaagactctcagggctcacccggaaggacctgctgggccagaatctacattttaacaagatgcccagaaactcctggagggcagaggcatgcctgccatcttcatcattgcattaccaccacccaacactatcgggggacctgccctgataatcagtctacaggtgtatccagcagctccagagagacagcgaccagcgagaaggggccatgatgatggaggtggttttgtcaaaacgaaaatggggatatgtagggaaaagaaagagagatcagactgttactgtgtctacatagaaagggaagacataagagactccattttgaaaaagacctgtactttaaacaattgctttgctgagatgttgttaatctgtagctttgccccagccactttgccccaaccactttgacccaatctggagctcataaaaacatgtgttgtatgaaatcaaggtttaaggcatgtagggctgtgcaggacgtgccttgttaaccaaatgtttgcaagcagtatacttggtaaaagtcatcaccattctctcatctcaataaaccaggggcacaatgcactgtggaaagccgcagggacctctgcccttgaaagctgggtattgtccaaagtttctccccatgtgatagtctgaaatatggcctcgtgggatgagaaagacctgacggtcccccagcgcgacacccataaaagatctgtgctgaggtggattagtcaaagaggaaagacttgcagttgagatagaggaaggccactgtctcctgactgcccctgggaactgaatgtctcggtataaaacacgattgtacatttgttcagttctgagatgggagaaaaaccgccctatggtgggaggcgagacatgtttacagcaatgctgccttgttatcctttactccactgagatgtctgggtggagagaaacataaatctggcttacatgcacgtccagtcatagtaccttcccttgaacttcattatgtcatagattctattgctcacgtttgttgctgaccttctccttattatcaccctgccctcctactacattcctttttgctgaaataatgaagataacaatcaataaaaactgagggaattc

SEQ ID NO: 70197 - DNA, 1336 bp, Homo sapiens
tgtgtctgttattccctggcagttctacaaggcctggagctgataggaaaaacctcccttctttcccaaatggtccccagctgccccgttcactgaaggccctgcagtcaggaacggtcaggacttcacacccagttgttgtgggtgtttggccgacacgacacttcctcttgtgtgattcatggacccgcagcattgcgtcacctgggagcttttggtattgaagactctcagggctcacccggaaggacctgctgggccagaatctacattttaacaagatgcccagaaactcctggagggcagaggcatgcctgccatcttcatcattgcattaccaccacccaacactatcgggggacctgccctgataatcagtctacaggtgtatccagcagctccagagagacagcgaccagcgagaaggggccatgatgatggaggtggttttgtcaaaacgaaaatggggatatgtagggaaaagaaagagagatcagactgttactgtgtctacatagaaagggaagacataagagactccattttgaaaaagacctgtactttaaacaattgctttgctgagatgttgttaatctgtagctttgccccagccactttgccccaaccactttgacccaatctggagctcataaaaacatgtgttgtatgaaatcaaggtttaaggcatgtagggctgtgcaggacgtgccttgttaaccaaatgtttgcaagcagtatacttggtaaaagtcatcaccattctctcatctcaataaaccaggggcacaatgcactgtggaaagccgcagggacctctgcccttgaaagctgggtattgtccaaagtttctccccatgtgatagtctgaaatatggcctcgtgggatgagaaagacctgacggtcccccagcgcgacacccataaaagatctgtgctgaggtggattagtcaaagaggaaagacttgcagttgagatagaggaaggccactgtctcctgactgcccctgggaactgaatgtctcggtataaaacacgattgtacatttgttcagttctgagatgggagaaaaaccgccctatggtgggaggcgagacatgtttacagcaatgctgccttgttatcctttactccactgagatgtctgggtggagagaaacataaatctggcttacatgcacgtccagtcatagtaccttcccttgaacttcattatgtcatagattctattgctcacgtttgttgctgaccttctccttattatcaccctgccctcctactacattcctttttgctgaaataatgaagataacaatcaataaaaactgagggaattc

SEQ ID NO: 70198 - DNA, 990 bp, Homo sapiens
aaccttggcttcatcaagaatatccagcaggtgtttggagataagaagaagttctggttaatacctattggttccagccctggtgatggacactccttccctatgaggtctatgaatgagtcacagaacccactgctagcaaatgaagaaacctgggaagacaacgaggatgacaaccaagattatccagaaggctcatcatctcttgctgtggaaacggaaacatagcagttttcacatttcctgcatctctcagacaggactcaccatctctgcctcccatgaggcttacagagttcaatgttggaaatcattgtaatcttcaaaataagtcaccgtgttggattgaaagcttcaaaatttgaaagaattccatcaaatacttgctgtgtaaatgtttctggactttatgttatttaatttactgactgaaatccaatttggaatttggtagcagttaattcaagccaattttttttgtttcttcatttcccctcccccaatccatgaaagcctaaatgtaaaatatatcttttcattcatcttatcaggtaaaaggaaattcagaaaatttccttagagtctttaattcccccacaaagattattaatcacatatatagggcctttttggtgttgaagggaatcaaactacatttgctgcttgtgtgcgtgtgcatttgtgaacacgtacagcatatctatacaaaattctgctatagtgtgaaaatcagggctaaaaacctgaagcctttgtttaattatgcttttcctctaaatagcaacttaaatatttgctagactttgaatcatcgctatatcaagtatctaaaatttgggagggtgaatcagtacactgtgaccaaggtcctcaaattggaatttgaacaacaatgtaaaacctgttctgtcacaaatgttcctgaaagcaccacagctactcaagaagatcaaattcaggacataaactttattgaacataataaccagt

SEQ ID NO: 70199 - DNA, 210 bp, Homo sapiens
gatgagcccagtggactttggctggggcagcctggctggccccagttgtttctaggttctcagaggagaccagcctggagccctctgctgggtgctggcacccacttgtccctgggccaagcagatggtgggtatggactcacatggacgtgtgggctccatgggtgcaggcctcccaccagcaggccagggagagggggaggttgaaat

SEQ ID NO: 70200 - DNA, 2174 bp, Homo sapiens
gcgccttgggccgcctgtcgcctgtgcgcctgcgcgcggcgccgaggggacggggtccgactcagaaatggcggcctccatgttctacggcaggctagtggccgtggccacccttcggaaccaccggcctcggacggcccagcgggctgctgctcaggttctgggaagttctggattgtttaataaccatggactccaagtacagcagcaacagcaaaggaatctctcactacatgaatacatgagtatggaattattgcaagaagctggtgtctccgttcccaaaggatatgtggcaaagtcaccagatgaagcttatgcaattgccaaaaaattaggttcaaaagatgtcgtgataaaggcacaggttttagctggtggtagaggaaaaggaacatttgaaagtggcctcaaaggaggagtgaagatagttttctctccagaagaagcaaaagctgtttcttcacaaatgattgggaaaaaattgtttaccaagcaaacgggagaaaagggcagaatatgcaatcaagtattggtctgtgagcgaaaatatcccaggagagaatactactttgcaataacaatggaaaggtcatttcaaggtcctgtattaataggaagttcacatggtggtgtcaacattgaagatgttgctgctgagactcctgaagcaataattaaagaacctattgatattgaagaaggcatcaaaaaggaacaagctctccagcttgcacagaagatgggatttccacctaatattgtggaatcagcagcagaaaacatggtcaagctttacagcctttttctgaaatacgatgcaaccatgatagaaataaatccaatggtggaagattcagatggagctgtattgtgtatggatgcaaagatcaattttgactctaattcagcctatcgccaaaagaaaatctttgatctacaggactggacccaggaagatgaaagggacaaagatgctgctaaggcaaatctcaactacattggcctcgatggaaatataggctgcctagtaaatggtgctggtttggctatggccacaatggatataataaaacttcatggagggactccagccaacttccttgatgttggtggtggtgctacagtccatcaagtaacagaagcatttaagcttatcacttcagataaaaaggtactggctattctggtcaacatttttggaggaatcatgcgctgtgatgttattgcacagggtatagtcatggcagtaaaagacttggaaattaaaatacctgttgtggtacggttacaaggtacacgagtcgatgatgctaaggcactgatagcggacagtggacttaaaatacttgcttgtgatgacttggatgaagctgctagaatggttgtaaagctctctgaaatagtgaccttagcgaagcaagcacatgtggatgtgaaatttcagttgccaatatgatctgaaaacccagtggatggctgaaggtgttaaatgtgctataatcattaagaatactgtgttctgtgttattgttctttttctttttagtgtgtggagattgtaattgccatctaggcacacaaacatttaaaaggatttggactgcatttaattgtaccattcagaatggactgtttgtacgaagcatgtataatgcagttatcttctttctttcgtcgcagccagtcttttttgcttctcctacaaaacgtaacttgcaatttgccagtttattattgttggatacaaagttcttcattgataagagtcctataaataagataaatacgaagataaagctttattctttagtgttaaaatacagtatatctaataactagcctcattagtagagcagtatattaaaacaatgttttatgtaaaaagtgtttatcttcagcaccaaatacatgataaatgtatcaatcactatttataaacagagctttcaaacactcctcagaatattcttctaagtattttgatgaagtaactttgtaattatttgaacattgttttaatcattaggaaacactgattaactgcaagtcttcatgattctgtcatattaagaaacacctgtaggtttgcttcaaataaaggcatatataccaaggacttacagacaaaattaagaatgtcaatttaagttaataaaaatctcccaatatga

SEQ ID NO: 70201 - DNA, 659 bp, Homo sapiens
gatgtaacagaaggagaatcatctgctttggttcatcctggatcattgagccatgatgttgattgttggatgtcaagagtagataatgttgatgactaatggaagagtagtttatacagcgtggatacgctgggcgaagagatggttcacattccacttggagcaggatggtgcaagatttcatcacacttctcagaacaacacacagtttaaaacttaatgacttttttatttctggaatttctcatttaaaatttttggaccacagttgactgcaggttgtaaagctctctgaaatagtgaccttagcgaagcaagcacatgtggatgtgaaatttcagttgccaatatgatctgaaaacccagtggatggctgaaggagttgattgaccaccagttgagagcctgcagttcatcagttgagagtgacaattccagagtgaccagctgagcatgtaatatgaaggaaactggagaaaagcctcaactactttatgattattcctatgatttgttcttaaagcagagaagcatctttttatttgtttttgatatccttgtttgatgaaaccagcatcgttttagaaaaaatatctttgttttagtaaaaatgacacatactcattgaaaaaataaaccccttcaaaactggaatgata

SEQ ID NO: 70202 - DNA, 495 bp, Homo sapiens
cagcctcctgaatagctgggaccacaggtgttctgggactcagtgttagaagctgtctgtctgtaagaatcttgctgtctctgcctcatgaaaacaattgcagtgatgagaaccagttactaatggcatacatcacacatttcagcccatcttctgggtgagcaggtggttgagctgtccctcgcctttgaatcaggaagttagcatcaaaaatgaagatgaaattcccatgtgaaagacacccttcctatactagaaggaaaagcaacatctgtatccttaaggacgagaagccaaggctgaaagacttctttacagaccttgttaagataactcatattgttgaagtctccccacataatttagttgcttcttcacaacttagtattcttttgtccaatgcagtatataagtaactgactgtagctggttttttgggtcttattttccttatgagggctccccaggccacataaaacttgtattaaatgaatt

SEQ ID NO: 70203 - DNA, 377 bp, Homo sapiens
gatgcccatgaaggggaaaaataagcaggcaaaaaccaaaaaacagaaaccaactctcaaaactccagcagaaggcaatgaagctgttaatattttggagttgattgaccaccagttgagagcctgcagttcatcagttgagagtgacaattccagagtgaccagctgagcatgtaatatgaaggaaactggagaaaagcctcaactactttatgattattcctatgatttgttcttaaagcagagaagcatctttttatttgtttttgatatccttgtttgatgaaaccagcatcgttttagaaaaaatatctttgttttagtaaaaatgacacatactcattgaaaaaataaaccccttcaaaactggaatgata

SEQ ID NO: 70204 - DNA, 369 bp, Homo sapiens
ctggcttgttctgttttgcttctgagacatactaagtaccgatcggtagaaagtgaaagcaaatgatggcaaggacacctcataaattaaagatgaaattcccatgtgaaagacacccttcctatactagaaggaaaagcaacatctgtatccttaaggacgagaagccaaggctgaaagacttctttacagaccttgttaagataactcatattgttgaagtctccccacataatttagttgcttcttcacaacttagtattcttttgtccaatgcagtatataagtaactgactgtagctggttttttgggtcttattttccttatgagggctccccaggccacataaaacttgtattaaatgaatt

SEQ ID NO: 70205 - DNA, 2720 bp, Homo sapiens
gcgccttgggccgcctgtcgcctgtgcgcctgcgcgcggcgccgaggggacggggtccgactcagaaatggcggcctccatgttctacggcaggctagtggccgtggccacccttcggaaccaccggcctcggacggcccagcgggctgctgctcaggttctgggaagttctggattgtttaataaccatggactccaagtacagcagcaacagcaaaggaatctctcactacatgaatacatgagtatggaattattgcaagaagctggtgtctccgttcccaaaggatatgtggcaaagtcaccagatgaagcttatgcaattgccaaaaaattaggttcaaaagatgtcgtgataaaggcacaggttttagctggtggtagaggaaaaggaacatttgaaagtggcctcaaaggaggagtgaagatagttttctctccagaagaagcaaaagctgtttcttcacaaatgattgggaaaaaattgtttaccaagcaaacgggagaaaagggcagaatatgcaatcaagtattggtctgtgagcgaaaatatcccaggagagaatactactttgcaataacaatggaaaggtcatttcaaggtcctgtattaataggaagttcacatggtggtgtcaacattgaagatgttgctgctgagactcctgaagcaataattaaagaacctattgatattgaagaaggcatcaaaaaggaacaagctctccagcttgcacagaagatgggatttccacctaatattgtggaatcagcagcagaaaacatggtcaagctttacagcctttttctgaaatacgatgcaaccatgatagaaataaatccaatggtggaagattcagatggagctgtattgtgtatggatgcaaagatcaattttgactctaattcagcctatcgccaaaagaaaatctttgatctacaggactggacccaggaagatgaaagggacaaagatgctgctaaggcaaatctcaactacattggcctcgatggaaatataggctgcctagtaaatggtgctggtttggctatggccacaatggatataataaaacttcatggagggactccagccaacttccttgatgttggtggtggtgctacagtccatcaagtaacagaagcatttaagcttatcacttcagataaaaaggtactggctattctggtcaacatttttggaggaatcatgcgctgtgatgttattgcacagggtatagtcatggcagtaaaagacttggaaattaaaatacctgttgtggtacggttacaaggtacacgagtcgatgatgctaaggcactgatagcggacagtggacttaaaatacttgcttgtgatgacttggatgaagctgctagaatggttgtaaagctctctgaaatagtgaccttagcgaagcaagcacatgtggatgtgaaatttcagttgccaatatgatctgaaaacccagtggatggctgaaggtgttaaatgtgctataatcattaagaatactgtgttctgtgttattgttctttttctttttagtgtgtggagattgtaattgccatctaggcacacaaacatttaaaaggatttggactgcatttaattgtaccattcagaatggactgtttgtacgaagcatgtataatgcagttatcttctttctttcgtcgcagccagtcttttttgcttctcctacaaaacgtaacttgcaatttgccagtttattattgttggatacaaagttcttcattgataagagtcctataaataagataaatacgaagataaagctttattctttagtgttaaaatacagtatatctaataactagcctcattagtagagcagtatattaaaacaatgttttatgtaaaaagtgtttatcttcagcaccaaatacatgataaatgtatcaatcactatttataaacagagctttcaaacactcctcagaatattcttctaagtattttgatgaagtaactttgtaattatttgaacattgttttaatcattaggaaacactgattaactgcaagtcttcatgattctgtcatattaagaaacacctgtaggtttgcttcaaataaaggcatatataccaaggacttacagacaaaattaagaatgtcaatttaagttaataaaaatctcccaatatgaaaaaaaaaaaaaaaaaaaaaaaaaaaaaaaaaaaaaaaaaaaaaaaaaaaaaaaaaaaaaaaaaaaaaaaaagaaaaaaaaaaaaaaaaacaaaacaaaaaaaagagaaggagcggcgcgagcacacataaacaaactaccaaacgcggggagacaaacatagacacatccacacaagcagcgtctataaatacaatacagaggggcatcagcaaggagacggtcgtcaatcatcgagagagacgagggaggagagcgacagaacactcggagatgtcgggagagggccgagccgacaaaaacacagcagtcgacataggcaaagggtctagagtaataatagaagaaaaaaccacgaaacactatttatctttatcaggtgagaaaagaaaaagaattaatagtcagaggagacttaattaatcagaaaaaattataatgaagtacttttgatgacggtgtattacataaaattattgtatgtgggagtttaagatagtggagaacacaataaactagtaatagttgtttaataaaaaaaaagag

SEQ ID NO: 70206 - DNA, 2056 bp, Homo sapiens
  misc_feature (16)..(16): n is a, c, g, or t
aatcaaagcgagagcnctcggcctctccagctgtccgcggttctgggaagttctggattgtttaataaccatggactccaagtacagcagcaacagcaaaggaatctctcactacatgaatacatgagtatggaattattgcaagaagctggtgtctccgttcccaaaggatatgtggcaaagtcaccagatgaagcttatgcaattgccaaaaaattaggttcaaaagatgtcgtgataaaggcacaggttttagctggtggtagaggaaaaggaacatttgaaagtggcctcaaaggaggagtgaagatagttttctctccagaagaagcaaaagctgtttcttcacaaatgattgggaaaaaattgtttaccaagcaaacgggagaaaagggcagaatatgcaatcaagtattggtctgtgagcgaaaatatcccaggagagaatactactttgcaataacaatggaaaggtcatttcaaggtcctgtattaataggaagttcacatggtggtgtcaacattgaagatgttgctgctgagactcctgaagcaataattaaagaacctattgatattgaagaaggcatcaaaaaggaacaagctctccagcttgcacagaagatgggatttccacctaatattgtggaatcagcagcagaaaacatggtcaagctttacagcctttttctgaaatacgatgcaaccatgatagaaataaatccaatggtggaagattcagatggagctgtattgtgtatggatgcaaagatcaattttgactctaattcagcctatcgccaaaagaaaatctttgatctacaggactggacccaggaagatgaaagggacaaagatgctgctaaggcaaatctcaactacattggcctcgatggaaatataggctgcctagtaaatggtgctggtttggctatggccacaatggatataataaaacttcatggagggactccagccaacttccttgatgttggtggtggtgctacagtccatcaagtaacagaagcatttaagcttatcacttcagataaaaaggtactggctattctggtcaacatttttggaggaatcatgcgctgtgatgttattgcacagggtatagtcatggcagtaaaagacttggaaattaaaatacctgttgtggtacggttacaaggtacacgagtcgatgatgctaaggcactgatagcggacagtggacttaaaatacttgcttgtgatgacttggatgaagctgctagaatggttgtaaagctctctgaaatagtgaccttagcgaagcaagcacatgtggatgtgaaatttcagttgccaatatgatctgaaaacccagtggatggctgaaggtgttaaatgtgctataatcattaagaatactgtgttctgtgttattgttctttttctttttagtgtgtggagattgtaattgccatctaggcacacaaacatttaaaaggatttggactgcatttaattgtaccattcagaatggactgtttgtacgaagcatgtataatgcagttatcttctttctttcgtcgcagccagtcttttttgcttctcctacaaaacgtaacttgcaatttgccagtttattattgttggatacaaagttcttcattgataagagtcctataaataagataaatacgaagataaagctttattctttagtgttaaaatacagtatatctaataactagcctcattagtagagcagtatattaaaacaatgttttatgtaaaaagtgtttatcttcagcaccaaatacatgataaatgtatcaatcactatttataaacagagctttcaaacactcctcagaatattcttctaagtattttgatgaagtaactttgtaattatttgaacattgttttaatcattaggaaacactgattaactgcaagtcttcatgattctgtcatattaagaaacacctgtaggtttgcttcaaataaaggcatatataccaaggacttacagacaaaattaagaatgtcaatttaagttaataaaaatctcccaatatga

SEQ ID NO: 70207 - DNA, 2271 bp, Homo sapiens
gcgccttgggccgcctgtcgcctgtgcgcctgcgcgcggcgccgaggggacggggtccgactcagaaatggcggcctccatgttctacggcaggctagtggccgtggccacccttcggaaccaccggcctcggacggcccagcgggctgctgctcaggttctgggaagttctggattgtttaataaccatggactccaagtacagcagcaacagcaaaggaatctctcactacatgaatacatgagtatggaattattgcaagaagctggtgtctccgttcccaaaggatatgtggcaaagtcaccagatgaagcttatgcaattgccaaaaaattaggtacagaagaaagaaataatatgtgcaggataaactgtaactatgagtatttctggcaagttctctgggaccagaactcacaagtaataagaagcaggttcaaaagatgtcgtgataaaggcacaggttttagctggtggtagaggaaaaggaacatttgaaagtggcctcaaaggaggagtgaagatagttttctctccagaagaagcaaaagctgtttcttcacaaatgattgggaaaaaattgtttaccaagcaaacgggagaaaagggcagaatatgcaatcaagtattggtctgtgagcgaaaatatcccaggagagaatactactttgcaataacaatggaaaggtcatttcaaggtcctgtattaataggaagttcacatggtggtgtcaacattgaagatgttgctgctgagactcctgaagcaataattaaagaacctattgatattgaagaaggcatcaaaaaggaacaagctctccagcttgcacagaagatgggatttccacctaatattgtggaatcagcagcagaaaacatggtcaagctttacagcctttttctgaaatacgatgcaaccatgatagaaataaatccaatggtggaagattcagatggagctgtattgtgtatggatgcaaagatcaattttgactctaattcagcctatcgccaaaagaaaatctttgatctacaggactggacccaggaagatgaaagggacaaagatgctgctaaggcaaatctcaactacattggcctcgatggaaatataggctgcctagtaaatggtgctggtttggctatggccacaatggatataataaaacttcatggagggactccagccaacttccttgatgttggtggtggtgctacagtccatcaagtaacagaagcatttaagcttatcacttcagataaaaaggtactggctattctggtcaacatttttggaggaatcatgcgctgtgatgttattgcacagggtatagtcatggcagtaaaagacttggaaattaaaatacctgttgtggtacggttacaaggtacacgagtcgatgatgctaaggcactgatagcggacagtggacttaaaatacttgcttgtgatgacttggatgaagctgctagaatggttgtaaagctctctgaaatagtgaccttagcgaagcaagcacatgtggatgtgaaatttcagttgccaatatgatctgaaaacccagtggatggctgaaggtgttaaatgtgctataatcattaagaatactgtgttctgtgttattgttctttttctttttagtgtgtggagattgtaattgccatctaggcacacaaacatttaaaaggatttggactgcatttaattgtaccattcagaatggactgtttgtacgaagcatgtataatgcagttatcttctttctttcgtcgcagccagtcttttttgcttctcctacaaaacgtaacttgcaatttgccagtttattattgttggatacaaagttcttcattgataagagtcctataaataagataaatacgaagataaagctttattctttagtgttaaaatacagtatatctaataactagcctcattagtagagcagtatattaaaacaatgttttatgtaaaaagtgtttatcttcagcaccaaatacatgataaatgtatcaatcactatttataaacagagctttcaaacactcctcagaatattcttctaagtattttgatgaagtaactttgtaattatttgaacattgttttaatcattaggaaacactgattaactgcaagtcttcatgattctgtcatattaagaaacacctgtaggtttgcttcaaataaaggcatatataccaaggacttacagacaaaattaagaatgtcaatttaagttaataaaaatctcccaatatga

SEQ ID NO: 70208 - DNA, 1730 bp, Homo sapiens
gcgccttgggccgcctgtcgcctgtgcgcctgcgcgcggcgccgaggggacggggtccgactcagaaatggcggcctccatgttctacggcaggctagtggccgtggccacccttcggaaccaccggcctcggacggcccagcgggctgctgctcagggtcctgtattaataggaagttcacatggtggtgtcaacattgaagatgttgctgctgagactcctgaagcaataattaaagaacctattgatattgaagaaggcatcaaaaaggaacaagctctccagcttgcacagaagatgggatttccacctaatattgtggaatcagcagcagaaaacatggtcaagctttacagcctttttctgaaatacgatgcaaccatgatagaaataaatccaatggtggaagattcagatggagctgtattgtgtatggatgcaaagatcaattttgactctaattcagcctatcgccaaaagaaaatctttgatctacaggactggacccaggaagatgaaagggacaaagatgctgctaaggcaaatctcaactacattggcctcgatggaaatataggctgcctagtaaatggtgctggtttggctatggccacaatggatataataaaacttcatggagggactccagccaacttccttgatgttggtggtggtgctacagtccatcaagtaacagaagcatttaagcttatcacttcagataaaaaggtactggctattctggtcaacatttttggaggaatcatgcgctgtgatgttattgcacagggtatagtcatggcagtaaaagacttggaaattaaaatacctgttgtggtacggttacaaggtacacgagtcgatgatgctaaggcactgatagcggacagtggacttaaaatacttgcttgtgatgacttggatgaagctgctagaatggttgtaaagctctctgaaatagtgaccttagcgaagcaagcacatgtggatgtgaaatttcagttgccaatatgatctgaaaacccagtggatggctgaaggtgttaaatgtgctataatcattaagaatactgtgttctgtgttattgttctttttctttttagtgtgtggagattgtaattgccatctaggcacacaaacatttaaaaggatttggactgcatttaattgtaccattcagaatggactgtttgtacgaagcatgtataatgcagttatcttctttctttcgtcgcagccagtcttttttgcttctcctacaaaacgtaacttgcaatttgccagtttattattgttggatacaaagttcttcattgataagagtcctataaataagataaatacgaagataaagctttattctttagtgttaaaatacagtatatctaataactagcctcattagtagagcagtatattaaaacaatgttttatgtaaaaagtgtttatcttcagcaccaaatacatgataaatgtatcaatcactatttataaacagagctttcaaacactcctcagaatattcttctaagtattttgatgaagtaactttgtaattatttgaacattgttttaatcattaggaaacactgattaactgcaagtcttcatgattctgtcatattaagaaacacctgtaggtttgcttcaaataaaggcatatataccaaggacttacagacaaaattaagaatgtcaatttaagttaataaaaatctcccaatatga

SEQ ID NO: 70209 - DNA, 2106 bp, Homo sapiens
gcgccttgggccgcctgtcgcctgtgcgcctgcgcgcggcgccgaggggacggggtccgactcagaaatggcggcctccatgttctacggcaggctagtggccgtggccacccttcggaaccaccggcctcggacggcccagcgggctgctgctcaggttcaaaagatgtcgtgataaaggcacaggttttagctggtggtagaggaaaaggaacatttgaaagtggcctcaaaggaggagtgaagatagttttctctccagaagaagcaaaagctgtttcttcacaaatgattgggaaaaaattgtttaccaagcaaacgggagaaaagggcagaatatgcaatcaagtattggtctgtgagcgaaaatatcccaggagagaatactactttgcaataacaatggaaaggtcatttcaaggtcctgtattaataggaagttcacatggtggtgtcaacattgaagatgttgctgctgagactcctgaagcaataattaaagaacctattgatattgaagaaggcatcaaaaaggaacaagctctccagcttgcacagaagatgggatttccacctaatattgtggaatcagcagcagaaaacatggtcaagctttacagcctttttctgaaatacgatgcaaccatgatagaaataaatccaatggtggaagattcagatggagctgtattgtgtatggatgcaaagatcaattttgactctaattcagcctatcgccaaaagaaaatctttgatctacaggactggacccaggaagatgaaagggacaaagatgctgctaaggcaaatctcaactacattggcctcgatggaaatataggctgcctaggtaccatgtgtttttatgttagaattggattcactaagtttaatttggatttactaagtttaatttattttctctgtgtttgttgcttatacaaatcattttcccctatatagtaaatggtgctggtttggctatggccacaatggatataataaaacttcatggagggactccagccaacttccttgatgttggtggtggtgctacagtccatcaagtaacagaagcatttaagcttatcacttcagataaaaaggtactggctattctggtcaacatttttggaggaatcatgcgctgtgatgttattgcacagggtatagtcatggcagtaaaagacttggaaattaaaatacctgttgtggtacggttacaaggtacacgagtcgatgatgctaaggcactgatagcggacagtggacttaaaatacttgcttgtgatgacttggatgaagctgctagaatggttgtaaagctctctgaaatagtgaccttagcgaagcaagcacatgtggatgtgaaatttcagttgccaatatgatctgaaaacccagtggatggctgaaggtgttaaatgtgctataatcattaagaatactgtgttctgtgttattgttctttttctttttagtgtgtggagattgtaattgccatctaggcacacaaacatttaaaaggatttggactgcatttaattgtaccattcagaatggactgtttgtacgaagcatgtataatgcagttatcttctttctttcgtcgcagccagtcttttttgcttctcctacaaaacgtaacttgcaatttgccagtttattattgttggatacaaagttcttcattgataagagtcctataaataagataaatacgaagataaagctttattctttagtgttaaaatacagtatatctaataactagcctcattagtagagcagtatattaaaacaatgttttatgtaaaaagtgtttatcttcagcaccaaatacatgataaatgtatcaatcactatttataaacagagctttcaaacactcctcagaatattcttctaagtattttgatgaagtaactttgtaattatttgaacattgttttaatcattaggaaacactgattaactgcaagtcttcatgattctgtcatattaagaaacacctgtaggtttgcttcaaataaaggcatatataccaaggacttacagacaaaattaagaatgtcaatttaagttaataaaaatctcccaatatga

SEQ ID NO: 70210 - DNA, 1068 bp, Homo sapiens
gatgtaacagaaggagaatcatctgctttggttcatcctggatcattgagccatgatgttgattgttggatgtcaagagtagataatgttgatgactaatggaagagtagtttatacagcgtggatacgctgggcgaagagatggttcacattccacttggagcaggatggtgcaagatttcatcacacttctcagaacaacacacagtttaaaacttaatgacttttttatttctggaatttctcatttaaaatttttggaccacagttgactgcaggttgtaaagctctctgaaatagtgaccttagcgaagcaagcacatgtggatgtgaaatttcagttgccaatatgatctgaaaacccagtggatggctgaaggtgttaaatgtgctataatcattaagaatactgtgttctgtgttattgttctttttctttttagtgtgtggagattgtaattgccatctaggcacacaaacatttaaaaggatttggactgcatttaattgtaccattcagaatggactgtttgtacgaagcatgtataatgcagttatcttctttctttcgtcgcagccagtcttttttgcttctcctacaaaacgtaacttgcaatttgccagtttattattgttggatacaaagttcttcattgataagagtcctataaataagataaatacgaagataaagctttattctttagtgttaaaatacagtatatctaataactagcctcattagtagagcagtatattaaaacaatgttttatgtaaaaagtgtttatcttcagcaccaaatacatgataaatgtatcaatcactatttataaacagagctttcaaacactcctcagaatattcttctaagtattttgatgaagtaactttgtaattatttgaacattgttttaatcattaggaaacactgattaactgcaagtcttcatgattctgtcatattaagaaacacctgtaggtttgcttcaaataaaggcatatataccaaggacttacagacaaaattaagaatgtcaatttaagttaataaaaatctcccaatatga

SEQ ID NO: 70211 - DNA, 1508 bp, Homo sapiens
gcgccttgggccgcctgtcgcctgtgcgcctgcgcgcggcgccgaggggacggggtccgactcagaaatggcggcctccatgttctacggcaggctagtggccgtggccacccttcggaaccaccggcctcggacggcccagcgggctgctgctcaggttctgggaagttctggattgtttaataaccatggactccaagtacagcagcaacagcaaaggaatctctcactacatgaatacatgagtatggaattattgcaagaagctggtgtctccgttcccaaaggatatgtggcaaagtcaccagatgaagcttatgcaattgccaaaaaattaggttcaaaagatgtcgtgataaaggcacaggttttagctggtggtagaggaaaaggaacatttgaaagtggcctcaaaggaggagtgaagatagttttctctccagaagaagcaaaagctgtttcttcacaaatgattgggaaaaaattgtttaccaagcaaacgggagaaaagggcagaatatgcaatcaagtattggtctgtgagcgaaaatatcccaggagagaatactactttgcaataacaatggaaaggtcatttcaagtgagtaattgtagacatgatacatacgggataaatttatgacattcaatttcaaaagtccattattgtttctatttatgtgggaaagattttaaaagtacaaattataatctgtttgtatgtcatgagcatgatatttatgtcatttaaaaaacagcttctttaatgccgtaaaatttgatatataatatcatgatcttaaaattataggaaaaattctgctgtaataaatttcatgggattctcaaattgttaattcactaaaagcagcttaaatcatctctggatcatctccagattgagaaaattatatctagcatagtaaaatattctaatgaaagagaaagttgctgaacccactagaagaatgtgtatccattgcctcatcttctgttttctcaacttcttgggtttgtttttttttttttaatagtttggggtttgtttcactatatgattcaatatttggtaaattgagggatgacattaagtagcaaacaatatggttttaaggagtattacattagcacagctctcctctctttatggaacctaaaatgttgaacataaagcttctggtgaagagaaaatccctttatagacctggtgtttggaagagagcattgataatcattttatactagaattatctgtttttcgagggtattaggttttacaagctgaatctgtgtgttaactagcttgttttttgaagcaactgggtatatatttgaaagccccagtacggatttcatgtagaacattaattgtgtagaatttagagtaacaaaaattttaagagtcatgaaaataattttcttatgtagaacaactttttaaaaaatagcaactttctgtattgtgatttttcttatttacaattaaatctattaatgtttgaatgata

SEQ ID NO: 70212 - DNA, 2107 bp, Homo sapiens
gcgccttgggccgcctgtcgcctgtgcgcctgcgcgcggcgccgaggggacggggtccgactcagaaatggcggcctccatgttctacggcaggctagtggccgtggccacccttcggaaccaccggcctcggacggcccacaacagcaaaggaatctctcactacatgaatacatgagtatggaattattgcaagaagctggtgtctccgttcccaaaggatatgtggcaaagtcaccagatgaagcttatgcaattgccaaaaaattaggttcaaaagatgtcgtgataaaggcacaggttttagctggtggtagaggaaaaggaacatttgaaagtggcctcaaaggaggagtgaagatagttttctctccagaagaagcaaaagctgtttcttcacaaatgattgggaaaaaattgtttaccaagcaaacgggagaaaagggcagaatatgcaatcaagtattggtctgtgagcgaaaatatcccaggagagaatactactttgcaataacaatggaaaggtcatttcaaggtcctgtattaataggaagttcacatggtggtgtcaacattgaagatgttgctgctgagactcctgaagcaataattaaagaacctattgatattgaagaaggcatcaaaaaggaacaagctctccagcttgcacagaagatgggatttccacctaatattgtggaatcagcagcagaaaacatggtcaagctttacagcctttttctgaaatacgatgcaaccatgatagaaataaatccaatggtggaagattcagatggagctgtattgtgtatggatgcaaagatcaattttgactctaattcagcctatcgccaaaagaaaatctttgatctacaggactggacccaggaagatgaaagggacaaagatgctgctaaggcaaatctcaactacattggcctcgatggaaatataggctgcctagtaaatggtgctggtttggctatggccacaatggatataataaaacttcatggagggactccagccaacttccttgatgttggtggtggtgctacagtccatcaagtaacagaagcatttaagcttatcacttcagataaaaaggtactggctattctggtcaacatttttggaggaatcatgcgctgtgatgttattgcacagggtatagtcatggcagtaaaagacttggaaattaaaatacctgttgtggtacggttacaaggtacacgagtcgatgatgctaaggcactgatagcggacagtggacttaaaatacttgcttgtgatgacttggatgaagctgctagaatggttgtaaagctctctgaaatagtgaccttagcgaagcaagcacatgtggatgtgaaatttcagttgccaatatgatctgaaaacccagtggatggctgaaggtgttaaatgtgctataatcattaagaatactgtgttctgtgttattgttctttttctttttagtgtgtggagattgtaattgccatctaggcacacaaacatttaaaaggatttggactgcatttaattgtaccattcagaatggactgtttgtacgaagcatgtataatgcagttatcttctttctttcgtcgcagccagtcttttttgcttctcctacaaaacgtaacttgcaatttgccagtttattattgttggatacaaagttcttcattgataagagtcctataaataagataaatacgaagataaagctttattctttagtgttaaaatacagtatatctaataactagcctcattagtagagcagtatattaaaacaatgttttatgtaaaaagtgtttatcttcagcaccaaatacatgataaatgtatcaatcactatttataaacagagctttcaaacactcctcagaatattcttctaagtattttgatgaagtaactttgtaattatttgaacattgttttaatcattaggaaacactgattaactgcaagtcttcatgattctgtcatattaagaaacacctgtaggtttgcttcaaataaaggcatatataccaaggacttacagacaaaattaagaatgtcaatttaagttaataaaaatctcccaatatga

SEQ ID NO: 70213 - DNA, 2287 bp, Homo sapiens
gcgccttgggccgcctgtcgcctgtgcgcctgcgcgcggcgccgaggggacggggtccgactcagaaatggcggcctccatgttctacggcaggctagtggccgtggccacccttcggaaccaccggcctcggacggcccagcgggctgctgctcaggttctgggaagttctggattgtttaataaccatggactccaagtacagcagcaacagcaaaggaatctctcactacatgaatacatgagtatggaattattgcaagaagctggtgtctccgttcccaaaggatatgtggcaaagtcaccagatgaagcttatgcaattgccaaaaaattaggttcaaaagatgtcgtgataaaggcacaggttttagctggtggtagaggaaaaggaacatttgaaagtggcctcaaaggaggagtgaagatagttttctctccagaagaagcaaaagctgtttcttcacaaatgattgggaaaaaattgtttaccaagcaaacgggagaaaagggcagaatatgcaatcaagtattggtctgtgagcgaaaatatcccaggagagaatactactttgcaataacaatggaaaggtcatttcaaggtcctgtattaataggaagttcacatggtggtgtcaacattgaagatgttgctgctgagactcctgaagcaataattaaagaacctattgatattgaagaaggcatcaaaaaggaacaagctctccagcttgcacagaagatgggatttccacctaatattgtggaatcagcagcagaaaacatggtcaagctttacagcctttttctgaaatacgatgcaaccatgatagaaataaatccaatggtggaagattcagatggagctgtattgtgtatggatgcaaagatcaattttgactctaattcagcctatcgccaaaagaaaatctttgatctacaggactggacccaggaagatgaaagggacaaagatgctgctaaggcaaatctcaactacattggcctcgatggaaatataggctgcctaggtaccatgtgtttttatgttagaattggattcactaagtttaatttggatttactaagtttaatttattttctctgtgtttgttgcttatacaaatcattttcccctatatagtaaatggtgctggtttggctatggccacaatggatataataaaacttcatggagggactccagccaacttccttgatgttggtggtggtgctacagtccatcaagtaacagaagcatttaagcttatcacttcagataaaaaggtactggctattctggtcaacatttttggaggaatcatgcgctgtgatgttattgcacagggtatagtcatggcagtaaaagacttggaaattaaaatacctgttgtggtacggttacaaggtacacgagtcgatgatgctaaggcactgatagcggacagtggacttaaaatacttgcttgtgatgacttggatgaagctgctagaatggttgtaaagctctctgaaatagtgaccttagcgaagcaagcacatgtggatgtgaaatttcagttgccaatatgatctgaaaacccagtggatggctgaaggtgttaaatgtgctataatcattaagaatactgtgttctgtgttattgttctttttctttttagtgtgtggagattgtaattgccatctaggcacacaaacatttaaaaggatttggactgcatttaattgtaccattcagaatggactgtttgtacgaagcatgtataatgcagttatcttctttctttcgtcgcagccagtcttttttgcttctcctacaaaacgtaacttgcaatttgccagtttattattgttggatacaaagttcttcattgataagagtcctataaataagataaatacgaagataaagctttattctttagtgttaaaatacagtatatctaataactagcctcattagtagagcagtatattaaaacaatgttttatgtaaaaagtgtttatcttcagcaccaaatacatgataaatgtatcaatcactatttataaacagagctttcaaacactcctcagaatattcttctaagtattttgatgaagtaactttgtaattatttgaacattgttttaatcattaggaaacactgattaactgcaagtcttcatgattctgtcatattaagaaacacctgtaggtttgcttcaaataaaggcatatataccaaggacttacagacaaaattaagaatgtcaatttaagttaataaaaatctcccaatatga

SEQ ID NO: 70214 - DNA, 2120 bp, Homo sapiens
gcgccttgggccgcctgtcgcctgtgcgcctgcgcgcggcgccgaggggacggggtccgactcagaaatggcggcctccatgttctacggcaggctagtggccgtggccacccttcggaaccaccggcctcggacggcccagcgggctgctgctcaggttctgggaagttctggattgtttaataaccatggactccaagtacagcagcaacagcaaaggaatctctcactacatgaatacatgagtatggaattattgcaagaagctggtgtctccgttcccaaaggatatgtggcaaagtcaccagatgaagcttatgcaattgccaaaaaattaggttcaaaagatgtcgtgataaaggcacaggttttagctggtggtagaggaaaaggaacatttgaaagtggcctcaaaggaggagtgaagatagttttctctccagaagaagcaaaagctgtttcttcacaaatgattgggaaaaaattgtttaccaagcaaacgggagaaaagggcagaatatgcaatcaagtattggtctgtgagcgaggtcctgtattaataggaagttcacatggtggtgtcaacattgaagatgttgctgctgagactcctgaagcaataattaaagaacctattgatattgaagaaggcatcaaaaaggaacaagctctccagcttgcacagaagatgggatttccacctaatattgtggaatcagcagcagaaaacatggtcaagctttacagcctttttctgaaatacgatgcaaccatgatagaaataaatccaatggtggaagattcagatggagctgtattgtgtatggatgcaaagatcaattttgactctaattcagcctatcgccaaaagaaaatctttgatctacaggactggacccaggaagatgaaagggacaaagatgctgctaaggcaaatctcaactacattggcctcgatggaaatataggctgcctagtaaatggtgctggtttggctatggccacaatggatataataaaacttcatggagggactccagccaacttccttgatgttggtggtggtgctacagtccatcaagtaacagaagcatttaagcttatcacttcagataaaaaggtactggctattctggtcaacatttttggaggaatcatgcgctgtgatgttattgcacagggtatagtcatggcagtaaaagacttggaaattaaaatacctgttgtggtacggttacaaggtacacgagtcgatgatgctaaggcactgatagcggacagtggacttaaaatacttgcttgtgatgacttggatgaagctgctagaatggttgtaaagctctctgaaatagtgaccttagcgaagcaagcacatgtggatgtgaaatttcagttgccaatatgatctgaaaacccagtggatggctgaaggtgttaaatgtgctataatcattaagaatactgtgttctgtgttattgttctttttctttttagtgtgtggagattgtaattgccatctaggcacacaaacatttaaaaggatttggactgcatttaattgtaccattcagaatggactgtttgtacgaagcatgtataatgcagttatcttctttctttcgtcgcagccagtcttttttgcttctcctacaaaacgtaacttgcaatttgccagtttattattgttggatacaaagttcttcattgataagagtcctataaataagataaatacgaagataaagctttattctttagtgttaaaatacagtatatctaataactagcctcattagtagagcagtatattaaaacaatgttttatgtaaaaagtgtttatcttcagcaccaaatacatgataaatgtatcaatcactatttataaacagagctttcaaacactcctcagaatattcttctaagtattttgatgaagtaactttgtaattatttgaacattgttttaatcattaggaaacactgattaactgcaagtcttcatgattctgtcatattaagaaacacctgtaggtttgcttcaaataaaggcatatataccaaggacttacagacaaaattaagaatgtcaatttaagttaataaaaatctcccaatatga

SEQ ID NO: 70215 - DNA, 2114 bp, Homo sapiens
gcgccttgggccgcctgtcgcctgtgcgcctgcgcgcggcgccgaggggacggggtccgactcagaaatggcggcctccatgttctacggcaggctagtggccgtggccacccttcggaaccaccggcctcggacggcccagcgggctgctgctcaggttctgggaagttctggattgtttaataaccatggactccaagtacagcagcaacagcaaaggaatctctcactacatgaatacatgagtatggaattattgcaagaagctggtgtctccgttcccaaaggatatgtggcaaagtcaccagatgaagcttatgcaattgccaaaaaattaggttcaaaagatgtcgtgataaaggcacaggttttagctggtggtagaggaaaaggaacatttgaaagtggcctcaaaggaggagtgaagatagttttctctccagaagaagcaaaagctgtttcttcacaaatgattgggaaaaaattgtttaccaagcaaacgggagaaaagggcagaatatgcaatcaagtattggtctgtgagcgaaaatatcccaggagagaatactactttgcaataacaatggaaaggtcatttcaaggtcctgtattaataggaagttcacatggtggtgtcaacattgaagatgttgctgctgagactcctgaagcaataattaaagaacctattgatattgaagaaggcatcaaaaaggaacaagctctccagcttgcacagaagatgggatttccacctaatattgtggaatcagcagcagaaaacatggtcaagctttacagcctttttctgaaatacgatgcaaccatgatagaaataaatccaatggtggaagattcagatggagctgtattgtgtatggatgcaaagatcaattttgactctaattcagcctatcgccaaaagaaaatctttgatctacaggactggacccaggaagatgaaagggacaaagatgctgctaaggcaaatctcaactacattggcctcgatggaaatataggctgcctagtaaatggtgctggtttggctatggccacaatggatataataaaacttcatggagggactccagccaacttccttgatgttggtggtggtgctacagtccatcaagtaacagaagcatttaagcttatcacttcagataaaaaggtactggctattctggtcaacatttttggaggaatcatgcgctgtgatgttattgcacagggtatagtcatggcagtaaaagacttggaaattaaaatacctgttgtggtacggttacaaggtacacgagtcgatgatgctaaggcactgatagcggacagtggacttaaaatacttgcttgtgatgacttggatgaagctgctagaatggtgttctgggactcagtgttagaagctgtctgtctgtaagaatcttgctgtctctgcctcatgaaaacaattgcagtgatgagaaccagttactaatggcatacatcacacatttcagcccatcttctgggtgagcaggtggttgagctgtccctcgcctttgaatcaggaagttagcatcaaaaatgactttgtggttagaaagacctggatttcgattcaagttgtgttagttaatagctgcaagacttcagaaattggtttcctttgtgcatacgtctgcactttcacatatacccacgtgtggtcagctgaaaaatgactcctcgaaagatattcatatcaaactcctggcagctatgaatgtgactttatttggaaaaagggtctttgcaggtgtaattaaatgaaggatgttgagataaggtgattatttgggattgctcaggttggccctaattcgaatgatgaatgtctttatgagagaacggcagagggagatttgagacagataggagtgaaaacacagagaggaggaggaggcaacgtgaccatggaataagacattggagtgaagtagccacaagccaaggaatgcctaaagccaccaaaagctggaagacgcaggaaaggagcctcctggagagatttctgagggagcacagccccaccgatgccatgatttcagccttctggttcccagaattgtgaaagagtaaatttctgttgt

SEQ ID NO: 70216 - DNA, 1187 bp, Homo sapiens
gcgccttgggccgcctgtcgcctgtgcgcctgcgcgcggcgccgaggggacggggtccgactcagaaatggcggcctccatgttctacggcaggctagtggccgtggccacccttcggaaccaccggcctcggacggcccagcgggctgctgctcaggttctgggaagttctggattgtttaataaccatggactccaagtacagcagcaacagcaaaggaatctctcactacatgaatacatgagtatggaattattgcaagaagctggtgtctccgttcccaaaggatatgtggcaaagtcaccagatgaagcttatgcaattgccaaaaaattaggttcaaaagatgtcgtgataaaggcacaggttttagctggtggtagaggaaaaggaacatttgaaagtggcctcaaaggaggagtgaagatagttttctctccagaagaagcaaaagctgtttcttcacaaatgattgggaaaaaattgtttaccaagcaaacgggagaaaagggcagaatatgcaatcaagtattggtctgtgagcgaaaatatcccaggagagaatactactttgcaataacaatggaaaggtcatttcaaggtcctgtattaataggaagttcacatggtggtgtcaacattgaagatgttgctgctgagactcctgaagcaataattaaagaacctattgatattgaagaaggcatcaaaaaggaacaagctctccagcttgcacagaagatgggatttccacctaatattgtggaatcagcagcagaaaacatggtcaagctttacagcctttttctgaaatacgatgcaaccatgatagaaataaatccaatggtggaagattcagatggagctgtattgtgtatggatgcaaagatcaattttgactctaattcagcctatcgccaaaagaaaatctttgatctacaggactggacccaggaagatgaaagggacaaagatgctgctaaggcaaatctcaactacattggcctcgatggaaatataggctgcctagtaaatggtgctggtttggctatggccacaatggatataataaaacttcatggagggactccagccaacttccttgatgttggtggtggtgctacagtccatcagtacaagcattagctatctcagtaaaggactgctatctggcacattttgagga

SEQ ID NO: 70217 - DNA, 4898 bp, Homo sapiens
gcccgaaacccggaagtgagcggcggcagctgcgaggctcggagaaacaggcgccgcgggctccgcgcccggccggacccgggcccgagatcatgatgctgccgccaccgccgccaccacggagcgagaagcccagatagacgccccggcggccccgggtcctggagtcccgccgcctgctgcccggccgaggaccccaccccgcctgccgcccgatgcttgcagtggggcccgccatggacagggattacccgcagcatgaacccccgccggcgggcagcctcctgtacagcccgccgcccctgcagagcgccatgctgcactgcccctactggaacaccttctcgctgccgccataccctgccttctccagcgacagccgcccgttcatgagctccgcctccttcctcggcagccagccctgcccagacaccagctatgcccccgtggccaccgcctccagcttgccaccaaagacctgcgactttgctcaggactcctcctattttgaggacttctccaacatctccatcttctcctcgtccgtggactccctgtcggacatcgtggacacgcccgacttcctgccggctgacagcctcaaccaggtgtccaccatctgggacgataaccctgccccctccacccacgataagctgttccagctcagcaggccgtttgcaggcttcgaggactttctgccctcccacagcaccccgcttctcgtcagctaccaggagcagagtgtgcagagccagccagaggaggaggacgaggctgaggaggaggaggcggaggagctggggcacacagagacctacgccgactacgtgccgtccaagtccaagatcgggaagcagcacccagaccgcgtggtggagaccagcacactgtccagcgtcccacccccagacatcacctacaccctggccctgccctcggacagcggggccctgtctgccctgcagctagaggccatcacctacgcctgccagcaacacgaggtcctgctccccagcgggcagcgcgcgggctttctcatcggcgatggggccggcgtgggcaaaggccggacggtggccggagtcatcctggagaaccacctgcgcggccggaagaaagcattgtggttcagcgtctccaacgacctcaagtacgatgcggagcgcgacctgcgggacatcgaagccacgggcatcgcggtgcacgcgctcagcaagatcaagtacggtgacaccactacctcagagggcgtcctcttcgccacctactccgccctgattggggagagccaggccggtggccagcaccgcactcgcctccggcagatcctggactggtgtggggaggcctttgagggcgtcatcgtgttcgacgagtgtcacaaagccaagaatgccggctccaccaagatgggcaaggctgtgctagacctgcagaacaagctgcccctggcccgcgtggtctacgccagcgccacaggtgcctctgagcctcggaacatgatctacatgagccgcttgggtatctggggcgagggcacacccttccggaactttgaggagttcctgcacgccatcgagaagaggggcgttggcgccatggagatcgtggccatggacatgaaggtcagcggcatgtacatcgcacgccagctcagcttctccggcgtcaccttccgcatcgaggagatcccgctggccccagccttcgagtgcgtctacaaccgcgcggccctgctgtgggccgaggccctgaacgtgttccagcaggcggccgactggatcggcctggagtcgcgcaagtccctgtggggccagttctggtcggcacaccagcgcttcttcaagtatctgtgcatcgcagccaaggtgcgccggctggtggagctggcccgagaggagctggcgcgagacaagtgcgtggtcatcgggctgcagtccacgggcgaggcgcgcacgcgggaggtgctgggggagaacgatgggcacctcaactgcttcgtctcggccgctgaaggcgtgttcctgtcgctaattcagaagcactttccgtccaccaagagaaagcgggacagaggagcgggcagcaagcggaaacggcgacctcggggacgcggggccaaagccccccggctggcgtgcgagacagcgggcgtcatccgcatcagtgacgacagcagcacggagtcggaccctggcctggacagcgacttcaactcctcccccgagtccctggtggatgacgacgttgtcatcgttgatgcagtcgggctccccagtgacgaccggggacccctgtgcctcctgcagagagacccgcatggccccggggtcctggagcgggtggagcggctgaagcaggatctgctggacaaagtgcggcggctgggccgggaactgccagtcaacaccctggacgagctcatcgaccagctgggcggcccccagcgggtggcggagatgaccggcaggaaaggccgcgtggtgtccaggcccgacgggacggtggccttcgagtcgcgggcagagcagggtctgtccatcgaccacgtgaacctcagggagaagcagcgcttcatgagcggcgagaagctcgtggccatcatctcggaggcctccagctcgggtgtctccctccaagccgaccgccgtgtccagaaccagcggcgccgcgtgcacatgaccttggagctgccgtggagcgccgaccgcgccatccagcagttcggccgcacccaccggtccaaccaggtctccgcgccagagtatgtcttcctcatctcggagctggccggggagcgccggttcgcctccatcgtggccaagcgcctggagagtctgggggccctgacccacggagaccgccgcgccacggagtcccgtgacctcagcaagtacaactttgagaacaagtatggcacccgggccctgcactgtgtcctcaccaccatcctgagccagactgagaacaaagtgcctgtgccccagggataccctggaggggtccccaccttcttccgggacatgaagcagggcctgctgtctgtgggcattggtggccgggagtcccggaatggctgcctggacgtggagaaggactgttccatcaccaagttcctgaaccgcatcctggggctggaggtgcacaagcagaatgccctgttccagtacttctcagacaccttcgaccacctcatcgagatggacaagcgggagggcaaatacgacatgggcatcctggaccttgctcccggtatcgaggagatctacgaggagagccagcaggtgttcctggctcccgggcacccgcaggacgggcaggtggtcttctacaagatcagcgtggaccgcggcctgaagtgggaggacgcctttgccaagtcgctggcgctgacgggcccctatgacggcttctacctctcctacaaggtccgcggtaacaagcccagctgcctgctggcggagcagaaccgcggccagttcttcacggtgtacaagcccaacatcggccggcagagccagctggaggccctggacagcctccgccgcaagttccaccgggtcaccgcggaggaggccaaggagccctgggagagtggctacgctttgtcgctgacgcactgcagccacagcgcctggaaccggcactgccggctggcgcaggagggtaaggactgcctgcaggggctgcggctgcggcaccactacatgctgtgcggcgcgctgctgcgcgtgtggggccgcatcgccgccgtcatggccgacgtcagcagcagcagctacctgcagatcgtgcggctgaagaccaaggacaggaagaagcaagtgggcatcaagatccccgagggctgcgtgcgccgggtgctgcaggagctgcggctgatggatgcggacgtgaagcgcaggcaggcgcccgccctgggctgccccgccccgcccgccccgcgcccgctggcgctgccttgcggccccggagaggtgctggacctcacctacagccccccggccgaggccttcccgccgcccccgcacttctctttcccggcgccgctgtccctggacgccggccccggcgtcgtgccgctgggcacccccgacgcccaggccgaccctgcggccctcgcgcaccagggctgcgacatcaacttcaaggaggtgctggaggacatgctgcgctcgctgcacgcggggccgccctccgagggcgcgctgggggagggcgcgggggcggggggcgcggcgggcggtggtcccgagcggcagagcgtgatccagttcagcccacccttccccggcgcccaggctcctctctgacacgcctttaggcgaaacatgccccaagacacagggaccgtttctcccctaggagcagcggtggggagcagggccaaggtcccctgaccactgctcagaggagccctaggccctggccgcagtgccttcagcgcccgacccgggcccccacctggtcagccctggcggggcccactcaggacagctgggggccggggcgtggcagggccctctctgtgcctctcctcccaagtaggaaggggctccgggtggctgctctgggactgggcacccacaagggctcagtgggcccaaacccttgaaatccgtgaaaccgggtggtcccaagagctagaaactcaggaaaccccaggtgctcagggccccgcgtctcgggggctccgtggggcagacccctgctaatatatgcaattctccctcccccagcccttccctgacccctaagttattgcccgctcacctctcccaggccccaggccgcggagctggcagggtggcgcctgcggtttctatgtatttatagcaagttctgatgtacatatgtaaaggacttttttaaatatatgtgccttttgcctactt

SEQ ID NO: 70218 - DNA, 4523 bp, Homo sapiens
ctgccgcggtcatgagggagccgctcccgggcagcgcttcctgggggacccctggccccccgagcgccgggaccatgtcccagctgcagctgtggctgcagtttgaggctctgaacaaggactcctcctattttgaggacttctccaacatctccatcttctcctcgtccgtggactccctgtcggacatcgtggacacgcccgacttcctgccggctgacagcctcaaccaggtgtccaccatctgggacgataaccctgccccctccacccacgataagctgttccagctcagcaggccgtttgcaggcttcgaggactttctgccctcccacagcaccccgcttctcgtcagctaccaggagcagagtgtgcagagccagccagaggaggaggacgaggctgaggaggaggaggcggaggagctggggcacacagagacctacgccgactacgtgccgtccaagtccaagatcgggaagcagcacccagaccgcgtggtggagaccagcacactgtccagcgtcccacccccagacatcacctacaccctggccctgccctcggacagcggggccctgtctgccctgcagctagaggccatcacctacgcctgccagcaacacgaggtcctgctccccagcgggcagcgcgcgggctttctcatcggcgatggggccggcgtgggcaaaggccggacggtggccggagtcatcctggagaaccacctgcgcggccggaagaaagcattgtggttcagcgtctccaacgacctcaagtacgatgcggagcgcgacctgcgggacatcgaagccacgggcatcgcggtgcacgcgctcagcaagatcaagtacggtgacaccactacctcagagggcgtcctcttcgccacctactccgccctgattggggagagccaggccggtggccagcaccgcactcgcctccggcagatcctggactggtgtggggaggcctttgagggcgtcatcgtgttcgacgagtgtcacaaagccaagaatgccggctccaccaagatgggcaaggctgtgctagacctgcagaacaagctgcccctggcccgcgtggtctacgccagcgccacaggtgcctctgagcctcggaacatgatctacatgagccgcttgggtatctggggcgagggcacacccttccggaactttgaggagttcctgcacgccatcgagaagaggggcgttggcgccatggagatcgtggccatggacatgaaggtcagcggcatgtacatcgcacgccagctcagcttctccggcgtcaccttccgcatcgaggagatcccgctggccccagccttcgagtgcgtctacaaccgcgcggccctgctgtgggccgaggccctgaacgtgttccagcaggcggccgactggatcggcctggagtcgcgcaagtccctgtggggccagttctggtcggcacaccagcgcttcttcaagtatctgtgcatcgcagccaaggtgcgccggctggtggagctggcccgagaggagctggcgcgagacaagtgcgtggtcatcgggctgcagtccacgggcgaggcgcgcacgcgggaggtgctgggggagaacgatgggcacctcaactgcttcgtctcggccgctgaaggcgtgttcctgtcgctaattcagaagcactttccgtccaccaagagaaagcgggacagaggagcgggcagcaagcggaaacggcgacctcggggacgcggggccaaagccccccggctggcgtgcgagacagcgggcgtcatccgcatcagtgacgacagcagcacggagtcggaccctggcctggacagcgacttcaactcctcccccgagtccctggtggatgacgacgttgtcatcgttgatgcagtcgggctccccagtgacgaccggggacccctgtgcctcctgcagagagacccgcatggccccggggtcctggagcgggtggagcggctgaagcaggatctgctggacaaagtgcggcggctgggccgggaactgccagtcaacaccctggacgagctcatcgaccagctgggcggcccccagcgggtggcggagatgaccggcaggaaaggccgcgtggtgtccaggcccgacgggacggtggccttcgagtcgcgggcagagcagggtctgtccatcgaccacgtgaacctcagggagaagcagcgcttcatgagcggcgagaagctcgtggccatcatctcggaggcctccagctcgggtgtctccctccaagccgaccgccgtgtccagaaccagcggcgccgcgtgcacatgaccttggagctgccgtggagcgccgaccgcgccatccagcagttcggccgcacccaccggtccaaccaggtctccgcgccagagtatgtcttcctcatctcggagctggccggggagcgccggttcgcctccatcgtggccaagcgcctggagagtctgggggccctgacccacggagaccgccgcgccacggagtcccgtgacctcagcaagtacaactttgagaacaagtatggcacccgggccctgcactgtgtcctcaccaccatcctgagccagactgagaacaaagtgcctgtgccccagggataccctggaggggtccccaccttcttccgggacatgaagcagggcctgctgtctgtgggcattggtggccgggagtcccggaatggctgcctggacgtggagaaggactgttccatcaccaagttcctgaaccgcatcctggggctggaggtgcacaagcagaatgccctgttccagtacttctcagacaccttcgaccacctcatcgagatggacaagcgggagggcaaatacgacatgggcatcctggaccttgctcccggtatcgaggagatctacgaggagagccagcaggtgttcctggctcccgggcacccgcaggacgggcaggtggtcttctacaagatcagcgtggaccgcggcctgaagtgggaggacgcctttgccaagtcgctggcgctgacgggcccctatgacggcttctacctctcctacaaggtccgcggtaacaagcccagctgcctgctggcggagcagaaccgcggccagttcttcacggtgtacaagcccaacatcggccggcagagccagctggaggccctggacagcctccgccgcaagttccaccgggtcaccgcggaggaggccaaggagccctgggagagtggctacgctttgtcgctgacgcactgcagccacagcgcctggaaccggcactgccggctggcgcaggagggtaaggactgcctgcaggggctgcggctgcggcaccactacatgctgtgcggcgcgctgctgcgcgtgtggggccgcatcgccgccgtcatggccgacgtcagcagcagcagctacctgcagatcgtgcggctgaagaccaaggacaggaagaagcaagtgggcatcaagatccccgagggctgcgtgcgccgggtgctgcaggagctgcggctgatggatgcggacgtgaagcgcaggcaggcgcccgccctgggctgccccgccccgcccgccccgcgcccgctggcgctgccttgcggccccggagaggtgctggacctcacctacagccccccggccgaggccttcccgccgcccccgcacttctctttcccggcgccgctgtccctggacgccggccccggcgtcgtgccgctgggcacccccgacgcccaggccgaccctgcggccctcgcgcaccagggctgcgacatcaacttcaaggaggtgctggaggacatgctgcgctcgctgcacgcggggccgccctccgagggcgcgctgggggagggcgcgggggcggggggcgcggcgggcggtggtcccgagcggcagagcgtgatccagttcagcccacccttccccggcgcccaggctcctctctgacacgcctttaggcgaaacatgccccaagacacagggaccgtttctcccctaggagcagcggtggggagcagggccaaggtcccctgaccactgctcagaggagccctaggccctggccgcagtgccttcagcgcccgacccgggcccccacctggtcagccctggcggggcccactcaggacagctgggggccggggcgtggcagggccctctctgtgcctctcctcccaagtaggaaggggctccgggtggctgctctgggactgggcacccacaagggctcagtgggcccaaacccttgaaatccgtgaaaccgggtggtcccaagagctagaaactcaggaaaccccaggtgctcagggccccgcgtctcgggggctccgtggggcagacccctgctaatatatgcaattctccctcccccagcccttccctgacccctaagttattgcccgctcacctctcccaggccccaggccgcggagctggcagggtggcgcctgcggtttctatgtatttatagcaagttctgatgtacatatgtaaaggacttttttaaatatatgtgccttttgcctactt

SEQ ID NO: 70219 - DNA, 2098 bp, Homo sapiens
gacccacgctgtcgcggacggcgtgggtcgacccacgcgtccgggggccctgacccacggagaccgccgcgccacggagtcccgtgacctcagcaagtacaactttgagaacaagtatggcacccgggccctgcactgtgtcctcaccaccatcctgagccagactgagaacaaagtgcctgtgccccagggataccctggaggggtccccaccttcttccgggacatgaagcagggcctgctgtctgtgggcattggtggccgggagtcccggaatggctgcctggacgtggagaaggactgttccatcaccaagttcctgaaccgcatcctggggctggaggtgcacaagcagaatgccctgttccagtacttctcagacaccttcgaccacctcatcgagatggacaagcgggagggcaaatacgacatgggcatcctggaccttgctcccggtatcgaggagatctacgaggagagccagcaggtgttcctggctcccgggcacccgcaggacgggcaggtggtcttctacaagatcagcgtggaccgcggcctgaagtgggaggacgcctttgccaagtcgctggcgctgacgggcccctatgacggcttctacctctcctacaaggtccgcggtaacaagcccagctgcctgctggcggagcagaaccgcggccagttcttcacggtgtacaagcccaacatcggccggcagagccagctggaggccctggacagcctccgccgcaagttccaccgggtcaccgcggaggaggccaaggagccctgggagagtggctacgctttgtcgctgacgcactgcagccacagcgcctggaaccggcactgccggctggcgcaggagggtaaggactgcctgcaggggctgcggctgcggcaccactacatgctgtgcggcgcgctgctgcgcgtgtggggccgcatcgccgccgtcatggccgacgtcagcagcagcagctacctgcagatcgtgcggctgaagaccaaggacaggaagaagcaagtgggcatcaagatccccgagggctgcgtgcgccgggtgctgcaggagctgcggctgatggatgcggacgtgaagcgcaggcaggcgcccgccctgggctgccccgccccgcccgccccgcgcccgctggcgctgccttgcggccccggagaggtgctggacctcacctacagccccccggccgaggccttcccgccgcccccgcacttctctttcccggcgccgctgtccctggacgccggccccggcgtcgtgccgctgggcacccccgacgcccaggccgaccctgcggccctcgcgcaccagggctgcgacatcaacttcaaggaggtgctggaggacatgctgcgctcgctgcacgcggggccgccctccgagggcgcgctgggggagggcgcgggggcggggggcgcggcgggcggtggtcccgagcggcagagcgtgatccagttcagcccacccttccccggcgcccaggctcctctctgacacgcctttaggcgaaacatgccccaagacacagggaccgtttctcccctaggagcagcggtggggagcagggccaaggtcccctgaccactgctcagaggagccctaggccctggccgcagtgccttcagcgcccgacccgggcccccacctggtcagccctggcggggcccactcaggacagctgggggccggggcgtggcagggccctctctgtgcctctcctcccaagtaggaaggggctccgggtggctgctctgggactgggcacccacaagggctcagtgggcccaaacccttgaaatccgtgaaaccgggtggtcccaagagctagaaactcaggaaaccccaggtgctcagggccccgcgtctcgggggctccgtggggcagacccctgctaatatatgcaattctccctcccccagcccttccctgacccctaagttattgcccgctcacctctcccaggccccaggccgcggagctggcagggtggcgcctgcggtttctatgtatttatagcaagttctgatgtacatatgtaaaggacttttttaaatatatgtgccttttgcctactt

SEQ ID NO: 70220 - DNA, 1854 bp, Homo sapiens
ggcctggtggcgaattcggcacgaggccggaatggctgcctggacgtggagaaggactgttccatcaccaagttcctgaaccgcatcctggggctggaggtgcacaagcagaatgccctgttccagtacttctcagacaccttcgaccacctcatcgagatggacaagcgggagggcaaatacgacatgggcatcctggaccttgctcccggtatcgaggagatctacgaggagagccagcaggtgttcctggctcccgggcacccgcaggacgggcaggtggtcttctacaagatcagcgtggaccgcggcctgaagtgggaggacgcctttgccaagtcgctggcgctgacgggcccctatgacggcttctacctctcctacaaggtccgcggtaacaagcccagctgcctgctggcggagcagaaccgcggccagttcttcacggtgtacaagcccaacatcggccggcagagccagctggaggccctggacagcctccgccgcaagttccaccgggtcaccgcggaggaggccaaggagccctgggagagtggctacgctttgtcgctgacgcactgcagccacagcgcctggaaccggcactgccggctggcgcaggagggtaaggactgcctgcaggggctgcggctgcggcaccactacatgctgtgcggcgcgctgctgcgcgtgtggggccgcatcgccgccgtcatggccgacgtcagcagcagcagctacctgcagatcgtgcggctgaagaccaaggacaggaagaagcaagtgggcatcaagatccccgagggctgcgtgcgccgggtgctgcaggagctgcggctgatggatgcggacgtgaagcgcaggcaggcgcccgccctgggctgccccgccccgcccgccccgcgcccgctggcgctgccttgcggccccggagaggtgctggacctcacctacagccccccggccgaggccttcccgccgcccccgcacttctctttcccggcgccgctgtccctggacgccggccccggcgtcgtgccgctgggcacccccgacgcccaggccgaccctgcggccctcgcgcaccagggctgcgacatcaacttcaaggaggtgctggaggacatgctgcgctcgctgcacgcggggccgccctccgagggcgcgctgggggagggcgcgggggcggggggcgcggcgggcggtggtcccgagcggcagagcgtgatccagttcagcccacccttccccggcgcccaggctcctctctgacacgcctttaggcgaaacatgccccaagacacagggaccgtttctcccctaggagcagcggtggggagcagggccaaggtcccctgaccactgctcagaggagccctaggccctggccgcagtgccttcagcgcccgacccgggcccccacctggtcagccctggcggggcccactcaggacagctgggggccggggcgtggcagggccctctctgtgcctctcctcccaagtaggaaggggctccgggtggctgctctgggactgggcacccacaagggctcagtgggcccaaacccttgaaatccgtgaaaccgggtggtcccaagagctagaaactcaggaaaccccaggtgctcagggccccgcgtctcgggggctccgtggggcagacccctgctaatatatgcaattctccctcccccagcccttccctgacccctaagttattgcccgctcacctctcccaggccccaggccgcggagctggcagggtggcgcctgcggtttctatgtatttatagcaagttctgatgtacatatgtaaaggacttttttaaatatatgtgccttttgcctactt

SEQ ID NO: 70221 - DNA, 4605 bp, Homo sapiens
  misc_feature (4575)..(4575): n is a, c, g, or t
  misc_feature (4582)..(4582): n is a, c, g, or t
ctgccgcggtcatgagggagccgctcccgggcagcgcttcctgggggacccctggccccccgagcgccgggaccatgtcccagctgcagctgtggctgcagtttgaggctctgaacaaggactcctcctattttgaggacttctccaacatctccatcttctcctcgtccgtggactccctgtcggacatcgtggacacgcccgacttcctgccggctgacagcctcaaccaggtgtccaccatctgggacgataaccctgccccctccacccacgataagctgttccagctcagcaggccgtttgcaggcttcgaggactttctgccctcccacagcaccccgcttctcgtcagctaccaggagcagagtgtgcagagccagccagaggaggaggacgaggctgaggaggaggaggcggaggagctggggcacacagagacctacgccgactacgtgccgtccaagtccaagatcgggaagcagcacccagaccgcgtggtggagaccagcacactgtccagcgtcccacccccagacatcacctacaccctggccctgccctcggacagcggggccctgtctgccctgcagctagaggccatcacctacgcctgccagcaacacgaggtcctgctccccagcgggcagcgcgcgggctttctcatcggcgatggggccggcgtgggcaaaggccggacggtggccggagtcatcctggagaaccacctgcgcggccggaagaaagcattgtggttcagcgtctccaacgacctcaagtacgatgcggagcgcgacctgcgggacatcgaagccacgggcatcgcggtgcacgcgctcagcaagatcaagtacggtgacaccactacctcagagggcgtcctcttcgccacctactccgccctgattggggagagccaggccggtggccagcaccgcactcgcctccggcagatcctggactggtgtggggaggcctttgagggcgtcatcgtgttcgacgagtgtcacaaagccaagaatgccggctccaccaagatgggcaaggctgtgctagacctgcagaacaagctgcccctggcccgcgtggtctacgccagcgccacaggtgcctctgagcctcggaacatgatctacatgagccgcttgggtatctggggcgagggcacacccttccggaactttgaggagttcctgcacgccatcgagaagaggggcgttggcgccatggagatcgtggccatggacatgaaggtcagcggcatgtacatcgcacgccagctcagcttctccggcgtcaccttccgcatcgaggagatcccgctggccccagccttcgagtgcgtctacaaccgcgcggccctgctgtgggccgaggccctgaacgtgttccagcaggcggccgactggatcggcctggagtcgcgcaagtccctgtggggccagttctggtcggcacaccagcgcttcttcaagtatctgtgcatcgcagccaaggtgcgccggctggtggagctggcccgagaggagctggcgcgagacaagtgcgtggtcatcgggctgcagtccacgggcgaggcgcgcacgcgggaggtgctgggggagaacgatgggcacctcaactgcttcgtctcggccgctgaaggcgtgttcctgtcgctaattcagaagcactttccgtccaccaagagaaagcgggacagaggagcgggcagcaagcggaaacggcgacctcggggacgcggggccaaagccccccggctggcgtgcgagacagcgggcgtcatccgcatcagtgacgacagcagcacggagtcggaccctggcctggacagcgacttcaactcctcccccgagtccctggtggatgacgacgttgtcatcgttgatgcagtcgggctccccagtgacgaccggggacccctgtgcctcctgcagagagacccgcatggccccggggtcctggagcgggtggagcggctgaagcaggatctgctggacaaagtgcggcggctgggccgggaactgccagtcaacaccctggacgagctcatcgaccagctgggcggcccccagcgggtggcggagatgaccggcaggaaaggccgcgtggtgtccaggcccgacgggacggtggccttcgagtcgcgggcagagcagggtctgtccatcgaccacgtgaacctcagggagaagcagcgcttcatgagcggcgagaagctcgtggccatcatctcggaggcctccagctcgggtgtctccctccaagccgaccgccgtgtccagaaccagcggcgccgcgtgcacatgaccttggagctgccgtggagcgccgaccgcgccatccagcagttcggccgcacccaccggtccaaccaggtctccgcgccagagtatgtcttcctcatctcggagctggccggggagcgccggttcgcctccatcgtggccaagcgcctggagagtctgggggccctgacccacggagaccgccgcgccacggagtcccgtgacctcagcaagtacaactttgagaacaagtatggcacccgggccctgcactgtgtcctcaccaccatcctgagccagactgagaacaaagtgcctgtgccccagggataccctggaggggtccccaccttcttccgggacatgaagcagggcctgctgtctgtgggcattggtggccgggagtcccggaatggctgcctggacgtggagaaggactgttccatcaccaagttcctgaaccgcatcctggggctggaggtgcacaagcagaatgccctgttccagtacttctcagacaccttcgaccacctcatcgagatggacaagcgggagggcaaatacgacatgggcatcctggaccttgctcccggtatcgaggagatctacgaggagagccagcaggtgttcctggctcccgggcacccgcaggacgggcaggtggtcttctacaagatcagcgtggaccgcggcctgaagtgggaggacgcctttgccaagtcgctggcgctgacgggcccctatgacggcttctacctctcctacaaggtccgcggtaacaagcccagctgcctgctggcggagcagaaccgcggccagttcttcacggtgtacaagcccaacatcggccggcagagccagctggaggccctggacagcctccgccgcaagttccaccgggtcaccgcggaggaggccaaggagccctgggagagtggctacgctttgtcgctgacgcactgcagccacagcgcctggaaccggcactgccggctggcgcaggagggtaaggactgcctgcaggggctgcggctgcggcaccactacatgctgtgcggcgcgctgctgcgcgtgtggggccgcatcgccgccgtcatggccgacgtcagcagcagcagctacctgcagatcgtgcggctgaagaccaaggacaggaagaagcaagtgggcatcaagatccccgagggctgcgtgcgccgggtgctgcaggagctgcggctgatggatgcggacgtgaagcgcaggcaggcgcccgccctgggctgccccgccccgcccgccccgcgcccgctggcgctgccttgcggccccggagaggtgctggacctcacctacagccccccggccgaggccttcccgccgcccccgcacttctctttcccggcgccgctgtccctggacgccggccccggcgtcgtgccgctgggcacccccgacgcccaggccgaccctgcggccctcgcgcaccagggctgcgacatcaacttcaaggaggtgctggaggacatgctgcgctcgctgcacgcggggccgccctccgagggcgcgctgggggagggcgcgggggcggggggcgcggcgggcggtggtcccgagcggcagagcgtgatccagttcagcccacccttccccggcgcccaggctcctctctgacacgcctttaggcgaaacatgccccaagacacagggaccgtttctcccctaggagcagcggtggggagcagggccaaggtcccctgaccactgctcagaggagccctaggccctggccgcagtgccttcagcgcccgacccgggcccccacctggtcagccctggcggggcccactcaggacagctgggggccggggcgtggcagggccctctctgtgcctctcctcccaagtaggaaggggctccgggtggctgctctgggactgggcacccacaagggctcagtgggcccaaacccttgaaatccgtgaaaccgggtggtcccaagagctagaaactcaggaaaccccaggtgctcagggccccgcgtctcgggggctccgtggggcagacccctgctaatatatgcaattctccctcccccagcccttccctgacccctaagttattgcccgctcacctctcccaggccccaggccgcggagctggcagggtggcgcctgcggtttctatgtatttatagcaagttctgatgtacatatgtaaaggacttttttaaatatatgtgccttttgcctacttaaaaaaaaaaaaaaaaaagttctttaattaaaggcggccgaaagcttaattnccctttnagtgaagggttaattttaaggct

SEQ ID NO: 70222 - DNA, 3196 bp, Homo sapiens
ctgccgcggtcatgagggagccgctcccgggcagcgcttcctgggggacccctggccccccgagcgccgggaccatgtcccagctgcagctgtggctgcagtttgaggctctgaacaaggactcctcctattttgaggacttctccaacatctccatcttctcctcgtccgtggactccctgtcggacatcgtggacacgcccgacttcctgccggctgacagcctcaaccaggtgtccaccatctgggacgataaccctgccccctccacccacgataagctgttccagctcagcaggccgtttgcaggcttcgaggactttctgccctcccacagcaccccgcttctcgtcagctaccaggagcagagtgtgcagagccagccagaggaggaggacgaggctgaggaggaggaggcggaggagctggggcacacagagacctacgccgactacgtgccgtccaagtccaagatcgggaagcagcacccagaccgcgtggtggagaccagcacactgtccagcgtcccacccccagacatcacctacaccctggccctgccctcggacagcggggccctgtctgccctgcagctagaggccatcacctacgcctgccagcaacacgaggtcctgctccccagcgggcagcgcgcgggctttctcatcggcgatggggccggcgtgggcaaaggccggacggtggccggagtcatcctggagaaccacctgcgcggccggaagaaagcattgtggttcagcgtctccaacgacctcaagtacgatgcggagcgcgacctgcgggacatcgaagccacgggcatcgcggtgcacgcgctcagcaagatcaagtacggtgacaccactacctcagagggcgtcctcttcgccacctactccgccctgattggggagagccaggccggtggccagcaccgcactcgcctccggcagatcctggactggtgtggggaggcctttgagggcgtcatcgtgttcgacgagtgtcacaaagccaagaatgccggctccaccaagatgggcaaggctgtgctagacctgcagaacaagctgcccctggcccgcgtggtctacgccagcgccacaggtgcctctgagcctcggaacatgatctacatgagccgcttgggtatctggggcgagggcacacccttccggaactttgaggagttcctgcacgccatcgagaagaggggcgttggcgccatggagatcgtggccatggacatgaaggtcagcggcatgtacatcgcacgccagctcagcttctccggcgtcaccttccgcatcgaggagatcccgctggccccagccttcgagtgcgtctacaaccgcgcggccctgctgtgggccgaggccctgaacgtgttccagcaggcggccgactggatcggcctggagtcgcgcaagtccctgtggggccagttctggtcggcacaccagcgcttcttcaagtatctgtgcatcgcagccaaggtgcgccggctggtggagctggcccgagaggagctggcgcgagacaagtgcgtggtcatcgggctgcagtccacgggcgaggcgcgcacgcgggaggtgctgggggagaacgatgggcacctcaactgcttcgtctcggccgctgaaggcgtgttcctgtcgctaattcagaagcactttccgtccaccaagagaaagcgggacagaggagcgggcagcaagcggaaacggcgacctcggggacgcggggccaaagccccccggctggcgtgcgagacagcgggcgtcatccgcatcagtgacgacagcagcacggagtcggaccctggcctggacagcgacttcaactcctcccccgagtccctggtggatgacgacgttgtcatcgttgatgcagtcgggctccccagtgacgaccggggacccctgtgcctcctgcagagagacccgcatggccccggggtcctggagcgggtggagcggctgaagcaggatctgctggacaaagtgcggcggctgggccgggaactgccagtcaacaccctggacgagctcatcgaccagctgggcggcccccagcgggtggcggagatgaccggcaggaaaggccgcgtggtgtccaggcccgacgggacggtggccttcgagtcgcgggcagagcagggtctgtccatcgaccacgtgaacctcagggagaagcagcgcttcatgagcggcgagaagctcgtggccatcatctcggaggcctccagctcgggtgtctccctccaagccgaccgccgtgtccagaaccagcggcgccgcgtgcacatgaccttggagctgccgtggagcgccgaccgcgccatccagcagttcggccgcacccaccggtccaaccaggtctccgcgccagagtatgtcttcctcatctcggagctggccggggagcgccggttcgcctccatcgtggccaagcgcctggagagtctgggggccctgacccacggagaccgccgcgccacggagtcccgtgacctcagcaagtacaactttgagaacaagtatggcacccgggccctgcactgtgtcctcaccaccatcctgagccagactgagaacaaagtgcctgtgccccagggataccctggaggggtccccaccttcttccgggacatgaagcagggcctgctgtctgtgggcattggtggccgggagtcccggaatggctgcctggacgtggagaaggactgttccatcaccaagttcctgaaccgcatcctggggctggaggtgcacaagcagaatgccctgttccagtacttctcagacaccttcgaccacctcatcgagatggacaagcgggagggcaaatacgacatgggcatcctggaccttgctcccggtatcgaggagatctacgaggagagccagcaggtgttcctggctcccgggcacccgcaggacgggcaggtggtcttctacaagatcagcgtggaccgcggcctgaagtgggaggacaagaagaacatcatcctggaggagggcaaggagatcctggtgggcgatgtgggccagactgtcgacgacccctacgccacctttgtcaagatgctgccagataaggactgccgctatgccctctatgatgcaacctatgagaccaaggagagcaagaaggaggatctggtgtttatcttctgggcccccgagtctgcgcc

SEQ ID NO: 70223 - DNA, 1825 bp, Homo sapiens
ctgccgcggtcatgagggagccgctcccgggcagcgcttcctgggggacccctggccccccgagcgccgggaccatgtcccagctgcagctgtggctgcagtttgaggctctgaacaaggactcctcctattttgaggacttctccaacatctccatcttctcctcgtccgtggactccctgtcggacatcgtggacacgcccgacttcctgccggctgacagcctcaaccaggtgtccaccatctgggacgataaccctgccccctccacccacgataagctgttccagctcagcaggccgtttgcaggcttcgaggactttctgccctcccacagcaccccgcttctcgtcagctaccaggagcagagtgtgcagagccagccagaggaggaggacgaggctgaggaggaggaggcggaggagctggggcacacagagacctacgccgactacgtgccgtccaagtccaagatcgggaagcagcacccagaccgcgtggtggagaccagcacactgtccagcgtcccacccccagacatcacctacaccctggccctgccctcggacagcggggccctgtctgccctgcagctagaggccatcacctacgcctgccagcaacacgaggtcctgctccccagcgggcagcgcgcgggctttctcatcggcgatggggccggcgtgggcaaaggccggacggtggccggagtcatcctggagaaccacctgcgcggccggaagaaagcattgtggttcagcgtctccaacgacctcaagtacgatgcggagcgcgacctgcgggacatcgaagccacgggcatcgcggtgcacgcgctcagcaagatcaagtacggtgacaccactacctcagagggcgtcctcttcgccacctactccgccctgattggggagagccaggccggtggccagcaccgcactcgcctccggcagatcctggactggtgtggggaggcctttgagggcgtcatcgtgttcgacgagtgtcacaaagccaagaatgccggctccaccaagatgggcaaggctgtgctagacctgcagaacaagctgcccctggcccgcgtggtctacgccagcgccacaggtgcctctgagcctcggaacatgatctacatgagccgcttgggtatctggggcgagggcacacccttccggaactttgaggagttcctgcacgccatcgagaagaggggcgttggcgccatggagatcgtggccatggacatgaaggtcagcggcatgtacatcgcacgccagctcagcttctccggcgtcaccttccgcatcgaggagatcccgctggccccagccttcgagtgcgtctacaaccgcgcggccctgctgtgggccgaggccctgaacgtgttccagcaggcggccgactggatcggcctggagtcgcgcaagtccctgtggggccagttctggtcggcacaccagcgcttcttcaagtatctgtgcatcgcagccaaggtgcgccggctggtggagctggcccgagaggagctggcgcgagacaaggtgagcggctgcggccttcgagaagctgtggcgaatgctaaacaccccttcttccctctcaagcaggtcaaaaaggctgggcctggatcttgtaagaattggtttcctgcagtcaccttcccaacagcagtgctggggtgagctcacccatgtctgctggggactgaatgccacttctgttgcaggtctgcctcagtagatgctggggaccaatatagggccttcctacctagtctatgacttagaagggcagagggtgaggggaaaagggtcccatcagc

SEQ ID NO: 70224 - DNA, 1102 bp, Homo sapiens
gcccgaaacccggaagtgagcggcggcagctgcgaggctcggagaaacaggcgccgcgggctccgcgcccggccggacccgggcccgagatcatgatgctgccgccaccgccgccaccacggagcgagaagcccagatagacgccccggcggccccgggtcctggagtcccgccgcctgctgcccggccgaggaccccaccccgcctgccgcccgatgcttgcagtggggcccgccatggacagggattacccgcagcatgaacccccgccggcgggcagcctcctgtacagcccgccgcccctgcagagcgccatgctgcactgcccctactggaacaccttctcgctgccgccataccctgccttctccagcgacagccgcccgttcatgagctccgcctccttcctcggcagccagccctgcccagacaccagctatgcccccgtggccaccgcctccagcttgccaccaaagacctgcgactttgctcaggactcctcctattttgaggacttctccaacatctccatcttctcctcgtccgtggactccctgtcggacatcgtggacacgcccgacttcctgccggctgacagcctcaaccaggtgtccaccatctgggacgataaccctgccccctccacccacgataagctgttccagctcagcaggccgtttgcaggcttcgaggactttctgccctcccacagcaccccgcttctcgtcagctaccaggtgagctgggcccagccgagagctccctcccctgccctctcatgggacctaaggagagggctcagcacaggcatctccattgtggggagcgcttggctggcctagaagctgggagtgcccattttatagctgaggagatggaggccctgggggagcaccttgctgcaggggcagacagagccgtctcccacccctgggtcactcagctgcccatggtcagcctggcccctgcccctgggggagcccagtgcccgcggcgttggatgcagtcagcggcgttggatgcagtcagcggcgttggatgcagtcagcggcgttggatgcagtcagcggctttggatgcagtcagcggcgttggatgcagt

SEQ ID NO: 70225 - DNA, 365 bp, Homo sapiens
ggccctgggtgctggggcgtggggagggggagccggtgagccttcgggcctggcgggcagtaaacgtttctggaactgactcacttgctggggaggggcagccagggagggtcacggagaaagtccctgcccgccatggccccggaccgccgtcggctgcccgtccagcctggagtgaggaggcgtcttcctttgcatgtcaggtaaactgaggaaagctgcctctggggtctgctgcgctcgccgcctggcttccggtgcccaggggccgggtggaatgggtcgcgggacccacgctggtgaccgcagcctccctacgctgtgagagggccaggcttcgtggggacagacagccgccagggtgc

SEQ ID NO: 70226 - DNA, 716 bp, Homo sapiens
gcagatcggactggcgggcctggtgccgctgtctcagtgacctgctttgtgactcgtgcccgtgcttcccggagccttgtgattgacctccatccccagcaagaacaagcgtccaagtgaaaccgaaagaggcggccttggccttggttccaggccccgctgcgttttgaaagtgatgtgcgccaggttccggaaggcggctcactcgcgtttcctgggagtctctgccgctgtgggctcctggggccaaggccctgggtgctggggcgtggggagggggagccggtgagccttcgggcctggcgggcagtaaacgtttctggaactgactcacttgctggggaggggcagccagggagggtcacggagaaagtccctgcccgccatggccccggaccgccgtcggctgcccgtccagcctggagtgaggaggcgtcttcctttgcatgtcagatcatgatgctgccgccaccgccgccaccacggagcgagaagcccagatagacgccccggcggccccgggtcctggagtcccgccgcctgctgcccggccgaggaccccaccccgcctgccgcccgatgcttgcagtggggcccgccatggacagggattacccgcagcatgaacccccgccggcgggcagcctcctgtacagcccgccgcccctgcagaagcgcatgctgactgcctattggaaactttccgtgcgcatacg

SEQ ID NO: 70227 - DNA, 4605 bp, Homo sapiens
ctgccgcggtcatgagggagccgctcccgggcagcgcttcctgggggacccctggccccccgagcgccgggaccatgtcccagctgcagctgtggctgcagtttgaggctctgaacaaggactcctcctattttgaggacttctccaacatctccatcttctcctcgtccgtggactccctgtcggacatcgtggacacgcccgacttcctgccggctgacagcctcaaccaggtgtccaccatctgggacgataaccctgccccctccacccacgataagctgttccagctcagcaggccgtttgcaggcttcgaggactttctgccctcccacagcaccccgcttctcgtcagctaccaggagcagagtgtgcagagccagccagaggaggaggacgaggctgaggaggaggaggcggaggagctggggcacacagagacctacgccgactacgtgccgtccaagtccaagatcgggaagcagcacccagaccgcgtggtggagaccagcacactgtccagcgtcccacccccagacatcacctacaccctggccctgccctcggacagcggggccctgtctgccctgcagctagaggccatcacctacgcctgccagcaacacgaggtcctgctccccagcgggcagcgcgcgggctttctcatcggcgatggggccggcgtgggcaaaggccggacggtggccggagtcatcctggagaaccacctgcgcggccggaagaaagcattgtggttcagcgtctccaacgacctcaagtacgatgcggagcgcgacctgcgggacatcgaagccacgggcatcgcggtgcacgcgctcagcaagatcaagtacggtgacaccactacctcagagggcgtcctcttcgccacctactccgccctgattggggagagccaggccggtggccagcaccgcactcgcctccggcagatcctggactggtgtggggaggcctttgagggcgtcatcgtgttcgacgagtgtcacaaagccaagaatgccggctccaccaagatgggcaaggctgtgctagacctgcagaacaagctgcccctggcccgcgtggtctacgccagcgccacaggtgcctctgagcctcggaacatgatctacatgagccgcttgggtatctggggcgagggcacacccttccggaactttgaggagttcctgcacgccatcgagaagaggggcgttggcgccatggagatcgtggccatggacatgaaggtcagcggcatgtacatcgcacgccagctcagcttctccggcgtcaccttccgcatcgaggagatcccgctggccccagccttcgagtgcgtctacaaccgcgcggccctgctgtgggccgaggccctgaacgtgttccagcaggcggccgactggatcggcctggagtcgcgcaagtccctgtggggccagttctggtcggcacaccagcgcttcttcaagtatctgtgcatcgcagccaaggtgcgccggctggtggagctggcccgagaggagctggcgcgagacaagtgcgtggtcatcgggctgcagtccacgggcgaggcgcgcacgcgggaggtgctgggggagaacgatgggcacctcaactgcttcgtctcggccgctgaaggcgtgttcctgtcgctaattcagaagcactttccgtccaccaagagaaagcgggacagaggagcgggcagcaagcggaaacggcgacctcggggacgcggggccaaagccccccggctggcgtgcgagacagcgggcgtcatccgcatcagtgacgacagcagcacggagtcggaccctggcctggacagcgacttcaactcctcccccgagtccctggtggatgacgacgttgtcatcgttgatgcagtcgggctccccagtgacgaccggggacccctgtgcctcctgcagagagacccgcatggccccggggtcctggagcgggtggagcggctgaagcaggatctgctggacaaagtgcggcggctgggccgggaactgccagtcaacaccctggacgagctcatcgaccagctgggcggcccccagcgggtggcggagatgaccggcaggaaaggccgcgtggtgtccaggcccgacgggacggtggccttcgagtcgcgggcagagcagggtctgtccatcgaccacgtgaacctcagggagaagcagcgcttcatgagcggcgagaagctcgtggccatcatctcggaggcctccagctcgggtgtctccctccaagccgaccgccgtgtccagaaccagcggcgccgcgtgcacatgaccttggagctgccgtggagcgccgaccgcgccatccagcagttcggccgcacccaccggtccaaccaggtctccgcgccagagtatgtcttcctcatctcggagctggccggggagcgccggttcgcctccatcgtggccaagcgcctggagagtctgggggccctgacccacggagaccgccgcgccacggagtcccgtgacctcagcaagtacaactttgagaacaagtatggcacccgggccctgcactgtgtcctcaccaccatcctgagccagactgagaacaaagtgcctgtgccccagggataccctggaggggtccccaccttcttccgggacatgaagcagggcctgctgtctgtgggcattggtggccgggagtcccggaatggctgcctggacgtggagaaggactgttccatcaccaagttcctgaaccgcatcctggggctggaggtgcacaagcagaatgccctgttccagtacttctcagacaccttcgaccacctcatcgagatggacaagcgggagggcaaatacgacatgggcatcctggaccttgctcccggtatcgaggagatctacgaggagagccagcaggtgttcctggctcccgggcacccgcaggacgggcaggtggtcttctacaagatcagcgtggaccgcggcctgaagtgggaggacgcctttgccaagtcgctggcgctgacgggcccctatgacggcttctacctctcctacaaggtggggtcgggcggggttacccccccagaggagggcccgcggggggcggaccggggcgcggcctcaacgcccccctccgcaggtccgcggtaacaagcccagctgcctgctggcggagcagaaccgcggccagttcttcacggtgtacaagcccaacatcggccggcagagccagctggaggccctggacagcctccgccgcaagttccaccgggtcaccgcggaggaggccaaggagccctgggagagtggctacgctttgtcgctgacgcactgcagccacagcgcctggaaccggcactgccggctggcgcaggagggtaaggactgcctgcaggggctgcggctgcggcaccactacatgctgtgcggcgcgctgctgcgcgtgtggggccgcatcgccgccgtcatggccgacgtcagcagcagcagctacctgcagatcgtgcggctgaagaccaaggacaggaagaagcaagtgggcatcaagatccccgagggctgcgtgcgccgggtgctgcaggagctgcggctgatggatgcggacgtgaagcgcaggcaggcgcccgccctgggctgccccgccccgcccgccccgcgcccgctggcgctgccttgcggccccggagaggtgctggacctcacctacagccccccggccgaggccttcccgccgcccccgcacttctctttcccggcgccgctgtccctggacgccggccccggcgtcgtgccgctgggcacccccgacgcccaggccgaccctgcggccctcgcgcaccagggctgcgacatcaacttcaaggaggtgctggaggacatgctgcgctcgctgcacgcggggccgccctccgagggcgcgctgggggagggcgcgggggcggggggcgcggcgggcggtggtcccgagcggcagagcgtgatccagttcagcccacccttccccggcgcccaggctcctctctgacacgcctttaggcgaaacatgccccaagacacagggaccgtttctcccctaggagcagcggtggggagcagggccaaggtcccctgaccactgctcagaggagccctaggccctggccgcagtgccttcagcgcccgacccgggcccccacctggtcagccctggcggggcccactcaggacagctgggggccggggcgtggcagggccctctctgtgcctctcctcccaagtaggaaggggctccgggtggctgctctgggactgggcacccacaagggctcagtgggcccaaacccttgaaatccgtgaaaccgggtggtcccaagagctagaaactcaggaaaccccaggtgctcagggccccgcgtctcgggggctccgtggggcagacccctgctaatatatgcaattctccctcccccagcccttccctgacccctaagttattgcccgctcacctctcccaggccccaggccgcggagctggcagggtggcgcctgcggtttctatgtatttatagcaagttctgatgtacatatgtaaaggacttttttaaatatatgtgccttttgcctactt

SEQ ID NO: 70228 - DNA, 2047 bp, Homo sapiens
caggggtccagggaaagccagcctcctccctgggcctcctccccgagtcaccttctccccctagtatggcacccgggccctgcactgtgtcctcaccaccatcctgagccagactgagaacaaagtgcctgtgccccagggataccctggaggggtccccaccttcttccgggacatgaagcagggcctgctgtctgtgggcattggtggccgggagtcccggaatggctgcctggacgtggagaaggactgttccatcaccaagttcctgaaccgcatcctggggctggaggtgcacaagcagaatgccctgttccagtacttctcagacaccttcgaccacctcatcgagatggacaagcgggagggcaaatacgacatgggcatcctggaccttgctcccggtatcgaggagatctacgaggagagccagcaggtgttcctggctcccgggcacccgcaggacgggcaggtggtcttctacaagatcagcgtggaccgcggcctgaagtgggaggacgcctttgccaagtcgctggcgctgacgggcccctatgacggcttctacctctcctacaaggtccgcggtaacaagcccagctgcctgctggcggagcagaaccgcggccagttcttcacggtgtacaagcccaacatcggccggcagagccagctggaggccctggacagcctccgccgcaagttccaccgggtcaccgcggaggaggccaaggagccctgggagagtggctacgctttgtcgctgacgcactgcagccacagcgcctggaaccggcactgccggctggcgcaggagggtaaggactgcctgcaggggctgcggctgcggcaccactacatgctgtgcggcgcgctgctgcgcgtgtggggccgcatcgccgccgtcatggccgacgtcagcagcagcagctacctgcagatcgtgcggctgaagaccaaggacaggaagaagcaagtgggcatcaagatccccgagggctgcgtgcgccgggtgctgcaggagctgcggctgatggatgcggacgtgaagcgcaggcaggcgcccgccctgggctgccccgccccgcccgccccgcgcccgctggcgctgccttgcggccccggagaggtgctggacctcacctacagccccccggccgaggccttcccgccgcccccgcacttctctttcccggcgccgctgtccctggacgccggccccggcgtcgtgccgctgggcacccccgacgcccaggccgaccctgcggccctcgcgcaccagggctgcgacatcaacttcaaggaggtgctggaggacatgctgcgctcgctgcacgcggggccgccctccgagggcgcgctgggggagggcgcgggggcggggggcgcggcgggcggtggtcccgagcggcagagcgtgatccagttcagcccacccttccccggcgcccaggctcctctctgacacgcctttaggcgaaacatgccccaagacacagggaccgtttctcccctaggagcagcggtggggagcagggccaaggtcccctgaccactgctcagaggagccctaggccctggccgcagtgccttcagcgcccgacccgggcccccacctggtcagccctggcggggcccactcaggacagctgggggccggggcgtggcagggccctctctgtgcctctcctcccaagtaggaaggggctccgggtggctgctctgggactgggcacccacaagggctcagtgggcccaaacccttgaaatccgtgaaaccgggtggtcccaagagctagaaactcaggaaaccccaggtgctcagggccccgcgtctcgggggctccgtggggcagacccctgctaatatatgcaattctccctcccccagcccttccctgacccctaagttattgcccgctcacctctcccaggccccaggccgcggagctggcagggtggcgcctgcggtttctatgtatttatagcaagttctgatgtacatatgtaaaggacttttttaaatatatgtgccttttgcctactt

SEQ ID NO: 70229 - DNA, 1411 bp, Homo sapiens
gcggccgccgggcgcagctttcgctcgggttgccggccctgaccccgcccaggctcatgcggccctgtgtccctaggtcaccgcggaggaggccaaggagccctgggagagtggctacgctttgtcgctgacgcactgcagccacagcgcctggaaccggcactgccggctggcgcaggagggtaaggactgcctgcaggggctgcggctgcggcaccactacatgctgtgcggcgcgctgctgcgcgtgtggggccgcatcgccgccgtcatggccgacgtcagcagcagcagctacctgcagatcgtgcggctgaagaccaaggacaggaagaagcaagtgggcatcaagatccccgagggctgcgtgcgccgggtgctgcaggagctgcggctgatggatgcggacgtgaagcgcaggcaggcgcccgccctgggctgccccgccccgcccgccccgcgcccgctggcgctgccttgcggccccggagaggtgctggacctcacctacagccccccggccgaggccttcccgccgcccccgcacttctctttcccggcgccgctgtccctggacgccggccccggcgtcgtgccgctgggcacccccgacgcccaggccgaccctgcggccctcgcgcaccagggctgcgacatcaacttcaaggaggtgctggaggacatgctgcgctcgctgcacgcggggccgccctccgagggcgcgctgggggagggcgcgggggcggggggcgcggcgggcggtggtcccgagcggcagagcgtgatccagttcagcccacccttccccggcgcccaggctcctctctgacacgcctttaggcgaaacatgccccaagacacagggaccgtttctcccctaggagcagcggtggggagcagggccaaggtcccctgaccactgctcagaggagccctaggccctggccgcagtgccttcagcgcccgacccgggcccccacctggtcagccctggcggggcccactcaggacagctgggggccggggcgtggcagggccctctctgtgcctctcctcccaagtaggaaggggctccgggtggctgctctgggactgggcacccacaagggctcagtgggcccaaacccttgaaatccgtgaaaccgggtggtcccaagagctagaaactcaggaaaccccaggtgctcagggccccgcgtctcgggggctccgtggggcagacccctgctaatatatgcaattctccctcccccagcccttccctgacccctaagttattgcccgctcacctctcccaggccccaggccgcggagctggcagggtggcgcctgcggtttctatgtatttatagcaagttctgatgtacatatgtaaaggacttttttaaatatatgtgccttttgcctactt

SEQ ID NO: 70230 - DNA, 2063 bp, Homo sapiens
ctgccgcggtcatgagggagccgctcccgggcagcgcttcctgggggacccctggccccccgagcgccgggaccatgtcccagctgcagctgtggctgcagtttgaggctctgaacaaggactcctcctattttgaggacttctccaacatctccatcttctcctcgtccgtggactccctgtcggacatcgtggacacgcccgacttcctgccggctgacagcctcaaccaggtgtccaccatctgggacgataaccctgccccctccacccacgataagctgttccagctcagcaggccgtttgcaggcttcgaggactttctgccctcccacagcaccccgcttctcgtcagctaccaggagcagagtgtgcagagccagccagaggaggaggacgaggctgaggaggaggaggcggaggagctggggcacacagagacctacgccgactacgtgccgtccaagtccaagatcgggaagcagcacccagaccgcgtggtggagaccagcacactgtccagcgtcccacccccagacatcacctacaccctggccctgccctcggacagcggggccctgtctgccctgcagctagaggccatcacctacgcctgccagcaacacgaggtcctgctccccagcgggcagcgcgcgggctttctcatcggcgatggggccggcgtgggcaaaggccggacggtggccggagtcatcctggagaaccacctgcgcggccggaagaaagcattgtggttcagcgtctccaacgacctcaagtacgatgcggagcgcgacctgcgggacatcgaagccacgggcatcgcggtgcacgcgctcagcaagatcaagtacggtgacaccactacctcagagggcgtcctcttcgccacctactccgccctgattggggagagccaggccggtggccagcaccgcactcgcctccggcagatcctggactggtgtggggaggcctttgagggcgtcatcgtgttcgacgagtgtcacaaagccaagaatgccggctccaccaagatgggcaaggctgtgctagacctgcagaacaagctgcccctggcccgcgtggtctacgccagcgccacaggtgcctctgagcctcggaacatgatctacatgagccgcttgggtatctggggcgagggcacacccttccggaactttgaggagttcctgcacgccatcgagaagaggggcgttggcgccatggagatcgtggccatggacatgaaggtcagcggcatgtacatcgcacgccagctcagcttctccggcgtcaccttccgcatcgaggagatcccgctggccccagccttcgagtgcgtctacaaccgcgcggccctgctgtgggccgaggccctgaacgtgttccagcaggcggccgactggatcggcctggagtcgcgcaagtccctgtggggccagttctggtcggcacaccagcgcttcttcaagtatctgtgcatcgcagccaaggtgcgccggctggtggagctggcccgagaggagctggcgcgagacaagtgcgtggtcatcgggctgcagtccacgggcgaggcgcgcacgcgggaggtgctgggggagaacgatgggcacctcaactgcttcgtctcggccgctgaaggcgtgttcctgtcgctaattcagaagcactttccgtccaccaagagaaagcgggacagaggagcgggcagcaagcggaaacggcgacctcggggacgcggggccaaagccccccggctggcgtgcgagacagcgggcgtcatccgcatcagtgacgacagcagcacggagtcggaccctggcctggacagcgacttcaactcctcccccgagtccctggtggatgacgacgttgtcatcgttgatgcagtcgggctccccagtgacgaccggggacccctgtgcctcctgcagagagacccgcatggccccaggccgcggagctggcagggtggcgcctgcggtttctatgtatttatagcaagttctgatgtacatatgtaaaggacttttttaaatatatgtgccttttgcctactt

SEQ ID NO: 70231 - DNA, 3116 bp, Homo sapiens
ctaaagtttttttctttgaatgacagaactacagcataatgcgtggcttcaacctgctcctcttctggggatgttgtgttatgcacagctgggaagggcacataagacccacacggaaaccaaacacaaagggtaataactgtagagacagtaccttgtgcccagcttatgccacctgcaccaatacggtggacagttactattgcacttgcaaacaaggcttcctgtccagcaatgggcaaaatcacttcaaggatccaggagtgcgatgcaaagatattgatgaatgttctcaaagcccccagccctgtggtcctaactcatcctgcaaaaacctgtcagggaggtacaagtgcagctgtttagatggtttctcttctcccactggaaatgactgggtcccaggaaagccgggcaatttctcctgtactgatatcaatgagtgcctcaccagcagggtctgccctgagcattctgactgtgtcaactccatgggaagctacagttgcagctgtcaagttggattcatctctagaaactccacctgtgaagacgtgaatgaatgtgcagatccaagagcttgcccagagcatgcaacttgtaataacactgttggaaactactcttgtttctgcaacccaggatttgaatccagcagtggccacttgagttgccagggtctcaaagcatcgtgtgaagatattgatgaatgcactgaaatgtgccccatcaattcaacatgcaccaacactcctgggagctacttttgcacctgccaccctggctttgcaccaagcagtggacagttgaatttcacagaccaaggagtggaatgtagagatattgatgagtgccgccaagatccatcaacctgtggtcctaattctatctgcaccaatgccctgggctcctacagctgtggctgcattgtaggctttcatcccaatccagaaggctcccagaaagatggcaacttcagctgccaaagggttctcttcaaatgtaaggaagatgtgatacccgataataagcagatccagcaatgccaagagggaaccgcagtgaaacctgcatatgtctccttttgtgcacaaataaataacatcttcagcgttctggacaaagtgtgtgaaaataaaacgaccgtagtttctctgaagaatacaactgagagctttgtccctgtgcttaaacaaatatccatgtggactaaattcaccaaggaagagacgtcctccctggccacagtcttcctggagagtgtggaaagcatgacactggcatctttttggaaaccctcagcaaatgtcactccggctgttcgggcggaatacttagacattgagagcaaagttatcaacaaagaatgcagtgaagagaatgtgacgttggacttggtagccaagggggataagatgaagatcgggtgttccacaattgaggaatctgaatccacagagaccactggtgtggcttttgtctcctttgtgggcatggaatcggttttaaatgagcgcttcttccaagaccaccaggctcccttgaccacctctgagatcaagctgaagatgaattctcgagtcgttgggggcataatgactggagagaagaaagacggcttctcagatccaatcatctacactctggagaacgttcagccaaagcagaagtttgagaggcccatctgtgtttcctggagcactgatgtgaagggtggaagatggacatcctttggctgtgtgatcctggaagcttctgagacatataccatctgcagctgtaatcagatggcaaatcttgccgttatcatggcgtctggggagctcacgatggacttttccttgtacatcattagccatgtaggcattatcatctccttggtgtgcctcgtcttggccatcgccacctttctgctgtgtcgctccatccgaaatcacaacacctacctccacctgcacctctgcgtgtgtctcctcttggcgaagactctcttcctcgccggtatacacaagactgacaacaagacgggctgcgccatcatcgcgggcttcctgcactaccttttccttgcctgcttcttctggatgctggtggaggctgtgatactgttcttgatggtcagaaacctgaaggtggtgaattacttcagctctcgcaacatcaagatgctgcacatctgtgcctttggttatgggctgccgatgctggtggtggtgatctctgccagtgtgcagccacagggctatggaatgcataatcgctgctggctgaatacagagacagggttcatctggagtttcttggggccagtttgcacagttatagtgatcaactcccttctcctgacctggaccttgtggatcctgaggcagaggctttccagtgttaatgccgaagtctcaacgctaaaagacaccaggttactgaccttcaaggcctttgcccagctcttcatcctgggctgctcctgggtgctgggcatttttcagattggacctgtggcaggtgtcatggcttacctgttcaccatcatcaacagcctgcagggggccttcatcttcctcatccactgtctgctcaacggccaggtacgagaagaatacaagaggtggatcactgggaagacgaagcccagctcccagtcccagacctcaaggatcttgctgtcctccatgccatccgcttccaagacgggttaaagtcctttcttgctttcaaatatgctatggagccacagttgaggacagtagtttcctgcaggagcctaccctgaaatctcttctcagcttaacatggaaatgaggatcccaccagccccagaaccctctggggaagaatgttgggggccgtcttcctgtggttgtatgcactgatgagaaatcaggcgtttctgctccaaacgaccattttatcttcgtgctctgcaacttcttcaattccagagtttctgagaacagacccaaattcaatggcatgaccaagaacacctggctaccattttgttttctcctgcccttgttggtgcatggttctaagcgtgcccctccagcgcctatcatacgcctgacacagagaacctctcaataaatgatttgtcgcctgtctgactgatttac

SEQ ID NO: 70232 - DNA, 4198 bp, Homo sapiens
ctaaagtttttttctttgaatgacagaactacagcataatgcgtggcttcaacctgctcctcttctggggatgttgtgttatgcacagctgggaagggcacataagacccacacggaaaccaaacacaaagggtaataactgtagagacagtaccttgtgcccagcttatgccacctgcaccaatacggtggacagttactattgcacttgcaaacaaggcttcctgtccagcaatgggcaaaatcacttcaaggatccaggagtgcgatgcaaagatattgatgaatgttctcaaagcccccagccctgtggtcctaactcatcctgcaaaaacctgtcagggaggtacaagtgcagctgtttagatggtttctcttctcccactggaaatgactgggtcccaggaaagccgggcaatttctcctgtactgatatcaatgagtgcctcaccagcagggtctgccctgagcattctgactgtgtcaactccatgggaagctacagttgcagctgtcaagttggattcatctctagaaactccacctgtgaagacgtgaatgaatgtgcagatccaagagcttgcccagagcatgcaacttgtaataacactgttggaaactactcttgtttctgcaacccaggatttgaatccagcagtggccacttgagttgccagggtctcaaagcatcgtgtgaagatattgatgaatgcactgaaatgtgccccatcaattcaacatgcaccaacactcctgggagctacttttgcacctgccaccctggctttgcaccaagcagtggacagttgaatttcacagaccaaggagtggaatgtagagatattgatgagtgccgccaagatccatcaacctgtggtcctaattctatctgcaccaatgccctgggctcctacagctgtggctgcattgtaggctttcatcccaatccagaaggctcccagaaagatggcaacttcagctgccaaagggttctcttcaaatgtaaggaagatgtgatacccgataataagcagatccagcaatgccaagagggaaccgcagtgaaacctgcatatgtctccttttgtgcacaaataaataacatcttcagcgttctggacaaagtgtgtgaaaataaaacgaccgtagtttctctgaagaatacaactgagagctttgtccctgtgcttaaacaaatatccatgtggactaaattcaccaaggaagagacgtcctccctggccacagtcttcctggagagtgtggaaagcatgacactggcatctttttggaaaccctcagcaaatgtcactccggctgttcgggcggaatacttagacattgagagcaaagttatcaacaaagaatgcagtgaagagaatgtgacgttggacttggtagccaagggggataagatgaagatcgggtgttccacaattgaggaatctgaatccacagagaccactggtgtggcttttgtctcctttgtgggcatggaatcggttttaaatgagcgcttcttccaagaccaccaggctcccttgaccacctctgagatcaagctgaagatgaattctcgagtcgttgggggcataatgactggagagaagaaagacggcttctcagatccaatcatctacactctggagaacgttcagccaaagcagaagtttgagaggcccatctgtgtttcctggagcactgatgtgaagggtggaagatggacatcctttggctgtgtgatcctggaagcttctgagacatataccatctgcagctgtaatcagatggcaaatcttgccgttatcatggcgtctggggagctcacgatggacttttccttgtacatcattagccatgtaggcattatcatctccttggtgtgcctcgtcttggccatcgccacctttctgctgtgtcgctccatccgaaatcacaacacctacctccacctgcacctctgcgtgtgtctcctcttggcgaagactctcttcctcgccggtatacacaagactgacaacaagacgggctgcgccatcatcgcgggcttcctgcactaccttttccttgcctgcttcttctggatgctggtggaggctgtgatactgttcttgatggtcagaaacctgaaggtggtgaattacttcagctctcgcaacatcaagatgctgcacatctgtgcctttggttatgggctgccgatgctggtggtggtgatctctgccagtgtgcagccacagggctatggaatgcataatcgctgctggctgaatacagagacagggttcatctggagtttcttggggccagtttgcacagttatagtgatcaactcccttctcctgacctggaccttgtggatcctgaggcagaggctttccagtgttaatgccgaagtctcaacgctaaaagacaccaggttactgaccttcaaggcctttgcccagctcttcatcctgggctgctcctgggtgctgggcatttttcagattggacctgtggcaggtgtcatggcttacctgttcaccatcatcaacagcctgcagggggccttcatcttcctcatccactgtctgctcaacggccaggtacgagaagaatacaagaggtggatcactgggaagacgaagcccagctcccagtcccagacctcaaggatcttgctgtcctccatgccatccgcttccaagacgggttaaagtcctttcttgctttcaaatatgctatggagccacagttgaggacagtagtttcctgcaggagcctaccctgaaatctcttctcagcttaacatggaaatgaggatcccaccagccccagaaccctctggggaagaatgttgggggccgtcttcctgtggttgtatgcactgatgagaaatcaggcgtttctgctccaaacgaccattttatcttcgtgctctgcaacttcttcaattccagagtttctgagaacagacccaaattcaatggcatgaccaagaacacctggctaccattttgttttctcctgcccttgttggtgcatggttctaagcgtgcccctccagcgcctatcatacgcctgacacagagaacctctcaataaatgatttgtcgcctgtctgactgatttaccctaggataaagactctttgtgattttaaagaaatggtcagtaaaactgtaatgagagtcccagggaaccaagatggcacatagacagataagctactttggcacaaacacttaaaaatagttgtgttggtaagtagggggatgtttgatgtagcaaaattctagcactccctggagggttgaagcacttggtgacaacaacctttggaaagtgctttggtttcctgaggtccttcaggtaaccaagacctcactgttttctagaaactttctaatgacttggctaggatttaggattttctctgtcacagttatcgctacctatccttaatttttttttttttttgacagagtctcagtctgttgcccaggccagagtgccgtggcatgatctcggctcattgcaacctctgcctcccgggtgcaagtgattctcctgcctcagcctcacaagtagctggactgcaggcgtgcaccaccacgcctggctaatttttgtatttttagtagagatggagtttcagcatgttggccaggctgatcttgcactcctgacctcagatgatccacccgcctcaccctcccaaagtgctgggattacaggcatgagccactgcgcccggccaccatccttaaattcttgagcttgggagagaagaagatgaaggtttaaatgcaggtattttcacttctatgggcactctaaaacctcccaatccaaagcgtggtccctggatcatcagcatcacctgagagcttgttagaaaagcaaagaagaatctcagaccccactccagacctcctagatcaggacttgcatgttaacatccccaggggatgaatataaccatgggtgtctgaaaagcactattgtagaacattcttctgtttgccgtgctgacagcagagcttgtctttaaagccagagagaaatgtcttcttcttgacttggaccctttgcatcttctcttagaataacttccctgaaaactcaattgatgtcttctgtctctttgagttgcagtgtagtcatcccctctgctaggaagcattctttgaatctcctacagtagaatttggca

SEQ ID NO: 70233 - DNA, 370 bp, Homo sapiens
ggcatgatctcggctcactacaacctccacctactgggttcaagggattctcctgcctcagcctcccaagtagctggcactataggtgcatgccaccatgcccgggtaataatttctgataaaattataaatacacttacaatatgacccagtaattctactccagggtatctactctggagaaatgacagtgtatgtccacacagagatctatacacacatgttcatagcagcattatttataatgctcccaattaggagtgacccaaatgcctttcaactggtgaatggataagctgtggtgtatccagcagtgaaatactactcagcatccaaaaggaacagacttctgatgcatgcaacagcatgg

SEQ ID NO: 70234 - DNA, 1151 bp, Homo sapiens
aatgtgtcatagctccggctggcagtgactagtctttggtcatgttctggagccacctggtttgcacacgtgtcgttttcaccagcaagtactatttttatggctgttcaccatttggctctacagtacaaacacttgcctgcttcgtcttttaacatacgtgtgtaatgccccggtgggattcgtggctgtaaggacgataagaaattgcactggccatgtaggggaagctcgacatgaattatgtagttcatttaaaatgcacatcaaagagagatcactttgtttaacataagtgaactctcccttcaattagatacaacagttactgaactattaatatgtatacaagaaaattaatgtggttggattcttaaggaaagcattacagtatattaaaggtgtaaattcaaagagactcatagttattgaatacactaaaatagttaatattttaggttaaaatgtaaacttatcacctaatttaataatgatgttatactaaacacacacatacaagtatattaagattaaattaaaagaatttgctgcttgccccaacaaatatttgcttctggaagctaagactatgaaacaactatttacttacataaatcaagtgaattcttcaagatttctttcaagacattgttctgtgcctcccaatccaagctaggatgtgataaactaaactccacccatagataaacttcaccctacaagtttaatcccagaaccactcagccgagcctgtcaaacctcatgaatacctttctctaatttcctcatattgagaaactgctaagactctattaaggtagcattctaccttttagtaattctaataaatttagtttcttggccgggcgcggtggctcacgcctgtaatcccagcacgttgggaggccgaggcgggcggatcacgaggtcaggagatcgaaaccattctggctaacacggtgaaaccccgtctgtactaaaaatacaaaaaattagcctggcgtggtggcgggcgcctgtagtcccagctactcgggaggctgaggcaggagaatggcgtgaacccaggaggcggagcttgcagtgagccgagatcgcgccactgcactccagcctgggcgacagagcgagactccgtctcaaaaaaaaaa

SEQ ID NO: 70235 - DNA, 330 bp, Homo sapiens
  misc_feature (212)..(212): n is a, c, g, or t
  misc_feature (238)..(238): n is a, c, g, or t
  misc_feature (322)..(322): n is a, c, g, or t
gaggagactttgcaagagataagactgagatgccaggcctggaccaaggggcctggtatgcctccctgtgagcttcgaatttttgtcctgtaggtgtggggaaccactaatgggctttaaactggggctcacagaagacacattttaaaagatctctcagatgaagtgtagaaggtagattagagagtcatgagaacggtttcaccatgttngccaggctggcatttacatatttttnagttaaaataaaattctagctagatgatgacatgtgcctgtaatcccagctactcaggaggctgaggactgtagggatggcttnagcccagg

SEQ ID NO: 70236 - DNA, 393 bp, Homo sapiens
aaagaaaagagaaaattgcagagaagataagtcttttctctaacagttcccaaaatccgtaactgaagtgtttgggccttccagattttcctctatgggatgcgaatgacttggaattttgggaattccaactccccatctctaattttatttaaattgctttctcaattgactgacgaagattagttggaccccatttctgaacaagcttgttacacagaaatgttgccagggcctactgtttatcctcttgagccaagaagagaatccttcagacttctaagttactgaacacatgcagtatcagaactattggatacacagaaagttttgttgtagataatatatttggaaagtttggagaaagttcctctaccccttgccttctttgag

SEQ ID NO: 70237 - DNA, 448 bp, Homo sapiens
gggacggtgagcccacttcctcagagcaaggcggccttgaaggatctggttctgctgccggagaaggcaaacccgctttgagtgaagaggaaagacaggaacaaactaagaggatgttggagctggtggcccagaagcagcgggagcgtgaagaaagagaggaacgggaggcattggaacgggaacggcagcgcaggagacaagggcaagagttgtcagcagcacgacagcggctacaggaagatgagatgcgccgggctgctgaggagaggcggagggaaaaggccgaggagttagcagccagacaaagagttagagaaaagatcgagagggacaaagcagagagagccaagaagtatggtggcagtgtgggctctcagccacccccagtggcaccagagccaggtcctgttccctcttctcccagccaggagcctccacccaagcg

SEQ ID NO: 70238 - DNA, 626 bp, Homo sapiens
ttttcttctcgtcggtgttcccggctgctatagagccgggtgagagagcgagcgcccgtcggcgggtgtcgagggcgggttgcctcgcgctgacccttcccgccctccttctcgtcacacaccaggtccccgcggaagccgcggtgtcggcgccatggcggagctgacggctcttgagagtctcatcgagatgggcttccccaggggacgcgcggagaaggatctggttctgctgccggagaaggcaaacccgctttgagtgaagaggaaagacaggaacaaactaagaggatgttggagctggtggcccagaagcagcgggagcgtgaagaaagagaggaacgggaggcattggaacgggaacggcagcgcaggagacaagggcaagagttgtcagcagcacgacagcggctacaggaagatgagatgcgccgggctgctgaggagaggcggagggaaaaggccgaggagttagcagccagacaaagagttagagaaaagatcgagagggacaaagcagagagagccaagaagtatggtggcagtgtgggctctcagccacccccagtggcaccagagccaggtcctgttccctcttctcccagccaggagcctccacccaagcg

SEQ ID NO: 70239 - DNA, 343 bp, Homo sapiens
ttgttgttataataataaatcagtagatcaccttcgatccatcactatgattggaagaacatctcagtattacctgctgttgggtaaaatagcactactgttaattctacagtaggactttttaactttctcctactcccctttgtaagagacaaacgaggtatgggtgagcaatccagatatttgaggattaaatgaaacatgttgaacatctgattttatataagatgctgtaaaaagccgaagtgaaataggtgtgctatgccatgacctccactcagcctgcttaggaggctgaaggctgggggcctattagtcctgggggaagctgtgattagacgtg

SEQ ID NO: 70240 - DNA, 531 bp, Homo sapiens
gagctggcaattgggataggttgagggggtcttgaccctgaaggggttgcttttgtggaccttttatctgggccgaggtgtgcagtgtcacaatcactgggctacaaggctgctgatagacacttctattgcagaaacagctcattatatttcttgactccagagtatttcagcagataaacaggcatgcaaggttgctttatttaaggagttaggggaccaggaaatatttgttgtcagggacaatgcaagtggtaaacattttatcccttaaaaggcaagaaagctcagaggacatgaggaaagcctgcaaaagcaggaaattggccatttaaaaagtacgcatgaggtccctactccagggagtgtttgctgagccccaggggagaaaggaagaggatgggccagccaggagtgcccagtggatttacagcagatttaataagtctactttaattatttaaatgaatcaaaatgcataggagtggaagaaagaaacaagtaaaaagaaataaaaattcttttcggaaa

SEQ ID NO: 70241 - DNA, 293 bp, Homo sapiens
tataatggcacctactgttgaggtatagtattgtagcttaatattaattataatataaaatatctagaaaaaataagtcaagatactgtttttctgggggtaggcatgtttagtttgaaattttccataggaagaaagtcctctgaaaacgtattgccaataagtgcattgcaggacatgatatataaagaaaatattggacagtatatatatggagaattttagaatttagaatatgacatgaaatgaaggtgagatttcacttggttagaattttcttgaccagtctctca

SEQ ID NO: 70242 - DNA, 1220 bp, Homo sapiens
ctctcggttcggtgtggccagccagcccagagagccatggagctaatgacctcagagcaaaacaggcgcttgggagccgctgggtatgaggcgccaggtgtgacaccacctctggatggggctgctggagcgagagcgggcaagctggtaccgggtggggttgcgggattaatgacgcaggctgcagccgaccaccccggaatcaggagccggggtagattcctgggctcctgatgcgctgttccccgtgaagaccacctctagatctgggagagcggttgctactcccaccctcctttctctctcagaacccaggtctttcccacaatgtagaccttccctgaccacagcaggacaagctattaataggataataacaacataacaaatactatttattgaagaagtactgcatactagaccctttacaaagcacgttccatacagtattaggttatttatactgcacaccaatccttcaagatggttttttttctgtcagtttcacggatgaggcaggacgggacgcttcctgtcattttaccgtgacttgccccaggaggtcacacggtcaagtgaaagattcacacctatgtcggcctcctgacattcaaacctgctctgtcttaagaaccaagcttacttctccggatcagggaggaagggctagaaaggagatcaatggcagagagaggagtgggggttcctcccctcccatccttctcttagggccagggctgagagcagtccgggaatgctgagcaagttctgtgtctaccgccagggggagacagaggccaggctaagcccttgcctaagaagagtaaaagcacactcactggaagaccaggacagagcccaatgcctggttggctgcccgttcttcctaacttctcccctctgggagagggtggtactgacctgatgccacaagagctctgtctctaaacctcctatcagaaagttgatcgctaggtatccacagacaccacccatccacacatctcaaatggggacaacgccgttgtggccctcaagcaagttggaagtagccatcagggactacggcacccagttcacggctggaacttttctgggctctgtcggccaggtgcttcctgaccacataccactttgttccccaggctaaactgtgtccccagaagggatgactttcttggcagcttccaaataaagatcccacagtggtccttcaaatt

SEQ ID NO: 70243 - DNA, 296 bp, Homo sapiens
cttcccaggcaatctctataattccatgattccccatatctcatttccatggtcacaaactaataaaagccacaactacgtcatatcaaaataaacattgcctgatgactctctttacccttcaacctaccctttagataaagatattcccccagacactatttttatgacaccaagctccttgctcaaaaatagtaaatgcataattaaccaactttgctgaagtacaagaatcttcaggggcacttgttacgaaaggattctaggaccctggccccagtctccaaggaagggat

SEQ ID NO: 70244 - DNA, 341 bp, Homo sapiens
gtcattatacaaaaatgacatgtactttttatattgaattgttcacagttttgttcttctttgaacactattcttcctagatacctaaacttcatgagccatttcaattttctgggcaatcattggcatggtctaactttcaactttatgtacctgtattagttttctatgctgctgtaacaaattgtcacaaattaagtggcttaaaacaatccacataccatgggctaaaatcaaggggccaggagggctgctttcctttctggaagttctagggcagaatctgtttccttgccttttcagcttctaaagggctgcctgcattccttggctcatgcccc

SEQ ID NO: 70245 - DNA, 329 bp, Homo sapiens
tggtttctagtttcagttgacgtacgagcctgctgccagctggcctcacatctttcatgtgactctcacaaccggagacccggacattggagaaaccctcagtaagagagatccaactgggttcagaccccgaggctgtgttgacgggacatgaggcaggatatagaccaggagccacctcctgaaatttagagcaaaactacaaaacaaggcctttgggagaccagggtgggagcatcacttgagcccaggaatttgaggcaacagtgagccatgatctcaccactgtattccatccagtctggacaagagagcgagaccctgtctca

SEQ ID NO: 70246 - DNA, 486 bp, Homo sapiens
catcatctcttgaaaaaatcatcacaatcaactgaaatgcactggtattatataagtgactcagctctgttccgtaagaaaaccacgcttttcttatcgaccttgagtagcagacagtgatataagagcatattaaaatcctctttaaggtcaagccaaattccacagcttgctatctatcattttagtttgcttttccaatgttcattggccttgagagttgtaaatacacaagtctgtcctcgattcacttttctcttttactctagtgagtatttcctgttgttttccttttgacttgattttaaaatgaccatttcaggggattcatctagatttctatgtgagaaaaaaaattcaggaacttggcatctctggctgggtttgatgagtagcagataggtagctctctagttaagtaacgtggggagcagaggttataggtctttgtagattagaaaacgttaaatgcattaacttggtggt

SEQ ID NO: 70247 - DNA, 495 bp, Homo sapiens
gtaactagcagatattttttaatctgaggacttctttctagtaaatagagatttcttcccaagcattataggaatatgtcttattgacttatttttttggcatgggttactaggaaataatattttcagggagttcagggacccagatttgattcccagataattcagattaaccttctttaatcattctattttatgttattgctgggattacaggcgtgagctaccgcacccggccagtagtttttaatgttcagtgaagttaaaacatctcccgtccagttatgctgtgtaataaatattaaagcaggagatattagaacaatacaacacttactgtgctatttataatttaaaatattaaagataaataatggaataactataaatattgatactatgataaaacttttagcatgtctaagttgttcattttgatagatacaaaaaaccaaagccaagcaaaataaaacacacctaaaactttatgaatgt

SEQ ID NO: 70248 - DNA, 492 bp, Homo sapiens
tctgcctactcctgcctgggtgtggcgggcgtgccctctctccagatgaaccctctgcatggtatcccttgactgcccttacacgaggcctgtgaacagggcctggcacgtgggctgtccttggacaagtccctgttcagaaagttgtccctgaggaatgaaacacttctgagactcctgcatcctggccctcacttccaccgggggaagattgatttcttcagatttcggttgccttttgaaacacttctctgtttcactgtgggtgtgtagaagctatgaactcggaactttcgttgttttccgaggaccggaagaagatgtgcaagaaatcctgtcgagtagaatctcatcacaggggcgtgggcagcccaggagttggcgggtatgtagagagaggtgtcaaaaatagtaattgagagtgagctttgggaggaagatgttggaaataaagatggtggaagaaagaggagtgctgaggaaaggtgctct

SEQ ID NO: 70249 - DNA, 1171 bp, Homo sapiens
taatgagggcagtcagctggccactgggatcttgacccgggtcacccagaagtcggtcacggtggcctttgatgagtcccacgatttccagttgagcttggaccgagagaattcctacagactgttaaaacttgccaatgatgtcacttacaggcgactgaaaaaagccctgattgctctaaagaagtatcattctggcccagcctcctcactcatagaagtgctctttggcagatctgctcccagtcctgccagtgaaatacacccgctgacattcttcaacacctgcctggacacctcccagaaagaagcggtttcatttgcgctgtctcagaaagaacttgccatcatccatggacctcctggcactgggaaaaccacgactgtggttgagatcattcttcaagctgtgaaacaaggcttaaaggttctgtgctgcgccccctccaacatcgccgtggacaatctggtggagcgcctggctctgtgtaagcagcggattctgcgcctgggacaccctgcccgcctcctggagtccattcagcagcactccctggatgcggttttagcgcggagcgacagtgcccagattgttgcagatatcaggaaggacatcgaccaggtctttgtgaaaaacaaaaagacccaggataagagagagaaaagtaattttcgaaatgaaattaagctgttaagaaaagaactgaaggagagggaagaagcagctatgctcgagagcctcacttcggcaaacgtggtccttgcaacaaacacaggtgcgtctgccgatggccccctgaagttgctgcccgagagctacttcgacgtggtggtcattgacgagtgtgcccaggccctcgaggcgagctgctggatccccctgctgaaggccagaaagtgcatcctggcgggcgatcacaagcagctgccccccaccacagtctctcacaaggctgcgctggcaggactgtcactcagcctgatggaacgcctggctgaggagtacggcgcgagggtggtgcggacactgacggtgcagtaccgcatgcaccaggctatcatgcgctgggcctcagacaccatgtaccttgggcagctcacagcccactcttccgtggcaaggcacctcctgagggacctcccaggtgtggctgccacagaagagacgggt

SEQ ID NO: 70250 - DNA, 1514 bp, Homo sapiens
taatgagggcagtcagctggccactgggatcttgacccgggtcacccagaagtcggtcacggtggcctttgatgagtcccacgatttccagttgagcttggaccgagagaattcctacagactgttaaaacttgccaatgatgtcacttacaggcgactgaaaaaagccctgattgctctaaagaagtatcattctggcccagcctcctcactcatagaagtgctctttggcagatctgctcccagtcctgccagtgaaatacacccgctgacattcttcaacacctgcctggacacctcccagaaagaagcggtttcatttgcgctgtctcagaaagaacttgccatcatccatggacctcctggcactgggaaaaccacgactgtggttgagatcattcttcaagctgtgaaacaaggcttaaaggttctgtgctgcgccccctccaacatcgccgtggacaatctggtggagcgcctggctctgtgtaagcagcggattctgcgcctgggacaccctgcccgcctcctggagtccattcagcagcactccctggatgcggttttagcgcggagcgacagtgcccagattgttgcagatatcaggaaggacatcgaccaggtctttgtgaaaaacaaaaagacccaggataagagagagaaaagtaattttcgaaatgaaattaagctgttaagaaaagaactgaaggagagggaagaagcagctatgctcgagagcctcacttcggcaaacgtggtccttgcaacaaacacaggtgcgtctgccgatggccccctgaagttgctgcccgagagctacttcgacgtggtggtcattgacgagtgtgcccaggccctcgaggcgagctgctggatccccctgctgaaggccagaaagtgcatcctggcgggcgatcacaagcagctgccccccaccacagtctctcacaagtaagacccctttgcctcacatgcccttctctgcccccgccctcctgcggtccttccacgctcagccaggagccccaggctcaccaggagcccctgcggtgcctcctcggtttctcggcacagctcctaccccgtcttacagcattcattcatctcaacgtcgcatctgtgagatcatgtactccccgagggtggggtcgcatcaccttcatctttgtagcttcagaactggacacagggcctggcacgtttctggtgttccgtccctgcttgttgagttgaatatcccctcatgaaccaggcaggtttgatggtagagtgccgtgagagccttgggctgggctaactggcctctgggtggatgtgggttctttagtcttcaatctgtagacacatccctggatggagggcactgggcagagactcagcaaaccatggttctgccgtgcggagacaccggagccctgatgcagtggcctgggcccaggctgtcctgggtggagacacttggagtcctgatgttggttggcctggcccagggttgttcctggtggaagacactg

SEQ ID NO: 70251 - DNA, 4714 bp, Homo sapiens
  misc_feature (1925)..(1925): n is a, c, g, or t
gtcaccaatccttcccctctgtcatttagcgaaccactcactgggcactaggactttggggagagtcccaagaggcccctcttcgtccaggggctacttttttctcttccagcctccatctcctaactcaaggggtacagctcagattatgtttggcgcccagggacagtgacaaacccagggcccgtggatagaggaggcatctcactacgctgcacgaggccacctcgcagtaggcagcccagccctgccccaaaacccaagagcctaaccaggaagacagggggaggccgcgggcttcatctcccaagagatggactacacctcccagcaggctctgcgcgcgggctgaggatccctccgctctttttctgtcccgccggctgggccccccgcgaccagccaagggccaaggacaggtctttcagaatctgaggtacatcttcttatcacatttccggggagggactgctaggagctccggaggaaaaacggactttttttgaggagaaaagcggaggcagacggtggatgacaacacgtcccgcagctgcagattttcgcgcgctttggcgcaggtggttgtgggtagcgcgcctgggagggagaaagaagtcgggggccgtggcgcgcagcccgcggggcctgaagggatgttcgaggacaagccccacgctgagggggcggcggtggtcgccgcagccggggaggcgctacaggccctgtgccaggagctgaacctggacgaggggagcgcggccgaagccctggacgactttactgccatccgaggcaactacagcctagagggagaagttacacactggttggcatgttcattatatgttgcatgccgcaaaagcattattcccacggttggaaagggtatcatggaaggcaactgtgtttcacttaccagaatactacgttcagctaaattaagtttaatacaattttttagtaaaatgaagaaatggatggacatgtcaaatctaccacaagaatttcgtgaacgtatagaaaggctagagagaaattttgaggtgtctactgtaatattcaaaaaatatgagccaatttttttagatatatttcaaaatccatatgaagaaccaccaaagttaccacgaagccggaagcagaggaggattccttgcagtgttaaggatctgtttaatttctgttggacactttttgtttatactaagggtaattttcggatgattggggatgacttagtaaactcttatcatttacttctatgctgcttggatctgatttttgccaatgcgattatgtgcccaaatagacaagacttgctaaatccatcatttaaaggtttaccatctgattttcatactgctgactttacggcttctgaagagccaccctgcatcattgctgtactgtgtgaactgcatgatggacttctcgtagaagcaaaaggaataaaggagcactactttaagccatatatttcaaaactctttgacaggaagatattaaaaggagaatgcctcctggacctttcaagttttactgataatagcaaagcagtgaataaggagtatgaagagtatgttctaactgttggtgattttgatgagaggatctttttgggagcagacgcagaagaggaaattggaacacctcgaaagttcactcgtgacaccccattagggaaactgacagcacaggctaatgtggagtataaccttcaacagcactttgaaaaaaaaaggtcatttgcaccttctaccccactgaccggacggagatatttacgagaaaaagaagcagtcattactcctgttgcatcagccacccaaagtgtgagccggttacagagtattgtggctggtctgaaaaatgcaccaagtgaccaacttataaatatttttgaatcttgtgtgcgtaatcctgtngaaaacattatgaaaatactaaaaggaataggagagactttctgtcaacactatactcaatcaacagatgaacagccaggatctcacatagactttgctgtaaacagactaaagctggcagaaattttgtattataaaatactagagactgtaatggttcaggaaacacgaagacttcatggaatggacatgtcagttcttttagagcaagatatatttcatcgttccttgatggcttgttgtttggaaattgtgctctttgcctatagctcacctcgtacttttccttggattattgaagttctcaacttgcaaccattttacttttataaggttattgaggtggtgatccgctcagaagaggggctctcaagggacatggtgaaacacctaaacagcattgaagaacagattttggagagtttagcatggagtcacgattctgcactgtgggaggctctccaggtttctgcaaacaaagttcctacctgtgaagaagttatattcccaaataactttgaaacaggaaatggaggaaatgtgcagggacatcttcccctgatgccaatgtctcctctaatgcacccaagagtcaaggaagttcgaactgacagtgggagtcttcgaagagatatgcaaccattgtctccaatttctgtccatgaacgctacagttctcctaccgcagggagtgctaagagaagactctttggagaggaccccccaaaggaaatgcttatggacaagatcataacagaaggaacaaaattgaaaatcgctccttcttcaagcattactgctgaaaatgtatcaattttacctggtcaaactcttctaacaatggccacagccccagtaacaggaacaacaggacataaagttacaattccattacatggtgtcgcaaatgatgctggagagatcacactgatacctctttccatgaatacaaatcaggagtccaaagtcaagagtcctgtatcacttactgctcattcattaattggtgcttctccaaaacagaccaatctgactaaagcacaagaggtacattcaactggaataaacaggccaaagagaactgggtccttagcactattttacagaaaggtctatcatttggcaagtgtacgcttacgtgatctatgtctaaaactggatgtttcaaatgagttacgaaggaagatatggacgtgttttgaattcactttagttcactgtcctgatctaatgaaagacaggcatttggatcagctcctcctttgtgccttttatatcatggcaaaggtaacaaaagaagaaagaacttttcaagaaattatgaaaagttataggaatcagccccaagctaatagtcacgtatatagaagtgttctgctgaaaagtattccaagagaagttgtggcatataataaaaatataaatgatgactttgaaatgatagattgtgacttagaagatgctacaaaaacacctgactgttccagtggaccagtgaaagaggaaagaagtgatcttataaaattttacaatacaatatatgtaggaagagtgaagtcatttgcactgaaatacgacttggcgaatcaggaccatatgatggatgctccaccactctctccttttccacatattaaacaacagccaggctcaccacgccgcatttcccagcagcactccatttatatttccccgcacaagaatgggtcaggccttacaccaagaagcgctctgctgtacaagttcaatggcagcccttctaagagtttgaaagatatcaacaacatgataaggcaaggtgagcagagaaccaagaagcgagtaatagccatcgatagtgatgcagaatcccctgccaaacgcgtctgtcaagaaaatgatgacgttttactgaaacgactacaggatgttgtcagtgaaagagcaaatcattaatgttgttcttgtttctatgataaaagcactttcagattgttctgcagaaagttggagctctgtccttcaaaccttttagccctatagatgataaatatcactgggttataagaaaaaattgcacaaaaattatgtgctttttaaaatatttatccaaaatgtagttgacagagatgtattttgagttggattggaaaggaatattttaagtgccttttaaaaatactaatagtccggccaggcgctgtggctcacgcctctaatcccaggactttgggaggccaaggcgggcagatcaccggagtcaggagttcgagaccagcctgaccaacatggagaaaccccatctctactaaaaatacaaaattagccgggtggtgtggcgcatgcctataatcccagctacttgggaggctgaggcagaattgcttgaacccaggaagcggaggttgtggtgagccaaggttgcgccactgcactccagcctgggcaacaagagtaaaactccatctcaaaaaatatatatatatatataaatagggaattttttttaatgtttgctccttgagttttcaagatgaaataaggagaaaccccataactttttagctctcttttaaaaataaatgtctccttctgtgttctgtaatatgaggataaataatctacttttgatagcatgctttgagatatttgtattcttaatttaatattgaaggaaggggttggttcccatagtacctgggccagagggttattataccatcctgtctctgggcccactgtgggtaattccacatccagggtaccaccgccatttcaggagttgtctcaccccttcttcgtggcctttt

SEQ ID NO: 70252 - DNA, 650 bp, Homo sapiens
gctttaatctatatcctcctgccatagcagtgaactagtgctatagaacagaaattttatttaatttagtatatcaacagcctatgttttttaatcttggtcttggtaagacataaaaatttgagaaatgatttacttggtgttttgcatcaatgtgttaccttctattttaggtctatcatttggcaagtgtacgcttacgtgatctatgtctaaaactggatgtttcaaatgagttacgaaggaagatatggacgtgttttgaattcactttagttcactgtcctgatctaatgaaagacaggcatttggatcagctcctcctttgtgccttttatatcatggcaaaggtaatgtataaattgggagaagaggctgggcatggtggctcacacgtataatcctagcactttcggaggtcaaggtgagcagatagcttgagcccaggatttcgagaccagcttgggcaacatggtgaaacctcatctctataaaaagtataaaaatcagctgggcattgtggcttgcacctataggcccagctacttgggagactgaggtgggaggatctcttgagcccaggaggcaaggctgcagtgagccgagatcatgacactgtacctcagcctgggcaatagagcaagaccctg

SEQ ID NO: 70253 - DNA, 1692 bp, Homo sapiens
ccacaggccaaaagcctgaactttaaaggtagaaaaaatcataaatgttagtggtttttagtcatggactggcctggggttaatggttttctgcaaggttgctctcagtgccaacttataattgaagttttgttcagagccatttttctttcaaaaagcagttgataaatgcggtttttattttccttaggtaacaaaagaagaaagaacttttcaagaaattatgaaaagttataggaatcagccccaagctaatagtcacgtatatagaagtgttctgctgaaaagtattccaagagaagttgtggcatataataaaaatataaatgatgactttgaaatgatagattgtgacttagaagatgctacaaaaacacctgactgttccagtggaccagtgaaagaggaaagaagtgatcttataaaattttacaatacaatatatgtaggaagagtgaagtcatttgcactgaaatacgacttggcgaatcaggaccatatgatggatgctccaccactctctccttttccacatattaaacaacagccaggctcaccacgccgcatttcccagcagcactccatttatatttccccgcacaagaatgggtcaggccttacaccaagaagcgctctgctgtacaagttcaatggcagcccttctaagagtttgaaagatatcaacaacatgataaggcaaggtgagcagagaaccaagaagcgagtaatagccatcgatagtgatgcagaatcccctgccaaacgcgtctgtcaagaaaatgatgacgttttactgaaacgactacaggatgttgtcagtgaaagagcaaatcattaatgttgttcttgtttctatgataaaagcactttcagattgttctgcagaaagttggagctctgtccttcaaaccttttagccctatagatgataaatatcactgggttataagaaaaaattgcacaaaaattatgtgctttttaaaatatttatccaaaatgtagttgacagagatgtattttgagttggattggaaaggaatattttaagtgccttttaaaaatactaatagtccggccaggcgctgtggctcacgcctctaatcccaggactttgggaggccaaggcgggcagatcaccggagtcaggagttcgagaccagcctgaccaacatggagaaaccccatctctactaaaaatacaaaattagccgggtggtgtggcgcatgcctataatcccagctacttgggaggctgaggcagaattgcttgaacccaggaagcggaggttgtggtgagccaaggttgcgccactgcactccagcctgggcaacaagagtaaaactccatctcaaaaaatatatatatatatataaatagggaattttttttaatgtttgctccttgagttttcaagatgaaataaggagaaaccccataactttttagctctcttttaaaaataaatgtctccttctgtgttctgtaatatgaggataaataatctacttttgatagcatgctttgagatatttgtattcttaatttaatattgaaggaaggggttggttcccatagtacctgggccagagggttattataccatcctgtctctgggcccactgtgggtaattccacatccagggtaccaccgccatttcaggagttgtctcaccccttcttcgtggcctttt

SEQ ID NO: 70254 - DNA, 418 bp, Homo sapiens
cccacaggccaaaagcctgaactttaaaggtagaaaaaatcataaatgttagtggtttttagtcatggactggcctggggttaatggttttctgcaaggttgctctcagtgccaacttataattgaagttttgttcagagccatttttctttcaaaaagcagttgataaatgcggtttttattttccttaggtaacaaaagaagaaagaacttttcaagaaattatgaaaagttataggaatcagccccaagctaatagtcacgtgagttacattatttttcctactgtccaaaaatagatttactcttttccactgacaagttatataaaaggtaaacttattttatagttttaatatacttcagattttctgttttaatggataacattaaactcaagagataatttcattgaagg

SEQ ID NO: 70255 - DNA, 3672 bp, Homo sapiens
  misc_feature (1925)..(1925): n is a, c, g, or t
gtcaccaatccttcccctctgtcatttagcgaaccactcactgggcactaggactttggggagagtcccaagaggcccctcttcgtccaggggctacttttttctcttccagcctccatctcctaactcaaggggtacagctcagattatgtttggcgcccagggacagtgacaaacccagggcccgtggatagaggaggcatctcactacgctgcacgaggccacctcgcagtaggcagcccagccctgccccaaaacccaagagcctaaccaggaagacagggggaggccgcgggcttcatctcccaagagatggactacacctcccagcaggctctgcgcgcgggctgaggatccctccgctctttttctgtcccgccggctgggccccccgcgaccagccaagggccaaggacaggtctttcagaatctgaggtacatcttcttatcacatttccggggagggactgctaggagctccggaggaaaaacggactttttttgaggagaaaagcggaggcagacggtggatgacaacacgtcccgcagctgcagattttcgcgcgctttggcgcaggtggttgtgggtagcgcgcctgggagggagaaagaagtcgggggccgtggcgcgcagcccgcggggcctgaagggatgttcgaggacaagccccacgctgagggggcggcggtggtcgccgcagccggggaggcgctacaggccctgtgccaggagctgaacctggacgaggggagcgcggccgaagccctggacgactttactgccatccgaggcaactacagcctagagggagaagttacacactggttggcatgttcattatatgttgcatgccgcaaaagcattattcccacggttggaaagggtatcatggaaggcaactgtgtttcacttaccagaatactacgttcagctaaattaagtttaatacaattttttagtaaaatgaagaaatggatggacatgtcaaatctaccacaagaatttcgtgaacgtatagaaaggctagagagaaattttgaggtgtctactgtaatattcaaaaaatatgagccaatttttttagatatatttcaaaatccatatgaagaaccaccaaagttaccacgaagccggaagcagaggaggattccttgcagtgttaaggatctgtttaatttctgttggacactttttgtttatactaagggtaattttcggatgattggggatgacttagtaaactcttatcatttacttctatgctgcttggatctgatttttgccaatgcgattatgtgcccaaatagacaagacttgctaaatccatcatttaaaggtttaccatctgattttcatactgctgactttacggcttctgaagagccaccctgcatcattgctgtactgtgtgaactgcatgatggacttctcgtagaagcaaaaggaataaaggagcactactttaagccatatatttcaaaactctttgacaggaagatattaaaaggagaatgcctcctggacctttcaagttttactgataatagcaaagcagtgaataaggagtatgaagagtatgttctaactgttggtgattttgatgagaggatctttttgggagcagacgcagaagaggaaattggaacacctcgaaagttcactcgtgacaccccattagggaaactgacagcacaggctaatgtggagtataaccttcaacagcactttgaaaaaaaaaggtcatttgcaccttctaccccactgaccggacggagatatttacgagaaaaagaagcagtcattactcctgttgcatcagccacccaaagtgtgagccggttacagagtattgtggctggtctgaaaaatgcaccaagtgaccaacttataaatatttttgaatcttgtgtgcgtaatcctgtngaaaacattatgaaaatactaaaaggaataggagagactttctgtcaacactatactcaatcaacagatgaacagccaggatctcacatagactttgctgtaaacagactaaagctggcagaaattttgtattataaaatactagagactgtaatggttcaggaaacacgaagacttcatggaatggacatgtcagttcttttagagcaagatatatttcatcgttccttgatggcttgttgtttggaaattgtgctctttgcctatagctcacctcgtacttttccttggattattgaagttctcaacttgcaaccattttacttttataaggttattgaggtggtgatccgctcagaagaggggctctcaagggacatggtgaaacacctaaacagcattgaagaacagattttggagagtttagcatggagtcacgattctgcactgtgggaggctctccaggtttctgcaaacaaagttcctacctgtgaagaagttatattcccaaataactttgaaacaggaaatggaggaaatgtgcagggacatcttcccctgatgccaatgtctcctctaatgcacccaagagtcaaggaagttcgaactgacagtgggagtcttcgaagagatatgcaaccattgtctccaatttctgtccatgaacgctacagttctcctaccgcagggagtgctaagagaagactctttggagaggaccccccaaaggaaatgcttatggacaagatcataacagaaggaacaaaattgaaaatcgctccttcttcaagcattactgctgaaaatgtatcaattttacctggtcaaactcttctaacaatggccacagccccagtaacaggaacaacaggacataaagttacaattccattacatggtgtcgcaaatgatgctggagagatcacactgatacctctttccatgaatacaaatcaggagtccaaagtcaagagtcctgtatcacttactgctcattcattaattggtgcttctccaaaacagaccaatctgactaaagcacaagaggtacattcaactggaataaacaggccaaagagaactgggtccttagcactattttacagaaaggtctatcatttggcaagtgtacgcttacgtgatctatgtctaaaactggatgtttcaaatgagttacgaaggaagatatggacgtgttttgaattcactttagttcactgtcctgatctaatgaaagacaggcatttggatcagctcctcctttgtgccttttatatcatggcaaaggtaacaaaagaagaaagaacttttcaagaaattatgaaaagttataggaatcagccccaagctaatagtcacgtatatagaagtgttctgctgaaaagtattccaagagaagttgtggcatataataaaaatataaatgatgactttgaaatgatagattgtggtaagttatccaatttaacatattatatgtaaaacacattggatcacactgtacataatacagtgggtgtcagacaacatggaaatgtgaatcataaggaggtgaggtggacaatgcatatgttttgaaaacaaataagtttgagattagaatgtgctggtatagtttattgaaaccattaatttgtcccctgttaattgtgttttggaagaagttttctagtctacttatacatgttaatgaaacacgtaaaagagacttaataaaattctaaaatctgaatgacagggaaaacaa

SEQ ID NO: 70256 - DNA, 327 bp, Homo sapiens
tggcccctcgaggcccaagaattcggcacagggcttatggagcatcacagtggtagtcagggtcctttactgaccactggggacttagggaaagaaaagaaagaaaagaaagagaagaagctggggtctccaggcagggtagtaagctgacactaaataatttttacacaaaaatgtattgaagcaacaaatatttcctgaagatccaccctgggtgaggctttgagctgactttagagatcactgtggggtcaagaatgtcttacatgttttattcatcattcttgaaaaaagaaataattcaaaccttggaattaaaaagtcaga

SEQ ID NO: 70257 - DNA, 4530 bp, Homo sapiens
gaattccccagacttgtaagccgggggctgagcctcagggcaggggtgcagatgggggtgcagcctccccgcttcccggcgactccgggaaggtcagcgcgggcagtcggggcgcgctcctgcggccgggcctcgccggcaacccggtccccacctgaaaccccgcctgccactccgttccagagggccaatagccgtgcaacctgcccgggatggggcgggacttatgcaaatagtgtcgccttcgggaggcacatagtgatacaagagctggaaggcggctccggcgcagaccttggagagcacagctgccggcccgcgagccagcctcggttcccgcggcccgccgaggctcggagccatccagcgacccggcgaccggcctcaggccccgccatggggaagaccaacagcaagctggcccccgaggtgctggaggaccttgttcagaacactgagttcagcgagcaggagctgaagcagtggtacaagggcttcctgaaggactgccccagcggcatcctcaacctggaggagtttcagcagctctacatcaagttcttcccctacggcgacgcctccaagttcgcgcagcacgctttccgcaccttcgacaagaacggcgacggcaccatcgacttccgggagttcatctgcgccctgtcggtcacctcccgcggcagcttcgagcagaagctcaactgggcctttgagatgtacgacctggacggcgacgggcgcatcacgcgcctggagatgctggagatcatcgaggcaatctacaagatggtgggcaccgtgatcatgatgcgcatgaaccaggacgggctcacgccccagcagcgtgtggacaagatcttcaagaagatggaccaggataaggacgaccagattacattggaggagttcaaggaggcagccaagagtgacccatccattgtgttgctgctgcagtgtgacatgcagaagtagaagctggtgaggggcagggtccctggccagaaggggcatggccacctcccaacctgatgacctctctggctggcctcccaggaggagggacactccagcccccctctctggcccacccagtcctctgcccaagcccttcctcccctccatcaagatctttgagggaccacctcaccctgcaaaagagacaggtcctccagtaccctgtcttctagccccacctcccacttggccagaaccaatgtccattgggcataggggagttggcttttgccccaggaggtgaggttaaggagttgggggcctggggttctggttaggaattctcttgatcctgggattatgctttataggatgtggtcccacaggcctgtcacagggccaaattgggtctgtccattcctgaggctccagatcccataaagggggtctcttccccatcccttctactctacctggcccttccagccccagcctttggagcgttcattcagtcctttcttcagctaatgattactgagcacctgtttggtgctaaggatatggtcatttacaagacacatcttgtgccctctggaagctcatagggttgtgaggcaaacttccagccgtcagggtctcagctaagcagaaggtgctggaaggctggttagtctgggaggagctatttcatcttccagctcagctccacacaaagctgcagaaggacgaaatgaaaagcatttggaagtttaggagccacgtgagtgaaagttttaagaaaaatgaaatttatgtcatacttatttttttagtaccctttaaaggagctacagtcattttattatttcaggaggttaaaatatactctatattacttggtttcttataaaatgattaaatgaatagagaaaatattaattttcaaggggaaaaaacctgagaagaaagggagaaaagaccatgaaatttaccagataacactttttaagactaagtcctgagctgccactctcagcagtttttgctgcttcagctcttcctttttattacctttttcaattcaacaagcaactttctgctacatacttactccggttgggtgctgacttcagggacaggaaaaagcaaggtttgcaaagagtgaaactagtgtatattccgtatcttggtagttcgtttctggattgggtttagtttcagaactggacttgttccttcactgccacagaatcagaaagagctagaagaaaaggctcacctggccactgtttaggcacccagacataatttatggacgaaatgcctaaaaatgtgccaggcatgctctgtttgagaggctttttctaaccccaaatcttagatctgccaggtagttcaacatcttccaagtgtgctggttctgctttccaatgcctgcttcccaattttggatccatgagctatacagctgcatgctttgactgccggaaaaattaatcttgcttcttcatcaggtctttctcctgtacttgtgatcagaaattacctttgacgtgcagtgacagttgatttcctcttgaactgccggtgaaaacagtctagtacacaggtgctgtcagcccagggtgggagcaggaaatgattgctgagcccggggcaggggaattgcatctgcaggaaagagatgcagcatgctcctcactcctgagtgcccacctgtcctgcttctctgcaggtgaaaactctgggggatgctgatcaatagagcttggtcccaagctctactgggcccttggaggtagcaaggccactgggttgctatcctcttgctggggatagcaaccactggtttgcaaccactgggttgctatccttttgctatcctcttgctcatgaccagccatatggtgaggctggggagttcacatcctcaggcaggaactagcagttgtttatccagcaatgcctcaaggatgttgcattgctcccaggagctggctattaggtatgtcttgtgcggtcagtcagcatcacagacacatagatgctcaccagcctggcttagctgggacctaaatcttctggtgaaaagcttttcactaagtgaggttccttccctgcaaatgctgaatctagcctaattcgcaaccacacagaatttcatggctttcaaaggcttgccatgtgccccatctcattctatactcacatcccatggaggtgaggattttcacttcttttctctagacttggaagctgagattcagagaggaagcatcccttgtgcaagatcacatagtcaggaggtgacacagggctaagacttgaaccaaggctctaagaggatttcttcttttcagagtctcttccctgtccatttctgtgactaagctgtgcagaggttgacagcagggcaagttacattgatattcatcctttataggcttcctgctaaaaagcttctgagattgtggtcttccaaaaaaaataggagcttggttgaagtccccacattttcaagcactcagtgttctgcctctggcaccttgtgctaacagctcagtgctgtcctgggagtcctctgactcagaaccctcgaagcatcctgcattgtctttacccaccatcatcttcactaagagaaacatgcctacccatgaaggcgtgtttgattactccaggcttctggacacacatacccatgggtgatttttgctcctcaggcccaatattctcagacagcccagcagtgtgaacacacaatgccaggccaggaactgggaccaccatcttgctgatggaaggaacaacaggtggcccaggacatgctcctgcatactcctgggtgtcccagggactgtgtgctcaggagcactgtggtagagcactggccctgccttgagaagagacacaggtctcccgtccctgcaccagctgagagagacttgccacaaagcacaaggctggcagagatttatgtatgacttgcacagacacaaaaatatacagacaatcaaaacattgatatattcaaactctcctttaaattccaatcttattgcaacaactctgtgaattgcaaggtcccagaatctgccttctcacatactctaccctcattcatccttttgggctaattgatgagcatcttatttcttatctctaaaaattatcagcaaaggctacttcagatggccactttagtcctttcagctgtagtcaggattatttaacttacctgtatatcaaaagtgaagaaaaagttagttcataagtaaaggcactaaatcctttcctgacaatggcagagtctctagaggtagaaatttgccttgctgcagagagagaaggaatggcgtgggatgggggaaagaaaagaaagagaagaagctggggtctccaggcagggtagtaagctgacactaaataatttttacacaaaaatgtattgaagcaacaaatatttcctgaagatccaccctgggtgaggctttgagctgactttagagatcactgtggggtcaagaatgtcttacatgttttattcatcattcttgaaaaaagaaataattcaaaccttggaattaaaaagtcaga

SEQ ID NO: 70258 - DNA, 4858 bp, Homo sapiens
gaattccccagacttgtaagccgggggctgagcctcagggcaggggtgcagatgggggtgcagcctccccgcttcccggcgactccgggaaggtcagcgcgggcagtcggggcgcgctcctgcggccgggcctcgccggcaacccggtccccacctgaaaccccgcctgccactccgttccagagggccaatagccgtgcaacctgcccgggatggggcgggacttatgcaaatagtgtcgccttcgggaggcacatagtgatacaagagctggaaggcggctccggcgcagaccttggagagcacagctgccggcccgcgagccagcctcggttcccgcggcccgccgaggctcggagccatccagcgacccggcgaccggcctcaggccccgccatggggaagaccaacagcaagctggcccccgaggtgctggaggaccttgttcagaacactgagttcagcgagcaggagctgaagcagtggtacaagggcttcctgaaggactgccccagcggcatcctcaacctggaggagtttcagcagctctacatcaagttcttcccctacggcgacgcctccaagttcgcgcagcacgctttccgcaccttcgacaagaacggcgacggcaccatcgacttccgggagttcatctgcgccctgtcggtcacctcccgcggcagcttcgagcagaagctcaactgggcctttgagatgtacgacctggacggcgacgggcgcatcacgcgcctggagatgctggagatcatcgaggcaatctacaagatggtgggcaccgtgatcatgatgcgcatgaaccaggacgggctcacgccccagcagcgtgtggacaagatcttcaagaagatggaccaggataaggacgaccagattacattggaggagttcaaggaggcagccaagagtgacccatccattgtgttgctgctgcagtgtgacatgcagaagtagaagctggtgaggggcagggtccctggccagaaggggcatggccacctcccaacctgatgacctctctggctggcctcccaggaggagggacactccagcccccctctctggcccacccagtcctctgcccaagcccttcctcccctccatcaagatctttgagggaccacctcaccctgcaaaagagacaggtcctccagtaccctgtcttctagccccacctcccacttggccagaaccaatgtccattgggcataggggagttggcttttgccccaggaggtgaggttaaggagttgggggcctggggttctggttaggaattctcttgatcctgggattatgctttataggatgtggtcccacaggcctgtcacagggccaaattgggtctgtccattcctgaggctccagatcccataaagggggtctcttccccatcccttctactctacctggcccttccagccccagcctttggagcgttcattcagtcctttcttcagctaatgattactgagcacctgtttggtgctaaggatatggtcatttacaagacacatcttgtgccctctggaagctcatagggttgtgaggcaaacttccagccgtcagggtctcagctaagcagaaggtgctggaaggctggttagtctgggaggagctatttcatcttccagctcagctccacacaaagctgcagaaggacgaaatgaaaagcatttggaagtttaggagccacgtgagtgaaagttttaagaaaaatgaaatttatgtcatacttatttttttagtaccctttaaaggagctacagtcattttattatttcaggaggttaaaatatactctatattacttggtttcttataaaatgattaaatgaatagagaaaatattaattttcaaggggaaaaaacctgagaagaaagggagaaaagaccatgaaatttaccagataacactttttaagactaagtcctgagctgccactctcagcagtttttgctgcttcagctcttcctttttattacctttttcaattcaacaagcaactttctgctacatacttactccggttgggtgctgacttcagggacaggaaaaagcaaggtttgcaaagagtgaaactagtgtatattccgtatcttggtagttcgtttctggattgggtttagtttcagaactggacttgttccttcactgccacagaatcagaaagagctagaagaaaaggctcacctggccactgtttaggcacccagacataatttatggacgaaatgcctaaaaatgtgccaggcatgctctgtttgagaggctttttctaaccccaaatcttagatctgccaggtagttcaacatcttccaagtgtgctggttctgctttccaatgcctgcttcccaattttggatccatgagctatacagctgcatgctttgactgccggaaaaattaatcttgcttcttcatcaggtctttctcctgtacttgtgatcagaaattacctttgacgtgcagtgacagttgatttcctcttgaactgccggtgaaaacagtctagtacacaggtgctgtcagcccagggtgggagcaggaaatgattgctgagcccggggcaggggaattgcatctgcaggaaagagatgcagcatgctcctcactcctgagtgcccacctgtcctgcttctctgcaggtgaaaactctgggggatgctgatcaatagagcttggtcccaagctctactgggcccttggaggtagcaaggccactgggttgctatcctcttgctggggatagcaaccactggtttgcaaccactgggttgctatccttttgctatcctcttgctcatgaccagccatatggtgaggctggggagttcacatcctcaggcaggaactagcagttgtttatccagcaatgcctcaaggatgttgcattgctcccaggagctggctattaggtatgtcttgtgcggtcagtcagcatcacagacacatagatgctcaccagcctggcttagctgggacctaaatcttctggtgaaaagcttttcactaagtgaggttccttccctgcaaatgctgaatctagcctaattcgcaaccacacagaatttcatggctttcaaaggcttgccatgtgccccatctcattctatactcacatcccatggaggtgaggattttcacttcttttctctagacttggaagctgagattcagagaggaagcatcccttgtgcaagatcacatagtcaggaggtgacacagggctaagacttgaaccaaggctctaagaggatttcttcttttcagagtctcttccctgtccatttctgtgactaagctgtgcagaggttgacagcagggcaagttacattgatattcatcctttataggcttcctgctaaaaagcttctgagattgtggtcttccaaaaaaaataggagcttggttgaagtccccacattttcaagcactcagtgttctgcctctggcaccttgtgctaacagctcagtgctgtcctgggagtcctctgactcagaaccctcgaagcatcctgcattgtctttacccaccatcatcttcactaagagaaacatgcctacccatgaaggcgtgtttgattactccaggcttctggacacacatacccatgggtgatttttgctcctcaggcccaatattctcagacagcccagcagtgtgaacacacaatgccaggccaggaactgggaccaccatcttgctgatggaaggaacaacaggtggcccaggacatgctcctgcatactcctgggtgtcccagggactgtgtgctcaggagcactgtggtagagcactggccctgccttgagaagagacacaggtctcccgtccctgcaccagctgagagagacttgccacaaagcacaaggctggcagagatttatgtatgacttgcacagacacaaaaatatacagacaatcaaaacattgatatattcaaactctcctttaaattccaatcttattgcaacaactctgtgaattgcaaggtcccagaatctgccttctcacatactctaccctcattcatccttttgggctaattgatgagcatcttatttcttatctctaaaaattatcagcaaaggctacttcagatggccactttagtcctttcagctgtagtcaggattatttaacttacctgtatatcaaaagtgaagaaaaagttagttcataagtaaaggcactaaatcctttcctgacaatggcagagtctctagaggtagaaatttgccttgctgcagagagagaaggaatggcgtgggatgggggaaagaaaagaaagagaagaagctggggtctccaggcagggtagtaagctgacactaaataatttttacacaaaaatgtattgaagcaacaaatatttcctgaagatccaccctgggtgaggctttgagctgactttagagatcactgtggggtcaagaatgtcttacatgttttattcatcattcttgaaaaaagaaataattcaaaccttggaattaaaaagtcagaaaaatatgggattttctttctggaattttcgaggttttctttttacctttgccagagtgtgggggcaggactgggcctgccagggtgtatagcccttcctgcttggtggaggccagtcaggcccagggccttctaagcagcagtagaaaggaggcttggggaaggggggggtctgggtagcaggggaaggaggccagttccagtgtagccccctatcccctccagatgtgctgcttctggctgtgcaatgactcggtcccctgcgaggtgggccctggcatccggggggccgtgtcgcgccgacatagtacgcgagccgggcccttcc

SEQ ID NO: 70259 - DNA, 2929 bp, Homo sapiens
gaattccccagacttgtaagccgggggctgagcctcagggcaggggtgcagatgggggtgcagcctccccgcttcccggcgactccgggaaggtcagcgcgggcagtcggggcgcgctcctgcggccgggcctcgccggcaacccggtccccacctgaaaccccgcctgccactccgttccagagggccaatagccgtgcaacctgcccgggatggggcgggacttatgcaaatagtgtcgccttcgggaggcacatagtgatacaagagctggaaggcggctccggcgcagaccttggagagcacagctgccggcccgcgagccagcctcggttcccgcggcccgccgaggctcggagccatccagcgacccggcgaccggcctcaggccccgccatggggaagaccaacagcaagctggcccccgaggtgctggaggaccttgttcagaacactgagttcagcgagcaggagctgaagcagtggtacaagggcttcctgaaggactgccccagcggcatcctcaacctggaggagtttcagcagctctacatcaagttcttcccctacggcgacgcctccaagttcgcgcagcacgctttccgcaccttcgacaagaacggcgacggcaccatcgacttccgggagttcatctgcgccctgtcggtcacctcccgcggcagcttcgagcagaagctcaactgggcctttgagatgtacgacctggacggcgacgggcgcatcacgcgcctggagatgctggagatcatcgaggcaatctacaagatggtgggcaccgtgatcatgatgcgcatgaaccaggacgggctcacgccccagcagcgtgtggacaagatcttcaagaagatggaccaggataaggacgaccagattacattggaggagttcaaggaggcagccaagagtgacccatccattgtgttgctgctgcagtgtgacatgcagaagtagaagctggtgaggggcagggtccctggccagaaggggcatggccacctcccaacctgatgacctctctggctggcctcccaggaggagggacactccagcccccctctctggcccacccagtcctctgcccaagcccttcctcccctccatcaagatctttgagggaccacctcaccctgcaaaagagacaggtcctccagtaccctgtcttctagccccacctcccacttggccagaaccaatgtccattgggcataggggagttggcttttgccccaggaggtgaggttaaggagttgggggcctggggttctggttaggaattctcttgatcctgggattatgctttataggatgtggtcccacaggcctgtcacagggccaaattgggtctgtccattcctgaggctccagatcccataaagggggtctcttccccatcccttctactctacctggcccttccagccccagcctttggagcgttcattcagtcctttcttcagctaatgattactgagcacctgtttggtgctaaggatatggtcatttacaagacacatcttgtgccctctggaagctcatagggttgtgaggcaaacttccagccgtcagggtctcagctaagcagaaggtgctggaaggctggttagtctgggaggagctatttcatcttccagctcagctccacacaaagctgcagaaggacgaaatgaaaagcatttggaagtttaggagccacgtgagtgaaagttttaagaaaaatgaaatttatgtcatacttatttttttagtaccctttaaaggagctacagtcattttattatttcaggaggttaaaatatactctatattacttggtttcttataaaatgattaaatgaatagagaaaatattaattttcaaggggaaaaaacctgagaagaaagggagaaaagaccatgaaatttaccagataacactttttaagactaagtcctgagctgccactctcagcagtttttgctgcttcagctcttcctttttattacctttttcaattcaacaagcaactttctgctacatacttactccggttgggtgctgacttcagggacaggaaaaagcaaggtttgcaaagagtgaaactagtgtatattccgtatcttggtagttcgtttctggattgggtttagtttcagaactggacttgttccttcactgccacagaatcagaaagagctagaagaaaaggctcacctggccactgtttaggcacccagacataatttatggacgaaatgcctaaaaatgtgccaggcatgctctgtttgagaggctttttctaaccccaaatcttagatctgccaggtagttcaacatcttccaagtgtgctggttctgctttccaatgcctgcttcccaattttggatccatgagctatacagctgcatgctttgactgccggaaaaattaatcttgcttcttcatcaggtctttctcctgtacttgtgatcagaaattacctttgactgagctgactttagagatcactgtggggtcaagaatgtcttacatgttttattcatcattcttgaaaaaagaaataattcaaaccttggaattaaaaagtcagaaaaatatgggattttctttctggaattttcgaggttttctttttacctttgccagagtgtgggggcaggactgggcctgccagggtgtatagcccttcctgcttggtggaggccagtcaggcccagggccttctaagcagcagtagaaaggaggcttggggaaggggggggtctgggtagcaggggaaggaggccagttccagtgtagccccctatcccctccagatgtgctgcttctggctgtgcactcagtgactgccctcactgctcaaccctgtgctgtgtggtgtgtttctttccccactgacagtgaataaaaggtgcaactgtgaaaaaagc

SEQ ID NO: 70260 - DNA, 4869 bp, Homo sapiens
gaattccccagacttgtaagccgggggctgagcctcagggcaggggtgcagatgggggtgcagcctccccgcttcccggcgactccgggaaggtcagcgcgggcagtcggggcgcgctcctgcggccgggcctcgccggcaacccggtccccacctgaaaccccgcctgccactccgttccagagggccaatagccgtgcaacctgcccgggatggggcgggacttatgcaaatagtgtcgccttcgggaggcacatagtgatacaagagctggaaggcggctccggcgcagaccttggagagcacagctgccggcccgcgagccagcctcggttcccgcggcccgccgaggctcggagccatccagcgacccggcgaccggcctcaggccccgccatggggaagaccaacagcaagctggcccccgaggtgctggaggaccttgttcagaacactgagttcagcgagcaggagctgaagcagtggtacaagggcttcctgaaggactgccccagcggcatcctcaacctggaggagtttcagcagctctacatcaagttcttcccctacggcgacgcctccaagttcgcgcagcacgctttccgcaccttcgacaagaacggcgacggcaccatcgacttccgggagttcatctgcgccctgtcggtcacctcccgcggcagcttcgagcagaagctcaactgggcctttgagatgtacgacctggacggcgacgggcgcatcacgcgcctggagatgctggagatcatcgaggcaatctacaagatggtgggcaccgtgatcatgatgcgcatgaaccaggacgggctcacgccccagcagcgtgtggacaagatcttcaagaagatggaccaggataaggacgaccagattacattggaggagttcaaggaggcagccaagagtgacccatccattgtgttgctgctgcagtgtgacatgcagaagtagaagctggtgaggggcagggtccctggccagaaggggcatggccacctcccaacctgatgacctctctggctggcctcccaggaggagggacactccagcccccctctctggcccacccagtcctctgcccaagcccttcctcccctccatcaagatctttgagggaccacctcaccctgcaaaagagacaggtcctccagtaccctgtcttctagccccacctcccacttggccagaaccaatgtccattgggcataggggagttggcttttgccccaggaggtgaggttaaggagttgggggcctggggttctggttaggaattctcttgatcctgggattatgctttataggatgtggtcccacaggcctgtcacagggccaaattgggtctgtccattcctgaggctccagatcccataaagggggtctcttccccatcccttctactctacctggcccttccagccccagcctttggagcgttcattcagtcctttcttcagctaatgattactgagcacctgtttggtgctaaggatatggtcatttacaagacacatcttgtgccctctggaagctcatagggttgtgaggcaaacttccagccgtcagggtctcagctaagcagaaggtgctggaaggctggttagtctgggaggagctatttcatcttccagctcagctccacacaaagctgcagaaggacgaaatgaaaagcatttggaagtttaggagccacgtgagtgaaagttttaagaaaaatgaaatttatgtcatacttatttttttagtaccctttaaaggagctacagtcattttattatttcaggaggttaaaatatactctatattacttggtttcttataaaatgattaaatgaatagagaaaatattaattttcaaggggaaaaaacctgagaagaaagggagaaaagaccatgaaatttaccagataacactttttaagactaagtcctgagctgccactctcagcagtttttgctgcttcagctcttcctttttattacctttttcaattcaacaagcaactttctgctacatacttactccggttgggtgctgacttcagggacaggaaaaagcaaggtttgcaaagagtgaaactagtgtatattccgtatcttggtagttcgtttctggattgggtttagtttcagaactggacttgttccttcactgccacagaatcagaaagagctagaagaaaaggctcacctggccactgtttaggcacccagacataatttatggacgaaatgcctaaaaatgtgccaggcatgctctgtttgagaggctttttctaaccccaaatcttagatctgccaggtagttcaacatcttccaagtgtgctggttctgctttccaatgcctgcttcccaattttggatccatgagctatacagctgcatgctttgactgccggaaaaattaatcttgcttcttcatcaggtctttctcctgtacttgtgatcagaaattacctttgacgtgcagtgacagttgatttcctcttgaactgccggtgaaaacagtctagtacacaggtgctgtcagcccagggtgggagcaggaaatgattgctgagcccggggcaggggaattgcatctgcaggaaagagatgcagcatgctcctcactcctgagtgcccacctgtcctgcttctctgcaggtgaaaactctgggggatgctgatcaatagagcttggtcccaagctctactgggcccttggaggtagcaaggccactgggttgctatcctcttgctggggatagcaaccactggtttgcaaccactgggttgctatccttttgctatcctcttgctcatgaccagccatatggtgaggctggggagttcacatcctcaggcaggaactagcagttgtttatccagcaatgcctcaaggatgttgcattgctcccaggagctggctattaggtatgtcttgtgcggtcagtcagcatcacagacacatagatgctcaccagcctggcttagctgggacctaaatcttctggtgaaaagcttttcactaagtgaggttccttccctgcaaatgctgaatctagcctaattcgcaaccacacagaatttcatggctttcaaaggcttgccatgtgccccatctcattctatactcacatcccatggaggtgaggattttcacttcttttctctagacttggaagctgagattcagagaggaagcatcccttgtgcaagatcacatagtcaggaggtgacacagggctaagacttgaaccaaggctctaagaggatttcttcttttcagagtctcttccctgtccatttctgtgactaagctgtgcagaggttgacagcagggcaagttacattgatattcatcctttataggcttcctgctaaaaagcttctgagattgtggtcttccaaaaaaaataggagcttggttgaagtccccacattttcaagcactcagtgttctgcctctggcaccttgtgctaacagctcagtgctgtcctgggagtcctctgactcagaaccctcgaagcatcctgcattgtctttacccaccatcatcttcactaagagaaacatgcctacccatgaaggcgtgtttgattactccaggcttctggacacacatacccatgggtgatttttgctcctcaggcccaatattctcagacagcccagcagtgtgaacacacaatgccaggccaggaactgggaccaccatcttgctgatggaaggaacaacaggtggcccaggacatgctcctgcatactcctgggtgtcccagggactgtgtgctcaggagcactgtggtagagcactggccctgccttgagaagagacacaggtctcccgtccctgcaccagctgagagagacttgccacaaagcacaaggctggcagagatttatgtatgacttgcacagacacaaaaatatacagacaatcaaaacattgatatattcaaactctcctttaaattccaatcttattgcaacaactctgtgaattgcaaggtcccagaatctgccttctcacatactctaccctcattcatccttttgggctaattgatgagcatcttatttcttatctctaaaaattatcagcaaaggctacttcagatggccactttagtcctttcagctgtagtcaggattatttaacttacctgtatatcaaaagtgaagaaaaagttagttcataagtaaaggcactaaatcctttcctgacaatggcagagtctctagaggtagaaatttgccttgctgcagagagagaaggaatggcgtgggatgggggaaagaaaagaaagagaagaagctggggtctccaggcagggtagtaagctgacactaaataatttttacacaaaaatgtattgaagcaacaaatatttcctgaagatccaccctgggtgaggctttgagctgactttagagatcactgtggggtcaagaatgtcttacatgttttattcatcattcttgaaaaaagaaataattcaaaccttggaattaaaaagtcagaaaaatatgggattttctttctggaattttcgaggttttctttttacctttgccagagtgtgggggcaggactgggcctgccagggtgtatagcccttcctgcttggtggaggccagtcaggcccagggccttctaagcagcagtagaaaggaggcttggggaaggggggggtctgggtagcaggggaaggaggccagttccagtgtagccccctatcccctccagatgtgctgcttctggctgtgcactcagtgactgccctcactgctcaaccctgtgctgtgtggtgtgtttctttccccactgacagtgaataaaaggtgcaactgtgaaaaaagc

SEQ ID NO: 70261 - DNA, 3819 bp, Homo sapiens
gaattccccagacttgtaagccgggggctgagcctcagggcaggggtgcagatgggggtgcagcctccccgcttcccggcgactccgggaaggtcagcgcgggcagtcggggcgcgctcctgcggccgggcctcgccggcaacccggtccccacctgaaaccccgcctgccactccgttccagagggccaatagccgtgcaacctgcccgggatggggcgggacttatgcaaatagtgtcgccttcgggaggcacatagtgatacaagagctggaaggcggctccggcgcagaccttggagagcacagctgccggcccgcgagccagcctcggttcccgcggcccgccgaggctcggagccatccagcgacccggcgaccggcctcaggccccgccatggggaagaccaacagcaagctggcccccgaggtgctggaggaccttgttcagaacactgagttcagcgagcaggagctgaagcagtggtacaagggcttcctgaaggactgccccagcggcatcctcaacctggaggagtttcagcagctctacatcaagttcttcccctacggcgacgcctccaagttcgcgcagcacgctttccgcaccttcgacaagaacggcgacggcaccatcgacttccgggagttcatctgcgccctgtcggtcacctcccgcggcagcttcgagcagaagctcaactgggcctttgagatgtacgacctggacggcgacgggcgcatcacgcgcctggagatgctggagatcatcgaggcaatctacaagatggtgggcaccgtgatcatgatgcgcatgaaccaggacgggctcacgccccagcagcgtgtggacaagatcttcaagaagatggaccaggataaggacgaccagattacattggaggagttcaaggaggcagccaagagtgacccatccattgtgttgctgctgcagtgtgacatgcagaagtagaagctggtgaggggcagggtccctggccagaaggggcatggccacctcccaacctgatgacctctctggctggcctcccaggaggagggacactccagcccccctctctggcccacccagtcctctgcccaagcccttcctcccctccatcaagatctttgagggaccacctcaccctgcaaaagagacaggtcctccagtaccctgtcttctagccccacctcccacttggccagaaccaatgtccattgggcataggggagttggcttttgccccaggaggtgaggttaaggagttgggggcctggggttctggttaggaattctcttgatcctgggattatgctttataggatgtggtcccacaggcctgtcacagggccaaattgggtctgtccattcctgaggctccagatcccataaagggggtctcttccccatcccttctactctacctggcccttccagccccagcctttggagcgttcattcagtcctttcttcagctaatgattactgagcacctgtttggtgctaaggatatggtcatttacaagacacatcttgtgccctctggaagctcatagggttgtgaggcaaacttccagccgtcagggtctcagctaagcagaaggtgctggaaggctggttagtctgggaggagctatttcatcttccagctcagctccacacaaagctgcagaaggacgaaatgaaaagcatttggaagtttaggagccacgtgagtgaaagttttaagaaaaatgaaatttatgtcatacttatttttttagtaccctttaaaggagctacagtcattttattatttcaggaggttaaaatatactctatattacttggtttcttataaaatgattaaatgaatagagaaaatattaattttcaaggggaaaaaacctgagaagaaagggagaaaagaccatgaaatttaccagataacactttttaagactaagtcctgagctgccactctcagcagtttttgctgcttcagctcttcctttttattacctttttcaattcaacaagcaactttctgctacatacttactccggttgggtgctgacttcagggacaggaaaaagcaaggtttgcaaagagtgaaactagtgtatattccgtatcttggtagttcgtttctggattgggtttagtttcagaactggacttgttccttcactgccacagaatcagaaagagctagaagaaaaggctcacctggccactgtttaggcacccagacataatttatggacgaaatgcctaaaaatgtgccaggcatgctctgtttgagaggctttttctaaccccaaatcttagatctgccaggtagttcaacatcttccaagtgtgctggttctgctttccaatgcctgcttcccaattttggatccatgagctatacagctgcatgctttgactgccggaaaaattaatcttgcttcttcatcaggtctttctcctgtacttgtgatcagaaattacctttgacgtgcagtgacagttgatttcctcttgaactgccggtgaaaacagtctagtacacaggtgctgtcagcccagggtgggagcaggaaatgattgctgagcccggggcaggggaattgcatctgcaggaaagagatgcagcatgctcctcactcctgagtgcccacctgtcctgcttctctgcaggtgaaaactctgggggatgctgatcaatagagcttggtcccaagctctactgggcccttggaggtagcaaggccactgggttgctatcctcttgctggggatagcaaccactggtttgcaaccactgggttgctatccttttgctatcctcttgctcatgaccagccatatggtgaggctggggagttcacatcctcaggcaggaactagcagttgtttatccagcaatgcctcaaggatgttgcattgctcccaggagctggctattaggtatgtcttgtgcggtcagtcagcatcacagacacatagatgctcaccagcctggcttagctgggacctaaatcttctggtgaaaagcttttcactaagtgaggttccttccctgcaaatgctgaatctagcctaattcgcaaccacacagaatttcatggctttcaaaggcttgccatgtgccccatctcattctatactcacatcccatggaggtgaggattttcacttcttttctctagacttggaagctgagattcagagaggaagcatcccttgtgcaagatcacatagtcaggaggtgacacagggctaagacttgaaccaaggctctaagaggatttcttcttttcagagtctcttccctgtccatttctgtgactaagctgtgcagaggttgacagcagggcaagttacattgatattcatcctttatagtgagctgactttagagatcactgtggggtcaagaatgtcttacatgttttattcatcattcttgaaaaaagaaataattcaaaccttggaattaaaaagtcagaaaaatatgggattttctttctggaattttcgaggttttctttttacctttgccagagtgtgggggcaggactgggcctgccagggtgtatagcccttcctgcttggtggaggccagtcaggcccagggccttctaagcagcagtagaaaggaggcttggggaaggggggggtctgggtagcaggggaaggaggccagttccagtgtagccccctatcccctccagatgtgctgcttctggctgtgcactcagtgactgccctcactgctcaaccctgtgctgtgtggtgtgtttctttccccactgacagtgaataaaaggtgcaactgtgaaaaaagc

SEQ ID NO: 70262 - DNA, 366 bp, Homo sapiens
aattaaaggaaataatcaatgtgaaggacttagtgataggttggttattgtacaataactcattagatgctcacggttctgtgagacaagtattactatttcatgtatgaagaatctgaggctaaaaaaattaatttgcccaaagtttcttacctagtaagtggctgactcagtatgccatcccaggtcctctgttagtgtaggaattgccctggcctagaccaaccagctgttaaaggataacagagcaaatatttatactgatagtacatatgttttggtggttcgtcaatgactttggagtgctttaaaaacaaagatttcctgaccgcttcaggaacctctacgaaatgaatggcaaattaa

SEQ ID NO: 70263 - DNA, 1610 bp, Homo sapiens
aagaaattgagaaaagggtaggaaagcagatgtgaatggcaaaactggtggggagaggcaccccaggccatgggctggagcagagggcctggcaggggtggtgggagaggcagcagggggaagagcagtcagcaaagtggctacagaggtcagcagggagctcctgaggaccaagggtggcctgggaaggtctggggactagatcctgagggcagtggggtggtcactgtaggatttcaagggagtcagatttgtgttctagaaaggttgtcaccatatggcctgaccatatgccagtctggttcattactgttttcctagcacctagctcagtgccagcacacagtagatgttcagtaaatgctttgaatcaatacacagatgccagcggtgtatccagaggcaatggttaactcctgtgggggtccttcagcttcagtttcctcctttgtgaacgagggcactggcacctgcctggtgggcatgttgtgatggtgaagggagcatggcagtttgggcttgctgtcctgcacacggtcagcgctctgtaatggcagcttttataaaacgtgtggaggatgtgccaaggggaacatgggggcaaggaccctggacaggagtggtcaagtcagccagaggagagagaataatgatgacaacagtgacgttgatcaaaggctgaagttcttcatgtatttcattcatgtcatcctcaacacagtgaaggaagacggcaccgtagttatccctgtgttattttccaggaggcggcggctcagagaggagtgactcgcctgaagccccgtgaacaatgcatggtggacggaagtacatggaatgccagagccaggctggtgactagtgctggtggtggggactggtcaaggcggccgccagggaagggatgtgaggacacggtctagactgatggaccagatggcgggggcaggcacagggggagggaggtttccaggacacccctcagtttctggcccaggtgaccaggtggaaggtcattccatctcctgagtgagggacacagcaggacagacaggcttggggagggactgttgggatgtctggagtctaggagaggatccaggcgggggatggaggggagggcggaatgagctcatggggcaagtggaaggcttgtgggcggtggaaaagctccagcccccggacacctagccaaggtcaagtaataacgacagtagacgttacatagccttgactctgtacagacctcatcctgcatccttacgttaactcattgaaccctcccaaccattatcaaattggaggtaccattatcacccccattttatagttggggaaactgaggcaagagacattaagtctgcaatattggaataggcaaatctgtagagaaaggaatgtgggtgagtggtgggctggggctgggggctgggaaggatcatggctaacgggcacaggctttcttttttgggtgatgaaaatattctaaaatgactgtgaaaatattgcacaactctgtgaacatgtgaaaacccactgaactgtatgctctaactgtatgaattgtatggtatttgaatttcacctcaataaagctgttatcaaaaagc

SEQ ID NO: 70264 - DNA, 572 bp, Homo sapiens
ctttattttaggagatgtaaacagaagattcagaggtgacatgtcatcatgtttgcaacttatttacaaatagttcagtgctcagtacgtgtgtgtgtgtgtgtgtgtgtgtattttgagtggcatcagttgcattcttttcttcctctgcctgtctggagggcacttttaatgtacctgtcctcatactctccattatgagttttaatcacaatagaaatttttttcccaccactttgatgaaaggtcatatttattgggcagacttatctattctatttaataatcttataatatactatatacattacctggggtaaatgtaagtacagcatttaggatttcacaatctatttacaaatgagactgacctgtaaatcccccttttggggaatactactatggtcagattctggttattttaagtgaataaaatgaaccggatggcttcgcatgctctgacaccatttatataagaatcatctgttcaataacacgtaggacgaggactctgctactgaaacttcctgagtgaacactgataagtggcatgaagaaacaaccaaagcaac

SEQ ID NO: 70265 - DNA, 491 bp, Homo sapiens
ctttattttaggagatgtaaacagaagattcagaggtgacatgtcatcatgtttgcaacttatttacaaatagttcagtgctcagtacgtgtgtgtgtgtgtgtgtgtgtgtgtgtgtgtgtgtgtgtggtgtgtgtgtgatgtaaaatacatactctacagtgaaatgttaacaacgttgaatttagatggtgggtatactgacgttcattttatcattatttcaccttttccttatgtttcaacattttcacagttaaaagttggaggcataaactctccagatgactccgatgttctcccaggtttaggtgctgtgtggtagacttcactgagctctaagagggaaggtgtgtctgtcttttgagtcctacagcacaagtctagcagatggtaaattcttgtcaacctgggctcccttctctcctctcctctggatttttgggacacttagcaaatcatttctgacttactcatgaggcttgtctctt

SEQ ID NO: 70266 - DNA, 316 bp, Homo sapiens
tgctaacctttcagttcaattgcattgtgatctttattcagtttgaccagcaagaaaatttcagtagagcattttaatagggagaaagctgaattttaaattagattactagtttggaatgagacttacgattgttgctaggagtagaggataataataagaacaaatatttataaagaacagcttatgaagcattttaacataccttaataattctcacagcaagcatatgagttagctattactcctgtttgcatttgacagataacactgaggctagaaaaggttaaattactagatgtccatggtcacacag

SEQ ID NO: 70267 - DNA, 371 bp, Homo sapiens
ctactcaggaggctgaggggagaggatcacttgagccctggaggtagaggctgcagtgagctgtcatcgtgtcagtgcactcctgcctgggggacagggagaaaccccgtctcaaaaaaataaactggataaacacttaagtgtttgaaatactttcacgaatactttcacaggaacagatgaatagaaatcacttagcaacattttcaaggcaacatctgaaaactactttgtctatttcctgacgtatgttagggcctaagtgaaccaaaagagatgtctacaatgccagttctgaaaatgttaccactttggtcagacaagtgtttagtcttactgtatagttctgtttatcagaaacccagagtagc

SEQ ID NO: 70268 - DNA, 581 bp, Homo sapiens
  misc_feature (575)..(575): n is a, c, g, or t
  misc_feature (577)..(578): n is a, c, g, or t
ctggctggtgcccgggcagagtcgcagggaagagaggccaagagccaacgctgacctcactgtgcgggtgcactgggggcccctgcgaagctgacctcactgcgcaggtgcactgggggcctccgtgaaggggtcggtgaggagctggacaaagatcagagcaggtttgagagagaatgggaaggcagaacctggagcttgcagatgaagcagtggagagggatgtggatcgatgttttggtttttttaatggagcagattacagtttacagattgctgagagaatggtccaacagaaagtgaggaggaggaatgagtctaatgtctgtacgaagcaactagagtcttgttaaaatgcagattccttcaaacctagggatcctgaaaaaaaggaaaatgcagattctcagagggagagagtccaggggtgcgggggccagtcaaaaaaactacctactggataccatgctaagtgatgcgatccttactgcagacctcagcatcacgcgatatacccaggtaacaaacctgcacatgtaccccctgtatttaaaataaaagttgaaattagaaanannaaa

SEQ ID NO: 70269 - DNA, 469 bp, Homo sapiens
tatggtattaaaatcttgctctcggccttagcgccatttttttggaaacctctgcgccatgagagccaagtggaggaagaagcgaatgcgcaggctgaagcgcaaaagaagaaagatgaggcagaggtccaagtaaaccgctagcttgttgcaccgtggaggccacaggagcagaaacatggaatgccagacgctggggatgctggtacaagttgtgggactgcatgctactgtctagagcttgtctcaatggatctagaacttcatcgccctctgatcgccgatcacctctgagacccaccttgctcatgaacaaaatgcccatgttggtcctctgccctggacctgtgacattctggactatttctgtgtttatttgtggccgagtgtaacaaccatataataaatcacctcttccgcggttttagctgaagaattaaaaaaaataaaataaaataaaatcttatgg

SEQ ID NO: 70270 - DNA, 269 bp, Homo sapiens
actgtacactttacaaacactgtacacttggccatactaaatttattttaaaaacatacattcaataatagattaacctaacttactgtaactttcttacattttataaacttttttttttaacttcttgactcttgtagtaacacttagcttaaaacacaaacacagtacagctatacaaaaatatctttcttttatcttttttccgagatggagtctccctctgtcacccaggctggaatgcagtggcacgatcttagctcactgca

SEQ ID NO: 70271 - DNA, 446 bp, Homo sapiens
agtatcagattgtttgctccataaaaactgttctggtttatagctgtatcccaggagtccaggccagttgtcagcacataataggggctcaataaatatttgctaaaaaaaaaaaaagaatcaagctgttaaaaattaagcttatctttcttgaaaaattccaatgtagattagatatgtatgatgaatgcctcccaagtcttcagtaaattttctcatgaacagtttccacagcagcacagagccattatttaggtggttgtaaaaatatgaatttgattgttaccaagtagggtagtcttgtttaaaatacaaaagataaagttgtaaaagtgggcaattatgatgggattcaccagtaatgcttctcttcttccaattatcaggaagattcacccatctagaacaaaggctcttaacacatattagagtcaccaggagagctc

SEQ ID NO: 70272 - DNA, 165 bp, Homo sapiens
ataaaatattttaaaagagaaactgagtcaatatttatggcaatacttggttggcatagctagaattcaacaaatattcatcattactaaagtgtgttttgatagtgctgagatgttttctttttcttctgtatcttcatggatatctagaagaacacagaaatt

SEQ ID NO: 70273 - DNA, 892 bp, Homo sapiens
agacaagtggatgattaatgaagtagcatctgaaaaacccaaggaaccaaatgtaggtggagcaacttccctgcaacacacgtcgaagctgctgcagtggctgttcttcccctccccttggaaaggcaccaaaagccagcctttggaagggctggtggactgtgcccttctttcccttcagagaaccagtgtccctgtgactccacccactcatctggccaccgttgccctgacctgccaggagcctggagaagatgaaggcatccgtggttctctccctccttggctacctggtggttccaagtggtgcttacatcttggggcgttgcacagtggctaagaaactccacgatggaggcctggattattttgagggctatagccttgagaactgggtgtgcctggcctacttcgagagcaagttcaaccccatggccatctacgagaacacacgtgagggctacactggctttggcctctttcagatgcgtggcagtgactggtgtggcgaccatggcaggaaccgctgccatatgtcatgttccgctttactgaatcctaatttagagaagacaattaaatgtgccaagaccattgtaaaaggaaaagaagggatgggagcatggcccacctggtcccggtactgccagtactccgataccctggcacggtggctggatggttgcaagctgtagccgcctgcatggcccctgcagcactcaccagttgcatcttgtgaatgaaggtgcttttctgcttgctgcttcagtcaatccttttgatgatctcaccactttaagagttccagatggaaaaagacaaaagtttgcttcatccggggatgcaggatgcagaataaaccaaactagttactcaacttgggccaaaggtc

SEQ ID NO: 70274 - DNA, 739 bp, Homo sapiens
  misc_feature (49)..(49): n is a, c, g, or t
attaaactcatattttcatacgaaataatgaggagaagtagcagcatgnctctcttattatccaccgctacagaaaataggaggtcaagaggaggagaaggggcagagtttcaggtgtcccagatttgcagtgacacgaagcagagaattaggatgggaagaagtgtcatggcttaccagtggctaagaaactccacgatggaggcctggattattttgagggctatagccttgagaactgggtgtgcctggcctacttcgagagcaagttcaaccccatggccatctacgagaacacacgtgagggctacactggctttggcctctttcagatgcgtggcagtgactggtgtggcgaccatggcaggaaccgctgccatatgtcatgttccgctttactgaatcctaatttagagaagacaattaaatgtgccaagaccattgtaaaaggaaaagaagggatgggagcatggcccacctggtcccggtactgccagtactccgataccctggcacggtggctggatggttgcaagctgtagccgcctgcatggcccctgcagcactcaccagttgcatcttgtgaatgaaggtgcttttctgcttgctgcttcagtcaatccttttgatgatctcaccactttaagagttccagatggaaaaagacaaaagtttgcttcatccggggatgcaggatgcagaataaaccaaactagttactcaacttgggccaaaggtc

SEQ ID NO: 70275 - DNA, 873 bp, Homo sapiens
agacaagtggatgattaatgaagtagcatctgaaaaacccaaggaaccaaatgtaggtggagcaacttccctgcaacacacgtcgaagctgctgcagtggctgttcttcccctccccttggaaaggcaccaaaagccagcctttggaagggctggtggactgagaaccagtgtccctgtgactccacccactcatctggccaccgttgccctgacctgccaggagcctggagaagatgaaggcatccgtggttctctccctccttggctacctggtggttccaagtggtgcttacatcttggggcgttgcacagtggctaagaaactccacgatggaggcctggattattttgagggctatagccttgagaactgggtgtgcctggcctacttcgagagcaagttcaaccccatggccatctacgagaacacacgtgagggctacactggctttggcctctttcagatgcgtggcagtgactggtgtggcgaccatggcaggaaccgctgccatatgtcatgttccgctttactgaatcctaatttagagaagacaattaaatgtgccaagaccattgtaaaaggaaaagaagggatgggagcatggcccacctggtcccggtactgccagtactccgataccctggcacggtggctggatggttgcaagctgtagccgcctgcatggcccctgcagcactcaccagttgcatcttgtgaatgaaggtgcttttctgcttgctgcttcagtcaatccttttgatgatctcaccactttaagagttccagatggaaaaagacaaaagtttgcttcatccggggatgcaggatgcagaataaaccaaactagttactcaacttgggccaaaggtc

SEQ ID NO: 70276 - DNA, 310 bp, Homo sapiens
aatctaggtctccaggcctcagatgcagctatctctgtcagcatcagacagcctccttgattctggcaagagagtgaatggctggttgttgcctggcaaccacagccaccccagatgttttctatctccacattttcatgagaatcaggccattcagcgatagctgggctcagacctcagagagaaaatgtctctggtcttaggggcagtagggacaggactcctcatgtttgaagcatttacctaggctaggcacagtcagttcccctccaggttctagaactctcccaggctgccccgacccatttct

SEQ ID NO: 70277 - DNA, 285 bp, Homo sapiens
gtgtgtgtgtgtgtgagagagagagagagagagagaaattcattgatgactgtatttttaatcctccttccttggtacactatttattcattttacatgaacctcaaagcagaggcacagagctggtattgaatgccagatccttgatcacactatctatcttactgaaaatgtaagagctaaggggttcattgatgctagtttgttttgtagctagagtatccttacctgacttgtgaccttgggcatgtaccttcatctttttgtgccttcacctttctcacc

SEQ ID NO: 70278 - DNA, 662 bp, Homo sapiens
gatatacctaatgttaaatgacgagttgatgggtgcagcacaccaacatggctgcacatgtatacatgtgtaacctgcacgttgtgcacatgtaccctaaaactttaagtataattaaaaaaaataaagtgctttaagttataagtgtgctggaaaataattgaaataggatagttgacatgcgagcgtggattgcacgttaggtaaatggttttctaacattgtcagctctccttccctttagaggagataagattatgccactatatttgaatgctgaccaatgctgtatggccgtcggtgctttattttgattgtagtaactgcaacttaagaaagtaaaaatgggccggcgcggtggctcacgcctgtaatcccggcactttgggaggccgaggcaggcggatcacctgaggtgaggagttcgagaccaggctggccaatatggcgaaaccccgtctctactagaaatacgatcattagccaggcgtggtggcgggcgcctgtaatctcacctacttgagaggctgaggcagggagaatcgcttgaacccgggaggtggaggttgcagtgagccgagatcgcgccactgcactccagcctggtcggcagagtgagacccactctcaaagtcgacgcggccgcgaatttagtagtagta

SEQ ID NO: 70279 - DNA, 174 bp, Homo sapiens
gcttctcttaaaacataggaaggtgcggcgggcagctctgagtgccagcccggtggcagattttccagagtagtggtgtcttgcccaggtatccgtttcattcttcaggttcattgagtcttacagatacaagttttgaatccattgctcaggagcgtttagtgcagatggtct

SEQ ID NO: 70280 - DNA, 443 bp, Homo sapiens
  misc_feature (434)..(434): n is a, c, g, or t
  misc_feature (443)..(443): n is a, c, g, or t
ttagcagaaattctttttgatactaacttgtgtgtaatgtatttcaggactatgactatgattttggggggaatttttttaaaatgtcaaaccagtgaactccaggagtagaggggagtcctaattttttctttatctgtttagaaaccaccggggtgatgagcatgctttttaacagcaaaagcttctctagatgtagaaataattttttttcttttgggtctaatttatattgacaaataatttgaggctaggagttctaggtctagactccctcccagggccattgtgagatttaaatgagatttaatgaatttgaaaacacattgtaagttttaaataacttcacagctataaggggttgctaatactatcagtgtctgagatatctagaataccaaggaattttcttctaatttgttagcaagattttnttcccctcn

SEQ ID NO: 70281 - DNA, 223 bp, Homo sapiens
ctgtcagtaatggctcactaaagggccagcagtttaaattacacaggttgcactaaaagctgcagctttggccaggcaaggtggatcacgcctataatcccaacactttgggaggccgaggcgggcaaatcacctgaggtcaggagttcaagaccagcctggccaatatggtgaaacctagcctctactaaaaatacaaaaattagccggacgtggtggcaca

SEQ ID NO: 70282 - DNA, 3014 bp, Homo sapiens
  misc_feature (531)..(531): n is a, c, g, or t
  misc_feature (538)..(538): n is a, c, g, or t
  misc_feature (563)..(563): n is a, c, g, or t
  misc_feature (1002)..(1002): n is a, c, g, or t
  misc_feature (1129)..(1129): n is a, c, g, or t
  misc_feature (1389)..(1389): n is a, c, g, or t
  misc_feature (1391)..(1391): n is a, c, g, or t
  misc_feature (1752)..(1752): n is a, c, g, or t
  misc_feature (1802)..(1802): n is a, c, g, or t
atttgtaatatattttgaaatcaggaagtgcaatgtctacagcattgttttccattctcaggattgttttgggtatttgaaatcctttgtacttccatatgaattttaggatatttttctatttctgttaaaaaatgccattgtgattttgataggaatttcactgaatttgtaaactgctttgggtagtataaacattttaacaatattaagtcttctaatccatgaacacaggatatctatttatttgtgtcgtctttaattttactcatgaattttttttgcaatctacagtgtgcaagttgttcaccttctcagttaagtttatttctaagtactttgttcttttgatgatattgtaagtggggtcattttcttaatttcttttcattgtttgtacatagaaacacaaccaatttttgtatgcttgttttataccctgcaacattactgaatttgtttattataataggtttttacggtagaatctttagggtgttctacatttaagatcataccatctcaaatagntataatnttacttctttctttatgacttatanattccttttatttatttttctgcttaattagtcaggctaggacttctagtactatgttgaataggatagacaagtgtgggcatcatttccttgttcctgatgttggaggaaaagctttcgattttttttattattgaatgtgatgttagttggggtctttttatgtattttctttcttatcttaagtaaattcttctactcctagtttgttgagtttttgtcatgaaaatgtgttgaatgttttcaaatcctgggtttttaaaatctaattagactatcatgttgtttttatcctttatgtgattactgtggtctatcatgttaattttcatacgttgaaccccccttgcatccagggataaaggctacttggtggtgatgaatgatgaaaggctactatgctgttgaatttagcttgctggtgttttattgaagattntttttatctagcatagaggcagacatattgactaatggaacagaataaaaactctagaaataaatccatgcatatataaaccactgatgttttactatggtaccaggaatatacaatggaggaaggntagcctcttcaacaaatgatgttgggaaaactgggtatccacatacaaaagaatgaaatcaagtacttatcttataccatacacaaaaatcaagttaaactaggttaaagacgtaaacataagacctgaaactgtagaatgcctagaggaaaacataggaaaaatgcttcatgagttttgtcttgtcagcttcttagatatgacccccaaatcacaggcaacaaaagcaaaattagacaagtggaactagataaaactananggcttctgcatatcaaaggaaacaactaacagtaaaaagacaacctacagaatgtgagggagaaaatatttgaaaactgcatatatacgatatggagttaatatccaaaatatataaggagctcctaaatttcaatagtgaaaataatcaaataacgcaattaaaaatgggcaaaggatttgaaaaggcatttctcaaaacagacatacaaattgtcaataagtacgtaagaaagttctcaacatcactagttatcagggagatggaaatcaaaaccactatgagatatcatctcacacctgttaggaagctattatgaaaaaagtaaaaacaaatgttaataaggatatggagaaactgnaacccttgtactttgttgctgtggatataaaaggttgcagccactatagnaagcagcatggagattccgcaaaaattaaaaatagaagtactatatgatccaacaattcaacttctgggtatttatccaaaagaattgacatcaggatcttgaaaagatatttacacttccatgttctctgcagcattatacggaataaccaaaatgtggaaacaacctaaatgtccatcaatggataaagggataaagaaaatactctgtgtgtgtgtgtgtgtgtgtgtgtgtgtgtgtgtgtgtgtgtgtgtgtatgtgtgtatatgtgtgtgtgtgtatatacatatgaatatttagcttttagaaagaagaaaattctttcatatgtgatcactattatgagttttgcctccagcagcaactctgccaggtcctcacaatgaatttcagaaaagatttccttgtgcttctggcccagaaggggaaaggaaacaacttttaaatatgtcaaagtattctgttcttcttaaccaggtctgccttcaggagaaactgtaaccaaaataatcaactgagattttaacagagcctaactgatttgggagaagaggaatatccaactcgaacctactctagctatcttgttctatataggacttttctttttggaatttccactatatgtatgtttcaccttttgtagttgtctcacagttcttggatatcctattttgttgtacttttgcagtactctcacccatctatcagaaatgtacaaatcaagcaggcagaaaattagtaaggatctagttgaactcaacactattaagtaacttgatataatggacatctgtagactatttgattcagcaacaggagaatacacattcttctcaaactcctgtggaacattcaccaagatagagcatattctgagtgacataaaaatcttaaccaatttaaaataatagaaatcatataatgtctgctctcagaccacaatggatttaaactagaaattgataacagaaaaacagttggaaagttccaaaatatttagagattagatagcatacttctaagtaatataagagtcaaacaagaaatctcaagaaaaaatttaaaaatattttgaactaacagaaaatgaaaaatataacttatcaaaatgtgtaagatgcggtgatgagagagaaatttataccacttaatgcatatattagaatggaagaatgctctaaaataaatcatctaagcttccaccttag

SEQ ID NO: 70283 - DNA, 193 bp, Homo sapiens
ctcttctgtgggtgctatgtcagttcgtggagaatcatgatatgcggtacagagaggcagggttctcagtcgagttcataggctacacttacccccagtgtatgcagccaggggaagttgtgtgcgttcacaaaatgaggttcttcttgttaaggaaggggatgaatagttcccagatatgagcctcagtcta

SEQ ID NO: 70284 - DNA, 285 bp, Homo sapiens
ttttctccttacttagagcttggattgtctctttctttgcaatctcatgctgcctttctgcatcaatctattcagggtgtctctttggataaaacaatattttgaagtcatcaccttgtcaggtaacccaagaccatgcttttgtctaatgttagaaatttcttactattggaagtagtacattagactccgtgttcactggttctcttttccccatagcttgtgtttggaaacagctagaattaagtgaattaactcactgttaccagaacatggggttgttgt

SEQ ID NO: 70285 - DNA, 662 bp, Homo sapiens
tttatttatttattttttgagactaggtcttgctctgtcacccaggctagagtgcaatggtgagattatagctcactgcaatctccagctcctgggctcatgtgatccacccaccttagcctccccaagtagctgggtttattctaacaagtgtgtgccaccatacccagctatttttttttttctagatatcgggtctcactatgttgcacaggctggtctcaaactcctgggctcaagtgatcctcccacctcagccttccaaagtgcagggattacaggcatgagccactgtgctcagccccatccactcctgccagtgcagctggaggaatctattcaaaccagaaatctgagcacatcactcatttgttttagctctctgtggataaaagccaaatccctaatacattctggaaggtttctagttaaactgcacatctactatctgcctggctctgcccacattctgcttcccctcctgctaccatagatgagctcccggccctttgctgaggccgatgcctccatccctgctctgttccacccccctccttcctgaggacctagttcctttctcatttttctctctctcttgcccaatcaacacacactccatgctacattactttcctgagtgtctcgcccaagtctatcaaatc

SEQ ID NO: 70286 - DNA, 573 bp, Homo sapiens
gttccctagcctgcgccagtggcaactcaccagcaaagtggtaaacagatactagtccagaatttctaacactccataagtatctgttcacttgagagttggctggacatagttcattgggcatgcagcgaaagcacattttatttaactttaaaaattttttaatttgactacatctaataaaattaaaaattttaatctttaaattggtctttgtaaacttctgaaaaaattttaatatttttgtctgatattctgaattagtgaatgtgatgttacattttagtagaaagtagtaaaacgatgaaaacaaaaattagatcatactaagttttgcgagtttttaaacattaaatccttagacttgaatttgacttaataaaagtattgttaactattttataaatggaagtttttttctgagaatttttttttcatttaaaattttttatttggccagacacggtggctcatgcctgtaatcccagcactttgggaggctgaggtgggaggactgcttgagtccaggagtttgagaccagcctgagcaatatagtgagaccgcgtctctac

SEQ ID NO: 70287 - DNA, 325 bp, Homo sapiens
ctacaaaatgcctctgtagaaataacatttagaaacaaggcacatgaacaccacacacacacacacacacacacacacacacacacacacaatgaggcaagtatgtgagccaataactttactcacttcagagtttcaactctgattatttctaacatatgtagcgctgcaattgggccttagaatagtgtagccacaggagaagccaaagacaagagagagaagtgttttttctttcttaattttatcttacattttgtattttttcagacctacaatcctaaataatttccttctgtatgttttgtcatttaaacatcattga

SEQ ID NO: 70288 - DNA, 369 bp, Homo sapiens
ccatgattcagtacttcccactgggtccctcccatgacatgtgggaattatgggagctacaattcaagatgagatttgggtggggacacacccaaactatatcatatatgttagaatgtgatgtagattttttaaatgatctaaaagaagaatcaatgatacaaagtagtatttgtgttatattgactgggaaaagcagtagcactgttataatttcctcttgaaaaagaaattcacatgtaaatgtatatataactggaaaagtaagcacaaaaatgttaaaagtgattcttttttcagattgaaattttttttcctttttgtaaatctttttttgccctaaaattaatatatattaattttaaaagg

SEQ ID NO: 70289 - DNA, 530 bp, Homo sapiens
tacatttttaattttgggtgctaaataaatgttggatcagttatactgaataaattttccatcaacgtgttcttgctgtgggacatccttgacactaatttaagttttccaacaaatgcgactttccaatattttaagcatgacagaattttgctagacagctggctgtctttctcctgttcctctggatgccactcaaatatcttcacacccatctcactcattaacactgcgtgaactgtgagctctccaccccttgtctgtctgtaatctgggttgtgactacttgtttatccagtttatcttctttctcatcatccatcctggtttctgcatactataacaacatcggttgcatactattgacctctaaccctggatcctgttgggatgaaaacattatcccagtcctgttgaaagtagtgcagtggccttttcttctttcttggttctgcaatgtctgcagagatgtgctcttggggggatgaagtcatctgggtagctttcccctccctgtgcccaggttgcta

SEQ ID NO: 70290 - DNA, 176 bp, Homo sapiens
  misc_feature (46)..(46): n is a, c, g, or t
gaatagataagacaacagcctaccttcaagtgatagtacaccaccncacaaacagaatatgacccttataacagtacacttccacttagcccctcctggactttgtgctattgttgtcagatattttactggtttttttgttttgttttgttttgtttgtttgttttgttttgttt

SEQ ID NO: 70291 - DNA, 821 bp, Homo sapiens
gtcatatgccagtgagcactagattaagtatatccttggtggttccgggtgagtctatctggctgctttggcttcaggaacatgggaacgatgcctgtggaggtgggcgtacaccgtctggagggaagatggggtgatagggtgtgtgcgtgtttgtcttcttgcctgtagttctcaaaaagaggcatggtggtcatttttaaaatctatgcttttttcttattcaagttatttggtactttacccatataagggtatttctggaatgatattgtttcatcctttcatttcttctttgggcatggtgattcccacacctgcaactctatttatgtcctcctttcttttcccagctctacctattagctgacttcctagtggtaccagaggcatgatttcactttgggtctgggagtttgggggaaaatgaaaaataggtttaggtattttctgggataagtggaaatcctgtctgtgtcatggagggatggccatacagagtaatccagtagtcattaaagacatacagaatcaggccgggcacagtggcttatgcctgtaatcccagcactttgggaggtcgaggtggtagtatctcttaaacccaggagttcaaaataagcctgatcaacatagcaagactctgtctttacaaaagaaaaataaaaaatcagctgggtgtggtggtgctcttctgtagtcccacctactgggaaggctgaggcaggaagatcacttgagcccaggaattcaaggctgcagtgaaccatgattgtgccactgcaccccagcctaggtaacagagtgagaccctgtctcaa

SEQ ID NO: 70292 - DNA, 397 bp, Homo sapiens
  misc_feature (29)..(29): n is a, c, g, or t
  misc_feature (42)..(42): n is a, c, g, or t
  misc_feature (51)..(51): n is a, c, g, or t
  misc_feature (53)..(53): n is a, c, g, or t
  misc_feature (61)..(61): n is a, c, g, or t
  misc_feature (74)..(74): n is a, c, g, or t
  misc_feature (78)..(79): n is a, c, g, or t
  misc_feature (81)..(81): n is a, c, g, or t
  misc_feature (89)..(89): n is a, c, g, or t
  misc_feature (91)..(92): n is a, c, g, or t
  misc_feature (96)..(97): n is a, c, g, or t
  misc_feature (105)..(106): n is a, c, g, or t
atgcgccaccactcccggctaattttgtnttttagtagaganggggtttcncnatgttggncaggctggtctcnaacnncngacctcangnnatcnncccacctnngcctcccaaagtgctgagattacaggtgtgagccaccgcactttgggaggtcgaggtggtagtatctcttaaacccaggagttcaaaataagcctgatcaacatagcaagactctgtctttacaaaagaaaaataaaaaatcagctgggtgtggtggtgctcttctgtagtcccacctactgggaaggctgaggcaggaagatcacttgagcccaggaattcaaggctgcagtgaaccatgattgtgccactgcaccccagcctaggtaacagagtgagaccctgtctcaa

SEQ ID NO: 70293 - DNA, 360 bp, Homo sapiens
  misc_feature (29)..(29): n is a, c, g, or t
  misc_feature (42)..(42): n is a, c, g, or t
  misc_feature (51)..(51): n is a, c, g, or t
  misc_feature (53)..(53): n is a, c, g, or t
  misc_feature (61)..(61): n is a, c, g, or t
  misc_feature (74)..(74): n is a, c, g, or t
  misc_feature (78)..(79): n is a, c, g, or t
  misc_feature (81)..(81): n is a, c, g, or t
  misc_feature (89)..(89): n is a, c, g, or t
  misc_feature (91)..(92): n is a, c, g, or t
  misc_feature (96)..(97): n is a, c, g, or t
  misc_feature (105)..(106): n is a, c, g, or t
atgcgccaccactcccggctaattttgtnttttagtagaganggggtttcncnatgttggncaggctggtctcnaacnncngacctcangnnatcnncccacctnngcactttgggaggtcgaggtggtagtatctcttaaacccaggagttcaaaataagcctgatcaacatagcaagactctgtctttacaaaagaaaaataaaaaatcagctgggtgtggtggtgctcttctgtagtcccacctactgggaaggctgaggcaggaagatcacttgagcccaggaattcaaggctgcagtgaaccatgattgtgccactgcaccccagcctaggtaacagagtgagaccctgtctcaa

SEQ ID NO: 70294 - DNA, 285 bp, Homo sapiens
ctgtgaccagaagaggtcatttgtaaccttgagatagtatgtggtaaagtaaaaaggactcttaagaaaaaaataacaagttcagatggttcatgaagtattatggacaaaaggtcatagtatttattcaaaaagaggaaagatgtaactactttgaaaactagaagagaaagaactaaaggagaaaagaattcttaggccaggtgcagtgactgacacctgtaatcccagcactctgggaggctgaggcatgtggatcatctgaggtcaggagttcaagaccag

SEQ ID NO: 70295 - DNA, 496 bp, Homo sapiens
aagcatgtgggtccttaagtaatcctgccttcaaattgttctcaggcattttgctaagcccagatgtcccatcttctcctgtcctgaacttttacagcctttttcttcagaagctgcaaactaattgcattccttactctgagtagagcttgctggccagggcagtggacactcgagtagtcattaagatacaagtcacccgagaggttgtaggagccctgcagttctgcaagaggacaaatatgaatgttctcattgaaaaattacattcaggcaggggtggttgcacacgcctataatcctagcactttgggaggccaaggtgggtgatcacctgaggtcatgagtttgagaccagcctggccaacatgctgaaaccccatctctactaaaaatacaaaaatttagccaggcatggtcgtgtgtgcttgtaatcccagctgctctggatgctgaggcaggagaggggaggcagagaggttgcagtgagccgaga

SEQ ID NO: 70296 - DNA, 428 bp, Homo sapiens
ataaggtagagtttatcatattgataatttgcagtttaacaaacttcaatcaacttctttatcttcggcttttctcccggaagagactgaatcactgagtgagttctcataaacttcaacttcattccttcccttgaagttgccctctctagatttttctctactaccactaattttcttttttctttttttgagatggagtctcattctgtcgtccaggctgcagtgcggtggcacaatctcagctcactgcaactccaggctgggtgacagaattggccccccccaaaaaaaagaacttttatgtaataaatgtctaaagcaaaaattgttataaataaagagaaacagaaagaagcaccaaaacttgattggtccacgagacaaacagataaagtaaaaaagccccaaacaaaaaaagaagatat

SEQ ID NO: 70297 - DNA, 498 bp, Homo sapiens
aaatttgtcaagatttgtcacatataaaatgacaaggagcagaaagtaaggtggatagggctgcagacagcagaaacagcatgttcaaaggtacaaatttatagagcacattggggaaacagaaaataattttgtgaagatccaaagggatggtatggcaaaaatacaacttcatcaaaaatggccaccggatttaagagattattgtattactcattaattattgctcataaatgtcatggactaatacattatttgagctcataaggaattgattatgtagttcaatacccagagatgtgacaactgatggaaatgaaattaaaactaagactattgcttccaaaactagcacttcacctccatgaattatgaaaataattctgttgttgagatagctagaataccaggctaactgaattttacttaaaagaaagttcccattccaaagcagtcaggttaggtgagtggtgtttaaatgtctgtgttttttgcatg

SEQ ID NO: 70298 - DNA, 1345 bp, Homo sapiens
gtagtttcttccagcccccatgcccgtgagtttagccaggcctgttacctgctaccctcttccccgccttcctccaccctgcagaggagcagagcgtagcctgagtgcctgggccagcagggtgagggagtgggccagaaccatgcagatgtcatccaggacaccctctcggccagtgtccatagcactctgacttcaccaggggagccctgcacaggagacactcagtttgttctcagaaatccagtagctgggctgacccatccatctgccctggctctcagaaaccagaatcactcaggctgagccgtgggtcctgcaggtctttcccctgtgggaggccagcatcttcgcttgctctcttctccacctgaagaccaactgtcatcttaccagcgagctcagctgccagggtttgtggctggcgccagtcgtattgtggacatgggcttatgctgagcacagaccaggtgctcctctgggaggagtgagactcacgggaacaccatcctccgctttctcgtgaggagggtgccccctccttgaacttacctaagggacgatggccagagaatagtgaaatgtatgcaggtgccactgcttagttcctgagaactgtttagctgtcatttttttgcccttaaatatgcctttttttaaagcacatttcactgatttcatgtgaatctagggtaaaaatggagtagtaagaccaggcggtgagagagtgggcttccgtccacttcagggcggaagctggttagtccacatgtcggtccttctgggaccctgccacacaggtgtccccacaccaaggctggcagaaggaggtttaaatgaccacaggcttcggatatcagaaaggcagctggaaatgacactgaggaacagatgggctataacagctgcccttgccacttggctctacatcctcctggctccgagcaggcccaccgttgcttttcctccagtagatggtgggccacgggatagagccagaacagaagactcgtcccccctccactcttgtctctggcaaatccaccagctgggaggaccacctttcctccctcctgcctctgtgcgtgtgcgtgcactccatgtcgacagccacaggtttctgctgcagcagcctcttcccctgaataggactgggattaagccccagcagctggtgcaccccactcagagcacggttaaggcagctgcccaaacctctcctcggctttctcagggcctttattcgttcaggctttctggaagtcagctggcggaggtgaagatggcttgggcgcccctcctgtgagctctgtgtgagtggtgctctttgtgatgtcaggtgagg

SEQ ID NO: 70299 - DNA, 507 bp, Homo sapiens
  misc_feature (84)..(84): n is a, c, g, or t
ggcaaaggctacaagtacaaccccatgtacagcgcctacaacaacgtcaaagcctgcctgaggaaccaccaggggccactgccnccggtgcccctgcacctgaggaacgcgcccaccgttgcttttcctccagtagatggtgggccacgggatagagccagaacagaagactcgtcccccctccactcttgtctctggcaaatccaccagctgggaggaccacctttcctccctcctgcctctgtgcgtgtgcgtgcactccatgtcgacagccacaggtttctgctgcagcagcctcttcccctgaataggactgggattaagccccagcagctggtgcaccccactcagagcacggttaaggcagctgcccaaacctctcctcggctttctcagggcctttattcgttcaggctttctggaagtcagctggcggaggtgaagatggcttgggcgcccctcctgtgagctctgtgtgagtggtgctctttgtgatgtcaggtgagg

SEQ ID NO: 70300 - DNA, 1019 bp, Homo sapiens
cctcagacctaaaaagcattgtttagagctaaaatactgcactgaaactgactaaaacacagcagaggaactcagacctggacatttttctgcttccatttacaatttcatttatcctcatgcctcacgtttgggcttagaaacctttgtctgctgaagcaggaagaccagagtatcttctgcggctgctgctgacctggccccaaccctgaagattccaactgagtggttctgatggggagagtctaagcatctgcactcccactgctatgtgacttttcagggtgtgctgctggctgggaatcaatgctgtacagagcccaccgccaggccagctgtcaggaaacaggggctctaggcccagcttcaccacttaggagctatggctttgttcagaaacattgtgactctcttacccacacattcctctgctggaaggggagattgacaaaccagcatcatctctaatttactacaaaagccctcactggaaattattcttaacttagcagctggtaggatccattaaaaaaaaaaagtaagttagactgtgttactctgctgctcaaagccctgcagtgcctcctcattttacctagcgtaaaacctagagtcctttccatggcctgctaggccctgcgccctctggcccatcatctacgaccacctctcctactgcccttcctgtcaggcctctgggcccaaacctgtacgtataaatccagatggcctgaagtaactgaagaatgacaaaagaagtgaaaatggcctgttcctgccttagctgatgacattaccttgtaaaattccttctcctggctcatcctggctcaaaagctccccaactgagcactgtgacccccacccctgccagccagagaacaaccccctttgactgtaattttccactacctaaccaaatcctataaaatggccccacccctatctcccttcgctgactcttttcggactcagcccgcctgcacccaggtgaaataaacagccttgttgctcacaca

SEQ ID NO: 70301 - DNA, 409 bp, Homo sapiens
ccttgttttactggaggagaaagtggggcacagagaaattcagttattggtccgaggtcacacagcgtgtgagtcgggaaggaaggggcagctggaatttgaacctggcagtctggcttccctctggggaagagcagtggatgagggcgaagccgacaagagcccaaactcatctgcgctgcgctgcttttgagccacacaaatccaaataagggatcatccaaatcctttattttctctcgaagttttgtgatcattaatcagttaacagcttgttcccttctgtgctggacaacccccagctgcaaggggcaggaatggagcatgggggaggctgtaaaatagatcacccaggagtttgtgagcagctgggcaacatagtgagaccctgtctctaaaagaaaaaaaa

SEQ ID NO: 70302 - DNA, 913 bp, Homo sapiens
ccttgttttactggaggagaaagtggggcacagagaaattcagttattggtccgaggtcacacagcgtgtgagtcgggaaggaaggggcagctggaatttgaacctggcagtctggcttccctctggggaagagcagtggatgagggcgaagccgacaagagcccaaactcatctgcgctgcgctgcttttgagccacacaaatccaaataagggatcatccaaatcctttattttctctcgaagttttgtgatcattaatcagttaacagcttgttcccttctgtgctggacaacccccagctgcaaggggcaggaatggagcatgggggaggctgtaaaatagatcactcaggcgtttccctagcgagccccccgggaatgaacagaagggtttctctcctatggtgggatgttgctgtccatgggggtcgtcgaaggacgggtgtggaggcccaggaggactgcaggcaagaggggagaaaaggaagaacccgtctcccctcaactggatcatcatgggctgtgttgcactggtaaaccaaggtgccaaggctgcggcagctcagatgggaaggggaccctgttttctgagcatgcagacgccaggattataggacattctgccaggcacagaaaccacgagagcccaccttccccaaaggctgctggctccaaagtggggagggagtggttgttcccaggtgataagtgatgagaagaccgttgagcccccagagtgacacccaagcatgtaactaactcgagaccaggagcatccactgacaaacgcccggtgaggtcgatcctggtgacaggatccaggtgctagtcgggtcctgagtcgagttgctggactcgcagcatttaaccattcaaaataaccagctttaaaaatgtgtgtgggccaggct

SEQ ID NO: 70303 - DNA, 376 bp, Homo sapiens
tcgagctcggtaccgacgggatactcgatcacgacctctacatcagccaggcgactgtctcgatacaatgaccaggcttcatcaagcaggattattgaaaggatattctctggtgcagtaacaaggggaaaaacaatacagaaagagggaagaatgagctatgcagattttgtttggtttttgatctctgaagaagacaaaaggaatcctaccagctaacagaatgctgcctacctgccctgaacctccaagcaagaaactgaaatgcttttctggggaactgacctgcccaagaataaagacctgaagattcgacactgggtcatccccaaggaaaaaaaccagcccattcattttacagtaaagcccagagtca

SEQ ID NO: 70304 - DNA, 4668 bp, Homo sapiens
gctttcccagaaggctccatattctcaacctgtgcaggtcaatttgacataaagctaccaacaaggagcaacaggcccactgcaggctgtgtttataacttgaaaattatgagcaggtattgggagccacagactgtatttgggaacagctgcatgtcaggacaagcatagattgtggtctgtggaggctgggagagcacaatgcttgaatttcatttctttgggagataagaagaaaaaataccttcctacctgacaagattgacaacttgctaaatctgattatcttcagaagtgtgctggacagttgcgaagtaaacatttacttttcaaagatgatgatcaaggaaacatctctacgaagggacccggatttaaggggagagctagctttcctggcaaggggctgtgattttgttctcccttcacggtttaagaagcggctgaagtcatttcagcagacacagattcaaaataaaccagaaaagaaacctggaacaccactcccacctccagccacctctccaagtagtccccgacctctctccccggttccccatgtgaataatgttgtgaatgcgccattgtccataaacattccacggttctactttcctgaaggactcccagatacctgtagtaatcatgaacaaactctaagcagaattgaaactgctttcatggatattgaagaacagaaagcagacatttatgaaatggggaaaattgcaaaggtctgtggctgtcctctctattggaaagcccccatgttcagggctgcagggggagagaagacaggatttgtgacagcacagtcattcattgccatgtggagaaagttgctgaataaccatcatgatgatgcctctaaattcatctgtcttctagcaaagcccaactgcagctctctagaacaggaggatttcatccctctacttcaggatgtggtggatacccaccctggtctcacgttcctgaaagatgctccagaattccactcccgctacatcaccacggttattcagagaatattctacacagtcaacagatcttggagtggaaaaattacttcgacagagataagaaaaagcaactttttgcaaaccctagcacttttggaagaagaggaagatataaaccaaattacagattacttctcctatgaacatttctatgttatttattgtaaattctgggaactagatactgatcacgacctctacatcagccaggccgatctgtctcgatacaatgaccaggcttcatcaagcaggattattgaaaggatattctctggtgcagtaacaaggggaaaaacaatacagaaagagggaagaatgagctatgcagattttgtttggtttttgatctctgaagaagacaaaaggaatcctaccagcattgagtattggttccgctgcatggatgtggatggagacggtgtactctccatgtatgagctggagtacttctatgaggagcagtgtgaacggatggaagccatgggaattgagcccttgccattccatgatttactgtgccagatgcttgacctagtgaagccagctgttgatggcaaaataactctaagagatctgaagaggtgcagaatggctcacatcttctatgacactttctttaatctggagaaatacttagaccatgaacagagagatccctttgcggtccagaaggatgttgagaacgatgggcctgagccctcagactgggaccggtttgccgctgaggagtatgagacgcttgttgcagaggaatctgcccaagcacaattccaggaaggctttgaagattatgaaacagatgaacctgcctctccctctgaatttggaaacaaaagcaataaaatattaagtgcaagccttccagagaaatgtggaaagcttcaatcagtggatgaagaatagctgccggtgtctacaatgaaacgaagatgtgtattttaaatgtttctttcttgtgaagagatgttctcgtttgcatactgctttttaaagactttgatttctccaagtgtgtatcatctgcactaggaactttgtttttaagcaataggtctggatacacatttaacttaggaggctcctccaatttgcctcaaacctcttacggagcttctcctcagaagtggtaccatcgccttccaaagtcagcactctacactcttgaatgtaccaaggatctcttggcgacagtaccaagcacggttctctacacaggtgactgaagttgcctctgtgttggctggcatccctgagtcccctccgggctcctatggagcctagaagaaaccttcacttgcagaaaacttgagtcagaaaattctggaacttgaaaaagtagtaagggcctccagaattgacttagccctagtaataaaagcactgccaaaacatctcagagacttcttttatgtatactggagttcaaagatctttaacttacctggcttaatgtaatttcacagttacctgccaaactactagtcactttacatcctcaggtattgtaaccactgggccttccaactttgctggcaagctctggtaacctccctgactgtggatcttatataaaatctcaagataaaaaaacacttcttaaatgaagtatagaatttgactcatacttggaaaaagcccttttaacttttatcttttattcattgaactattgaatgatgtatttaatatccaaattagttgataactgttttcacttcctatcagaaggcctgcttgaagacataaaggaataatgatacattaaaattcttactagatagatatattccttcctcccaggagtattagactagctaatagtaaaggcctcaacgttattctttacttcatgttgaaaacaattactacagatatttcatccacctcagtatttatcaaggaaatggaaaatgatacagctataaaagaaagctgttatttactgtagttgtagatgtattcactacagaatcctacatttttcagcaggccacagtccagccaaatcctataatatccttgaaaagaaactattaaaaaggatagacatttctgatgtaagtaaaacccccaagcaacttaatatccatctgtcagtcatcaacttttcccctagattttttttttaactagttctgaaagtgtcaagaatagcttccctttccaccctacctaggttccctccttgctggcataaaggccaagcagtgaaatgaaccttgggttagagttatggtaggcaaaaagaaaaggagaatttaggaaataaatatgctataaacaaggtacagtacagtgagagttaacaatcctaggaatcctgcctgtcacaagctcccagttccctgtcattttatcttcatgattagaactgatcttccatttaactattacagaaagcagtaactattgcaactatctaatagttcacacaaaagaattaaaagcttaaaaataatttttaggaaacacaatattcaaaatctaaacacactgataaattattaagattaagattatttatgtgataaatgaaatctcctaccaatccatccagcctttaccagggaagaaaagcaattatttcatttcagatagaaatacaaaaaaaaaaaaaatacttttcttagaagccagatatggtttaaatgttttattatccataatgatctaaactaataagattcaccaaaaagtaaaaattcaattttacaatatacatttttttttttaactatttggctttacctttttaccttggttctccttactgaagtcctcttgctttcactttgatctggtttttgaagtctcttaattattggctgggcatggtgactcatgcctgtaatcccggcactttgggaggccaagggaggtgatcacttgagcccaggagtaaagaccagcctgggcaacatagtgagactccgtctctacaaaaaataaatttagctgggcatggtggtgcacatctgtagtcctaccaacttgggaggctgaggcaggagaatcgcttgagccccaggcttcgaggctgcagtgagctatgattacgacactgcactccagcctaggcgacagagcaagaccccattctcttacaaagtctctattataaaagtacatccatcaataccattccatttaaaatgggctattgtaatttacccacattatcacattttcaggaattataagaatgtgttttattgtactccttccttggagctgaatgcaaggaatgtgaattctgaggaattaaggtagaatatatttgactttctggtaaagatcatggttaagtataatcattactgccaaactggaattttcaagttattataatatcccaggccccttgataaaagctgagggttatcatgaccttaatgctaattcaatgagaaatgagtttaatagcataacattaccaaggtaatcaaactaataaaattccatatatcttccctgcatcttgtcactgtgtaccattcaaagtgtttataaaactctagattcatcaaatgagatttgctcagctttttgaaatgttaagatgtgtttggagaaggctgcatgactttgtttttcccttttagcaaaactaaataaagttgtcaaatatgaatcatgttcattaagg

SEQ ID NO: 70305 - DNA, 3446 bp, Homo sapiens
gattgctgcaacgactctcttaacttccaccgctacagcttcatcaagcaggattattgaaaggatattctctggtgcagtaacaaggggaaaaacaatacagaaagagggaagaatgagctatgcagattttgtttggtttttgatctctgaagaagacaaaaggaatcctaccagcattgagtattggttccgctgcatggatgtggatggagacggtgtactctccatgtatgagctggagtacttctatgaggagcagtgtgaacggatggaagccatgggaattgagcccttgccattccatgatttactgtgccagatgcttgacctagtgaagccagctgttgatggcaaaataactctaagagatctgaagaggtgcagaatggctcacatcttctatgacactttctttaatctggagaaatacttagaccatgaacagagagatccctttgcggtccagaaggatgttgagaacgatgggcctgagccctcagactgggaccggtttgccgctgaggagtatgagacgcttgttgcagaggaatctgcccaagcacaattccaggaaggctttgaagattatgaaacagatgaacctgcctctccctctgaatttggaaacaaaagcaataaaatattaagtgcaagccttccagagaaatgtggaaagcttcaatcagtggatgaagaatagctgccggtgtctacaatgaaacgaagatgtgtattttaaatgtttctttcttgtgaagagatgttctcgtttgcatactgctttttaaagactttgatttctccaagtgtgtatcatctgcactaggaactttgtttttaagcaataggtctggatacacatttaacttaggaggctcctccaatttgcctcaaacctcttacggagcttctcctcagaagtggtaccatcgccttccaaagtcagcactctacactcttgaatgtaccaaggatctcttggcgacagtaccaagcacggttctctacacaggtgactgaagttgcctctgtgttggctggcatccctgagtcccctccgggctcctatggagcctagaagaaaccttcacttgcagaaaacttgagtcagaaaattctggaacttgaaaaagtagtaagggcctccagaattgacttagccctagtaataaaagcactgccaaaacatctcagagacttcttttatgtatactggagttcaaagatctttaacttacctggcttaatgtaatttcacagttacctgccaaactactagtcactttacatcctcaggtattgtaaccactgggccttccaactttgctggcaagctctggtaacctccctgactgtggatcttatataaaatctcaagataaaaaaacacttcttaaatgaagtatagaatttgactcatacttggaaaaagcccttttaacttttatcttttattcattgaactattgaatgatgtatttaatatccaaattagttgataactgttttcacttcctatcagaaggcctgcttgaagacataaaggaataatgatacattaaaattcttactagatagatatattccttcctcccaggagtattagactagctaatagtaaaggcctcaacgttattctttacttcatgttgaaaacaattactacagatatttcatccacctcagtatttatcaaggaaatggaaaatgatacagctataaaagaaagctgttatttactgtagttgtagatgtattcactacagaatcctacatttttcagcaggccacagtccagccaaatcctataatatccttgaaaagaaactattaaaaaggatagacatttctgatgtaagtaaaacccccaagcaacttaatatccatctgtcagtcatcaacttttcccctagattttttttttaactagttctgaaagtgtcaagaatagcttccctttccaccctacctaggttccctccttgctggcataaaggccaagcagtgaaatgaaccttgggttagagttatggtaggcaaaaagaaaaggagaatttaggaaataaatatgctataaacaaggtacagtacagtgagagttaacaatcctaggaatcctgcctgtcacaagctcccagttccctgtcattttatcttcatgattagaactgatcttccatttaactattacagaaagcagtaactattgcaactatctaatagttcacacaaaagaattaaaagcttaaaaataatttttaggaaacacaatattcaaaatctaaacacactgataaattattaagattaagattatttatgtgataaatgaaatctcctaccaatccatccagcctttaccagggaagaaaagcaattatttcatttcagatagaaatacaaaaaaaaaaaaaatacttttcttagaagccagatatggtttaaatgttttattatccataatgatctaaactaataagattcaccaaaaagtaaaaattcaattttacaatatacatttttttttttaactatttggctttacctttttaccttggttctccttactgaagtcctcttgctttcactttgatctggtttttgaagtctcttaattattggctgggcatggtgactcatgcctgtaatcccggcactttgggaggccaagggaggtgatcacttgagcccaggagtaaagaccagcctgggcaacatagtgagactccgtctctacaaaaaataaatttagctgggcatggtggtgcacatctgtagtcctaccaacttgggaggctgaggcaggagaatcgcttgagccccaggcttcgaggctgcagtgagctatgattacgacactgcactccagcctaggcgacagagcaagaccccattctcttacaaagtctctattataaaagtacatccatcaataccattccatttaaaatgggctattgtaatttacccacattatcacattttcaggaattataagaatgtgttttattgtactccttccttggagctgaatgcaaggaatgtgaattctgaggaattaaggtagaatatatttgactttctggtaaagatcatggttaagtataatcattactgccaaactggaattttcaagttattataatatcccaggccccttgataaaagctgagggttatcatgaccttaatgctaattcaatgagaaatgagtttaatagcataacattaccaaggtaatcaaactaataaaattccatatatcttccctgcatcttgtcactgtgtaccattcaaagtgtttataaaactctagattcatcaaatgagatttgctcagctttttgaaatgttaagatgtgtttggagaaggctgcatgactttgtttttcccttttagcaaaactaaataaagttgtcaaatatgaatcatgttcattaagg

SEQ ID NO: 70306 - DNA, 2907 bp, Homo sapiens
  misc_feature (1)..(1): n is a, c, g, or t
nttaagcgtgactgactctcttattaaccaccgctcacagctttgaagattatgaaacagatgaacctgcctctccctctgaatttggaaacaaaagcaataaaatattaagtgcaagccttccagagaaatgtggaaagcttcaatcagtggatgaagaatagctgccggtgtctacaatgaaacgaagatgtgtattttaaatgtttctttcttgtgaagagatgttctcgtttgcatactgctttttaaagactttgatttctccaagtgtgtatcatctgcactaggaactttgtttttaagcaataggtctggatacacatttaacttaggaggctcctccaatttgcctcaaacctcttacggagcttctcctcagaagtggtaccatcgccttccaaagtcagcactctacactcttgaatgtaccaaggatctcttggcgacagtaccaagcacggttctctacacaggtgactgaagttgcctctgtgttggctggcatccctgagtcccctccgggctcctatggagcctagaagaaaccttcacttgcagaaaacttgagtcagaaaattctggaacttgaaaaagtagtaagggcctccagaattgacttagccctagtaataaaagcactgccaaaacatctcagagacttcttttatgtatactggagttcaaagatctttaacttacctggcttaatgtaatttcacagttacctgccaaactactagtcactttacatcctcaggtattgtaaccactgggccttccaactttgctggcaagctctggtaacctccctgactgtggatcttatataaaatctcaagataaaaaaacacttcttaaatgaagtatagaatttgactcatacttggaaaaagcccttttaacttttatcttttattcattgaactattgaatgatgtatttaatatccaaattagttgataactgttttcacttcctatcagaaggcctgcttgaagacataaaggaataatgatacattaaaattcttactagatagatatattccttcctcccaggagtattagactagctaatagtaaaggcctcaacgttattctttacttcatgttgaaaacaattactacagatatttcatccacctcagtatttatcaaggaaatggaaaatgatacagctataaaagaaagctgttatttactgtagttgtagatgtattcactacagaatcctacatttttcagcaggccacagtccagccaaatcctataatatccttgaaaagaaactattaaaaaggatagacatttctgatgtaagtaaaacccccaagcaacttaatatccatctgtcagtcatcaacttttcccctagattttttttttaactagttctgaaagtgtcaagaatagcttccctttccaccctacctaggttccctccttgctggcataaaggccaagcagtgaaatgaaccttgggttagagttatggtaggcaaaaagaaaaggagaatttaggaaataaatatgctataaacaaggtacagtacagtgagagttaacaatcctaggaatcctgcctgtcacaagctcccagttccctgtcattttatcttcatgattagaactgatcttccatttaactattacagaaagcagtaactattgcaactatctaatagttcacacaaaagaattaaaagcttaaaaataatttttaggaaacacaatattcaaaatctaaacacactgataaattattaagattaagattatttatgtgataaatgaaatctcctaccaatccatccagcctttaccagggaagaaaagcaattatttcatttcagatagaaatacaaaaaaaaaaaaaatacttttcttagaagccagatatggtttaaatgttttattatccataatgatctaaactaataagattcaccaaaaagtaaaaattcaattttacaatatacatttttttttttaactatttggctttacctttttaccttggttctccttactgaagtcctcttgctttcactttgatctggtttttgaagtctcttaattattggctgggcatggtgactcatgcctgtaatcccggcactttgggaggccaagggaggtgatcacttgagcccaggagtaaagaccagcctgggcaacatagtgagactccgtctctacaaaaaataaatttagctgggcatggtggtgcacatctgtagtcctaccaacttgggaggctgaggcaggagaatcgcttgagccccaggcttcgaggctgcagtgagctatgattacgacactgcactccagcctaggcgacagagcaagaccccattctcttacaaagtctctattataaaagtacatccatcaataccattccatttaaaatgggctattgtaatttacccacattatcacattttcaggaattataagaatgtgttttattgtactccttccttggagctgaatgcaaggaatgtgaattctgaggaattaaggtagaatatatttgactttctggtaaagatcatggttaagtataatcattactgccaaactggaattttcaagttattataatatcccaggccccttgataaaagctgagggttatcatgaccttaatgctaattcaatgagaaatgagtttaatagcataacattaccaaggtaatcaaactaataaaattccatatatcttccctgcatcttgtcactgtgtaccattcaaagtgtttataaaactctagattcatcaaatgagatttgctcagctttttgaaatgttaagatgtgtttggagaaggctgcatgactttgtttttcccttttagcaaaactaaataaagttgtcaaatatgaatcatgttcattaagg

SEQ ID NO: 70307 - DNA, 2894 bp, Homo sapiens
cggtggcgcgacgggtgcaacgactcgctttgaagattatgaaacagatgaacctgcctctccctctgaatttggaaacaaaagcaataaaatattaagtgcaagccttccagagaaatgtggaaagcttcaatcagtggatgaagaatagctgccggtgtctacaatgaaacgaagatgtgtattttaaatgtttctttcttgtgaagagatgttctcgtttgcatactgctttttaaagactttgatttctccaagtgtgtatcatctgcactaggaactttgtttttaagcaataggtctggatacacatttaacttaggaggctcctccaatttgcctcaaacctcttacggagcttctcctcagaagtggtaccatcgccttccaaagtcagcactctacactcttgaatgtaccaaggatctcttggcgacagtaccaagcacggttctctacacaggtgactgaagttgcctctgtgttggctggcatccctgagtcccctccgggctcctatggagcctagaagaaaccttcacttgcagaaaacttgagtcagaaaattctggaacttgaaaaagtagtaagggcctccagaattgacttagccctagtaataaaagcactgccaaaacatctcagagacttcttttatgtatactggagttcaaagatctttaacttacctggcttaatgtaatttcacagttacctgccaaactactagtcactttacatcctcaggtattgtaaccactgggccttccaactttgctggcaagctctggtaacctccctgactgtggatcttatataaaatctcaagataaaaaaacacttcttaaatgaagtatagaatttgactcatacttggaaaaagcccttttaacttttatcttttattcattgaactattgaatgatgtatttaatatccaaattagttgataactgttttcacttcctatcagaaggcctgcttgaagacataaaggaataatgatacattaaaattcttactagatagatatattccttcctcccaggagtattagactagctaatagtaaaggcctcaacgttattctttacttcatgttgaaaacaattactacagatatttcatccacctcagtatttatcaaggaaatggaaaatgatacagctataaaagaaagctgttatttactgtagttgtagatgtattcactacagaatcctacatttttcagcaggccacagtccagccaaatcctataatatccttgaaaagaaactattaaaaaggatagacatttctgatgtaagtaaaacccccaagcaacttaatatccatctgtcagtcatcaacttttcccctagattttttttttaactagttctgaaagtgtcaagaatagcttccctttccaccctacctaggttccctccttgctggcataaaggccaagcagtgaaatgaaccttgggttagagttatggtaggcaaaaagaaaaggagaatttaggaaataaatatgctataaacaaggtacagtacagtgagagttaacaatcctaggaatcctgcctgtcacaagctcccagttccctgtcattttatcttcatgattagaactgatcttccatttaactattacagaaagcagtaactattgcaactatctaatagttcacacaaaagaattaaaagcttaaaaataatttttaggaaacacaatattcaaaatctaaacacactgataaattattaagattaagattatttatgtgataaatgaaatctcctaccaatccatccagcctttaccagggaagaaaagcaattatttcatttcagatagaaatacaaaaaaaaaaaaaatacttttcttagaagccagatatggtttaaatgttttattatccataatgatctaaactaataagattcaccaaaaagtaaaaattcaattttacaatatacatttttttttttaactatttggctttacctttttaccttggttctccttactgaagtcctcttgctttcactttgatctggtttttgaagtctcttaattattggctgggcatggtgactcatgcctgtaatcccggcactttgggaggccaagggaggtgatcacttgagcccaggagtaaagaccagcctgggcaacatagtgagactccgtctctacaaaaaataaatttagctgggcatggtggtgcacatctgtagtcctaccaacttgggaggctgaggcaggagaatcgcttgagccccaggcttcgaggctgcagtgagctatgattacgacactgcactccagcctaggcgacagagcaagaccccattctcttacaaagtctctattataaaagtacatccatcaataccattccatttaaaatgggctattgtaatttacccacattatcacattttcaggaattataagaatgtgttttattgtactccttccttggagctgaatgcaaggaatgtgaattctgaggaattaaggtagaatatatttgactttctggtaaagatcatggttaagtataatcattactgccaaactggaattttcaagttattataatatcccaggccccttgataaaagctgagggttatcatgaccttaatgctaattcaatgagaaatgagtttaatagcataacattaccaaggtaatcaaactaataaaattccatatatcttccctgcatcttgtcactgtgtaccattcaaagtgtttataaaactctagattcatcaaatgagatttgctcagctttttgaaatgttaagatgtgtttggagaaggctgcatgactttgtttttcccttttagcaaaactaaataaagttgtcaaatatgaatcatgttcattaagg

SEQ ID NO: 70308 - DNA, 4628 bp, Homo sapiens
gaaggaggtaggggcctgcgggtggctgggcggggcgcgctcgggcctccgctcttcacgcgccgcattcgtagcccgagagtccgcgccgcggggaggcttggaggcaagcgctgcccgcgagctgagccgccggaggaggagccgcgggcaacgaggtttctctgtcattcacagaaaaatgaatcatttaaacctttggaggactcagttatcacaatacttctctactaccaactaagatttatgatagtaaatttatgagagcaaatttccatgttatagaactgttgaagaactaaaagaggatattctttcatcaaaataattctgcagtatcataatattactaaataaaattaaaaagcacaattattaaattattaaatttgccacacatgtgcagcagctactgtatcctgatagtgaccaaacctcaaatataaatggtttcccttcatgggaaaagccattatatttggaagaaaccactgaacattgttattaaatatattttcagctaactgtcatttaggagaattttcatgaaacaagttctagaaagttccaagtcccaccagtaagtggatttgatattatggcagcaacttacagacttgtggttagtactgtgaaccactacagcagcgtggtgatagaccggcgttttgaacaagctatacattattgcactggaacctgccacaccttcacacatggaattgactgcattgtggtacaccatagtgtttgtgcagacctcttgcacatccctgtgtctcagttcaaagatgcagatctgaactctatgtttctaccccatgaaaatgggctttcttcggctgaaggagactatccccaacaggccttcacaggcatacccagggtcaagagaggatctacatttcagaatacctacaacttaaaggatattgcaggagaagcaatcagttttgccagtgggaaaataaaagaattttcctttgaaaaactcaaaaactctaaccatgcagcttacagaaagggaaggaaagttaagtctgactcatttaataggaggtcagttgatttggacttgctttgtggccattataacaacgatgggaacgccccatcctttggtttactgcggagttcctcagttgaggaaaaacctttgtctcatagaaactcactggatacgaacctgacttccatgtttcttcaaaacttttctgaagaagacttggttactcagattttggaaaaacataaaatagataatttttcttctgggacagacataaagatgtgcttggacatcttattgaaatgctccgaggatttaaaaaaatgcacagacatcataaaacaatgcataaagaaaaaatcagggagtagcatcagtgaaggaagtggtaatgatacaatttctagctctgaaactgtctatatgaatgtaatgaccaggttagcatcctatctgaaaaagttaccatttgaattcatgcagtctgggaataatgaggctctagatttaacagaactgatcagtaatatgcctagcttacaactgactcccttctccccagtgtttggcactgaacaaccccctaaatatgaagatgttgtccagctctcagcttctgactctggacgatttcaaactattgaattgcaaaatgacaagcctaattctaggaagatggacactgtacaatccattccaaacaactccacaaattccttatataacttagaggtaaatgatcctagaactctaaaagctgtccaggtccaatcacagtcattaaccatgaatcctttagaaaatgtttcttctgacgacttaatggaaactctttatattgaagaagagtcagatggaaagaaagcattagataaaggacaaaagacagagaatggacctagtcatgagttattaaaggtaaatgaacatagagcagaatttccagaacatgctactcatcttaaaaaatgccccaccccaatgcaaaatgaaattggtaagatatttgagaaatcatttgttaatctacctaaggaagactgtaaatcaaaagtttctaaatttgaagagggagaccagagagattttacaaattccagtagccaggaagagatagataaattgttaatggatttggaatctttttcacagaagatggagacctctctaagagagccacttgcgaagggtaaaaactctaattttttaaatagtcacagtcagttgaccggtcagacccttgtagatcttgagcctaaatctaaagtctcttcacccatagaaaaagtctcaccttcctgtctaacaaggattattgaaaccaatggacacaaaatagaggaagaggatcgagccctcttactgcgaatcctggaaagcattgaagactttgctcaagaactagttgaatgcaaatcaagcagagggagcctatcacaagaaaaggaaatgatgcaaattctacaggaaaccttgacaacttcctcccaggccaatttatcagtctgtagaagtcctgttggtgataaagccaaagatactacttcagcagttttgattcagcagactccagaggtgatcaagattcaaaataaaccagaaaagaaacctggaacaccactcccacctccagccacctctccaagtagtccccgacctctctccccggttccccatgtgaataatgttgtgaatgcgccattgtccataaacattccacggttctactttcctgaaggactcccagatacctgtagtaatcatgaacaaactctaagcagaattgaaactgctttcatggatattgaagaacagaaagcagacatttatgaaatggggaaaattgcaaaggtctgtggctgtcctctctattggaaagcccccatgttcagggctgcagggggagagaagacaggatttgtgacagcacagtcattcattgccatgtggagaaagttgctgaataaccatcatgatgatgcctctaaattcatctgtcttctagcaaagcccaactgcagctctctagaacaggaggatttcatccctctacttcaggatgtggtggatacccaccctggtctcacgttcctgaaagatgctccagaattccactcccgctacatcaccacggttattcagagaatattctacacagtcaacagatcttggagtggaaaaattacttcgacagagataagaaaaagcaactttttgcaaaaaaggagaatttaggaaataaatatgctataaacaaggtacagtacagtgagagttaacaatcctaggaatcctgcctgtcacaagctcccagttccctgtcattttatcttcatgattagaactgatcttccatttaactattacagaaagcagtaactattgcaactatctaatagttcacacaaaagaattaaaagcttaaaaataatttttaggaaacacaatattcaaaatctaaacacactgataaattattaagattaagattatttatgtgataaatgaaatctcctaccaatccatccagcctttaccagggaagaaaagcaattatttcatttcagatagaaatacaaaaaaaaaaaaaatacttttcttagaagccagatatggtttaaatgttttattatccataatgatctaaactaataagattcaccaaaaagtaaaaattcaattttacaatatacatttttttttttaactatttggctttacctttttaccttggttctccttactgaagtcctcttgctttcactttgatctggtttttgaagtctcttaattattggctgggcatggtgactcatgcctgtaatcccggcactttgggaggccaagggaggtgatcacttgagcccaggagtaaagaccagcctgggcaacatagtgagactccgtctctacaaaaaataaatttagctgggcatggtggtgcacatctgtagtcctaccaacttgggaggctgaggcaggagaatcgcttgagccccaggcttcgaggctgcagtgagctatgattacgacactgcactccagcctaggcgacagagcaagaccccattctcttacaaagtctctattataaaagtacatccatcaataccattccatttaaaatgggctattgtaatttacccacattatcacattttcaggaattataagaatgtgttttattgtactccttccttggagctgaatgcaaggaatgtgaattctgaggaattaaggtagaatatatttgactttctggtaaagatcatggttaagtataatcattactgccaaactggaattttcaagttattataatatcccaggccccttgataaaagctgagggttatcatgaccttaatgctaattcaatgagaaatgagtttaatagcataacattaccaaggtaatcaaactaataaaattccatatatcttccctgcatcttgtcactgtgtaccattcaaagtgtttataaaactctagattcatcaaatgagatttgctcagctttttgaaatgttaagatgtgtttggagaaggctgcatgactttgtttttcccttttagcaaaactaaataaagttgtcaaatatgaatcatgttcattaagg

SEQ ID NO: 70309 - DNA, 1338 bp, Homo sapiens
  misc_feature (8)..(8): n is a, c, g, or t
gtatttcnatctgaaatgaaataattgcttttcttccctgtcattttatcttcatgattagaactgatcttccatttaactattacagaaagcagtaactattgcaactatctaatagttcacacaaaagaattaaaagcttaaaaataatttttaggaaacacaatattcaaaatctaaacacactgataaattattaagattaagattatttatgtgataaatgaaatctcctaccaatccatccagcctttaccagggaagaaaagcaattatttcatttcagatagaaatacaaaaaaaaaaaaaatacttttcttagaagccagatatggtttaaatgttttattatccataatgatctaaactaataagattcaccaaaaagtaaaaattcaattttacaatatacatttttttttttaactatttggctttacctttttaccttggttctccttactgaagtcctcttgctttcactttgatctggtttttgaagtctcttaattattggctgggcatggtgactcatgcctgtaatcccggcactttgggaggccaagggaggtgatcacttgagcccaggagtaaagaccagcctgggcaacatagtgagactccgtctctacaaaaaataaatttagctgggcatggtggtgcacatctgtagtcctaccaacttgggaggctgaggcaggagaatcgcttgagccccaggcttcgaggctgcagtgagctatgattacgacactgcactccagcctaggcgacagagcaagaccccattctcttacaaagtctctattataaaagtacatccatcaataccattccatttaaaatgggctattgtaatttacccacattatcacattttcaggaattataagaatgtgttttattgtactccttccttggagctgaatgcaaggaatgtgaattctgaggaattaaggtagaatatatttgactttctggtaaagatcatggttaagtataatcattactgccaaactggaattttcaagttattataatatcccaggccccttgataaaagctgagggttatcatgaccttaatgctaattcaatgagaaatgagtttaatagcataacattaccaaggtaatcaaactaataaaattccatatatcttccctgcatcttgtcactgtgtaccattcaaagtgtttataaaactctagattcatcaaatgagatttgctcagctttttgaaatgttaagatgtgtttggagaaggctgcatgactttgtttttcccttttagcaaaactaaataaagttgtcaaatatgaatcatgttcattaagg

SEQ ID NO: 70310 - DNA, 402 bp, Homo sapiens
aaacatagcagactgcctgaatcctaagccagctgagggaaaaaccaagaagcaaccagatatacccagcaaaacctgcagacattcaggatttggggatactaggaaccttggaagtgggggtggggtaaaggtaaagccaaaacaggagagtttatagaaagtttgtttaaatgaacagttgatcttcaggtcatgtcctctaccctagcataaaactggtgctttattccctggagaacataaaacagagggtctccggactggggagcattgggcacagttgagatgtgaatgtgatcttgaaaacagataaaatgagtgtatgcatactgaatgctgagacgcccagtcttcattcctcactcagctaacagaatgctgcctacctgccctgaacct

SEQ ID NO: 70311 - DNA, 768 bp, Homo sapiens
agattctgaggttagcagtaagctattggtgcaccactgcactccagactaggcaacagagtgagaccctatctcttttaaaaaaaagagttggaatcagccagccacggtggctcacacctgtaatcccagcactttgggacgctgaggcgggcagatcacctgaggtcaggagttcgagaccagcctggccaacatggcgaaaccctgtctctacaaaatacaaaaattagctggacgtggtggtacttgcctgtagtcccagctacttgggaggctgaggcaggagaattgcttgaacccaggaggcagaggctgcagtgagccgagatcgtgccactatactccagcctgggtgacagagtgagattctatctcaaaaagaaaaaaaaagaaaaaagaaaaaaatggaatctatacctaaaaaacctggctgctaaacagttataattttgccatttgaggtgtagaaaattaccttaggagttttaccttagcacctcttttaaacctgttgaaatgaaacatttttcaggtaggattttttcagcagtatacatttgtgtgatgatctatctccaattctttgtctttgattttttttatttctcgtggctgtcttctttccaatcaggatgttgagaacgatgggcctgagccctcagactgggaccggtttgccgctgaggagtatgagacgcttgttgcagaggaatctgcccaagcacaattccaggaagggtgagtaagtttccctatgtcttatag

SEQ ID NO: 70312 - DNA, 1359 bp, Homo sapiens
gaaggaggtaggggcctgcgggtggctgggcggggcgcgctcgggcctccgctcttcacgcgccgcattcgtagcccgagagtccgcgccgcggggaggcttggaggcaagcgctgcccgcgagctgagccgccggaggaggagccgcgggcaacgaggtttctctgtcattcacagaaaaatgaatcatttaaacctttggaggactcagttatcacaatacttctctactaccaactaagatttatgatagtaaatttatgagagcaaatttccatgttatagaactgttgaagaactaaaagaggatattctttcatcaaaataattctgcagtatcataatattactaaataaaattaaaaagcacaattattaaattattaaatttgccacacatgtgcagcagctactgtatcctgatagtgaccaaacctcaaatataaatggtttcccttcatgggaaaagccattatatttggaagaaaccactgaacattgttattaaatatattttcagctaactgtcatttaggagaattttcatgaaacaagttctagaaagttccaagtcccaccagtaagtggatttgatattatggcagcaacttacagacttgtggttagtactgtgaaccactacagcagcgtggtgatagaccggcgttttgaacaagctatacattattgcactggaacctgccacaccttcacacatggaattgactgcattgtggtacaccatagtgtttgtgcagacctcttgcacatccctgtgtctcagttcaaagatgcagatctgaactctatgtttctaccccatgaaaatgggctttcttcggctgaaggagactatccccaacaggccttcacaggcatacccagggtcaagagaggatctacatttcagaatacctacaacttaaaggatattgcaggagaagcaatcagttttgccagtgggaaaataaaagaattttcctttgaaaaactcaaaaactctaaccatgcagcttacagaaagggaaggaaagttaagtctgactcatttaataggaggtcagttgatttggacttgctttgtggccattataacaacgatgggaacgccccatcctttggtttactgcggagttcctcagttgaggaaaaacctttgtctcatagaaactcactggatacgaacctgacttccatgtttcttcaaaacttttctgaagaagacttggttactcagattttggaaaaacataaaatagataatttttcttctgggacagacataaagatgtgcttggacatcttattgaaatgctccgaggatttaaaaaaatgcacagacatcataaaacaatgcat

SEQ ID NO: 70313 - DNA, 6794 bp, Homo sapiens
gaaggaggtaggggcctgcgggtggctgggcggggcgcgctcgggcctccgctcttcacgcgccgcattcgtagcccgagagtccgcgccgcggggaggcttggaggcaagcgctgcccgcgagctgagccgccggaggaggagccgcgggcaacgaggtttctctgtcattcacagaaaaatgaatcatttaaacctttggaggactcagttatcacaatacttctctactaccaactaagatttatgatagtaaatttatgagagcaaatttccatgttatagaactgttgaagaactaaaagaggatattctttcatcaaaataattctgcagtatcataatattactaaataaaattaaaaagcacaattattaaattattaaatttgccacacatgtgcagcagctactgtatcctgatagtgaccaaacctcaaatataaatggtttcccttcatgggaaaagccattatatttggaagaaaccactgaacattgttattaaatatattttcagctaactgtcatttaggagaattttcatgaaacaagttctagaaagttccaagtcccaccagtaagtggatttgatattatggcagcaacttacagacttgtggttagtactgtgaaccactacagcagcgtggtgatagaccggcgttttgaacaagctatacattattgcactggaacctgccacaccttcacacatggaattgactgcattgtggtacaccatagtgtttgtgcagacctcttgcacatccctgtgtctcagttcaaagatgcagatctgaactctatgtttctaccccatgaaaatgggctttcttcggctgaaggagactatccccaacaggccttcacaggcatacccagggtcaagagaggatctacatttcagaatacctacaacttaaaggatattgcaggagaagcaatcagttttgccagtgggaaaataaaagaattttcctttgaaaaactcaaaaactctaaccatgcagcttacagaaagggaaggaaagttaagtctgactcatttaataggaggtcagttgatttggacttgctttgtggccattataacaacgatgggaacgccccatcctttggtttactgcggagttcctcagttgaggaaaaacctttgtctcatagaaactcactggatacgaacctgacttccatgtttcttcaaaacttttctgaagaagacttggttactcagattttggaaaaacataaaatagataatttttcttctgggacagacataaagatgtgcttggacatcttattgaaatgctccgaggatttaaaaaaatgcacagacatcataaaacaatgcataaagaaaaaatcagggagtagcatcagtgaaggaagtggtaatgatacaatttctagctctgaaactgtctatatgaatgtaatgaccaggttagcatcctatctgaaaaagttaccatttgaattcatgcagtctgggaataatgaggctctagatttaacagaactgatcagtaatatgcctagcttacaactgactcccttctccccagtgtttggcactgaacaaccccctaaatatgaagatgttgtccagctctcagcttctgactctggacgatttcaaactattgaattgcaaaatgacaagcctaattctaggaagatggacactgtacaatccattccaaacaactccacaaattccttatataacttagaggtaaatgatcctagaactctaaaagctgtccaggtccaatcacagtcattaaccatgaatcctttagaaaatgtttcttctgacgacttaatggaaactctttatattgaagaagagtcagatggaaagaaagcattagataaaggacaaaagacagagaatggacctagtcatgagttattaaaggtaaatgaacatagagcagaatttccagaacatgctactcatcttaaaaaatgccccaccccaatgcaaaatgaaattggtaagatatttgagaaatcatttgttaatctacctaaggaagactgtaaatcaaaagtttctaaatttgaagagggagaccagagagattttacaaattccagtagccaggaagagatagataaattgttaatggatttggaatctttttcacagaagatggagacctctctaagagagccacttgcgaagggtaaaaactctaattttttaaatagtcacagtcagttgaccggtcagacccttgtagatcttgagcctaaatctaaagtctcttcacccatagaaaaagtctcaccttcctgtctaacaaggattattgaaaccaatggacacaaaatagaggaagaggatcgagccctcttactgcgaatcctggaaagcattgaagactttgctcaagaactagttgaatgcaaatcaagcagagggagcctatcacaagaaaaggaaatgatgcaaattctacaggaaaccttgacaacttcctcccaggccaatttatcagtctgtagaagtcctgttggtgataaagccaaagatactacttcagcagttttgattcagcagactccagaggtgatcaagattcaaaataaaccagaaaagaaacctggaacaccactcccacctccagccacctctccaagtagtccccgacctctctccccggttccccatgtgaataatgttgtgaatgcgccattgtccataaacattccacggttctactttcctgaaggactcccagatacctgtagtaatcatgaacaaactctaagcagaattgaaactgctttcatggatattgaagaacagaaagcagacatttatgaaatggggaaaattgcaaaggtctgtggctgtcctctctattggaaagcccccatgttcagggctgcagggggagagaagacaggatttgtgacagcacagtcattcattgccatgtggagaaagttgctgaataaccatcatgatgatgcctctaaattcatctgtcttctagcaaagcccaactgcagctctctagaacaggaggatttcatccctctacttcaggatgtggtggatacccaccctggtctcacgttcctgaaagatgctccagaattccactcccgctacatcaccacggttattcagagaatattctacacagtcaacagatcttggagtggaaaaattacttcgacagagataagaaaaagcaactttttgcaaaccctagcacttttggaagaagaggaagatataaaccaaattacagattacttctcctatgaacatttctatgttatttattgtaaattctgggaactagatactgatcacgacctctacatcagccaggccgatctgtctcgatacaatgaccaggcttcatcaagcaggattattgaaaggatattctctggtgcagtaacaaggggaaaaacaatacagaaagagggaagaatgagctatgcagattttgtttggtttttgatctctgaagaagacaaaaggaatcctaccagcattgagtattggttccgctgcatggatgtggatggagacggtgtactctccatgtatgagctggagtacttctatgaggagcagtgtgaacggatggaagccatgggaattgagcccttgccattccatgatttactgtgccagatgcttgacctagtgaagccagctgttgatggcaaaataactctaagagatctgaagaggtgcagaatggctcacatcttctatgacactttctttaatctggagaaatacttagaccatgaacagagagatccctttgcggtccagaaggatgttgagaacgatgggcctgagccctcagactgggaccggtttgccgctgaggagtatgagacgcttgttgcagaggaatctgcccaagcacaattccaggaaggctttgaagattatgaaacagatgaacctgcctctccctctgaatttggaaacaaaagcaataaaatattaagtgcaagccttccagagaaatgtggaaagcttcaatcagtggatgaagaatagctgccggtgtctacaatgaaacgaagatgtgtattttaaatgtttctttcttgtgaagagatgttctcgtttgcatactgctttttaaagactttgatttctccaagtgtgtatcatctgcactaggaactttgtttttaagcaataggtctggatacacatttaacttaggaggctcctccaatttgcctcaaacctcttacggagcttctcctcagaagtggtaccatcgccttccaaagtcagcactctacactcttgaatgtaccaaggatctcttggcgacagtaccaagcacggttctctacacaggtgactgaagttgcctctgtgttggctggcatccctgagtcccctccgggctcctatggagcctagaagaaaccttcacttgcagaaaacttgagtcagaaaattctggaacttgaaaaagtagtaagggcctccagaattgacttagccctagtaataaaagcactgccaaaacatctcagagacttcttttatgtatactggagttcaaagatctttaacttacctggcttaatgtaatttcacagttacctgccaaactactagtcactttacatcctcaggtattgtaaccactgggccttccaactttgctggcaagctctggtaacctccctgactgtggatcttatataaaatctcaagataaaaaaacacttcttaaatgaagtatagaatttgactcatacttggaaaaagcccttttaacttttatcttttattcattgaactattgaatgatgtatttaatatccaaattagttgataactgttttcacttcctatcagaaggcctgcttgaagacataaaggaataatgatacattaaaattcttactagatagatatattccttcctcccaggagtattagactagctaatagtaaaggcctcaacgttattctttacttcatgttgaaaacaattactacagatatttcatccacctcagtatttatcaaggaaatggaaaatgatacagctataaaagaaagctgttatttactgtagttgtagatgtattcactacagaatcctacatttttcagcaggccacagtccagccaaatcctataatatccttgaaaagaaactattaaaaaggatagacatttctgatgtaagtaaaacccccaagcaacttaatatccatctgtcagtcatcaacttttcccctagattttttttttaactagttctgaaagtgtcaagaatagcttccctttccaccctacctaggttccctccttgctggcataaaggccaagcagtgaaatgaaccttgggttagagttatggtaggcaaaaagaaaaggagaatttaggaaataaatatgctataaacaaggtacagtacagtgagagttaacaatcctaggaatcctgcctgtcacaagctcccagttccctgtcattttatcttcatgattagaactgatcttccatttaactattacagaaagcagtaactattgcaactatctaatagttcacacaaaagaattaaaagcttaaaaataatttttaggaaacacaatattcaaaatctaaacacactgataaattattaagattaagattatttatgtgataaatgaaatctcctaccaatccatccagcctttaccagggaagaaaagcaattatttcatttcagatagaaatacaaaaaaaaaaaaaatacttttcttagaagccagatatggtttaaatgttttattatccataatgatctaaactaataagattcaccaaaaagtaaaaattcaattttacaatatacatttttttttttaactatttggctttacctttttaccttggttctccttactgaagtcctcttgctttcactttgatctggtttttgaagtctcttaattattggctgggcatggtgactcatgcctgtaatcccggcactttgggaggccaagggaggtgatcacttgagcccaggagtaaagaccagcctgggcaacatagtgagactccgtctctacaaaaaataaatttagctgggcatggtggtgcacatctgtagtcctaccaacttgggaggctgaggcaggagaatcgcttgagccccaggcttcgaggctgcagtgagctatgattacgacactgcactccagcctaggcgacagagcaagaccccattctcttacaaagtctctattataaaagtacatccatcaataccattccatttaaaatgggctattgtaatttacccacattatcacattttcaggaattataagaatgtgttttattgtactccttccttggagctgaatgcaaggaatgtgaattctgaggaattaaggtagaatatatttgactttctggtaaagatcatggttaagtataatcattactgccaaactggaattttcaagttattataatatcccaggccccttgataaaagctgagggttatcatgaccttaatgctaattcaatgagaaatgagtttaatagcataacattaccaaggtaatcaaactaataaaattccatatatcttccctgcatcttgtcactgtgtaccattcaaagtgtttataaaactctagattcatcaaatgagatttgctcagctttttgaaatgttaagatgtgtttggagaaggctgcatgactttgtttttcccttttagcaaaactaaataaagttgtcaaatatgaatcatgttcattaagg

SEQ ID NO: 70314 - DNA, 4976 bp, Homo sapiens
cattttttttggaaagtgccttccccggggccgaggtccaccccttccccactcccgccagcttcttccctccacctttcaagtgtccccgcctttcccgtcccagggaaagtggaagcccatgtccagaacatccgcggttactgtcctgaagactcccagatacctgtagtaatcatgacaactctaacagaatgaactgctgtcatggatattgaagaacagaaagcagacatttatgaaatgggggaaaattgcaaaggtaatgtaactactaaaatgattgtacaatctcccgttcgtttagaaaccctgagccccttccccaaatacttttcggatatatatatttaaaaggaacttgtttttgcctgttgaaagagaggtaaaagtcacagaaagaccaagaactgtcttcaaaaagaatgtattaatccagttccaacagagtgagaatacaccttgagattcttaatatatcaactaacattgctctttgagtcttttgaaatgtctgccaaatagttgatggagaaacctatgtatttttttaaacgtaaatctatgtaaacttgagtactggcagataattaataaattaattaatttagtgcagataagcattccctagaaacatgcttaccacctttaagagtacagtgagcccttaatctctcctgtctctgattgtggtttcttatattgctggtgagaattttcagtaaatgaatactgtttaaattttttgtgtctcataatcttatttttcttttagattcaaaataaaccagaaaagaaacctggaacaccactcccacctccagccacctctccaagtagtccccgacctctctccccggttccccatgtgaataatgttgtgaatgcgccattgtccataaacattccacggttctactttcctgaaggactcccagatacctgtagtaatcatgaacaaactctaagcagaattgaaactgctttcatggatattgaagaacagaaagcagacatttatgaaatggggaaaattgcaaaggtctgtggctgtcctctctattggaaagcccccatgttcagggctgcagggggagagaagacaggatttgtgacagcacagtcattcattgccatgtggagaaagttgctgaataaccatcatgatgatgcctctaaattcatctgtcttctagcaaagcccaactgcagctctctagaacaggaggatttcatccctctacttcaggatgtggtggatacccaccctggtctcacgttcctgaaagatgctccagaattccactcccgctacatcaccacggttattcagagaatattctacacagtcaacagatcttggagtggaaaaattacttcgacagagataagaaaaagcaactttttgcaaaccctagcacttttggaagaagaggaagatataaaccaaattacagattacttctcctatgaacatttctatgttatttattgtaaattctgggaactagatactgatcacgacctctacatcagccaggccgatctgtctcgatacaatgaccaggcttcatcaagcaggattattgaaaggatattctctggtgcagtaacaaggggaaaaacaatacagaaagagggaagaatgagctatgcagattttgtttggtttttgatctctgaagaagacaaaaggaatcctaccagcattgagtattggttccgctgcatggatgtggatggagacggtgtactctccatgtatgagctggagtacttctatgaggagcagtgtgaacggatggaagccatgggaattgagcccttgccattccatgatttactgtgccagatgcttgacctagtgaagccagctgttgatggcaaaataactctaagagatctgaagaggtgcagaatggctcacatcttctatgacactttctttaatctggagaaatacttagaccatgaacagagagatccctttgcggtccagaaggatgttgagaacgatgggcctgagccctcagactgggaccggtttgccgctgaggagtatgagacgcttgttgcagaggaatctgcccaagcacaattccaggaaggctttgaagattatgaaacagatgaacctgcctctccctctgaatttggaaacaaaagcaataaaatattaagtgcaagccttccagagaaatgtggaaagcttcaatcagtggatgaagaatagctgccggtgtctacaatgaaacgaagatgtgtattttaaatgtttctttcttgtgaagagatgttctcgtttgcatactgctttttaaagactttgatttctccaagtgtgtatcatctgcactaggaactttgtttttaagcaataggtctggatacacatttaacttaggaggctcctccaatttgcctcaaacctcttacggagcttctcctcagaagtggtaccatcgccttccaaagtcagcactctacactcttgaatgtaccaaggatctcttggcgacagtaccaagcacggttctctacacaggtgactgaagttgcctctgtgttggctggcatccctgagtcccctccgggctcctatggagcctagaagaaaccttcacttgcagaaaacttgagtcagaaaattctggaacttgaaaaagtagtaagggcctccagaattgacttagccctagtaataaaagcactgccaaaacatctcagagacttcttttatgtatactggagttcaaagatctttaacttacctggcttaatgtaatttcacagttacctgccaaactactagtcactttacatcctcaggtattgtaaccactgggccttccaactttgctggcaagctctggtaacctccctgactgtggatcttatataaaatctcaagataaaaaaacacttcttaaatgaagtatagaatttgactcatacttggaaaaagcccttttaacttttatcttttattcattgaactattgaatgatgtatttaatatccaaattagttgataactgttttcacttcctatcagaaggcctgcttgaagacataaaggaataatgatacattaaaattcttactagatagatatattccttcctcccaggagtattagactagctaatagtaaaggcctcaacgttattctttacttcatgttgaaaacaattactacagatatttcatccacctcagtatttatcaaggaaatggaaaatgatacagctataaaagaaagctgttatttactgtagttgtagatgtattcactacagaatcctacatttttcagcaggccacagtccagccaaatcctataatatccttgaaaagaaactattaaaaaggatagacatttctgatgtaagtaaaacccccaagcaacttaatatccatctgtcagtcatcaacttttcccctagattttttttttaactagttctgaaagtgtcaagaatagcttccctttccaccctacctaggttccctccttgctggcataaaggccaagcagtgaaatgaaccttgggttagagttatggtaggcaaaaagaaaaggagaatttaggaaataaatatgctataaacaaggtacagtacagtgagagttaacaatcctaggaatcctgcctgtcacaagctcccagttccctgtcattttatcttcatgattagaactgatcttccatttaactattacagaaagcagtaactattgcaactatctaatagttcacacaaaagaattaaaagcttaaaaataatttttaggaaacacaatattcaaaatctaaacacactgataaattattaagattaagattatttatgtgataaatgaaatctcctaccaatccatccagcctttaccagggaagaaaagcaattatttcatttcagatagaaatacaaaaaaaaaaaaaatacttttcttagaagccagatatggtttaaatgttttattatccataatgatctaaactaataagattcaccaaaaagtaaaaattcaattttacaatatacatttttttttttaactatttggctttacctttttaccttggttctccttactgaagtcctcttgctttcactttgatctggtttttgaagtctcttaattattggctgggcatggtgactcatgcctgtaatcccggcactttgggaggccaagggaggtgatcacttgagcccaggagtaaagaccagcctgggcaacatagtgagactccgtctctacaaaaaataaatttagctgggcatggtggtgcacatctgtagtcctaccaacttgggaggctgaggcaggagaatcgcttgagccccaggcttcgaggctgcagtgagctatgattacgacactgcactccagcctaggcgacagagcaagaccccattctcttacaaagtctctattataaaagtacatccatcaataccattccatttaaaatgggctattgtaatttacccacattatcacattttcaggaattataagaatgtgttttattgtactccttccttggagctgaatgcaaggaatgtgaattctgaggaattaaggtagaatatatttgactttctggtaaagatcatggttaagtataatcattactgccaaactggaattttcaagttattataatatcccaggccccttgataaaagctgagggttatcatgaccttaatgctaattcaatgagaaatgagtttaatagcataacattaccaaggtaatcaaactaataaaattccatatatcttccctgcatcttgtcactgtgtaccattcaaagtgtttataaaactctagattcatcaaatgagatttgctcagctttttgaaatgttaagatgtgtttggagaaggctgcatgactttgtttttcccttttagcaaaactaaataaagttgtcaaatatgaatcatgttcattaagg

SEQ ID NO: 70315 - DNA, 5650 bp, Homo sapiens
gaaggaggtaggggcctgcgggtggctgggcggggcgcgctcgggcctccgctcttcacgcgccgcattcgtagcccgagagtccgcgccgcggggaggcttggaggcaagcgctgcccgcgagctgagccgccggaggaggagccgcgggcaacgaggtttctctgtcattcacagaaaaatgaatcatttaaacctttggaggactcagttatcacaatacttctctactaccaactaagatttatgatagtaaatttatgagagcaaatttccatgttatagaactgttgaagaactaaaagaggatattctttcatcaaaataattctgcagtatcataatattactaaataaaattaaaaagcacaattattaaattattaaatttgccacacatgtgcagcagctactgtatcctgatagtgaccaaacctcaaatataaatggtttcccttcatgggaaaagccattatatttggaagaaaccactgaacattgttattaaatatattttcagctaactgtcatttaggagaattttcatgaaacaagttctagaaagttccaagtcccaccagtaagtggatttgatattatggcagcaacttacagacttgtggttagtactgtgaaccactacagcagcgtggtgatagaccggcgttttgaacaagctatacattattgcactggaacctgccacaccttcacacatggaattgactgcattgtggtacaccatagtgtttgtgcagacctcttgcacatccctgtgtctcagttcaaagatgcagatctgaactctatgtttctaccccatgaaaatgggctttcttcggctgaaggagactatccccaacaggccttcacaggcatacccagggtcaagagaggatctacatttcagaatacctacaacttaaaggatattgcaggagaagcaatcagttttgccagtgggaaaataaaagaattttcctttgaaaaactcaaaaactctaaccatgcagcttacagaaagggaaggaaagttaagtctgactcatttaataggaggtcagttgatttggacttgctttgtggccattataacaacgatgggaacgccccatcctttggtttactgcggagttcctcagttgaggaaaaacctttgtctcatagaaactcactggatacgaacctgacttccatgtttcttcaaaacttttctgaagaagacttggttactcagattttggaaaaacataaaatagataatttttcttctgggacagacataaagatgtgcttggacatcttattgaaatgctccgaggatttaaaaaaatgcacagacatcataaaacaatgcataaagaaaaaatcagggagtagcatcagtgaaggaagtggtaatgatacaatttctagctctgaaactgtctatatgaatgtaatgaccaggttagcatcctatctgaaaaagttaccatttgaattcatgcagtctgggaataatgaggctctagatttaacagaactgatcagtaatatgcctagcttacaactgactcccttctccccagtgtttggcactgaacaaccccctaaatatgaagatgttgtccagctctcagcttctgactctggacgatttcaaactattgaattgcaaaatgacaagcctaattctaggaagatggacactgtacaatccattccaaacaactccacaaattccttatataacttagaggtaaatgatcctagaactctaaaagctgtccaggtccaatcacagtcattaaccatgaatcctttagaaaatgtttcttctgacgacttaatggaaactctttatattgaagaagagtcagatggaaagaaagcattagataaaggacaaaagacagagaatggacctagtcatgagttattaaaggtaaatgaacatagagcagaatttccagaacatgctactcatcttaaaaaatgccccaccccaatgcaaaatgaaattggtaagatatttgagaaatcatttgttaatctacctaaggaagactgtaaatcaaaagtttctaaatttgaagagggagaccagagagattttacaaattccagtagccaggaagagatagataaattgttaatggatttggaatctttttcacagaagatggagacctctctaagagagccacttgcgaagggtaaaaactctaattttttaaatagtcacagtcagttgaccggtcagacccttgtagatcttgagcctaaatctaaagtctcttcacccatagaaaaagtctcaccttcctgtctaacaaggattattgaaaccaatggacacaaaatagaggaagaggatcgagccctcttactgcgaatcctggaaagcattgaagactttgctcaagaactagttgaatgcaaatcaagcagagggagcctatcacaagaaaaggaaatgatgcaaattctacaggaaaccttgacaacttcctcccaggccaatttatcagtctgtagaagtcctgttggtgataaagccaaagatactacttcagcagttttgattcagcagactccagaggtgatcaagattcaaaataaaccagaaaagaaacctggaacaccactcccacctccagccacctctccaagtagtccccgacctctctccccggttccccatgtgaataatgttgtgaatgcgccattgtccataaacattccacggttctactttcctgaaggactcccagatacctgtagtaatcatgaacaaactctaagcagaattgaaactgctttcatggatattgaagaacagaaagcagacatttatgaaatggggaaaattgcaaaggtctgtggctgtcctctctattggaaagcccccatgttcagggctgcagggggagagaagacaggatttgtgacagcacagtcattcattgccatgtggagaaagttgctgaataaccatcatgatgatgcctctaaattcatctgtcttctagcaaagcccaactgcagctctctagaacaggaggatttcatccctctacttcaggatgtggtggatacccaccctggtctcacgttcctgaaagatgctccagaattccactcccgctacatcaccacggttattcagagaatattctacacagtcaacagatcttggagtggaaaaattacttcgacagagataagaaaaagcaactttttgcaaaccctagcacttttggaagaagaggaagatataaaccaaattacagattacttctcctatgaacatttctatgttatttattgtaaattctgggaactagatactgatcacgacctctacatcagccaggccgatctgtctcgatacaatgaccaggcttcatcaagcaggattattgaaaggatattctctggtgcagtaacaaggggaaaaacaatacagaaagagggaagaatgagctatgcagattttgtttggtttttgatctctgaagaagacaaaaggaatcctaccagcattgagtattggttccgctgcatggatgtggatggagacggtgtactctccatgtatgagctggagtacttctatgaggagcagtgtgaacggatggaagccatgggaattgagcccttgccattccatgatttactgtgccagatgcttgacctagtgaagccagctgttgatggcaaaataactctaagagatctgaagaggtgcagaatggctcacatcttctatgacactttctttaatctggagaaatacttagaccatgaacagagagatccctttgcggtccagaaggatgttgagaacgatgggcctgagccctcagactgggaccggtttgccgctgaggagtatgagacgcttgttgcagaggaatctgcccaagcacaattccaggaaggctttgaagattatgaaacagatgaacctgcctctccctctgaatttggaaacaaaagcaataaaatattaagtgcaagccttccagagaaatgtggaaagcttcaatcagtggatgaagaatagctgccggtgtctacaatgaaacgaagatgtgtattttaaatgtttctttcttgtgaagagatgttctcgtttgcatactgctttttaaagactttgatttctccaagtgtgtatcatctgcactaggaactttgtttttaagcaataggtctggatacacatttaacttaggaggctcctccaatttgcctcaaacctcttacggagcttctcctcagaagtggtaccatcgccttccaaagtcagcactctacactcttgaatgtaccaaggatctcttggcgacagtaccaagcacggttctctacacaggtgactgaagttgcctctgtgttggctggcatccctgagtcccctccgggctcctatggagcctagaagaaaccttcacttgcagaaaacttgagtcagaaaattctggaacttgaaaaagtagtaagggcctccagaattgacttagccctagtaataaaagcactgccaaaacatctcagagacttcttttatgtatactggagttcaaagatctttaacttacctggcttaatgtaatttcacagttacctgccaaactactagtcactttacatcctcaggtattgtaaccactgggccttccaactttgctggcaagctctggtaacctccctgactgtggatcttatataaaatctcaagataaaaaaacacttcttaaatgaagtatagaatttgactcatacttggaaaaagcccttttaacttttatcttttattcattgaactattgaatgatgtatttaatatccaaattagttgataactgttttcacttcctatcagaaggcctgcttgaagacataaaggaataatgatacattaaaattcttactagatagatatattccttcctcccaggagtattagactagctaatagtaaaggcctcaacgttattctttacttcatgttgaaaacaattactacagatatttcatccacctcagtatttatcaaggaaatggaaaatgatacagctataaaagaaagctgttatttactgtagttgtagatgtattcactacagaatcctacatttttcagcaggccacagtccagccaaatcctataatatccttgaaaagaaactattaaaaaggatagacatttctgatgtaagtaaaacccccaagcaacttaatatccatctgtcagtcatcaacttttcccctagattttttttttaactagttctgaaagtgtcaagaatagcttccctttccaccctacctaggttccctccttgctggcataaaggccaagcagtgaaatgaaccttgggttagagttatggtaggcaaaaagaaaaggagaatttaggaaataaatatgctataaacaaggtacagtacagtgagagttaacaatcctaggaatcctgcctgtcacaagctcccagttccctgtcattttatcttcatgattagaactgatcttccatttaactattacagaaagcagtaactattgcaactatctaatagttcacacaaaagaattaaaagcttaaaaataatttatcagtgtgtttagattttgaatattgtgtttccgtcgacc

SEQ ID NO: 70316 - DNA, 707 bp, Homo sapiens
aaaaatgccccaccccaatgcaaaatgaaattggtaagatatttgagaaatcatttgttaatctacctaaggaagactgtaaatcaaaagtttctaaatttgaagagggagaccagagagattttacaaattccagtagccaggaagagatagataaattgttaatggatttggaatctttttcacagaagatggagacctctctaagagagccacttgcgaagggtaaaaactctaattttttaaatagtcacagtcagttgaccggtcagacccttgtagatcttgagcctaaatctaaagtctcttcacccatagaaaaagtctcaccttcctgtctaacaaggattattgaaaccaatggacacaaaatagaggaagaggatcgagccctcttactgcgaatcctggaaagcattgaagactttgctcaagaactagttgaatgcaaatcaagcagagggagcctatcacaagaaaaggaaatgatgcaaattctacaggaaaccttgacaacttcctcccaggccaatttatcagtctgtagaagtcctgttggtgataaagccaaagatactacttcagcagttttgattcagcagactccagaggtgatcaaggtaagacccaacaattttgagtcctaggaactctttaaaaaatgtttagtgtttgaaaattttataaagaaaaacttttttgttagc

SEQ ID NO: 70317 - DNA, 2423 bp, Homo sapiens
  misc_feature (7)..(9): n is a, c, g, or t
  misc_feature (14)..(14): n is a, c, g, or t
agcgggnnncgggnccgggcaacccggaaggtccggcgtcccagccgcctacctcgctgggaccctggtcttgctgtcccccgctggcctcctgcccaagcgactgcggccaggatgggccggaaggtgaccgtggccacctgcgcactcaaccagtgggccctggacttcgagggcaatttgcaaagaattttaaagagtattgaaattgccaaaaacagaggagcaagatacaggcttggaccagagctggaaatatgcggctacggatgttgggatcattattacgagtcggacaccctcttgcactcgtttcaagtcctagcggcccttctggagtctcccgtcactcaggacatcatctgcgacgtggggatgcctgtaatgcaccgaaacgtccgctacaactgcagagtgatattcctcaacaggaagatcctgctcatcagacccaagatggccttggccaatgaaggcaactaccgcgagctgcgctggttcaccccgtggtcgaggagtcggcacacagaggagtactttctgcctcggatgatacaggacctgacaaagcaggaaaccgtacccttcggagatgcggtgctggtgacatgggacacctgcattggaagtgagatctgtgaggagctctggacaccccacagcccgcacatcgacatgggcctggatggcgtggagatcatcaccaacgcctcgggcagccaccacgtgctgcgcaaagccaacaccagggtggatctcgtgactatggtcaccagcaagaacggtgggatttacttgctggccaaccagaagggttgcgacggggaccgcctgtactacgacggctgtgccatgatcgccatgaacggaagcgtctttgctcaaggatcccagttttctctggatgacgtggaagtcctgacggccacgctggatctggaggacgtccggagctacagggcggagatttcatctcgaaacctggcggccagcagggcgagcccctaccccagagtgaaggtggactttgccctctcgtgccacgaggacttgctggcacccatctctgagcccatcgagtggaaataccacagccctgaggaggagataagccttggacctgcctgctggctctgggattttttaagacgaagtcaacaggcagggtttttgctgcccttgagtggcggggtggacagcgcagccaccgcctgcctcatctactccatgtgctgccaggtctgcgaggccgtgaggagtggaaatgaggaagtgctggctgatgtccgcaccatcgtgaaccagatcagctacaccccccaggatccccgagacctctgtggacgcatactgaccacctgctacatggccagcaagaactcctcccaggagacgtgcacccgggccagagagttggcccagcagattggaagccaccacatcagtctcaacatcgatccagccgtgaaggccgtcatgggcatcttcagcctggtgacggggaagagccctctgtttgcagctcatggaggaagcagcagggaaaacctggcgctgcaaaatgtgcaggctcgaatacggatggtcctcgcctatctgtttgctcagttgagcctctggtctcggggtgtccacggtgggctcctcgtgctgggatccgccaacgtggatgagagtctcctgggctacctgaccaagtacgactgctccagtgcggacatcaaccccataggcgggatcagcaagacggacctcagggccttcgtccagttctgcatccagcgcttccagcttcctgccctgcagagcatcctgttggcgccggccaccgcagagctggagcccttggctgatggacaggtgtcccagaccgacgaggaagatatggggatgacatatgcggagctctcggtctatgggaaactcaggaaggtggccaagatggggccctacagcatgttctgcaaactcctcggcatgtggagacacatctgcaccccgagacaggtcgctgacaaagtgaagcggtttttctccaagtactccatgaacagacacaagatgaccacgctcacacccgcgtaccacgccgagaactacagccctgaggacaacaggtttgatctgcgaccatttctgtacaacacaagctggccttggcagtttcggtgcatagaaaatcaggtgctacagctcgagagggcagagccacagtccctggacggcgtggactgaggccggttccttcctggaggcctcctgtcctcggggaccccagcacctcatcatcagcattgctggagccaagggtaggagccctacactaggagcccaggatgggacggcgcatcagccgagagggagggaacttttcagtcaaattcctcaaaaagaggctggaataaagcctgggcttaaaaaga

SEQ ID NO: 70318 - DNA, 669 bp, Homo sapiens
gaatctcggaaaagttgtgcagtcaaaggaagcggcgaggaatctggtgttctcgtgtcaatgagctccaggaggtcggcccaggcttcattgaggccatccttccattcagcgatggtggcggcatctgaatgtccagagttgatgagctcatctgccaggtgattgaccgtgtccacgcgctcctgcccaatgttcccggtgtctcgggcaaactcccggcatgtggagacacatctgcaccccgagacaggtcgctgacaaagtgaagcggtttttctccaagtactccatgaacagacacaagatgaccacgctcacacccgcgtaccacgccgagaactacagccctgaggacaacaggtttgatctgcgaccatttctgtacaacacaagctggccttggcagtttcggtgcatagaaaatcaggtgctacagctcgagagggcagagccacagtccctggacggcgtggactgaggccggttccttcctggaggcctcctgtcctcggggaccccagcacctcatcatcagcattgctggagccaagggtaggagccctacactaggagcccaggatgggacggcgcatcagccgagagggagggaacttttcagtcaaattcctcaaaaagaggctggaataaagcctgggcttaaaaaga

SEQ ID NO: 70319 - DNA, 485 bp, Homo sapiens
agtaacccattagtcatttgcttgtatgatccagcatgggaattccggcctggggtctctccagttttggtaacatgaagctcgtgtgttgcacgcccaccaggtcgctgacaaagtgaagcggtttttctccaagtactccatgaacagacacaagatgaccacgctcacacccgcgtaccacgccgagaactacagccctgaggacaacaggtttgatctgcgaccatttctgtacaacacaagctggccttggcagtttcggtgcatagaaaatcaggtaaatccagcagaaatgtttctctctccatgtttcatgtctgtagaagaaacgtgaggttatttccatgaaggattgaaaaactttcttatatacacagtaacttttttactgtcctcctttctgcaaagggacaagtatgtttaaagcgttttttaaatttacttttttcgtgttgacaaataaaaattctatatattgaaaa

SEQ ID NO: 70320 - DNA, 817 bp, Homo sapiens
cagccctgaggacaacaggtttgtagttctcggcgtggtacgcgggtgtgagcgtggtcatcttgtgtctgttcatggagtactacagccctgaggacaacaggtttgatctgcgaccatttctgtacaacacaagctggccttggcagtttcggtgcatagaaaatcaggtgctacagctcgagagggcagagccacagtccctggacggcgtggactgaggccggttccttcctggaggcctcctgtcctcggggaccccagcacctcatcatcagcattgctggagccaagggtaggagccctacactaggagcccaggatgggacggcgcatcagccgagagggagggaacttttcagtcaaattcctcaaaaagaggctggaataaagcctgggcttaaaaagaaaaaaaaaaaaaaaaaaaaaaaaaaaaaaaggcgaaaagaaaaacacagccagcaacaacgcagagcagaaacgcaagaaaatgagaaaagacaggaaaggggggggccgacggatataaggattaccccccgagaggggggggcacaaccacaagagcgcaccccggctgttagtggaccagaaaaaggagggcgaccgaaaagaggaggcggcgtctaacacaaagcgggcggagcggcgcggccgcagttaacaaaacacggtggatgaaggggagaaacaacgacgccacgtagcagacgactgttgggggagaagcaccgcaacacgcaggcggggggaaacaaaagcggggccaaccacgctcgcaagaagaaagtcgagcgccctggcgacaaaagtcaac

SEQ ID NO: 70321 - DNA, 301 bp, Homo sapiens
gatctgcgaccattatgtgtacacatcagagttataaatggaaagattacatatctgattaatagtttctacatactgtgcatatagcacagtccctggacggcgtggactgaggccggttccttcctggaggcctcctgtcctcggggaccccagcacctcatcatcagcattgctggagccaagggtaggagccctacactaggagcccaggatgggacggcgcatcagccgagagggagggaacttttcagtcaaattcctcaaaaagaggctggaataaagcctgggcttaaaaaga

SEQ ID NO: 70322 - DNA, 424 bp, Homo sapiens
taagcagagtagttaataaaaagcttttttttttcatgttttaaaaatgtgacgttgtcaggcctctgagcccaagctaagccatcatgtcctctgtaacctgcacgtacacatccagatggccggttcctgccttaactgatgacattccaccacaaaagaagtgaaaatggcctgttcctgccttaactgatgacactatcttgtgaaattccttctcctggctcatcctggctcaaaagctcccctactgagcaccttgtgacctccactcctgtctgccagagaacaacccccctttgactgtaattttcctttacctacccaaatcttataaaacggccccacccctatctcctttcgctgactcttttcagactcagcccgcctgcacccaggtgaaataaacagccttgttgctcac

SEQ ID NO: 70323 - DNA, 326 bp, Homo sapiens
  misc_feature (7)..(9): n is a, c, g, or t
  misc_feature (14)..(14): n is a, c, g, or t
agcgggnnncgggnccgggcaacccggaaggtccggcgtcccagccgcctacctcgctgggaccctggtcttgctgtcccccgctggcctcctgcccaagcgactgcggccaggatgggccggaaggtgaccgtggccacctgcgcactcaaccagtgggccctggacttcgagggcaatttgcaaagaattttaaagagtattgaaattgccaaaaacagaggagcaagatacaggcttggaccagagctggaaatatgcggctacgatgttgggatcatatacgagtcgtggcaagaaagggatcctctagaaacctgcagcac

SEQ ID NO: 70324 - DNA, 2712 bp, Homo sapiens
  misc_feature (7)..(9): n is a, c, g, or t
  misc_feature (14)..(14): n is a, c, g, or t
agcgggnnncgggnccgggcaacccggaaggtccggcgtcccagccgcctacctcgctgggaccctggtcttgctgtcccccgctggcctcctgcccaagcgactgcggccaggatgggccggaaggtgaccgtggccacctgcgcactcaaccagtgggccctggacttcgagggcaatttgcaaagaattttaaagagtattgaaattgccaaaaacagaggagcaagatacaggcttggaccagagctggaaatatgcggctacggatgttgggatcattattacgagtcggacaccctcttgcactcgtttcaagtcctagcggcccttctggagtctcccgtcactcaggacatcatctgcgacgtggggatgcctgtaatgcaccgaaacgtccgctacaactgcagagtgatattcctcaacaggaagatcctgctcatcagacccaagatggccttggccaatgaaggcaactaccgcgagctgcgctggttcaccccgtggtcgaggagtcggcacacagaggagtactttctgcctcggatgatacaggacctgacaaagcaggaaaccgtacccttcggagatgcggtgctggtgacatgggacacctgcattggaagtgagatctgtgaggagctctggacaccccacagcccgcacatcgacatgggcctggatggcgtggagatcatcaccaacgcctcgggcagccaccacgtgctgcgcaaagccaacaccagggtggatctcgtgactatggtcaccagcaagaacggtgggatttacttgctggccaaccagaagggttgcgacggggaccgcctgtactacgacggctgtgccatgatcgccatgaacggaagcgtctttgctcaaggatcccagttttctctggatgacgtggaagtcctgacggccacgctggatctggaggacgtccggagctacagggcggagatttcatctcgaaacctggcggccagcagggcgagcccctaccccagagtgaaggtggactttgccctctcgtgccacgaggacttgctggcacccatctctgagcccatcgagtggaaataccacagccctgaggaggagataagccttggacctgcctgctggctctgggattttttaagacgaagtcaacaggcagggtttttgctgcccttgagtggcggggtggacagcgcagccaccgcctgcctcatctactccatgtgctgccaggtctgcgaggccgtgaggagtggaaatgaggaagtgctggctgatgtccgcaccatcgtgaaccagatcagctacaccccccaggatccccgagacctctgtggacgcatactgaccacctgctacatggccagcaagaactcctcccaggagacgtgcacccgggccagagagttggcccagcagattggaagccaccacatcagtctcaacatcgatccagccgtgaaggccgtcatgggcatcttcagcctggtgacggggaagagccctctgtttgcagctcatggaggaagcagcagggaaaacctggcgctgcaaaatgtgcaggctcgaatacggatggtcctcgcctatctgtttgctcagttgagcctctggtctcggggtgtccacggtgggctcctcgtgctgggatccgccaacgtggatgagagtctcctgggctacctgaccaagtacgactgctccagtgcggacatcaaccccataggcgggatcagcaagacggacctcagggccttcgtccagttctgcatccagcgcttccagcttcctgccctgcagagcatcctgttggcgccggccaccgcagagctggagcccttggctgatggacaggtgtcccagaccgacgaggaagatatggggatgacatatgcggagctctcggtctatgggaaactcaggaaggtggccaagatggggccctacagcatgttctgcaaactcctcggcatgtggagacacatctgcaccccgagacaggtcgctgacaaagtgaagcggtttttctccaagtactccatgaacagacacaagatgaccacgctcacacccgcgtaccacgccgagaactacagccctgaggacaacaggtttgatctgcgaccatttctgtacaacacaagctggccttggcagtttcggtgcatagaaaatcaggtgctacagctcgagagggcagagccacagtccctggacggcgtggactgaggccggttccttcctggaggcctcctgtcctcggggaccccagcacctcatcatcagcattgctggagccaagggtaggagccctacactaggagcccaggatgggacggcgcatcagccgagagggagggaacttttcagtcaaattcctcaaaaagaggctggaataaagcctgggcttaaaaagaggctggaatccaatgcacatgattttgacctcccgccagcgtgcgcttccccgcgaagtctggcattctccgaaggaagccgcctgggtaggagggttccaaccgccgccccgtgtggcatctttgctgcaggaacaagaacagtagctcccgggaagggaggggtgtcatgagcagaaaatgaaggagagaagaccttctctcccacccacacacaccttcctgtcctgggttccagaaggttctggggagatggtccctgcagagctttcttcctgggagtctgggg

SEQ ID NO: 70325 - DNA, 4477 bp, Homo sapiens
  misc_feature (7)..(9): n is a, c, g, or t
  misc_feature (14)..(14): n is a, c, g, or t
  misc_feature (1789)..(1789): n is a, c, g, or t
agcgggnnncgggnccgggcaacccggaaggtccggcgtcccagccgcctacctcgctgggaccctggtcttgctgtcccccgctggcctcctgcccaagcgactgcggccaggatgggccggaaggtgaccgtggccacctgcgcactcaaccagtgggccctggacttcgagggcaatttgcaaagaattttaaagagtattgaaattgccaaaaacagaggagcaagatacaggcttggaccagagctggaaatatgcggctacggatgttgggatcattattacgagtcggacaccctcttgcactcgtttcaagtcctagcggcccttctggagtctcccgtcactcaggacatcatctgcgacgtggggatgcctgtaatgcaccgaaacgtccgctacaactgcagagtgatattcctcaacaggaagatcctgctcatcagacccaagatggccttggccaatgaaggcaactaccgcgagctgcgctggttcaccccgtggtcgaggagtcggcacacagaggagtactttctgcctcggatgatacaggacctgacaaagcaggaaaccgtacccttcggagatgcggtgctggtgacatgggacacctgcattggaagtgagatctgtgaggagctctggacaccccacagcccgcacatcgacatgggcctggatggcgtggagatcatcaccaacgcctcgggcagccaccacgtgctgcgcaaagccaacaccagggtggatctcgtgactatggtcaccagcaagaacggtgggatttacttgctggccaaccagaagggttgcgacggggaccgcctgtactacgacggctgtgccatgatcgccatgaacggaagcgtctttgctcaaggatcccagttttctctggatgacgtggaagtcctgacggccacgctggatctggaggacgtccggagctacagggcggagatttcatctcgaaacctggcggccagcagggcgagcccctaccccagagtgaaggtggactttgccctctcgtgccacgaggacttgctggcacccatctctgagcccatcgagtggaaataccacagccctgaggaggagataaggtgtgtggcccctgacccctgggagggacctggcgtctgtgtggccacgcccctggggtggggactcctggaggtcacgcagtgggttttcagaacctgcctgggtggggacttgcagaaggcaactgtgcctcccctgggttgagggcgtggatgctagagccagaacccctgggtgtgacccccagccctgctgcttccccgtgctgtgaccttgggccccaaggtgctgtccgtccattctgtggttcagtgtccccattttaaaatgaggacgatgataatacccacgtcctggggctgtcttcagaatcacatgtgtcccttctcacgaggtgcctaaagcagagacgggcgtcctgagagcccagcgttgactctggcactgcagcctcctggggcctgcttgggtgggttgttgggtgctgtgggcaggggccaccgcctccgggctccatgttctgattgccctgcagccttggacctgcctgctggctctgggattttttaagacgaagtcaacaggtaagacttccagtttctagtgagcccactttgcttgttctgctggttggtctggttttattctggggcagggtagggatttttttttttttttttagtgcaaacaacaaaaagcatttcatcactctgcctccatggggagcttagtctgngctagccagaggcaaggtgggcacagtggctggtgggtcagctccacctttggaggctcagcggaacccagcccatcagcattcagggtcacgctcaccatcttgccagcattgtaatcatgcgtatctgcagttcgtcggtggagtcagcctctgacacgccccgcagtgaagtgtcttttttccctctgaaaaatccattcatcctgccacgtgcgggtatttgtcctgaccccatggaaagtgctgacacccacgtgcatttctgtggacgcctccttgaggtctatgggtggagcttggctgatccatgggcatgctgcttctccgaggctctgctcacgctgtctgattggtccattccaggcagggtttttgctgcccttgagtggcggggtggacagcgcagccaccgcctgcctcatctactccatgtgctgccaggtctgcgaggccgtgaggagtggaaatgaggaagtgctggctgatgtccgcaccatcgtgaaccagatcagctacaccccccaggatccccgagacctctgtggacgcatactgaccacctgctacatggccagcaagaactcctcccaggagacgtgcacccgggccagagagttggcccagcagattggaagccaccacatcagtctcaacatcgatccagccgtgaaggccgtcatgggcatcttcagcctggtgacggggaagagccctctgtttgcagctcatggaggaagcagcagggaaaacctggcgctgcaaaatgtgcaggtgcccccgcctgggccggcgtcccctgggggtgggggtgcagggagcactgggacaatcactacaggatgtgcaggtgcccccacctgggccatcgtctccatgaagctcatggcaccggttacctagggacagccagtgctggggtcacagcctgtatgcctcactgaagacgtcggtcatgcagccttgttaacaaggagggggtctgtgtgtgtgttggtgcatgagcatgtgatgtgtaagagcaagagcgggggtgtaaggatgtgcgtgctcgagtgtgtgcatgagcctgagtgcaagagcaagagggtgtgtctgagcctgagtgtgagcctgagcgtgagaggttacatgagtgtatgagagtacaagtgtgtgaatgtatgcacaagtgtgggtgtgcttgtgagtgcttgtgcaaaagcaagtgtgagtgtggatgtgtgagtgtgcacaaacgtgagtgcacagttgtgtgcatgagtgcgtctgcatgagtgcacgagcatgcctgtgagcatgtgggtgggtgggtgtgcatgagtgtgagagtgcacatgactgtgtgtgagtgtgtgtctctttaatcctcagggaacagcccagacgctgtctgcctcctgagctactgcacttgactgactgctccgtgatgggcagaggaaaagagaggccgggggctccagctgctgggatctgtcctgtctctctctgtcccctttctgctgtgcctgggtggcctctcccctcctgccagtggtaaagggatggaaatgcagttgccaagctttctcccagggaccccacggctcagtcctgccaccagtgctccctctgccctcccgggctctgggtgctcccatctttgaaggcaaggcaccactgagcttgtgtgagccctgtggaggtgggaccaccccgagaggaaggcctcgggacactgtgggactctgagactctgatgttccccgaacgctagagagctcctaagctattttaattttcttgttttcaagagtttgtgggtgtgcgtctcccccgtgttcctttgcaagggaacccgttatttcctctgttgtgttttccaggctcgaatacggatggtcctcgcctatctgtttgctcagttgagcctctggtctcggggtgtccacggtgggctcctcgtgctgggatccgccaacgtggatgagagtctcctgggctacctgaccaagtacgactgctccagtgcggacatcaaccccataggcgggatcagcaagacggacctcagggccttcgtccagttctgcatccagcgcttccagcttcctgccctgcagagcatcctgttggcgccggccaccgcagagctggagcccttggctgatggacaggtgtcccagaccgacgaggaagatatggggatgacatatgcggagctctcggtctatgggaaactcaggaaggtggccaagatggggccctacagcatgttctgcaaactcctcggcatgtggagacacatctgcaccccgagacaggtcgctgacaaagtgaagcggtttttctccaagtactccatgaacagacacaagatgaccacgctcacacccgcgtaccacgccgagaactacagccctgaggacaacaggtttgatctgcgaccatttctgtacaacacaagctggccttggcagtttcggtgcatagaaaatcaggtaaatccagcagaaatgtttctctctccatgtttcatgtctgtagaagaaacgtgaggttatttccatgaaggattgaaaaactttcttatatacacagtaacttttttactgtcctcctttctgcaaagggacaagtatgtttaaagcgttttttaaatttacttttttcgtgttgacaaataaaaattctatatattgaaaa

SEQ ID NO: 70326 - DNA, 2257 bp, Homo sapiens
gagtggcactttgcacaagaatattaacatgacgtattgaaattgccaaaaacagaggagcaagatacaggcttggaccagagctggaaatatgcggctacggatgttgggatcattattacgagtcggacaccctcttgcactcgtttcaagtcctagcggcccttctggagtctcccgtcactcaggacatcatctgcgacgtggggatgcctgtaatgcaccgaaacgtccgctacaactgcagagtgatattcctcaacaggaagatcctgctcatcagacccaagatggccttggccaatgaaggcaactaccgcgagctgcgctggttcaccccgtggtcgaggagtcggcacacagaggagtactttctgcctcggatgatacaggacctgacaaagcaggaaaccgtacccttcggagatgcggtgctggtgacatgggacacctgcattggaagtgagatctgtgaggagctctggacaccccacagcccgcacatcgacatgggcctggatggcgtggagatcatcaccaacgcctcgggcagccaccacgtgctgcgcaaagccaacaccagggtggatctcgtgactatggtcaccagcaagaacggtgggatttacttgctggccaaccagaagggttgcgacggggaccgcctgtactacgacggctgtgccatgatcgccatgaacggaagcgtctttgctcaaggatcccagttttctctggatgacgtggaagtcctgacggccacgctggatctggaggacgtccggagctacagggcggagatttcatctcgaaacctggcggccagcagggcgagcccctaccccagagtgaaggtggactttgccctctcgtgccacgaggacttgctggcacccatctctgagcccatcgagtggaaataccacagccctgaggaggagataagccttggacctgcctgctggctctgggattttttaagacgaagtcaacaggcagggtttttgctgcccttgagtggcggggtggacagcgcagccaccgcctgcctcatctactccatgtgctgccaggtctgcgaggccgtgaggagtggaaatgaggaagtgctggctgatgtccgcaccatcgtgaaccagatcagctacaccccccaggatccccgagacctctgtggacgcatactgaccacctgctacatggccagcaagaactcctcccaggagacgtgcacccgggccagagagttggcccagcagattggaagccaccacatcagtctcaacatcgatccagccgtgaaggccgtcatgggcatcttcagcctggtgacggggaagagccctctgtttgcagctcatggaggaagcagcagggaaaacctggcgctgcaaaatgtgcaggctcgaatacggatggtcctcgcctatctgtttgctcagttgagcctctggtctcggggtgtccacggtgggctcctcgtgctgggatccgccaacgtggatgagagtctcctgggctacctgaccaagtacgactgctccagtgcggacatcaaccccataggcgggatcagcaagacggacctcagggccttcgtccagttctgcatccagcgcttccagcttcctgccctgcagagcatcctgttggcgccggccaccgcagagctggagcccttggctgatggacaggtgtcccagaccgacgaggaagatatggggatgacatatgcggagctctcggtctatgggaaactcaggaaggtggccaagatggggccctacagcatgttctgcaaactcctcggcatgtggagacacatctgcaccccgagacaggtcgctgacaaagtgaagcggtttttctccaagtactccatgaacagacacaagatgaccacgctcacacccgcgtaccacgccgagaactacagccctgaggacaacaggtttgatctgcgaccatttctgtacaacacaagctggccttggcagtttcggtgcatagaaaatcaggtgctacagctcgagagggcagagccacagtccctggacggcgtggactgaggccggttccttcctggaggcctcctgtcctcggggaccccagcacctcatcatcagcattgctggagccaagggtaggagccctacactaggagcccaggatgggacggcgcatcagccgagagggagggaacttttcagtcaaattcctcaaaaagaggctggaataaagcctgggcttaaaaaga

SEQ ID NO: 70327 - DNA, 2965 bp, Homo sapiens
  misc_feature (7)..(9): n is a, c, g, or t
  misc_feature (14)..(14): n is a, c, g, or t
agcgggnnncgggnccgggcaacccggaaggtccggcgtcccagccgcctacctcgctgggaccctggtcttgctgtcccccgctggcctcctgcccaagcgactgcggccaggatgggccggaaggtgaccgtggccacctgcgcactcaaccagtgggccctggacttcgagggcaatttgcaaagaattttaaagagtattgaaattgccaaaaacagaggagcaagatacaggcttggaccagagctggaaatatgcggctacggatgttgggatcattattacgagtcggacaccctcttgcactcgtttcaagtcctagcggcccttctggagtctcccgtcactcaggacatcatctgcgacgtggggatgcctgtaatgcaccgaaacgtccgctacaactgcagagtgatattcctcaacaggaagatcctgctcatcagacccaagatggccttggccaatgaaggcaactaccgcgagctgcgctggttcaccccgtggtcgaggagtcggcacacagaggagtactttctgcctcggatgatacaggacctgacaaagcaggaaaccgtacccttcggagatgcggtgctggtgacatgggacacctgcattggaagtgagatctgtgaggagctctggacaccccacagcccgcacatcgacatgggcctggatggcgtggagatcatcaccaacgcctcgggcagccaccacgtgctgcgcaaagccaacaccagggtggatctcgtgactatggtcaccagcaagaacggtgggatttacttgctggccaaccagaagggttgcgacggggaccgcctgtactacgacggctgtgccatgatcgccatgaacggaagcgtctttgctcaaggatcccagttttctctggatgacgtggaagtcctgacggccacgctggatctggaggacgtccggagctacagggcggagatttcatctcgaaacctggcggccagcagggcgagcccctaccccagagtgaaggtggactttgccctctcgtgccacgaggacttgctggcacccatctctgagcccatcgagtggaaataccacagccctgaggaggagataagccttggacctgcctgctggctctgggattttttaagacgaagtcaacaggcagggtttttgctgcccttgagtggcggggtggacagcgcagccaccgcctgcctcatctactccatgtgctgccaggtctgcgaggccgtgaggagtggaaatgaggaagtgctggctgatgtccgcaccatcgtgaaccagatcagctacaccccccaggatccccgagacctctgtggacgcatactgaccacctgctacatggccagcaagaactcctcccaggagacgtgcacccgggccagagagttggcccagcagattggaagccaccacatcagtctcaacatcgatccagccgtgaaggccgtcatgggcatcttcagcctggtgacggggaagagccctctgtttgcagctcatggaggaagcagcagggaaaacctggcgctgcaaaatgtgcaggctcgaatacggatggtcctcgcctatctgtttgctcagttgagcctctggtctcggggtgtccacggtgggctcctcgtgctgggatccgccaacgtggatgagagtctcctgggctacctgaccaagtacgactgctccagtgcggacatcaaccccataggcgggatcagcaagacggacctcagggccttcgtccagttctgcatccagcgcttccagcttcctgccctgcagagcatcctgttggcgccggccaccgcagagctggagcccttggctgatggacaggtgtcccagaccgacgaggaagatatggggatgacatatgcggagctctcggtctatgggaaactcaggaaggtggccaagatggggccctacagcatgttctgcaaactcctcggcatgtggagacacatctgcaccccgagacaggtcgctgacaaagtgaagcggtttttctccaagtactccatgaacagacacaagatgaccacgctcacacccgcgtaccacgccgagaactacagccctgaggacaacaggtttgatctgcgaccatttctgtacaacacaagctggccttggcagtttcggtgcatagaaaatcaggtgctacagctcgagagggcagagccacagtccctggacggcgtggactgaggccggttccttcctggaggcctcctgtcctcggggaccccagcacctcatcatcagcattgctggagccaaggagtctgttacccacgtcacatcgtggatgccccctgcccggataggtctgagtgcactggggtggccggcaccccacaccttctcagggagcacccagcaggatacctgagattctccttaggccttggatgggagctggaggcttctggctgcctcctgcaccccagatgtgtggcaacggggtggggagtgtgtcacccgaaagatgatcaggtgaggctgggaccctgaaggcagccccatcctgtggaattaccctcggaggctccaaaacttcccacctgcaggaactgagctcaggggcaccagaccctggtccccaaccttcaagttatagggtggtgtcccccagttacagggcagtgtccccagttacaggatactgtccctcagtcataggttagtatcttctggttacaggatagcatcccgtcagttacagggcagtgtccccccagtcatagcatagtgtatccccaagttacagggtagtgtccccagttataaggcaatgttcccccattatagtgtccccagttatgaggtaatgtctcccagttacagggtaatgtcccccagttatagggtgatgtccccacagttatagggtgatgtccccacagttatagggtgatgtccccacagttacaggtga

SEQ ID NO: 70328 - DNA, 2672 bp, Homo sapiens
  misc_feature (7)..(9): n is a, c, g, or t
  misc_feature (14)..(14): n is a, c, g, or t
agcgggnnncgggnccgggcaacccggaaggtccggcgtcccagccgcctacctcgctgggaccctggtcttgctgtcccccgctggcctcctgcccaagcgactgcggccaggatgggccggaaggtgaccgtggccacctgcgcactcaaccagtgggccctggacttcgagggcaatttgcaaagaattttaaagagtattgaaattgccaaaaacagaggagcaagatacaggcttggaccagagctggaaatatgcggctacggatgttgggatcattattacgagtcggacaccctcttgcactcgtttcaagtcctagcggcccttctggagtctcccgtcactcaggacatcatctgcgacgtggggatgcctgtaatgcaccgaaacgtccgctacaactgcagagtgatattcctcaacaggaagatcctgctcatcagacccaagatggccttggccaatgaaggcaactaccgcgagctgcgctggttcaccccgtggtcgaggagtcggcacacagaggagtactttctgcctcggatgatacaggacctgacaaagcaggaaaccgtacccttcggagatgcggtgctggtgacatgggacacctgcattggaagtgagatctgtgaggagctctggacaccccacagcccgcacatcgacatgggcctggatggcgtggagatcatcaccaacgcctcgggcagccaccacgtgctgcgcaaagccaacaccagggtggatctcgtgactatggtcaccagcaagaacggtgggatttacttgctggccaaccagaagggttgcgacggggaccgcctgtactacgacggctgtgccatgatcgccatgaacggaagcgtctttgctcaaggatcccagttttctctggatgacgtggaagtcctgacggccacgctggatctggaggacgtccggagctacagggcggagatttcatctcgaaacctggcggccagcagggcgagcccctaccccagagtgaaggtggactttgccctctcgtgccacgaggacttgctggcacccatctctgagcccatcgagtggaaataccacagccctgaggaggagataagccttggacctgcctgctggctctgggattttttaagacgaagtcaacaggcagggtttttgctgcccttgagtggcggggtggacagcgcagccaccgcctgcctcatctactccatgtgctgccaggtctgcgaggccgtgaggagtggaaatgaggaagtgctggctgatgtccgcaccatcgtgaaccagatcagctacaccccccaggatccccgagacctctgtggacgcatactgaccacctgctacatggccagcaagaactcctcccaggagacgtgcacccgggccagagagttggcccagcagattggaagccaccacatcagtctcaacatcgatccagccgtgaaggccgtcatgggcatcttcagcctggtgacggggaagagccctctgtttgcagctcatggaggaagcagcagggaaaacctggcgctgcaaaatgtgcaggctcgaatacggatggtcctcgcctatctgtttgctcagttgagcctctggtctcggggtgtccacggtgggctcctcgtgctgggatccgccaacgtggatgagagtctcctgggctacctgaccaagtacgactgctccagtgcggacatcaaccccataggcgggatcagcaagacggacctcagggccttcgtccagttctgcatccagcgcttccagcttcctgccctgcagagcatcctgttggcgccggccaccgcagagctggagcccttggctgatggacaggtgtcccagaccgacgaggaagatatggggatgacatatgcggagctctcggtctatgggaaactcaggaaggtggccaagatggggccctacagcatgttctgcaaactcctcggcatgtggagacacatctgcaccccgagacaggtcgctgacaaagtgaagcggtttttctccaagtactccatgaacagacacaagatgaccacgctcacacccgcgtaccacgccgagaactacagccctgaggacaacaggtttgatctgcgaccatttctgtacaacacaagctggccttggcagtttcggtgcatagaaaatcaggtgctacagctcgagagggcagagccacagtccctggacggcgtggactgaggccggttccttcctggaggcctcctgtcctcggggaccccagcacctcatcatcagcattgctggagccaagggcctctgagcccaagctaagccatcatgtcctctgtaacctgcacgtacacatccagatggccggttcctgccttaactgatgacattccaccacaaaagaagtgaaaatggcctgttcctgccttaactgatgacactatcttgtgaaattccttctcctggctcatcctggctcaaaagctcccctactgagcaccttgtgacctccactcctgtctgccagagaacaacccccctttgactgtaattttcctttacctacccaaatcttataaaacggccccacccctatctcctttcgctgactcttttcagactcagcccgcctgcacccaggtgaaataaacagccttgttgctcac

SEQ ID NO: 70329 - DNA, 2345 bp, Homo sapiens
  misc_feature (7)..(9): n is a, c, g, or t
  misc_feature (14)..(14): n is a, c, g, or t
  misc_feature (2199)..(2199): n is a, c, g, or t
agcgggnnncgggnccgggcaacccggaaggtccggcgtcccagccgcctacctcgctgggaccctggtcttgctgtcccccgctggcctcctgcccaagcgactgcggccaggatgggccggaaggtgaccgtggccacctgcgcactcaaccagtgggccctggacttcgagggcaatttgcaaagaattttaaagagtattgaaattgccaaaaacagaggagcaagatacaggcttggaccagagctggaaatatgcggctacggatgttgggatcattattacgagtcggacaccctcttgcactcgtttcaagtcctagcggcccttctggagtctcccgtcactcaggacatcatctgcgacgtggggatgcctgtaatgcaccgaaacgtccgctacaactgcagagtgatattcctcaacaggaagatcctgctcatcagacccaagatggccttggccaatgaaggcaactaccgcgagctgcgctggttcaccccgtggtcgaggagtcggcacacagaggagtactttctgcctcggatgatacaggacctgacaaagcaggaaaccgtacccttcggagatgcggtgctggtgacatgggacacctgcattggaagtgagatctgtgaggagctctggacaccccacagcccgcacatcgacatgggcctggatggcgtggagatcatcaccaacgcctcgggcagccaccacgtgctgcgcaaagccaacaccagggtggatctcgtgactatggtcaccagcaagaacggtgggatttacttgctggccaaccagaagggttgcgacggggaccgcctgtactacgacggctgtgccatgatcgccatgaacggaagcgtctttgctcaaggatcccagttttctctggatgacgtggaagtcctgacggccacgctggatctggaggacgtccggagctacagggcggagatttcatctcgaaacctggcggccagcagggcgagcccctaccccagagtgaaggtggactttgccctctcgtgccacgaggacttgctggcacccatctctgagcccatcgagtggaaataccacagccctgaggaggagataagccttggacctgcctgctggctctgggattttttaagacgaagtcaacaggcagggtttttgctgcccttgagtggcggggtggacagcgcagccaccgcctgcctcatctactccatgtgctgccaggtctgcgaggccgtgaggagtggaaatgaggaagtgctggctgatgtccgcaccatcgtgaaccagatcagctacaccccccaggatccccgagacctctgtggacgcatactgaccacctgctacatggccagcaagaactcctcccaggagacgtgcacccgggccagagagttggcccagcagattggaagccaccacatcagtctcaacatcgatccagccgtgaaggccgtcatgggcatcttcagcctggtgacggggaagagccctctgtttgcagctcatggaggaagcagcagggaaaacctggcgctgcaaaatgtgcaggctcgaatacggatggtcctcgcctatctgtttgctcagttgagcctctggtctcggggtgtccacggtgggctcctcgtgctgggatccgccaacgtggatgagagtctcctgggctacctgaccaagtacgactgctccagtgcggacatcaaccccataggcgggatcagcaagacggacctcagggccttcgtccagttctgcatccagcgcttccagcttcctgccctgcagagcatcctgttggcgccggccaccgcagagctggagcccttggctgatggacaggtgtcccagaccgacgaggaagatatggggatgacatatgcggagctctcggtctatgggaaactcaggaaggtggccaagatggggccctacagcatgttctgcaaactcctcggcatgtggagacacatctgcaccccgagacaggtcgctgacaaagtgaagcggtttttctccaagtactccatgaacagacacaagatgaccacgctcacacccgcgtaccacgccgagaactacagccctgaggacaacaggtttgatctgcgaccatttctgtacaacacaagctggccttggcagtttcggtgcatagaaaatcaggtgctacagtcgagnggtcagcgcacagaagccctgtcgtacattgtctataggtgtgtgacttgagtaatgttatcaacgtttttgtaaatatttactatgtttttctattagctaaattccaacaattttgtactttaataaaatgttctaaacattgc

SEQ ID NO: 70330 - DNA, 1603 bp, Homo sapiens
tggtggccagggtgctgtcactttgggaagcagccagagaaccacaggatgcgtgaatcggtctccttgtcttcatgggcatctccggccaggaagtcctgacggccacgctggatctggaggacgtccggagctacagggcggagatttcatctcgaaacctggcggccagcagggcgagcccctaccccagagtgaaggtggactttgccctctcgtgccacgaggacttgctggcacccatctctgagcccatcgagtggaaataccacagccctgaggaggagataagccttggacctgcctgctggctctgggattttttaagacgaagtcaacaggcagggtttttgctgcccttgagtggcggggtggacagcgcagccaccgcctgcctcatctactccatgtgctgccaggtctgcgaggccgtgaggagtggaaatgaggaagtgctggctgatgtccgcaccatcgtgaaccagatcagctacaccccccaggatccccgagacctctgtggacgcatactgaccacctgctacatggccagcaagaactcctcccaggagacgtgcacccgggccagagagttggcccagcagattggaagccaccacatcagtctcaacatcgatccagccgtgaaggccgtcatgggcatcttcagcctggtgacggggaagagccctctgtttgcagctcatggaggaagcagcagggaaaacctggcgctgcaaaatgtgcaggctcgaatacggatggtcctcgcctatctgtttgctcagttgagcctctggtctcggggtgtccacggtgggctcctcgtgctgggatccgccaacgtggatgagagtctcctgggctacctgaccaagtacgactgctccagtgcggacatcaaccccataggcgggatcagcaagacggacctcagggccttcgtccagttctgcatccagcgcttccagcttcctgccctgcagagcatcctgttggcgccggccaccgcagagctggagcccttggctgatggacaggtgtcccagaccgacgaggaagatatggggatgacatatgcggagctctcggtctatgggaaactcaggaaggtggccaagatggggccctacagcatgttctgcaaactcctcggcatgtggagacacatctgcaccccgagacaggtcgctgacaaagtgaagcggtttttctccaagtactccatgaacagacacaagatgaccacgctcacacccgcgtaccacgccgagaactacagccctgaggacaacaggtttgatctgcgaccatttctgtacaacacaagctggccttggcagtttcggtgcatagaaaatcaggtgctacagctcgagagggcagagccacagtccctggacggcgtggactgaggccggttccttcctggaggcctcctgtcctcggggaccccagcacctcatcatcagcattgctggagccaagggtaggagccctacactaggagcccaggatgggacggcgcatcagccgagagggagggaacttttcagtcaaattcctcaaaaagaggctggaataaagcctgggcttaaaaaga

SEQ ID NO: 70331 - DNA, 2311 bp, Homo sapiens
  misc_feature (7)..(9): n is a, c, g, or t
  misc_feature (14)..(14): n is a, c, g, or t
agcgggnnncgggnccgggcaacccggaaggtccggcgtcccagccgcctacctcgctgggaccctggtcttgctgtcccccgctggcctcctgcccaagcgactgcggccaggatgggccggaaggtgaccgtggccacctgcgcactcaaccagtgggccctggacttcgagggcaatttgcaaagaattttaaagagtattgaaattgccaaaaacagaggagcaagatacaggcttggaccagagctggaaatatgcggctacggatgttgggatcattattacgagtcggacaccctcttgcactcgtttcaagtcctagcggcccttctggagtctcccgtcactcaggacatcatctgcgacgtggggatgcctgtaatgcaccgaaacgtccgctacaactgcagagtgatattcctcaacaggaagatcctgctcatcagacccaagatggccttggccaatgaaggcaactaccgcgagctgcgctggttcaccccgtggtcgaggagtcggcacacagaggagtactttctgcctcggatgatacaggacctgacaaagcaggaaaccgtacccttcggagatgcggtgctggtgacatgggacacctgcattggaagtgagatctgtgaggagctctggacaccccacagcccgcacatcgacatgggcctggatggcgtggagatcatcaccaacgcctcgggcagccaccacgtgctgcgcaaagccaacaccagggtggatctcgtgactatggtcaccagcaagaacggtgggatttacttgctggccaaccagaagggttgcgacggggaccgcctgtactacgacggctgtgccatgatcgccatgaacggaagcgtctttgctcaaggatcccagttttctctggatgacgtggaagtcctgacggccacgctggatctggaggacgtccggagctacagggcggagatttcatctcgaaacctggcggccagcagggcgagcccctaccccagagtgaaggtggactttgccctctcgtgccacgaggacttgctggcacccatctctgagcccatcgagtggaaataccacagccctgaggaggagataagccttggacctgcctgctggctctgggattttttaagacgaagtcaacaggcagggtttttgctgcccttgagtggcggggtggacagcgcagccaccgcctgcctcatctactccatgtgctgccaggtctgcgaggccgtgaggagtggaaatgaggaagtgctggctgatgtccgcaccatcgtgaaccagatcagctacaccccccaggatccccgagacctctgtggacgcatactgaccacctgctacatggccagcaagaactcctcccaggagacgtgcacccgggccagagagttggcccagcagattggaagccaccacatcagtctcaacatcgatccagccgtgaaggccgtcatgggcatcttcagcctggtgacggggaagagccctctgtttgcagctcatggaggaagcagcagggaaaacctggcgctgcaaaatgtgcaggctcgaatacggatggtcctcgcctatctgtttgctcagttgagcctctggtctcggggtgtccacggtgggctcctcgtgctgggatccgccaacgtggatgagagtctcctgggctacctgaccaagtacgactgctccagtgcggacatcaaccccataggcgggatcagcaagacggacctcagggccttcgtccagttctgcatccagcgcttccagcttcctgccctgcagagcatcctgttggcgccggccaccgcagagctggagcccttggctgatggacaggtgtcccagaccgacgaggaagatatggggatgacatatgcggagctctcggtctatgggaaactcaggaaggtggccaagatggggccctacagcatgttctgcaaactcctcggcatgtggagacacatctgcaccccgagacaggtcgctgacaaagtgaagcggtttttctccaagtactccatgaacagacacaagatgaccacgctcacacccgcgtaccacgccgagaaccacagtccctggacggcgtggactgaggccggttccttcctggaggcctcctgtcctcggggaccccagcacctcatcatcagcattgctggagccaagggtaggagccctacactaggagcccaggatgggacggcgcatcagccgagagggagggaacttttcagtcaaattcctcaaaaagaggctggaataaagcctgggcttaaaaaga

SEQ ID NO: 70332 - DNA, 1204 bp, Homo sapiens
  misc_feature (7)..(9): n is a, c, g, or t
  misc_feature (14)..(14): n is a, c, g, or t
agcgggnnncgggnccgggcaacccggaaggtccggcgtcccagccgcctacctcgctgggaccctggtcttgctgtcccccgctggcctcctgcccaagcgactgcggccaggatgggccggaaggtgaccgtggccacctgcgcactcaaccagtgggccctggacttcgagggcaatttgcaaagaattttaaagagtattgaaattgccaaaaacagaggagcaagatacaggcttggaccagagctggaaatatgcggctacggatgttgggatcattattacgagtcggacaccctcttgcactcgtttcaagtcctagcggcccttctggagtctcccgtcactcaggacatcatctgcgacgtggggatgcctgtaatgcaccgaaacgtccgctacaactgcagagtgatattcctcaacaggaagatcctgctcatcagacccaagatggccttggccaatgaaggcaactaccgcgagctgcgctggttcaccccgtggtcgaggagtcggcacacagaggagtactttctgcctcggatgatacaggacctgacaaagcaggaaaccgtacccttcggagatgcggtgctggtgacatgggacacctgcattggaagtgagatctgtgaggagctctggacaccccacagcccgcacatcgacatgggcctggatggcgtggagatcatcaccaacgcctcgggcagccaccacgtgctgcgcaaagccaacaccagggtggatctcgtgactatggtcaccagcaagaacggtgggatttacttgctggccaaccagaagggttgcgacggggaccgcctgtactacgacggctgtgccatgatcgccatgaacggaagcgtctttgctcaaggatcccagttttctctggatgacgtgcattgcctgactcgtctttggacccgacggccttccactctgctctttttgggaatgggcattaaagcagcggattcaccgaggcaggcggtagcaccggaggcgagttctgcagctggctttgcaggagcagggcgagcttgtgtcctggcgtcgccgactctgcgaggctgtctgagcagttcattgctttgctcccgctgcgttcccatcctcatgattctgtctggtgctttctgcacagcataggtgtggtcagcacggaggcggttacaaaaccaaaccagtttca

SEQ ID NO: 70333 - DNA, 1425 bp, Homo sapiens
  misc_feature (7)..(9): n is a, c, g, or t
  misc_feature (14)..(14): n is a, c, g, or t
agcgggnnncgggnccgggcaacccggaaggtccggcgtcccagccgcctacctcgctgggaccctggtcttgctgtcccccgctggcctcctgcccaagcgactgcggccaggatgggccggaaggtgaccgtggccacctgcgcactcaaccagtgggccctggacttcgagggcaatttgcaaagaattttaaagagtattgaaattgccaaaaacagaggagcaagatacaggcttggaccagagctggaaatatgcggctacggatgttgggatcattattacgagtcggacaccctcttgcactcgtttcaagtcctagcggcccttctggagtctcccgtcactcaggacatcatctgcgacgtggggatgtaagtgccagtgtgagtgtggaagggcaaacctgggacaaaggcaagctcaagggcatgacccacccaaccggcctccatccagggtgtggaacatccatgtgtccagggatacgaaaggccttatgcttgaaaagtgggttttgttcctatctcagccccgtaagccacctcatttcccctgcaaggagggagctcctgaaagcaggatgtgtcagttcttccagaaagtcctgtgcacacatcagcagactctgcacaaaggggaatgcagcattcaccccaccccgtgcagagagcttgactcacatcacagggagccctggggctcattccatgtccacatgttgccacacggttcccatgtcctaggctgcatatgtgtagctccacaaggaaggcctctgcatgctccatgctggtgtctgtgctgtaccctgcatcgccggtccttatggaggcctctgcacacgctgtgctggtgtctgtgctgtaccctgcatagccggtccctatggaggcctctgcacgctctgtgctggtgtctgtgctgtaccctgcatagctggtccctatggaggcctctgacaacgctgtgctggtgtctgtgctgtaccctgcatagccagtccctgtggaggcctttgtgtgtgctgtgctggtgtctgctgcggtccctgcatagccgcccctatggaggcctctgcatgagctgtgctgtgccctgcatagctggtccctatggaggcctctgtgtgcgctgtgctggcgtctgtgctgtccctgcatagccggtcccctatggaggcctctgctcacgctgtgctggtgtctgtgctgtccctgcttagccacccctatggaggcctctgtgtgtgctgtgctggtgtctgtgctgtccctgcatagccggtcccctatggaggcctctgcacgtgctgtgctggtatctgagccctgctttgaatagccggctccctatggaggatgctgtgctggagtctgtgctgcgcactctgcatagccgtcccctatggaggcctctgca

SEQ ID NO: 70334 - DNA, 1151 bp, Homo sapiens
cttttccagcacacacgcccagcatctggtggggactctggtaatttactttttcacctctgggacttgtgacccgcttttggtgcgtgccagtgtttcaacagccccacagtccgtctttgcggggctgtggtgtcacaggcctctctttccaggtgctacagctcgagagggcagagccacagtccctggacggcgtggactgaggccggttccttcctggaggcctcctgtcctcggggaccccagcacctcatcatcagcattgctggagccaagggtgaattacttggaaactgcacaacacacccgctgttttcaacagagttcagtcacctcttgagggctcttctgattcttatcttggtagagcatctcctcaaggatttctgcaggtgagtacactggtgaaacaatgcccaatcgcacggccaagagatttgaggagcagggacatctggctgtggttcttgtggctgctcccagtgcagctgctataagccctgctgctgctcctcaggctgtgggtcatcctgctgccagtccagctgctgtaagccctgctgctgccagtccagctgctgtaagccctgctgctgttcctcaggctgtgggtcatcctgctgccagtccagttgctgcaatccctgctgctcccagtctagctgctgtgtccccgtgtgctgccagtgtaagatctgaggctctggactcaggtctcatgtgagtcctgctaaccccattttccgaagctgtgacctgtccttcatcgttgagccccaaaccactgctcagggtccattcctcactataagatgaagccatatctgcctgccttttcctaaggagagtccaccctaattaatgtccattccctcctaacaaattctcttcccaagtcaactgcaactgcggctgaatcacccctcacccgctagccttgcctttgcttgtgtattcagaggcctgagctcctgaacccacttgaagtcctgtcttttccagctggagcagctgggcatgagtgtcccacctgcaacaaggtgggcgtttaagaggcttccttggagtggctttgcctgtccaacactctgctttatcttaaatgaaaagttgcaaactaataaaaataccatgccgacaaactgaaa

SEQ ID NO: 70335 - DNA, 503 bp, Homo sapiens
tcccttccagacacagcacagcacacacaaaggcctccacagggactgctgtgctggtgtctgtgctgtaccctgcatagccagtccctgtggaggcctttgtgtgtgctgtgctggtgtctgctgcggtccctgcatagccgcccctatggaggcctctgcatgagctgtgctgtgccctgcatagctggtccctatggaggcctctgtgtgcgctgtgctggcgtctgtgctgtccctgcatagccggtcccctatggaggcctctgctcacgctgtgctggtgtctgtgctgtccctgcttagccacccctatggaggcctctgtgtgtgctgtgctggtgtctgtgctgtccctgcatagccggtcccctatggaggcctctgcacgtgctgtgctggtatctgagccctgctttgaatagccggctccctatggaggatgctgtgctggagtctgtgctgcgcactctgcatagccgtcccctatggaggcctctgca

SEQ ID NO: 70336 - DNA, 3417 bp, Homo sapiens
  misc_feature (7)..(9): n is a, c, g, or t
  misc_feature (14)..(14): n is a, c, g, or t
  misc_feature (1789)..(1789): n is a, c, g, or t
agcgggnnncgggnccgggcaacccggaaggtccggcgtcccagccgcctacctcgctgggaccctggtcttgctgtcccccgctggcctcctgcccaagcgactgcggccaggatgggccggaaggtgaccgtggccacctgcgcactcaaccagtgggccctggacttcgagggcaatttgcaaagaattttaaagagtattgaaattgccaaaaacagaggagcaagatacaggcttggaccagagctggaaatatgcggctacggatgttgggatcattattacgagtcggacaccctcttgcactcgtttcaagtcctagcggcccttctggagtctcccgtcactcaggacatcatctgcgacgtggggatgcctgtaatgcaccgaaacgtccgctacaactgcagagtgatattcctcaacaggaagatcctgctcatcagacccaagatggccttggccaatgaaggcaactaccgcgagctgcgctggttcaccccgtggtcgaggagtcggcacacagaggagtactttctgcctcggatgatacaggacctgacaaagcaggaaaccgtacccttcggagatgcggtgctggtgacatgggacacctgcattggaagtgagatctgtgaggagctctggacaccccacagcccgcacatcgacatgggcctggatggcgtggagatcatcaccaacgcctcgggcagccaccacgtgctgcgcaaagccaacaccagggtggatctcgtgactatggtcaccagcaagaacggtgggatttacttgctggccaaccagaagggttgcgacggggaccgcctgtactacgacggctgtgccatgatcgccatgaacggaagcgtctttgctcaaggatcccagttttctctggatgacgtggaagtcctgacggccacgctggatctggaggacgtccggagctacagggcggagatttcatctcgaaacctggcggccagcagggcgagcccctaccccagagtgaaggtggactttgccctctcgtgccacgaggacttgctggcacccatctctgagcccatcgagtggaaataccacagccctgaggaggagataaggtgtgtggcccctgacccctgggagggacctggcgtctgtgtggccacgcccctggggtggggactcctggaggtcacgcagtgggttttcagaacctgcctgggtggggacttgcagaaggcaactgtgcctcccctgggttgagggcgtggatgctagagccagaacccctgggtgtgacccccagccctgctgcttccccgtgctgtgaccttgggccccaaggtgctgtccgtccattctgtggttcagtgtccccattttaaaatgaggacgatgataatacccacgtcctggggctgtcttcagaatcacatgtgtcccttctcacgaggtgcctaaagcagagacgggcgtcctgagagcccagcgttgactctggcactgcagcctcctggggcctgcttgggtgggttgttgggtgctgtgggcaggggccaccgcctccgggctccatgttctgattgccctgcagccttggacctgcctgctggctctgggattttttaagacgaagtcaacaggtaagacttccagtttctagtgagcccactttgcttgttctgctggttggtctggttttattctggggcagggtagggatttttttttttttttttagtgcaaacaacaaaaagcatttcatcactctgcctccatggggagcttagtctgngctagccagaggcaaggtgggcacagtggctggtgggtcagctccacctttggaggctcagcggaacccagcccatcagcattcagggtcacgctcaccatcttgccagcattgtaatcatgcgtatctgcagttcgtcggtggagtcagcctctgacacgccccgcagtgaagtgtcttttttccctctgaaaaatccattcatcctgccacgtgcgggtatttgtcctgaccccatggaaagtgctgacacccacgtgcatttctgtggacgcctccttgaggtctatgggtggagcttggctgatccatgggcatgctgcttctccgaggctctgctcacgctgtctgattggtccattccaggcagggtttttgctgcccttgagtggcggggtggacagcgcagccaccgcctgcctcatctactccatgtgctgccaggtctgcgaggccgtgaggagtggaaatgaggaagtgctggctgatgtccgcaccatcgtgaaccagatcagctacaccccccaggatccccgagacctctgtggacgcatactgaccacctgctacatggccagcaagaactcctcccaggagacgtgcacccgggccagagagttggcccagcagattggaagccaccacatcagtctcaacatcgatccagccgtgaaggccgtcatgggcatcttcagcctggtgacggggaagagccctctgtttgcagctcatggaggaagcagcagggaaaacctggcgctgcaaaatgtgcaggctcgaatacggatggtcctcgcctatctgtttgctcagttgagcctctggtctcggggtgtccacggtgggctcctcgtgctgggatccgccaacgtggatgagagtctcctgggctacctgaccaagtacgactgctccagtgcggacatcaaccccataggcgggatcagcaagacggacctcagggccttcgtccagttctgcatccagcgcttccagcttcctgccctgcagagcatcctgttggcgccggccaccgcagagctggagcccttggctgatggacaggtgtcccagaccgacgaggaagatatggggatgacatatgcggagctctcggtctatgggaaactcaggaaggtggccaagatggggccctacagcatgttctgcaaactcctcggcatgtggagacacatctgcaccccgagacaggtcgctgacaaagtgaagcggtttttctccaagtactccatgaacagacacaagatgaccacgctcacacccgcgtaccacgccgagaactacagccctgaggacaacaggtttgatctgcgaccatttctgtacaacacaagctggccttggcagtttcggtgcatagaaaatcaggtgctacagctcgagagggcagagccacagtccctggacggcgtggactgaggccggttccttcctggaggcctcctgtcctcggggaccccagcacctcatcatcagcattgctggagccaagggtaggagccctacactaggagcccaggatgggacggcgcatcagccgagagggagggaacttttcagtcaaattcctcaaaaagaggctggaataaagcctgggcttaaaaaga

SEQ ID NO: 70337 - DNA, 2306 bp, Homo sapiens
  misc_feature (7)..(9): n is a, c, g, or t
  misc_feature (14)..(14): n is a, c, g, or t
agcgggnnncgggnccgggcaacccggaaggtccggcgtcccagccgcctacctcgctgggaccctggtcttgctgtcccccgctggcctcctgcccaagcgactgcggccaggatgggccggaaggtgaccgtggccacctgcgcactcaaccagtgggccctggacttcgagggcaatttgcaaagaattttaaagagtattgaaattgccaaaaacagaggagcaagatacaggcttggaccagagctggaaatatggcctgtaatgcaccgaaacgtccgctacaactgcagagtgatattcctcaacaggaagatcctgctcatcagacccaagatggccttggccaatgaaggcaactaccgcgagctgcgctggttcaccccgtggtcgaggagtcggcacacagaggagtactttctgcctcggatgatacaggacctgacaaagcaggaaaccgtacccttcggagatgcggtgctggtgacatgggacacctgcattggaagtgagatctgtgaggagctctggacaccccacagcccgcacatcgacatgggcctggatggcgtggagatcatcaccaacgcctcgggcagccaccacgtgctgcgcaaagccaacaccagggtggatctcgtgactatggtcaccagcaagaacggtgggatttacttgctggccaaccagaagggttgcgacggggaccgcctgtactacgacggctgtgccatgatcgccatgaacggaagcgtctttgctcaaggatcccagttttctctggatgacgtggaagtcctgacggccacgctggatctggaggacgtccggagctacagggcggagatttcatctcgaaacctggcggccagcagggcgagcccctaccccagagtgaaggtggactttgccctctcgtgccacgaggacttgctggcacccatctctgagcccatcgagtggaaataccacagccctgaggaggagataagccttggacctgcctgctggctctgggattttttaagacgaagtcaacaggcagggtttttgctgcccttgagtggcggggtggacagcgcagccaccgcctgcctcatctactccatgtgctgccaggtctgcgaggccgtgaggagtggaaatgaggaagtgctggctgatgtccgcaccatcgtgaaccagatcagctacaccccccaggatccccgagacctctgtggacgcatactgaccacctgctacatggccagcaagaactcctcccaggagacgtgcacccgggccagagagttggcccagcagattggaagccaccacatcagtctcaacatcgatccagccgtgaaggccgtcatgggcatcttcagcctggtgacggggaagagccctctgtttgcagctcatggaggaagcagcagggaaaacctggcgctgcaaaatgtgcaggctcgaatacggatggtcctcgcctatctgtttgctcagttgagcctctggtctcggggtgtccacggtgggctcctcgtgctgggatccgccaacgtggatgagagtctcctgggctacctgaccaagtacgactgctccagtgcggacatcaaccccataggcgggatcagcaagacggacctcagggccttcgtccagttctgcatccagcgcttccagcttcctgccctgcagagcatcctgttggcgccggccaccgcagagctggagcccttggctgatggacaggtgtcccagaccgacgaggaagatatggggatgacatatgcggagctctcggtctatgggaaactcaggaaggtggccaagatggggccctacagcatgttctgcaaactcctcggcatgtggagacacatctgcaccccgagacaggtcgctgacaaagtgaagcggtttttctccaagtactccatgaacagacacaagatgaccacgctcacacccgcgtaccacgccgagaactacagccctgaggacaacaggtttgatctgcgaccatttctgtacaacacaagctggccttggcagtttcggtgcatagaaaatcaggtgctacagctcgagagggcagagccacagtccctggacggcgtggactgaggccggttccttcctggaggcctcctgtcctcggggaccccagcacctcatcatcagcattgctggagccaagggtaggagccctacactaggagcccaggatgggacggcgcatcagccgagagggagggaacttttcagtcaaattcctcaaaaagaggctggaataaagcctgggcttaaaaaga

SEQ ID NO: 70338 - DNA, 3180 bp, Homo sapiens
  misc_feature (7)..(9): n is a, c, g, or t
  misc_feature (14)..(14): n is a, c, g, or t
agcgggnnncgggnccgggcaacccggaaggtccggcgtcccagccgcctacctcgctgggaccctggtcttgctgtcccccgctggcctcctgcccaagcgactgcggccaggatgggccggaaggtgaccgtggccacctgcgcactcaaccagtgggccctggacttcgagggcaatttgcaaagaattttaaagagtattgaaattgccaaaaacagaggagcaagatacaggcttggaccagagctggaaatatgcggctacggatgttgggatcattattacgagtcggacaccctcttgcactcgtttcaagtcctagcggcccttctggagtctcccgtcactcaggacatcatctgcgacgtggggatgcctgtaatgcaccgaaacgtccgctacaactgcagagtgatattcctcaacaggaagatcctgctcatcagacccaagatggccttggccaatgaaggcaactaccgcgagctgcgctggttcaccccgtggtcgaggagtcggcacacagaggagtactttctgcctcggatgatacaggacctgacaaagcaggaaaccgtacccttcggagatgcggtgctggtgacatgggacacctgcattggaagtgagatctgtgaggagctctggacaccccacagcccgcacatcgacatgggcctggatggcgtggagatcatcaccaacgcctcgggcagccaccacgtgctgcgcaaagccaacaccagggtggatctcgtgactatggtcaccagcaagaacggtgggatttacttgctggccaaccagaagggttgcgacggggaccgcctgtactacgacggctgtgccatgatcgccatgaacggaagcgtctttgctcaaggatcccagttttctctggatgacgtggaagtcctgacggccacgctggatctggaggacgtccggagctacagggcggagatttcatctcgaaacctggcggccagcagggcgagcccctaccccagagtgaaggtggactttgccctctcgtgccacgaggacttgctggcacccatctctgagcccatcgagtggaaataccacagccctgaggaggagataagccttggacctgcctgctggctctgggattttttaagacgaagtcaacaggcagggtttttgctgcccttgagtggcggggtggacagcgcagccaccgcctgcctcatctactccatgtgctgccaggtctgcgaggccgtgaggagtggaaatgaggaagtgctggctgatgtccgcaccatcgtgaaccagatcagctacaccccccaggatccccgagacctctgtggacgcatactgaccacctgctacatggccagcaagaactcctcccaggagacgtgcacccgggccagagagttggcccagcagattggaagccaccacatcagtctcaacatcgatccagccgtgaaggccgtcatgggcatcttcagcctggtgacggggaagagccctctgtttgcagctcatggaggaagcagcagggaaaacctggcgctgcaaaatgtgcaggctcgaatacggatggtcctcgcctatctgtttgctcagttgagcctctggtctcggggtgtccacggtgggctcctcgtgctgggatccgccaacgtggatgagagtctcctgggctacctgaccaagtacgactgctccagtgcggacatcaaccccataggcgggatcagcaagacggacctcagggccttcgtccagttctgcatccagcgcttccagcttcctgccctgcagagcatcctgttggcgccggccaccgcagagctggagcccttggctgatggacaggtgtcccagaccgacgaggaagatatggggatgacatatgcggagctctcggtctatgggaaactcaggaaggtggccaagatggggccctacagcatgttctgcaaactcctcggcatgtggagacacatctgcaccccgagacaggtcgctgacaaagtgaagcggtttttctccaagtactccatgaacagacacaagatgaccacgctcacacccgcgtaccacgccgagaactacagccctgaggacaacaggtttgatctgcgaccatttctgtacaacacaagctggccttggcagtttcggtgcatagaaaatcaggtgctacagctcgagagggcagagccacagtccctggacggcgtggactgaggccggttccttcctggaggcctcctgtcctcggggaccccagcacctcatcatcagcattgctggagccaagggtgaattacttggaaactgcacaacacacccgctgttttcaacagagttcagtcacctcttgagggctcttctgattcttatcttggtagagcatctcctcaaggatttctgcaggtgagtacactggtgaaacaatgcccaatcgcacggccaagagatttgaggagcagggacatctggctgtggttcttgtggctgctcccagtgcagctgctataagccctgctgctgctcctcaggctgtgggtcatcctgctgccagtccagctgctgtaagccctgctgctgccagtccagctgctgtaagccctgctgctgttcctcaggctgtgggtcatcctgctgccagtccagttgctgcaatccctgctgctcccagtctagctgctgtgtccccgtgtgctgccagtgtaagatctgaggctctggactcaggtctcatgtgagtcctgctaaccccattttccgaagctgtgacctgtccttcatcgttgagccccaaaccactgctcagggtccattcctcactataagatgaagccatatctgcctgccttttcctaaggagagtccaccctaattaatgtccattccctcctaacaaattctcttcccaagtcaactgcaactgcggctgaatcacccctcacccgctagccttgcctttgcttgtgtattcagaggcctgagctcctgaacccacttgaagtcctgtcttttccagctggagcagctgggcatgagtgtcccacctgcaacaaggtgggcgtttaagaggcttccttggagtggctttgcctgtccaacactctgctttatcttaaatgaaaagttgcaaactaataaaaataccatgccgacaaactgaaa

SEQ ID NO: 70339 - DNA, 2420 bp, Homo sapiens
  misc_feature (7)..(9): n is a, c, g, or t
  misc_feature (14)..(14): n is a, c, g, or t
agcgggnnncgggnccgggcaacccggaaggtccggcgtcccagccgcctacctcgctgggaccctggtcttgctgtcccccgctggcctcctgcccaagcgactgcggccaggatgggccggaaggtgaccgtggccacctgcgcactcaaccagtgggccctggacttcgagggcaatttgcaaagaattttaaagagtattgaaattgccaaaaacagaggagcaagatacaggcttggaccagagctggaaatatgcggctacggatgttgggatcattattacgagtcggacaccctcttgcactcgtttcaagtcctagcggcccttctggagtctcccgtcactcaggacatcatctgcgacgtggggatgcctgtaatgcaccgaaacgtccgctacaactgcagagtgatattcctcaacaggaagatcctgctcatcagacccaagatggccttggccaatgaaggcaactaccgcgagctgcgctggttcaccccgtggtcgaggagtcggcacacagaggagtactttctgcctcggatgatacaggacctgacaaagcaggaaaccgtacccttcggagatgcggtgctggtgacatgggacacctgcattggaagtgagatctgtgaggagctctggacaccccacagcccgcacatcgacatgggcctggatggcgtggagatcatcaccaacgcctcgggcagccaccacgtgctgcgcaaagccaacaccagggtggatctcgtgactatggtcaccagcaagaacggtgggatttacttgctggccaaccagaagggttgcgacggggaccgcctgtactacgacggctgtgccatgatcgccatgaacggaagcgtctttgctcaaggatcccagttttctctggatgacgtggaagtcctgacggccacgctggatctggaggacgtccggagctacagggcggagatttcatctcgaaacctggcggccagcagggcgagcccctaccccagagtgaaggtggactttgccctctcgtgccacgaggacttgctggcacccatctctgagcccatcgagtggaaataccacagccctgaggaggagataagccttggacctgcctgctggctctgggattttttaagacgaagtcaacaggcagggtttttgctgcccttgagtggcggggtggacagcgcagccaccgcctgcctcatctactccatgtgctgccaggtctgcgaggccgtgaggagtggaaatgaggaagtgctggctgatgtccgcaccatcgtgaaccagatcagctacaccccccaggatccccgagacctctgtggacgcatactgaccacctgctacatggccagcaagaactcctcccaggagacgtgcacccgggccagagagttggcccagcagattggaagccaccacatcagtctcaacatcgatccagccgtgaaggccgtcatgggcatcttcagcctggtgacggggaagagccctctgtttgcagctcatggaggaagcagcagggaaaacctggcgctgcaaaatgtgcaggctcgaatacggatggtcctcgcctatctgtttgctcagttgagcctctggtctcggggtgtccacggtgggctcctcgtgctgggatccgccaacgtggatgagagtctcctgggctacctgaccaagtacgactgctccagtgcggacatcaaccccataggcgggatcagcaagacggacctcagggccttcgtccagttctgcatccagcgcttccagcttcctgccctgcagagcatcctgttggcgccggccaccgcagagctggagcccttggctgatggacaggtgtcccagaccgacgaggaagatatggggatgacatatgcggagctctcggtctatgggaaactcaggaaggtggccaagatggggccctacagcatgttctgcaaactcctcggcatgtggagacacatctgcaccccgagacaggtcgctgacaaagtgaagcggtttttctccaagtactccatgaacagacacaagatgaccacgctcacacccgcgtaccacgccgagaactacagccctgaggacaacaggtttgatctgcgaccatttctgtacaacacaagctggccttggcagtttcggtgcatagaaaatcaggtgctacagctcgagagggcagagccacagtccctggacggcgtggactgaggccggttccttcctggaggcctcctgtcctcggggaccccagcacctcatcatcagcattgctggagccaagggtaggagccctacactaggagcccaggctttattccagcctctttttgaggaatttgactgaaaagttccctccctcaccgctgatgcgccgtcccatcctgggcgtcgac

SEQ ID NO: 70340 - DNA, 1711 bp, Homo sapiens
atcgggaatgtttccactttctgtctatcattaacaattctgctacaaacatacatgtacttctgttggaggggacacatgttttcatttctcttgggtgtgtctatccaggagtggaattggctgggtcttatggtaactctgttaactgttttttgctttttggttttttgtttgttttttgagacggagtttcacccttgctgtgaactaccataggctggagtacaatggcgcaatcccagctcagcacaacctctgcctcgtagattcaagccagcagggcgagcccctaccccagagtgaaggtggactttgccctctcgtgccacgaggacttgctggcacccatctctgagcccatcgagtggaaataccacagccctgaggaggagataagccttggacctgcctgctggctctgggattttttaagacgaagtcaacaggcagggtttttgctgcccttgagtggcggggtggacagcgcagccaccgcctgcctcatctactccatgtgctgccaggtctgcgaggccgtgaggagtggaaatgaggaagtgctggctgatgtccgcaccatcgtgaaccagatcagctacaccccccaggatccccgagacctctgtggacgcatactgaccacctgctacatggccagcaagaactcctcccaggagacgtgcacccgggccagagagttggcccagcagattggaagccaccacatcagtctcaacatcgatccagccgtgaaggccgtcatgggcatcttcagcctggtgacggggaagagccctctgtttgcagctcatggaggaagcagcagggaaaacctggcgctgcaaaatgtgcaggctcgaatacggatggtcctcgcctatctgtttgctcagttgagcctctggtctcggggtgtccacggtgggctcctcgtgctgggatccgccaacgtggatgagagtctcctgggctacctgaccaagtacgactgctccagtgcggacatcaaccccataggcgggatcagcaagacggacctcagggccttcgtccagttctgcatccagcgcttccagcttcctgccctgcagagcatcctgttggcgccggccaccgcagagctggagcccttggctgatggacaggtgtcccagaccgacgaggaagatatggggatgacatatgcggagctctcggtctatgggaaactcaggaaggtggccaagatggggccctacagcatgttctgcaaactcctcggcatgtggagacacatctgcaccccgagacaggtcgctgacaaagtgaagcggtttttctccaagtactccatgaacagacacaagatgaccacgctcacacccgcgtaccacgccgagaactacagccctgaggacaacaggtttgatctgcgaccatttctgtacaacacaagctggccttggcagtttcggtgcatagaaaatcaggtgctacagctcgagagggcagagccacagtccctggacggcgtggactgaggccggttccttcctggaggcctcctgtcctcggggaccccagcacctcatcatcagcattgctggagccaagggtaggagccctacactaggagcccaggatgggacggcgcatcagccgagagggagggaacttttcagtcaaattcctcaaaaagaggctggaataaagcctgggcttaaaaaga

SEQ ID NO: 70341 - DNA, 2705 bp, Homo sapiens
  misc_feature (1077)..(1077): n is a, c, g, or t
atcgggaatgtttccactttctgtctatcattaacaattctgctacaaacatacatgtacttctgttggaggggacacatgttttcatttctcttgggtgtgtctatccaggagtggaattggctgggtcttatggtaactctgttaactgttttttgctttttggttttttgtttgttttttgagacggagtttcacccttgctgtgaactaccataggctggagtacaatggcgcaatcccagctcagcacaacctctgcctcgtagattcaagccagcagggcgagcccctaccccagagtgaaggtggactttgccctctcgtgccacgaggacttgctggcacccatctctgagcccatcgagtggaaataccacagccctgaggaggagataaggtgtgtggcccctgacccctgggagggacctggcgtctgtgtggccacgcccctggggtggggactcctggaggtcacgcagtgggttttcagaacctgcctgggtggggacttgcagaaggcaactgtgcctcccctgggttgagggcgtggatgctagagccagaacccctgggtgtgacccccagccctgctgcttccccgtgctgtgaccttgggccccaaggtgctgtccgtccattctgtggttcagtgtccccattttaaaatgaggacgatgataatacccacgtcctggggctgtcttcagaatcacatgtgtcccttctcacgaggtgcctaaagcagagacgggcgtcctgagagcccagcgttgactctggcactgcagcctcctggggcctgcttgggtgggttgttgggtgctgtgggcaggggccaccgcctccgggctccatgttctgattgccctgcagccttggacctgcctgctggctctgggattttttaagacgaagtcaacaggtaagacttccagtttctagtgagcccactttgcttgttctgctggttggtctggttttattctggggcagggtagggatttttttttttttttttagtgcaaacaacaaaaagcatttcatcactctgcctccatggggagcttagtctgngctagccagaggcaaggtgggcacagtggctggtgggtcagctccacctttggaggctcagcggaacccagcccatcagcattcagggtcacgctcaccatcttgccagcattgtaatcatgcgtatctgcagttcgtcggtggagtcagcctctgacacgccccgcagtgaagtgtcttttttccctctgaaaaatccattcatcctgccacgtgcgggtatttgtcctgaccccatggaaagtgctgacacccacgtgcatttctgtggacgcctccttgaggtctatgggtggagcttggctgatccatgggcatgctgcttctccgaggctctgctcacgctgtctgattggtccattccaggcagggtttttgctgcccttgagtggcggggtggacagcgcagccaccgcctgcctcatctactccatgtgctgccaggtctgcgaggccgtgaggagtggaaatgaggaagtgctggctgatgtccgcaccatcgtgaaccagatcagctacaccccccaggatccccgagacctctgtggacgcatactgaccacctgctacatggccagcaagaactcctcccaggagacgtgcacccgggccagagagttggcccagcagattggaagccaccacatcagtctcaacatcgatccagccgtgaaggccgtcatgggcatcttcagcctggtgacggggaagagccctctgtttgcagctcatggaggaagcagcagggaaaacctggcgctgcaaaatgtgcaggctcgaatacggatggtcctcgcctatctgtttgctcagttgagcctctggtctcggggtgtccacggtgggctcctcgtgctgggatccgccaacgtggatgagagtctcctgggctacctgaccaagtacgactgctccagtgcggacatcaaccccataggcgggatcagcaagacggacctcagggccttcgtccagttctgcatccagcgcttccagcttcctgccctgcagagcatcctgttggcgccggccaccgcagagctggagcccttggctgatggacaggtgtcccagaccgacgaggaagatatggggatgacatatgcggagctctcggtctatgggaaactcaggaaggtggccaagatggggccctacagcatgttctgcaaactcctcggcatgtggagacacatctgcaccccgagacaggtcgctgacaaagtgaagcggtttttctccaagtactccatgaacagacacaagatgaccacgctcacacccgcgtaccacgccgagaactacagccctgaggacaacaggtttgatctgcgaccatttctgtacaacacaagctggccttggcagtttcggtgcatagaaaatcaggtgctacagctcgagagggcagagccacagtccctggacggcgtggactgaggccggttccttcctggaggcctcctgtcctcggggaccccagcacctcatcatcagcattgctggagccaagggtaggagccctacactaggagcccaggatgggacggcgcatcagccgagagggagggaacttttcagtcaaattcctcaaaaagaggctggaataaagcctgggcttaaaaaga

SEQ ID NO: 70342 - DNA, 672 bp, Homo sapiens
tcagctcggtaccattaggcgcgtctggtccagcgcttcagcttcctgcctgcagagcatcctgttggcgccggccaccgcagagctggagcccttggctgatggacaggtgtcccagaccgacgaggaagatatggggatgacatatgcggagctctcggtctatgggaaactcaggaaggtggccaagatggggccctacagcatgttctgcaaactcctcggcatgtggagacacatctgcaccccgagacaggtcgctgacaaagtgaagcggtttttctccaagtactccatgaacagacacaagatgaccacgctcacacccgcgtaccacgccgagaactacagccctgaggacaacaggtttgatctgcgaccatttctgtacaacacaagctggccttggcagtttcggtgcatagaaaatcaggtgctacagctcgagagggcagagccacagtccctggacggcgtggactgaggccggttccttcctggaggcctcctgtcctcggggaccccagcacctcatcatcagcattgctggagccaagggtaggagccctacactaggagcccaggatgggacggcgcatcagccgagagggagggaacttttcagtcaaattcctcaaaaagaggctggaataaagcctgggcttaaaaaga

SEQ ID NO: 70343 - DNA, 1066 bp, Homo sapiens
ccacgggccgaccagccgtccgcagacccctgagtcctctgcctcgcctcaaacccctttcaccccttgccctcgccgtccctggtttgagccagaactctcccgcgaagccctctagaggaccacgtgccttagggacaggctgggggcggcctccgtgcgagtcgtggttgttcgcagagcagcacgtcctctgcctgccaaaatcccggcttctttgagaatcttgtcactggacaataccatccttttcctttcagcctgtaatttatagatttcctattcctagtgagttttgtcatgattagttcttcaaagactagctcctacttgaaccttcacctcaaatcctggcatcgacaaactagtttccccccgcccacctccccacccccccgccacaaccccaaatattgccatctgccagaagattgttttaataactgtccaaatcctcagtgactgtggggtgcttgacacaacttggagttgtgttatgcacaactgtggttgaacttgaactccaacatccagtcccctccttcctgtaacttcatctccagtaattatttctccccttcagaatcagtccttgctaccacagttctagaccatgtcatcattagaatccgcatcctctctacagtcttgtctgtggtgaccatggcctctcagatctcctgctccacggagcggaagtgactgacaggtccccctgccttcccaaggcatacactgctgggtttgcactgaagccatgcttctctggcactactcccagtcagtgagcgggcacagcacggggtgttggtggtggcacgttcatggaagatgtaggactcctctgatgagcaagtttggcttggaaacacctgagccggctggttgaaactttctgagaactatgctgcatgcagcctgaggctcttgggcccagttcccctctcctttcacaggtgtcagacctgtattatgatatgaagtctcccttccccgctcctgcttccttctgtttatccttcacaggagttcccttaataaaactcttgcacattgaaaaaaatct

SEQ ID NO: 70344 - DNA, 357 bp, Homo sapiens
gtctcggctcactgcaacctccgcctcccggcttcaagtgattctcctgcctcagcctccccagtagctgggatcacgtagcgcccgccagcatgcctggctaagttttgtatttttagtaaagacagggtttcaccatgttggccaggctggtcttgaactgccgaccttgtgatccgcccgcctctgcctcctaaagtgctgggattacaggcatgagcccggccgaaatacaatttaattaaaatacttattttcttattagaaagctgcctctcaatggcacctactgctacatttacatagtaacccaaaattgcagttgcttagcagggagagaatcacagtgctggatat

SEQ ID NO: 70345 - DNA, 303 bp, Homo sapiens
gatggcacctgtttcctgttagagatttcttaagggagattgtgaataatcaccagtgattttagtggcagccaagtgacactgaagcttggcagatgtctgtcaaaaccagctacgggactggacagcgaggaccaggagaaaaatgtttgttttttttaaaagatactctggtattcgtatgacaagacccattttgttatgcccaagaacaaggggagaacctcatcttcgccatacttgagtctgactcagtgtggctgtgactcatccttctaggacagttcccctgccacaatagcg

SEQ ID NO: 70346 - DNA, 1326 bp, Homo sapiens
agcgggccacggccgttgggagcctgagactcaaacatggcagcgccaccttctccaggaaggacggccgaccaagcagaccaggtatgcaccttcctcttcaaaaagcctggacggaaaggggctgcaggcctcagaaagcgcccggcctgcgaccccgagcacggagagagcagcagcagcggggacgagggcgacacagtggctcagcccccgcgggtggcaccgaggccccggggcctccacagctggcagaaggcggctcacggcgacaggaggggcgaggaggcggcgcctgagagcctcgacgtggtgtacaggtccacccgctcggcgaagcctgtggggccggaggacatgggggccaccgctgacttcgagcaggacaccgagaaggagcaccatacgccgaccatcctcaagtgcagccagcgggtccaggaggcactgcggggtcgggagcacgaccacatctaccggggaatccacagctacctgaggtacctgaagcccaaggacacgtccatgggcaactcctcctcggggatggcgaggaagggccccatacgtgcgccagggcatctgcgcgccactgtgcgctgggattaccagcctgacatctgcaaggactacaaggagactggcttctgtggcttcggggacagctgcaaattcctccacgaccgttccgattacaagctcgggtgggagattgaacgggagcttgaagagggtcgctactgtatctgcgaggacgaaaaccatgaagtgggaagcgaggaagaggaaataccattcaggtgtttcatatgtcgccaggccttccaaaacccagtcgtcaccaagtgcaggcattatttctgcgagagctgcgcgctggagcacttccgggccaccccgcgctgctacatctgtgaccagccaaccggcggcatctttaaccccgccaaagaactgatggcgaaactgcaaaagcttcaggctgcagaaggaaaaaagagataagaaagactcaagtctgtatgtacactggggagaagcagcctgttgagtaagatgagagagatgacagtcttcctgcaatcccatgttcactgcagaattatttgcaaaagccaagaggtgtaaacaacccaagtgtccatggatggatgaatggacaaacaaaatgcgatacacacacacaatggaatgctattaagccttaacgggaaggaaatccttttaaagatttaaactgatccttttaaggatcacatgctacaactagaatgaaccttgaagacgacactgctaagtgaaataaactagtcacaaaatgaaaaa

SEQ ID NO: 70347 - DNA, 1387 bp, Homo sapiens
agcgggccacggccgttgggagcctgagactcaaacatggcagcgccaccttctccaggaaggacggccgaccaagcagaccaggtatgcaccttcctcttcaaaaagcctggacggaaaggggctgcaggcctcagaaagcgcccggcctgcgaccccgagcacggagagagcagcagcagcggggacgagggcgacacagtggctcagcccccgcgggtggcaccgaggccccggggcctccacagctggcagaaggcggctcacggcgacaggaggggcgaggaggcggcgcctgagagcctcgacgtggtgtacaggtccacccgctcggcgaagcctgtggggccggaggacatgggggccaccgctgacttcgagcaggacaccgagaaggagcaccatacgccgaccatcctcaagtgcagccagcgggtccaggaggcactgcggggtcgggagcacgaccacatctaccggggaatccacagctacctgaggtacctgaagcccaaggacacgtccatgggcaactcctcctcggggatggcgaggaagggccccatacgtgcgccagggcatctgcgcgccactgtgcgctgggattaccagcctgacatctgcaaggactacaaggagactggcttctgtggcttcggggacagctgcaaattcctccacgaccgttccgattacaagctcgggtgggagattgaacgggagcttgaagagggtcgctactgtatctgcgaggacgaaaaccatgaagtgggaagcgaggaagaggaaataccattcaggtgtttcatatgtcgccaggccttccaaaacccagtcgtcaccaagtgcaggcattatttctgcgagagctgcgcgctggagcacttccgggccaccccgcgctgctacatctgtgaccagccaaccggcggcatctttaaccccgccaaagaactgatggcgaaactgcaaaagcttcaggctgcagaaggaaaaaagagataagaaagactcaagtctgtatgtacactggggagaagcagcctgttgagtaagatgagagagatgacagtcttcctgcaatcccatgcctgagtatgtaaccaaaagaattgaaatccggatctcaaagaggtatgtgcactcccatgttcactgcagaattatttgcaaaagccaagaggtgtaaacaacccaagtgtccatggatggatgaatggacaaacaaaatgcgatacacacacacaatggaatgctattaagccttaacgggaaggaaatccttttaaagatttaaactgatccttttaaggatcacatgctacaactagaatgaaccttgaagacgacactgctaagtgaaataaactagtcacaaaatgaaaaa

SEQ ID NO: 70348 - DNA, 860 bp, Homo sapiens
ttttgttcctgcattaattcactcaggagggaaaattttatttattttttaattaattattattattattattatttagatttttgagacaggttctcgctgtgttgcccaggctggccttgaactcctgggctcaagcaatcctcctgccttgtcctcccaaagtgctgggattacaggcatgagccaccatgcccagcctaggagggaaaattttaaattacatgtgtggctcacattgtatctcttctagacagcaatgctctagagaaatgtttaccagaagacatacgctagaaggctcataaataacattattaataataccttccaaaactagaaaagaattcaaatattcatccagaatgggacagataaattgtggcttattaatacaatggaatacatacagtcaaaaaaatgcagtaataatgacagctacataaaatgtggatgcaccctgaaaaaatgttggcagaaagaagccagataaaaagaatacatacaatgggattccattcacaaagtcagacaaaattaaatacaaaaataaaaaataaacaaattcagaacaaattaaacaatggtgttaagggatacacgctgagatggaaaaactattaagaaaatcaaaacaggccaggcgcggttgtttcttataacatctttccataaaaagccaagggccccactcagtgaaaatgattgaacatgagaattaagataatgtctaactgggatggattctttttctgtgattatgattttgttaaataagctacaaagcaatttgaacatcaagcatcaaagtttcttatgccaaacttcttaatttcaaatatgaaaacagtcataaaaat

SEQ ID NO: 70349 - DNA, 193 bp, Homo sapiens
taaacaaattcagaacaaattaaacaatggtgttaagggatacacgctgagatggaaaaactattaagaaaatcaaaacaggccaggcgcggtggctcgcgcctataatcccagcactttgggaggccaaggcaggcggatcacaaggtcaagagatcgagaccatcctggccaacacggtgaaaccccgtct

SEQ ID NO: 70350 - DNA, 387 bp, Homo sapiens
ttaaaacctgggtgctccaaaagaactgcttcatttttgatagccactggacaattgtttataattattttggagctgcaaacccctttgaatatctgataaaagctatgattcttttcccagagaaatacattgtacacaaatttttgcatacaatttcaatttgcatatacctcttgaaacctatctgtagatcctataatagtgatcaaatttcaatgagtatgtaactcacctgggattgcttgttaaaatatagatgacctattctcactgcccaaagtttggtgcattaagtctggagttggacttaggactctgtctactcctccctactccctactcttttctcttttttcaaagagacagggtcttgttgggctcaag

SEQ ID NO: 70351 - DNA, 334 bp, Homo sapiens
aattctggagggaaacctgaggtttctggagcactaaatataacaagcagtgacatagttgaaccagtgatgtcgaagccagcaaagcccccatgtgtggagcttggtgtatttctggttcagacagaaatagacacctaccagagggcatgatggcatcagtgcttgcgggcagccttgggccaaacttagtctccatccctgctgcctggccctctcctcctgccttttcctctctgctccttggggagctccatctagcacccgaggattgtggttttgcttctggctgcaagtactttcacatatcctgttgctcatgagagggtggagg

SEQ ID NO: 70352 - DNA, 335 bp, Homo sapiens
gaaaactctcctttccttgtgcagttccccaggtgtctttgcccctatagaaaatgatgaaaatagggcagagaagagctgtctccaagaaagctcctcttggaggcttgaagagatagcctccaagaaagccatgtttgtcagcctgtcctgtgcccttttccagcccttctggttcctgcctcctccctcacaaggtccaggccttaccattcttcctcacagtcctgggttggccaggcggggagctccttgagacaaagagcaaggagaaggaagtgcttctactcatgtgtgttctgtcccaaggcgtgggacctgcagatgcctgtcaa

SEQ ID NO: 70353 - DNA, 319 bp, Homo sapiens
ctttgagtgcagtgggacctcagaggctaggggtagccatttgagcatctcctgtgtaccaggcactgtactgggcactaagaatttaaaaataaacaagacaccgtccctacccttgaggagctcaccaactaggggtgaaatgtccaggacacactctctgagttcctagggctgcagctaaccttagccagaccagagcacagatgagctcgcagccagactctccaggccagatacgggccaggcagcagcatccgttcaacagaatcgctgagcagttctgttgtgccagacaaagcagtcacactagagatac

SEQ ID NO: 70354 - DNA, 289 bp, Homo sapiens
ctcaaagaaacataccacctcaaagacacaggcataccgtgccttcctaatacacaaatgaggattagaaaaacagagaactacccatgttgccttgccctctttcctcaaaccacactagcaggcacaaagtaaacaagcaagaagagtctgccactgggagtgggtaaacagcacgccgagagatacatgtagaataaatataaaaattaaaacaatactggacacattgtattcaaactccttaaaaccaaagctaaagagtcaaagttacagatagccatccaga

SEQ ID NO: 70355 - DNA, 414 bp, Homo sapiens
gataaaagggaaaataaatataaagtactgctgcatattgaataagatagttgtctttaggaaaagcacttgtgcagttatttaagttgccagctgaattcattgctttttatggaatactatttttgcttgaatggaccatttacagatatgctgtgattatcagactggttattggttattagttattgattactcaagactggtttttggttatttggcgcacattttttccaaagcgaacaaattaagcctgtcatgttaaacaactgacaccatctattgccattgataaaatatgaaatgtcaagtgaaaattagaatttttagaaacatatatctggcactatgtggttgaagctttttctttttttcttttcttttcttttttttttttttgataaggtgttactc

SEQ ID NO: 70356 - DNA, 2952 bp, Homo sapiens
  misc_feature (610)..(610): n is a, c, g, or t
gaagcgaatagcgttttcagagatattgggcggctcaagggtcttactctgtcgcccagtctgtaatgcagtgctgtgaccatagcccactgcagcctccacctcccaggctcaagcagtccttcccccctcgccctcatgaatagctgggactacagcctggagcattggtaagcgtcacactgccaaagtgagagctgctggagaactcataatcccaggaacgcctcttctactctccgagtaccccagtgaccagagtgagagaagctctgaacgagggcacgcggcttgaaggactgtgggcagatgtgaccaagagcctgcattaagttgtacaatggtagatggagtgatgattcttcctgtgcttatcatgattgctctcccctcccctagtatggaagatgagaagcccaaggtcaaccccaaactctacatgtgtgtgtgtgaaggtctctcctgcggtaatgaggaccactgtgaaggccagcagtgcttttcctcactgagcatcaacgatggcttccacgtctaccagaaaggctgcttccaggtttatgagcagggaaagatgacctgtaagaccccgccgtcccctggccaagcngtggagtgctgccaaggggactggtgtaacaggaacatcacggcccagctgcccactaaaggaaaatccttccctggaacacagaatttccacttggaggttggcctcattattctctctgtagtgttcgcagtatgtcttttagcctgcctgctgggagttgctctccgaaaatttaaaaggcgcaaccaagaacgcctcaatccccgagacgtggagtatggcactatcgaagggctcatcaccaccaatgttggagacagcactttagcagatttattggatcattcgtgtacatcaggaagtggctctggtcttccttttctggtacaaagaacagtggctcgccagattacactgttggagtgtgtcgggaaaggcaggtatggtgaggtgtggaggggcagctggcaaggggaaaatgttgccgtgaagatcttctcctcccgtgatgagaagtcatggttcagggaaacggaattgtacaacactgtgatgctgaggcatgaaaatatcttaggtttcattgcttcagacatgacatcaagacactccagtacccagctgtggttaattacacattatcatgaaatgggatcgttgtacgactatcttcagcttactactctggatacagttagctgccttcgaatagtgctgtccatagctagtggtcttgcacatttgcacatagagatatttgggacccaagggaaaccagccattgcccatcgagatttaaagagcaaaaatattctggttaagaagaatggacagtgttgcatagcagatttgggcctggcagtcatgcattcccagagcaccaatcagcttgatgtggggaacaatccccgtgtgggcaccaagcgctacatggcccccgaagttctagatgaaaccatccaggtggattgtttcgattcttataaaagggtcgatatttgggcctttggacttgttttgtgggaagtggccaggcggatggtgagcaatggtatagtggaggattacaagccaccgttctacgatgtggttcccaatgacccaagttttgaagatatgaggaaggtagtctgtgtggatcaacaaaggccaaacatacccaacagatggttctcagacccgacattaacctctctggccaagctaatgaaagaatgctggtatcaaaatccatccgcaagactcacagcactgcgtatcaaaaagactttgaccaaaattgataattccctcgacaaattgaaaactgactgttgacattttcatagtgtcaagaaggaagatttgacgttgttgtcattgtccagctgggacctaatgctggcctgactggttgtcagaatggaatccatctgtctccctccccaaatggctgctttgacaaggcagacgtcgtacccagccatgtgttggggagacatcaaaaccaccctaacctcgctcgatgactgtgaactgggcatttcacgaactgttcacactgcagagactaatgttggacagacactgttgcaaaggtagggactggaggaacacagagaaatcctaaaagagatctgggcattaagtcagtggctttgcatagctttcacaagtctcctagacactccccacgggaaactcaaggaggtggtgaatttttaatcagcaatattgcctgtgcttctcttctttattgcactaggaattctttgcattccttacttgcactgttactcttaattttaaagacccaacttgccaaaatgttggctgcgtactccactggtctgtctttggataataggaattcaatttggcaaaacaaaatgtaatgtcagactttgctgcattttacacatgtgctgatgtttacaatgatgccgaacattaggaattgtttatacacaactttgcaaattatttattacttgtgcacttagtagtttttacaaaactgctttgtgcatatgttaaagcttatttttatgtggtcttatgattttattacagaaatgtttttaacactatactctaaaatggacattttcttttattatcagttaaaatcacattttaagtgcttcacatttgtatgtgtgtagactgtaactttttttcagttcatatgcagaacgtatttagccattacccacgtgacaccaccgaatatattatcgatttagaagcaaagatttcagtagaattttagtcctgaacgctacggggaaaatgcattttcttcagaattatccattacgtgcatttaaactctgccagaaaaaaataactattttgttttaatctactttttgtatttagtagttatttgtataaattaaataaactgttttcaagtc

SEQ ID NO: 70357 - DNA, 3032 bp, Homo sapiens
  misc_feature (690)..(690): n is a, c, g, or t
aagagatgtgggctctggggcgctggattcagtaacttccgtcgggttctagactggctcggctctgtccagttgtgccagatagtctcccacccgctccccagccctcctttcccctggagatttgaacgctggttgctgggagaaaagctattagagaaaaagagtccattagtaacagaagaagagtcttggttaaaagttgtcatgaattggttttggagagaggcgaagcaagcctggagcattggtaagcgtcacactgccaaagtgagagctgctggagaactcataatcccaggaacgcctcttctactctccgagtaccccagtgaccagagtgagagaagctctgaacgagggcacgcggcttgaaggactgtgggcagatgtgaccaagagcctgcattaagttgtacaatggtagatggagtgatgattcttcctgtgcttatcatgattgctctcccctcccctagtatggaagatgagaagcccaaggtcaaccccaaactctacatgtgtgtgtgtgaaggtctctcctgcggtaatgaggaccactgtgaaggccagcagtgcttttcctcactgagcatcaacgatggcttccacgtctaccagaaaggctgcttccaggtttatgagcagggaaagatgacctgtaagaccccgccgtcccctggccaagcngtggagtgctgccaaggggactggtgtaacaggaacatcacggcccagctgcccactaaaggaaaatccttccctggaacacagaatttccacttggaggttggcctcattattctctctgtagtgttcgcagtatgtcttttagcctgcctgctgggagttgctctccgaaaatttaaaaggcgcaaccaagaacgcctcaatccccgagacgtggagtatggcactatcgaagggctcatcaccaccaatgttggagacagcactttagcagatttattggatcattcgtgtacatcaggaagtggctctggtcttccttttctggtacaaagaacagtggctcgccagattacactgttggagtgtgtcgggaaaggcaggtatggtgaggtgtggaggggcagctggcaaggggaaaatgttgccgtgaagatcttctcctcccgtgatgagaagtcatggttcagggaaacggaattgtacaacactgtgatgctgaggcatgaaaatatcttaggtttcattgcttcagacatgacatcaagacactccagtacccagctgtggttaattacacattatcatgaaatgggatcgttgtacgactatcttcagcttactactctggatacagttagctgccttcgaatagtgctgtccatagctagtggtcttgcacatttgcacatagagatatttgggacccaagggaaaccagccattgcccatcgagatttaaagagcaaaaatattctggttaagaagaatggacagtgttgcatagcagatttgggcctggcagtcatgcattcccagagcaccaatcagcttgatgtggggaacaatccccgtgtgggcaccaagcgctacatggcccccgaagttctagatgaaaccatccaggtggattgtttcgattcttataaaagggtcgatatttgggcctttggacttgttttgtgggaagtggccaggcggatggtgagcaatggtatagtggaggattacaagccaccgttctacgatgtggttcccaatgacccaagttttgaagatatgaggaaggtagtctgtgtggatcaacaaaggccaaacatacccaacagatggttctcagacccgacattaacctctctggccaagctaatgaaagaatgctggtatcaaaatccatccgcaagactcacagcactgcgtatcaaaaagactttgaccaaaattgataattccctcgacaaattgaaaactgactgttgacattttcatagtgtcaagaaggaagatttgacgttgttgtcattgtccagctgggacctaatgctggcctgactggttgtcagaatggaatccatctgtctccctccccaaatggctgctttgacaaggcagacgtcgtacccagccatgtgttggggagacatcaaaaccaccctaacctcgctcgatgactgtgaactgggcatttcacgaactgttcacactgcagagactaatgttggacagacactgttgcaaaggtagggactggaggaacacagagaaatcctaaaagagatctgggcattaagtcagtggctttgcatagctttcacaagtctcctagacactccccacgggaaactcaaggaggtggtgaatttttaatcagcaatattgcctgtgcttctcttctttattgcactaggaattctttgcattccttacttgcactgttactcttaattttaaagacccaacttgccaaaatgttggctgcgtactccactggtctgtctttggataataggaattcaatttggcaaaacaaaatgtaatgtcagactttgctgcattttacacatgtgctgatgtttacaatgatgccgaacattaggaattgtttatacacaactttgcaaattatttattacttgtgcacttagtagtttttacaaaactgctttgtgcatatgttaaagcttatttttatgtggtcttatgattttattacagaaatgtttttaacactatactctaaaatggacattttcttttattatcagttaaaatcacattttaagtgcttcacatttgtatgtgtgtagactgtaactttttttcagttcatatgcagaacgtatttagccattacccacgtgacaccaccgaatatattatcgatttagaagcaaagatttcagtagaattttagtcctgaacgctacggggaaaatgcattttcttcagaattatccattacgtgcatttaaactctgccagaaaaaaataactattttgttttaatctactttttgtatttagtagttatttgtataaattaaataaactgttttcaagtc

SEQ ID NO: 70358 - DNA, 2836 bp, Homo sapiens
  misc_feature (494)..(494): n is a, c, g, or t
cctgactcccccggctcagcccccggacggtggggacccgagcctggagcattggtaagcgtcacactgccaaagtgagagctgctggagaactcataatcccaggaacgcctcttctactctccgagtaccccagtgaccagagtgagagaagctctgaacgagggcacgcggcttgaaggactgtgggcagatgtgaccaagagcctgcattaagttgtacaatggtagatggagtgatgattcttcctgtgcttatcatgattgctctcccctcccctagtatggaagatgagaagcccaaggtcaaccccaaactctacatgtgtgtgtgtgaaggtctctcctgcggtaatgaggaccactgtgaaggccagcagtgcttttcctcactgagcatcaacgatggcttccacgtctaccagaaaggctgcttccaggtttatgagcagggaaagatgacctgtaagaccccgccgtcccctggccaagcngtggagtgctgccaaggggactggtgtaacaggaacatcacggcccagctgcccactaaaggaaaatccttccctggaacacagaatttccacttggaggttggcctcattattctctctgtagtgttcgcagtatgtcttttagcctgcctgctgggagttgctctccgaaaatttaaaaggcgcaaccaagaacgcctcaatccccgagacgtggagtatggcactatcgaagggctcatcaccaccaatgttggagacagcactttagcagatttattggatcattcgtgtacatcaggaagtggctctggtcttccttttctggtacaaagaacagtggctcgccagattacactgttggagtgtgtcgggaaaggcaggtatggtgaggtgtggaggggcagctggcaaggggaaaatgttgccgtgaagatcttctcctcccgtgatgagaagtcatggttcagggaaacggaattgtacaacactgtgatgctgaggcatgaaaatatcttaggtttcattgcttcagacatgacatcaagacactccagtacccagctgtggttaattacacattatcatgaaatgggatcgttgtacgactatcttcagcttactactctggatacagttagctgccttcgaatagtgctgtccatagctagtggtcttgcacatttgcacatagagatatttgggacccaagggaaaccagccattgcccatcgagatttaaagagcaaaaatattctggttaagaagaatggacagtgttgcatagcagatttgggcctggcagtcatgcattcccagagcaccaatcagcttgatgtggggaacaatccccgtgtgggcaccaagcgctacatggcccccgaagttctagatgaaaccatccaggtggattgtttcgattcttataaaagggtcgatatttgggcctttggacttgttttgtgggaagtggccaggcggatggtgagcaatggtatagtggaggattacaagccaccgttctacgatgtggttcccaatgacccaagttttgaagatatgaggaaggtagtctgtgtggatcaacaaaggccaaacatacccaacagatggttctcagacccgacattaacctctctggccaagctaatgaaagaatgctggtatcaaaatccatccgcaagactcacagcactgcgtatcaaaaagactttgaccaaaattgataattccctcgacaaattgaaaactgactgttgacattttcatagtgtcaagaaggaagatttgacgttgttgtcattgtccagctgggacctaatgctggcctgactggttgtcagaatggaatccatctgtctccctccccaaatggctgctttgacaaggcagacgtcgtacccagccatgtgttggggagacatcaaaaccaccctaacctcgctcgatgactgtgaactgggcatttcacgaactgttcacactgcagagactaatgttggacagacactgttgcaaaggtagggactggaggaacacagagaaatcctaaaagagatctgggcattaagtcagtggctttgcatagctttcacaagtctcctagacactccccacgggaaactcaaggaggtggtgaatttttaatcagcaatattgcctgtgcttctcttctttattgcactaggaattctttgcattccttacttgcactgttactcttaattttaaagacccaacttgccaaaatgttggctgcgtactccactggtctgtctttggataataggaattcaatttggcaaaacaaaatgtaatgtcagactttgctgcattttacacatgtgctgatgtttacaatgatgccgaacattaggaattgtttatacacaactttgcaaattatttattacttgtgcacttagtagtttttacaaaactgctttgtgcatatgttaaagcttatttttatgtggtcttatgattttattacagaaatgtttttaacactatactctaaaatggacattttcttttattatcagttaaaatcacattttaagtgcttcacatttgtatgtgtgtagactgtaactttttttcagttcatatgcagaacgtatttagccattacccacgtgacaccaccgaatatattatcgatttagaagcaaagatttcagtagaattttagtcctgaacgctacggggaaaatgcattttcttcagaattatccattacgtgcatttaaactctgccagaaaaaaataactattttgttttaatctactttttgtatttagtagttatttgtataaattaaataaactgttttcaagtc

SEQ ID NO: 70359 - DNA, 738 bp, Homo sapiens
aatgatttcaattgtcggcttcaaattcaccttatttcttctaccccagcatgccttttttgtggcagcacttagattctcatatcagaaaacaaacgcattcatgccgtaccagtgattcgttggggaaactgcctcggccccaccacccagatcccccacgttcctaccaagtaagccaagtgaccatgtgaagaactgactgacacccagaggaaactaataaacaaaaacaaataaaagcaaataccttttcaggaatctcacttggaaaaccaagtataatggcaaaaaacaaccaaaaaaaaaaaacccgaatgttttcagcgttggggatgttgggggtgtagacatctcgagagctggtttccgaaggcaccgcaccccagacaatgtgctacaagagcctcccggctgctgtgtcaatgaagcctttcaggccctccacactgcttcacttgttccctaaagtagtgctttctggaagctaaactctcagctggcgagaacagtgaactctgtgccatttgtctatcaactcctttaaaaagaaaaacctcctgtacggctctcttgttttgcattttctattctgcactccagtacgcataacgacacacagaagaggcaagggcctcttttaaaaccgtgaagaaagaataaatttgaaagcacccagaagcctctgctttcagctattagagaaaagtttgcatcccatagaaaccagtactaatt

SEQ ID NO: 70360 - DNA, 2189 bp, Homo sapiens
  misc_feature (1)..(1): n is a, c, g, or t
  misc_feature (43)..(43): n is a, c, g, or t
  misc_feature (1552)..(1552): n is a, c, g, or t
nggatgagcctctgtgaactactaaggtgggagggggctatangcagaggagaatgtcagatgctcagctcggtcccctccgcctgacgctcctctctgtctcagccaggactggtttctgtaagaaacagcaggagctgtggcagcggcgaaaggaagcggctgaggcgcttggaacccgaaaagtctcggtgctcctggctacctcgcacagcggtgcccgcccggccgtcagtaccatggacagcagcgctgcccccacgaacgccagcaattgcactgatgccttggcgtactcaagttgctccccagcacccagccccggttcctgggtcaacttgtcccacttagatggcaacctgtccgacccatgcggtccgaaccgcaccgacctgggcgggagagacagcctgtgccctccgaccggcagtccctccatgatcacggccatcacgatcatggccctctactccatcgtgtgcgtggtggggctcttcggaaacttcctggtcatgtatgtgattgtcagatacaccaagatgaagactgccaccaacatctacattttcaaccttgctctggcagatgccttagccaccagtaccctgcccttccagagtgtgaattacctaatgggaacatggccatttggaaccatcctttgcaagatagtgatctccatagattactataacatgttcaccagcatattcaccctctgcaccatgagtgttgatcgatacattgcagtctgccaccctgtcaaggccttagatttccgtactccccgaaatgccaaaattatcaatgtctgcaactggatcctctcttcagccattggtcttcctgtaatgttcatggctacaacaaaatacaggcaaggttccatagattgtacactaacattctctcatccaacctggtactgggaaaacctgctgaagatctgtgttttcatcttcgccttcattatgccagtgctcatcattaccgtgtgctatggactgatgatcttgcgcctcaagagtgtccgcatgctctctggctccaaagaaaaggacaggaatcttcgaaggatcaccaggatggtgctggtggtggtggctgtgttcatcgtctgctggactcccattcacatttacgtcatcattaaagccttggttacaatcccagaaactacgttccagactgtttcttggcacttctgcattgctctaggttacacaaacagctgcctcaacccagtcctttatgcatttctggatgaaaacttcaaacgatgcttcagagagttctgtatcccaacctcttccaacattgagcaacaaaactccactcgaattcgtcagaacactagagaccacccctccacggccaatacagtggatagaactaatcatcagctagaaaatctggaagcagaaactgctccgttgccctaacagggtctcatgccattccgaccttcaccaagcttagaagccaccatgtatgtggaagcaggttgcttcaagaatgtgtaggaggctctaattctctaggaaagtgcctncttttaggtcatccaacctctttcctctctggccactctgctctgcacattagagggacagccaaaagtaagtggagcatttggaaggaaaggaatataccacaccgaggagtccagtttgtgcaagacacccagtggaaccaaaacccatcgtggtatgtgaattgaagtcatcataaaaggtgacccttctgtctgtaagattttattttcaagcaaatatttatgacctcaacaaagaagaaccatcttttgttaagttcaccgtagtaacacataaagtaaatgctacctctgatcaaagcaccttgaatggaaggtccgagtctttttagtgtttttgcaagggaatgaatccattattctattttagacttttaacttcaacttaaaattagcatctggctaaggcatcattttcacctccatttcttggttttgtattgtttaaaaaaaataacatctctttcatctagctccataattgcaagggaagagattagcatgaaaggtaatctgaaacacagtcatgtgtcagctgtagaaaggttgattctcatgcactgcaaatacttccaaagagtcatcatgggggatttttcattcttaggctttcagtggtttgttcctggaattc

SEQ ID NO: 70361 - DNA, 1516 bp, Homo sapiens
  misc_feature (1)..(1): n is a, c, g, or t
  misc_feature (43)..(43): n is a, c, g, or t
  misc_feature (1514)..(1516): n is a, c, g, or t
nggatgagcctctgtgaactactaaggtgggagggggctatangcagaggagaatgtcagatgctcagctcggtcccctccgcctgacgctcctctctgtctcagccaggactggtttctgtaagaaacagcaggagctgtggcagcggcgaaaggaagcggctgaggcgcttggaacccgaaaagtctcggtgctcctggctacctcgcacagcggtgcccgcccggccgtcagtaccatggacagcagcgctgcccccacgaacgccagcaattgcactgatgccttggcgtactcaagttgctccccagcacccagccccggttcctgggtcaacttgtcccacttagatggcaacctgtccgacccatgcggtccgaaccgcaccgacctgggcgggagagacagcctgtgccctccgaccggcagtccctccatgatcacggccatcacgatcatggccctctactccatcgtgtgcgtggtggggctcttcggaaacttcctggtcatgtatgtgattgtcagatacaccaagatgaagactgccaccaacatctacattttcaaccttgctctggcagatgccttagccaccagtaccctgcccttccagagtgtgaattacctaatgggaacatggccatttggaaccatcctttgcaagatagtgatctccatagattactataacatgttcaccagcatattcaccctctgcaccatgagtgttgatcgatacattgcagtctgccaccctgtcaaggccttagatttccgtactccccgaaatgccaaaattatcaatgtctgcaactggatcctctcttcagccattggtcttcctgtaatgttcatggctacaacaaaatacaggcaaggttccatagattgtacactaacattctctcatccaacctggtactgggaaaacctgctgaagatctgtgttttcatcttcgccttcattatgccagtgctcatcattaccgtgtgctatggactgatgatcttgcgcctcaagagtgtccgcatgctctctggctccaaagaaaaggacaggaatcttcgaaggatcaccaggatggtgctggtggtggtggctgtgttcatcgtctgctggactcccattcacatttacgtcatcattaaagccttggttacaatcccagaaactacgttccagactgtttcttggcacttctgcattgctctaggttacacaaacagctgcctcaacccagtcctttatgcatttctggatgaaaacttcaaacgatgcttcagagagttctgtatcccaacctcttccaacattgagcaacaaaactccactcgaattcgtcagaacactagagaccacccctccacggccaatacagtggatagaactaatcatcaggtacgcagtctctagaattaggtatatctactggggatgacataaaaattataaggctttgtgctaaactaggagtttaatccattatagaggatgagaatggagggaagnnn

SEQ ID NO: 70362 - DNA, 318 bp, Homo sapiens
catttgtcatcctaaaagaaagaagctgaggtacaaaatataatttagagtttacttgagccaaagttaggaaagcttcccaggacatacttttatgttgccttggagaatgctccattagcttttgttacaagcaggttttcaagggcaaagggagcaaaaagtgggccaatacaagttgtttgacaggaattctcatcagttaacagaaacaacattggtagtgattggctgtacatcactgaactataggttatgagttatggtgtctagcctgtggaatttttatggctacttggtgtcagtcagtcaagagcc

SEQ ID NO: 70363 - DNA, 514 bp, Homo sapiens
ccgcctcagcctcccaaagtgctgggattacaggtgtgagccactgcgcccggcccaaaacatgtattctgttttatggaatgaagtattgcccaattttagaatcacaaataaagtcagttaagatccttaaactggattcgttgtaattttgtgttttgacatatgttacaacatggacaaaccttgaacatattataataagtgaaataggccagacacaaaaggacaaatattggatgattccacttacatgagctacctaaagcagccaaattcatagagacagaaagtagaacggtggttgccagggttgggatggcaatgggaggcagagcgaggagttatgcacccagtttcagagtgtgggatggttaaaaagtcctagccatggcgtggtggctcacgcctgtaatcccagtactttggaaggccgaggtgggtagattgcttgaggtcaggagattgagaccagcctggctaacatggtgaaactctgtctctactaaatata

SEQ ID NO: 70364 - DNA, 556 bp, Homo sapiens
taatcgagctcggtcccccccttactatcatgcagctagtagtagcagaatggtgatttgaacccaggacttttgattccactctacaacactgcccacccccattggaaagcggtcatgtgcagcccctgcctccagagtacagagcctagaggagataagacttgtctttaggaagctagagttcaaagctaagagctgaagggcccatgagaggtccaggtaacaggttctacacatgtaaaggagggagcaggcaatgccagctctggagaattagggatggctacatggaagaggtgaccctggagctgtgtactggtagggaggattttagggtgagcaaggggaagtgactggagtgcagcattttcaccatgagcagatttgtagaggtaggaggggccaggagcacagccagagagagggaaagaggccagttctgcttgagagttgagggggagtgggagagggggccctgcagtcacacagcaggcacttcccatacattgccctcaaataaacaaatgctcattcgtcatgcacattttaaaat

SEQ ID NO: 70365 - DNA, 551 bp, Homo sapiens
  misc_feature (480)..(480): n is a, c, g, or t
  misc_feature (502)..(502): n is a, c, g, or t
  misc_feature (538)..(538): n is a, c, g, or t
taatcgagctcggtcccccccttactatcatgcagctagtagtagcagaatggtgatttgaacccaggacttttgattccactctacaacactgcccacccccattggaaagcggtcatgtgcagcccctgcctccagagtacagagcctagaggagataagacttgtctttaggaagctagagttcaaagctaagagctgaagggcccatgagaggtccaggtaacaggttctacacatgtaaaggagggagcaggcaatgccagctctggagaattagggatggctacatggaagaggtgaccctggagctgtgtactggtagggaggattttagggtgagcaaggggaagtgactggagtgcagcattttcaccatgagcagatttgtagaggtaggaggggccaggagcacagccagagagagggaaagaggccagttctgcttgatgtgattatttgacattccatgcttatttnaaaatattctcaggtatcccanaaatctatatacctactatgaacccacaaaaatttnaaattttaaaaat

SEQ ID NO: 70366 - DNA, 642 bp, Homo sapiens
  misc_feature (3)..(3): n is a, c, g, or t
  misc_feature (29)..(29): n is a, c, g, or t
ctngcccctacggccactaagctgcgaanaagacgacagaatgggacagcccacagagttccacctgctcacaggttggctggctcagccaaggtggtgccctgctctgagcattcaggccaagcccatcctgcaccatggccaggtacagatgctgtcgcagccagagccggagcagatattaccgccagagacaaagaagtcgcagacgaaggaggcggagctgccagacacggaggagagccatgaggtgctgccgccccaggtacagaccgagatgtagaagacactaattgcacaaaatagcacatccaccaaactcctgcctgagaatgttaccagacttcaagatcctcttgccacatcttgaaaatgccaccatccaataaaaatcaggagcctgctaaggaacaatgccgcctgtcaataaatgttgaaaagtcaaaaaaaaaaaaaaaaaaaaaaaaaacaaaaaacaaaaaaaaaaaaacaaaaaaaaaaaaacaaagaaacaaaaaaaaacaaaaaaacaagaagaagacggggggcggcggcgcacataaataatatcccgccgcaggggggccaccgcaccgtgacgcgtgcccccgccgttttttatacgacagaggggggccccat

SEQ ID NO: 70367 - DNA, 444 bp, Homo sapiens
  misc_feature (3)..(3): n is a, c, g, or t
  misc_feature (29)..(29): n is a, c, g, or t
ctngcccctacggccactaagctgcgaanaagacgacagaatgggacagcccacagagttccacctgctcacaggttggctggctcagccaaggtggtgccctgctctgagcattcaggccaagcccatcctgcaccatggccaggtacagatgctgtcgcagccagagccggagcagatattaccgccagagacaaagaagtcgcagacgaaggaggcggagctgccagacacggaggagagccatgaggtgctgccgccccaggtacagaccgagatgtagaagacactaattgcacaaaatagcacatccaccaaactcctgcctgagaatgttaccagacttcaagatcctcttgccacatcttgaaaatgccaccatccaataaaaatcaggagcctgctaaggaacaatgccgcctgtcaataaatgttgaaaagtca

SEQ ID NO: 70368 - DNA, 607 bp, Homo sapiens
  misc_feature (3)..(3): n is a, c, g, or t
  misc_feature (29)..(29): n is a, c, g, or t
ctngcccctacggccactaagctgcgaanaagacgacagaatgggacagcccacagagttccacctgctcacaggttggctggctcagccaaggtggtgccctgctctgagcattcaggccaagcccatcctgcaccatggccaggtacagatgctgtcgcagccagagccggagcagatattaccgccagagacaaagaagtcgcagacgaaggaggcggagctgccagacacggaggagagccatgaggtgctgccgccccaggtacagaccgagatgtagaagacactaattgcacaaaatagcacatccaccaaactcctgcctgagaatgttaccagacttcaagatcctcttgccacatcttgaaaatgccaccatccaataaaaatcaggagcctgctaaggaaaaaaaaaaaaaaaaaaaaaaaaacaaaaaacaaaaaaaaaaaaacaaaaaaaaaaaaacaaagaaacaaaaaaaaacaaaaaaacaagaagaagacggggggcggcggcgcacataaataatatcccgccgcaggggggccaccgcaccgtgacgcgtgcccccgccgttttttatacgacagaggggggccccat

SEQ ID NO: 70369 - DNA, 146 bp, Homo sapiens
  misc_feature (43)..(43): n is a, c, g, or t
  misc_feature (143)..(143): n is a, c, g, or t
  misc_feature (145)..(146): n is a, c, g, or t
gggggcctagatgctccctgtgtgcaatgatctgtgtgcatancctgcctatgtatagatgtcctgggctcagtacacacttgttgaactcaacccaggatgctatgaggacagagaatgtggcttttaagggaccctaacancnn

SEQ ID NO: 70370 - DNA, 563 bp, Homo sapiens
cttaatttaaaaatatattactttcaatcttgtaagaggcagactggtttaagtatctcctgtgctactgatgaaactaggaaaagaaggtgaccatgaatatgaaccaaaatatatgctttcatattattttctcacttatcagagcaccacacacctattaacagtacttgattttaccaaatttttgttctaactagcttaggggggctcccaccatcataagatggttcgtgtttgcaactcatttaaaaatcgcattttttcttctgattataacagtagtatatgtttactatagagaatctagagaaaaatatttattaaaaatagaattcaacaactcaaaaccagatgagattttggtacacttccttctactctcttttttctctgtgtatgtatttatatatgtatatatacatataattataaaaaatatatacctttatgagtatagaattggaatcatggtatatatagctttgtacacttttttctattatgcaaaatgtaagcatctttttatattattaaactatcttggaaaccatggtattaaa

SEQ ID NO: 70371 - DNA, 553 bp, Homo sapiens
cgatacgcaagctcgaaatacccccctaaaaggaacaaaagcggagctccccggggtgcggccgttctaaacaagtggatcccccggctccaggaatcgggcacaagatttaataatggaatatctgcattaatataccatccatgtgtttttaccatttgccttaatattgaatatactgtttacctcacactaaaaagaaaaccagaagccttatttgtgattttgggagtggaagcttccatttttgtgtcaaaaatgaatcctgattcttatggaaatctctgttattaagatatttcaagatgagacaacactgaagatcaaattgtgtttagtatcactatcttctctcctcgtttctctcttactcctcatcctcccagaatctaccagtttatggtagaaagatgggaaccttatttgaatgtgttttttttttccatgatgtccaattttgttgtgggaaaggatttggataaaatttttgtttaaattttggtagatttttatctatacaaatttaaataaaattatgttttgtaagctgtaa

SEQ ID NO: 70372 - DNA, 485 bp, Homo sapiens
tcccgctgctcctcctccgcctccttcccctgcccgcgcccgccctactgccccgtgccgagtttcctgtttaagatggcgtcccccgtagcagcgcaggccgggaagcttctgcgagccctagcgctgcggccccgcttcctggcggccgggtcccaggcagttcaattaacctccagaagatggctgaacctgcaggaataccagagcaagaaactgatgtctgacaacggagtgagagttcaaagattctttgtagcagacactgcaaatgaagctctcgaggctgctaagagactaaatgcaaaagaaattgttttaaaagcccagatcttagctggaggaagaggaaaaggtgtcttcaatagtggtttgaaaggaggtgttcatttaacaaaagaccctaatgttgtgggacagctggctaaacagatgattgggtacaatctagcgacaaaactcccagagcctacctggcttctgtg

SEQ ID NO: 70373 - DNA, 2399 bp, Homo sapiens
tcccgctgctcctcctccgcctccttcccctgcccgcgcccgccctactgccccgtgccgagtttcctgtttaagatggcgtcccccgtagcagcgcaggccgggaagcttctgcgagccctagcgctgcggccccgcttcctggcggccgggtcccaggcagttcaattaacctccagaagatggctgaacctgcaggaataccagagcaagaaactgatgtctgacaacggagtgagagttcaaagattctttgtagcagacactgcaaatgaagctctcgaggctgctaagagactaaatgcaaaagaaattgttttaaaagcccagatcttagctggaggaagaggaaaaggtgtcttcaatagtggtttgaaaggaggtgttcatttaacaaaagaccctaatgttgtgggacagctggctaaacagatgattgggtacaatctagcgacaaaacaaactccaaaagaaggtgtgaaagttaacaaggtgatggttgctgaagccttggatatttccagagaaacctacctggcaattctgatggaccggtcctgcaatggccccgtgctggtgggcagcccccaggggggcgtcgacattgaagaggtggctgcttcaaacccggagctcatttttaaggagcaaattgacatttttgaaggaataaaggacagccaagctcagcggatggccgaaaatctaggcttcgttgggcctttgaaaagccaggctgcagatcaaattacgaagctgtataatctcttcctgaaaattgatgctactcaggtggaagtgaatccctttggtgaaactccagaaggacaagttgtctgttttgatgccaagataaactttgatgacaacgcagaattccgacaaaaagacatatttgctatggacgacaaatcagagaatgagcccattgaaaatgaagctgccaaatatgatctaaaatacataggactagatgggaacattgcctgctttgtgaatggtgctgggctcgccatggctacttgtgatatcattttccttaatggtgggaagccagccaacttcttggatcttggaggtggtgtaaaggaagctcaagtatatcaagcattcaaattgctcacagctgatcctaaggttgaagccatccttgtcaatatatttggtggtatcgtcaactgtgccatcattgccaatgggatcaccaaagcctgccgggagctagaactcaaggtgcccctggtggtccggcttgaaggaaccaacgtccaagaggcccagaagatactcaacaacagcggactccccattacttcagccattgacctggaggatgcagccaagaaggctgtggccagtgtggccaagaagtgatgtctttgtcctgatccaatggagaaagaaagccatttttccataaaaagggatggttcatcattgtgaaagaaatggttatctcattggggaagaaaaggggagggggaaggcaagaatcactgaaaaatcttaaatctgtgttttctggaataagatatctagacagcctaaatctgattttagtctttataaaaataatatcttgtgttctcatacttttctgtcactgtaagcctgcccagtaggcagtgttttgcagactttggggagtggtctatgtggccaaatattgtgtgtatagacagaatttgaaatcaagtcctgcttcatttacaagaattttggtgggcatctaatcctacataatgaaaaagaaaaacagaccatttaaaaactcagacaagattatatttaatatattaattactaaaaaggcacaagattacactgaacatattagctactaaaaaggcactgctaagacattcaagcaaatagctattacacactactgcagattttacaggtttctaattctaacatatgtttgaaaaatccgtgagtattccaaaatatatttaataatggaatatctgcattaatataccatccatgtgtttttaccatttgccttaatattgaatatactgtttacctcacactaaaaagaaaaccagaagccttatttgtgattttgggagtggaagcttccatttttgtgtcaaaaatgaatcctgattcttatggaaatctctgttattaagatatttcaagatgagacaacactgaagatcaaattgtgtttagtatcactatcttctctcctcgtttctctcttactcctcatcctcccagaatctaccagtttatggtagaaagatgggaaccttatttgaatgtgttttttttttccatgatgtccaattttgttgtgggaaaggatttggataaaatttttgtttaaattttggtagatttttatctatacaaatttaaataaaattatgttttgtaagctgtaa

SEQ ID NO: 70374 - DNA, 2431 bp, Homo sapiens
tcccgctgctcctcctccgcctccttcccctgcccgcgcccgccctactgccccgtgccgagtttcctgtttaagatggcgtcccccgtagcagcgcaggccgggaagcttctgcgagccctagcgctgcggccccgcttcctggcggccgggtcccaggcagttcaattaacctccagaagatggctgaacctgcaggaataccagagcaagaaactgatgtctgacaacggagtgagagttcaaagattctttgtagcagacactgcaaatgaagctctcgaggctgctaagagactaaatgcaaaagaaattgttttaaaagcccagatcttagctggaggaagaggaaaaggtgtcttcaatagtggtttgaaaggaggtgttcatttaacaaaagaccctaatgttgtgggacagctggctaaacagatgattgggtacaatctagcgacaaaacaaactccaaaagaaggtgtgaaagttaacaaggtgatggttgctgaagccttggatatttccagagaaacctacctggcaattctgatggaccggtcctgcaatggccccgtgctggtgggcagcccccaggggggcgtcgacattgaagaggtggctgcttcaaacccggagctcatttttaaggagcaaattgacatttttgaaggaataaaggacagccaagctcagcggatggccgaaaatctaggcttcgttgggcctttgaaaagccaggctgcagatcaaattacgaagctgtataatctcttcctgaaaattgatgctactcaggtggaagtgaatccctttggtgaaactccagaaggacaagttgtctgttttgatgccaagataaactttgatgacaacgcagaattccgacaaaaagacatatttgctatggacgacaaatcagagaatgagcccattgaaaatgaagctgccaaatatgatctaaaatacataggactagatgggaacattgcctgctttgtgaatggtgctgggctcgccatggctacttgtgatatcattttccttaatggtgggaagccagccaacttcttggatcttggaggtggtgtaaaggaagctcaagtatatcaagcattcaaattgctcacagctgatcctaaggttgaagccatccttgtcaatatatttggtggtatcgtcaactgtgccatcattgccaatgggatcaccaaagcctgccgggagctagaactcaaggtgcccctggtggtccggcttgaaggaaccaacgtccaagaggcccagaagatactcaacaacagcggactccccattacttcagccattgacctggaggatgcagccaagaaggctgtggccagtgtggccaagaagtgatgtctttgtcctgatccaatggagaaagaaagccatttttccataaaaagggatggttcatcattgtgaaagaaatggttatctcattggggaagaaaaggggagggggaaggcaagaatcactgaaaaatcttaaatctgtgttttctggaataagatatctagacagcctaaatctgattttagtctttataaaaataatatcttgtgttctcatacttttctgtcactgtaagcctgcccagtaggcagtgttttgcagactttggggagtggtctatgtggccaaatattgtgtgtatagacagaatttgaaatcaagtcctgcttcatttacaagaattttggtgggcatctaatcctacataatgaaaaagaaaaacagaccatttaaaaactcagacaagattatatttaatatattaattactaaaaaggcacaagattacactgaacatattagctactaaaaaggcactgctaagacattcaagcaaatagctattacacactactgcagattttacaggtttctaattctaacatatgtttgaaaaatccgtgagtattccaaaatatatttaataatggaatatctgcattaatataccatccatgtgtttttaccatttgccttaatattgaatatactgtttacctcacactaaaaagaaaaccagaagccttatttgtgattttgggagtggaagcttccatttttgtgtcaaaaatgaatcctgattcttatggaaatctctgttattaagatatttcaagatgagacaacactgaagatcaaattgtgtttagtatcactatcttctctcctcgtttctctcttactcctcatcctcccagaatctaccagtttatggtagaaagatgggaaccttatttgaatgtgttttttttttccatgatgtccaattttgttgtgggaaaggatttggataaaatttttgtttaaattttggtagatttttatctatacaaatttaaataaaattatgttttgtaagctgtaaaaaatgaacaacacaacctcacaccaacacaa

SEQ ID NO: 70375 - DNA, 2345 bp, Homo sapiens
tcccgctgctcctcctccgcctccttcccctgcccgcgcccgccctactgccccgtgccgagtttcctgtttaagatggcgtcccccgtagcagcgcaggccgggaagcttctgcgagccctagcgctgcggccccgcttcctggcggccgggtcccaggcagttcaattaacctccagaagatggctgaacctgcaggaataccagagcaagaaactgatgtctgacaacggagtgagagttcaaagattctttgtagcagacactgcaaatgaagctctcgaggctgctaagagactaaatgcaaaagaaattgttttaaaagcccagatcttagctggaggaagaggaaaaggtgtcttcaatagtggtttgaaaggaggtgttcatttaacaaaagaccctaatgttgtgggacagctggctaaacagatgattgggtacaatctagcgacaaaacaaactccaaaagaaggtgtgaaagttaacaaggtgatggttgctgaagccttggatatttccagagaaacctacctggcaattctgatggaccggtcctgcaatggccccgtgctggtgggcagcccccaggggggcgtcgacattgaagaggtggctgcttcaaacccggagctcatttttaaggagcaaattgacatttttgaaggaataaaggacagccaagctcagcggatggccgaaaatctaggcttcgttgggcctttgaaaagccaggctgcagatcaaattacgaagctgtataatctcttcctgaaaattgatgctactcaggtggaagtgaatccctttggtgaaactccagaaggacaagttgtctgttttgatgccaagataaactttgatgacaacgcagaattccgacaaaaagacatatttgctatggacgacaaatcagagaatgagcccattgaaaatgaagctgccaaatatgatctaaaatacataggactagatgggaacattgcctgctttgtgaatggtgctgggctcgccatggctacttgtgatatcattttccttaatggtgggaagccagccaacttcttggatcttggaggtggtgtaaaggaagctcaagtatatcaagcattcaaattgctcacagctgatcctaaggttgaagccatccttgtcaatatatttggtggtatcgtcaactgtgccatcattgccaatgggatcaccaaagcctgccgggagctagaactcaaggtgcccctggtggtccggcttgaaggaaccaacgtccaagaggcccagaagatactcaacaacagcggactccccattacttcagccattgacctggaggatgcagccaagaaggctgtggccagtgtggccaagaagtgatgtctttgtcctgatccaatggagaaagaaagccatttttccataaaaagggatggttcatcattgtgaaagaaatggttatctcattggggaagaaaaggggagggggaaggcaagaatcactgaaaaatcttaaatctgtgttttctggaataagatatctagacagcctaaatctgattttagtctttatagcagtgttttgcagactttggggagtggtctatgtggccaaatattgtgtgtatagacagaatttgaaatcaagtcctgcttcatttacaagaattttggtgggcatctaatcctacataatgaaaaagaaaaacagaccatttaaaaactcagacaagattatatttaatatattaattactaaaaaggcacaagattacactgaacatattagctactaaaaaggcactgctaagacattcaagcaaatagctattacacactactgcagattttacaggtttctaattctaacatatgtttgaaaaatccgtgagtattccaaaatatatttaataatggaatatctgcattaatataccatccatgtgtttttaccatttgccttaatattgaatatactgtttacctcacactaaaaagaaaaccagaagccttatttgtgattttgggagtggaagcttccatttttgtgtcaaaaatgaatcctgattcttatggaaatctctgttattaagatatttcaagatgagacaacactgaagatcaaattgtgtttagtatcactatcttctctcctcgtttctctcttactcctcatcctcccagaatctaccagtttatggtagaaagatgggaaccttatttgaatgtgttttttttttccatgatgtccaattttgttgtgggaaaggatttggataaaatttttgtttaaattttggtagatttttatctatacaaatttaaataaaattatgttttgtaagctgtaa

SEQ ID NO: 70376 - DNA, 1507 bp, Homo sapiens
tcccgctgctcctcctccgcctccttcccctgcccgcgcccgccctactgccccgtgccgagtttcctgtttaagatggcgtcccccgtagcagcgcaggccgggaagcttctgcgagccctagcgctgcggccccgcttcctggcggccgggtcccaggcagttcaattaacctccagaagatggctgaacctgcaggaataccagagcaagaaactgatgtctgacaacggagtgagagttcaaagattctttgtagcagacactgcaaatgaagctctcgaggctgctaagagactaaatgcaaaagaaattgttttaaaagcccagatcttagctggaggaagaggaaaaggtgtcttcaatagtggtttgaaaggaggtgttcatttaacaaaagaccctaatgttgtgggacagctggctaaacagatgattgggtacaatctagcgacaaaacaaactccaaaagaaggtgtgaaagttaacaaggtgatggttgctgaagccttggatatttccagagaaacctacctggcaattctgatggaccggtcctgcaatggccccgtgctggtgggcagcccccaggggggcgtcgacattgaagaggtggctgcttcaaacccggagctcatttttaaggagcaaattgacatttttgaaggaataaaggacagccaagctcagcggatggccgaaaatctaggcttcgttgggcctttgaaaagccaggctgcagatcaaattacgaagctgtataatctcttcctgaaaattgatgctactcaggtggaagtgaatccctttggtgaaactccagaaggacaagttgtctgttttgatgccaagataaactttgatgacaacgcagaattccgacaaaaagacatatttgctatggacgacaaatcagagaatgagcccattgaaaatgaagctgccaaatatgatctaaaatacataggactagatgggaacattgcctgctttgtgaatggtgctgggctcgccatggctacttgtgatatcattttccttaatggtgggaagccagccaacttcttggatcttggaggtggtgtaaaggaagctcaagtatatcaagcattcaaattgctcacagctgatcctaaggttgaagccatccttgtcaatatatttggtggtatcgtcaactgtgccatcattgccaatgggatcaccaaagcctgccgggagctagaactcaaggtgcccctggtggtccggcttgaaggaaccaacgtccaagaggcccagaagatactcaacaacagcggactccccattacttcagccattgacctggaggatgcagccaagaaggctgtggccagtgtggccaagaagtgatgtctttgtcctgatccaatggagaaagaaagccatttttccataaaaagggatggttcatcattgtgaaagaaatggttatctcattggggaagaaaaggggaggggctcccgctgtctaagggtccgtcct

SEQ ID NO: 70377 - DNA, 806 bp, Homo sapiens
cggacgcgtgggtcgacccacgcgatcgcgcagtgttttgcagactttggggagtggtctatgtggccaaatattgtgtgtatagacagaatttgaaatcaagtcctgcttcatttacaagaattttggtgggcatctaatcctacataatgaaaaagaaaaacagaccatttaaaaactcagacaagattatatttaatatattaattactaaaaaggcacaagattacactgaacatattagctactaaaaaggcactgctaagacattcaagcaaatagctattacacactactgcagattttacaggtttctaattctaacatatgtttgaaaaatccgtgagtattccaaaatatatttaataatggaatatctgcattaatataccatccatgtgtttttaccatttgccttaatattgaatatactgtttacctcacactaaaaagaaaaccagaagccttatttgtgattttgggagtggaagcttccatttttgtgtcaaaaatgaatcctgattcttatggaaatctctgttattaagatatttcaagatgagacaacactgaagatcaaattgtgtttagtatcactatcttctctcctcgtttctctcttactcctcatcctcccagaatctaccagtttatggtagaaagatgggaaccttatttgaatgtgttttttttttccatgatgtccaattttgttgtgggaaaggatttggataaaatttttgtttaaattttggtagatttttatctatacaaatttaaataaaattatgttttgtaagctgtaa

SEQ ID NO: 70378 - DNA, 772 bp, Homo sapiens
tcccgctgctcctcctccgcctccttcccctgcccgcgcccgccctactgccccgtgccgagtttcctgtttaagatggcgtcccccgtagcagcgcaggccgggaagcttctgcgagccctagcgctgcggccccgcttcctggcggccgggtcccaggcagttcaattaacctccagaagatggctgaacctgcaggaataccagagcaagaaactgatgtctgacaacggagtgagagttcaaagattctttgtagcagacactgcaaatgaagctctcgaggctgctaagagactaaatgcaaaagaaattgttttaaaagcccagatcttagctggaggaagaggccctaatgttgtgggacagctggctaaacagatgattgggtacaatctagcgacaaaacaaactccaaaagaaggtgtgaaagttaacaaggtgatggttgctgaagccttggatatttccagagaaacctacctggcaattctgatggaccggtcctgcaatggccccgtgctggtgggcagcccccaggggggcgtcgacattgaagaggtggctgcttcaaacccggagctcatttttaaggagcaaattgacatttttgaaggaataaaggacagccaagctcagcggatggccgaaaatctaggcttcgttgggcctttgaaaagccagctgagtcaatacgactgatatctttctgaaatgagctctagtgaggatccttgtgactcaaagcagtgctgttgtcagataactgtca

SEQ ID NO: 70379 - DNA, 2512 bp, Homo sapiens
tttttttgagatggagtctcactgtgtcacccaggctggagtccaatggtgcattctcgtttcactgcaacctctgcctcctgcgttcaagctgttctcctgtctcagcctcctgagtacctgggattaaagggcaaaagcttgctgaccacaaagaacttgtctgtgctgattactgctagatcttggatgtcaaacacagtgaccacattatggatgcagtggaaaattgttaaatgaatgaacaaagtataggtctgccagtttccttggcagttcaattaacctccagaagatggctgaacctgcaggaataccagagcaagaaactgatgtctgacaacggagtgagagttcaaagattctttgtagcagacactgcaaatgaagctctcgaggctgctaagagactaaatgcaaaagaaattgttttaaaagcccagatcttagctggaggaagaggaaaaggtgtcttcaatagtggtttgaaaggaggtgttcatttaacaaaagaccctaatgttgtgggacagctggctaaacagatgattgggtacaatctagcgacaaaacaaactccaaaagaaggtgtgaaagttaacaaggtgatggttgctgaagccttggatatttccagagaaacctacctggcaattctgatggaccggtcctgcaatggccccgtgctggtgggcagcccccaggggggcgtcgacattgaagaggtggctgcttcaaacccggagctcatttttaaggagcaaattgacatttttgaaggaataaaggacagccaagctcagcggatggccgaaaatctaggcttcgttgggcctttgaaaagccaggctgcagatcaaattacgaagctgtataatctcttcctgaaaattgatgctactcaggtggaagtgaatccctttggtgaaactccagaaggacaagttgtctgttttgatgccaagataaactttgatgacaacgcagaattccgacaaaaagacatatttgctatggacgacaaatcagagaatgagcccattgaaaatgaagctgccaaatatgatctaaaatacataggactagatgggaacattgcctgctttgtgaatggtgctgggctcgccatggctacttgtgatatcattttccttaatggtgggaagccagccaacttcttggatcttggaggtggtgtaaaggaagctcaagtatatcaagcattcaaattgctcacagctgatcctaaggttgaagccatccttgtcaatatatttggtggtatcgtcaactgtgccatcattgccaatgggatcaccaaagcctgccgggagctagaactcaaggtgcccctggtggtccggcttgaaggaaccaacgtccaagaggcccagaagatactcaacaacagcggactccccattacttcagccattgacctggaggatgcagccaagaaggctgtggccagtgtggccaagaagtgatgtctttgtcctgatccaatggagaaagaaagccatttttccataaaaagggatggttcatcattgtgaaagaaatggttatctcattggggaagaaaaggggagggggaaggcaagaatcactgaaaaatcttaaatctgtgttttctggaataagatatctagacagcctaaatctgattttagtctttataaaaataatatcttgtgttctcatacttttctgtcactgtaagcctgcccagtaggcagtgttttgcagactttggggagtggtctatgtggccaaatattgtgtgtatagacagaatttgaaatcaagtcctgcttcatttacaagaattttggtgggcatctaatcctacataatgaaaaagaaaaacagaccatttaaaaactcagacaagattatatttaatatattaattactaaaaaggcacaagattacactgaacatattagctactaaaaaggcactgctaagacattcaagcaaatagctattacacactactgcagattttacaggtttctaattctaacatatgtttgaaaaatccgtgagtattccaaaatatatttaataatggaatatctgcattaatataccatccatgtgtttttaccatttgccttaatattgaatatactgtttacctcacactaaaaagaaaaccagaagccttatttgtgattttgggagtggaagcttccatttttgtgtcaaaaatgaatcctgattcttatggaaatctctgttattaagatatttcaagatgagacaacactgaagatcaaattgtgtttagtatcactatcttctctcctcgtttctctcttactcctcatcctcccagaatctaccagtttatggtagaaagatgggaaccttatttgaatgtgttttttttttccatgatgtccaattttgttgtgggaaaggatttggataaaatttttgtttaaattttggtagatttttatctatacaaatttaaataaaattatgttttgtaagctgtaa

SEQ ID NO: 70380 - DNA, 1997 bp, Homo sapiens
tcccgctgctcctcctccgcctccttcccctgcccgcgcccgccctactgccccgtgccgagtttcctgtttaagatggcgtcccccgtagcagcgcaggccgggaagcttctgcgagccctagcgctgcggccccgcttcctggcggccgggtcccaggcagttcaattaacctccagaagatggctgaacctgcaggaataccagagcaagaaactgatgtctgacaacggagtgagagttcaaagattctttgtagcagacactgcaaatgaagctctcgaggctgctaagagactaaatgcaaaagaaattgttttaaaagcccagatcttagctggaggaagaggaaaaggtgtcttcaatagtggtttgaaaggaggtgttcatttaacaaaagaccctaatgttgtgggacagctggctaaacagatgattgggtacaatctagcgacaaaacaaactccaaaagaaggtgtgaaagttaacaaggtgatggttgctgaagccttggatatttccagagaaacctacctggcaattctgatggaccggtcctgcaatggccccgtgctggtgggcagcccccaggggggcgtcgacattgaagaggtggctgcttcaaacccggagctcatttttaaggagcaaattgacatttttgaaggaataaaggacagccaagctcagcggatggccgaaaatctaggcttcgttgggcctttgaaaagccaggttgaagccatccttgtcaatatatttggtggtatcgtcaactgtgccatcattgccaatgggatcaccaaagcctgccgggagctagaactcaaggtgcccctggtggtccggcttgaaggaaccaacgtccaagaggcccagaagatactcaacaacagcggactccccattacttcagccattgacctggaggatgcagccaagaaggctgtggccagtgtggccaagaagtgatgtctttgtcctgatccaatggagaaagaaagccatttttccataaaaagggatggttcatcattgtgaaagaaatggttatctcattggggaagaaaaggggagggggaaggcaagaatcactgaaaaatcttaaatctgtgttttctggaataagatatctagacagcctaaatctgattttagtctttataaaaataatatcttgtgttctcatacttttctgtcactgtaagcctgcccagtaggcagtgttttgcagactttggggagtggtctatgtggccaaatattgtgtgtatagacagaatttgaaatcaagtcctgcttcatttacaagaattttggtgggcatctaatcctacataatgaaaaagaaaaacagaccatttaaaaactcagacaagattatatttaatatattaattactaaaaaggcacaagattacactgaacatattagctactaaaaaggcactgctaagacattcaagcaaatagctattacacactactgcagattttacaggtttctaattctaacatatgtttgaaaaatccgtgagtattccaaaatatatttaataatggaatatctgcattaatataccatccatgtgtttttaccatttgccttaatattgaatatactgtttacctcacactaaaaagaaaaccagaagccttatttgtgattttgggagtggaagcttccatttttgtgtcaaaaatgaatcctgattcttatggaaatctctgttattaagatatttcaagatgagacaacactgaagatcaaattgtgtttagtatcactatcttctctcctcgtttctctcttactcctcatcctcccagaatctaccagtttatggtagaaagatgggaaccttatttgaatgtgttttttttttccatgatgtccaattttgttgtgggaaaggatttggataaaatttttgtttaaattttggtagatttttatctatacaaatttaaataaaattatgttttgtaagctgtaa

SEQ ID NO: 70381 - DNA, 454 bp, Homo sapiens
ttaaaaaaaagaaaaaacatttcatattttaccctttctatgctctcccttccctgcttatacagcagtcaacattcctgcttctttaccttccattcattccataaccccatctcctaatgctttacgattgtgcctttatctgaagctattacaaaaattaacacagtcatactgtagtacaccaaacaagcagaatggggaaatttgattccacaaatactccaattttgtctatgactatgcctactgatggaaatttggactgcaagagagatgtaattatgagtttctccttggctttaaagtgcagaaaattggaaattggaaacagtaagcctcctaaaattttcacaagttgggcagggggtgagtatcttatatttatgtgtgcagttacattgctttaaaaagtttttccagcctgggcaatatatcaagacctcatctatac

SEQ ID NO: 70382 - DNA, 1035 bp, Homo sapiens
ccaacctttccatttcatggcaaatgataatatttgtaaggtatagaggtaaatggatgaagcttctcacttggaggtggccaatttgggtgcttaggccactatgagggcaggaaaaaattactatcttggccacaattacaaacttcttagactgcagctccattttggttggaaagcattggttaacaaactcaagaaataatgtgtgaacataattttacaagtatgaatacaaattgaagttcataggctttttgcaagatacatgttgaaatatgtggaaattttcttaagggactcttgaaaatatttcgtaatacatttaattagaaaaagctcaactgagaataagaagaattgaatttccatcctgattatttaagctgataagaacagatactacacttgatcttagccaaaaggccgagaagcgattccatcctgattatttattagctgtatgactatggatatgtcacttctcagcttccatatacataaaatgagaagattagctcaaataatctctatagtttcctataatgctaacattctatttttatcttatttcagaattttatttcattctattttagttcagaatttacatgaatattatttctttcaaaatgttcaccttctgaaatgaaatcacttttattgctccttttgtatttacaggcacataaatactaaaatattttgtacatatacttattttcatcatctttggtaagcactgaaatgaatatatttagttcagtattttcaatgctaattaaggaattggtttggtaccagttttcagaacagacttaaagaaccaaaagattataatttcaaagagactaaattatttatattctactctaaaaggatgcttagaacaagaataagtacagcatccaggggataatattgcatgaccattgggcagaagaaatgcatcaaatcatataaactgtactaaattgatatgctttttaaacattgcctaataaaaatttattgttgttattacccaaaaaaaaa

SEQ ID NO: 70383 - DNA, 467 bp, Homo sapiens
cattttggaattaaaactccatgagggcttgaactttttgttccctactacttgtaaaatgcctgatgtatagtagatattcaatttgctgaataataagtgatacttgtcaggccctgttccagtaactttacatgtcttacctcatgatctttgcacagttttgttgaggtaggaagtatttatatcctcattttaagatgagaacattgaggtgcaacatggttcaatgacttgcttgaggttactgagctagaacactgggagctggtgtataaacccatgctctctggatttgaacctagccagtcccatgccagaatttgtaccataaaccaatatgccatgtcatttctctcatgaatgaatgtatatcatccttgtaagctctacttttaatggctcagaaggaagattttctttgaaattgaaacttgtttaaaccactcttttatttaagtatgttt

SEQ ID NO: 70384 - DNA, 458 bp, Homo sapiens
tttttggaaatagaaaaaacatttaagagatagattgtatatttaattgtctataactgatacttcttggtcttcagtccactttcagaaagaatgttcatatgctgtgtgtgctctataattttgttactttatttttattttaataattcagaaggcagggccgggtgcagtttagttgctcacgcctgtaatcccagcactttgggaggctgaggtgggcagatcacttgaggccagaaattcaagaccagcctggccaacatggcaaaaccctgtctcaaataaaaatacaaaaattagctggacatggtggcgtgtgcctgtagtcccagctacttgggaggctgaggcaggagaatcacttgaacccaggaggcggaggttgcagtgagctgacatcacaccactgcacttcagtctgggtgacagagtgagattctgtcttaaaaaaaaaa

SEQ ID NO: 70385 - DNA, 193 bp, Homo sapiens
gctgccccaggtcagaattcttcattgttcctccatgggtttcaccatcagcctcagtaacctccctgcctcctttttctctcccctccagaacaaccagagtcacctacttgggtacagactgggttcggtccttcccttccagatcttccctagcacttccagtcaagtccagacaccttggcagggcctt

SEQ ID NO: 70386 - DNA, 818 bp, Homo sapiens
gcaattaacaaaaggacccagatggcttattgcctaattgggtgaacaaagcaagaatatggtgtttcttgcttccttaaccagctccatgatttattactttattgcagaagtggctgtcaactcagtccctggctggtatttacagacccttaatttaagtaaaacagatgcctccatttagttctagaaggaccttctcctttagtgtaaccaagtgttcaaattcccttcttctctatgaactcagcattcattttatccataatgatcaatttaaaagtagagaaacttgtcagttgagagatctgattcccaagagattggtttcacttgtctacctgaattttgtgattggattttgttgttcgttttttaagattgaattttgttaccacccccaccaagttcatcatcattattaactataccactggggagaacagagagaagtgtccggccagcagtctagagtcccacactcttcatgctgtattacaacagtaagagcagatatccttcctggagagtgcctgacctgtttcctctttggttttaatgccatagatcccactggaaaattcagaattccaactaacaaagacatggtggttgaaaagtcctcagtgacaataatgatggcaccactgcagcagaacttgacattttagaggtcatgttattgtgcttaatgtgagggggttctattctctactgaaaggctatgaaaaagccagttggacaccaagtgatctgtgaccagtcaccaaatttggacaaacaaaatgcaaacaagttgcatttttaaaaagcattca

SEQ ID NO: 70387 - DNA, 420 bp, Homo sapiens
tttggttccacaggaaggctgcctttattcagtttggttgttaatacctcaggcctacaaattcatctttccaccaattgcagatcctaaaggaaggtttaaaaaggtgaaggaaaaagcatgagcttcagttccttattgcaggcccctctcactgctagactctggtgggtatttaggagatgcatgggagaaacagaaaggaaaattcttgactccagtcagagctaaggtccctttgttttctgctctgagctgtctggagattaattaataagagaaaagaagacgaggatgatggcaacaatgatgggagccttagtctagggctttctctgaggctgctcattctggtgttttgtttggcaggggaagtggtttaaatatttaaattcattcaattattctcttgtcttccag

SEQ ID NO: 70388 - DNA, 441 bp, Homo sapiens
gttagggcatggaaggtcttatttaagatattatctaaggaaaaattacaatttaaatcttcatcagtttgcaacattctaccaaataaaccaaagaaagtatgttctaaatgagtgggccatgagatgaaaagttttggtgggagagtagatgtcatatggagcaaaatagtgtaaagagaagactccaataatcctgtattaagtcccatttttttatgattactagcctgtggcctcaagaaaatgtattcattgagctatgtgtaaaatgactataatagtacctaccttctaggattattgtgaacattagaaattattcatatgatgtgcttcacacaaaataaaaacacaatatgtggtgaggggaacagtagtggttgctgccggtggtgatggtggtagtagtagtagtagtagtagtagtgaagcattact

SEQ ID NO: 70389 - DNA, 658 bp, Homo sapiens
atgcagtgggacaagcaaccccgtgggccagagctcccctgcctcctgccccctcgtcccctgcctcctgccccctcgtcccctgcctcctgccccctcgtcacctgccttcaacttcgcagagtgaagggcctggcgcaaggacccattccatggggttatgtatgtgacatgttctccagcgagggtttaagggataactttttacttcagttgagatgtgccatccttactgaagaactgttacgttctgtatcttttgatctgaaaaaaccaaacagtaaatatagaagtatttgttgacaagaaataagggaaaatgtttttattgccaagagcctttccccctggttcactgaaatgtttgcttgtatacatcactcctggcttagtagagccaacaagacggcaggtcaaacagaagacaacatgaacgtctaacctcaggcaccagtggacacgtgtgggacccaggcagcttcttcaggattcgggtgtcaggaaaaggcgcccgaaatgctggtagaccaggtggctggggtggcatggatggggcttatggacctgggtctttcagaagtgacccatagctcactcctggaaggcgtgagtcaagcaggtggttctgcgcactaacgacgctcttccactgtttccc

SEQ ID NO: 70390 - DNA, 320 bp, Homo sapiens
gcgcacgtcagcacatgctcagcgcacagcacacactcggcacacggtcatcacacgtcagcttgtgcccagcgcacagtcagcacacactcagcacacggtcagcgcacatcagcacgtgctcagcgcacagtcagcacacagcacacactcggtcagcgcacgtcagcatgtgctcagcgcacagtcagcacacacggcacatacgtgcttagtgcacatcagcacatgctcagcacacacttggcacactcgtttagcacactacacatgctcagcacacggtcagtgcacgtcagcactgtgtgctcgccggggta

SEQ ID NO: 70391 - DNA, 2166 bp, Homo sapiens
gaagccccatcatatccatcccaaaccggtttcgagtaggttaaggttatagggacccttgtcagaacattgatacaaagggctcccaaacgccgggatcaagatatggatgctaacaggcgataaactcgagacagctacctgcattgccaaaagttcacatctcgtgtctagaacacaagatattcatattttcagacaggtaaccagtcggggagaggcacatttggagctgaatgcatttcgaaggaagcatgattgtgcactagtcatatctggggactctctggaggtttgtctaaagtactacgagcatgaatttgtggagctggcctgccagtgccctgccgtggtttgctgccgctgctcacccacccagaaggcccgcattgtgacactgctgcagcagcacacagggagacgcacctgcgccatcggtgatggaggaaatgatgtcagcatgattcaggcagcagactgtgggattgggattgagggaaaggagggtaaacaggcctcgctggcggccgacttctccatcacgcagttccggcacataggcaggctgctcatggtgcacgggcggaacagctacaagaggtcggcggcactcggccagttcgtcatgcacaggggccttatcatctccaccatgcaggctgtgttttcctcagtcttctacttcgcatccgtccctttgtatcagggcttcctcatggtggggtatgccaccatatacaccatgttcccagtgttctccttagtgctggaccaggacgtgaagccagagatggcgatgctctacccggagctgtacaaggacctcaccaagggaagatccttgtccttcaaaaccttcctcatctgggttttaataagtatttaccaaggcggcatcctcatgtatggggccctggtgctcttcgagtctgagttcgtccacgtggtggccatctccttcaccgcactgatcctgaccgagctgctgatggtggcgctgaccgtccgcacgtggcactggctgatggtggtggccgagttcctcagcttaggctgctacgtgtcctcactcgcttttctcaatgaatattttggtataggcagagtgtcttttggagctttcttagatgttgcctttatcaccaccgtgaccttcctgtggaaagtgtcggcgatcaccgtggtcagctgcctcccgctgtatgtcctcaagtacctgaggcgcaagctctctcctcccagctactgcaagctggcctcctaaggggctgtgcacccccagcgggctggccccagcaccttctgcccttcccagcaccttgtgcccttgccagtgaacgcagggtttgccattgctaccaagcaagcaccacaagaaagggagggtacgccaggcgagcccagggcacagatgctgagacagcctctccttctcagtgcagggacgtcacccctgccaggcaagcccagggcacagatgccaggatggcttctccctctcagtgcgaggcttcacccctgccaggcaagcccagggcatagatgctgagacagcctctccctctcagtgcagggacgtcacccctgccaggcaagcccagggcacagaggccgggacggcctctccctctcagtgtgaggcttcacccatgctaggcaagcccagggcacagatgccgggatggcccctccctctcagtgcgggaacgtcacccctgccaggcaagcccagggcacagatgctgcgatggcctcttcctcttaagtgtggggcctcacccctgcttttctttctttttttgtattgtcaaaattgtatttccatattgaagcagcttgagtttctactgaaaatgagcccgaattatttcactattactgtaaagggttcatcttactctggcattctgagaattagactgaaagtttaatttctgcagttccctcatattcagattctttctttgatgttataacacaaagtcattcctactcaaatgtaataaaattgaggctccacggaggcccgtgtccacatcagctgcagctcccactcagacagacggcctgccccacagcctgccctttgctgaagataccctcgctttatacttgcatttcgcttttcagtaaaaacagtcaagttactgagttctcacataaaga

SEQ ID NO: 70392 - DNA, 2293 bp, Homo sapiens
gaagccccatcatatccatcccaaaccggtttcgagtaggttaaggttatagggacccttgtcagaacattgatacaaagggctcccaaacgccgggatcaagatatggatgctaacaggcgataaactcgagacagctacctgcattgccaaaagttcacatctcgtgtctagaacacaagatattcatattttcagacaggtaaccagtcggggagaggcacatttggagctgaatgcatttcgaaggaagcatgattgtgcactagtcatatctggggactctctggaggtttgtctaaagtactacgagcatgaatttgtggagctggcctgccagtgccctgccgtggtttgctgccgctgctcacccacccagaaggcccgcattgtgacactgctgcagcagcacacagggagacgcacctgcgccatcggtgatggaggaaatgatgtcagcatgattcaggcagcagactgtgggattgggattgagggaaaggagggtaaacaggcctcgctggcggccgacttctccatcacgcagttccggcacataggcaggctgctcatggtgcacgggcggaacagctacaagaggtcggcggcactcggccagttcgtcatgcacaggggccttatcatctccaccatgcaggctgtgttttcctcagtcttctacttcgcatccgtccctttgtatcagggcttcctcatggtggggtatgccaccatatacaccatgttcccagtgttctccttagtgctggaccaggacgtgaagccagagatggcgatgctctacccggagctgtacaaggacctcaccaagagccaacaagacggcaggtcaaacagaagacaacatgaacgtctaacctcaggcaccagtggacacgtgtgggacccaggcagcttcttcaggattcgggtgtcaggaaaaggcgcccgaaatgctgggaagatccttgtccttcaaaaccttcctcatctgggttttaataagtatttaccaaggcggcatcctcatgtatggggccctggtgctcttcgagtctgagttcgtccacgtggtggccatctccttcaccgcactgatcctgaccgagctgctgatggtggcgctgaccgtccgcacgtggcactggctgatggtggtggccgagttcctcagcttaggctgctacgtgtcctcactcgcttttctcaatgaatattttggtataggcagagtgtcttttggagctttcttagatgttgcctttatcaccaccgtgaccttcctgtggaaagtgtcggcgatcaccgtggtcagctgcctcccgctgtatgtcctcaagtacctgaggcgcaagctctctcctcccagctactgcaagctggcctcctaaggggctgtgcacccccagcgggctggccccagcaccttctgcccttcccagcaccttgtgcccttgccagtgaacgcagggtttgccattgctaccaagcaagcaccacaagaaagggagggtacgccaggcgagcccagggcacagatgctgagacagcctctccttctcagtgcagggacgtcacccctgccaggcaagcccagggcacagatgccaggatggcttctccctctcagtgcgaggcttcacccctgccaggcaagcccagggcatagatgctgagacagcctctccctctcagtgcagggacgtcacccctgccaggcaagcccagggcacagaggccgggacggcctctccctctcagtgtgaggcttcacccatgctaggcaagcccagggcacagatgccgggatggcccctccctctcagtgcgggaacgtcacccctgccaggcaagcccagggcacagatgctgcgatggcctcttcctcttaagtgtggggcctcacccctgcttttctttctttttttgtattgtcaaaattgtatttccatattgaagcagcttgagtttctactgaaaatgagcccgaattatttcactattactgtaaagggttcatcttactctggcattctgagaattagactgaaagtttaatttctgcagttccctcatattcagattctttctttgatgttataacacaaagtcattcctactcaaatgtaataaaattgaggctccacggaggcccgtgtccacatcagctgcagctcccactcagacagacggcctgccccacagcctgccctttgctgaagataccctcgctttatacttgcatttcgcttttcagtaaaaacagtcaagttactgagttctcacataaaga

SEQ ID NO: 70393 - DNA, 2133 bp, Homo sapiens
gaagccccatcatatccatcccaaaccggtttcgagtaggttaaggttatagggacccttgtcagaacattgatacaaagggctcccaaacgccgggatcaagatatggatgctaacaggcgataaactcgagacagctacctgcattgccaaaagttcacatctcgtgtctagaacacaagatattcatattttcagacaggtaaccagtcggggagaggcacatttggagctgaatgcatttcgaaggaagcatgattgtgcactagtcatatctggggactctctggaggtttgtctaaagtactacgagcatgaatttgtggagctggcctgccagtgccctgccgtggtttgctgccgctgctcacccacccagaaggcccgcattgtgacactgctgcagcagcacacagggagacgcacctgcgccatcggtgatggaggaaatgatgtcagcatgattcaggcagcagactgtgggattgggattgagggaaaggagggtaaacaggcctcgctggcggccgacttctccatcacgcagttccggcacataggcaggctgctcatggtgcacgggcggaacagctacaagaggtcggcggcactcggccagttcgtcatgcacaggggccttatcatctccaccatgcaggctgtgttttcctcagtcttctacttcgcatccgtccctttgtatcagggcttcctcatggtggggtatgccaccatatacaccatgttcccagtgttctccttagtgctggaccaggacgtgaagccagagatggcgatgctctacccggagctgtacaaggacctcaccaagggaagatccttgtccttcaaaaccttcctcatctgggttttaataagtatttaccaaggcggcatcctcatgtatggggccctggtgctcttcgagtctgagttcgtccacgtggtggccatctccttcaccgcactgatcctgaccgagctgctgatggtggcgctgaccgtccgcacgtggcactggctgatggtggtggccgagttcctcagcttaggctgctacgtgtcctcactcgcttttctcaatgaatattttgatgttgcctttatcaccaccgtgaccttcctgtggaaagtgtcggcgatcaccgtggtcagctgcctcccgctgtatgtcctcaagtacctgaggcgcaagctctctcctcccagctactgcaagctggcctcctaaggggctgtgcacccccagcgggctggccccagcaccttctgcccttcccagcaccttgtgcccttgccagtgaacgcagggtttgccattgctaccaagcaagcaccacaagaaagggagggtacgccaggcgagcccagggcacagatgctgagacagcctctccttctcagtgcagggacgtcacccctgccaggcaagcccagggcacagatgccaggatggcttctccctctcagtgcgaggcttcacccctgccaggcaagcccagggcatagatgctgagacagcctctccctctcagtgcagggacgtcacccctgccaggcaagcccagggcacagaggccgggacggcctctccctctcagtgtgaggcttcacccatgctaggcaagcccagggcacagatgccgggatggcccctccctctcagtgcgggaacgtcacccctgccaggcaagcccagggcacagatgctgcgatggcctcttcctcttaagtgtggggcctcacccctgcttttctttctttttttgtattgtcaaaattgtatttccatattgaagcagcttgagtttctactgaaaatgagcccgaattatttcactattactgtaaagggttcatcttactctggcattctgagaattagactgaaagtttaatttctgcagttccctcatattcagattctttctttgatgttataacacaaagtcattcctactcaaatgtaataaaattgaggctccacggaggcccgtgtccacatcagctgcagctcccactcagacagacggcctgccccacagcctgccctttgctgaagataccctcgctttatacttgcatttcgcttttcagtaaaaacagtcaagttactgagttctcacataaaga

SEQ ID NO: 70394 - DNA, 1823 bp, Homo sapiens
atgcagtgggacaagcaaccccgtgggccagagctcccctgcctcctgccccctcgtcccctgcctcctgccccctcgtcccctgcctcctgccccctcgtcacctgccttcaacttcgcagagtgaagggcctggcgcaaggacccattccatggggttatgtatgtgacatgttctccagcgagggtttaagggataactttttacttcagttgagatgtgccatccttactgaagaactgttacgttctgtatcttttgatctgaaaaaaccaaacagtaaatatagaagtatttgttgacaagaaataagggaaaatgtttttattgccaagagcctttccccctggttcactgaaatgtttgcttgtatacatcactcctggcttagtagagccaacaagacggcaggtcaaacagaagacaacatgaacgtctaacctcaggcaccagtggacacgtgtgggacccaggcagcttcttcaggattcgggtgtcaggaaaaggcgcccgaaatgctgggaagatccttgtccttcaaaaccttcctcatctgggttttaataagtatttaccaaggcggcatcctcatgtatggggccctggtgctcttcgagtctgagttcgtccacgtggtggccatctccttcaccgcactgatcctgaccgagctgctgatggtggcgctgaccgtccgcacgtggcactggctgatggtggtggccgagttcctcagcttaggctgctacgtgtcctcactcgcttttctcaatgaatattttgatgttgcctttatcaccaccgtgaccttcctgtggaaagtgtcggcgatcaccgtggtcagctgcctcccgctgtatgtcctcaagtacctgaggcgcaagctctctcctcccagctactgcaagctggcctcctaaggggctgtgcacccccagcgggctggccccagcaccttctgcccttcccagcaccttgtgcccttgccagtgaacgcagggtttgccattgctaccaagcaagcaccacaagaaagggagggtacgccaggcgagcccagggcacagatgctgagacagcctctccttctcagtgcagggacgtcacccctgccaggcaagcccagggcacagatgccaggatggcttctccctctcagtgcgaggcttcacccctgccaggcaagcccagggcatagatgctgagacagcctctccctctcagtgcagggacgtcacccctgccaggcaagcccagggcacagaggccgggacggcctctccctctcagtgtgaggcttcacccatgctaggcaagcccagggcacagatgccgggatggcccctccctctcagtgcgggaacgtcacccctgccaggcaagcccagggcacagatgctgcgatggcctcttcctcttaagtgtggggcctcacccctgcttttctttctttttttgtattgtcaaaattgtatttccatattgaagcagcttgagtttctactgaaaatgagcccgaattatttcactattactgtaaagggttcatcttactctggcattctgagaattagactgaaagtttaatttctgcagttccctcatattcagattctttctttgatgttataacacaaagtcattcctactcaaatgtaataaaattgaggctccacggaggcccgtgtccacatcagctgcagctcccactcagacagacggcctgccccacagcctgccctttgctgaagataccctcgctttatacttgcatttcgcttttcagtaaaaacagtcaagttactgagttctcacataaaga

SEQ ID NO: 70395 - DNA, 1483 bp, Homo sapiens
ctgtctccacctccccggtagctgggattacaggtgtccaccaccacgcccggctaatgttttgttgtcttttttgtagagatgaggttttcctatgttggccaggatggtctcgaactcctgacttcaagtgatccgtctgccttggcctcccaaaagtgctgggattataggcatgagccactgcgcccggcctgcaatctataatgctttggttttgttttttccattaaaagaagaatgaattatgcccggtatgcaggtcaaacaattctgcagtcaagaaaacctgagatttggagctgggcccctgtaaatgcacagtgatgtttccgtggcaagcttagaccgtctggtggcctggccagggtctgtggctgtggccatgagggcccagggacttcttggtcagctcttacctttttctctgtttcctgccaacagatgttgcctttatcaccaccgtgaccttcctgtggaaagtgtcggcgatcaccgtggtcagctgcctcccgctgtatgtcctcaagtacctgaggcgcaagctctctcctcccagctactgcaagctggcctcctaaggggctgtgcacccccagcgggctggccccagcaccttctgcccttcccagcaccttgtgcccttgccagtgaacgcagggtttgccattgctaccaagcaagcaccacaagaaagggagggtacgccaggcgagcccagggcacagatgctgagacagcctctccttctcagtgcagggacgtcacccctgccaggcaagcccagggcacagatgccaggatggcttctccctctcagtgcgaggcttcacccctgccaggcaagcccagggcatagatgctgagacagcctctccctctcagtgcagggacgtcacccctgccaggcaagcccagggcacagaggccgggacggcctctccctctcagtgtgaggcttcacccatgctaggcaagcccagggcacagatgccgggatggcccctccctctcagtgcgggaacgtcacccctgccaggcaagcccagggcacagatgctgcgatggcctcttcctcttaagtgtggggcctcacccctgcttttctttctttttttgtattgtcaaaattgtatttccatattgaagcagcttgagtttctactgaaaatgagcccgaattatttcactattactgtaaagggttcatcttactctggcattctgagaattagactgaaagtttaatttctgcagttccctcatattcagattctttctttgatgttataacacaaagtcattcctactcaaatgtaataaaattgaggctccacggaggcccgtgtccacatcagctgcagctcccactcagacagacggcctgccccacagcctgccctttgctgaagataccctcgctttatacttgcatttcgcttttcagtaaaaacagtcaagttactgagttctcacataaaga

SEQ ID NO: 70396 - DNA, 546 bp, Homo sapiens
attgatgggcaaagtttgttccatctctaaaactagattgatttcatctccattcatggaagtttctgaaatagcttctgatggtaaaaatgaaaaacgtgatgatggataaggttttatttcatctcacttttcttgcttcgcaggtgatggaggaaatgatgtcagcatgattcaggcagcagactgtgggattgggattgagggaaaggtaggttcgcccttttatcaacacattagcacacagtcagcacacatcaacacgactcagcacatgctgggccactgtacactcagcacctacttggtcagtgcacgtcagcatgtgcttagcgtacgctcggtcagcaaacactcagcacatgcttggtcaacacacatcagcacgtgctcagcgcacagtcagcacacactcggtacacgctcggtcggcgcacgtcagcacatgctcagcgcacagcacacactcggcacacggtcatcacacgtcagcttgtgcccagcgcacagtcagcacacactcagcacacggtcagcgcacatcag

SEQ ID NO: 70397 - DNA, 1352 bp, Homo sapiens
ctgtctccacctccccggtagctgggattacaggtgtccaccaccacgcccggctaatgttttgttgtcttttttgtagagatgaggttttcctatgttggccaggatggtctcgaactcctgacttcaagtgatccgtctgccttggcctcccaaaagtgctgggattataggcatgagccactgcgcccggcctgcaatctataatgctttggttttgttttttccattaaaagaagaatgaattatgcccggtatgcaggtcaaacaattctgcagtcaagaaaacctgagatttggagctgggcccctgtaaatgcacagtgatgtttccgtggcaagcttagaccgtctggtggcctggccagggtctgtggctgtggccatgagggcccagggacttcttggtcagctcttacctttttctctgtttcctgccaacagatgttgcctttatcaccaccgtgaccttcctgtggaaagtgtcggcgatcaccgtggtcagctgcctcccgctgtatgtcctcaagtacctgaggcgcaagctctctcctcccagctactgcaagctggcctcctaaggggctgtgcacccccagcgggctggccccagcaccttctgcccttcccagcaccttgtgcccttgccagtgaacgcagggtttgccattgctaccaagcaagcaccacaagaaagggagggtacgccaggcgagcccagggcacagatgctgagacagcctctccttctcagtgcagggacgtcacccctgccaggcaagcccagggcacagaggccgggacggcctctccctctcagtgtgaggcttcacccatgctaggcaagcccagggcacagatgccgggatggcccctccctctcagtgcgggaacgtcacccctgccaggcaagcccagggcacagatgctgcgatggcctcttcctcttaagtgtggggcctcacccctgcttttctttctttttttgtattgtcaaaattgtatttccatattgaagcagcttgagtttctactgaaaatgagcccgaattatttcactattactgtaaagggttcatcttactctggcattctgagaattagactgaaagtttaatttctgcagttccctcatattcagattctttctttgatgttataacacaaagtcattcctactcaaatgtaataaaattgaggctccacggaggcccgtgtccacatcagctgcagctcccactcagacagacggcctgccccacagcctgccctttgctgaagataccctcgctttatacttgcatttcgcttttcagtaaaaacagtcaagttactgagttctcacataaaga

SEQ ID NO: 70398 - DNA, 2043 bp, Homo sapiens
tgcaaataatgccctgtttctctgtgcctgtaacttagacaacattttaatttgggattctttttctcccttaatggaggtaaccagtcggggagaggcacatttggagctgaatgcatttcgaaggaagcatgattgtgcactagtcatatctggggactctctggaggtttgtctaaagtactacgagcatgaatttgtggagctggcctgccagtgccctgccgtggtttgctgccgctgctcacccacccagaaggcccgcattgtgacactgctgcagcagcacacagggagacgcacctgcgccatcggtgatggaggaaatgatgtcagcatgattcaggcagcagactgtgggattgggattgagggaaaggagggtaaacaggcctcgctggcggccgacttctccatcacgcagttccggcacataggcaggctgctcatggtgcacgggcggaacagctacaagaggtcggcggcactcggccagttcgtcatgcacaggggccttatcatctccaccatgcaggctgtgttttcctcagtcttctacttcgcatccgtccctttgtatcagggcttcctcatggtggggtatgccaccatatacaccatgttcccagtgttctccttagtgctggaccaggacgtgaagccagagatggcgatgctctacccggagctgtacaaggacctcaccaagggaagatccttgtccttcaaaaccttcctcatctgggttttaataagtatttaccaaggcggcatcctcatgtatggggccctggtgctcttcgagtctgagttcgtccacgtggtggccatctccttcaccgcactgatcctgaccgagctgctgatggtggcgctgaccgtccgcacgtggcactggctgatggtggtggccgagttcctcagcttaggctgctacgtgtcctcactcgcttttctcaatgaatattttggtataggcagagtgtcttttggagctttcttagatgttgcctttatcaccaccgtgaccttcctgtggaaagtgtcggcgatcaccgtggtcagctgcctcccgctgtatgtcctcaagtacctgaggcgcaagctctctcctcccagctactgcaagctggcctcctaaggggctgtgcacccccagcgggctggccccagcaccttctgcccttcccagcaccttgtgcccttgccagtgaacgcagggtttgccattgctaccaagcaagcaccacaagaaagggagggtacgccaggcgagcccagggcacagatgctgagacagcctctccttctcagtgcagggacgtcacccctgccaggcaagcccagggcacagatgccaggatggcttctccctctcagtgcgaggcttcacccctgccaggcaagcccagggcatagatgctgagacagcctctccctctcagtgcagggacgtcacccctgccaggcaagcccagggcacagaggccgggacggcctctccctctcagtgtgaggcttcacccatgctaggcaagcccagggcacagatgccgggatggcccctccctctcagtgcgggaacgtcacccctgccaggcaagcccagggcacagatgctgcgatggcctcttcctcttaagtgtggggcctcacccctgcttttctttctttttttgtattgtcaaaattgtatttccatattgaagcagcttgagtttctactgaaaatgagcccgaattatttcactattactgtaaagggttcatcttactctggcattctgagaattagactgaaagtttaatttctgcagttccctcatattcagattctttctttgatgttataacacaaagtcattcctactcaaatgtaataaaattgaggctccacggaggcccgtgtccacatcagctgcagctcccactcagacagacggcctgccccacagcctgccctttgctgaagataccctcgctttatacttgcatttcgcttttcagtaaaaacagtcaagttactgagttctcacataaaga

SEQ ID NO: 70399 - DNA, 2035 bp, Homo sapiens
gaagccccatcatatccatcccaaaccggtttcgagtaggttaaggttatagggacccttgtcagaacattgatacaaagggctcccaaacgccgggatcaagatatggatgctaacaggcgataaactcgagacagctacctgcattgccaaaagttcacatctcgtgtctagaacacaagatattcatattttcagacaggtaaccagtcggggagaggcacatttggagctgaatgcatttcgaaggaagcatgattgtgcactagtcatatctggggactctctggaggtttgtctaaagtactacgagcatgaatttgtggagctggcctgccagtgccctgccgtggtttgctgccgctgctcacccacccagaaggcccgcattgtgacactgctgcagcagcacacagggagacgcacctgcgccatcggtgatggaggaaatgatgtcagcatgattcaggcagcagactgtgggattgggattgagggaaaggagggtaaacaggcctcgctggcggccgacttctccatcacgcagttccggcacataggcaggctgctcatggtgcacgggcggaacagctacaagaggtcggcggcactcggccagttcgtcatgcacaggggccttatcatctccaccatgcaggctgtgttttcctcagtcttctacttcgcatccgtccctttgtatcagggcttcctcatggtggggtatgccaccatatacaccatgttcccagtgttctccttagtgctggaccaggacgtgaagccagagatggcgatgctctacccggagctgtacaaggacctcaccaagggaagatccttgtccttcaaaaccttcctcatctgggttttaataagtatttaccaaggcggcatcctcatgtatggggccctggtgctcttcgagtctgagttcgtccacgtggtggccatctccttcaccgcactgatcctgaccgagctgctgatggtggcgctgaccgtccgcacgtggcactggctgatggtggtggccgagttcctcagcttaggctgctacgtgtcctcactcgcttttctcaatgaatattttggtataggcagagtgtcttttggagctttcttagatgttgcctttatcaccaccgtgaccttcctgtggaaagtgtcggcgatcaccgtggtcagctgcctcccgctgtatgtcctcaagtacctgaggcgcaagctctctcctcccagctactgcaagctggcctcctaaggggctgtgcacccccagcgggctggccccagcaccttctgcccttcccagcaccttgtgcccttgccagtgaacgcagggtttgccattgctaccaagcaagcaccacaagaaagggagggtacgccaggcgagcccagggcacagatgctgagacagcctctccttctcagtgcagggacgtcacccctgccaggcaagcccagggcacagaggccgggacggcctctccctctcagtgtgaggcttcacccatgctaggcaagcccagggcacagatgccgggatggcccctccctctcagtgcgggaacgtcacccctgccaggcaagcccagggcacagatgctgcgatggcctcttcctcttaagtgtggggcctcacccctgcttttctttctttttttgtattgtcaaaattgtatttccatattgaagcagcttgagtttctactgaaaatgagcccgaattatttcactattactgtaaagggttcatcttactctggcattctgagaattagactgaaagtttaatttctgcagttccctcatattcagattctttctttgatgttataacacaaagtcattcctactcaaatgtaataaaattgaggctccacggaggcccgtgtccacatcagctgcagctcccactcagacagacggcctgccccacagcctgccctttgctgaagataccctcgctttatacttgcatttcgcttttcagtaaaaacagtcaagttactgagttctcacataaaga

SEQ ID NO: 70400 - DNA, 2068 bp, Homo sapiens
gaagccccatcatatccatcccaaaccggtttcgagtaggttaaggttatagggacccttgtcagaacattgatacaaagggctcccaaacgccgggatcaagatatggatgctaacaggcgataaactcgagacagctacctgcattgccaaaagttcacatctcgtgtctagaacacaagatattcatattttcagacaggtaaccagtcggggagaggcacatttggagctgaatgcatttcgaaggaagcatgattgtgcactagtcatatctggggactctctggaggtttgtctaaagtactacgagcatgaatttgtggagctggcctgccagtgccctgccgtggtttgctgccgctgctcacccacccagaaggcccgcattgtgacactgctgcagcagcacacagggagacgcacctgcgccatcggtgatggaggaaatgatgtcagcatgattcaggcagcagactgtgggattgggattgagggaaaggagggtaaacaggcctcgctggcggccgacttctccatcacgcagttccggcacataggcaggctgctcatggtgcacgggcggaacagctacaagaggtcggcggcactcggccagttcgtcatgcacaggggccttatcatctccaccatgcaggtatgccaccatatacaccatgttcccagtgttctccttagtgctggaccaggacgtgaagccagagatggcgatgctctacccggagctgtacaaggacctcaccaagggaagatccttgtccttcaaaaccttcctcatctgggttttaataagtatttaccaaggcggcatcctcatgtatggggccctggtgctcttcgagtctgagttcgtccacgtggtggccatctccttcaccgcactgatcctgaccgagctgctgatggtggcgctgaccgtccgcacgtggcactggctgatggtggtggccgagttcctcagcttaggctgctacgtgtcctcactcgcttttctcaatgaatattttgatgttgcctttatcaccaccgtgaccttcctgtggaaagtgtcggcgatcaccgtggtcagctgcctcccgctgtatgtcctcaagtacctgaggcgcaagctctctcctcccagctactgcaagctggcctcctaaggggctgtgcacccccagcgggctggccccagcaccttctgcccttcccagcaccttgtgcccttgccagtgaacgcagggtttgccattgctaccaagcaagcaccacaagaaagggagggtacgccaggcgagcccagggcacagatgctgagacagcctctccttctcagtgcagggacgtcacccctgccaggcaagcccagggcacagatgccaggatggcttctccctctcagtgcgaggcttcacccctgccaggcaagcccagggcatagatgctgagacagcctctccctctcagtgcagggacgtcacccctgccaggcaagcccagggcacagaggccgggacggcctctccctctcagtgtgaggcttcacccatgctaggcaagcccagggcacagatgccgggatggcccctccctctcagtgcgggaacgtcacccctgccaggcaagcccagggcacagatgctgcgatggcctcttcctcttaagtgtggggcctcacccctgcttttctttctttttttgtattgtcaaaattgtatttccatattgaagcagcttgagtttctactgaaaatgagcccgaattatttcactattactgtaaagggttcatcttactctggcattctgagaattagactgaaagtttaatttctgcagttccctcatattcagattctttctttgatgttataacacaaagtcattcctactcaaatgtaataaaattgaggctccacggaggcccgtgtccacatcagctgcagctcccactcagacagacggcctgccccacagcctgccctttgctgaagataccctcgctttatacttgcatttcgcttttcagtaaaaacagtcaagttactgagttctcacataaaga

SEQ ID NO: 70401 - DNA, 769 bp, Homo sapiens
gaagccccatcatatccatcccaaaccggtttcgagtaggttaaggttatagggacccttgtcagaacattgatacaaagggctcccaaacgccgggatcaagatatggatgctaacaggcgataaactcgagacagctacctgcattgccaaaagttcacatctcgtgtctagaacacaagatattcatattttcagacaggtaaccagtcggggagaggcacatttggagctgaatgcatttcgaaggaagcatgattgtgcactagtcatatctggggactctctggaggtttgtctaaagtactacgagcatgaatttgtggagctggcctgccagtgccctgccgtggtttgctgccgctgctcacccacccagaaggcccgcattgtgacactgctgcagcagcacacagggagacgcacctgcgccatcggtgatggaggaaatgatgtcagcatgattcaggcagcagactgtgggattgggattgagggaaaggagggtaaacaggcctcgctggcggccgacttctccatcacgcagttccggcacataggcaggctgctcatggtgcacgggcggaacagctacaagaggtcggcggcactcggccagttcgtcatgcacaggggccttatcatctccaccatgcagctgtgtttttctcagtcttctacttcgcatacccgcccttgtatcacgggctctctcataggggtgggatgtcacaccatacaccccgtgtcccgagtgctcctcatgagc

SEQ ID NO: 70402 - DNA, 100 bp, Homo sapiens
taaatatacataaatttagatttgtcagtgacggggaaaaatgatgatgaaacacattttctgttctaggaagctgagtccatcaggttaaacagaggga

SEQ ID NO: 70403 - DNA, 650 bp, Homo sapiens
agaaggagccattaaaaaaaaaaaaaaggttggactcggtggctcatgcctgtaatcccagtgctttgggaggctgaggtgggagaatcatttgagaccaggagttcaagaccagcctgtgcaacatagtgaggccctgactctaaaaggagaaagcgaagaaatacacactcataaatggaaacttactatggaaagtgttctttgccttatcacatattaccatatatatatataacatatatatgttatatatgttatatatgtatgttatatataaatacatatatatgttatatgtacatatatgttatatatgtacgttttatatatatttatatatgtatgttatatataaatatatgttagaaaactagattataaactagattatatatatatatcttggacatctttccatgccagcttgtggagaattccttcattctttttgccagctacagagcatgccaatagaagtactggccacagtgtcctgcttgcccaatgatgactttcaggctttgcactaatgagagagaaaatctgtgaaatgggcttgctggtgcaaagtatacaatcttttctaaaaatttttatcattattattgtttttattttttactgaagagctggggagagaagaaagg

SEQ ID NO: 70404 - DNA, 443 bp, Homo sapiens
aattcggaacgaggaggcaggaggattgcttgagcccaggaggtgaaggctgcagtgaactatgatcgtgccattgcactccagcttgggtgacacagtgaaaccctgcctcttaaaaaaaccaaaagggttaaggagtttgcttgaggtaacatagctagtgtgtgtaatggggttctaacccaagtagtatgactgtagagctctgattgttaaaatggcacagagtagggggagaccacactgtttttttttgagacagagtttcattcttcttgcccaggaggtggaggttgcggtgagtgcagatttcgccactgcactccagcctgggcgacaaagagagactctgtcttaaaaaaaaacaagccaccaccaaaaaaagctacctttatcaatcaagtacagtcatgtgtcacttaatgatggggatatgttctgag

SEQ ID NO: 70405 - DNA, 321 bp, Homo sapiens
aaaagctttggaaagtaaaaacattgaaagtgaaggtattctcattacttttatattcatattaaataactctttccttctcttagaaaatgcagaaaagggctgggcacagtggcttaagcctgtaatcccagcactttgggaggctgaggtgggcggatctcttgagcctaggagtttgagaccagcctaggcaacacaacaaaatcccatctctgcaaaaaatacaataaaatctagctgggtgtggtggtgcatgcctgtggacccaactacttgggaggctgaggtgggaggatcgcttgagcctggaaagttgag

SEQ ID NO: 70406 - DNA, 351 bp, Homo sapiens
  misc_feature (349)..(349): n is a, c, g, or t
aacagccccttgaactgggtagtattgtccacattaactaaggaaaagactgagtgtcagaaaagttaagtaacttatccaagatcacaggttaaaatggtggagccatggctcaaaccctgaccgtcagacaccacacccaacaatgttgtttatcctactggtaagctcttagcttggccctttcacctcccactgctgatgtcttcaacagagagttttttggtgcccagtgttagaatggacccaacaagtgaacaagagctgctataggttctcaagcctgggaatgacgtaataaagtgctcagcacgaggcctaatatagagtgacttagctattgtgatantg

SEQ ID NO: 70407 - DNA, 1171 bp, Homo sapiens
taccatcctctgtcttttcagagggattctaggcatgttcaagaaaatatagtatactgttctgtgttttgttcttttcatgtaacaccatagatagcttggagaaaatgccattatcaatatgaattacttagaaacataaccccgctctcttccctgagctcatatggtacaaatcaagcacttatgtgttgaaagtgctgcatgttaaaactctggggtagcagttccctcatagtttccttgtatcctctccctcccgctggcaccattcccaggcagccaagcaggccggacttttccctggcaaccctctcgcctcaattctggcagccctgtgcgctagagtgaaccaagtgtgggctggggagtcaggtttaatttctagttttttaccatctatgtagcatgttgggcaagtcagtggtctctgggcctcagtttttatatccgtaaatggtaaaaatgttagaagtctacttcacacattttggtgagaatgtcatgaggtgtacaaaatagcagataggatattctataaatttaggtgcgctagagtgaaccaagtgtgggctggggagtcaggtttaatttctagttttttaccatctatgtagcatgttgggcaagtcagtggtctctgggcctcagtttttatatccgtaaatggtaaaaatgttagaagtctacttcacacattttggtgagaatgtcatgaggtgtacaaaatagcagataggatattctataaatttaggtgctatttctcaaatcaccttcacatctgagattttcttaactgttgtaacagtggtgacttccatttcatcactgttcatttcacagcctctcctgctctcataaaaccacagaaattgttctaagaatactgataacttatgaatatttttataggcagcagaaaaggttgatacttttaataaaatctgaccataccagctgggcgtggtggctcacacctgtaatcctagcagtttgggaggccagggcgaaggatcatgagattaggagttcaagaccagcctggccatgtactaaaagtacaaaaattagctggaaatcgctcgaacccagaaggtggagtttgcagtgagccgagatcgtgccactgcactccagcctgggcaacacagcaagactccgtctcaaa

SEQ ID NO: 70408 - DNA, 397 bp, Homo sapiens
ctgatctgacaggaggtgtaggtcaggcagtaatggaagtgatggggaacagctgtaaatacagataaagctttactcactcgcccacccactgctcatctcctgctgtactgcccagttcctaacagacagcagacagctactggtctgtggcccaagggttggggacccctgacatagactaaacaattaacaatgtttatattaaacaacttattccaagtttccattttagactctggaacatctgaaatggtgaatccacaggtagtaaatgggaaggagataacagaaaaattgaaggaagtggaagaagcactgggagggcactggtgaagggtctcgggaaagaattcaaatcttcagactggcacagtggctcacacctgcaatccca

SEQ ID NO: 70409 - DNA, 332 bp, Homo sapiens
ctgtctatcatgttctactgctgtctgtctcactagaataagaaccagtagacatctactgtacatattcagggttcattctcagacataaatcccaatgaaagcttatgcaggcactgttaaaaaaaaatcaaaggtaagataagatacaactaaaggtatgggcaacaaaaagtatagaagtttgagggggaaaaacagaatcagtaggtgagttgagagttagttgattgacaacctctttaaaatttgtgcctttttctttttggttctggttgagctagcccagtggttcttaaccttttgaaggttttggatccctttgagaatca

SEQ ID NO: 70410 - DNA, 821 bp, Homo sapiens
aaaaaaaagacccacccaagaacccaaacttagctaagaaaatatctgagcacatccagaattaaatatcacaagttgttggaccaacaccttcaccatatctacagatgagtccctgacactcacatggagctgattgactctgatttgactcataattctaacagtttctgttttcagcttagtctacggcaacaaaataatagtacaggacccactgcagattggtgtagtaatacaagagatgtgaccagagatgagaagaaagagacccaaaaaaatgatcagaagcagaaatgggagcccagaagtgcagctgaccagaagcatttcagtgtcagatcacacgcagcctcctctgtaatgagatcacagcacgtctcatcagttactggttttcattatggtgacactgaacactcatgaaaagttagcattgaaatatgttggtatctccaatttagaaaggtagtgatgatgggtacagtgtttttacggggaaaaaaagccaaaaaatgcattcatgtttgtctactcttaaaacccagctgtccaagaacgattccccaaggccctgtccatcatttctctttctatccttgaagcgcagtgtctgacacataggatgtgctcattgatgccagatgatgaaacttgaatggctggtttcctagggttctggataactctgttttaccgtggatcctggatgtattccaggatgactttaagaaggcgagaaggggtaagacccctgagagctcagtgtttattctgtttttacacatggttagatgagatgatacccaccctccttcaaa

SEQ ID NO: 70411 - DNA, 1386 bp, Homo sapiens
gacactcagacccctcgggacaagggtggctagagagaggtccaagctgccctgggtgggtggggagtcaaggcaggccaaagcttcagatttagacagtaaccaccaaatccgacctgggctgcaggtccaaggcctcttcctctttcctgcatgctccgctctgccgctggcccatcttccaatgcaacccctacaactaccaaagcaaaaaggcctgtcccaactccatcctcacggcccgatccccaaccctcaggggatgccgcttcgtgtctcctctttattttacaacgcggccctccttgcagccctcacgaaaagttctgcagtggggtcccccagcgtggggcccttctcgagacccttaaagagaaggctcgtttggtggaccatacccgggcagcgcgggcccgggcctggactggttctacttgtgttctgaggtccctgaccaccgccttgggtccagccctcgtccagggggcggcggtgcaggggagaccgcgcggcccggcctgaagcgcggccgccctcatcccttccccggggctggggtgggtcaccggccgacaaacacaggaggggccgcgtccccgtccccgacgcgctcacaaacgccgtggtcgcccgaaccttcggccccgcagcattcggctacaggaccgcgacactgcagggccccggctctgcgcgctgcgctccggccgctcggcgcgggaggacgtgcggtcgcgcctgcctcggtggccgcgcggggtgggagcatttcagagcgcacaagccatggtggccaaacagcggatccggatggctaacgagaagcacagcaaaaacatcacccagagggggaacgtagccaaaaccctgaggccgcaagaggagaaatatcctgtgggaccatggctgttggcactgtttgtttttgttgtctgtggctcagctatctttcagatcattcagagcataaggatgggcatgtgagaaagccagggatttgacaccacctccctcccactggaggcgggaggacaacggaagcggtcagccagtttctgcgggaaacaagcaggccacacggaatagaaaaaaacgctcccccacttgttccctgatcacttcatcgtggatgtcagaccaaattgccttctcacaggacatcttggtgcatccgcgttctcaagcggaaaggacattttgcttttctgttggcaggattagtagccacgcgggtcgtccgcagcagtgctgtctttttggtttttcccttggtttcactaatgcgtgcatgtggccctctgaacgatcactggtttactttctatggatacaatctctcctccattgagaattgattttacaaataaatgtcttcgttcaacctta

SEQ ID NO: 70412 - DNA, 1608 bp, Homo sapiens
gacactcagacccctcgggacaagggtggctagagagaggtccaagctgccctgggtgggtggggagtcaaggcaggccaaagcttcagatttagacagtaaccaccaaatccgacctgggctgcaggtccaaggcctcttcctctttcctgcatgctccgctctgccgctggcccatcttccaatgcaacccctacaactaccaaagcaaaaaggcctgtcccaactccatcctcacggcccgatccccaaccctcaggggatgccgcttcgtgtctcctctttattttacaacgcggccctccttgcagccctcacgaaaagttctgcagtggggtcccccagcgtggggcccttctcgagacccttaaagagaaggctcgtttggtggaccatacccgggcagcgcgggcccgggcctggactggttctacttgtgttctgaggtccctgaccaccgccttgggtccagccctcgtccagggggcggcggtgcaggggagaccgcgcggcccggcctgaagcgcggccgccctcatcccttccccggggctggggtgggtcaccggccgacaaacacaggaggggccgcgtccccgtccccgacgcgctcacaaacgccgtggtcgcccgaaccttcggccccgcagcattcggctacaggaccgcgacactgcagggccccggctctgcgcgctgcgctccggccgctcggcgcgggaggacgtgcggtcgcgcctgcctcggtggccgcgcggggtgggagcatttcagagcgcacaagccatggtggccaaacagcggatccggatggctaacgagaagcacagcaaaaacatcacccagagggggaacgtagccaaaaccctgaggccgcaagaggagaaatatcctgtgggaccatggctgttggcactgtttgtttttgttgtctgtggctcaggtcaaccacataaattggcctctcctggagactgccagaactttctcaaagttgtaacatccagagggagtcaccccacccccaagaccggcaactgagatgtttaaaggaactggctggccctgaaggaaagactgaggccattcatctgctctggagttcatcctcgggatctgagatgcacagcctgaagacatctcatcagccatcagctcccttaagctatctttcagatcattcagagcataaggatgggcatgtgagaaagccagggatttgacaccacctccctcccactggaggcgggaggacaacggaagcggtcagccagtttctgcgggaaacaagcaggccacacggaatagaaaaaaacgctcccccacttgttccctgatcacttcatcgtggatgtcagaccaaattgccttctcacaggacatcttggtgcatccgcgttctcaagcggaaaggacattttgcttttctgttggcaggattagtagccacgcgggtcgtccgcagcagtgctgtctttttggtttttcccttggtttcactaatgcgtgcatgtggccctctgaacgatcactggtttactttctatggatacaatctctcctccattgagaattgattttacaaataaatgtcttcgttcaacctta

SEQ ID NO: 70413 - DNA, 2783 bp, Homo sapiens
gacactcagacccctcgggacaagggtggctagagagaggtccaagctgccctgggtgggtggggagtcaaggcaggccaaagcttcagatttagacagtaaccaccaaatccgacctgggctgcaggtccaaggcctcttcctctttcctgcatgctccgctctgccgctggcccatcttccaatgcaacccctacaactaccaaagcaaaaaggcctgtcccaactccatcctcacggcccgatccccaaccctcaggggatgccgcttcgtgtctcctctttattttacaacgcggccctccttgcagccctcacgaaaagttctgcagtggggtcccccagcgtggggcccttctcgagacccttaaagagaaggctcgtttggtggaccatacccgggcagcgcgggcccgggcctggactggttctacttgtgttctgaggtccctgaccaccgccttgggtccagccctcgtccagggggcggcggtgcaggggagaccgcgcggcccggcctgaagcgcggccgccctcatcccttccccggggctggggtgggtcaccggccgacaaacacaggaggggccgcgtccccgtccccgacgcgctcacaaacgccgtggtcgcccgaaccttcggccccgcagcattcggctacaggaccgcgacactgcagggccccggctctgcgcgctgcgctccggccgctcggcgcgggaggacgtgcggtcgcgcctgcctcggtggccgcgcggggtgggagcatttcagagcgcacaagccatggtggccaaacagcggatccggatggctaacgagaagcacagcaaaaacatcacccagagggggaacgtagccaaaaccctgaggccgcaagaggagaaatatcctgtgggaccatggctgttggcactgtttgtttttgttgtctgtggctcaggtcaaccacataaattggcctctcctggagactgccagaactttctcaaagttgtaacatccagagggagtcaccccacccccaagaccggcaactgagatgtttaaaggaactggctggccctgaaggaaagactgaggccattcatctgctctggagttcatcctcgggatctgagatgcacagcctgaagacatctcatcagccatcagctcccttaaggtgacctgtagcctcctttgtgccctgggggcatttgggattgtgtagaggctctctctcagaagcatctttctgttattttaatgcggatagaaagctttacattctttgctaataacatctgggttttaatagcgcctccttgccctgcctgtctccggcatctctcttttttccctcttctccatctctagagaagccaccagaaaatggcatcttgcttttgactttctttgtgctgattcttttagagaacttagtgatccactttgcaatgtctcgtctcctaacatttcagcttgtttctcagagggcctgtactttgctttctaccagctctttcatcattttcattttctttaatgaaaaataagcaaaactgtatgatttctaggttgtcttcttctcctaaaggatattcttcttccggcctctcttaatctctcttctcagcaactcccttgatctcttttatcatcaatttattgtcaataaaagtggctttaggaagcctcctgttacctggcagggttccagctttctgacactttcctatgggacccacttgttatgtcatccctgtgtccttctggcactccctcttagctggggagggtcagtccccagggtgagagtcggttgggatggcccattatcaggcctttaggagtttatagtcttgtacttccccttcgaagactgagctttagagacatttggatctaaaggcagccatttgatgctgactctttgggtttgcaaagtagtcatttgaggtttttaaaatgtaatttcctctgtgctctttgcaatcgttcacttttcagtaattcaataatatttacagaggacctactttgtgccatacctggtcgctgttatcctggagcttatagtctaatggcaaagaaagatgagttaatcaagtaatcacaccaaaacactttcaattcagccatgaaactgtacaatttcagccatgaaacaatgtaaaggagaggcacatggggctatgaaatcatacaatgcaaaggactggtgtactctcaggtaagtggttctcaaagtgtggtccctggaccggcatctcaacatctcctgtgaacttgttagaaacacagattctccatcccttaactccagggtttggggggaaggtgtccagcatttgtgttttaacctgtccccaagagactgtgatgcatgctcaagtctgagaacctctgctccaggtgatcaaagaaggcttctctgaagacattaaattttggttgatgaaggaaactagggaatagggtggggtagaagtatttcagacagaaagaatggcatgtgtaaaagccctgtggtctcactcctgtaaatcccagcactttgggaggccgaggcgggtggatcgtgagatcaagagattgacaccatcctggccaacatagtgaaaccccgtctctattaaaaatacaaaaaaaattagctgggcatggtggtgcgctcctgtagtcccagctactcaggaggctaaggctggagaatcgcttgaacccggaagacagaggttgcagtaagccgagatcgtgccactgctctctaggctggtgacagagtgagactctgtctc

SEQ ID NO: 70414 - DNA, 1597 bp, Homo sapiens
gacactcagacccctcgggacaagggtggctagagagaggtccaagctgccctgggtgggtggggagtcaaggcaggccaaagcttcagatttagacagtaaccaccaaatccgacctgggctgcaggtccaaggcctcttcctctttcctgcatgctccgctctgccgctggcccatcttccaatgcaacccctacaactaccaaagcaaaaaggcctgtcccaactccatcctcacggcccgatccccaaccctcaggggatgccgcttcgtgtctcctctttattttacaacgcggccctccttgcagccctcacgaaaagttctgcagtggggtcccccagcgtggggcccttctcgagacccttaaagagaaggctcgtttggtggaccatacccgggcagcgcgggcccgggcctggactggttctacttgtgttctgaggtccctgaccaccgccttgggtccagccctcgtccagggggcggcggtgcaggggagaccgcgcggcccggcctgaagcgcggccgccctcatcccttccccggggctggggtgggtcaccggccgacaaacacaggaggggccgcgtccccgtccccgacgcgctcacaaacgccgtggtcgcccgaaccttcggccccgcagcattcggctacaggaccgcgacactgcagggccccggctctgcgcgctgcgctccggccgctcggcgcgggaggacgtgcggtcgcgcctgcctcggtggccgcgcggggtgggagcatttcagagcgcacaagccatggtggccaaacagcggatccggatggctaacgagaagcacagcaaaaacatcacccagagggggaacgtagccaaaaccctgaggccgcaagaggagaaatatcctgtgggaccatggctgttggcactgtttgtttttgttgtctgtggctcagtttctgttttcagcttagtctacggcaacaaaataatagtacaggacccactgcagattggtgtagtaatacaagagatgtgaccagagatgagaagaaagagacccaaaaaaatgatcagaagcagaaatgggagcccagaagtgcagctgaccagaagcatttcagtgtcagatcacacgcagcctcctctgtaatgagatcacagcacgtctcatcagttactggttttcattatggtgacactgaacactcatgaaaagttagcattgaaatatgttggtatctccaatttagaaaggtagtgatgatgggtacagtgtttttacggggaaaaaaagccaaaaaatgcattcatgtttgtctactcttaaaacccagctgtccaagaacgattccccaaggccctgtccatcatttctctttctatccttgaagcgcagtgtctgacacataggatgtgctcattgatgccagatgatgaaacttgaatggctggtttcctagggttctggataactctgttttaccgtggatcctggatgtattccaggatgactttaagaaggcgagaaggggtaagacccctgagagctcagtgtttattctgtttttacacatggttagatgagatgatacccaccctccttcaaa

SEQ ID NO: 70415 - DNA, 828 bp, Homo sapiens
gaaaaggcagactcactgacctgtttaatgagtgcagtttctgcacgaaagcccatatccctctcccaggcagccccagaactttgctggggaagggggccaaatctcttctcagtgcctgagggatttctggccttaactgctggtggaattagcaggagttatctataaatccctgaggcatccatcagccgactgagcgaggctgcctttttaaagaagttcactgacctcttgttaacttaactccttgttaggaaatatctaatcagctgtgagctaacacgtcagggcccaggggtctgcagaagccgggctcactgtgggctgggtttccagctgtgtgcagtctggtgtctgagctgtggtgttttcctcttttcagctatctttcagatcattcagagcataaggatgggcatgtgagaaagccagggatttgacaccacctccctcccactggaggcgggaggacaacggaagcggtcagccagtttctgcgggaaacaagcaggccacacggaatagaaaaaaacgctcccccacttgttccctgatcacttcatcgtggatgtcagaccaaattgccttctcacaggacatcttggtgcatccgcgttctcaagcggaaaggacattttgcttttctgttggcaggattagtagccacgcgggtcgtccgcagcagtgctgtctttttggtttttcccttggtttcactaatgcgtgcatgtggccctctgaacgatcactggtttactttctatggatacaatctctcctccattgagaattgattttacaaataaatgtcttcgttcaacctta

SEQ ID NO: 70416 - DNA, 1006 bp, Homo sapiens
gcctctctctggagtcggctagccggggctcggggagcggggtgcgcagggctcggggccacgccttgccacctgcagcgcccgggtgggccgcgggggcctcggcgggacgcgctcggccctgtcgcaggagctaacgcagggggaatccttgcaggtgggagcatttcagagcgcacaagccatggtggccaaacagcggatccggatggctaacgagaagcacagcaaaaacatcacccagagggggaacgtagccaaaaccctgaggccgcaagaggagaaatatcctgtgggaccatggctgttggcactgtttgtttttgttgtctgtggctcaggtcaaccacataaattggcctctcctggagactgccagaactttctcaaagttgtaacatccagagggagtcaccccacccccaagaccggcaactgagatgtttaaaggaactggctggccctgaaggaaagactgaggccattcatctgctctggagttcatcctcgggatctgagatgcacagcctgaagacatctcatcagccatcagctcccttaagctatctttcagatcattcagagcataaggatgggcatgtgagaaagccagggatttgacaccacctccctcccactggaggcgggaggacaacggaagcggtcagccagtttctgcgggaaacaagcaggccacacggaatagaaaaaaacgctcccccacttgttccctgatcacttcatcgtggatgtcagaccaaattgccttctcacaggacatcttggtgcatccgcgttctcaagcggaaaggacattttgcttttctgttggcaggattagtagccacgcgggtcgtccgcagcagtgctgtctttttggtttttcccttggtttcactaatgcgtgcatgtggccctctgaacgatcactggtttactttctatggatacaatctctcctccattgagaattgattttacaaataaatgtcttcgttcaacctta

SEQ ID NO: 70417 - DNA, 1013 bp, Homo sapiens
gcctctctctggagtcggctagccggggctcggggagcggggtgcgcagggctcggggccacgccttgccacctgcagcgcccgggtgggccgcgggggcctcggcgggacgcgctcggccctgtcgcaggagctaacgcagggggaatccttgcaggtgggagcatttcagagcgcacaagccatggtggccaaacagcggatccggatggctaacgagaagcacagcaaaaacatcacccagagggggaacgtagccaaaaccctgaggccgcaagaggagaaatatcctgtgggaccatggctgttggcactgtttgtttttgttgtctgtggctcagctatctttcagatcattcagagcataaggatgggcatgtgagaaagccagggatttgacaccacctccctcccactggaggcgggaggacaacggaagcggtcagccagtttctgcgggaaacaagcaggccacacggaatagaaaaaaacgctcccccacttgttccctgatcacttcatcgtggatgtcagaccaaattgccttctcacaggacatcttggtgcatccgcgttctcaagcggaaaggacattttgcttttctgttggcaggattagtagccacgcgggtcgtccgcagcagtgctgtctttttggtttttcccttggtttcactaatgcgtgcatgtggccctctgaacgatcactggtttactttctatggatacaatctctcctccattgagaattgattttacaaataaatgtcttcgttcaaccttaaaaaaaaaagaaggaaaaaggaaagggagaaaaaggaagagaaaaaaaggggggggccgctaaaaaaacacccgcgaggggacgcattagagcgccccaccatgtgtgagacaagggcgcccaaagggggcgtcacaagagacaagcggcgcgtaaacacgctggagaggaaacacgccggggacaaggggagagacacccctggggggcacagtggacacacccggaa

SEQ ID NO: 70418 - DNA, 1687 bp, Homo sapiens
gacactcagacccctcgggacaagggtggctagagagaggtccaagctgccctgggtgggtggggagtcaaggcaggccaaagcttcagatttagacagtaaccaccaaatccgacctgggctgcaggtccaaggcctcttcctctttcctgcatgctccgctctgccgctggcccatcttccaatgcaacccctacaactaccaaagcaaaaaggcctgtcccaactccatcctcacggcccgatccccaaccctcaggggatgccgcttcgtgtctcctctttattttacaacgcggccctccttgcagccctcacgaaaagttctgcagtggggtcccccagcgtggggcccttctcgagacccttaaagagaaggctcgtttggtggaccatacccgggcagcgcgggcccgggcctggactggttctacttgtgttctgaggtccctgaccaccgccttgggtccagccctcgtccagggggcggcggtgcaggggagaccgcgcggcccggcctgaagcgcggccgccctcatcccttccccggggctggggtgggtcaccggccgacaaacacaggaggggccgcgtccccgtccccgacgcgctcacaaacgccgtggtcgcccgaaccttcggccccgcagcattcggctacaggaccgcgacactgcagggccccggctctgcgcgctgcgctccggccgctcggcgcgggaggacgtgcggtcgcgcctgcctcggtggccgcgcggggtgggagcatttcagagcgcacaagccatggtggccaaacagcggatccggatggctaacgagaagcacagcaaaaacatcacccagagggggaacgtagccaaaaccctgaggccgcaagaggagaaatatcctgtgggaccatggctgttggcactgtttgtttttgttgtctgtggctcagtttctgttttcagcttagtctacggcaacaaaataatagtacaggacccactgcagattggtgtagtaatacaagagatgtgaccagagatgagaagaaagagacccaaaaaaatgatcagaagcagaaatgggagcccagaagtgcagctgaccagaagcatttcagtgtcagatcacacgcagcctcctctgtaatgagatcacagcacgtctcatcagttactggttttcattatggtgacactgaacactcatgaaaagttagcattgaaatatgttggtatctccaatttagaaagctatctttcagatcattcagagcataaggatgggcatgtgagaaagccagggatttgacaccacctccctcccactggaggcgggaggacaacggaagcggtcagccagtttctgcgggaaacaagcaggccacacggaatagaaaaaaacgctcccccacttgttccctgatcacttcatcgtggatgtcagaccaaattgccttctcacaggacatcttggtgcatccgcgttctcaagcggaaaggacattttgcttttctgttggcaggattagtagccacgcgggtcgtccgcagcagtgctgtctttttggtttttcccttggtttcactaatgcgtgcatgtggccctctgaacgatcactggtttactttctatggatacaatctctcctccattgagaattgattttacaaataaatgtcttcgttcaacctta

SEQ ID NO: 70419 - DNA, 1615 bp, Homo sapiens
gacactcagacccctcgggacaagggtggctagagagaggtccaagctgccctgggtgggtggggagtcaaggcaggccaaagcttcagatttagacagtaaccaccaaatccgacctgggctgcaggtccaaggcctcttcctctttcctgcatgctccgctctgccgctggcccatcttccaatgcaacccctacaactaccaaagcaaaaaggcctgtcccaactccatcctcacggcccgatccccaaccctcaggggatgccgcttcgtgtctcctctttattttacaacgcggccctccttgcagccctcacgaaaagttctgcagtggggtcccccagcgtggggcccttctcgagacccttaaagagaaggctcgtttggtggaccatacccgggcagcgcgggcccgggcctggactggttctacttgtgttctgaggtccctgaccaccgccttgggtccagccctcgtccagggggcggcggtgcaggggagaccgcgcggcccggcctgaagcgcggccgccctcatcccttccccggggctggggtgggtcaccggccgacaaacacaggaggggccgcgtccccgtccccgacgcgctcacaaacgccgtggtcgcccgaaccttcggccccgcagcattcggctacaggaccgcgacactgcagggccccggctctgcgcgctgcgctccggccgctcggcgcgggaggacgtgcggtcgcgcctgcctcggtggccgcgcggggtgggagcatttcagagcgcacaagccatggtggccaaacagcggatccggatggctaacgagaagcacagcaaaaacatcacccagagggggaacgtagccaaaaccctgaggccgcaagaggagaaatatcctgtgggaccatggctgttggcactgtttgtttttgttgtctgtggctcagctatctttcagatcattcagagcataaggatgggcatgtgagaaagccagggatttgacaccacctccctcccactggaggcgggaggacaacggaagcggtcagccagtttctgcgggaaacaagcaggccacacggaatagaaaaaaacgctcccccacttgttccctgatcacttcatcgtggatgtcagaccaaattgccttctcacaggacatcttggtgcatccgcgttctcaagcggaaaggacattttgcttttctgttggcaggattagtagccacgcgggtcgtccgcagcagtgctgtctttttggtttttcccttggtttcactaatgcgtgcatgtggccctctgaacgatcactggtttactttctatggatacaatctctcctccattgagaattgattttacaaataaatgtcttcgttcaaccttaaaaaaaaaagaaggaaaaaggaaagggagaaaaaggaagagaaaaaaaggggggggccgctaaaaaaacacccgcgaggggacgcattagagcgccccaccatgtgtgagacaagggcgcccaaagggggcgtcacaagagacaagcggcgcgtaaacacgctggagaggaaacacgccggggacaaggggagagacacccctggggggcacagtggacacacccggaa

SEQ ID NO: 70420 - DNA, 276 bp, Homo sapiens
ctcgaggcccaagaattcggcacgaggggccgcaggaagagggggtgctggtttgagggccaccactgcagttctgctaggtctgcttcctgcccaggaaggtgcctgcacatgagaggagagaaatacacgtctgataagacttcatgaaataataattatagcaaagaacagtttggtggtcttttctcttccactgatttttctgtaatgacattatacctttattacctctttattttattacctctataataaaatgatacctttcatgta

SEQ ID NO: 70421 - DNA, 5078 bp, Homo sapiens
agcaggctggtactggtcggaagtcgtttggatgcgcccgcgcgccccgggagcctacccagcacgcgctccgcgcccactggttccctccagccgccgccgtccagccgagtccccactccggagtcgccgctgccgcggggacatggtcctctgcgttcaggggtaagcgcggctctctgcccccttcccggccaccacgaggggcgcacgggagaacaggggcttcgtgctagctgccgggcattgggagggcttgacgggccagaggtgactgagcgcagacggacctcaggagcaaggctctgtgtggggctgtgacactcccactccccgcccccacacacttacctcaattcccactgtggattgggaaaccgggggctggccggctaaaggaggaactcacagggtgggctcagcctgggttctcattggagcagatggatgctaacggcacggcgtcccccaagatgtggccaacaatcccagatattcttctgggcccagagcactctacgctagcctgcctgctgccctgcctgctagtaaccttggaccagcccctggccccctctgtcctggtgtcccctctcctgccccaggctagcaagtaggctcttcttgggaagccagccgcagatccttgcctttcctcaggctggccacctgatggtctgcaactctcgggaggccctgggtttggcctggtcctgcttggggtacccccacaatcgtctcacaaccctgtctcagcccagtctgggatcccaatgtgagaaggaccttggctcctgcctctcatcttcaaatttcccagacttgaggtaagggacagtggagaggggatgctgataagacagagtcttgacctgagctgagcattcctggccatccactctgtcctgaacctcagcaaccccttcaaccaaagggtctgatgctggccatggtgatgtgacaggagctcaggaagctccaaggagagaggaagaaggtataaatgggtgttctgcactcagggaggactgggtggctgtgcttatcgcaactggcctggtgccaagtgagggagggtggaaggtgaggccaaggaagaggacatggaggtgctgggaagactacttctcccttgctgtctccagcaagttccttcctcctgtctgcattctgggactcctgaatacctgccccaccactgccttccaccccaggagcctccccctgcattccggggtcccatagcctctttcactttttaccctaggtgagcacccccttgtaagctcagggctactgttgggtgtcagggaacaaagttttagactgctgcgctccaaagcgggcacacacatgtacctagaacacaccagccactgtccccaccatgatgatgacacagccatggacacacccctgcccaggtacacactcaccaggagcttgtggtgatcaacacagctattcatacacccagctaccacatcagccccaaaggtgcccacacctacatgtgggatctgaggaccggctaagctatctggacgtggccacccacagaggttccagcctgactggctagccaccaaccatgctcctgggaaggtagctctgggccccagcaagcaggtcatctcaaaatttggcctccagctctccaagagggatttccaagatcccacagtacagccagggtaggtgtggaaaagtttttgtcaggctgtggtgtgccagagttgtgtggccctttctcactgtgagtggtcatagggccatgatttgttagaacctagagggtcacctataacctacacaggagtcaggtctggctcctgccaccagctcctgcctgcgccttcctgcctcacaagcaatactggcgctgtttgcccatgctgtcctctctacctggggtcccttcccccagctccttcctttggcctggaagacacagctcaggagcaagcagaccctgactcccccgtgacacctgcagttttatgactttgcattataattactcttagtgtcatcttccccagccagtctggttctccttgagggcaaggccatggtttcattatggcggtgtcctgaggcccagccagggactagacccagaactaaggcttggagatgtattttgcaaggagtgagggaggagcagctgtcttcctggggaagtagagccagtccctgctgccctcccaaggaggaagccctagtatcaccctgctgggtgggcttcccctaggagaaagctgctactcagattttggtcggctcagttcccccaaccccagccatccaagaatatggtgttactgaacctctcagtgcatgggttggtgggaccctttattgcggaaaagggaaactgaagcccagtgaagagcaagctttgtacaagatcgtagagcctggtagggctggcttgccagggtgggaactggagtgtggattaggtccctgcccttggtgggagctcatactgacaggaggtgagacttgccagtgcctttagaggccactgtccaccccagaccctccactgggagaagcagaggccaggataggctgacttgtatgggtaggggattatttcagtctctaagtcctggccagtgtggacctaggtccctctgagagacactcctatccatggggaggtagcgtgtgacctcaggcagcctaccataatcctggggcttctctggaggaccccacacagatctatcataggataaatctacttgtctgtcgtagatctatctcaactaggaccattcatcagtgggccatttaatcagcccacttcagccaggagggcacaaacatgaagctactttgcactgaatcctatcagtgtggtgagaacattagacatgcctatagggaatgatctgtgtttttggttgatataaaatagagagcaattaattactgtttagtaaatgcagggcagtggaaaagaatctttcaaaagaggatccccacatggaaacaatcaaggtggcttttgtgatgacaagtggggaacgagatactggactaactgagcccatggctgggtagaggggaagctgaggctcatagtgagatgggccagccagaggtcatgaaactagtctggggcataggggggtctctggagatgggggaagcatgggtcctccactcactgctcatccactgccttctagacctcgtcctttgctggctgtggagcggactgggcagcggcccctgtgggccccgtccctggaactgcccaagccagtcatgcagcccttgcctgctggggccttcctcgaggaggtggcagagggtaccccagcccagacagagagtgagccaaaggtgctggacccagaggaggatctgctgtgcatagccaagaccttctcctaccttcgggaatctggctggtattggggttccattacggccagcgaggcccgacaacacctgcagaagatgccagaaggcacgttcttagtacgtgacagcacgcaccccagctacctgttcacgctgtcagtgaaaaccactcgtggccccaccaatgtacgcattgagtatgccgactccagcttccgtctggactccaactgcttgtccaggccacgcatcctggcctttccggatgtggtcagccttgtgcagcactatgtggcctcctgcactgctgatacccgaagcgacagccccgatcctgctcccaccccggccctgcctatgcctaaggaggatgcgcctagtgacccagcactgcctgctcctccaccagccactgctgtacacctaaaactggtgcagccctttgtacgcagaagcagtgcccgcagcctgcaacacctgtgccgccttgtcatcaaccgtctggtggccgacgtggactgcctgccactgccccggcgcatggccgactacctccgacagtaccccttccagctctgactgtacggggcaatctgcccaccctcacccagtcgcaccctggaggggacatcagccccagctggacttgggcccccactgtccctcctccaggcatcctggtgcctgcatacctctggcagctggcccaggaagagccagcaagagcaaggcatgggagaggggaggtgtcacacaacttggaggtaaatgcccccaggccgcatgtggcttcattatactgagccatgtgtcagaggatggggagacaggcaggaccttgtctcacctgtgggctgggcccagacctccactcgcttgcctgccctggccacctgaactgtatgggcactctcagccctggtttttcaatccccagggtcgggtaggacccctactggcagccagcctctgtttctgggaggatgacatgcagaggaactgagatcgacagtgactagtgaccccttgttgaggggtaagccaggctaggggactgcacaattatacactatttatttatttattctccttggggttggtgtcaggggcgagccaaccccacctctatgccctgagccctggtagtccagagaccccaactctgccctggcttctctggttcttccctgtggaaagcccatcctgagacatcttgctggaaccaaggcaatcctggatgtcctggtactgacccacccgtctgtgaatgtgtccactctcttctgcccccagccatatttggggaggatggacaactacaataggtaagaaaatgcagccggagcctcagtccccagcagagcctgtgtctcaccccctcacaggacagagctgtatctgcatagagctggtctcactgtggcgcaggccccggggggagtgcctgtgctgtcaggaagagggggtgctggtttgagggccaccactgcagttctgctaggtctgcttcctgcccaggaaggtgcctgcacatgagaggagagaaatacacgtctgataagacttcatgaaataataattatagcaaagaacagtttggtggtcttttctcttccactgatttttctgtaatgacattatacctttattacctctttattttattacctctataataaaatgatacctttcatgta

SEQ ID NO: 70422 - DNA, 2040 bp, Homo sapiens
agcaggctggtactggtcggaagtcgtttggatgcgcccgcgcgccccgggagcctacccagcacgcgctccgcgcccactggttccctccagccgccgccgtccagccgagtccccactccggagtcgccgctgccgcggggacatggtcctctgcgttcagggacctcgtcctttgctggctgtggagcggactgggcagcggcccctgtgggccccgtccctggaactgcccaagccagtcatgcagcccttgcctgctggggccttcctcgaggaggtggcagagggtaccccagcccagacagagagtgagccaaaggtgctggacccagaggaggatctgctgtgcatagccaagaccttctcctaccttcgggaatctggctggtattggggttccattacggccagcgaggcccgacaacacctgcagaagatgccagaaggcacgttcttagtacgtgacagcacgcaccccagctacctgttcacgctgtcagtgaaaaccactcgtggccccaccaatgtacgcattgagtatgccgactccagcttccgtctggactccaactgcttgtccaggccacgcatcctggcctttccggatgtggtcagccttgtgcagcactatgtggcctcctgcactgctgatacccgaagcgacagccccgatcctgctcccaccccggccctgcctatgcctaaggaggatgcgcctagtgacccagcactgcctgctcctccaccagccactgctgtacacctaaaactggtgcagccctttgtacgcagaagcagtgcccgcagcctgcaacacctgtgccgccttgtcatcaaccgtctggtggccgacgtggactgcctgccactgccccggcgcatggccgactacctccgacagtaccccttccagctctgactgtacggggcaatctgcccaccctcacccagtcgcaccctggaggggacatcagccccagctggacttgggcccccactgtccctcctccaggcatcctggtgcctgcatacctctggcagctggcccaggaagagccagcaagagcaaggcatgggagaggggaggtgtcacacaacttggaggtaaatgcccccaggccgcatgtggcttcattatactgagccatgtgtcagaggatggggagacaggcaggaccttgtctcacctgtgggctgggcccagacctccactcgcttgcctgccctggccacctgaactgtatgggcactctcagccctggtttttcaatccccagggtcgggtaggacccctactggcagccagcctctgtttctgggaggatgacatgcagaggaactgagatcgacagtgactagtgaccccttgttgaggggtaagccaggctaggggactgcacaattatacactatttatttatttattctccttggggttggtgtcaggggcgagccaaccccacctctatgccctgagccctggtagtccagagaccccaactctgccctggcttctctggttcttccctgtggaaagcccatcctgagacatcttgctggaaccaaggcaatcctggatgtcctggtactgacccacccgtctgtgaatgtgtccactctcttctgcccccagccatatttggggaggatggacaactacaataggtaagaaaatgcagccggagcctcagtccccagcagagcctgtgtctcaccccctcacaggacagagctgtatctgcatagagctggtctcactgtggcgcaggccccggggggagtgcctgtgctgtcaggaagagggggtgctggtttgagggccaccactgcagttctgctaggtctgcttcctgcccaggaaggtgcctgcacatgagaggagagaaatacacgtctgataagacttcatgaaataataattatagcaaagaacagtttggtggtcttttctcttccactgatttttctgtaatgacattatacctttattacctctttattttattacctctataataaaatgatacctttcatgta

SEQ ID NO: 70423 - DNA, 2037 bp, Homo sapiens
aggtgctggtacgctcggaattatgggattgcgcccgcgcgccccgggagcctacccagcacgcgctccgcgcccactggttccctccagccgccgccgtccagccgagtccccactccggagtcgccgctgccgcggggacatggtcctctgcgttcagggacctcgtcctttgctggctgtggagcggactgggcagcggcccctgtgggccccgtccctggaactgcccaagccagtcatgcagcccttgcctgctggggccttcctcgaggaggtggcagagggtaccccagcccagacagagagtgagccaaaggtgctggacccagaggaggatctgctgtgcatagccaagaccttctcctaccttcgggaatctggctggtattggggttccattacggccagcgaggcccgacaacacctgcagaagatgccagaaggcacgttcttagtacgtgacagcacgcaccccagctacctgttcacgctgtcagtgaaaaccactcgtggccccaccaatgtacgcattgagtatgccgactccagcttccgtctggactccaactgcttgtccaggccacgcatcctggcctttccggatgtggtcagccttgtgcagcactatgtggcctcctgcactgctgatacccgaagcgacagccccgatcctgctcccaccccggccctgcctatgcctaaggaggatgcgcctagtgacccagcactgcctgctcctccaccagccactgctgtacacctaaaactggtgcagccctttgtacgcagaagcagtgcccgcagcctgcaacacctgtgccgccttgtcatcaaccgtctggtggccgacgtggactgcctgccactgccccggcgcatggccgactacctccgacagtaccccttccagctctgactgtacggggcaatctgcccaccctcacccagtcgcaccctggaggggacatcagccccagctggacttgggcccccactgtccctcctccaggcatcctggtgcctgcatacctctggcagctggcccaggaagagccagcaagagcaaggcatgggagaggggaggtgtcacacaacttggaggtaaatgcccccaggccgcatgtggcttcattatactgagccatgtgtcagaggatggggagacaggcaggaccttgtctcacctgtgggctgggcccagacctccactcgcttgcctgccctggccacctgaactgtatgggcactctcagccctggtttttcaatccccagggtcgggtaggacccctactggcagccagcctctgtttctgggaggatgacatgcagaggaactgagatcgacagtgactagtgaccccttgttgaggggtaagccaggctaggggactgcacaattatacactatttatttatttattctccttggggttggtgtcaggggcgagccaaccccacctctatgccctgagccctggtagtccagagaccccaactctgccctggcttctctggttcttccctgtggaaagcccatcctgagacatcttgctggaaccaaggcaatcctggatgtcctggtactgacccacccgtctgtgaatgtgtccactctcttctgcccccagccatatttggggaggatggacaactacaataggtaagaaaatgcagccggagcctcagtccccagcagagcctgtgtctcaccccctcacaggacagagctgtatctgcatagagctggtctcactgtggcgcaggccccggggggagtgcctgtgctgtcaggaagagggggtgctggtttgagggccaccactgcagttctgctaggtctgcttcctgcccaggaaggtgcctgcacatgagaggagagaaatacacgtctgataagacttcatgaaataataattatagcaaagaacagtttggtggtcttttctcttccactgatttttctgtaatgacattatacctttattacctctttattttattacctctataataaaatgatacctttcatgta

SEQ ID NO: 70424 - DNA, 2408 bp, Homo sapiens
agcaggctggtactggtcggaagtcgtttggatgcgcccgcgcgccccgggagcctacccagcacgcgctccgcgcccactggttccctccagccgccgccgtccagccgagtccccactccggagtcgccgctgccgcggggacatggtcctctgcgttcagggacctcgtcctttgctggctgtggagcggactgggcagcggcccctgtgggccccgtccctggaactgcccaagccagtcatgcagcccttgcctgctggggccttcctcgaggaggtggcagagggtaccccagcccagacagagagtgagccaaaggtgctggacccagaggaggatctgctgtgcatagccaagaccttctcctaccttcgggaatctggctggtattggggttccattacggccagcgaggcccgacaacacctgcagaagatgccagaaggcacgttcttagtacgtgacagcacgcaccccagctacctgttcacgctgtcagtgaaaaccactcgtggccccaccaatgtacgcattgagtatgccgactccagcttccgtctggactccaactgcttgtccaggccacgcatcctggcctttccggatgtggtcagccttgtgcagcactatgtggcctcctgcactgctgatacccgaagcgacagccccgatcctgctcccaccccggccctgcctatgcctaaggaggatgcgcctagtgacccagcactgcctgctcctccaccagccactgctgtacacctaaaactggtgcagccctttgtacgcagaagcagtgcccgcagcctgcaacacctgtgccgccttgtcatcaaccgtctggtggccgacgtggactgcctgccactgccccggcgcatggccgactacctccgacagtaccccttccagctctgactgtacggggcaatctgcccaccctcacccagtcgcaccctggaggggacatcagccccagctggacttgggcccccactgtccctcctccaggcatcctggtgcctgcatacctctggcagctggcccaggaagagccagcaagagcaaggcatgggagaggggaggtgtcacacaacttggaggtaaatgcccccaggccgcatgtggcttcattatactgagccatgtgtcagaggatggggagacaggcaggaccttgtctcacctgtgggctgggcccagacctccactcgcttgcctgccctggccacctgaactgtatgggcactctcagccctggtttttcaatccccagggtcgggtaggacccctactggcagccagcctctgtttctgggaggatgacatgcagaggaactgagatcgacagtgactagtgaccccttgttgaggggtaagccaggctaggggactgcacaattatacactatttatttatttattctccttggggttggtgtcaggggcgagccaaccccacctctatgccctgagccctggtagtccagagaccccaactctgccctggcttctctggttcttccctgtggaaagcccatcctgagacatcttgctggaaccaaggcaatcctggatgtcctggtactgacccacccgtctgtgaatgtgtccactctcttctgcccccagccatatttggggaggatggacaactacaataggtaagaaaatgcagccggagcctcagtccccagcagagcctgtgtctcaccccctcacaggacagagctgtatctgcatagagctggtctcactgtggcgcaggccccggggggagtgcctgtgctgtcaggaagagggggtgctggtttgagggccaccactgcagttctgctaggtctgcttcctgcccaggaaggtgcctgcacatgagaggagagaaatacacgtctgataagacttcatgaaataataattatagcaaagaacagtttggtggtcttttctcttccactgatttttctgtaatgacattatacctttattacctctttattttattacctctataataaaatgatacctttcatgtacagagccctcaatggggccgattttcagttgtgtacacagtgtgtcccctttgatcttgttatcattagcccccatttgatatttgggctagcggagaggcccagaaattctatgtggctgagcagtccctgctggggactcattaaggagtggaggagacagggagcagcctctcctctcatctcccctgggtccccttgggaaatgggagctaggagacaaaggccagttagactgcctgcagggtgactgccctggccactgccaggcgagggctcgggggagggtggcagaggtgcatcagccctgagagatgtgtaaacaagaaatgccaactccaaatcgcaagtggagaatacccagggag

SEQ ID NO: 70425 - DNA, 1748 bp, Homo sapiens
gcgaattcactagtgattagctgtgaggcagtgctggacccagaggaggatctgctgtgcatagccaagaccttctcctaccttcgggaatctggctggtattggggttccattacggccagcgaggcccgacaacacctgcagaagatgccagaaggcacgttcttagtacgtgacagcacgcaccccagctacctgttcacgctgtcagtgaaaaccactcgtggccccaccaatgtacgcattgagtatgccgactccagcttccgtctggactccaactgcttgtccaggccacgcatcctggcctttccggatgtggtcagccttgtgcagcactatgtggcctcctgcactgctgatacccgaagcgacagccccgatcctgctcccaccccggccctgcctatgcctaaggaggatgcgcctagtgacccagcactgcctgctcctccaccagccactgctgtacacctaaaactggtgcagccctttgtacgcagaagcagtgcccgcagcctgcaacacctgtgccgccttgtcatcaaccgtctggtggccgacgtggactgcctgccactgccccggcgcatggccgactacctccgacagtaccccttccagctctgactgtacggggcaatctgcccaccctcacccagtcgcaccctggaggggacatcagccccagctggacttgggcccccactgtccctcctccaggcatcctggtgcctgcatacctctggcagctggcccaggaagagccagcaagagcaaggcatgggagaggggaggtgtcacacaacttggaggtaaatgcccccaggccgcatgtggcttcattatactgagccatgtgtcagaggatggggagacaggcaggaccttgtctcacctgtgggctgggcccagacctccactcgcttgcctgccctggccacctgaactgtatgggcactctcagccctggtttttcaatccccagggtcgggtaggacccctactggcagccagcctctgtttctgggaggatgacatgcagaggaactgagatcgacagtgactagtgaccccttgttgaggggtaagccaggctaggggactgcacaattatacactatttatttatttattctccttggggttggtgtcaggggcgagccaaccccacctctatgccctgagccctggtagtccagagaccccaactctgccctggcttctctggttcttccctgtggaaagcccatcctgagacatcttgctggaaccaaggcaatcctggatgtcctggtactgacccacccgtctgtgaatgtgtccactctcttctgcccccagccatatttggggaggatggacaactacaataggtaagaaaatgcagccggagcctcagtccccagcagagcctgtgtctcaccccctcacaggacagagctgtatctgcatagagctggtctcactgtggcgcaggccccggggggagtgcctgtgctgtcaggaagagggggtgctggtttgagggccaccactgcagttctgctaggtctgcttcctgcccaggaaggtgcctgcacatgagaggagagaaatacacgtctgataagacttcatgaaataataattatagcaaagaacagtttggtggtcttttctcttccactgatttttctgtaatgacattatacctttattacctctttattttattacctctataataaaatgatacctttcatgta

SEQ ID NO: 70426 - DNA, 630 bp, Homo sapiens
ctactactactactaaatttgcggccgcgtcgacgtcaggggcgagccaaccccacctctatgccctgagccctggtagtccagagaccccaactctgccctggcttctctggttcttccctgtggaaagcccatcctgagacatcttgctggaaccaaggcaatcctggatgtcctggtactgacccacccgtctgtgaatgtgtccactctcttctgcccccagccatatttggggaggatggacaactacaataggtaagaaaatgcagccggagcctcagtccccagcagagcctgtgtctcaccccctcacaggacagagctgtatctgcatagagctggtctcactgtggcgcaggccccggggggagtgcctgtgctgtcaggaagagggggtgctggtttgagggccaccactgcagttctgctaggtctgcttcctgcccaggaaggtgcctgcacatgagaggagagaaatacacgtctgataagacttcatgaaataataattatagcaaagaacagtttggtggtcttttctcttccactgatttttctgtaatgacattatacctttattacctctttattttattacctctataataaaatgatacctttcatgta

SEQ ID NO: 70427 - DNA, 1153 bp, Homo sapiens
agcaggctggtactggtcggaagtcgtttggatgcgcccgcgcgccccgggagcctacccagcacgcgctccgcgcccactggttccctccagccgccgccgtccagccgagtccccactccggagtcgccgctgccgcggggacatggtcctctgcgttcagggacctcgtcctttgctggctgtggagcggactgggcagcggcccctgtgggccccgtccctggaactgcccaagccagtcatgcagcccttgcctgctggggccttcctcgaggaggtggcagagggtaccccagcccagacagagagtgagccaaaggtgctggacccagaggaggatctgctgtgcatagccaagaccttctcctaccttcgggaatctggctggtattggggttccattacggccagcgaggcccgacaacacctgcagaagatgccagaaggcacgttcttagtacgtgacagcacgcaccccagctacctgttcacgctgtcagtgaaaaccactcgtggccccaccaatgtacgcattgagtatgccgactccagcttccgtctggactccaactgcttgtccaggccacgcatcctggcctttccggatgtggtcagccttgtgcagcactatgtggcctcctgcactgctgatacccgaagcgacagccccgatcctgctcccaccccggccctgcctatgcctaaggaggatgcgcctagtgacccagcactgcctgctcctccaccagccactgctgtacacctaaaactggtgcagccctttgtacgcagaagcagtgcccgcagcctgcaacacctgtgccgccttgtcatcaaccgtctggtggccgacgtggactgcctgccactgccccggcgcatggccgactacctccgacagtaccccttccagctctgactgtacggggcaatctgcccaccctcacccagtcgcaccctggaggggacatcagccccagctggacttgggcccccactgtccctcctccaggcatcctggtgcctgcatacctctggcagctggcccaggaagagccagcaagagcaaggcatgggagaggggaggtctgggcccagcccacaggtgagacaaggtcctgcctgtctccccatcctctgacacatggct

SEQ ID NO: 70428 - DNA, 601 bp, Homo sapiens
aggtgctggtacgctcggaattatgggattgcgcccgcgcgccccgggagcctacccagcacgcgctccgcgcccactggttccctccagccgccgccgtccagccgagtccccactccggagtcgccgctgccgcggggacatggtcctctgcgttcagggacctcgtcctttgctggctgtggagcggactgggcagcggcccctgtgggccccgtccctggaactgcccaagccagtcatgcagcccttgcctgctggggccttcctcgaggaggtggcagagggtaccccagcccagacagagagtgagccaaaggtgctggacccagaggaggatctgctgtgcatagccaagaccttctcctaccttcgggaatctggctggtattggggttccattacggccagcgaggcccgacaacacctgctgcacatgagaggagagaaatacacgtctgataagacttcatgaaataataattatagcaaagaacagtttggtggtcttttctcttccactgatttttctgtaatgacattatacctttattacctctttattttattacctctataataaaatgatacctttcatgta

SEQ ID NO: 70429 - DNA, 2197 bp, Homo sapiens
agcaggctggtactggtcggaagtcgtttggatgcgcccgcgcgccccgggagcctacccagcacgcgctccgcgcccactggttccctccagccgccgccgtccagccgagtccccactccggagtcgccgctgccgcggggacatggtcctctgcgttcaggggtgagcacccccttgtaagctcagggctactgttgggtgtcagggaacaaagttttagactgctgcgctccaaagcgggcacacacatgtacctagaacacaccagccactgtccccaccatgatgatgacacagccatggacacacccctgcccagacctcgtcctttgctggctgtggagcggactgggcagcggcccctgtgggccccgtccctggaactgcccaagccagtcatgcagcccttgcctgctggggccttcctcgaggaggtggcagagggtaccccagcccagacagagagtgagccaaaggtgctggacccagaggaggatctgctgtgcatagccaagaccttctcctaccttcgggaatctggctggtattggggttccattacggccagcgaggcccgacaacacctgcagaagatgccagaaggcacgttcttagtacgtgacagcacgcaccccagctacctgttcacgctgtcagtgaaaaccactcgtggccccaccaatgtacgcattgagtatgccgactccagcttccgtctggactccaactgcttgtccaggccacgcatcctggcctttccggatgtggtcagccttgtgcagcactatgtggcctcctgcactgctgatacccgaagcgacagccccgatcctgctcccaccccggccctgcctatgcctaaggaggatgcgcctagtgacccagcactgcctgctcctccaccagccactgctgtacacctaaaactggtgcagccctttgtacgcagaagcagtgcccgcagcctgcaacacctgtgccgccttgtcatcaaccgtctggtggccgacgtggactgcctgccactgccccggcgcatggccgactacctccgacagtaccccttccagctctgactgtacggggcaatctgcccaccctcacccagtcgcaccctggaggggacatcagccccagctggacttgggcccccactgtccctcctccaggcatcctggtgcctgcatacctctggcagctggcccaggaagagccagcaagagcaaggcatgggagaggggaggtgtcacacaacttggaggtaaatgcccccaggccgcatgtggcttcattatactgagccatgtgtcagaggatggggagacaggcaggaccttgtctcacctgtgggctgggcccagacctccactcgcttgcctgccctggccacctgaactgtatgggcactctcagccctggtttttcaatccccagggtcgggtaggacccctactggcagccagcctctgtttctgggaggatgacatgcagaggaactgagatcgacagtgactagtgaccccttgttgaggggtaagccaggctaggggactgcacaattatacactatttatttatttattctccttggggttggtgtcaggggcgagccaaccccacctctatgccctgagccctggtagtccagagaccccaactctgccctggcttctctggttcttccctgtggaaagcccatcctgagacatcttgctggaaccaaggcaatcctggatgtcctggtactgacccacccgtctgtgaatgtgtccactctcttctgcccccagccatatttggggaggatggacaactacaataggtaagaaaatgcagccggagcctcagtccccagcagagcctgtgtctcaccccctcacaggacagagctgtatctgcatagagctggtctcactgtggcgcaggccccggggggagtgcctgtgctgtcaggaagagggggtgctggtttgagggccaccactgcagttctgctaggtctgcttcctgcccaggaaggtgcctgcacatgagaggagagaaatacacgtctgataagacttcatgaaataataattatagcaaagaacagtttggtggtcttttctcttccactgatttttctgtaatgacattatacctttattacctctttattttattacctctataataaaatgatacctttcatgta

SEQ ID NO: 70430 - DNA, 2312 bp, Homo sapiens
agcaggctggtactggtcggaagtcgtttggatgcgcccgcgcgccccgggagcctacccagcacgcgctccgcgcccactggttccctccagccgccgccgtccagccgagtccccactccggagtcgccgctgccgcggggacatggtcctctgcgttcagggacctcgtcctttgctggctgtggagcggactgggcagcggcccctgtgggccccgtccctggaactgcccaagccagtcatgcagcccttgcctgctggggccttcctcgaggaggtggcagagggtaccccagcccagacagagagtgagccaaaggtgctggacccagaggaggatctgctgtgcatagccaagaccttctcctaccttcgggaatctggctggtattggggttccattacggccagcgaggcccgacaacacctgcagaagatgccagaaggcacgttcttagtacgtgacagcacgcaccccagctacctgttcacgctgtcagtgaaaaccactcgtggccccaccaatgtacgcattgagtatgccgactccagcttccgtctggactccaactgcttgtccaggccacgcatcctggcctttccggatgtggtcagccttgtgcagcactatgtggcctcctgcactgctgatacccgaagcgacagccccgatcctgctcccaccccggccctgcctatgcctaaggaggatgcgcctagtgacccagcactgcctgctcctccaccagccactgctgtacacctaaaactggtgcagccctttgtacgcagaagcagtgcccgcagcctgcaacacctgtgccgccttgtcatcaaccgtctggtggccgacgtggactgcctgccactgccccggcgcatggccgactacctccgacagtaccccttccagctctgactgtacggggcaatctgcccaccctcacccagtcgcaccctggaggggacatcagccccagctggacttgggcccccactgtccctcctccaggcatcctggtgcctgcatacctctggcagctggcccaggaagagccagcaagagcaaggcatgggagaggggaggtgtcacacaacttggaggtaaatgcccccaggccgcatgtggcttcattatactgagccatgtgtcagaggatggggagacaggcaggaccttgtctcacctgtgggctgggcccagacctccactcgcttgcctgccctggccacctgaactgtatgggcactctcagccctggtttttcaatccccagggtcgggtaggacccctactggcagccagcctctgtttctgggaggatgacatgcagaggaactgagatcgacagtgactagtgaccccttgttgaggggtaagccaggctaggggactgcacaattatacactatttatttatttattctccttggggttggtgtcaggggcgagccaaccccacctctatgccctgagccctggtagtccagagaccccaactctgccctggcttctctggttcttccctgtggaaagcccatcctgagacatcttgctggaaccaaggcaatcctggatgtcctggtactgacccacccgtctgtgaatgtgtccactctcttctgcccccagccatatttggggaggatggacaactacaataggtaagaaaatgcagccggagcctcagtccccagcagagcctgtgtctcaccccctcacaggacagagctgtatctgcatagagctggtctcactgtggcgcaggccccggggggagtgcctgtgctgtcaggaagagggggtgctggtttgagggccaccactgcagttctgctaggtctgcttcctgcccaggaaggtgcctgcacatgagaggagagaaatacacgtctgataagacttcatgaaataataattatagcaaagaacagtttggtggtcttttctcttccactgatttttctgtaatgacattatacctttattacctctttattttattacctctataataaaatgatacctttcatgtaaaaaaaaaaaaacaaaaaaacaacagacagaacaaagcacaaagcagaacaaacaaaaagacaaccacaagaaaggggcggggagaagacaagacacgacggggggggagagaaaaggcgacacacagcaaagaccaaacaacaaggccaccacaaagaccaagcaacacaaaaccgcagcgcgacgcgaagaacaacccgcggcggcgcaaaaaaacacagggaaaaagcgagaagaaacaaaacacggcaagacgaaaaggaaacacaca

SEQ ID NO: 70431 - DNA, 1990 bp, Homo sapiens
aggtgctggtacgctcggaattatgggattgcgcccgcgcgccccgggagcctacccagcacgcgctccgcgcccactggttccctccagccgccgccgtccagccgagtccccactccggagtcgccgctgccgcggggacatggtcctctgcgttcagggacctcgtcctttgctggctgtggagcggactgggcagcggcccctgtgggccccgtccctggaactgcccaagccagtcatgcagcccttgcctgctggggccttcctcgaggaggtggcagagggtaccccagcccagacagagagtgagccaaaggtgctggacccagaggaggatctgctgtgcatagccaagaccttctcctaccttcgggaatctgcagaagatgccagaaggcacgttcttagtacgtgacagcacgcaccccagctacctgttcacgctgtcagtgaaaaccactcgtggccccaccaatgtacgcattgagtatgccgactccagcttccgtctggactccaactgcttgtccaggccacgcatcctggcctttccggatgtggtcagccttgtgcagcactatgtggcctcctgcactgctgatacccgaagcgacagccccgatcctgctcccaccccggccctgcctatgcctaaggaggatgcgcctagtgacccagcactgcctgctcctccaccagccactgctgtacacctaaaactggtgcagccctttgtacgcagaagcagtgcccgcagcctgcaacacctgtgccgccttgtcatcaaccgtctggtggccgacgtggactgcctgccactgccccggcgcatggccgactacctccgacagtaccccttccagctctgactgtacggggcaatctgcccaccctcacccagtcgcaccctggaggggacatcagccccagctggacttgggcccccactgtccctcctccaggcatcctggtgcctgcatacctctggcagctggcccaggaagagccagcaagagcaaggcatgggagaggggaggtgtcacacaacttggaggtaaatgcccccaggccgcatgtggcttcattatactgagccatgtgtcagaggatggggagacaggcaggaccttgtctcacctgtgggctgggcccagacctccactcgcttgcctgccctggccacctgaactgtatgggcactctcagccctggtttttcaatccccagggtcgggtaggacccctactggcagccagcctctgtttctgggaggatgacatgcagaggaactgagatcgacagtgactagtgaccccttgttgaggggtaagccaggctaggggactgcacaattatacactatttatttatttattctccttggggttggtgtcaggggcgagccaaccccacctctatgccctgagccctggtagtccagagaccccaactctgccctggcttctctggttcttccctgtggaaagcccatcctgagacatcttgctggaaccaaggcaatcctggatgtcctggtactgacccacccgtctgtgaatgtgtccactctcttctgcccccagccatatttggggaggatggacaactacaataggtaagaaaatgcagccggagcctcagtccccagcagagcctgtgtctcaccccctcacaggacagagctgtatctgcatagagctggtctcactgtggcgcaggccccggggggagtgcctgtgctgtcaggaagagggggtgctggtttgagggccaccactgcagttctgctaggtctgcttcctgcccaggaaggtgcctgcacatgagaggagagaaatacacgtctgataagacttcatgaaataataattatagcaaagaacagtttggtggtcttttctcttccactgatttttctgtaatgacattatacctttattacctctttattttattacctctataataaaatgatacctttcatgta

SEQ ID NO: 70432 - DNA, 1671 bp, Homo sapiens
aggtgctggtacgctcggaattatgggattgcgcccgcgcgccccgggagcctacccagcacgcgctccgcgcccactggttccctccagccgccgccgtccagccgagtccccactccggagtcgccgctgccgcggggacatggtcctctgcgttcagggacctcgtcctttgctggctgtggagcggactgggcagcggcccctgtgggccccgtccctggaactgcccaagccagtcatgcagcccttgcctgctggggccttcctcgaggaggtggcagagggtaccccagcccagacagagagtgagccaaaggtgctggacccagaggaggatctgctgtgcatagccaagaccttctcctaccttcgggaatctgccactgctgtacacctaaaactggtgcagccctttgtacgcagaagcagtgcccgcagcctgcaacacctgtgccgccttgtcatcaaccgtctggtggccgacgtggactgcctgccactgccccggcgcatggccgactacctccgacagtaccccttccagctctgactgtacggggcaatctgcccaccctcacccagtcgcaccctggaggggacatcagccccagctggacttgggcccccactgtccctcctccaggcatcctggtgcctgcatacctctggcagctggcccaggaagagccagcaagagcaaggcatgggagaggggaggtgtcacacaacttggaggtaaatgcccccaggccgcatgtggcttcattatactgagccatgtgtcagaggatggggagacaggcaggaccttgtctcacctgtgggctgggcccagacctccactcgcttgcctgccctggccacctgaactgtatgggcactctcagccctggtttttcaatccccagggtcgggtaggacccctactggcagccagcctctgtttctgggaggatgacatgcagaggaactgagatcgacagtgactagtgaccccttgttgaggggtaagccaggctaggggactgcacaattatacactatttatttatttattctccttggggttggtgtcaggggcgagccaaccccacctctatgccctgagccctggtagtccagagaccccaactctgccctggcttctctggttcttccctgtggaaagcccatcctgagacatcttgctggaaccaaggcaatcctggatgtcctggtactgacccacccgtctgtgaatgtgtccactctcttctgcccccagccatatttggggaggatggacaactacaataggtaagaaaatgcagccggagcctcagtccccagcagagcctgtgtctcaccccctcacaggacagagctgtatctgcatagagctggtctcactgtggcgcaggccccggggggagtgcctgtgctgtcaggaagagggggtgctggtttgagggccaccactgcagttctgctaggtctgcttcctgcccaggaaggtgcctgcacatgagaggagagaaatacacgtctgataagacttcatgaaataataattatagcaaagaacagtttggtggtcttttctcttccactgatttttctgtaatgacattatacctttattacctctttattttattacctctataataaaatgatacctttcatgta

SEQ ID NO: 70433 - DNA, 620 bp, Homo sapiens
ctgaaatgtattcttccagaaagtctggaggaaggacctatatttgtagaagtaaaggtatattctgtcactcagctgtattcacgtctgagcagttctgcagtaacacctgcttaaaattctccctttgcatgttttgtaaataggctccagttttgttttttaaaaggaatttattttttgcctcatcagtccacccaactgattctgaatgggagagagtctgtagagaattgattcagaaaagtgtctgtgaaagaaaaacaattattttgtcctgtttctcaaacagtgttaagcagttttgttaatagacatttttgcatcgacacttcaacattaacactttcaaagtcatggtctggtgccagatttaagaaactcgaaccacctaatatttcataaccttcttcattaggtacttgtacagattaatttctaacattgcagcagtttcatatgtgtgcaatatgtgcattctttcattttagttttgcacttggttttctataaagtacgtttttactcagttcatgcgtgaacaatttaaaaaacgacagaataaggtacaaatgtagtgtatttaataaactgtcaaccaaagaaaaaaaaaaattaaa

SEQ ID NO: 70434 - DNA, 596 bp, Homo sapiens
ctgaaatgtattcttccagaaagtctggaggaaggacctatatttgtagaagtaaaggtatattctgtcactcagctgtattcacgtctgagcagttctgcagtaacacctgcttaaaattctccctttgcatgttttgtaaataggctccagttttgttttttaaaaggaatttattttttgcctcatcagtccacccaactgattctgaatgggagagagtctgtagagaattgattcagaaaagtgtctgtgaaagaaaaacaattattttgtcctgtttctcaaacagtgttaagcagttttgttaatagacatttttgcatcgacacttcaacattaacactttcaaagtcatggtctggtgccagatttaagaaactcgaaccacctaatatttcataaccttcttcattaggtacttgtacagattaatttctaacattgcagcagtttcatatgtgtgcaatatgtgcattctttcattttattaaatacactacatttgtaccttattctgtcgttttttaaattgttcacgcatgaactgagtaaaaacgtactttatagataaccaagtgcaaaactaaaatgtc

SEQ ID NO: 70435 - DNA, 241 bp, Homo sapiens
tccctcgtttcttttctttttcttccatgtcattacggagaagggcactggaggcttactgaagagctttgagaaatagcatagaaggcccagagcattacttgtttccagatgatcaagctaaggctgtaccctggctatgaatagcccagcctcctgtggtgtccaagcctggagagattctgtctcattcactcctggtagactggttaacccggccacaggctccttttgccttcag

SEQ ID NO: 70436 - DNA, 395 bp, Homo sapiens
tgtctattggctcctattgtctttccaatcacctttttcttattatcccacagaagccgtagacatgtcttccaattttcctctctaggttgtatgatgaacatcaaaccaatgacctagtccaacattatggtctcatctttgtggccagcactgggttatgtgcctctccatatatagcatggatatagggattttctaataaaccacaaaggaaagtgtcttcaataggaaatatgtattctcctatcaaaatacatggaaaaggaaaagcgagatgaatcgataaaaacaacagcagctatattcaccaaacttcaaaaagtgttaagataaggtgaaatgtatacagattctcggagtaaaaatatatataaatgttgtaaagttattga

SEQ ID NO: 70437 - DNA, 2499 bp, Homo sapiens
atacacatgcagaagctgtgacacgtgcggaagctgtggtaagtgcatcctccttcagtctcagttctgaaaatagatcatcatggtggcaccaaagagtcacacagatgactgggctcctgggcctttctccagtaagccacagaggagtcagctgcaaatattctcttctgttctacagacctctctcctcttcctgctcatgggactaagagcctctggaaaggactcagccccaacagtggtgtcagggatcctagggggttccgtgactctccccctaaacatctcagtagacacagagattgagaacgtcatctggattggtcccaaaaatgctcttgctttcgcacgtcccaaagaaaatgtaaccattatggtcaaaagctacctgggccgactagacatcaccaagtggagttactccctgtgcatcagcaatctgactctgaatgatgcaggatcctacaaagcccagataaaccaaaggaattttgaagtcaccactgaggaggaattcaccctgttcgtctatgagcagctgcaggagccccaagtcaccatgaagtctgtgaaggtgtctgagaacttctcctgtaacatcactctaatgtgctccgtgaagggggcagagaaaagtgttctgtacagctggaccccaagggaaccccatgcttctgagtccaatggaggctccattcttaccgtctcccgaacaccatgtgacccagacctgccatacatctgcacagcccagaaccccgtcagccagagaagctccctccctgtccatgttgggcagttctgtacagatccaggagcctccagaggaggaacaacgggggagactgtggtaggggtcctgggagagccagtcaccctgccacttgcactcccagcctgccgggacacagagaaggttgtctggttgtttaacacatccatcattagcaaagagagggaagaagcagcaacggcagatccactcattaaatccagggatccttacaagaacagggtgtgggtctccagccaggactgctccctgaagatcagccagctgaagatagaggacgccggcccctaccatgcctacgtgtgctcagaggcctccagcgtcaccagcatgacacatgtcaccctgctcatctaccgcaggctgaggaagcccaaaatcacgtggagcctcaggcacagtgaggatggcatctgcaggatcagcctgacctgctccgtggaggacgggggaaacactgtcatgtacacatggaccccgctgcagaaggaagctgttgtgtcccaaggggaatcacacctcaatgtctcatggagaagcagtgaaaatcaccccaacctcacatgcacagccagcaaccctgtcagcaggagttcccaccagtttctttctgagaacatctgttcaggacctgagagaaacacaaagctttggattgggttgttcctgatggtttgccttctgtgcgttgggatcttcagctggtgcatttggaagcgaaaaggacggtgttcagtcccagccttctgttccagccaagctgaggccccagcggatacaccagaacccacagctggccacacgctatactctgtgctctcccaaggatatgagaagctggacactcccctcaggcctgccaggcaacagcctacacccacctcagacagcagctctgacagcaacctcacaactgaggaggatgaggacaggcctgaggtgcacaagcccatcagtggaagatatgaggtgtttgaccaggtcactcaggagggcgctggacatgacccagcccctgagggccaagcagactatgatcccgtcactccatatgtcacggaagttgagtctgtggttggagagaacaccgtgtatgcacaagtgttcaacttacagggaaagaccccagtttctcagaaggaagagagctcagccacaatctactgctccatacggaaacctcaggtggtgccaccaccacaacagaatgatcttgagattcctgaaagtcctacctatgaaaatttcacctgaaaggaaaagcagctgctgcctctctcctgggaccgtggggttggaaagtcagctggacctcatggggcctggggctcacagacagaagcacctcagaatttccttcagtgcctcagagatgcctggatgtggcccctccccctccttctcacccttaaggactcccaaacccattaatagttcagacacaggctccttcttggagcctatgggcttcagatgtctttgccccatttgtcacctcgcacacttatagcgtttcctcctcgaaattctaccaagactggtcaaatgttgctgaggggcctggaccagctgtcctttacaccaccttctcaacactgctgaaaagaacccaagagaattgtcacacatgacacaagatgtacataatatcatgctcactgcagtgttatttaaaataaaaggcaggaaataaaaaaaaaaaa

SEQ ID NO: 70438 - DNA, 861 bp, Homo sapiens
acttggcaaagctggccttacattactgatttacacatgcacctgactccccagctagacagggtgctcctccagggccaggtctaatttacctttgtgtttccccagagtacctgcaatgatgcttggcatggtttatcccacagggccagagagttgctaaagtctatcacatgtcatatttaatatttatcaaatgaatgaataaatgaatgcttgaaaggaaggaggaagggagagtggaatggaccccctgagggaagacaggacaaaacaatctccttcggttctctaggcctcatctaatgcaggcatcagagcaggctggggccttgcagcaaagcaagaagagaggtggggttggcatacttttatcagccctgcacaatgtgttccagaacccacagctggccacacgctatactctgtgctctcccaaggatatgagaagctggacactcccctcaggcctgccaggcaacagcctacacccacctcagacagcagctctgacagcaacctcacaactgaggaggatgaggacaggcctgaggtgcacaagcccatcagtggaagatatgaggtgtttgaccaggtcactcaggagggcgctggacatgacccagcccctgagggccaagcagactatgatcccgtcactccatatgtcacggaagttgagtctgtggttggagagaacaccgtgtatgcacaagtgttcaacttacagggaaagaccccagtttctcagaaggaagagagctcagccacaatctactgctccatacggaaacctcaggtggtgagaactacattctctgtatcccaaggcccacagagtgaggaactattccttagacc

SEQ ID NO: 70439 - DNA, 953 bp, Homo sapiens
aagctggtacgccccggattacgggatcaaagagtcacacagatgactgggctcctgggcctttctccagtaagccacagaggagtcagctgcaaatattctcttctgttctacagacctctctcctcttcctgctcatggaattcctggtggagtctgggtcccaaacccatctgttttggtctagaatttcaaaagtgctctccagagcctcggaagccctggaatctgggaatccaagctagggtcacccagaagacacccacagggtccctacaagaaaattaactgccttggccaaataccagcttcctagatgccttggactaagagcctctggaaaggactcagccccaacagtggtgtcagggatcctagggggttccgtgactctccccctaaacatctcagtagacacagagattgagaacgtcatctggattggtcccaaaaatgctcttgctttcgcacgtcccaaagaaaatgtaaccattatggtcaaaagctacctgggccgactagacatcaccaagtggagttactccctgtgcatcagcaatctgactctgaatgatgcaggatcctacaaagcccagataaaccaaaggaattttgaagtcaccactgaggaggaattcaccctgttcgtctatgcaccatttattgaaaagttgtccgtccacgtcatcgagggtgaccaccgcacactcctggagggcagcggcctggagtccatcatcagcaccctggctgagccacgtgtgagcgtgcgggagggctaggccctcgcccccacctgccactggagaccgctccgccatccccacctcaccgccgcgcagcagagctggaagggtcctgccgatgggaccctgccaggcccagtgccactgccccccgaggctgctagacgtgggcgttaggcgtgtcccacccacccggcggctcccatg

SEQ ID NO: 70440 - DNA, 2457 bp, Homo sapiens
atacacatgcagaagctgtgacacgtgcggaagctgtggtaagtgcatcctccttcagtctcagttctgaaaatagatcatcatggtggcaccaaagagtcacacagatgactgggctcctgggcctttctccagtaagccacagaggagtcagctgcaaatattctcttctgttctacagacctctctcctcttcctgctcatgggactaagagcctctggaaaggactcagccccaacagtggtgtcagggatcctagggggttccgtgactctccccctaaacatctcagtagacacagagattgagaacgtcatctggattggtcccaaaaatgctcttgctttcgcacgtcccaaagaaaatgtaaccattatggtcaaaagctacctgggccgactagacatcaccaagtggagttactccctgtgcatcagcaatctgactctgaatgatgcaggatcctacaaagcccagataaaccaaaggaattttgaagtcaccactgaggaggaattcaccctgttcgtctatgagcagctgcaggagccccaagtcaccatgaagtctgtgaaggtgtctgagaacttctcctgtaacatcactctaatgtgctccgtgaagggggcagagaaaagtgttctgtacagctggaccccaagggaaccccatgcttctgagtccaatggaggctccattcttaccgtctcccgaacaccatgtgacccagacctgccatacatctgcacagcccagaaccccgtcagccagagaagctccctccctgtccatgttgggcagttctgtacagatccaggagcctccagaggaggaacaacgggggagactgtggtaggggtcctgggagagccagtcaccctgccacttgcactcccagcctgccgggacacagagaaggttgtctggttgtttaacacatccatcattagcaaagagagggaagaagcagcaacggcagatccactcattaaatccagggatccttacaagaacagggtgtgggtctccagccaggactgctccctgaagatcagccagctgaagatagaggacgccggcccctaccatgcctacgtgtgctcagaggcctccagcgtcaccagcatgacacatgtcaccctgctcatctaccgcaggctgaggaagcccaaaatcacgtggagcctcaggcacagtgaggatggcatctgcaggatcagcctgacctgctccgtggaggacgggggaaacactgtcatgtacacatggaccccgctgcagaaggaagctgttgtgtcccaaggggaatcacacctcaatgtctcatggagaagcagtgaaaatcaccccaacctcacatgcacagccagcaaccctgtcagcaggagttcccaccagtttctttctgagaacatctgttcaggacctgagagaaacacaaagctttggattgggttgttcctgatggtttgccttctgtgcgttgggatcttcagctggtgcatttggaagcgaaaaggacggtgttcagtcccagccttctgttccagccaagctgaggccccagcggatacaccaggatatgagaagctggacactcccctcaggcctgccaggcaacagcctacacccacctcagacagcagctctgacagcaacctcacaactgaggaggatgaggacaggcctgaggtgcacaagcccatcagtggaagatatgaggtgtttgaccaggtcactcaggagggcgctggacatgacccagcccctgagggccaagcagactatgatcccgtcactccatatgtcacggaagttgagtctgtggttggagagaacaccgtgtatgcacaagtgttcaacttacagggaaagaccccagtttctcagaaggaagagagctcagccacaatctactgctccatacggaaacctcaggtggtgccaccaccacaacagaatgatcttgagattcctgaaagtcctacctatgaaaatttcacctgaaaggaaaagcagctgctgcctctctcctgggaccgtggggttggaaagtcagctggacctcatggggcctggggctcacagacagaagcacctcagaatttccttcagtgcctcagagatgcctggatgtggcccctccccctccttctcacccttaaggactcccaaacccattaatagttcagacacaggctccttcttggagcctatgggcttcagatgtctttgccccatttgtcacctcgcacacttatagcgtttcctcctcgaaattctaccaagactggtcaaatgttgctgaggggcctggaccagctgtcctttacaccaccttctcaacactgctgaaaagaacccaagagaattgtcacacatgacacaagatgtacataatatcatgctcactgcagtgttatttaaaataaaaggcaggaaataaaaaaaaaaaa

SEQ ID NO: 70441 - DNA, 2351 bp, Homo sapiens
gggctgtacggcccggaagtcgggatcagtaagccacagaggagtcagctgcaaatattctcttctgttctacagacctctctcctcttcctgctcatgggactaagagcctctggaaaggactcagccccaacagtggtgtcagggatcctagggggttccgtgactctccccctaaacatctcagtagacacagagattgagaacgtcatctggattggtcccaaaaatgctcttgctttcgcacgtcccaaagaaaatgtaaccattatggtcaaaagctacctgggccgactagacatcaccaagtggagttactccctgtgcatcagcaatctgactctgaatgatgcaggatcctacaaagcccagataaaccaaaggaattttgaagtcaccactgaggaggaattcaccctgttcgtctatgagcagctgcaggagccccaagtcaccatgaagtctgtgaaggtgtctgagaacttctcctgtaacatcactctaatgtgctccgtgaagggggcagagaaaagtgttctgtacagctggaccccaagggaaccccatgcttctgagtccaatggaggctccattcttaccgtctcccgaacaccatgtgacccagacctgccatacatctgcacagcccagaaccccgtcagccagagaagctccctccctgtccatgttgggcagttctgtacagatccaggagcctccagaggaggaacaacgggggagactgtggtaggggtcctgggagagccagtcaccctgccacttgcactcccagcctgccgggacacagagaaggttgtctggttgtttaacacatccatcattagcaaagagagggaagaagcagcaacggcagatccactcattaaatccagggatccttacaagaacagggtgtgggtctccagccaggactgctccctgaagatcagccagctgaagatagaggacgccggcccctaccatgcctacgtgtgctcagaggcctccagcgtcaccagcatgacacatgtcaccctgctcatctaccgcaggctgaggaagcccaaaatcacgtggagcctcaggcacagtgaggatggcatctgcaggatcagcctgacctgctccgtggaggacgggggaaacactgtcatgtacacatggaccccgctgcagaaggaagctgttgtgtcccaaggggaatcacacctcaatgtctcatggagaagcagtgaaaatcaccccaacctcacatgcacagccagcaaccctgtcagcaggagttcccaccagtttctttctgagaacatctgttcaggacctgagagaaacacaaagctttggattgggttgttcctgatggtttgccttctgtgcgttgggatcttcagctggtgcatttggaagcgaaaaggacggtgttcagtcccagccttctgttccagccaagctgaggccccagcggatacaccaggatatgagaagctggacactcccctcaggcctgccaggcaacagcctacacccacctcagacagcagctctgacagcaacctcacaactgaggaggatgaggacaggcctgaggtgcacaagcccatcagtggaagatatgaggtgtttgaccaggtcactcaggagggcgctggacatgacccagcccctgagggccaagcagactatgatcccgtcactccatatgtcacggaagttgagtctgtggttggagagaacaccgtgtatgcacaagtgttcaacttacagggaaagaccccagtttctcagaaggaagagagctcagccacaatctactgctccatacggaaacctcaggtggtgccaccaccacaacagaatgatcttgagattcctgaaagtcctacctatgaaaatttcacctgaaaggaaaagcagctgctgcctctctcctgggaccgtggggttggaaagtcagctggacctcatggggcctggggctcacagacagaagcacctcagaatttccttcagtgcctcagagatgcctggatgtggcccctccccctccttctcacccttaaggactcccaaacccattaatagttcagacacaggctccttcttggagcctatgggcttcagatgtctttgccccatttgtcacctcgcacacttatagcgtttcctcctcgaaattctaccaagactggtcaaatgttgctgaggggcctggaccagctgtcctttacaccaccttctcaacactgctgaaaagaacccaagagaattgtcacacatgacacaagatgtacataatatcatgctcactgcagtgttatttaaaataaaaggcaggaaataaaaaaaaaaaa

SEQ ID NO: 70442 - DNA, 2388 bp, Homo sapiens
atacacatgcagaagctgtgacacgtgcggaagctgtggtaagtgcatcctccttcagtctcagttctgaaaatagatcatcatggtggcaccaaagagtcacacagatgactgggctcctgggcctttctccagtaagccacagaggagtcagctgcaaatattctcttctgttctacagacctctctcctcttcctgctcatgggactaagagcctctggaaaggactcagccccaacagtggtgtcagggatcctagggggttccgtgactctccccctaaacatctcagtagacacagagattgagaacgtcatctggattggtcccaaaaatgctcttgctttcgcacgtcccaaagaaaatgtaaccattatggtcaaaagctacctgggccgactagacatcaccaagtggagttactccctgtgcatcagcaatctgactctgaatgatgcaggatcctacaaagcccagataaaccaaaggaattttgaagtcaccactgaggaggaattcaccctgttcgtctatgagcagctgcaggagccccaagtcaccatgaagtctgtgaaggtgtctgagaacttctcctgtaacatcactctaatgtgctccgtgaagggggcagagaaaagtgttctgtacagctggaccccaagggaaccccatgcttctgagtccaatggaggctccattcttaccgtctcccgaacaccatgtgacccagacctgccatacatctgcacagcccagaaccccgtcagccagagaagctccctccctgtccatgttgggcagttctgtacagatccaggagcctccagaggaggaacaacgggggagactgtggtaggggtcctgggagagccagtcaccctgccacttgcactcccagcctgccgggacacagagaaggttgtctggttgtttaacacatccatcattagcaaagagagggaagaagcagcaacggcagatccactcattaaatccagggatccttacaagaacagggtgtgggtctccagccaggactgctccctgaagatcagccagctgaagatagaggacgccggcccctaccatgcctacgtgtgctcagaggcctccagcgtcaccagcatgacacatgtcaccctgctcatctaccgcaggctgaggaagcccaaaatcacgtggagcctcaggcacagtgaggatggcatctgcaggatcagcctgacctgctccgtggaggacgggggaaacactgtcatgtacacatggaccccgctgcagaaggaagctgttgtgtcccaaggggaatcacacctcaatgtctcatggagaagcagtgaaaatcaccccaacctcacatgcacagccagcaaccctgtcagcaggagttcccaccagtttctttctgagaacatctgttcaggacctgagagaaacacaaagctttggattgggttgttcctgatggtttgccttctgtgcgttgggatcttcagctggtgcatttggaagcgaaaaggacggtgttcagtcccagccttctgttccagccaagctgaggccccagcggatacaccaggatatgagaagctggacactcccctcaggcctgccaggcaacagcctacacccacctcagacagcagctctgacagcaacctcacaactgaggaggatgaggacaggcctgaggtgcacaagcccatcagtggaagatatgaggtgtttgaccaggtcactcaggagggcgctggacatgacccagcccctgagggccaagcagactatgatcccgtcactccatatgtcacggaagttgagtctgtggttggagagaacaccgtgtatgcacaagtgttcaacttacaggtggtgccaccaccacaacagaatgatcttgagattcctgaaagtcctacctatgaaaatttcacctgaaaggaaaagcagctgctgcctctctcctgggaccgtggggttggaaagtcagctggacctcatggggcctggggctcacagacagaagcacctcagaatttccttcagtgcctcagagatgcctggatgtggcccctccccctccttctcacccttaaggactcccaaacccattaatagttcagacacaggctccttcttggagcctatgggcttcagatgtctttgccccatttgtcacctcgcacacttatagcgtttcctcctcgaaattctaccaagactggtcaaatgttgctgaggggcctggaccagctgtcctttacaccaccttctcaacactgctgaaaagaacccaagagaattgtcacacatgacacaagatgtacataatatcatgctcactgcagtgttatttaaaataaaaggcaggaaataaaaaaaaaaaa

SEQ ID NO: 70443 - DNA, 2430 bp, Homo sapiens
atacacatgcagaagctgtgacacgtgcggaagctgtggtaagtgcatcctccttcagtctcagttctgaaaatagatcatcatggtggcaccaaagagtcacacagatgactgggctcctgggcctttctccagtaagccacagaggagtcagctgcaaatattctcttctgttctacagacctctctcctcttcctgctcatgggactaagagcctctggaaaggactcagccccaacagtggtgtcagggatcctagggggttccgtgactctccccctaaacatctcagtagacacagagattgagaacgtcatctggattggtcccaaaaatgctcttgctttcgcacgtcccaaagaaaatgtaaccattatggtcaaaagctacctgggccgactagacatcaccaagtggagttactccctgtgcatcagcaatctgactctgaatgatgcaggatcctacaaagcccagataaaccaaaggaattttgaagtcaccactgaggaggaattcaccctgttcgtctatgagcagctgcaggagccccaagtcaccatgaagtctgtgaaggtgtctgagaacttctcctgtaacatcactctaatgtgctccgtgaagggggcagagaaaagtgttctgtacagctggaccccaagggaaccccatgcttctgagtccaatggaggctccattcttaccgtctcccgaacaccatgtgacccagacctgccatacatctgcacagcccagaaccccgtcagccagagaagctccctccctgtccatgttgggcagttctgtacagatccaggagcctccagaggaggaacaacgggggagactgtggtaggggtcctgggagagccagtcaccctgccacttgcactcccagcctgccgggacacagagaaggttgtctggttgtttaacacatccatcattagcaaagagagggaagaagcagcaacggcagatccactcattaaatccagggatccttacaagaacagggtgtgggtctccagccaggactgctccctgaagatcagccagctgaagatagaggacgccggcccctaccatgcctacgtgtgctcagaggcctccagcgtcaccagcatgacacatgtcaccctgctcatctaccgcaggctgaggaagcccaaaatcacgtggagcctcaggcacagtgaggatggcatctgcaggatcagcctgacctgctccgtggaggacgggggaaacactgtcatgtacacatggaccccgctgcagaaggaagctgttgtgtcccaaggggaatcacacctcaatgtctcatggagaagcagtgaaaatcaccccaacctcacatgcacagccagcaaccctgtcagcaggagttcccaccagtttctttctgagaacatctgttcaggacctgagagaaacacaaagctttggattgggttgttcctgatggtttgccttctgtgcgttgggatcttcagctggtgcatttggaagcgaaaaggacggtgttcagtcccagccttctgttccagccaagctgaggccccagcggatacaccagaacccacagctggccacacgctatactctgtgctctcccaaggatatgagaagctggacactcccctcaggcctgccaggcaacagcctacacccacctcagacagcagctctgacagcaacctcacaactgaggaggatgaggacaggcctgaggtgcacaagcccatcagtggaagatatgaggtgtttgaccaggtcactcaggagggcgctggacatgacccagcccctgagggccaagcagactatgatcccgtcactccatatgtcacggaagttgagtctgtggttggagagaacaccgtgtatgcacaagtgttcaacttacaggtggtgccaccaccacaacagaatgatcttgagattcctgaaagtcctacctatgaaaatttcacctgaaaggaaaagcagctgctgcctctctcctgggaccgtggggttggaaagtcagctggacctcatggggcctggggctcacagacagaagcacctcagaatttccttcagtgcctcagagatgcctggatgtggcccctccccctccttctcacccttaaggactcccaaacccattaatagttcagacacaggctccttcttggagcctatgggcttcagatgtctttgccccatttgtcacctcgcacacttatagcgtttcctcctcgaaattctaccaagactggtcaaatgttgctgaggggcctggaccagctgtcctttacaccaccttctcaacactgctgaaaagaacccaagagaattgtcacacatgacacaagatgtacataatatcatgctcactgcagtgttatttaaaataaaaggcaggaaataaaaaaaaaaaa

SEQ ID NO: 70444 - DNA, 2665 bp, Homo sapiens
atacacatgcagaagctgtgacacgtgcggaagctgtggtaagtgcatcctccttcagtctcagttctgaaaatagatcatcatggtggcaccaaagagtcacacagatgactgggctcctgggcctttctccagtaagccacagaggagtcagctgcaaatattctcttctgttctacagacctctctcctcttcctgctcatgggcccaactcctgggaaacatctctccgctgcatggcccggaaccccactgtccagcagatagagccaatccagtaccccagagaggatctcagccacctgggactgtggcagctactgtccttctgtgctcccgctttctccagggcttcagggatgatggtgcaggactaagagcctctggaaaggactcagccccaacagtggtgtcagggatcctagggggttccgtgactctccccctaaacatctcagtagacacagagattgagaacgtcatctggattggtcccaaaaatgctcttgctttcgcacgtcccaaagaaaatgtaaccattatggtcaaaagctacctgggccgactagacatcaccaagtggagttactccctgtgcatcagcaatctgactctgaatgatgcaggatcctacaaagcccagataaaccaaaggaattttgaagtcaccactgaggaggaattcaccctgttcgtctatgagcagctgcaggagccccaagtcaccatgaagtctgtgaaggtgtctgagaacttctcctgtaacatcactctaatgtgctccgtgaagggggcagagaaaagtgttctgtacagctggaccccaagggaaccccatgcttctgagtccaatggaggctccattcttaccgtctcccgaacaccatgtgacccagacctgccatacatctgcacagcccagaaccccgtcagccagagaagctccctccctgtccatgttgggcagttctgtacagatccaggagcctccagaggaggaacaacgggggagactgtggtaggggtcctgggagagccagtcaccctgccacttgcactcccagcctgccgggacacagagaaggttgtctggttgtttaacacatccatcattagcaaagagagggaagaagcagcaacggcagatccactcattaaatccagggatccttacaagaacagggtgtgggtctccagccaggactgctccctgaagatcagccagctgaagatagaggacgccggcccctaccatgcctacgtgtgctcagaggcctccagcgtcaccagcatgacacatgtcaccctgctcatctaccgcaggctgaggaagcccaaaatcacgtggagcctcaggcacagtgaggatggcatctgcaggatcagcctgacctgctccgtggaggacgggggaaacactgtcatgtacacatggaccccgctgcagaaggaagctgttgtgtcccaaggggaatcacacctcaatgtctcatggagaagcagtgaaaatcaccccaacctcacatgcacagccagcaaccctgtcagcaggagttcccaccagtttctttctgagaacatctgttcaggacctgagagaaacacaaagctttggattgggttgttcctgatggtttgccttctgtgcgttgggatcttcagctggtgcatttggaagcgaaaaggacggtgttcagtcccagccttctgttccagccaagctgaggccccagcggatacaccagaacccacagctggccacacgctatactctgtgctctcccaaggatatgagaagctggacactcccctcaggcctgccaggcaacagcctacacccacctcagacagcagctctgacagcaacctcacaactgaggaggatgaggacaggcctgaggtgcacaagcccatcagtggaagatatgaggtgtttgaccaggtcactcaggagggcgctggacatgacccagcccctgagggccaagcagactatgatcccgtcactccatatgtcacggaagttgagtctgtggttggagagaacaccgtgtatgcacaagtgttcaacttacagggaaagaccccagtttctcagaaggaagagagctcagccacaatctactgctccatacggaaacctcaggtggtgccaccaccacaacagaatgatcttgagattcctgaaagtcctacctatgaaaatttcacctgaaaggaaaagcagctgctgcctctctcctgggaccgtggggttggaaagtcagctggacctcatggggcctggggctcacagacagaagcacctcagaatttccttcagtgcctcagagatgcctggatgtggcccctccccctccttctcacccttaaggactcccaaacccattaatagttcagacacaggctccttcttggagcctatgggcttcagatgtctttgccccatttgtcacctcgcacacttatagcgtttcctcctcgaaattctaccaagactggtcaaatgttgctgaggggcctggaccagctgtcctttacaccaccttctcaacactgctgaaaagaacccaagagaattgtcacacatgacacaagatgtacataatatcatgctcactgcagtgttatttaaaataaaaggcaggaaataaaaaaaaaaaa

SEQ ID NO: 70445 - DNA, 2502 bp, Homo sapiens
  misc_feature (19)..(19): n is a, c, g, or t
ggctggtaccggtcccgangatttaggacaaagagtcacacagatgactgggctcctgggcctttctccagtaagccacagaggagtcagctgcaaatattctcttctgttctacagacctctctcctcttcctgctcatggagtgaaagaaagaaggctagctcaaggagtctagctgctcctccaagtccctcttctatctctgcaggactaagagcctctggaaaggactcagccccaacagtggtgtcagggatcctagggggttccgtgactctccccctaaacatctcagtagacacagagattgagaacgtcatctggattggtcccaaaaatgctcttgctttcgcacgtcccaaagaaaatgtaaccattatggtcaaaagctacctgggccgactagacatcaccaagtggagttactccctgtgcatcagcaatctgactctgaatgatgcaggatcctacaaagcccagataaaccaaaggaattttgaagtcaccactgaggaggaattcaccctgttcgtctatgagcagctgcaggagccccaagtcaccatgaagtctgtgaaggtgtctgagaacttctcctgtaacatcactctaatgtgctccgtgaagggggcagagaaaagtgttctgtacagctggaccccaagggaaccccatgcttctgagtccaatggaggctccattcttaccgtctcccgaacaccatgtgacccagacctgccatacatctgcacagcccagaaccccgtcagccagagaagctccctccctgtccatgttgggcagttctgtacagatccaggagcctccagaggaggaacaacgggggagactgtggtaggggtcctgggagagccagtcaccctgccacttgcactcccagcctgccgggacacagagaaggttgtctggttgtttaacacatccatcattagcaaagagagggaagaagcagcaacggcagatccactcattaaatccagggatccttacaagaacagggtgtgggtctccagccaggactgctccctgaagatcagccagctgaagatagaggacgccggcccctaccatgcctacgtgtgctcagaggcctccagcgtcaccagcatgacacatgtcaccctgctcatctaccgcaggctgaggaagcccaaaatcacgtggagcctcaggcacagtgaggatggcatctgcaggatcagcctgacctgctccgtggaggacgggggaaacactgtcatgtacacatggaccccgctgcagaaggaagctgttgtgtcccaaggggaatcacacctcaatgtctcatggagaagcagtgaaaatcaccccaacctcacatgcacagccagcaaccctgtcagcaggagttcccaccagtttctttctgagaacatctgttcaggacctgagagaaacacaaagctttggattgggttgttcctgatggtttgccttctgtgcgttgggatcttcagctggtgcatttggaagcgaaaaggacggtgttcagtcccagccttctgttccagccaagctgaggccccagcggatacaccagaacccacagctggccacacgctatactctgtgctctcccaaggatatgagaagctggacactcccctcaggcctgccaggcaacagcctacacccacctcagacagcagctctgacagcaacctcacaactgaggaggatgaggacaggcctgaggtgcacaagcccatcagtggaagatatgaggtgtttgaccaggtcactcaggagggcgctggacatgacccagcccctgagggccaagcagactatgatcccgtcactccatatgtcacggaagttgagtctgtggttggagagaacaccgtgtatgcacaagtgttcaacttacagggaaagaccccagtttctcagaaggaagagagctcagccacaatctactgctccatacggaaacctcaggtggtgccaccaccacaacagaatgatcttgagattcctgaaagtcctacctatgaaaatttcacctgaaaggaaaagcagctgctgcctctctcctgggaccgtggggttggaaagtcagctggacctcatggggcctggggctcacagacagaagcacctcagaatttccttcagtgcctcagagatgcctggatgtggcccctccccctccttctcacccttaaggactcccaaacccattaatagttcagacacaggctccttcttggagcctatgggcttcagatgtctttgccccatttgtcacctcgcacacttatagcgtttcctcctcgaaattctaccaagactggtcaaatgttgctgaggggcctggaccagctgtcctttacaccaccttctcaacactgctgaaaagaacccaagagaattgtcacacatgacacaagatgtacataatatcatgctcactgcagtgttatttaaaataaaaggcaggaaataaaaaaaaaaaa

SEQ ID NO: 70446 - DNA, 1502 bp, Homo sapiens
  misc_feature (19)..(19): n is a, c, g, or t
ggctggtaccggtcccgangatttaggaagaaggttgtctggttgtttaacacatccatcattagcaaagagagggaagaagcagcaacggcagatccactcattaaatccagggatccttacaagaacagggtgtgggtctccagccaggactgctccctgaagatcagccagctgaagatagaggacgccggcccctaccatgcctacgtgtgctcagaggcctccagcgtcaccagcatgacacatgtcaccctgctcatctaccgcaggctgaggaagcccaaaatcacgtggagcctcaggcacagtgaggatggcatctgcaggatcagcctgacctgctccgtggaggacgggggaaacactgtcatgtacacatggaccccgctgcagaaggaagctgttgtgtcccaaggggaatcacacctcaatgtctcatggagaagcagtgaaaatcaccccaacctcacatgcacagccagcaaccctgtcagcaggagttcccaccagtttctttctgagaacatctgttcaggacctgagagaaacacaaagctttggattgggttgttcctgatggtttgccttctgtgcgttgggatcttcagctggtgcatttggaagcgaaaaggacggtgttcagtcccagccttctgttccagccaagctgaggccccagcggatacaccaggatatgagaagctggacactcccctcaggcctgccaggcaacagcctacacccacctcagacagcagctctgacagcaacctcacaactgaggaggatgaggacaggcctgaggtgcacaagcccatcagtggaagatatgaggtgtttgaccaggtcactcaggagggcgctggacatgacccagcccctgagggccaagcagactatgatcccgtcactccatatgtcacggaagttgagtctgtggttggagagaacaccgtgtatgcacaagtgttcaacttacaggtggtgccaccaccacaacagaatgatcttgagattcctgaaagtcctacctatgaaaatttcacctgaaaggaaaagcagctgctgcctctctcctgggaccgtggggttggaaagtcagctggacctcatggggcctggggctcacagacagaagcacctcagaatttccttcagtgcctcagagatgcctggatgtggcccctccccctccttctcacccttaaggactcccaaacccattaatagttcagacacaggctccttcttggagcctatgggcttcagatgtctttgccccatttgtcacctcgcacacttatagcgtttcctcctcgaaattctaccaagactggtcaaatgttgctgaggggcctggaccagctgtcctttacaccaccttctcaacactgctgaaaagaacccaagagaattgtcacacatgacacaagatgtacataatatcatgctcactgcagtgttatttaaaataaaaggcaggaaataaaaaaaaaaaa

SEQ ID NO: 70447 - DNA, 835 bp, Homo sapiens
atacacatgcagaagctgtgacacgtgcggaagctgtggtaagtgcatcctccttcagtctcagttctgaaaatagatcatcatggtggcaccaaagagtcacacagatgactgggctcctgggcctttctccagtaagccacagaggagtcagctgcaaatattctcttctgttctacagacctctctcctcttcctgctcatgggactaagagcctctggaaaggactcagccccaacagtggtgtcagggatcctagggggttccgtgactctccccctaaacatctcagtagacacagagattgagaacgtcatctggattggtcccaaaaatgctcttgctttcgcacgtcccaaagaaaatgtaaccattatggtcaaaagctacctgggccgactagacatcaccaagtggagttactccctgtgcatcagcaatctgactctgaatgatgcaggatcctacaaagcccagataaaccaaaggaattttgaagtcaccactgaggaggaattcaccctgttcgtctatgcaccatttattgaaaagttgtccgtccacgtcatcgagggtgaccaccgcacactcctggagggcagcggcctggagtccatcatcagcaccctggctgagccacgtgtgagcgtgcgggagggctaggccctcgcccccacctgccactggagaccgctccgccatccccacctcaccgccgcgcagcagagctggaagggtcctgccgatgggaccctgccaggcccagtgccactgccccccgaggctgctagacgtgggcgttaggcgtgtcccacccacccggcggctcccatg

SEQ ID NO: 70448 - DNA, 342 bp, Homo sapiens
ggcactttgccggcagtatcaacactcagcttcatgaatatattttcaatgaatgaagacaggtgactgctcagggggcaggcctgattccacatggagtctgcctctctcctcacaggcaggctgaggaagcccaaaatcacgtggagcctcaggcacagtgaggatggcatctgcaggatcagcctgacctgctccgtggaggacgggggaaacactgtcatgtacacatggaccccgctgcagaaggaagctgttgtgtcccaaggggaatcacacctcaatgtctcatggagaagcagtgaaaatcaccccaacctcacatgcacagccagcaaccct

SEQ ID NO: 70449 - DNA, 798 bp, Homo sapiens
ccttattaaataaaaatcactagagttaaatattaagttctttaaggttgtaagttgtttgtattttattatatactctgtacatgtggttgttttagcctaattgttatttgtgaaaattaactgtctttatggtggttccatctagattacattaacattaatgttttaacctgtgaatataatgataacttacttcaaattacctgccaattcaaaggttaaaatattgtaaggtttagaaaatggtagaatattctgaagcactaaaccatagttgttattttatttgtacacatgatatgaacattgagcagttcttgctcacccatctctattattctgacattctttgattcattgaattcattgttcctccccacagaaggtaacagggtaccaccatttatcaccaattaatgtcacattctcagcattctcttccttcataccgataactaaaaggacctgaaaccaaccactcagcttgctttctaaatttactgaatctcattctcacggtccaccagatcatatctacttgataacacatatgctttgtccattatttctttggacactcaaggaacccatttgtgctatatttaaactggtatactgaaaaatttactgataatttaaaactatttttacatgattgctatttaatttttcagtaaaaatggtcattttaatttattaaagtcatttgtcattttatattaaaatgatattgtaggtatttcttctacccaatgtcagattacttgtaaatatataataaaattatttgcatta

SEQ ID NO: 70450 - DNA, 7161 bp, Homo sapiens
  misc_feature (1178)..(1178): n is a, c, g, or t
  misc_feature (3868)..(3868): n is a, c, g, or t
tttccctaagctactgcacactaaacagtgagagagcttttccctgcagtcttgttgaagcaccccgggttttttgctcattgttggtgggtgcattttaattttttcattccctggactatgggttatgatatccatactcactgaagacaaaaagccaccttttctgcgtcttggtggcatgcatgtgtctcatcatcctttcaaacttgtggtggaacagggttttcttccctgtctgtgtattttgagccagcacagttaccaaaattgaacttgtctttcgcttgtgagcggttgtggtcattgtgagggcgggtcatgaggaggctgtagccaaggacgaggtgtgtgcggctgttgcctggacgtttgtccaatccacgttgacatttgagggatcacagcgtgtgaaaatgaactcagaggagaattggtgaattcctatccagtgggcatcttcaaaccctggtcgacggcggaagaatatcaggtcctgagatcacccacccggcgcggcaacagtgcagagtggccacatctggtggaagaagaaaaaaatgtagttattgaattcaatcaagtgtttgcatctttcaagctatcaacaaaattccatcaagaaaggttccagttggtctcacagacgtatggatatccgaggagccacctaaagatggagaaatcaaggcatagagagattaagtgactttgccacagtcacaagctggagaggaccaggagtagagcttagagcgagcccctgactctgggcctgcgtcctgccaggagtcacgctgcctccgttcctaggagagaagacttcctgtaagatggaggtggacaccgaggagaagcggcatcgcacgcggtccaaaggggttcgagttcccgtggaaccagccatacaagagctgttcagctgtcccacccctggctgtgacggcagtggtcatgtcagtggcaaatatgcaagacacagaagtgtatatggttgtcccttggcgaaaaaaagaaaaacacaagataaacagccccaggaacctgctcctaaacgaaagccatttgccgtgaaagcagacagctcctcagtggatgagtgtgacgacagtgatgggactgaggacatggatgagaaggaggaggatgagggggaggagtactccgaggacaatgangagccaggggatgaggacgaggaggacgaggagggggaccgggaggaggaggaggagatcgaggaggaggatgaggacgatgacgaggatggagaagatgtggaggatgaagaagaggaagaggaggaggaggaggaggaggaagaggaagaagaaaacggaagaccatcaaatgaattgtcacaatactcgaataatgcaagacacagaaaaggatgataacaataatgacgaatatgacaattacgatgaactggtggccaagtcattgttaaacctcggcaaaatcgctgaggatgcagcctaccgggccaggactgagtcagaaatgaacagcaatacctccaatagtctggaagacgatagtgacaaaaacgaaaacctgggtcggaaaagtgagttgagtttagacttagacagtgatgttgttagagaaacagtggactcccttaaactattagcccaaggacacggtgttgtgctctcagaaaacatgaatgacagaaattatgcagacagcatgtcgcagcaagacagtagaaatatgaattacgtcatgttggggaagcccatgaacaacggactcatggaaaagatggtggaggagagcgatgaggaggtgtgtctgagcagtctggagtgtttgaggaatcagtgcttcgacctggccaggaagctcagtgagaccaacccgcaggagaggaatccgcagcagaacatgaacatccgtcagcatgtccggccagaagaggacttcccaggaaggacgccggacagaaactactcggacatgctgaacctcatgcggctggaggagcagttgagcccccggtcgagagtgtttgccagctgtgcgaaggaggatgggtgtcatgagcgggacgacgataccacctctgtgaactcggacaggtctgaagaggtgttcgacatgaccaaggggaacctgaccctgctggagaaagccatcgctttggaaacggaaagagcaaaggccatgagggagaagatggccatggaagctgggaggagggacaatatgaggtcatatgaggaccagtctccgagacaacttcccggggaggacagaaagcctaaatccagtgacagccatgtcaaaaagccatactatggtaaagatccctcaagaacagaaaagaaagagagcaagtgtccaacccccgggtgtgatggaaccggccacgtaactgggctgtacccacatcaccgcagcctgtccggatgcccgcacaaagatagggtccctccagaaatccttgccatgcatgaaagtgtcctcaagtgccccactccgggctgcacggggcgcgggcatgtcaacagcaacaggaactcccaccgaagcctctccggatgcccgatcgctgcagcagagaaactggccaaggcacaggaaaagcaccagagctgcgacgtgtccaagtccagccaggcctcggaccgcgtgctcaggccaatgtgctttgtgaagcagctggagattcctcagtatggctacagaaacaatgtccccacaactacgccgcgttccaacctggccaaggagctcgagaaatattccaagacctcgtttgaatacaacagttacgacaaccatacttatggcaagcgagccatagctcccaaggtgcaaaccagggatatatcccccaaaggatatgatgatgcgaagcgggtactgcaaggaccccagccccagcagcagcagcaccagcagctacgcgcccagcagcagcagcaacctgagctgcggcgggggcagcagcgccagcagcacgtgcagcaagagcagcttcgactacacgcacgacatggaggcggcccacatggcggccaccgccatcctcaacctgtccacgcgctgccgcgagatgccgcagaacctgagcaccaagccgcaggacctgtgcgccacgcggaaccctgacatggaggtggatgagaacgggaccctggacctcagcatgaacaagcagaggccgcgggacagctgctgccccatcctgacccctctggagcccatgtccccccagcagcaggcagtgatgaacaaccggtgtttccagctgggcgagggcgactgctgggacttgcccgtagactacaccaaaatgaaaccccggaggatagacgaggacgagtccaaagacattactccagaagacttggacccattccaggaggctctagaagaaagacggtatcccggggaggtgaccatcccaagtcccaaacccaagtaccctcagtgcaaggagagcaaaaaggacttaataactctgtctggctgccccctggcggacaaaagcattcgaagtatgctggccaccagctcccaagaactcaagtgccccacgcctggctgtgatggttctggacatatcaccggcaattatgcttctcatcggagcctttcaggttgcccaagagcaaagaaaagtggtatcaggatagcacagagcaaagaagataaagaagatcaagaacccatcaggtgtccggtccccgggtgcgacggccagggccacatcactgggaagtacgcgtcccatcgcagcgcctccgggtgccccttggcggccaagaggcagaaagacgggtacctgaatggctcccagttctcctggaagtcggtcaagacggaaggcatgtcctgccccacgccaggntgcgacggctcaggccacgtcagcggcagcttcctcacacaccgcagcttgtcaggatgcccgagagccacgtcagcgatgaagaaggcaaagctttctggagagcagatgctgaccatcaaacagcgggccagcaacggtatagaaaatgatgaagaaatcaaacagttagatgaagaaatcaaggagctaaatgaatccaattcccagatggaagccgatatgattaaactcagaactcagattaccacgatggagagcaacctgaagaccatcgaagaggagaacaaagtgattgagcagcagaacgagtctctcctccacgagctggcgaacctgagccagtctctgatccacagcctggctaacatccagctgccgcacatggatccaatcaatgaacaaaattttgatgcttacgtgactactttgacggaaatgtatacaaatcaagatcgttatcagagtccagaaaataaagccctactggaaaatataaagcaggctgtgagaggaattcaggtctgaacagctgctgtagtgatgaaactcttgcttaaaaaggatgcctcttgttttttgctgctgtaacttaccagaaagtgttctatatttatttctgtttgaatttgaaacagtgttatgcttacaagacttcataatgattttatgtcttgctttaaagatagtacctgcagaatagtttttgaatacacccacattttgtacgtttccatgtaagctgacatagtgttctgccatgtaatgtttatagctgctgatgtatgcacatttgggggtatatctatttctgaagaggtaagctgatcaaaataaatagagtgtaaattctttttaatgctttagtgattaaatgttttagtattttgaactgaaatggacacacaaacacacacacgcacacacagacccacagctttgaatgatcatgttgtggctgagcagccgctttttagacgttatcattttgcctcatgttggaggactttatggaatttaagaaatacattttgtgtgcatattgtttcatagcaagaattcgttgcaaaaatgctttatttttgaacaatgcttggaaatattatgtgacttttttgtttgtttgttttaggaggatggtgtatggtgggggcaataaatgaggttttttgcattccaaggaaatggcatatggattaactgtaagaaatgaaataagtaatttattgtaagacaacatcaagccatggaaacttggcagaagattcaaagcagcttaaacagcacttttaaattaactcctaagcgttacatggttgtgactatggaaactccagttaagacaggatcttatcagaggtggacaacgtgaagatttccttttccattttcaataaactttggaacaaccttctcgtatctcccctagagtttcgtgcccctctgaactgtctgttattgcaatgtagtttatcaacagaatttgtgtgttttcgatttaagctaaaagataatttaagaacatttatttccccttttcactttaaaaaattatgattattcctattattgttatgaaccttcttattttacatttgagggataaaggcaaatgatttgtgagtcttctagttactggaccgagttttctgctggatctggtgggaaggcagctcggtaaagtttccctcctgctccccccgcccgactttgactctgaatcagcatttggtcctattcagaggactcttaccacgacgtttctgttctacacttgggtggagaccagttgaccatagagcatttgcagagcctcattgtttgatttcttgtgactattctaagaatgaatgcaatcagattttaaaagtaactaaatatacttcagcacttttttgctttaaactagatcatcttagacttgtttataccttccagatttgattgttttactcccaatgactgcactatatgtatgcataagaccacttttgagcgctgtgttcccccttctgagtagtcctttgacgacgtgttgtgttttctgatgttgacttgagttccatttagtagcatctcttccttccatgtcttgatgttatgcaggaagtacagacgtactttaaatttttgttatgaaataaaaaaaagatgggttttgtaaaaataaaaaaaaaatatttttagcagaacaggacttacagggtcattgtccccacaatgtgccagtcgactatttgcacttaccttgtcctatatatccgtacggaggtgtgcaattcctcgtgtcagtagccttgtgacactgaacctggatggattatagaggagccctcacggctgatcaataatgttgcaaagggagactacagggatctcacgacgaatattctgatacaatactcaacctcggtatatatatatgtgtataaatatatgtatatcccagcggcactttatactgttcactgtacaaaagcttacagttttccacaaggactttaataactagctgggaaaagacgatgtaattatttcggggctctgcggaaccttctctgtacagcgccccctttctgttgtgctattggttgcagctgccatgctcagaatgcgttttgagagctgaagcaaggtgcttgcagtcacctgaggccgtccgtgtggcccagggccccagctgcctttagggcccccattgttcataacagcatatgcatttccccaccgcgttgtgtctgcagcttctttgccaatatagtaatgcttttagtagagtactagatagtatcagttttggattcttattgttatcacctatgtacaatggaaagggattttaagcacaaacctgctgctcatctaacgttggtacataatctcaaatcaaaagttatctgtgactattatatagggatcacaaaagtgtcacatattagaatgctgacctttcatatggattattgtgagtcatcagagtttattataacttattgttcatattcatttctaagttaatttaagtaatcatttattaagacagaattttgtataaactatttattgtgctctctgtggaactgaagtttgatttatttttgtactacacggcatgggtttgttgacactttaattttgctataaatgtgtggaatcacaagttgctgtgatacttcatttttaaattgtgaactttgtacaaattttgtcatgctggatgttaacacatcttactctaaataaacaaggtgttgccacatttgtagcacgaaggatctctaaaaaaaaaatgc

SEQ ID NO: 70451 - DNA, 558 bp, Homo sapiens
ggtctctcaagcccaggagcatggactgagcccctcatgactcgcaacaactttctttagaataattcccgcatgagtccttttttatattctttgtgtatattttcaagggtttggttaatttgtcctgcagcagcatcgtccctgattaacatcgtgatattaagccattcactgtgtcctgtaacagtctctaatcgttcataaacacatagtagaaagtgggccccaattacccccaaaattattctctacaatacatgtcagctaacaaatggaactttctggaaattttcttcttgtcacttccaacactgaattgtgatatttggcctttaacaggacattcttgatcatggacaaaacaaattttccagataaactctcgctcttggatcctctaagctcttaaacttcctgagataacactttgcctggtcttacccaaagcagcaaacatgggacgttttgaaaagaaaatccatcacttcattgtctaattatgtataatatgtaaactgaaactggattaaaatttaacgtgcacctgaaaattac

SEQ ID NO: 70452 - DNA, 3899 bp, Homo sapiens
  misc_feature (1178)..(1178): n is a, c, g, or t
tttccctaagctactgcacactaaacagtgagagagcttttccctgcagtcttgttgaagcaccccgggttttttgctcattgttggtgggtgcattttaattttttcattccctggactatgggttatgatatccatactcactgaagacaaaaagccaccttttctgcgtcttggtggcatgcatgtgtctcatcatcctttcaaacttgtggtggaacagggttttcttccctgtctgtgtattttgagccagcacagttaccaaaattgaacttgtctttcgcttgtgagcggttgtggtcattgtgagggcgggtcatgaggaggctgtagccaaggacgaggtgtgtgcggctgttgcctggacgtttgtccaatccacgttgacatttgagggatcacagcgtgtgaaaatgaactcagaggagaattggtgaattcctatccagtgggcatcttcaaaccctggtcgacggcggaagaatatcaggtcctgagatcacccacccggcgcggcaacagtgcagagtggccacatctggtggaagaagaaaaaaatgtagttattgaattcaatcaagtgtttgcatctttcaagctatcaacaaaattccatcaagaaaggttccagttggtctcacagacgtatggatatccgaggagccacctaaagatggagaaatcaaggcatagagagattaagtgactttgccacagtcacaagctggagaggaccaggagtagagcttagagcgagcccctgactctgggcctgcgtcctgccaggagtcacgctgcctccgttcctaggagagaagacttcctgtaagatggaggtggacaccgaggagaagcggcatcgcacgcggtccaaaggggttcgagttcccgtggaaccagccatacaagagctgttcagctgtcccacccctggctgtgacggcagtggtcatgtcagtggcaaatatgcaagacacagaagtgtatatggttgtcccttggcgaaaaaaagaaaaacacaagataaacagccccaggaacctgctcctaaacgaaagccatttgccgtgaaagcagacagctcctcagtggatgagtgtgacgacagtgatgggactgaggacatggatgagaaggaggaggatgagggggaggagtactccgaggacaatgangagccaggggatgaggacgaggaggacgaggagggggaccgggaggaggaggaggagatcgaggaggaggatgaggacgatgacgaggatggagaagatgtggaggatgaagaagaggaagaggaggaggaggaggaggaggaagaggaagaagaaaacggaagaccatcaaatgaattgtcacaatactcgaataatgcaagacacagaaaaggatgataacaataatgacgaatatgacaattacgatgaactggtggccaagtcattgttaaacctcggcaaaatcgctgaggatgcagcctaccgggccaggactgagtcagaaatgaacagcaatacctccaatagtctggaagacgatagtgacaaaaacgaaaacctgggtcggaaaagtgagttgagtttagacttagacagtgatgttgttagagaaacagtggactcccttaaactattagcccaaggacacggtgttgtgctctcagaaaacatgaatgacagaaattatgcagacagcatgtcgcagcaagacagtagaaatatgaattacgtcatgttggggaagcccatgaacaacggactcatggaaaagatggtggaggagagcgatgaggaggtgtgtctgagcagtctggagtgtttgaggaatcagtgcttcgacctggccaggaagctcagtgagaccaacccgcaggagaggaatccgcagcagaacatgaacatccgtcagcatgtccggccagaagaggacttcccaggaaggacgccggacagaaactactcggacatgctgaacctcatgcggctggaggagcagttgagcccccggtcgagagtgtttgccagctgtgcgaaggaggatgggtgtcatgagcgggacgacgataccacctctgtgaactcggacaggtctgaagaggtgttcgacatgaccaaggggaacctgaccctgctggagaaagccatcgctttggaaacggaaagagcaaaggccatgagggagaagatggccatggaagctgggaggagggacaatatgaggtcatatgaggaccagtctccgagacaacttcccggggaggacagaaagcctaaatccagtgacagccatgtcaaaaagccatactatggtaaagatccctcaagaacagaaaagaaagagagcaagtgtccaacccccgggtgtgatggaaccggccacgtaactgggctgtacccacatcaccgcagcctgtccggatgcccgcacaaagatagggtccctccagaaatccttgccatgcatgaaagtgtcctcaagtgccccactccgggctgcacggggcgcgggcatgtcaacagcaacaggaactcccaccgaagcctctccggatgcccgatcgctgcagcagagaaactggccaaggcacaggaaaagcaccagagctgcgacgtgtccaagtccagccaggcctcggaccgcgtgctcaggccaatgtgctttgtgaagcagctggagattcctcagtatggctacagaaacaatgtccccacaactacgccgcgttccaacctggccaaggagctcgagaaatattccaagacctcgtttgaatacaacagttacgacaaccatacttatggcaagcgagccatagctcccaaggtgcaaaccagggatatatcccccaaaggatatgatgatgcgaagcgggtactgcaaggaccccagccccagcagcagcagcaccagcagctacgcgcccagcagcagcagcaacctgagctgcggcgggggcagcagcgccagcagcacgtgcagcaagagcagcttcgactacacgcacgacatggaggcggcccacatggcggccaccgccatcctcaacctgtccacgcgctgccgcgagatgccgcagaacctgagcaccaagccgcaggacctgtgcgccacgcggaaccctgacatggaggtggatgagaacgggaccctggacctcagcatgaacaagcagaggccgcgggacagctgctgccccatcctgacccctctggagcccatgtccccccagcagcaggcagtgatgaacaaccggtgtttccagctgggcgagggcgactgctgggacttgcccgtagactacaccaaaatgaaaccccggaggatagacgaggacgagtccaaagacattactccagaagacttggacccattccaggaggctctagaagaaagacggtatcccggggaggtgaccatcccaagtcccaaacccaagtaccctcagtgcaaggagagcaaaaaggacttaataactctgtctggctgccccctggcggacaaaagcattcgaagtatgctggccaccagctcccaagaactcaagtaagatttaatgacaataattctcttttaaaaatccatgcactcagtagttcacaaaaaaaaatgatatgtcatttgcaaagaaaaatgtctgttaaaaaacatggcctgtgcaccccagtgccttgatgtagacatgggattgaatcctcggaatttcagccacttttccacacaacccattctgccttttcccctgacatacctccagcttgttcatatcatatccttcctatctgggatatcctaaagcatgggtgttttctcttcagatatgcatgcatatggaagggaaattttacagttactcaaatttttagaaaatgactgtaaataatcaaaatttaattttt

SEQ ID NO: 70453 - DNA, 1454 bp, Homo sapiens
tttccctaagctactgcacactaaacagtgagagagcttttccctgcagtcttgttgaagcaccccgggttttttgctcattgttggtgggtgcattttaattttttcattccctggactatgggttatgatatccatactcactgaagacaaaaagccaccttttctgcgtcttggtggcatgcatgtgtctcatcatcctttcaaacttgtggtggaacagggttttcttccctgtctgtgtattttgagccagcacagttaccaaaattgaacttgtctttcgcttgtgagcggttgtggtcattgtgagggcgggtcatgaggaggctgtagccaaggacgaggtgtgtgcggctgttgcctggacgtttgtccaatccacgttgacatttgagggatcacagcgtgtgaaaatgaactcagaggagaattggtgaattcctatccagtgggcatcttcaaaccctggtcgacggcggaagaatatcaggtcctgagatcacccacccggcgcggcaacagtgcagagtggccacatctggtggaagaagaaaaaaatgtagttattgaattcaatcaagtgtttgcatctttcaagctatcaacaaaattccatcaagaaaggttccagttggtctcacagacgtatggatatccgaggagccacctaaagatggagaaatcaaggcatagagagattaagtgactttgccacagtcacaagctggagaggaccaggagtagagcttagagcgagcccctgactctgggcctgcgtcctgccaggagtcacgctgcctccgttcctaggagagaagacttcctgtaagatggaggtggacaccgaggagaagcggcatcgcacgcggtccaaaggggttcgagttcccgtggaaccagccatacaagagctgttcagctgtcccacccctggctgtgacggcagtggtcatgtcagtggcaaatatgcaagacacagaaggaaccagtgagaaaggcgaaggacagagttccaggatctgataaaagcattaagtcagctccttagagacgcagacactcttggcagcgaaggaaaactgtttccatcccacacattgcccagcagggatccaagcttactcaacatttttgggccctgatacaggtcatcaggccagacctcctaggaagctaacaaatatgacaaatatttatcttcagaaacgtcattattagccagtcacctgaatttgccttttgcttttcccaactgaggtttttgtcttgtgatattaggcatataaatgacaaaaacacggtgaattttataaggcagggctaggaagtaatgcttacatcacgagtgaacgtggctcatgtgggtctttcctgcacatgggtcacctgtgttttctgcgcccattgttagatggctgcacacgtggctcagcccattcagctgctccgag

SEQ ID NO: 70454 - DNA, 1318 bp, Homo sapiens
tttccctaagctactgcacactaaacagtgagagagcttttccctgcagtcttgttgaagcaccccgggttttttgctcattgttggtgggtgcattttaattttttcattccctggactatgggttatgatatccatactcactgaagacaaaaagccaccttttctgcgtcttggtggcatgcatgtgtctcatcatcctttcaaacttgtggtggaacagggttttcttccctgtctgtgtattttgagccagcacagttaccaaaattgaacttgtctttcgcttgtgagcggttgtggtcattgtgagggcgggtcatgaggaggctgtagccaaggacgaggtgtgtgcggctgttgcctggacgtttgtccaatccacgttgacatttgagggatcacagcgtgtgaaaatgaactcagaggagaattggtgaattcctatccagtgggcatcttcaaaccctggtcgacggcggaagaatatcaggtcctgagatcacccacccggcgcggcaacagtgcagagtggccacatctggtggaagaagaaaaaaatgtagttattgaattcaatcaagtgtttgcatctttcaagctatcaacaaaattccatcaagaaaggttccagttggtctcacagacgtatggatatccgaggagccacctaaagatggagaaatcaaggcatagagagattaagtgactttgccacagtcacaagctggagaggaccaggagtagagcttagagcgagcccctgactctgggcctgcgtcctgccaggagtcacgctgcctccgttcctaggagagaagacttcctgtaagatggaggtggacaccgaggagaagcggcatcgcacgcggtccaaaggggttcgagttcccgtggaaccagccatacaagagctgttcagctgtcccacccctggctgtgacggcagtggtcatgtcagtggcaaatatgcaagacacagaaggaggctgttctggagctaaagtcaagggcttgcttcctgatgtatgcacgcctcatttggagtctgccaacagcctaggggctgtattattcatgccttgacagagagcactcactaaaagccctggaacagagccaggtgctggctgagagatgtggagcattgcaacttgcaactgagaggagcatctataatccaaaaataaataaaaaaagaagaaacagagaggaagacagagagaaaaataggagttcctatatctcccctttaccagtttcacatagatagaaatttcatttgcattaaaataaaatatcctaaaaataattgcat

SEQ ID NO: 70455 - DNA, 662 bp, Homo sapiens
aagaaaggagccggaaagttttgttttgttttcgtttgccgtgttgtttgtttctttacgcgtaagccccagcaccctgaggcccgtcccacgcggctgtgtgtggctgaggccggggcgggcaggccctgccgtgtgctgtctgccgtgtgccctgcggccggggcctgagtcatccctgtccctgtctccccagcgaagcgggtactgcaaggaccccagccccagcagcagcagcaccagcagctacgcgcccagcagcagcagcaacctgagctgcggcgggggcagcagcgccagcagcacgtgcagcaagagcagcttcgactacacgcacgacatggaggcggcccacatggcggccaccgccatcctcaacctgtccacgcgctgccgcgagatgccgcagaacctgagcaccaagccgcaggacctgtgcgccacgcgggtacgcgcgcctgggcaggtggagccacctggcgggtgggggaggccgggccgcggacccagccaccgagacacgcggcgctttcggggcagctgtatggggcaaacgccgtgatctcctaaaccattctcgccactgtgaacaattagtgcagcttcccttaacgcagcctgaacacaccattgtccaaagcgcatccattttctaaatcaga

SEQ ID NO: 70456 - DNA, 7003 bp, Homo sapiens
  misc_feature (1178)..(1178): n is a, c, g, or t
  misc_feature (3710)..(3710): n is a, c, g, or t
tttccctaagctactgcacactaaacagtgagagagcttttccctgcagtcttgttgaagcaccccgggttttttgctcattgttggtgggtgcattttaattttttcattccctggactatgggttatgatatccatactcactgaagacaaaaagccaccttttctgcgtcttggtggcatgcatgtgtctcatcatcctttcaaacttgtggtggaacagggttttcttccctgtctgtgtattttgagccagcacagttaccaaaattgaacttgtctttcgcttgtgagcggttgtggtcattgtgagggcgggtcatgaggaggctgtagccaaggacgaggtgtgtgcggctgttgcctggacgtttgtccaatccacgttgacatttgagggatcacagcgtgtgaaaatgaactcagaggagaattggtgaattcctatccagtgggcatcttcaaaccctggtcgacggcggaagaatatcaggtcctgagatcacccacccggcgcggcaacagtgcagagtggccacatctggtggaagaagaaaaaaatgtagttattgaattcaatcaagtgtttgcatctttcaagctatcaacaaaattccatcaagaaaggttccagttggtctcacagacgtatggatatccgaggagccacctaaagatggagaaatcaaggcatagagagattaagtgactttgccacagtcacaagctggagaggaccaggagtagagcttagagcgagcccctgactctgggcctgcgtcctgccaggagtcacgctgcctccgttcctaggagagaagacttcctgtaagatggaggtggacaccgaggagaagcggcatcgcacgcggtccaaaggggttcgagttcccgtggaaccagccatacaagagctgttcagctgtcccacccctggctgtgacggcagtggtcatgtcagtggcaaatatgcaagacacagaagtgtatatggttgtcccttggcgaaaaaaagaaaaacacaagataaacagccccaggaacctgctcctaaacgaaagccatttgccgtgaaagcagacagctcctcagtggatgagtgtgacgacagtgatgggactgaggacatggatgagaaggaggaggatgagggggaggagtactccgaggacaatgangagaagaccatcaaatgaattgtcacaatactcgaataatgcaagacacagaaaaggatgataacaataatgacgaatatgacaattacgatgaactggtggccaagtcattgttaaacctcggcaaaatcgctgaggatgcagcctaccgggccaggactgagtcagaaatgaacagcaatacctccaatagtctggaagacgatagtgacaaaaacgaaaacctgggtcggaaaagtgagttgagtttagacttagacagtgatgttgttagagaaacagtggactcccttaaactattagcccaaggacacggtgttgtgctctcagaaaacatgaatgacagaaattatgcagacagcatgtcgcagcaagacagtagaaatatgaattacgtcatgttggggaagcccatgaacaacggactcatggaaaagatggtggaggagagcgatgaggaggtgtgtctgagcagtctggagtgtttgaggaatcagtgcttcgacctggccaggaagctcagtgagaccaacccgcaggagaggaatccgcagcagaacatgaacatccgtcagcatgtccggccagaagaggacttcccaggaaggacgccggacagaaactactcggacatgctgaacctcatgcggctggaggagcagttgagcccccggtcgagagtgtttgccagctgtgcgaaggaggatgggtgtcatgagcgggacgacgataccacctctgtgaactcggacaggtctgaagaggtgttcgacatgaccaaggggaacctgaccctgctggagaaagccatcgctttggaaacggaaagagcaaaggccatgagggagaagatggccatggaagctgggaggagggacaatatgaggtcatatgaggaccagtctccgagacaacttcccggggaggacagaaagcctaaatccagtgacagccatgtcaaaaagccatactatggtaaagatccctcaagaacagaaaagaaagagagcaagtgtccaacccccgggtgtgatggaaccggccacgtaactgggctgtacccacatcaccgcagcctgtccggatgcccgcacaaagatagggtccctccagaaatccttgccatgcatgaaagtgtcctcaagtgccccactccgggctgcacggggcgcgggcatgtcaacagcaacaggaactcccaccgaagcctctccggatgcccgatcgctgcagcagagaaactggccaaggcacaggaaaagcaccagagctgcgacgtgtccaagtccagccaggcctcggaccgcgtgctcaggccaatgtgctttgtgaagcagctggagattcctcagtatggctacagaaacaatgtccccacaactacgccgcgttccaacctggccaaggagctcgagaaatattccaagacctcgtttgaatacaacagttacgacaaccatacttatggcaagcgagccatagctcccaaggtgcaaaccagggatatatcccccaaaggatatgatgatgcgaagcgggtactgcaaggaccccagccccagcagcagcagcaccagcagctacgcgcccagcagcagcagcaacctgagctgcggcgggggcagcagcgccagcagcacgtgcagcaagagcagcttcgactacacgcacgacatggaggcggcccacatggcggccaccgccatcctcaacctgtccacgcgctgccgcgagatgccgcagaacctgagcaccaagccgcaggacctgtgcgccacgcggaaccctgacatggaggtggatgagaacgggaccctggacctcagcatgaacaagcagaggccgcgggacagctgctgccccatcctgacccctctggagcccatgtccccccagcagcaggcagtgatgaacaaccggtgtttccagctgggcgagggcgactgctgggacttgcccgtagactacaccaaaatgaaaccccggaggatagacgaggacgagtccaaagacattactccagaagacttggacccattccaggaggctctagaagaaagacggtatcccggggaggtgaccatcccaagtcccaaacccaagtaccctcagtgcaaggagagcaaaaaggacttaataactctgtctggctgccccctggcggacaaaagcattcgaagtatgctggccaccagctcccaagaactcaagtgccccacgcctggctgtgatggttctggacatatcaccggcaattatgcttctcatcggagcctttcaggttgcccaagagcaaagaaaagtggtatcaggatagcacagagcaaagaagataaagaagatcaagaacccatcaggtgtccggtccccgggtgcgacggccagggccacatcactgggaagtacgcgtcccatcgcagcgcctccgggtgccccttggcggccaagaggcagaaagacgggtacctgaatggctcccagttctcctggaagtcggtcaagacggaaggcatgtcctgccccacgccaggntgcgacggctcaggccacgtcagcggcagcttcctcacacaccgcagcttgtcaggatgcccgagagccacgtcagcgatgaagaaggcaaagctttctggagagcagatgctgaccatcaaacagcgggccagcaacggtatagaaaatgatgaagaaatcaaacagttagatgaagaaatcaaggagctaaatgaatccaattcccagatggaagccgatatgattaaactcagaactcagattaccacgatggagagcaacctgaagaccatcgaagaggagaacaaagtgattgagcagcagaacgagtctctcctccacgagctggcgaacctgagccagtctctgatccacagcctggctaacatccagctgccgcacatggatccaatcaatgaacaaaattttgatgcttacgtgactactttgacggaaatgtatacaaatcaagatcgttatcagagtccagaaaataaagccctactggaaaatataaagcaggctgtgagaggaattcaggtctgaacagctgctgtagtgatgaaactcttgcttaaaaaggatgcctcttgttttttgctgctgtaacttaccagaaagtgttctatatttatttctgtttgaatttgaaacagtgttatgcttacaagacttcataatgattttatgtcttgctttaaagatagtacctgcagaatagtttttgaatacacccacattttgtacgtttccatgtaagctgacatagtgttctgccatgtaatgtttatagctgctgatgtatgcacatttgggggtatatctatttctgaagaggtaagctgatcaaaataaatagagtgtaaattctttttaatgctttagtgattaaatgttttagtattttgaactgaaatggacacacaaacacacacacgcacacacagacccacagctttgaatgatcatgttgtggctgagcagccgctttttagacgttatcattttgcctcatgttggaggactttatggaatttaagaaatacattttgtgtgcatattgtttcatagcaagaattcgttgcaaaaatgctttatttttgaacaatgcttggaaatattatgtgacttttttgtttgtttgttttaggaggatggtgtatggtgggggcaataaatgaggttttttgcattccaaggaaatggcatatggattaactgtaagaaatgaaataagtaatttattgtaagacaacatcaagccatggaaacttggcagaagattcaaagcagcttaaacagcacttttaaattaactcctaagcgttacatggttgtgactatggaaactccagttaagacaggatcttatcagaggtggacaacgtgaagatttccttttccattttcaataaactttggaacaaccttctcgtatctcccctagagtttcgtgcccctctgaactgtctgttattgcaatgtagtttatcaacagaatttgtgtgttttcgatttaagctaaaagataatttaagaacatttatttccccttttcactttaaaaaattatgattattcctattattgttatgaaccttcttattttacatttgagggataaaggcaaatgatttgtgagtcttctagttactggaccgagttttctgctggatctggtgggaaggcagctcggtaaagtttccctcctgctccccccgcccgactttgactctgaatcagcatttggtcctattcagaggactcttaccacgacgtttctgttctacacttgggtggagaccagttgaccatagagcatttgcagagcctcattgtttgatttcttgtgactattctaagaatgaatgcaatcagattttaaaagtaactaaatatacttcagcacttttttgctttaaactagatcatcttagacttgtttataccttccagatttgattgttttactcccaatgactgcactatatgtatgcataagaccacttttgagcgctgtgttcccccttctgagtagtcctttgacgacgtgttgtgttttctgatgttgacttgagttccatttagtagcatctcttccttccatgtcttgatgttatgcaggaagtacagacgtactttaaatttttgttatgaaataaaaaaaagatgggttttgtaaaaataaaaaaaaaatatttttagcagaacaggacttacagggtcattgtccccacaatgtgccagtcgactatttgcacttaccttgtcctatatatccgtacggaggtgtgcaattcctcgtgtcagtagccttgtgacactgaacctggatggattatagaggagccctcacggctgatcaataatgttgcaaagggagactacagggatctcacgacgaatattctgatacaatactcaacctcggtatatatatatgtgtataaatatatgtatatcccagcggcactttatactgttcactgtacaaaagcttacagttttccacaaggactttaataactagctgggaaaagacgatgtaattatttcggggctctgcggaaccttctctgtacagcgccccctttctgttgtgctattggttgcagctgccatgctcagaatgcgttttgagagctgaagcaaggtgcttgcagtcacctgaggccgtccgtgtggcccagggccccagctgcctttagggcccccattgttcataacagcatatgcatttccccaccgcgttgtgtctgcagcttctttgccaatatagtaatgcttttagtagagtactagatagtatcagttttggattcttattgttatcacctatgtacaatggaaagggattttaagcacaaacctgctgctcatctaacgttggtacataatctcaaatcaaaagttatctgtgactattatatagggatcacaaaagtgtcacatattagaatgctgacctttcatatggattattgtgagtcatcagagtttattataacttattgttcatattcatttctaagttaatttaagtaatcatttattaagacagaattttgtataaactatttattgtgctctctgtggaactgaagtttgatttatttttgtactacacggcatgggtttgttgacactttaattttgctataaatgtgtggaatcacaagttgctgtgatacttcatttttaaattgtgaactttgtacaaattttgtcatgctggatgttaacacatcttactctaaataaacaaggtgttgccacatttgtagcacgaaggatctctaaaaaaaaaatgc

SEQ ID NO: 70457 - DNA, 3722 bp, Homo sapiens
  misc_feature (1178)..(1178): n is a, c, g, or t
tttccctaagctactgcacactaaacagtgagagagcttttccctgcagtcttgttgaagcaccccgggttttttgctcattgttggtgggtgcattttaattttttcattccctggactatgggttatgatatccatactcactgaagacaaaaagccaccttttctgcgtcttggtggcatgcatgtgtctcatcatcctttcaaacttgtggtggaacagggttttcttccctgtctgtgtattttgagccagcacagttaccaaaattgaacttgtctttcgcttgtgagcggttgtggtcattgtgagggcgggtcatgaggaggctgtagccaaggacgaggtgtgtgcggctgttgcctggacgtttgtccaatccacgttgacatttgagggatcacagcgtgtgaaaatgaactcagaggagaattggtgaattcctatccagtgggcatcttcaaaccctggtcgacggcggaagaatatcaggtcctgagatcacccacccggcgcggcaacagtgcagagtggccacatctggtggaagaagaaaaaaatgtagttattgaattcaatcaagtgtttgcatctttcaagctatcaacaaaattccatcaagaaaggttccagttggtctcacagacgtatggatatccgaggagccacctaaagatggagaaatcaaggcatagagagattaagtgactttgccacagtcacaagctggagaggaccaggagtagagcttagagcgagcccctgactctgggcctgcgtcctgccaggagtcacgctgcctccgttcctaggagagaagacttcctgtaagatggaggtggacaccgaggagaagcggcatcgcacgcggtccaaaggggttcgagttcccgtggaaccagccatacaagagctgttcagctgtcccacccctggctgtgacggcagtggtcatgtcagtggcaaatatgcaagacacagaagtgtatatggttgtcccttggcgaaaaaaagaaaaacacaagataaacagccccaggaacctgctcctaaacgaaagccatttgccgtgaaagcagacagctcctcagtggatgagtgtgacgacagtgatgggactgaggacatggatgagaaggaggaggatgagggggaggagtactccgaggacaatgangagccaggggatgaggacgaggaggacgaggagggggaccgggaggaggaggaggagatcgaggaggaggatgaggacgatgacgaggatggagaagatgtggaggatgaagaagaggaagaggaggaggaggaggaggaggaagaggaagaagaaaacggaagaccatcaaatgaattgtcacaatactcgaataatgcaagacacagaaaaggatgataacaataatgacgaatatgacaattacgatgaactggtggccaagtcattgttaaacctcggcaaaatcgctgaggatgcagcctaccgggccaggactgagtcagaaatgaacagcaatacctccaatagtctggaagacgatagtgacaaaaacgaaaacctgggtcggaaaagtgagttgagtttagacttagacagtgatgttgttagagaaacagtggactcccttaaactattagcccaaggacacggtgttgtgctctcagaaaacatgaatgacagaaattatgcagacagcatgtcgcagcaagacagtagaaatatgaattacgtcatgttggggaagcccatgaacaacggactcatggaaaagatggtggaggagagcgatgaggaggtgtgtctgagcagtctggagtgtttgaggaatcagtgcttcgacctggccaggaagctcagtgagaccaacccgcaggagaggaatccgcagcagaacatgaacatccgtcagcatgtccggccagaagaggacttcccaggaaggacgccggacagaaactactcggacatgctgaacctcatgcggctggaggagcagttgagcccccggtcgagagtgtttgccagctgtgcgaaggaggatgggtgtcatgagcgggacgacgataccacctctgtgaactcggacaggtctgaagaggtgttcgacatgaccaaggggaacctgaccctgctggagaaagccatcgctttggaaacggaaagagcaaaggccatgagggagaagatggccatggaagctgggaggagggacaatatgaggtcatatgaggaccagtctccgagacaacttcccggggaggacagaaagcctaaatccagtgacagccatgtcaaaaagccatactatggtaaagatccctcaagaacagaaaagaaagagagcaagtgtccaacccccgggtgtgatggaaccggccacgtaactgggctgtacccacatcaccgcagcctgtccggatgcccgcacaaagatagggtccctccagaaatccttgccatgcatgaaagtgtcctcaagtgccccactccgggctgcacggggcgcgggcatgtcaacagcaacaggaactcccaccgaagcctctccggatgcccgatcgctgcagcagagaaactggccaaggcacaggaaaagcaccagagctgcgacgtgtccaagtccagccaggcctcggaccgcgtgctcaggccaatgtgctttgtgaagcagctggagattcctcagtatggctacagaaacaatgtccccacaactacgccgcgttccaacctggccaaggagctcgagaaatattccaagacctcgtttgaatacaacagttacgacaaccatacttatggcaagcgagccatagctcccaagcgaagcgggtactgcaaggaccccagccccagcagcagcagcaccagcagctacgcgcccagcagcagcagcaacctgagctgcggcgggggcagcagcgccagcagcacgtgcagcaagagcagcttcgactacacgcacgacatggaggcggcccacatggcggccaccgccatcctcaacctgtccacgcgctgccgcgagatgccgcagaacctgagcaccaagccgcaggacctgtgcgccacgcggaaccctgacatggaggtggatgagaacgggaccctggacctcagcatgaacaagcagaggccgcgggacagctgctgccccatcctgacccctctggagcccatgtccccccagcagcaggcagtgatgaacaaccggtgtttccagctgggcgagggcgactgctgggacttgcccgtagactacaccaaaatgaaaccccggaggatagacgaggacgagtccaaagacattactccagaagacttggacccattccaggaggctctagaagaaagacggtatcccggggaggtgaccatcccaagtcccaaacccaagtaccctcagtgcaaggagagcaaaaaggacttaataactctgtctggctgccccctggcggacaaaagcattcgaagtatgctggccaccagctcccaagaactcaagacattcttgatcatggacaaaacaaattttccagataaactctcgctcttggatcctctaagctcttaaacttcctgagataacactttgcctggtcttacccaaagcagcaaacatgggacgttttgaaaagaaaatccatcacttcattgtctaattatgtataatatgtaaactgaaactggattaaaatttaacgtgcacctgaaaattac

SEQ ID NO: 70458 - DNA, 3858 bp, Homo sapiens
  misc_feature (1178)..(1178): n is a, c, g, or t
tttccctaagctactgcacactaaacagtgagagagcttttccctgcagtcttgttgaagcaccccgggttttttgctcattgttggtgggtgcattttaattttttcattccctggactatgggttatgatatccatactcactgaagacaaaaagccaccttttctgcgtcttggtggcatgcatgtgtctcatcatcctttcaaacttgtggtggaacagggttttcttccctgtctgtgtattttgagccagcacagttaccaaaattgaacttgtctttcgcttgtgagcggttgtggtcattgtgagggcgggtcatgaggaggctgtagccaaggacgaggtgtgtgcggctgttgcctggacgtttgtccaatccacgttgacatttgagggatcacagcgtgtgaaaatgaactcagaggagaattggtgaattcctatccagtgggcatcttcaaaccctggtcgacggcggaagaatatcaggtcctgagatcacccacccggcgcggcaacagtgcagagtggccacatctggtggaagaagaaaaaaatgtagttattgaattcaatcaagtgtttgcatctttcaagctatcaacaaaattccatcaagaaaggttccagttggtctcacagacgtatggatatccgaggagccacctaaagatggagaaatcaaggcatagagagattaagtgactttgccacagtcacaagctggagaggaccaggagtagagcttagagcgagcccctgactctgggcctgcgtcctgccaggagtcacgctgcctccgttcctaggagagaagacttcctgtaagatggaggtggacaccgaggagaagcggcatcgcacgcggtccaaaggggttcgagttcccgtggaaccagccatacaagagctgttcagctgtcccacccctggctgtgacggcagtggtcatgtcagtggcaaatatgcaagacacagaagtgtatatggttgtcccttggcgaaaaaaagaaaaacacaagataaacagccccaggaacctgctcctaaacgaaagccatttgccgtgaaagcagacagctcctcagtggatgagtgtgacgacagtgatgggactgaggacatggatgagaaggaggaggatgagggggaggagtactccgaggacaatgangagccaggggatgaggacgaggaggacgaggagggggaccgggaggaggaggaggagatcgaggaggaggatgaggacgatgacgaggatggagaagatgtggaggatgaagaagaggaagaggaggaggaggaggaggaggaagaggaagaagaaaacggaagaccatcaaatgaattgtcacaatactcgaataatgcaagacacagaaaaggatgataacaataatgacgaatatgacaattacgatgaactggtggccaagtcattgttaaacctcggcaaaatcgctgaggatgcagcctaccgggccaggactgagtcagaaatgaacagcaatacctccaatagtctggaagacgatagtgacaaaaacgaaaacctgggtcggaaaagtgagttgagtttagacttagacagtgatgttgttagagaaacagtggactcccttaaactattagcccaaggacacggtgttgtgctctcagaaaacatgaatgacagaaattatgcagacagcatgtcgcagcaagacagtagaaatatgaattacgtcatgttggggaagcccatgaacaacggactcatggaaaagatggtggaggagagcgatgaggaggtgtgtctgagcagtctggagtgtttgaggaatcagtgcttcgacctggccaggaagctcagtgagaccaacccgcaggagaggaatccgcagcagaacatgaacatccgtcagcatgtccggccagaagaggacttcccaggaaggacgccggacagaaactactcggacatgctgaacctcatgcggctggaggagcagttgagcccccggtcgagagtgtttgccagctgtgcgaaggaggatgggtgtcatgagcgggacgacgataccacctctgtgaactcggacaggtctgaagaggtgttcgacatgaccaaggggaacctgaccctgctggagaaagccatcgctttggaaacggaaagagcaaaggccatgagggagaagatggccatggaagctgggaggagggacaatatgaggtcatatgaggaccagtctccgagacaacttcccggggaggacagaaagcctaaatccagtgacagccatgtcaaaaagccatactatggtaaagatccctcaagaacagaaaagaaagagagcaagtgtccaacccccgggtgtgatggaaccggccacgtaactgggctgtacccacatcaccgcagcctgtccggatgcccgcacaaagatagggtccctccagaaatccttgccatgcatgaaagtgtcctcaagtgccccactccgggctgcacggggcgcgggcatgtcaacagcaacaggaactcccaccgaagcctctccggatgcccgatcgctgcagcagagaaactggccaaggcacaggaaaagcaccagagctgcgacgtgtccaagtccagccaggcctcggaccgcgtgctcaggccaatgtgctttgtgaagcagctggagattcctcagtatggctacagaaacaatgtccccacaactacgccgcgttccaacctggccaaggagctcgagaaatattccaagacctcgtttgaatacaacagttacgacaaccatacttatggcaagcgagccatagctcccaaggtgcaaaccagggatatatcccccaaaggatatgatgatgcgaagcgggtactgcaaggaccccagccccagcagcagcagcaccagcagctacgcgcccagcagcagcagcaacctgagctgcggcgggggcagcagcgccagcagcacgtgcagcaagagcagcttcgactacacgcacgacatggaggcggcccacatggcggccaccgccatcctcaacctgtccacgcgctgccgcgagatgccgcagaacctgagcaccaagccgcaggacctgtgcgccacgcggaaccctgacatggaggtggatgagaacgggaccctggacctcagcatgaacaagcagaggccgcgggacagctgctgccccatcctgacccctctggagcccatgtccccccagcagcaggcagtgatgaacaaccggtgtttccagctgggcgagggcgactgctgggacttgcccgtagactacaccaaaatgaaaccccggaggatagacgaggacgagtccaaagacattactccagaagacttggacccattccaggaggctctagaagaaagacggtatcccggggaggtgaccatcccaagtcccaaacccaagtaccctcagtgcaaggagagcaaaaaggacttaataactctgtctggctgccccctggcggacaaaagcattcgaagtatgctggccaccagctcccaagaactcaagatccctgtccaaggccctagggccctagatcacctgcttatgttcagtgacttcctgaactagctctttcgccacaagacccttggaactttcttcatggaatgtaaacgcctggagggcttcctcttacctaacggctgtaaagtctgtagcctcatccaaaacagtgcctcatggaaaagtagatttaggatctcaaaacggacagcattagcaagagcagttcaacccactttgttcaggcgtcttttgtatggctcgaaaccacatttccctcatggtcaaaacatgactaactccacttggaactt

SEQ ID NO: 70459 - DNA, 1436 bp, Homo sapiens
  misc_feature (1)..(1): n is a, c, g, or t
  misc_feature (5)..(5): n is a, c, g, or t
  misc_feature (9)..(10): n is a, c, g, or t
  misc_feature (13)..(15): n is a, c, g, or t
naagngtcnntcnnnagatgaataaatttcagttttgtacaatgagaaaagtttgggagattggttacaaatggtgtgaatgtacctaatgcactgaacccatacactttaaaatggttcagatgctaagcttttttgtgtgtgtatgagataaattcttgctctgtcacccatgctagtgtgcaatggtgtgattgtggctcactgcagcctcaacctcctgggctccagtgatcctcccacttcagccttctgagcagctaggactacaggtgcatgccaccacgcccagctaatttttgtatgttttttgtagagatgggatttgggatttctttctttctttttctttttttttttttgagatggattttcactcttgttgcccaggctgaagtgcaatggtgtgaccttggctcattgcaacctccatctcccgggttcaagcgattttcctgcctcagcctcccgagtagctgagattacaggcacccaccaccacgcccagctaattttttgtatttttagtagagacacggtttcgccatgttggccaggctggtcttgaattcccgtcctcaggcgatccacccgccttggcctcccaaagtgctgagattacaggcatgagccactgcacctggccaaaactaagtctttaggaaaatgtaactatgattaaatagtgtaatctgtataaactttaggaggatatttggcaatacatgtcaaaactcttattgtagaagaatgtctaatgacagagtaatgtatatatgatacattattaattgcaaaaagtctatttataaacgtaatggtgcaagcttatgtgtgcccatgcatgtatgaacagacagaagatacacactgaaatgttacggttccacgttctctaaagcaggcattcttgacaggtacaatacatctcccaattgggtaaaactggatcttggcacaggagggagtgtggaaaaaagactttgacattattaatataatagtctgtggccctccaaagcgtcacagtacataaacagatatacagcatatatgtagtactgaaatttttagggtgggaaaaagtgattaggagaaaatgtctaaaaaggctaattaggggtcaataattttaaaaaggttgaaaaacatagggcatgatgccaaaaaataaggcaaagttccccagtgtgaggaatgaatgaatgaatgaatgaataaataaataaataaataaataaataaataaatggtatgggtttcatatgtgctgagtactgattctctcaggcctttgaggatgccaatcaaggccagtagcaggggtagggttagggccctggggtatttgtccttggtctgcagcatcctcttctatttattccattgtgcctccaaatatcatttgctgtgagtgctgttatgtgagaaaggtt

SEQ ID NO: 70460 - DNA, 307 bp, Homo sapiens
gtgccactgcattccagcctgggcaatagagtgagactccatctcaaaaagaaaaacaagaaaacccaaaaaaaccactaacaacaaaacccagcctttttgctgatatggagaaagctttagtgatctggagagaagatcaaagaagccgcagcacttccttaagccaaagcctaatccagagcaaggcccctcttcagttctctgaagcccaagagaggtgaggaagctgaagaagaaaagtttgaagctagcagaggttgacttacaaggtttgaggaaagaagccatctctctaacatcaaag

SEQ ID NO: 70461 - DNA, 724 bp, Homo sapiens
agcgggggaacagcatcagtgggcttttgctttatctaggctagatgaagaccttggctgtagatgagctgtccgtgacgtaggtttgtacgtcaactcagccttattctgggaaatcattaatccttaactctgatgactgtgcaaaagtagtcactgaccactcacgcagatgcttgagagtgatcacattcttgtagtgataaaaggttgttttaaatcatgagccatttttcccatgactcttgtagccccttgagcttgaaacttggggtaacactagcttgctcttcttaccagcttgagctcagctgaatatgacggtgaactgagatccctgcaccagcttgtcagcatgtgatgggagagaatgctctggacagggtatgcatgccatcctaaaataaaacataaatccttgacaatttcctttggacagtcaaaccatttaaggaactaggaagatcttggctgactaagagactaatggtcctttgtcctgtcccagtcacagcttttctgttttctttggtgctgcactgaagttttcttctatttgtaaaaaggcagagttatcatcccttttcctaactttctttttcagtctcttggccctcggatgtcattgaatgtctcaccttgcatcattaagcatacttgtaatgtggtcttttcttcatgccatacatgttgtatcttcttatcatttctctgatgctatgag

SEQ ID NO: 70462 - DNA, 812 bp, Homo sapiens
  misc_feature (13)..(13): n is a, c, g, or t
  misc_feature (90)..(90): n is a, c, g, or t
  misc_feature (102)..(102): n is a, c, g, or t
  misc_feature (105)..(105): n is a, c, g, or t
  misc_feature (108)..(108): n is a, c, g, or t
  misc_feature (110)..(110): n is a, c, g, or t
  misc_feature (120)..(120): n is a, c, g, or t
  misc_feature (123)..(123): n is a, c, g, or t
  misc_feature (125)..(126): n is a, c, g, or t
  misc_feature (133)..(133): n is a, c, g, or t
  misc_feature (673)..(673): n is a, c, g, or t
  misc_feature (690)..(690): n is a, c, g, or t
  misc_feature (698)..(698): n is a, c, g, or t
  misc_feature (704)..(704): n is a, c, g, or t
  misc_feature (711)..(711): n is a, c, g, or t
  misc_feature (715)..(715): n is a, c, g, or t
  misc_feature (719)..(719): n is a, c, g, or t
  misc_feature (769)..(769): n is a, c, g, or t
tcaaaattttttntttaactccatcacccataactttacatttccattcacccccttaaattcactcctctctttcccaaacacatcttntacattttaacntantanancaccccaaanttnannccaaacnattctttttctttttttaattttacatgcacattgcagttgtaggtgttcattttcagcatctagtagataatccattggtgtttgtcccaccattggtgtattctaacaagaatgtgtccaactttgaatctcctggcttgaaagtataaaccatcacttaattcttattttaactctccacctgaaaaccagttcatatttctggccattttatgtaagcaaaactgaacaattggtgaaacattttgttactcttggaattgactctggctgtcagtgtgagccattagagtaacatcgaatcttggggcaaagagctgcccaggtgaattaaatttttccaggacactagctagtgtgccttggattgattacctcttctactgcattgaaaggcgccatgttttcctgaaatactaaattcccaacacctgggtaaacaatgaccttccagagagtggctcccgtatgcctctccctaggaccaaccccatgaacatgttttgtcacgtttgtctcatgtttctacttcacagtnccgtgtgtgttgctttnaagtggtnaagttnacgaggnattnattnctgagtgaggctaatgagtgtcgtattggctgtcttctcttctaattctnctatgtttttttcatttctctcttgtttccttttctatttctc

SEQ ID NO: 70463 - DNA, 5813 bp, Homo sapiens
ctcctcccctccccctccgccctcctccgctccgggccagcgcggcggcggcggcggcggcagcagcaggagcagccccggctgcgggtcgcgacggcggcggggcgccccctcccccgtgccggggcgcggcggagggatgtggggccttgcgggaggaaggcttttcggcatcttctcggccccggtgctggtggctgtggtgtgctgcgcccagagtgtgaacgatcccgggaacatgtcctttgtgaaggagacggtggacaagctgttgaaaggctacgacattcgcctaagacccgacttcgggggtcccccggtctgcgtggggatgaacatcgacatcgccagcatcgacatggtttccgaagtcaacatggattataccttaaccatgtattttcaacaatattggagagataaaaggctcgcctattctgggatccctctcaacctcacgcttgacaatcgagtggctgaccagctatgggtgcccgacacatatttcttaaatgacaaaaagtcatttgtgcatggagtgacagtgaaaaaccgcatgatccgtcttcaccctgatgggacagtgctgtatgggctcagaatcaccacgacagcagcatgcatgatggacctcaggagataccccctggacgagcagaactgcactctggaaattgaaagctatggctacaccacggatgacattgagttttactggcgaggcggggacaaggctgttaccggagtggaaaggattgagctcccgcagttctccatcgtggagcaccgtctggtctcgaggaatgttgtcttcgccacaggtgcctatcctcgactgtcactgagctttcggttgaagaggaacattggatacttcattcttcagacttatatgccctctatactgataacgattctgtcgtgggtgtccttctggatcaattatgatgcatctgctgctagagttgccctcgggatcacaactgtgctgacaatgacaaccatcaacacccaccttcgggagaccttgcccaaaatcccctatgtcaaagccattgacatgtaccttatgggctgcttcgtctttgtgttcctggcccttctggagtatgcctttgtcaactacattttctttggaagaggccctcaaaggcagaagaagcttgcagaaaagacagccaaggcaaagaatgaccgttcaaagagcgaaagcaaccgggtggatgctcatggaaatattctgttgacatcgctggaagttcacaatgaaatgaatgaggtctcaggcggcattggcgataccaggaattcagcaatatcctttgacaactcaggaatccagtacaggaaacagagcatgcctcgagaagggcatgggcgattcctgggggacagaagcctcccgcacaagaagacccatctacggaggaggtcttcacagctcaaaattaaaatacctgatctaaccgatgtgaatgccatagacagatggtccaggatcgtgtttccattcactttttctcttttcaacttagtttactggctgtactatgttaactgagtgactgtacttgatttttcaaagacttcatttaacactgagtgaaatattactctgcctgtcaagtttttatacctgtacacacacagacacacaagcagacacacacatatatacatacgcaattgtatatatatgtgaactttctcagcatatatataaaatacacgtgtatatgaggatgtatgtgtatatgtttatacacacaggagtcagtgcccatgtgtatggaagacaaatacacatacatatatacattttgcagctatggacaatttaccacaggatgcatattaaagaaagtcatagtttttttcttttttaattgaaagggacaagtatcatctaaatattatgccttgagaatgagggcgtgaaacacaatatcatccccaaatgtgtcttgtattatcataagttagatgttttagtttaaaaatcagaaagacattcttagttaatctttgaaaactcatacagtggtattgctagtttaaaatgagtcacttacttcatatcctctcgttcagtttagtaagcaaaggcttcttggcttctctggtgatggggtttgttttcatcgggcatacgttttctgcaatggtttagtggctggggtgagccactggcagtgtgcttacctgttgtctgaaacatagatagatcccacgttgatgtctgaacgaccgtcttttgaaaactcatcgggagtgaatggcatctcgttgtaagtactctaatatacagtgtgtagtttgtttctgttgttcacttggagtggatccagcttcactgtcatgtgcgaacacagtgacacgtttggccagtgacatttcaatcactgaaaatgtgctctacatctcgtatggatttctaggcctgatatccaacagaaagcatagacgtctcaggttattcgttactctaaggtaaaaccatctaggatgattttcccccttgcagttatgttatcattcttataacattgtatgttaatagaaaatatatttgcataatatgcatatatatgtatatttaccaagattttgtttcttacgcttgctatcatggcagcatgcgatgtcatattttcctttatgtgatgtaactactttctgttatctagaaattaagattgaagctaaaacacttctactgttcaatttcagaaactaagaatcatcctcatgcctttatttctgtatctgacatatttcataagcacatccaactactcctagactgactaggattctgcaggaacatgacccgtacacaccacgcgtcacccaacgacccatgaccgttctctgaggcaaaggagggcaacctgacagcaaacacagtcactgttggttccttctgatccacagcctcatcagtatttggactttttaaagctcgtagaaacaagacaaggtgcaccggtttcatagacgcaaccttaacttactatttagatgagatctttctaaagaaaaaaaaaagagatgatatattttttgtaaacaatatttctatcacaggcatccataaactgaaatgactacagttgtgcaaacaggtgtcacagtgaagttgagcatttggagaaaaaaataaaaagcaaaatttgcaggaagaactgctaaattaatactttatcccaaaatgccacgtatgcctcaccctctctgttctatccaaaaccaaggaccagagtgctccaatggtaggccccagttgtctcgatgtaggtagaggcaccaccctccccgaggatgcgtgtggtgtggactatccccatgagctgaccactacttgatttttctttggtggccgtaacaacctttaatttgtgggcatctgcaacagttcaaaacccaccatcagataaaacataatccacaaaatctcacgctagaggcaattacctacttttagacccttttccctctttcattcctatctttttcctcctaatcgctgctctctggttttattttcatctggagactagccagggatttctttggctttggcttttctctgaccattttttccatgggtaacaatgggggatcctaaaagttaaacagattgggaaaaaccttgttaagtggccttatcattattatcatgttaaagaaaaaaaatacatttgcaaagaccttatccctttcaatacttcaggtatctttttctgtatccagtaattaaaggtgtgaggtccacatgcagaagagggaccccaaaatgtaaatggatgtggacaaaaacagtcaatggtctatttaagtgtataatttatactattcagaactgtgacattaattctttctgggagaaaagtgatttaaaacttttttgatgcatagttgaggtacccaaatatcaaaggcagagaccccatggggctccaaagagctgcagtctccttcccaaggttttctggatataaatttgcatggtatagtcataatagcttttgagctttttatatgcatttggcaccaagactgggatccacaactttgtagacactgcgatgaagttaacatattagctatactataaatagtgtttgtaactcacacacacacacacacacacacacaaatacatacatatattctgtaaaaacaaaaaaaaactttttaagatccttgggtatgtgtttgctttactccatttcagaagaaaattacttttcttctaacaaaattattttatagcttctccatttttaaaacttgtgagagcattgagaagagaactctgactgtgttaacagaagagagttgaattggagtctctgttgtgttaaaatgacctctcgttactccacagtagttatttgagccagtgactgagtcgcgttgaggaattctgaacccggacctctgacgttgttgggaggtggctgttacccacacccagacctcttgagtaaggacagaaacgttatcattggggatataatgagatttctttcttaacaattgaaagtaataaagagttaattttctcagtagtcctgtctttccaaaatgcgccacaggggctcaagatctacagaagaatcttgttatgacagtttgttattacccatattcagatatccttgagataatggaagagccctgctacataactccctacagagaaagactgatagacttgagtagtccttaaaacaagtgttattcctgttcaccaaccccgggactgtggaggggtttcactgtctataccatgcgacatccatttcccctgaatctcaaacgaactagaaagtatgtcatgataatatttccattagatttggaagctacctgtacatctgcaatattgtgtttttaacgccagcacccagaactttgacatgttcagtcactccctgaaaggcacttctctcttgtccaaacacagcgttgacatttttactgaggagatcatctcaaaggtgatgccaaacgagtctggggctggttttaaggggacaggcacattgcagttgtaggtgttcattttcagcatctagtagataatccattggtgtttgtcccaccattggtgtattctaacaagaatgtgtccaactttgaatctcctggcttgaaagtataaaccatcacttaattcttattttaactctccacctgaaaaccagttcatatttctggccattttatgtaagcaaaactgaacaattggtgaaacattttgttactcttggaattgactctggctgtcagtgtgagccattagagtaacatcgaatcttggggcaaagagctgcccaggtgaattaaatttttccaggacactagctagtgtgccttggattgattacctcttctactgcattgaaaggcgccatgttttcctgaaatactaaattcccaacacctgggtaaacaatgaccttccagagagtggctcccgtatgcctctccctaggaccaaccccatgaacatgttttgtcacgtttgtctcatgtttctacttcacaagtcagtgagtgtgtttaaggtaagtacaggattattctagtaggaataggcgattgctgtcataatcaattctcatgttgatttcattttattgtaaagataaatttaaacccagttttgcttaagcacattgatgtaattttttggtattatttgacatgaaaaaacagcaaaattgagtgatagatacaatatgaaacttgttgatgaatgaattcaaatttattaaaaaaggagtaactgacctaaaaaaaaa

SEQ ID NO: 70464 - DNA, 4574 bp, Homo sapiens
ctcctcccctccccctccgccctcctccgctccgggccagcgcggcggcggcggcggcggcagcagcaggagcagccccggctgcgggtcgcgacggcggcggggcgccccctcccccgtgccggggcgcggcggagggatgtggggccttgcgggaggaaggcttttcggcatcttctcggccccggtgctggtggctgtggtgtgctgcgcccagagtgtgaacgatcccgggaacatgtcctttgtgaaggagacggtggacaagctgttgaaaggctacgacattcgcctaagacccgacttcgggggtcccccggtctgcgtggggatgaacatcgacatcgccagcatcgacatggtttccgaagtcaacatggattataccttaaccatgtattttcaacaatattggagagataaaaggctcgcctattctgggatccctctcaacctcacgcttgacaatcgagtggctgaccagctatgggtgcccgacacatatttcttaaatgacaaaaagtcatttgtgcatggagtgacagtgaaaaaccgcatgatccgtcttcaccctgatgggacagtgctgtatgggctcagaatcaccacgacagcagcatgcatgatggacctcaggagataccccctggacgagcagaactgcactctggaaattgaaagctatggctacaccacggatgacattgagttttactggcgaggcggggacaaggctgttaccggagtggaaaggattgagctcccgcagttctccatcgtggagcaccgtctggtctcgaggaatgttgtcttcgccacaggtgcctatcctcgactgtcactgagctttcggttgaagaggaacattggatacttcattcttcagacttatatgccctctatactgataacgattctgtcgtgggtgtccttctggatcaattatgatgcatctgctgctagagttgccctcgggatcacaactgtgctgacaatgacaaccatcaacacccaccttcgggagaccttgcccaaaatcccctatgtcaaagccattgacatgtaccttatgggctgcttcgtctttgtgttcctggcccttctggagtatgcctttgtcaactacattttctttggaagaggccctcaaaggcagaagaagcttgcagaaaagacagccaaggcaaagaatgaccgttcaaagagcgaaagcaaccgggtggatgctcatggaaatattctgttgacatcgctggaagttcacaatgaaatgaatgaggtctcaggcggcattggcgataccaggaattcagcaatatcctttgacaactcaggaatccagtacaggaaacagagcatgcctcgagaagggcatgggcgattcctgggggacagaagcctcccgcacaagaagacccatctacggaggaggtcttcacagctcaaaattaaaatacctgatctaaccgatgtgaatgccatagacagatggtccaggatcgtgtttccattcactttttctcttttcaacttagtttactggctgtactatgttaactgagtgactgtacttgatttttcaaagacttcatttaacactgagtgaaatattactctgcctgtcaagtttttatacctgtacacacacagacacacaagcagacacacacatatatacatacgcaattgtatatatatgtgaactttctcagcatatatataaaatacacgtgtatatgaggatgtatgtgtatatgtttatacacacaggagtcagtgcccatgtgtatggaagacaaatacacatacatatatacattttgcagctatggacaatttaccacaggatgcatattaaagaaagtcatagtttttttcttttttaattgaaagggacaagtatcatctaaatattatgccttgagaatgagggcgtgaaacacaatatcatccccaaatgtgtcttgtattatcataagttagatgttttagtttaaaaatcagaaagacattcttagttaatctttgaaaactcatacagtggtattgctagtttaaaatgagtcacttacttcatatcctctcgttcagtttagtaagcaaaggcttcttggcttctctggtgatggggtttgttttcatcgggcatacgttttctgcaatggtttagtggctggggtgagccactggcagtgtgcttacctgttgtctgaaacatagatagatcccacgttgatgtctgaacgaccgtcttttgaaaactcatcgggagtgaatggcatctcgttgtaagtactctaatatacagtgtgtagtttgtttctgttgttcacttggagtggatccagcttcactgtcatgtgcgaacacagtgacacgtttggccagtgacatttcaatcactgaaaatgtgctctacatctcgtatggatttctaggcctgatatccaacagaaagcatagacgtctcaggttattcgttactctaaggtaaaaccatctaggatgattttcccccttgcagttatgttatcattcttataacattgtatgttaatagaaaatatatttgcataatatgcatatatatgtatatttaccaagattttgtttcttacgcttgctatcatggcagcatgcgatgtcatattttcctttatgtgatgtaactactttctgttatctagaaattaagattgaagctaaaacacttctactgttcaatttcagaaactaagaatcatcctcatgcctttatttctgtatctgacatatttcataagcacatccaactactcctagactgactaggattctgcaggaacatgacccgtacacaccacgcgtcacccaacgacccatgaccgttctctgaggcaaaggagggcaacctgacagcaaacacagtcactgttggttccttctgatccacagcctcatcagtatttggactttttaaagctcgtagaaacaagacaaggtgcaccggtttcatagacgcaaccttaacttactatttagatgagatctttctaaagaaaaaaaaaagagatgatatattttttgtaaacaatatttctatcacaggcatccataaactgaaatgactacagttgtgcaaacaggtgtcacagtgaagttgagcatttggagaaaaaaataaaaagcaaaatttgcaggaagaactgctaaattaatactttatcccaaaatgccacgtatgcctcaccctctctgttctatccaaaaccaaggaccagagtgctccaatggtaggccccagttgtctcgatgtaggtagaggcaccaccctccccgaggatgcgtgtggtgtggactatccccatgagctgaccactacttgatttttctttggtggccgtaacaacctttaatttgtgggcatctgcaacagttcaaaacccaccatcagataaaacataatccacaaaatctcacgctagaggcaattacctacttttagacccttttccctctttcattcctatctttttcctcctaatcgctgctctctggttttattttcatctggagactagccagggatttctttggctttggcttttctctgaccattttttccatgggtaacaatgggggatcctaaaagttaaacagattgggaaaaaccttgttaagtggccttatcattattatcatgttaaagaaaaaaaatacatttgcaaagaccttatccctttcaatacttcaggtatctttttctgtatccagtaattaaaggtgtgaggtccacatgcagaagagggaccccaaaatgtaaatggatgtggacaaaaacagtcaatggtctatttaagtgtataatttatactattcagaactgtgacattaattctttctgggagaaaagtgatttaaaacttttttgatgcatagttgaggtacccaaatatcaaaggcagagaccccatggggctccaaagagctgcagtctccttcccaaggttttctggatataaatttgcatggtatagtcataatagcttttgagctttttatatgcatttggcaccaagactgggatccacaactttgtagacactgcgatgaagttaacatattagctatactataaatagtgtttgtaactcacacacacacacacacacacacacaaatacatacatatattctgtaaaaacaaaaaaaaactttttaagatccttgggtatgtgtttgctttactccatttcagaagaaaattacttttcttctaacaaaattattttatagcttctccatttttaaaacttgtgagagcattgagaagagaactctgactgtgttaacagaagagagttgaattggagtctctgttgtgttaaaatgacctctcgttactccacagtagttatttgagccagtgactgagtcgcgttgaggaattctgaacccggacctctgacgttgttgggaggtggctgttacccacacccagacctcttgagtaaggacagaaacgttatcattggggatataatgagatttctttcttaacaattgaaagtaataaagagttaattttctcagta

SEQ ID NO: 70465 - DNA, 5730 bp, Homo sapiens
ctcggagagtaggggggacagcggatcccagcaggttaggccggaggaacagcgccatgtgctccgggctcctggagctcctgctgcccatctggctctcctggaccctggggacccgaggctctgagccccgcagtgtgaacgatcccgggaacatgtcctttgtgaaggagacggtggacaagctgttgaaaggctacgacattcgcctaagacccgacttcgggggtcccccggtctgcgtggggatgaacatcgacatcgccagcatcgacatggtttccgaagtcaacatggattataccttaaccatgtattttcaacaatattggagagataaaaggctcgcctattctgggatccctctcaacctcacgcttgacaatcgagtggctgaccagctatgggtgcccgacacatatttcttaaatgacaaaaagtcatttgtgcatggagtgacagtgaaaaaccgcatgatccgtcttcaccctgatgggacagtgctgtatgggctcagaatcaccacgacagcagcatgcatgatggacctcaggagataccccctggacgagcagaactgcactctggaaattgaaagctatggctacaccacggatgacattgagttttactggcgaggcggggacaaggctgttaccggagtggaaaggattgagctcccgcagttctccatcgtggagcaccgtctggtctcgaggaatgttgtcttcgccacaggtgcctatcctcgactgtcactgagctttcggttgaagaggaacattggatacttcattcttcagacttatatgccctctatactgataacgattctgtcgtgggtgtccttctggatcaattatgatgcatctgctgctagagttgccctcgggatcacaactgtgctgacaatgacaaccatcaacacccaccttcgggagaccttgcccaaaatcccctatgtcaaagccattgacatgtaccttatgggctgcttcgtctttgtgttcctggcccttctggagtatgcctttgtcaactacattttctttggaagaggccctcaaaggcagaagaagcttgcagaaaagacagccaaggcaaagaatgaccgttcaaagagcgaaagcaaccgggtggatgctcatggaaatattctgttgacatcgctggaagttcacaatgaaatgaatgaggtctcaggcggcattggcgataccaggaattcagcaatatcctttgacaactcaggaatccagtacaggaaacagagcatgcctcgagaagggcatgggcgattcctgggggacagaagcctcccgcacaagaagacccatctacggaggaggtcttcacagctcaaaattaaaatacctgatctaaccgatgtgaatgccatagacagatggtccaggatcgtgtttccattcactttttctcttttcaacttagtttactggctgtactatgttaactgagtgactgtacttgatttttcaaagacttcatttaacactgagtgaaatattactctgcctgtcaagtttttatacctgtacacacacagacacacaagcagacacacacatatatacatacgcaattgtatatatatgtgaactttctcagcatatatataaaatacacgtgtatatgaggatgtatgtgtatatgtttatacacacaggagtcagtgcccatgtgtatggaagacaaatacacatacatatatacattttgcagctatggacaatttaccacaggatgcatattaaagaaagtcatagtttttttcttttttaattgaaagggacaagtatcatctaaatattatgccttgagaatgagggcgtgaaacacaatatcatccccaaatgtgtcttgtattatcataagttagatgttttagtttaaaaatcagaaagacattcttagttaatctttgaaaactcatacagtggtattgctagtttaaaatgagtcacttacttcatatcctctcgttcagtttagtaagcaaaggcttcttggcttctctggtgatggggtttgttttcatcgggcatacgttttctgcaatggtttagtggctggggtgagccactggcagtgtgcttacctgttgtctgaaacatagatagatcccacgttgatgtctgaacgaccgtcttttgaaaactcatcgggagtgaatggcatctcgttgtaagtactctaatatacagtgtgtagtttgtttctgttgttcacttggagtggatccagcttcactgtcatgtgcgaacacagtgacacgtttggccagtgacatttcaatcactgaaaatgtgctctacatctcgtatggatttctaggcctgatatccaacagaaagcatagacgtctcaggttattcgttactctaaggtaaaaccatctaggatgattttcccccttgcagttatgttatcattcttataacattgtatgttaatagaaaatatatttgcataatatgcatatatatgtatatttaccaagattttgtttcttacgcttgctatcatggcagcatgcgatgtcatattttcctttatgtgatgtaactactttctgttatctagaaattaagattgaagctaaaacacttctactgttcaatttcagaaactaagaatcatcctcatgcctttatttctgtatctgacatatttcataagcacatccaactactcctagactgactaggattctgcaggaacatgacccgtacacaccacgcgtcacccaacgacccatgaccgttctctgaggcaaaggagggcaacctgacagcaaacacagtcactgttggttccttctgatccacagcctcatcagtatttggactttttaaagctcgtagaaacaagacaaggtgcaccggtttcatagacgcaaccttaacttactatttagatgagatctttctaaagaaaaaaaaaagagatgatatattttttgtaaacaatatttctatcacaggcatccataaactgaaatgactacagttgtgcaaacaggtgtcacagtgaagttgagcatttggagaaaaaaataaaaagcaaaatttgcaggaagaactgctaaattaatactttatcccaaaatgccacgtatgcctcaccctctctgttctatccaaaaccaaggaccagagtgctccaatggtaggccccagttgtctcgatgtaggtagaggcaccaccctccccgaggatgcgtgtggtgtggactatccccatgagctgaccactacttgatttttctttggtggccgtaacaacctttaatttgtgggcatctgcaacagttcaaaacccaccatcagataaaacataatccacaaaatctcacgctagaggcaattacctacttttagacccttttccctctttcattcctatctttttcctcctaatcgctgctctctggttttattttcatctggagactagccagggatttctttggctttggcttttctctgaccattttttccatgggtaacaatgggggatcctaaaagttaaacagattgggaaaaaccttgttaagtggccttatcattattatcatgttaaagaaaaaaaatacatttgcaaagaccttatccctttcaatacttcaggtatctttttctgtatccagtaattaaaggtgtgaggtccacatgcagaagagggaccccaaaatgtaaatggatgtggacaaaaacagtcaatggtctatttaagtgtataatttatactattcagaactgtgacattaattctttctgggagaaaagtgatttaaaacttttttgatgcatagttgaggtacccaaatatcaaaggcagagaccccatggggctccaaagagctgcagtctccttcccaaggttttctggatataaatttgcatggtatagtcataatagcttttgagctttttatatgcatttggcaccaagactgggatccacaactttgtagacactgcgatgaagttaacatattagctatactataaatagtgtttgtaactcacacacacacacacacacacacacaaatacatacatatattctgtaaaaacaaaaaaaaactttttaagatccttgggtatgtgtttgctttactccatttcagaagaaaattacttttcttctaacaaaattattttatagcttctccatttttaaaacttgtgagagcattgagaagagaactctgactgtgttaacagaagagagttgaattggagtctctgttgtgttaaaatgacctctcgttactccacagtagttatttgagccagtgactgagtcgcgttgaggaattctgaacccggacctctgacgttgttgggaggtggctgttacccacacccagacctcttgagtaaggacagaaacgttatcattggggatataatgagatttctttcttaacaattgaaagtaataaagagttaattttctcagtagtcctgtctttccaaaatgcgccacaggggctcaagatctacagaagaatcttgttatgacagtttgttattacccatattcagatatccttgagataatggaagagccctgctacataactccctacagagaaagactgatagacttgagtagtccttaaaacaagtgttattcctgttcaccaaccccgggactgtggaggggtttcactgtctataccatgcgacatccatttcccctgaatctcaaacgaactagaaagtatgtcatgataatatttccattagatttggaagctacctgtacatctgcaatattgtgtttttaacgccagcacccagaactttgacatgttcagtcactccctgaaaggcacttctctcttgtccaaacacagcgttgacatttttactgaggagatcatctcaaaggtgatgccaaacgagtctggggctggttttaaggggacaggcacattgcagttgtaggtgttcattttcagcatctagtagataatccattggtgtttgtcccaccattggtgtattctaacaagaatgtgtccaactttgaatctcctggcttgaaagtataaaccatcacttaattcttattttaactctccacctgaaaaccagttcatatttctggccattttatgtaagcaaaactgaacaattggtgaaacattttgttactcttggaattgactctggctgtcagtgtgagccattagagtaacatcgaatcttggggcaaagagctgcccaggtgaattaaatttttccaggacactagctagtgtgccttggattgattacctcttctactgcattgaaaggcgccatgttttcctgaaatactaaattcccaacacctgggtaaacaatgaccttccagagagtggctcccgtatgcctctccctaggaccaaccccatgaacatgttttgtcacgtttgtctcatgtttctacttcacaagtcagtgagtgtgtttaaggtaagtacaggattattctagtaggaataggcgattgctgtcataatcaattctcatgttgatttcattttattgtaaagataaatttaaacccagttttgcttaagcacattgatgtaattttttggtattatttgacatgaaaaaacagcaaaattgagtgatagatacaatatgaaacttgttgatgaatgaattcaaatttattaaaaaaggagtaactgacctaaaaaaaaa

SEQ ID NO: 70466 - DNA, 1307 bp, Homo sapiens
ctcctcccctccccctccgccctcctccgctccgggccagcgcggcggcggcggcggcggcagcagcaggagcagccccggctgcgggtcgcgacggcggcggggcgccccctcccccgtgccggggcgcggcggagggatgtggggccttgcgggaggaaggcttttcggcatcttctcggccccggtgctggtggctgtggtgtgctgcgcccagagtgtgaacgatcccgggaacatgtcctttgtgaaggagacggtggacaagctgttgaaaggctacgacattcgcctaagacccgacttcgggggtcccccggtctgcgtggggatgaacatcgacatcgccagcatcgacatggtttccgaagtcaacatggattataccttaaccatgtattttcaacaatattggagagataaaaggctcgcctattctgggatccctctcaacctcacgcttgacaatcgagtggctgaccagctatgggtgcccgacacatatttcttaaatgacaaaaagtcatttgtgcatggagtgacagtgaaaaaccgcatgatccgtcttcaccctgatgggacagtgctgtatgggctcaggtactatggccctggcctggaggaggtctggcacagctgagaacactgaagttaaattccccatggtggaaggtttgcagagagctggggttgttcctgctgttcctgcttgtaaagtactgctgaggaaggtcctgcccagcagagattgctttcctactgattatgtgcttgaaatactggttggactggctgtatcactgagaccttcagactgaatttctctcacccctggacactgagattggctctcaccttgtctatccagcagtagcctacactgcttgagctcagctgaatatgacggtgaactgagatccctgcaccagcttgtcagcatgtgatgggagagaatgctctggacagggtatgcatgccatcctaaaataaaacataaatccttgacaatttcctttggacagtcaaaccatttaaggaactaggaagatcttggctgactaagagactaatggtcctttgtcctgtcccagtcacagcttttctgttttctttggtgctgcactgaagttttcttctatttgtaaaaaggcagagttatcatcccttttcctaactttctttttcagtctcttggccctcggatgtcattgaatgtctcaccttgcatcattaagcatacttgtaatgtggtcttttcttcatgccatacatgttgtatcttcttatcatttctctgatgctatgag

SEQ ID NO: 70467 - DNA, 312 bp, Homo sapiens
ttttaaattcatctctgtgtggtgtctgggtcagctctgaagttacacttcgcaaatagaactctggtcagagcacccattctccccagcctctcgacttttcagtaccaacctggtacaaataaaatggcagcagtaacatgagaatattggaaagttagttctttgatgacacttcccctagacaagcacattaagcaaatctactcaaaacatagcagagccgcaacctccatgttaatgatagtttatttagccgtgcatttatacgaaatggtgatgtttgctgtctccctgcttctctcttggcag

SEQ ID NO: 70468 - DNA, 734 bp, Homo sapiens
ttccctcgagctatgggaagcaccctcgctaaggcaaagcatacacactcagatgcccagagtccaaacaagtagctgaccccttttgctgagaccttgaagagggccacctcaggcacatcaagagagatcaaaccacctcaatacaagggcaagcttctttagcccattgtggccagggcagaattcaggtcctactgccagatttactggtttcccaagtgctataaatccagtttaagtgaaaggtgtctgagggggtgcatttggacccaccggggcctggggcataattcgaaaaagcatgtgcattcttatgatttcatttcatatttggaaaactaaagaggaaatatttttcaagacactatagaatggtaacatttaacaaaatcttggctcaaagtggtctgtttaaaaagtctaaaacacttattttcctattatggtaaacaaaaatgtttgtatcactaaaaaacaccttcacaatattttaatgactctttcctgatgttgttgttatttagcatagcagtctcttctagaccttagtcgttccttcattcatccaataaactattaatagtgaaggctatttgccaagccctgagaacatggtggtgaccagactgacacagaccctgccctcaagagactcatattccagctagggaggcagaaactatttttgcttttttacctatgtcatatgaagaacattttttcaaatcact

SEQ ID NO: 70469 - DNA, 527 bp, Homo sapiens
tcccaaatggttacgtatttcttttacaaaatatgctgatgtctttttttttttacaggttgaaaaaagaatagcttaggagtagcacatagagagttcttgtgtgtggcctttgtttctcttgacttttataaaataggatgtttcttgaaagctgggtgctgttaaataatgcatggttttcaactggttagatggtacagcagaacactgggggtgaagaaacaaggatttcagtactaattcagccaacaactatccctgtaatagtgagcaagtaatctgtataatcctgcatttgctattctatttcatacaaataaagctataagttagaacttacacttgtagtgtttatgacactccaaaaatagcttgtggtgttcatgacaatttaggatttaacacaatgttcaaatttgataaaaatatgagaaagctatacgatacaaacatgcttaaaagctatttgccatttttaattttaacatatttaaaaaataaaatttaaagacatctggatttct

SEQ ID NO: 70470 - DNA, 1566 bp, Homo sapiens
tggaaagccattttgcttgggttgacactgattttagaaattcaaacaatttgtgctgaagagcaaggtctttggagaacatttgggatgataactagtctcccactccaaactggatgaatgacttgataaagtcattttaccccttcgtttgtttgtttgttcgtttgtttgtttgtttgtttagacagagtcttgctggagtgcagtgagccgagatcatgccactgcactctggcctgggtgtcagagcaagactccgtctcaaaaaaaaaaaaaaagattaaatgaatcataagaatggggccttaatctgatagaattgtggccttttaagaagaggaagaaagagaaaaagagaaacatctgtctctttctctctcttaaccgtgtgaggacgcagggagaacgtggccatctgcaaatcaaggagagagtcctcatcagacattgaccctgctgtcaccttgatcttggacttccagtgcccagaactgtgagaaaagaagtgtctgttgtttcagccactcagttgatggtgttttattatggcagcataaacagactactgtaggagcttagactctgggtcctgatacatatcggatcctgatgcttatcaaatccaggctccttccttgaatgtgtgacctttggccaggttctcgacttctctatgcctcagtttactcctcagtaaaatggagataataatattacttatcacctcagtaaaatggagacaataatattacttaccatctaggtttattttgagacttaaataacttaatgtatgtaaagtatttatattgtgagtgcaaaataaattaactattataatagtccctaatgtacttaatatctaactgcaaacattgccaagttttcttcttgtccaaagtcacaacagttttctttaggaaattttccatacaaagtggggcacattttcactgggttctttaagatgagataataaaaaatgatacgttagaaaattttccttatggcatcagtcttctctgacagattgcagcttcataaaggcaaaaactcttgattttctttttaacccacataagcccttaataaaatacccattacatgtagttgaagtaagaaaagctggaagtgaggaatggaggaaagaagaaaagaggggcacaaaatatttcattaaatgttttaaaaatccccagaaattcagaatacatgaatataggctgacattaaagcagatgtacgtctcgtgcagaacacacagtgaggaaacaaaatggcaagagcaaagctaaagaaaactaccaaatttgcattttcattaattcagccttaaatgtaactttgtgtcactgaataagtgacttacttcctaaacatgacggtcagacaggaaatcacttttcttgtgattagcataatgcttatattgtttttttagctacagtctaatcattacaaagaactactcgttgtgtccatattaaaattaaaagtaccttgccataacaaaagcacattctaagcctttcgaaatgtcaacatattaaaatatattaaagc

SEQ ID NO: 70471 - DNA, 487 bp, Homo sapiens
gaaaagacagttcttagaaaaaggcaaagggctcttagccatatgaaaggataataatcggcctcactgataagaaaaacgtaaggtgaaactacaatagattatgataccctaccaatcatactggcaaaaatccaaaagtttgacaacatattctgtttgtgaggctgcaagcaaacaggcattctcatacatttttggtgggaatataaaatggtacaaagaggaagaggagtttggcagtatctaacaaaatcatacatgcatttattctttgacataatagtctcacaccgaggagtctttcccaaaggtagactgacaagaatatagtacatggagtgattcactgcagcactctttgaagtagaaaaagactgaaaacaactcaaatgtccattaatagggggctcactgaacagattgtggtatatccacaggatgcggtactatgtagctgttacatgaatggggaaatagctctttg

SEQ ID NO: 70472 - DNA, 1408 bp, Homo sapiens
  misc_feature (162)..(162): n is a, c, g, or t
  misc_feature (217)..(217): n is a, c, g, or t
  misc_feature (801)..(801): n is a, c, g, or t
  misc_feature (1332)..(1332): n is a, c, g, or t
ctctgattcatgaaatgtgaatttatgacagttgccactcttaaaaaaaaaaacaaacagacagaacttgagcaatacatgactgatgcattctcagcctgcttcctgtgttccatctgtctttctgccagtgcattcaccctccaggtttgaaagtagtcnggcaagaaagtactaaacatagagaaagggcaattccaaaagaacaaatgattgnttaatttaggctgacattacccagttgctgggggtatgggccatggggatgggccatgttcaccacttaggttgggcaaattcccaagatgccttttgacatagtaatgagggggaatacatcactcatgcccactggcattctctggggaaatttttaaaaggcagtatatcccactccagttgagttcaaatcaggtgccatatctacttaaaaatagcctcagatagaatggcaactcaaatgacagtttaactttcactactttctcggtagtgaaactttctacattccacattttctatcaagaaaagaaagaggttgtattgtgaggtaagaggcacacacacggacttccttcagtagctgcaatccttgctataggtcaggcatcaagacaattccactttacaggcctggattttggagaaagaaaggtgtttacaagtttctgtataattatagttatactgacatttaaatagttcaacagactggacttcctaacattcctattacatcgatattaatgaaagcatgacacaggtttcaaggaagcatgtccaggtatatgctgaatgacntaataagaaaaatgtaaatatgcattgcttttgtcttaaggtaatacttgtgattgcagaatcctagaatgtagagatgatggggacttcagagattctttaatccaaaccctttatttaatggaagaagggaaaaaggtctagagaagctgtgacttctctcagatcacacaataaattagttgctgaggtagaacaaaaacctaacttccactttaccatttccttgagaaactgtagaacaattgtaagccactgatatattccacataataaagccgctctgttgcctttttaggttctagtatgttacgtttatgttcccctgctttctacaatcctgttcaaagagttgctgacttaaccacagagaggattccagaacctgagacacagaataaacttgagcaatcatagtccatccacttcattgtctcatcaaaaaccaaaggtccagtgaagctctggaactcaacgctgtaaaggagcgaaggagcttctatacagagcctggatgcctgtctccttatnctacttcagtggacttgactgcaatccggattatgctgttttctaagcatttaaaataaaataaaaagtataaaag

SEQ ID NO: 70473 - DNA, 361 bp, Homo sapiens
  misc_feature (285)..(285): n is a, c, g, or t
ccttgctaccgacgatatcttcggtcctatctttcttgcgcaatgcacattggttctagtatgttacgtttatgttcccctgctttctacaatcctgttcaaagagttgctgacttaaccacagagaggattccagaacctgagacacagaataaacttgagcaatcatagtccatccacttcattgtctcatcaaaaaccaaaggtccagtgaagctctggaactcaacgctgtaaaggagcgaaggagcttctatacagagcctggatgcctgtctccttatnctacttcagtggacttgactgcaatccggattatgctgttttctaagcatttaaaataaaataaaaagtataaaag

SEQ ID NO: 70474 - DNA, 649 bp, Homo sapiens
  misc_feature (573)..(573): n is a, c, g, or t
ggagactctaagacttctgaagagtttcttgcttctttcctgtggggcagtgactccacttcccagcagtaatggaatatcctgaattagctacattaatgttagaaccatttggacctcacccaggacttcaactacattatgctaaagttacagaacccaaatttggcaactgtctgcatctgaacaacagaagtttcaacattctgccaacagagtaactcctggacgattggcacagaagaaggcacaaggcaaatacccatctctgtacaccctgtgctactgtgtcatgtgctgctccaggcaactccaatggattggccaccctggccaatgtgttctagtatgttacgtttatgttcccctgctttctacaatcctgttcaaagagttgctgacttaaccacagagaggattccagaacctgagacacagaataaacttgagcaatcatagtccatccacttcattgtctcatcaaaaaccaaaggtccagtgaagctctggaactcaacgctgtaaaggagcgaaggagcttctatacagagcctggatgcctgtctccttatnctacttcagtggacttgactgcaatccggattatgctgttttctaagcatttaaaataaaataaaaagtataaaag

SEQ ID NO: 70475 - DNA, 329 bp, Homo sapiens
tgagacagggtttcactctgtcacccaggctggagagcagtggtgagatttctgctcactgcaacctccacctcccaggttcaagtgatcttctgcctcagcctcctgagtagctgagactacaggtacgtaccaccatgcccagccaatttttgtattttttgatagagatggggtttcaccatgttggccaggctggtcttgaactcctgacctcaagttatccacctgccttggcctcccaaagtgcttggattacaggtgtgagccacgaggctggcaccaatgccatcttgatcaaagaaaacaaagttggaggcattatacca

SEQ ID NO: 70476 - DNA, 322 bp, Homo sapiens
aaataaagatcagtaagaaaggttctgtcttcaatggttcgcagcaacgtggttgaaaaaccttggcaagagtacatgaactaaataatattaaccacacacaggttgtgatctgattgtaggtattaggcagagtatcagaacagaatgcatttctgtaatcctcatgttaaagaaaatggattcttttctttttataagactaatgatgactaatataagactaataagaataaaccaacttttattgttctgtttcctataccttattgtaaaattaatatttattgagcacttagtaggggtcaggcattcactgttc

SEQ ID NO: 70477 - DNA, 402 bp, Homo sapiens
agtctgtggtattcttgttaaggcagcccaagctgactaagacaccaaatcattcaaaacgttaattctttttctgttctttaagcttcccagaatgtacacaaacaatgctgttattaaaatttaaaggactcttggaactgtaggacatgatccagctaaaataaataacaaataacacagctaagcaaatacttataaatgtagctttaaatatttattttagtcagttttaaataattagtggggtacgagacagttcacattcaagagacattttacttagacaaaaatttataagagaacgatgcataaaaacaaacaatatattggtctgtttatttttctaagggaaaatggaattggagctgttgagaataaaacttgaagaatctaactgca

SEQ ID NO: 70478 - DNA, 189 bp, Homo sapiens
gaactgcagaggttcacagaaagtggcacatggtaagcactcagaaagtgcttgctgcactaaagggaacgatgttgaataataatcactggtacgtgaataaaccccacatgtgctggacatacacagagtcccatattaatgagggcacactctcagatgcatctggcccgcaggaaacctgactaa

SEQ ID NO: 70479 - DNA, 372 bp, Homo sapiens
gggcatggtggtgcgcacctgtaatcccagctactcaggcggctgagtcaggagaatcgttcgaatacgggaggcagaggttgcagtgaactgagatcatgccactgcactctagccactgcacgctggtgacagagtgagactgtctcaaaaaaaaaaaaaaatttttttttggtacgcttgagggagacaaatgctacaaaagcgttataaactgaagttctatggaagctcacttgaagatattgaccaagtttattttatctcctattcattttcctccctcctgtattttaagcaaattccacataacatttttttcataagtatttcagtatttgcttttcaaagacaaggattaaaaaaaaactg

SEQ ID NO: 70480 - DNA, 229 bp, Homo sapiens
ggagtggttctcagatcacaaactgacatggttttatctagaagagacacatggctctgactcactgaatttccatgcaggatctaactgggacacatcaagggaacttcagtgttttcagcaccagcttcacaagaggagaatgagacacagtttttatctatttcctctggaggacaaaaggtctggatccagggtagttggtaaaagaagctgaagtgtcaggcag

SEQ ID NO: 70481 - DNA, 356 bp, Homo sapiens
gaggctaatgatattctattgtatgtatatgccacatttaaagaattcattcatttattcattgagggacccctgggttacttccgccttttggctattgcaaataatgctgccgtgaaaacaggtgtacaaatatttgtttgagatcctgctctcacttttgggtatagacccagaagtggaattgctggatcacatggtgattctgtgcttaagttttttgagacaatcctagacttttgcacctgattctttgtctctcctggcctctgaggacttgactgcccagctagcattgtactgaatttgctggggctgaggccccagtcatgggcccctggcttcctgagtaccct

SEQ ID NO: 70482 - DNA, 1551 bp, Homo sapiens
agcaggctgtacggtcccgagtctttaggatcctggtgctgatcctccagctgctgaccctctggcctctgtgtcacacagacatcactccgtctgtccccccagcttcataccaccctaagccatggctgggagctcagccggctacagttgtgacccctggggtcaacgtgaccttgagatgccgggcaccccaacccgcttggagatttggacttttcaagcctggagagatcgctccccttctcttccgggatgtgtcctccgagctggcagaattctttctggaggaggtgactccagcccaagggggaagttaccgctgctgctaccgaaggccagactgggggccgggtgtctggtcccagcccagcgatgtcctggagctgctggtgacagaggagctgccgcggccgtcgctggtggcgctgcccgggccggtggtgggtcctggcgccaacgtgagcctgcgctgcgcgggccgcctgcggaacatgagcttcgtgctgtaccgcgagggcgtggcggccccgctgcagtaccgccactccgcgcagccctgggccgacttcacgctgctgggcgcccgcgcccccggcacctacagctgctactatcacacgccctccgcgccctacgtgctgtcgcagcgcagcgaggtgctggtcatcagctgggaagactctggctcctccgactacacccgggggaacctagtccgcctggggctggccgggctggtcctcatctccctgggcgcgctggtcacttttgactggcgcagtcagaaccgcgctcctgctggtatccgcccctgagccccaggagcactgcagcccgagacttccaacctgagtggcggagaagctgggaccctgggctggactgtcctttcctgcagccccacagtcctgctggctgagctccgcggaacggtccttagaccccgctgtgccctgtgctgtagcttctttccaggcctttcccaaggagtagctgaaaggaagacgcgattagtggttaagacttccaagccagaagacagagggttcgaatcccagcactgccgtctactcactgtagtagtagcagctacagaaaggtagtagtgagacgtgaagccagctggacttcctgggttgaatggggacctggagaacttttctgtcttacaagaggattgtaaaatggaccaatcagcactctgtaagatggaccaatcagcgctctgtaaaatggaccaatcagcaggacatgggcggggacaataagggaataaaagctggcgagcgcggcaccccaccagagtctgcttccacgctgtgggagctttgttctcttgctctacacaataaatcttgctgctgctaactctttaggtccgtgccatctttaagcgctgtaacactcaccacgaaggtccctggctccattcttaaagtcagcgagaccacaaacccacaggaaggaaccaactctggacacggtagcagcattcagaaagcgcccttccccaactctctcttgccttgacggtaaaatggatgcact

SEQ ID NO: 70483 - DNA, 326 bp, Homo sapiens
  misc_feature (306)..(306): n is a, c, g, or t
ggatccggttgcagtgagccgagatcacaccactacactccagcctgggcgacagagtgagagtctgcctcagacaaaaaaaaaaaaggaaaaagaaactagtccctcaacctcctacagggcctctgtgtcacacagacatcactccgtctggtgagtagccaccccatccactctccttttgttgctgacaccccttttccaattactcagattttattttggtgcccaatcccatcccagatatccttattttcctccctccctccattccttccttcttttctcattccccttagtgggggngggggggggggggggaattc

SEQ ID NO: 70484 - DNA, 281 bp, Homo sapiens
  misc_feature (261)..(261): n is a, c, g, or t
ggatccggttgcagtgagccgagatcacaccactacactccagcctgggcgacagagtgagagtctgcctcagacaaaaaaaaaaaaggaaaaagaaactagtccctcaacctcctacagggcctctgtgtcacacagacatcactccgtctggtgagtagccaccccatccactctccttttgttgctgacaccccttttccaattactcagattttattttggtgcccaatcccatcccagatatccttattttcgggngggggggggggggggaattc

SEQ ID NO: 70485 - DNA, 2052 bp, Homo sapiens
agcggggcactcgcgcagaacaaagatggagccgtggagtgccatagggctatgacacagtcacccacaggcccccacctcgatactctcttccgtaaatgaggatctgggtctggttttctgatgttgcctcatttcctgggaggggagagggtgcgaccaagccctggctccagctctagcgggtatctgcccaccatggccctggtgctgatcctccagctgctgaccctctggcctctgtgtcacacagacatcactccgtctgtccccccagcttcataccaccctaagccatggctgggagctcagccggctacagttgtgacccctggggtcaacgtgaccttgagatgccgggcaccccaacccgcttggagatttggacttttcaagcctggagagatcgctccccttctcttccgggatgtgtcctccgagctggcagaattctttctggaggaggtgactccagcccaagggggaagttaccgctgctgctaccgaaggccagactgggggccgggtgtctggtcccagcccagcgatgtcctggagctgctggtgacagaggagctgccgcggccgtcgctggtggcgctgcccgggccggtggtgggtcctggcgccaacgtgagcctgcgctgcgcgggccgcctgcggaacatgagcttcgtgctgtaccgcgagggcgtggcggccccgctgcagtaccgccactccgcgcagccctgggccgacttcacgctgctgggcgcccgcgcccccggcacctacagctgctactatcacacgccctccgcgccctacgtgctgtcgcagcgcagcgaggtgctggtcatcagctgggaaggtgagggccctgaggcccggcccgcctcctccgccccaggaatgcaggccccaggacctcctccctcagacccaggactccaggcccccagcccctccttcctggacccaggactccaggcccccagcccctccttcctgatccagcagtccaggccccagccccttcttcctggacccaggagttgaagcctccatcgactccccctcaactttgagactgtagagtcaggtccctaagtccaccccaggggctggaaacctggagttcagggcccagactttggggtccgggagctgatggcccctctctcccggctccgcccgcagactctggctcctccgactacacccgggggaacctagtccgcctggggctggccgggctggtcctcatctccctgggcgcgctggtcacttttgactggcgcagtcagaaccgcgctcctgctggtatccgcccctgagccccaggagcactgcagcccgagacttccaacctgagtggcggagaagctgggaccctgggctggactgtcctttcctgcagccccacagtcctgctggctgagctccgcggaacggtccttagaccccgctgtgccctgtgctgtagcttctttccaggcctttcccaaggagtagctgaaaggaagacgcgattagtggttaagacttccaagccagaagacagagggttcgaatcccagcactgccgtctactcactgtagtagtagcagctacagaaaggtagtagtgagacgtgaagccagctggacttcctgggttgaatggggacctggagaacttttctgtcttacaagaggattgtaaaatggaccaatcagcactctgtaagatggaccaatcagcgctctgtaaaatggaccaatcagcaggacatgggcggggacaataagggaataaaagctggcgagcgcggcaccccaccagagtctgcttccacgctgtgggagctttgttctcttgctctacacaataaatcttgctgctgctaactctttaggtccgtgccatctttaagcgctgtaacactcaccacgaaggtccctggctccattcttaaagtcagcgagaccacaaacccacaggaaggaaccaactctggacacggtagcagcattcagaaagcgcccttccccaactctctcttgccttgacggtaaaatggatgcact

SEQ ID NO: 70486 - DNA, 1073 bp, Homo sapiens
agcggggcactcgcgcagaacaaagatggagccgtggagtgccatagggctatgacacagtcacccacaggcccccacctcgatactctcttccgtaaatgaggatctgggtctggttttctgatgttgcctcatttcctgggaggggagagggtgcgaccaagccctggctccagctctagcgggtatctgcccaccatggccctggtgctgatcctccagctgctgaccctctggcctctgtgtcacacagacatcactccgtctgtccccccagcttcataccaccctaagccatggctgggagctcagccggctacagttgtgacccctggggtcaacgtgaccttgagatgccgggcaccccaacccgcttggagatttggacttttcaagcctggagagatcgctccccttctcttccgggatgtgtcctccgagctggcagaattctttctggaggaggtgactccagcccaagggggaagttaccgctgctgctaccgaaggccagactgggggccgggtgtctggtcccagcccagcgatgtcctggagctgctggtgacagaggagctgccgcggccgtcgctggtggcgctgcccgggccggtggtgggtcctggcgccaacgtgagcctgcgctgcgcgggccgcctgcggaacatgagcttcgtgctgtaccgcgagggcgtggcggccccgctgcagtaccgccactccgcgcagccctgggccgacttcacgctgctgggcgcccgcgcccccggcacctacagctgctactatcacacgccctccgcgccctacgtgctgtcgcagcgcagcgaggtgctggtcatcagctgggaaggtgagggccctgaggcccggcccgcctcctccgccccaggaatgcaggccccaggacctccgccctcagacccaggagcccaggcccccagcctctcctccttcagacccaggggtctagtcctgcagcccctcctccctcagacccaggattcctgggacccagcccctcctccctcagatccaggagtctagtcctccagctcctcctccctcagacc

SEQ ID NO: 70487 - DNA, 1040 bp, Homo sapiens
agcggggcactcgcgcagaacaaagatggagccgtggagtgccatagggctatgacacagtcacccacaggcccccacctcgatactctcttccgtaaatgaggatctgggtctggttttctgatgttgcctcatttcctgggaggggagagggtgcgaccaagccctggctccagctctagcgggtatctgcccaccatggccctggtgctgatcctccagctgctgaccctcttccccccagcttcataccaccctaagccatggctgggagctcagccggctacagttgtgacccctggggtcaacgtgaccttgagatgccgggcaccccaacccgcttggagatttggacttttcaagcctggagagatcgctccccttctcttccgggatgtgtcctccgagctggcagaattctttctggaggaggtgactccagcccaagggggaagttaccgctgctgctaccgaaggccagactgggggccgggtgtctggtcccagcccagcgatgtcctggagctgctggtgacagaggagctgccgcggccgtcgctggtggcgctgcccgggccggtggtgggtcctggcgccaacgtgagcctgcgctgcgcgggccgcctgcggaacatgagcttcgtgctgtaccgcgagggcgtggcggccccgctgcagtaccgccactccgcgcagccctgggccgacttcacgctgctgggcgcccgcgcccccggcacctacagctgctactatcacacgccctccgcgccctacgtgctgtcgcagcgcagcgaggtgctggtcatcagctgggaaggtgagggccctgaggcccggcccgcctcctccgccccaggaatgcaggccccaggacctccgccctcagacccaggagcccaggcccccagcctctcctccttcagacccaggggtctagtcctgcagcccctcctccctcagacccaggattcctgggacccagcccctcctccctcagatccaggagtctagtcctccagctcctcctccctcagacc

SEQ ID NO: 70488 - DNA, 2019 bp, Homo sapiens
agcggggcactcgcgcagaacaaagatggagccgtggagtgccatagggctatgacacagtcacccacaggcccccacctcgatactctcttccgtaaatgaggatctgggtctggttttctgatgttgcctcatttcctgggaggggagagggtgcgaccaagccctggctccagctctagcgggtatctgcccaccatggccctggtgctgatcctccagctgctgaccctcttccccccagcttcataccaccctaagccatggctgggagctcagccggctacagttgtgacccctggggtcaacgtgaccttgagatgccgggcaccccaacccgcttggagatttggacttttcaagcctggagagatcgctccccttctcttccgggatgtgtcctccgagctggcagaattctttctggaggaggtgactccagcccaagggggaagttaccgctgctgctaccgaaggccagactgggggccgggtgtctggtcccagcccagcgatgtcctggagctgctggtgacagaggagctgccgcggccgtcgctggtggcgctgcccgggccggtggtgggtcctggcgccaacgtgagcctgcgctgcgcgggccgcctgcggaacatgagcttcgtgctgtaccgcgagggcgtggcggccccgctgcagtaccgccactccgcgcagccctgggccgacttcacgctgctgggcgcccgcgcccccggcacctacagctgctactatcacacgccctccgcgccctacgtgctgtcgcagcgcagcgaggtgctggtcatcagctgggaaggtgagggccctgaggcccggcccgcctcctccgccccaggaatgcaggccccaggacctcctccctcagacccaggactccaggcccccagcccctccttcctggacccaggactccaggcccccagcccctccttcctgatccagcagtccaggccccagccccttcttcctggacccaggagttgaagcctccatcgactccccctcaactttgagactgtagagtcaggtccctaagtccaccccaggggctggaaacctggagttcagggcccagactttggggtccgggagctgatggcccctctctcccggctccgcccgcagactctggctcctccgactacacccgggggaacctagtccgcctggggctggccgggctggtcctcatctccctgggcgcgctggtcacttttgactggcgcagtcagaaccgcgctcctgctggtatccgcccctgagccccaggagcactgcagcccgagacttccaacctgagtggcggagaagctgggaccctgggctggactgtcctttcctgcagccccacagtcctgctggctgagctccgcggaacggtccttagaccccgctgtgccctgtgctgtagcttctttccaggcctttcccaaggagtagctgaaaggaagacgcgattagtggttaagacttccaagccagaagacagagggttcgaatcccagcactgccgtctactcactgtagtagtagcagctacagaaaggtagtagtgagacgtgaagccagctggacttcctgggttgaatggggacctggagaacttttctgtcttacaagaggattgtaaaatggaccaatcagcactctgtaagatggaccaatcagcgctctgtaaaatggaccaatcagcaggacatgggcggggacaataagggaataaaagctggcgagcgcggcaccccaccagagtctgcttccacgctgtgggagctttgttctcttgctctacacaataaatcttgctgctgctaactctttaggtccgtgccatctttaagcgctgtaacactcaccacgaaggtccctggctccattcttaaagtcagcgagaccacaaacccacaggaaggaaccaactctggacacggtagcagcattcagaaagcgcccttccccaactctctcttgccttgacggtaaaatggatgcact

SEQ ID NO: 70489 - DNA, 586 bp, Homo sapiens
ggttggggcttagctgctcggtgaattatttactgaaagattttaataaatggcctgcttaagattttcatgtcagggctgggcatggtggctcatgcctataagtctagcactttgggaggccaaggcagaaggatctacaaaaatttttttaaaaattaccaggtgtggtttcacacacctgtagtcccagctactcagaaggctgaagtgggaggattgcttgagcccaggagttccaggcggcagtgagctacaatcaccactgcactccagcctgggcaacagagtgagactctatctctaaaaaaatttaaaacgattcccatgtctcgcagcaatggtaatgtaggcgcatgataatgctatctggctaaaatactccccagactgcagagcaaagtttctagtagtcaaatactttcctttgcagaacattactcctggatcagcgagacaactcagtgactttattaaggtgtgtagaaaatagtttgtcacctagcttctaatcgaagggtagtaaatatgaaaggggtaaaattagcaattgttctgtagattctctaactgtataacatgtata

SEQ ID NO: 70490 - DNA, 1075 bp, Homo sapiens
  misc_feature (707)..(707): n is a, c, g, or t
  misc_feature (713)..(713): n is a, c, g, or t
  misc_feature (720)..(720): n is a, c, g, or t
  misc_feature (722)..(723): n is a, c, g, or t
  misc_feature (729)..(729): n is a, c, g, or t
  misc_feature (734)..(734): n is a, c, g, or t
  misc_feature (740)..(740): n is a, c, g, or t
  misc_feature (760)..(760): n is a, c, g, or t
  misc_feature (762)..(762): n is a, c, g, or t
  misc_feature (835)..(835): n is a, c, g, or t
  misc_feature (843)..(843): n is a, c, g, or t
  misc_feature (1069)..(1070): n is a, c, g, or t
  misc_feature (1072)..(1072): n is a, c, g, or t
ccttctttaatttttctcaccaattgcttttaggggcctcgtacctgcttcattgcatgtattgttaagcatgtaatgattctggctattaatctctattatgttttattgaatttcattttctagctgctaattgctagtatggagaaattaagatgatgaaatcaactttataaaggcataatttcggtacaacagactgcaccactttaaaatgtgtaattcaatgcacgtttacaaatggatgcactaacggaactactgccacaaccaagatagaggaaattccctatgcccaaaagtttcttgtacccctttgcagttcatcagcctttcaaccctcagccccaaggagccactgtcacttcaggtccgtttgcatttttaaccattttctataaatgaaatgatacctgtgttcttttgtgtctgccttctttcatgcatcaatgtaattttaaaatccatctgtaatgtcttgtaaatactgagtagtattccttcatgtggctataccatgtatgtttgtactttcacttattattggacatttctatcattccacgtttgggctattatgaagaaactatcatgagcatccatacgtagcaggccaggtctcactaacacaggcctccctaaaaactgtttcagtagcgactgagtggttcaattaaatattaagaggaaaaaaaaaaaaaaaagangccagngcccttntnnaaaggntggantgtaanaaaagcccaccaagagtttngnctaggtttttcctgggccttaaagcatgacgaaataacgaaggcattcttaacaggagccatttagtattaancgagtttnactgggggtctgaagaaactccccaggcctccacagacaagtttattggagatctgaagggactctccaaacctctgtgatttagcaggagacaagataagggcccccagcacctagacccatttagattaagtgaatttaactgaggttccagaggaaggtctttaggactcagacttagttatagattaaaagaagttaatcacttatgtatttagatgaatcnnanttc

SEQ ID NO: 70491 - DNA, 504 bp, Homo sapiens
tggggtttcaccatgttggtcaggctcatctcgaactcctgacctcaggtgatccaccctcctcggcctcccgccaggcccattcttaatgggggaaacactgaaggtgtccaaatgaggaaacactgaaggcctgcaggttaagtcaggagcaagatgaggacattcattatcaccattgtttgggaggtgcaagtcagtgtagtaagtaaggtaaggcaaaaaggattatggatgttgaaaaggaagccatacatttatcaccatttccaggaatagtgatacagtagaggaaaagaacattcctgagaataagatgaaagtttgaagtggaagaaagagaggttgaaacattttctgtttggtgccctctgtgtttttggtgaatgaaggctttttgctgaaagtggaggggatgagggtgaaattgggcaactaagaagaataggaagaaaagttatggagaagccactgtgatgaaaaattatgtggaatagctccaag

SEQ ID NO: 70492 - DNA, 301 bp, Homo sapiens
tttttttactatcatgtgctgaattcaccttagaaattatagttttagattaaaataaagaataaaaatgaagatattattagatataagcagttttaacctatgtagaatgttataggaatacttgaaatgatcaatgatatcaaactgtgataaagcattgtttgaaaccaaaagggacaatagtgttctggtacagagggtggagactaagaaaggtagataatgctcactttttccatggaacataatgggtcctaggagcttttattagcaaagaaacagaggtgtccacatttga

SEQ ID NO: 70493 - DNA, 399 bp, Homo sapiens
ctcgttgacagtatccacagaggccagaaacaactctgcttgttatgataactttggcttcttcatgactgctaaagagttgtcccagcacttggggaggctgaggcaggcagattgccctgagctcagaagtttgagaccagcctgggcaacatggtgaaaccccgtctctacaaaaaatacaaaaaaaaaatttatccagtcatggtggtgcacacctgtagtcccagctacttgggaggctgaggtgggaggattgcttgagcctgggaggtggaggttgcagtgatctgagatcacatcactgcactccaacctgggcaacccccagactttctctttcccacctccaacagtgagaccctgtctcaaaaaaagaaaaaaaaaaggtaactagtc

SEQ ID NO: 70494 - DNA, 454 bp, Homo sapiens
gtgggtggtagctgagtttggttgctgttgctgttttctaaaaagagcccatcaataattttgaggtttacatataatttctcataaagtttacctggtttaaatatgatttataggaggataaatatgattgattaccaaaaatctgtaataaaaaataaccaactgagatacacaaagttctttaaattcttcagtgatctgttttatatatttactagacaaaactatttatctcccaacttcacatagaaaaagtactgtgaggaatttattggataagctttaagagtcaagatagaaaatatagaacgtttcttttttttaaccaaatgaaagcatttaagtgtaataattccaagtgtgtgtttttatggattttggagaggataagaaatagtatgtgattgaaattttggaaatgaatgaaactgtagtaatacgtgctgcttgt

SEQ ID NO: 70495 - DNA, 493 bp, Homo sapiens
atcaaacccccaaagatctggaaaccgtgcaacagcggacccagctccctctcttttgtagcagttgtagagcatgtctgtcctatgtgtctggatgttcgagctctccttttagctcgttcatttcccagtgaggaagctgaggccgtaaggtggtaagttctgcttgctggaggctccctgttggagcctctttgcgcacccagcagggtccctgtgcagctgggggaggtgcactggcagagctgcgtctccagtccatgccatctgtgagaagcagctgcctgtaggcttgtgtgggggacagagtaaggtaatgcatgtggaactctgaggatgatgcctggtactcgggagctctccatcagctgtagcctaggccttcacaggcctgcctggctggccacatcccttagagagacgaattgctgttttctaaacgctggaacactcaggaagttctcctctctcccctccaaagggcttatgagaa

SEQ ID NO: 70496 - DNA, 482 bp, Homo sapiens
ccttggcctttgggactaagttctcacggggtttagggtgaggatgtgagagtaactgagctccacctttgcttgagctttaaactcaccctgcggaagagagacattttagccccactcccttcctaccttgaagggtcctgcatgatatgtgatttatcatggcttttctctttctcttctagtcctcatttttttggcagaattctctcagagtccccacatctgggtctcttcccttttggaggctgggatggcggagactgtgagctgcgaggtggctagggtgtttccagccaaagaagttatgttccacatgttcctggaagaccaagagctgagctccttcctttcctgggagggggacacagcatgggccaatgctaccattcggaccatggaggctggtgatcaggaactgtcttgctttgcatctctgggtgcaatggaacagaagacaagaaagctagtgcatagctaca

SEQ ID NO: 70497 - DNA, 273 bp, Homo sapiens
ttatggaagaaaatataggaaaatatcttaactttgtgttaggcaaagatttcttatatattcaccaacagtacaaaggaggtatgtctagaatatagaatatttaaaaagaatactcttacaacacagcaataagaagtcaaagaaacttggctcacgctaaggttgtaatcgcagcactttgggaggctgaggcgggcggatcacaaggtcaggagatcgagaccatcctggttaacacggtgaaaccccgtctctactaaaaatacaaaa

SEQ ID NO: 70498 - DNA, 3574 bp, Homo sapiens
  misc_feature (1824)..(1824): n is a, c, g, or t
  misc_feature (3565)..(3570): n is a, c, g, or t
  misc_feature (3572)..(3574): n is a, c, g, or t
tgctgggattacaggcgtgagccactgcgcctggcctattgcttttatttttaaatttggagaaattatgtagctcaattcataaataagtagatgaacgaagcaactactttgttttcccaaatctttgtttcaaataagaagggaaatatcgtgattgagaggtctcttcccttcttttagtaaaaataatgcaataccgcgtttaagggcatataagtgaatgagagttagtattgaccttatgctactgtgatatatgtcaattaaaaaaatgctaatgtgtcaatttcgggaggataaagcaaaaagaaaaaaatgctaatgtgagaacaagcatgccagcaagccatggtcaccccacacccaataaaacaggtaaacaggaaaacacaaaaagtacctgtgagtatgaatagtatatataaaatattttcaaagaaacaagttactcttatgtatcttcaatagaaaggaaaaactattatttattcagcttatgtataattatgttttctgttgctgattcagttacttttgggaaaggcagtacaagtaaagccactcaatatggctttgtgttggacattcgtagtttcttagaacagctaacgaaaatgtagcttttatgccctttgttttttaacataaagaatctgagattgaagaggtagtgtgttcaggattacagaatgataaatggtggaatctagactcaaatgtaaagcagtattatttccaaagccagctacttttgtgttcagctatattgtttttgaattttcagtgatttattggtaggctttttgttatctgggaattccttctattaaaattatattgtcaagtgttgaaatatgcaggttttaactagttgcattgacacagcttgattttgtgtcactctaaaactcaccccctgctcccccagggagcaaaaacaaataaaaaccacatataaacatagctttctaggaacagtagtttcagatactgcttcctaaattgttcaaatatcttagcttttcagttctgtttgttccaaggtggtcatatattgttatttttcaataatcagatttagttgttttgccatttttgtttagggagttactattaattgttttttaatattaagcatgataaacttcagatgtttctctttttaaagacctggttttcgtatattgagtggtttcacttttgttaccttgccccaaagtaattgaatcagcaacagaagaaagcatgacattttaattgtctacgtcaaattacataatctagtgaagtatgaagactcactgttaaattattaatgacttttgtttattaaaccaagcagtgaaagagatggtatagggacattcccctcatattttataagtcatactactggctaaatagtatcaggattgtttttagctctgcattgctaactgagtgatctgtctaaaacttaaattagactgtgtccctcctttgcttttaagtcttaaaaactgctgcttaccagtcaaagtctatattacttagtatggtatttaaagcttttaagttctagccccctgctgactaccctaacgtcattcctatatatttcaaagcctatcctaccgaagtttgtctgctggcaacactaactactatttttctgtatgtagagagattctacactttggtttatatattctattctgtcctatttgactgttttcccttaccaccagactatttggtctcctttttccccacatttgtaactttttatattctttttaagacgtgctcttgctcttttgctcagagttgagtgcagtcgtnaatcatagctcatcgtggccttgaactcctgggctcaagcaatcttcctgcctcagcctcccaagtgtagctggggctacagacgtacaccagcatgcctggctaattttatttttatttttatttttagagacagggtgttgttgtgttgcccaggctggtcttaaactcctggcctcaactcctgcctcagctgggattacaggtgtgagccactgggctgggtggctatcatgttttatctaaaattagaaactccttgaggcagggaccatttatctttgtatctttagtgttcagcacctagtagtaactcagcaaatgtttgttttctttctgacatatttgtcatatttgtatttgttgtatttagcatcagaaagccaaatatggtcattcaacgttaatttgactgattccttttgttattttagtccagaattgctaccaaagtgtttaggtttgacctttttgtgcccaggaagtctagtcgttttgatgataaatctaaattggttgaggtgtaatgaaaaagacaaccaggtgtctagaagtgactgtgacaattgcagatttatcttgtttgtgcatgctggtttttttttttttcagtgttcaaagcctgtattgcatcaggttttcaggtttagatttcctaaatttggaacacaaagttccctttttagaagaataggtattgagcccttgagcgtgggtagaaagatagagacagagtgatttgcaaaataatggaggatcatatttatatatgaattttcacttatttgaactttcagatatcagctcaaaagctttggtataagtaaagtatattaatgagactccttggatgaaagtaaccaaaaccagtaaaaataaggtaataaggatgtaatagtttcttatggacactcaacagctagaatgcagttagtctcagaaaagaattagaacaaataactggaaggccatcaggagtccaaaaccatcactcttttatattttatattttatttttctctcttcagatgagcattctctttctatgtccatatggtagaaggcggcagctccatagattatggcttcagatgttacagttccgctaaatgcagggacagacttgctatctttcagtcccacttacatatcctggggagagagcaaatgattgactggcttgagtcaggtgcccgttccctttccaatctgctccatctaggagggcagtgttacctggtaccaaaatagatgttagagggccacccctttcaaaagggagaatagctctcacaacagggcttctatgttgtgcaggttgcttattccacatgctgcttgccaagctgtatgcctataagggctgcagttttaaaatttgtacaaaggtgctttatggatttgtggtaaccttttctcagagaaaggaggagtcattgtgaattggggggctattccaagggggtctgctatgtcatttttgggggatatttattgtccatcttagtattgccagactcttagcattgaaatattagattgtctctcacccttgggccatggagttttattgcagcaaaaacaaaaatccatatgtatataagtgttttctcaataggtatattgacagtggacttactatgatgtggagctttgacatttgtggacctgctgcggtgtccttacactcattgagaaccattgatgttacgcaaatgctattaaactttgcatctaagannnnnnannn

SEQ ID NO: 70499 - DNA, 2189 bp, Homo sapiens
  misc_feature (1)..(1): n is a, c, g, or t
ncggcgggaggcgcagcctgggcagagctcagcttggtcccgccgcccggccggtgctccctggcgcagccacgcaggcgcaccgcagacagacccctctgccatgaaccagtccatcccagtggctcccaccccaccccgccgcgtgcggctgaagccctggctggtggcccaggtgaacagctgccagtacccagggcttcaatgggtcaacggggaaaagaaattattctgcatcccctggaggcatgccacaaggcatggtcccagccaggacggagataacaccatcttcaaggcctgggccaaggagacagggaaatacaccgaaggcgtggatgaagccgatccggccaagtggaaggccaacctgcgctgtgcccttaacaagagccgggacttccgcctcatctacgacgggccccgggacatgccacctcagccctacaagatctacgaggtctgctccaatggccctgctcccacagactcccagccccctgaggattactcttttggtgcaggagaggaggaggaagaagaggaagagctgcagaggatgttgccaagcctgagcctcacagatgcagtgcagtctggcccccacatgacaccctattctttactcaaagaggatgtcaagtggccgcccacttctgcagccgcccactctgcagccgcccgtggtgctgggtccccctgctccagaccccagccccctggctcctccccctggcaaccctgctggcttcagggagcttctctctgaggtcctggagcctgggcccctgcctgccagcctgccccctgcaggcgaacagctcctgccagacctgctgatcagcccccacatgctgcctctgaccgacctggagatcaagtttcagtaccgggggcggccaccccgggccctcaccatcagcaacccccatggctgccggctcttctacagccagctggaggccacccaggagcaggtggaactcttcggccccataagcctggagcaagtgcgcttccccagccctgaggacatccccagtgacaagcagcgcttctacacgaaccagctgctggatgtcctggaccgcgggctcatcctccagctacagggccaggacctttatgccatccgcctgtgtcagtgcaaggtgttctggagcgggccttgtgcctcagcccatgactcatgccccaaccccatccagcgggaggtcaagaccaagcttttcagcctggagcattttctcaatgagctcatcctgttccaaaagggccagaccaacaccccaccacccttcgagatcttcttctgctttggggaagaatggcctgaccgcaaaccccgagagaagaagctcattactgtacaggtggtgcctgtagcagctcgactgctgctggagatgttctcaggggagctatcttggtcagctgatagtatccggctacagatctcaaacccagacctcaaagaccgcatggtggagcaattcaaggagctccatcacatctggcagtcccagcagcggttgcagcctgtggcccaggcccctcctggagcaggccttggtgttggccaggggccctggcctatgcacccagctggcatgcaataacaaggctgcagacggtgactggccctggcttcctgggtggcggtgcggactgatgtggagatgtgacagccccgatgagcacctggctggctgcagggtcctacctctgggtttcctggaagtggatttgggccaagaaggagagggagaaaggcccgagcccctgccttcccgggcctttctctcctgggctgtctctggtctggtcagcctggctctcgggaaattcagccatgagcagggaaagaactctcccaaccctggggcctagctgtataggaggaattgcctaagggtggcccactcttgtgattgccccatttcctctggcaacaaaagccagagtgttgtgggccaagtccccccacagggcctctgcagggcatggccctgatttccctggtttgagactcacttcctcatctccctgtcctctgagataatatgagtgagcacttaggtatcatatcagatgctcaaggctggcagctacccccttcttgagagtccaagaacctggagcagaaataatttttatgtatttttggattaataaatgttaaaaacaga

SEQ ID NO: 70500 - DNA, 2331 bp, Homo sapiens
  misc_feature (1)..(1): n is a, c, g, or t
ncggcgggaggcgcagcctgggcagagctcagcttggtcccgccgcccggccggtgctccctggcgcagccacgcaggcgcaccgcagacagccttcctaacaggctccggcaggcgttagggccttcctaagtgctacccgaatgcgtgtccagtgggaggagaagggggaggaccaagaacctagatgaatggccctagagagacccctctgccatgaaccagtccatcccagtggctcccaccccaccccgccgcgtgcggctgaagccctggctggtggcccaggtgaacagctgccagtacccagggcttcaatgggtcaacggggaaaagaaattattctgcatcccctggaggcatgccacaaggcatggtcccagccaggacggagataacaccatcttcaaggcctgggccaaggagacagggaaatacaccgaaggcgtggatgaagccgatccggccaagtggaaggccaacctgcgctgtgcccttaacaagagccgggacttccgcctcatctacgacgggccccgggacatgccacctcagccctacaagatctacgaggtctgctccaatggccctgctcccacagactcccagccccctgaggattactcttttggtgcaggagaggaggaggaagaagaggaagagctgcagaggatgttgccaagcctgagcctcacagatgcagtgcagtctggcccccacatgacaccctattctttactcaaagaggatgtcaagtggccgcccactctgcagccgcccactctgcggccgcctactctgcagccgcccactctgcagccgcccgtggtgctgggtccccctgctccagaccccagccccctggctcctccccctggcaaccctgctggcttcagggagcttctctctgaggtcctggagcctgggcccctgcctgccagcctgccccctgcaggcgaacagctcctgccagacctgctgatcagcccccacatgctgcctctgaccgacctggagatcaagtttcagtaccgggggcggccaccccgggccctcaccatcagcaacccccatggctgccggctcttctacagccagctggaggccacccaggagcaggtggaactcttcggccccataagcctggagcaagtgcgcttccccagccctgaggacatccccagtgacaagcagcgcttctacacgaaccagctgctggatgtcctggaccgcgggctcatcctccagctacagggccaggacctttatgccatccgcctgtgtcagtgcaaggtgttctggagcgggccttgtgcctcagcccatgactcatgccccaaccccatccagcgggaggtcaagaccaagcttttcagcctggagcattttctcaatgagctcatcctgttccaaaagggccagaccaacaccccaccacccttcgagatcttcttctgctttggggaagaatggcctgaccgcaaaccccgagagaagaagctcattactgtacaggtggtgcctgtagcagctcgactgctgctggagatgttctcaggggagctatcttggtcagctgatagtatccggctacagatctcaaacccagacctcaaagaccgcatggtggagcaattcaaggagctccatcacatctggcagtcccagcagcggttgcagcctgtggcccaggcccctcctggagcaggccttggtgttggccaggggccctggcctatgcacccagctggcatgcaataacaaggctgcagacggtgactggccctggcttcctgggtggcggtgcggactgatgtggagatgtgacagccccgatgagcacctggctggctgcagggtcctacctctgggtttcctggaagtggatttgggccaagaaggagagggagaaaggcccgagcccctgccttcccgggcctttctctcctgggctgtctctggtctggtcagcctggctctcgggaaattcagccatgagcagggaaagaactctcccaaccctggggcctagctgtataggaggaattgcctaagggtggcccactcttgtgattgccccatttcctctggcaacaaaagccagagtgttgtgggccaagtccccccacagggcctctgcagggcatggccctgatttccctggtttgagactcacttcctcatctccctgtcctctgagataatatgagtgagcacttaggtatcatatcagatgctcaaggctggcagctacccccttcttgagagtccaagaacctggagcagaaataatttttatgtatttttggattaataaatgttaaaaacaga

SEQ ID NO: 70501 - DNA, 2284 bp, Homo sapiens
gagcgttctgaacacctccccgtcccagcccctgggccaggcaagggccggccttacctctcctgggttggtggcagcagagctgggctctgagggaggcctgcaatgtgagacagtagcagctcagaggcggcactaggcaggtgcaaccccaaaagacccctctgccatgaaccagtccatcccagtggctcccaccccaccccgccgcgtgcggctgaagccctggctggtggcccaggtgaacagctgccagtacccagggcttcaatgggtcaacggggaaaagaaattattctgcatcccctggaggcatgccacaaggcatggtcccagccaggacggagataacaccatcttcaaggcctgggccaaggagacagggaaatacaccgaaggcgtggatgaagccgatccggccaagtggaaggccaacctgcgctgtgcccttaacaagagccgggacttccgcctcatctacgacgggccccgggacatgccacctcagccctacaagatctacgaggtctgctccaatggccctgctcccacagactcccagccccctgaggattactcttttggtgcaggagaggaggaggaagaagaggaagagctgcagaggatgttgccaagcctgagcctcacagatgcagtgcagtctggcccccacatgacaccctattctttactcaaagaggatgtcaagtggccgcccactctgcagccgcccactctgcggccgcctactctgcagccgcccactctgcagccgcccgtggtgctgggtccccctgctccagaccccagccccctggctcctccccctggcaaccctgctggcttcagggagcttctctctgaggtcctggagcctgggcccctgcctgccagcctgccccctgcaggcgaacagctcctgccagacctgctgatcagcccccacatgctgcctctgaccgacctggagatcaagtttcagtaccgggggcggccaccccgggccctcaccatcagcaacccccatggctgccggctcttctacagccagctggaggccacccaggagcaggtggaactcttcggccccataagcctggagcaagtgcgcttccccagccctgaggacatccccagtgacaagcagcgcttctacacgaaccagctgctggatgtcctggaccgcgggctcatcctccagctacagggccaggacctttatgccatccgcctgtgtcagtgcaaggtgttctggagcgggccttgtgcctcagcccatgactcatgccccaaccccatccagcgggaggtcaagaccaagcttttcagcctggagcattttctcaatgagctcatcctgttccaaaagggccagaccaacaccccaccacccttcgagatcttcttctgctttggggaagaatggcctgaccgcaaaccccgagagaagaagctcattactgtacaggtggtgcctgtagcagctcgactgctgctggagatgttctcaggggagctatcttggtcagctgatagtatccggctacagatctcaaacccagacctcaaagaccgcatggtggagcaattcaaggagctccatcacatctggcagtcccagcagcggttgcagcctgtggcccaggcccctcctggagcaggccttggtgttggccaggggccctggcctatgcacccagctggcatgcaataacaaggctgcagacggtgactggccctggcttcctgggtggcggtgcggactgatgtggagatgtgacagccccgatgagcacctggctggctgcagggtcctacctctgggtttcctggaagtggatttgggccaagaaggagagggagaaaggcccgagcccctgccttcccgggcctttctctcctgggctgtctctggtctggtcagcctggctctcgggaaattcagccatgagcagggaaagaactctcccaaccctggggcctagctgtataggaggaattgcctaagggtggcccactcttgtgattgccccatttcctctggcaacaaaagccagagtgttgtgggccaagtccccccacagggcctctgcagggcatggccctgatttccctggtttgagactcacttcctcatctccctgtcctctgagataatatgagtgagcacttaggtatcatatcagatgctcaaggctggcagctacccccttcttgagagtccaagaacctggagcagaaataatttttatgtatttttggattaataaatgttaaaaacaga

SEQ ID NO: 70502 - DNA, 2391 bp, Homo sapiens
  misc_feature (1)..(1): n is a, c, g, or t
ncggcgggaggcgcagcctgggcagagctcagcttggtcccgccgcccggccggtgctccctggcgcagccacgcaggcgcaccgcagacagacccctctgccatgaaccagtccatcccagtggctcccaccccaccccgccgcgtgcggctgaagccctggctggtggcccaggtgaacagctgccagtacccagggcttcaatgggtcaacggggaaaagaaattattctgcatcccctggaggcatgccacaaggcatggtcccagccaggacggagataacaccatcttcaaggcctgggccaaggagacagggaaatacaccgaaggcgtggatgaagccgatccggccaagtggaaggccaacctgcgctgtgcccttaacaagagccgggacttccgcctcatctacgacgggccccgggacatgccacctcagccctacaagatctacgaggtctgctccaatggccctgctcccacagactcccagccccctgaggattactcttttggtgcaggagaggaggaggaagaagaggaagagctgcagaggatgttgccaagcctgagcctcacaggtggggccgggaggtggtggttgggggtctagtatacagagaagctataggtaccataggtacctggaagggggctgatgggaggctagggtggcccagggctgggaggaggtgtgcctgggaggcagttcgtggaggtggcactgacagccgtccacacgcactctctgtagatgcagtgcagtctggcccccacatgacaccctattctttactcaaagaggatgtcaagtggccgcccactctgcagccgcccactctgcggccgcctactctgcagccgcccactctgcagccgcccgtggtgctgggtccccctgctccagaccccagccccctggctcctccccctggcaaccctgctggcttcagggagcttctctctgaggtcctggagcctgggcccctgcctgccagcctgccccctgcaggcgaacagctcctgccagacctgctgatcagcccccacatgctgcctctgaccgacctggagatcaagtttcagtaccgggggcggccaccccgggccctcaccatcagcaacccccatggctgccggctcttctacagccagctggaggccacccaggagcaggtggaactcttcggccccataagcctggagcaagtgcgcttccccagccctgaggacatccccagtgacaagcagcgcttctacacgaaccagctgctggatgtcctggaccgcgggctcatcctccagctacagggccaggacctttatgccatccgcctgtgtcagtgcaaggtgttctggagcgggccttgtgcctcagcccatgactcatgccccaaccccatccagcgggaggtcaagaccaagcttttcagcctggagcattttctcaatgagctcatcctgttccaaaagggccagaccaacaccccaccacccttcgagatcttcttctgctttggggaagaatggcctgaccgcaaaccccgagagaagaagctcattactgtacaggtggtgcctgtagcagctcgactgctgctggagatgttctcaggggagctatcttggtcagctgatagtatccggctacagatctcaaacccagacctcaaagaccgcatggtggagcaattcaaggagctccatcacatctggcagtcccagcagcggttgcagcctgtggcccaggcccctcctggagcaggccttggtgttggccaggggccctggcctatgcacccagctggcatgcaataacaaggctgcagacggtgactggccctggcttcctgggtggcggtgcggactgatgtggagatgtgacagccccgatgagcacctggctggctgcagggtcctacctctgggtttcctggaagtggatttgggccaagaaggagagggagaaaggcccgagcccctgccttcccgggcctttctctcctgggctgtctctggtctggtcagcctggctctcgggaaattcagccatgagcagggaaagaactctcccaaccctggggcctagctgtataggaggaattgcctaagggtggcccactcttgtgattgccccatttcctctggcaacaaaagccagagtgttgtgggccaagtccccccacagggcctctgcagggcatggccctgatttccctggtttgagactcacttcctcatctccctgtcctctgagataatatgagtgagcacttaggtatcatatcagatgctcaaggctggcagctacccccttcttgagagtccaagaacctggagcagaaataatttttatgtatttttggattaataaatgttaaaaacaga

SEQ ID NO: 70503 - DNA, 2014 bp, Homo sapiens
tgcctgggatggacgagctgggaccggaggcagggtcttgcctgagctaaactgaggctaggggagttgcctcatagttctcgcctgttatttccccagccccaggtcagtggaataacctgtcctcctttctctcccatctcttccctcccttgctggtggtgtcccttcagctgcagaggatgttgccaagcctgagcctcacaggtggggccgggaggtggtggttgggggtctagtatacagagaagctataggtaccataggtacctggaagggggctgatgggaggctagggtggcccagggctgggaggaggtgtgcctgggaggcagttcgtggaggtggcactgacagccgtccacacgcactctctgtagatgcagtgcagtctggcccccacatgacaccctattctttactcaaagaggatgtcaagtggccgcccactctgcagccgcccactctgcggccgcctactctgcagccgcccactctgcagccgcccgtggtgctgggtccccctgctccagaccccagccccctggctcctccccctggcaaccctgctggcttcagggagcttctctctgaggtcctggagcctgggcccctgcctgccagcctgccccctgcaggcgaacagctcctgccagacctgctgatcagcccccacatgctgcctctgaccgacctggagatcaagtttcagtaccgggggcggccaccccgggccctcaccatcagcaacccccatggctgccggctcttctacagccagctggaggccacccaggagcaggtggaactcttcggccccataagcctggagcaagtgcgcttccccagccctgaggacatccccagtgacaagcagcgcttctacacgaaccagctgctggatgtcctggaccgcgggctcatcctccagctacagggccaggacctttatgccatccgcctgtgtcagtgcaaggtgttctggagcgggccttgtgcctcagcccatgactcatgccccaaccccatccagcgggaggtcaagaccaagcttttcagcctggagcattttctcaatgagctcatcctgttccaaaagggccagaccaacaccccaccacccttcgagatcttcttctgctttggggaagaatggcctgaccgcaaaccccgagagaagaagctcattactgtacaggtggtgcctgtagcagctcgactgctgctggagatgttctcaggggagctatcttggtcagctgatagtatccggctacagatctcaaacccagacctcaaagaccgcatggtggagcaattcaaggagctccatcacatctggcagtcccagcagcggttgcagcctgtggcccaggcccctcctggagcaggccttggtgttggccaggggccctggcctatgcacccagctggcatgcaataacaaggctgcagacggtgactggccctggcttcctgggtggcggtgcggactgatgtggagatgtgacagccccgatgagcacctggctggctgcagggtcctacctctgggtttcctggaagtggatttgggccaagaaggagagggagaaaggcccgagcccctgccttcccgggcctttctctcctgggctgtctctggtctggtcagcctggctctcgggaaattcagccatgagcagggaaagaactctcccaaccctggggcctagctgtataggaggaattgcctaagggtggcccactcttgtgattgccccatttcctctggcaacaaaagccagagtgttgtgggccaagtccccccacagggcctctgcagggcatggccctgatttccctggtttgagactcacttcctcatctccctgtcctctgagataatatgagtgagcacttaggtatcatatcagatgctcaaggctggcagctacccccttcttgagagtccaagaacctggagcagaaataatttttatgtatttttggattaataaatgttaaaaacaga

SEQ ID NO: 70504 - DNA, 2116 bp, Homo sapiens
ggcacgagggtccagctgcgcctggaaagcgagctcggacccctctgccatgaaccagtccatcccagtggctcccaccccaccccgccgcgtgcggctgaagccctggctggtggcccaggtgaacagctgccagtacccagggcttcaatgggtcaacggggaaaagaaattattctgcatcccctggaggcatgccacaaggcatggtcccagccaggacggagataacaccatcttcaaggcctgggccaaggagacagggaaatacaccgaaggcgtggatgaagccgatccggccaagtggaaggccaacctgcgctgtgcccttaacaagagccgggacttccgcctcatctacgacgggccccgggacatgccacctcagccctacaagatctacgaggtctgctccaatggccctgctcccacagactcccagccccctgaggattactcttttggtgcaggagaggaggaggaagaagaggaagagctgcagaggatgttgccaagcctgagcctcacagaggatgtcaagtggccgcccactctgcagccgcccactctgcggccgcctactctgcagccgcccactctgcagccgcccgtggtgctgggtccccctgctccagaccccagccccctggctcctccccctggcaaccctgctggcttcagggagcttctctctgaggtcctggagcctgggcccctgcctgccagcctgccccctgcaggcgaacagctcctgccagacctgctgatcagcccccacatgctgcctctgaccgacctggagatcaagtttcagtaccgggggcggccaccccgggccctcaccatcagcaacccccatggctgccggctcttctacagccagctggaggccacccaggagcaggtggaactcttcggccccataagcctggagcaagtgcgcttccccagccctgaggacatccccagtgacaagcagcgcttctacacgaaccagctgctggatgtcctggaccgcgggctcatcctccagctacagggccaggacctttatgccatccgcctgtgtcagtgcaaggtgttctggagcgggccttgtgcctcagcccatgactcatgccccaaccccatccagcgggaggtcaagaccaagcttttcagcctggagcattttctcaatgagctcatcctgttccaaaagggccagaccaacaccccaccacccttcgagatcttcttctgctttggggaagaatggcctgaccgcaaaccccgagagaagaagctcattactgtacaggtggtgcctgtagcagctcgactgctgctggagatgttctcaggggagctatcttggtcagctgatagtatccggctacagatctcaaacccagacctcaaagaccgcatggtggagcaattcaaggagctccatcacatctggcagtcccagcagcggttgcagcctgtggcccaggcccctcctggagcaggccttggtgttggccaggggccctggcctatgcacccagctggcatgcaataacaaggctgcagacggtgactggccctggcttcctgggtggcggtgcggactgatgtggagatgtgacagccccgatgagcacctggctggctgcagggtcctacctctgggtttcctggaagtggatttgggccaagaaggagagggagaaaggcccgagcccctgccttcccgggcctttctctcctgggctgtctctggtctggtcagcctggctctcgggaaattcagccatgagcagggaaagaactctcccaaccctggggcctagctgtataggaggaattgcctaagggtggcccactcttgtgattgccccatttcctctggcaacaaaagccagagtgttgtgggccaagtccccccacagggcctctgcagggcatggccctgatttccctggtttgagactcacttcctcatctccctgtcctctgagataatatgagtgagcacttaggtatcatatcagatgctcaaggctggcagctacccccttcttgagagtccaagaacctggagcagaaataatttttatgtatttttggattaataaatgttaaaaacaga

SEQ ID NO: 70505 - DNA, 2218 bp, Homo sapiens
  misc_feature (1)..(1): n is a, c, g, or t
ncggcgggaggcgcagcctgggcagagctcagcttggtcccgccgcccggccggtgctccctggcgcagccacgcaggcgcaccgcagacagacccctctgccatgaaccagtccatcccagtggctcccaccccaccccgccgcgtgcggctgaagccctggctggtggcccaggtgaacagctgccagtacccagggcttcaatgggtcaacggggaaaagaaattattctgcatcccctggaggcatgccacaaggcatggtcccagccaggacggagataacaccatcttcaaggcctgggccaaggagacagggaaatacaccgaaggcgtggatgaagccgatccggccaagtggaaggccaacctgcgctgtgcccttaacaagagccgggacttccgcctcatctacgacgggccccgggacatgccacctcagccctacaagatctacgaggtctgctccaatggccctgctcccacagactcccagccccctgaggattactcttttggtgcaggagaggaggaggaagaagaggaagagctgcagaggatgttgccaagcctgagcctcacagatgcagtgcagtctggcccccacatgacaccctattctttactcaaagaggatgtcaagtggccgcccactctgcagccgcccactctgcggccgcctactctgcagccgcccactctgcagccgcccgtggtgctgggtccccctgctccagaccccagccccctggctcctccccctggcaaccctgctggcttcagggagcttctctctgaggtcctggagcctgggcccctgcctgccagcctgccccctgcaggcgaacagctcctgccagacctgctgatcagcccccacatgctgcctctgaccgacctggagatcaagtttcagtaccgggggcggccaccccgggccctcaccatcagcaacccccatggctgccggctcttctacagccagctggaggccacccaggagcaggtggaactcttcggccccataagcctggagcaagtgcgcttccccagccctgaggacatccccagtgacaagcagcgcttctacacgaaccagctgctggatgtcctggaccgcgggctcatcctccagctacagggccaggacctttatgccatccgcctgtgtcagtgcaaggtgttctggagcgggccttgtgcctcagcccatgactcatgccccaaccccatccagcgggaggtcaagaccaagcttttcagcctggagcattttctcaatgagctcatcctgttccaaaagggccagaccaacaccccaccacccttcgagatcttcttctgctttggggaagaatggcctgaccgcaaaccccgagagaagaagctcattactgtacaggtggtgcctgtagcagctcgactgctgctggagatgttctcaggggagctatcttggtcagctgatagtatccggctacagatctcaaacccagacctcaaagaccgcatggtggagcaattcaaggagctccatcacatctggcagtcccagcagcggttgcagcctgtggcccaggcccctcctggagcaggccttggtgttggccaggggccctggcctatgcacccagctggcatgcaataacaaggctgcagacggtgactggccctggcttcctgggtggcggtgcggactgatgtggagatgtgacagccccgatgagcacctggctggctgcagggtcctacctctgggtttcctggaagtggatttgggccaagaaggagagggagaaaggcccgagcccctgccttcccgggcctttctctcctgggctgtctctggtctggtcagcctggctctcgggaaattcagccatgagcagggaaagaactctcccaaccctggggcctagctgtataggaggaattgcctaagggtggcccactcttgtgattgccccatttcctctggcaacaaaagccagagtgttgtgggccaagtccccccacagggcctctgcagggcatggccctgatttccctggtttgagactcacttcctcatctccctgtcctctgagataatatgagtgagcacttaggtatcatatcagatgctcaaggctggcagctacccccttcttgagagtccaagaacctggagcagaaataatttttatgtatttttggattaataaatgttaaaaacaga

SEQ ID NO: 70506 - DNA, 2873 bp, Homo sapiens
  misc_feature (1)..(1): n is a, c, g, or t
ncggcgggaggcgcagcctgggcagagctcagcttggtcccgccgcccggccggtgctccctggcgcagccacgcaggcgcaccgcagacagacccctctgccatgaaccagtccatcccagtggctcccaccccaccccgccgcgtgcggctgaagccctggctggtggcccaggtgaacagctgccagtacccagggcttcaatgggtcaacggggaaaagaaattattctgcatcccctggaggcatgccacaaggcatggtcccagccaggacggagataacaccatcttcaaggcctgggccaaggagacagggaaatacaccgaaggcgtggatgaagccgatccggccaagtggaaggccaacctgcgctgtgcccttaacaagagccgggacttccgcctcatctacgacgggccccgggacatgccacctcagccctacaagatctacgaggtctgctccaatggccctgctcccacagactcccagccccctgaggattactcttttggtgcaggagaggaggaggaagaagaggaagagctgcagaggatgttgccaagcctgagcctcacagatgcagtgcagtctggcccccacatgacaccctattctttactcaaagaggatgtcaagtggccgcccactctgcagccgcccactctgcggccgcctactctgcagccgcccactctgcagccgcccgtggtgctgggtccccctgctccagaccccagccccctggctcctccccctggcaaccctgctggcttcagggagcttctctctgaggtcctggagcctgggcccctgcctgccagcctgccccctgcaggcgaacagctcctgccagacctgctgatcagcccccacatgctgcctctgaccgacctggagatcaagtttcagtaccgggggcggccaccccgggccctcaccatcagcaacccccatggctgccggctcttctacagccagctggaggccacccaggagcaggtggaactcttcggccccataagcctggagcaagtgcgcttccccagccctgaggacatccccagtgacaagcagcgcttctacacgaaccagctgctggatgtcctggaccgcgggctcatcctccagctacagggccaggacctttatgccatccgcctgtgtcagtgcaaggtgttctggagcgggccttgtgcctcagcccatgactcatgccccaaccccatccagcgggaggtcaagaccaagcttttcagcctggagcattttctcaatgagctcatcctgttccaaaagggccagaccaacaccccaccacccttcgagatcttcttctgctttggggaagaatggcctgaccgcaaaccccgagagaagaagctcattactgtacaggtggtgcctgtagcagctcgactgctgctggagatgttctcaggggagctatcttggtcagctgatagtatccggctacagatctcaaacccagacctcaaagaccgcatggtggagcaattcaaggagctccatcacatctggcagtcccagcagcggttgcagcctgtggcccaggcccctcctggagcaggccttggtgttggccaggggccctggcctatgcacccagctggcatgcaataacaaggctgcagacggtgactggccctggcttcctgggtggcggtgcggactgatgtggagatgtgacagccccgatgagcacctggctggctgcagggtcctacctctgggtttcctggaagtggatttgggccaagaaggagagggagaaaggcccgagcccctgccttcccgggcctttctctcctgggctgtctctggtctggtcagcctggctctcgggaaattcagccatgagcagggaaagaactctcccaaccctggggcctagctgtataggaggaattgcctaagggtggcccactcttgtgattgccccatttcctctggcaacaaaagccagagtgttgtgggccaagtccccccacagggcctctgcagggcatggccctgatttccctggtttgagactcacttcctcatctccctgtcctctgagataatatgagtgagcacttaggtatcatatcagatgctcaaggctggcagctacccccttcttgagagtccaagaacctggagcagaaataatttttatgtatttttggattaataaatgttaaaaacagactcagctgtttctttccttttactactaccagttgctcccatgctgctccaccaggccctgtttcggatgccaactggcccactccccaagcacttgcccccagcttgcgaccattggcactgggagggcctggcttctgggctgatgggtcagttgggccttcataaacactcacctggctggctttgccttccaggaggaagctggctgaagcaagggtgtggaattttaaatgtgtgcacagtctggaaaactgtcagaatcagttttcccataaaagggtgggctagcattgcagctgcatttgggaccattcaaatctgtcactctcttgtgtatattcctgtgctattaaatatatcagggcagtgcatgtaaatcatcctgatatatttaatatatttattatattgtcccccgaggtggggacagtgagtgagttctcttagtccccccagagctggttgttaaagagcctggcacctacccgctctcacttcatctgtgtcatctctgcacactccagcccactttctgccttcagccattgagtggaagctgccccaggcccttaccaggtgcagatgcccaatcttgatgcccagccatcagaactgtgagccaaataaacctttttctgtataaattacccag

SEQ ID NO: 70507 - DNA, 1723 bp, Homo sapiens
  misc_feature (1)..(1): n is a, c, g, or t
ncggcgggaggcgcagcctgggcagagctcagcttggtcccgccgcccggccggtgctccctggcgcagccacgcaggcgcaccgcagacagacccctctgccatgaaccagtccatcccagtggctcccaccccaccccgccgcgtgcggctgaagccctggctggtggcccaggtgaacagctgccagtacccagggcttcaatgggtcaacggggaaaagaaattattctgcatcccctggaggcatgccacaaggcatggtcccagccaggacggagataacaccatcttcaaggcctgggccaaggagacagggaaatacaccgaaggcgtggatgaagccgatccggccaagtggaaggccaacctgcgctgtgcccttaacaagagccgggacttccgcctcatctacgacgggccccgggacatgccacctcagccctacaagatctacgaggtctgctccaatggccctgctcccacagactcccagccccctgaggattactcttttggtgcaggagaggaggaggaagaagaggaagagctgcagaggatgttgccaagcctgagcctcacagatgcagtgcagtctggcccccacatgacaccctattctttactcaaagaggatgtcaagtggccgcccacttctgcagccgcccactctgcagccgcccgtggtgctgggtccccctgctccagaccccagccccctggctcctccccctggcaaccctgctggcttcagggagcttctctctagctgtataggaggaattgcctaagggtggcccactcttgtgattgccccatttcctctggcaacaaaagccagagtgttgtgggccaagtccccccacagggcctctgcagggcatggccctgatttccctggtttgagactcacttcctcatctccctgtcctctgagataatatgagtgagcacttaggtatcatatcagatgctcaaggctggcagctacccccttcttgagagtccaagaacctggagcagaaataatttttatgtatttttggattaataaatgttaaaaacagactcagctgtttctttccttttactactaccagttgctcccatgctgctccaccaggccctgtttcggatgccaactggcccactccccaagcacttgcccccagcttgcgaccattggcactgggagggcctggcttctgggctgatgggtcagttgggccttcataaacactcacctggctggctttgccttccaggaggaagctggctgaagcaagggtgtggaattttaaatgtgtgcacagtctggaaaactgtcagaatcagttttcccataaaagggtgggctagcattgcagctgcatttgggaccattcaaatctgtcactctcttgtgtatattcctgtgctattaaatatatcagggcagtgcatgtaaatcatcctgatatatttaatatatttattatattgtcccccgaggtggggacagtgagtgagttctcttagtccccccagagctggttgttaaagagcctggcacctacccgctctcacttcatctgtgtcatctctgcacactccagcccactttctgccttcagccattgagtggaagctgccccaggcccttaccaggtgcagatgcccaatcttgatgcccagccatcagaactgtgagccaaataaacctttttctgtataaattacccag

SEQ ID NO: 70508 - DNA, 1985 bp, Homo sapiens
tgcctgggatggacgagctgggaccggaggcagggtcttgcctgagctaaactgaggctaggggagttgcctcatagttctcgcctgttatttccccagccccaggtcagtggaataacctgtcctcctttctctcccatctcttccctcccttgctggtggtgtcccttcagctgcagaggatgttgccaagcctgagcctcacaggtggggccgggaggtggtggttgggggtctagtatacagagaagctataggtaccataggtacctggaagggggctgatgggaggctagggtggcccagggctgggaggaggtgtgcctgggaggcagttcgtggaggtggcactgacagccgtccacacgcactctctgtagatgcagtgcagtctggcccccacatgacaccctattctttactcaaagaggatgtcaagtggccgcccacttctgcagccgcccactctgcagccgcccgtggtgctgggtccccctgctccagaccccagccccctggctcctccccctggcaaccctgctggcttcagggagcttctctctgaggtcctggagcctgggcccctgcctgccagcctgccccctgcaggcgaacagctcctgccagacctgctgatcagcccccacatgctgcctctgaccgacctggagatcaagtttcagtaccgggggcggccaccccgggccctcaccatcagcaacccccatggctgccggctcttctacagccagctggaggccacccaggagcaggtggaactcttcggccccataagcctggagcaagtgcgcttccccagccctgaggacatccccagtgacaagcagcgcttctacacgaaccagctgctggatgtcctggaccgcgggctcatcctccagctacagggccaggacctttatgccatccgcctgtgtcagtgcaaggtgttctggagcgggccttgtgcctcagcccatgactcatgccccaaccccatccagcgggaggtcaagaccaagcttttcagcctggagcattttctcaatgagctcatcctgttccaaaagggccagaccaacaccccaccacccttcgagatcttcttctgctttggggaagaatggcctgaccgcaaaccccgagagaagaagctcattactgtacaggtggtgcctgtagcagctcgactgctgctggagatgttctcaggggagctatcttggtcagctgatagtatccggctacagatctcaaacccagacctcaaagaccgcatggtggagcaattcaaggagctccatcacatctggcagtcccagcagcggttgcagcctgtggcccaggcccctcctggagcaggccttggtgttggccaggggccctggcctatgcacccagctggcatgcaataacaaggctgcagacggtgactggccctggcttcctgggtggcggtgcggactgatgtggagatgtgacagccccgatgagcacctggctggctgcagggtcctacctctgggtttcctggaagtggatttgggccaagaaggagagggagaaaggcccgagcccctgccttcccgggcctttctctcctgggctgtctctggtctggtcagcctggctctcgggaaattcagccatgagcagggaaagaactctcccaaccctggggcctagctgtataggaggaattgcctaagggtggcccactcttgtgattgccccatttcctctggcaacaaaagccagagtgttgtgggccaagtccccccacagggcctctgcagggcatggccctgatttccctggtttgagactcacttcctcatctccctgtcctctgagataatatgagtgagcacttaggtatcatatcagatgctcaaggctggcagctacccccttcttgagagtccaagaacctggagcagaaataatttttatgtatttttggattaataaatgttaaaaacaga

SEQ ID NO: 70509 - DNA, 2024 bp, Homo sapiens
gagccccaggactgagatatttttactataccttctctatcatcttgcacccccaaaatagcttccagggcacttctatttgtttttgtggaaagactggcaattagaggtagaaaagtgaaataaatggaaatagtactactcagggctgtcacatctacatctgtgtttttgcagtgccaatttgcattttctgagtgagttacttctactcaccttcacagcagccagtaccgcagtgccttgcatatattatatcctcaatgagtacttgtcaattgattttgtacatgcgtgtgacagtataaatatattatgaaaaatgaggaggccaggcaataaaagagtcaggatttcttccaaaaaaaatacacagcggtggagcttggcataaagttcaaatgctcctacaccctgccctgcagtatctctaaccaggggactttgataaggaagctgaagggtgatattacctttgctccctcactgcaactgaacacatttcttagtttttaggtggcccccgctggctaacttgctgtggagttttcaagggcatagaatcgtcctttacacaattaaaagaagatgctgtttaatctgaggatcctgttaaacaatgcagcttttagaaatggtcacaacttcatggttcgaaattttcggtgtggacaaccactacaaaataaagtgcagctgaagggccgtgaccttctcactctaaaaaactttaccggagaagaaattaaatatatgctatggctatcagcagatctgaaatttaggataaaacagaaaggagagtatttgcctttattgcaggggaagtccttaggcatgatttttgagaaaagaagtactcgaacaagattgtctacagaaacaggctttgcacttctgggaggacatccttgttttcctaccacacaagatattcatttgggtgtgaatgaaagtctcacggacacggcccgtgtattgtctagcatggcagatgcagtattggctcgagtgtataaacaatcagatttggacacccttgctaaagaagcatccatcccaattatcaatgggctgtcagatttgtaccatcctatccagatcctggctgattacctcacgctccaggaacactatagctctctgaaaggtcttaccctcagctgtttcggggatgggaacaatatcctgcactccatcatgatgagcgcagcgaaattcggaatgcaccttcaggcagctactccaaagggttatgagccggatgctagtgtaaccaagttggcagagcagtatgccaaagagaatggtaccaagctgttgctgacaaatgatccattggaagcagcgcatggaggcaatgtattaattacagacacttggataagcatgggacaagaagaggagaagaaaaagcggctccaggctttccaaggttaccaggttacaatgaagactgctaaagttgctgcctctgactggacatttttacactgcttgcccagaaagccagaagaagtggatgatgaagtcttttattctcctcgatcactagtgttcccagaggcagaaaacagaaagtggacaatcatggctgtcatggtgtccctgctgacagattactcacctcagctccagaagcctaaattttgatgttgtgttacttgtcaagaaagaagcaatgttcttcagtaacagaatgagttggtttatggggaaaagagaagagaatctaaaaaataaacaaatccctaacacgtggtatgggtgaaccgtatgatatgctttgccattgtgaaactttccttaagcctttaatttaagtgctgatgcactgtaatacgtgcttaactttgcttaaactctctaattcccaatttctgagttacatttagatatcatattaattatcatatacatttacttcaacataaaatactgtgttcataatgtataatgtctaagccattaagtgtaatctatgcttattacctaaataaattatcacccatgctaatttataa

SEQ ID NO: 70510 - DNA, 1803 bp, Homo sapiens
gagccccaggactgagatatttttactataccttctctatcatcttgcacccccaaaatagcttccagggcacttctatttgtttttgtggaaagactggcaattagaggtagaaaagtgaaataaatggaaatagtactactcagggctgtcacatctacatctgtgtttttgcagtgccaatttgcattttctgagtgagttacttctactcaccttcacagcagccagtaccgcagtgccttgcatatattatatcctcaatgagtacttgtcaattgattttgtacatgcgtgtgacagtataaatatattatgaaaaatgaggaggccaggcaataaaagagtcaggatttcttccaaaaaaaatacacagcggtggagcttggcataaagttcaaatgctcctacaccctgccctgcagtatctctaaccaggggactttgataaggaagctgaagggtgatattacctttgctccctcactgcaactgaacacatttcttagtttttaggtggcccccgctggctaacttgctgtggagttttcaagggcatagaatcgtcctttacacaattaaaagaagatgctgtttaatctgaggatcctgttaaacaatgcagcttttagaaatggtcacaacttcatggttcgaaattttcggtgtggacaaccactacaaaataaagtgcagctgaagggccgtgaccttctcactctaaaaaactttaccggagaagaaattaaatatatgctatggctatcagcagatctgaaatttaggataaaacagaaaggagagtatttgcctttattgcaggggaagtccttaggcatgatttttgagaaaagaagtactcgaacaagattgtctacagaaacaggctttgcacttctgggaggacatccttgttttcctaccacacaagatattcatttgggtgtgaatgaaagtctcacggacacggcccgtgtattgtctagcatggcagatgcagtattggctcgagtgtataaacaatcagatttggacacccttgctaaagaagcatccatcccaattatcaatgggctgtcagatttgtaccatcctatccagatcctggctgattacctcacgctccaggaacactatagctctctgaaaggtcttaccctcagctgtttcggggatgggaacaatatcctgcactccatcatgatgagcgcagcgaaattcggaatgcaccttcaggcagctactccaaagggttatgagccggatgctagtgtaaccaagttggcagagcagtatgccaaagagaatggtaccaagctgttgctgacaaatgatccattggaagcagcgcatggaggcaatgtattaattacagacacttggataagcatgggacaagaagaggagaagaaaaagcggctccaggctttccaaggttaccaggttacaatgaagactgctaaagttgctgcctctgactggacatttttacactgcttgcccagaaagccagaagaagtggatgatgaagtcttttattctcctcgatcactagtgttcccagaggcagaaaacagaaagtggacaatcatggctgtcatggtgtccctgctgacagattactcacctcagctccagaagcctaaattttgatgttgtgttacttgtcaagaaagaagcaatgttcttcagtaacagaatgagttggtttatggggaaaagagaagagaatctaaaaaataaagcatgatgcgtccggctcatcctctcattcggtgccagtagccccaccaaccgtcatct

SEQ ID NO: 70511 - DNA, 514 bp, Homo sapiens
gacatatggggcccactccgattcctttgactcccctctctttcctcagaacatctgcaattgttaattatacattacggtttcaataacttcttccttaattcttttgctgttccaggaagtgtgtgtttgtgcatgcacgtatgtgcacatgcctgtgtgtcttcaggtgctcttgttttttctgataaaggccaacatgcaaagaagaccatcttccccaagagcagacaaggcctagaagagataggttcaaagaataaagggaaactgaacatggcccataccctccaccatgtacaattaagtgagaagatgagagaatgcatgtaacagcctaacacttaaaggcactatgaaattaagagcaaataactgtcagatggtaaatgagagccatttgctaattcctttagttacctgagatgcagaccaaagagtatacgtggaaatcacgtatctcctcccagcaaaataaaaaacaaaactcaaaaggttcttagcataaaaatgg

SEQ ID NO: 70512 - DNA, 467 bp, Homo sapiens
cagcctgaagagtacacgccgacggacagacagacagtgcagtcacccataaagtagaaagcactactaacagcactggagggtgtagtgtttcctactttatggatgagtgtactgtgggcttcggagatcacgccactgctgccgcccgctgcccgccaccatcttcctcggcgctcggggacctcgtgtgacaggtgagcaccttacggcccctccctaccctgcccagatgcctgaaaggcctccatggctttcctgcccttcctggttccggacagctggggaaaggccacagcagctcctctgctgccctgcagtctttgggggcggggagggctggacatgtggaaccctgatgcagccgcagcgtcaaggacgaggaaggggtgggaagggatggtacgtggaggggaatgggtggtgggaccagggacccaatgctaataaagactggactgtgcttc

SEQ ID NO: 70513 - DNA, 473 bp, Homo sapiens
  misc_feature (73)..(73): n is a, c, g, or t
cagactctggcccttcagaactgccaggccccactcacaccactacaggctctacctatagtgccattaccanacccacagtgctccaagccccctcactcacactactacaggctccacccacaagcccataatctctacccttactactacaggccctaccctcaatatcataggcccagtccagactaccacaagccccacccacactatgccaagccctccctaccctgcccagatgcctgaaaggcctccatggctttcctgcccttcctggttccggacagctggggaaaggccacagcagctcctctgctgccctgcagtctttgggggcggggagggctggacatgtggaaccctgatgcagccgcagcgtcaaggacgaggaaggggtgggaagggatggtacgtggaggggaatgggtggtgggaccagggacccaatgctaataaagactggactgtgcttc

SEQ ID NO: 70514 - DNA, 189 bp, Homo sapiens
gtcagcactgagcctccacttgcaattttgtggtagaccttccaactttcatggacaagcctgcagccagagtccagaaaataacaatcaattgctagacattgctccagagctgcatatagattaggctcacttgcagaggaagcaagagctcaataaaacaccaaacaaaaaccatcctggggaaaa

SEQ ID NO: 70515 - DNA, 4151 bp, Homo sapiens
  misc_feature (1387)..(1387): n is a, c, g, or t
agcggagtagaggctgtgggagagagcgcgatgggccgcggcggtgggcgcacgttccgcggggactcatgccacgcgcgtcccggcccgacgcgcaattagcagccacctccgcagcccgccgccaccgcctccctgccctcccgggctgccgcagctaggagctccagccgtcgcctcgcgcaggctgcgggcattgtcctctcggttcgccgcccgggctgctgctgccgccgcggactgctgcggggcccggacccgcaccccagggatacgctgccgccgccgccggccggcccggcgcccggcctccgttcggtggtttccgccctgcgttctctgggttgctctctcctgggtttttcctgcgtagctgaggaaggggaagagaagtccagccgccaagcccagccttccccggcgcgcagccccgacggggccgcggcaggcgcggcgagagcgctgacggagccatgagagagtacaaagtggtggtgctgggctcgggcggcgtgggcaagtccgcgctcaccgtgcagttcgtgacgggctccttcatcgagaagtacgacccgaccatcgaagacttttaccgcaaggagattgaggtggactcgtcgccgtcggtgctggagatcctggatacggcgggcaccgagcagttcgcgtccatgcgggacctgtacatcaagaacggccagggcttcatcctggtctacagcctcgtcaaccagcagagcttccaggacatcaagcccatgcgggaccagatcatccgcgtgaagcggtacgagcgcgtgcccatgatcctggtgggcaacaaggtggacctggagggtgagcgcgaggtctcgtacggggagggcaaggccctggctgaggagtggagctgccccttcatggagacgtcggccaaaaacaaagcctcggtagacgagctatttgccgagatcgtgcggcagatgaactacgcggcgcagcccaacggcgatgagggctgctgctcggcctgcgtgatcctctgaggcggccaccgcgcgccggccgcgctctgcgcacaaaagccaaacgcatccgactctctaaatgtgatttatttcttgctttgagattggagaccactttgcattggccagggtgtcttgggagcccggctggcctccgcggccggcgtcccctgcctccaccctgtgcccgagggggtgtccggtcctgcccatccgatactctggtggaaatgtggctctttgcagcatgtacgtttctccctgattttggttgatgcatatttccccgtttaagtagccgttagggcgcagtatcggcagcttgacacccaccaagcaaaagtttcagcctggaaaaaaaatgggggggaagggtggangaaaaggagggagagaaggtggaaatggtttttttttttttttttctattttctttctttttttttttttttttttttggtcaacagccgtttttctagttccaagttttaaatacatggaaggaagtccgggagaaccatatgaaggagcaggaggagaggaagaaactttttttccttcttttccaggagtagctggaaattaagatcgggttccttttctgccagcttggaagggcaaccccatgactgattgcgattctgaggatgtctatgcaaagttggattcttgttacagtgtatccaatctgaagtattgcacatctgaactgggactgttaacactgatgccaatacagtgtggggtgccagaaagtgtctgctgatatttgtggaaaaaaaatctattttgtttacctactgtatcaaaggggagtctgggggagaatggtagtattttttttttttatcagctgtgaaaaaaatgttacagatctgcacattttcgtgtgtactatggtgtgtgtgtgtatgtgtgtggtgtgtgtgtgttttaagtttagccttttgtttttgttttttggttggcagtaaccgattttaatgactagcttttaaaaatacagtacaaagactttgtaaatgtgattcagggcccccagcacccctgtgtctgcagagtgccttcaaaactcagctgttccagccggtgccaacctgtgaacttcccaccatatcccagaatctgctattccccaaaccacttcccagtttcctttcagtaatctttctgaaggagccaggacaatagggcctgttgtttagtgaatttctttattattttcagcctttaaaatgtaatttccatctcttgcaatgaatttgtttcccttttttttgcttcattttgtttaaattttcaggtatttagctcccctttcatattatttttaaattttttaattacctgttgtagggtgttcctccagaagcaaagagcaaaattttactgttgtgatgtaccaattctaactaattgtaatttttaatttcatgcgtttaatcattgtctcttcattttaagacttttaatacaaatgtcatttttaaagaaacaaacccaaaactattgtttgtgtttctgtgtttcatattcagtgatttaatacagtatcatggctgaggtggatggggcaggtgcatgatactcttcagagctatttgtgaaattttaaagacagaagtgtctcagtgacaagttggatgacactactcccaactttttaaatttggagaaaaccatcaaggtcgaggaagccctgggtatggccattaccatctgattagaagatgaacaggtattttgaatctgatctgacatggaacagtttacctcattgtaggtagggaacaagagaacccatctattaaaattgccttagatctgggaaagtaaccatccttctggcaaagtaggatggcacttttaagtttttcttccttttttccctctgtttatattgcacatcaagtcaaaaacatgtttgggaaagatggttttcaattctgaagttatacctagtgatgttttttgcagtacatttgaatggattgtagacactgcctcaacccttttgaggttttgatttggaaatagatttaaaagaaaacaggctaagataatatccttgttctcatttacaccctgcagtttggaccacatttgacctcataagtttttccttttaacagtaggaggcagtgtgagctttttattttttatttttcttaaggtggtcttagtaatataacatgttcatacatatcaagagagtacttggtataccttaggtctatgaagtgtagctgaaatctgaagagtcttgacaaagggatttacacccttgacaaaaccaaaagaaattaacaggccacaggtttctttaaagctgtgttaacatatcttgccttaaaatgtgtgtgtgtgtttttgctttgcttttttttttttgcccaagaggcatctcagtactccagcaatggaggaagaatagagaattttgcctggcaatggtcctactgccattttttttttcccactctgatctcacttaagtttgatatcaaacacaattgggaggcaatagtatcaatatcctaaatgtagaaattaaaagatactgtataattttatgcctttgcaaagattcgttcttgtatttgaataaattcagttgctaaagtagatccaaagtgttaaaaatgctgaagtcatgtcaagtactgtctggagggtttttttaagaaaaggcatttggcatttaactgtctcttgttttatttttaagtttttggaaaccttttgacataaaatgctgccaagtatctaagaaatgtatatactgacagaagatatttgaaagtggaaaattggaaatgaaatatgttgctgggtgcgttaatcacctccgcccaggatttagtcacttgcaggacctctttatagtctaggatggcagagcagaagattttaatatgcttttattaagtgatgtaaaataaatgctttttggattatcaatgaaagcaattttatgtgtgcctgaagcaagaaaatagcgtttttggttttatctcatattttcttggcaaaattgagagaaattaggaacactgctatttttttcttaaaaatgtttttaagaatatgttcgtttctttgactattaagaaccccttgtggtattagtgtgtgaagagataa

SEQ ID NO: 70516 - DNA, 2424 bp, Homo sapiens
  misc_feature (1387)..(1387): n is a, c, g, or t
agcggagtagaggctgtgggagagagcgcgatgggccgcggcggtgggcgcacgttccgcggggactcatgccacgcgcgtcccggcccgacgcgcaattagcagccacctccgcagcccgccgccaccgcctccctgccctcccgggctgccgcagctaggagctccagccgtcgcctcgcgcaggctgcgggcattgtcctctcggttcgccgcccgggctgctgctgccgccgcggactgctgcggggcccggacccgcaccccagggatacgctgccgccgccgccggccggcccggcgcccggcctccgttcggtggtttccgccctgcgttctctgggttgctctctcctgggtttttcctgcgtagctgaggaaggggaagagaagtccagccgccaagcccagccttccccggcgcgcagccccgacggggccgcggcaggcgcggcgagagcgctgacggagccatgagagagtacaaagtggtggtgctgggctcgggcggcgtgggcaagtccgcgctcaccgtgcagttcgtgacgggctccttcatcgagaagtacgacccgaccatcgaagacttttaccgcaaggagattgaggtggactcgtcgccgtcggtgctggagatcctggatacggcgggcaccgagcagttcgcgtccatgcgggacctgtacatcaagaacggccagggcttcatcctggtctacagcctcgtcaaccagcagagcttccaggacatcaagcccatgcgggaccagatcatccgcgtgaagcggtacgagcgcgtgcccatgatcctggtgggcaacaaggtggacctggagggtgagcgcgaggtctcgtacggggagggcaaggccctggctgaggagtggagctgccccttcatggagacgtcggccaaaaacaaagcctcggtagacgagctatttgccgagatcgtgcggcagatgaactacgcggcgcagcccaacggcgatgagggctgctgctcggcctgcgtgatcctctgaggcggccaccgcgcgccggccgcgctctgcgcacaaaagccaaacgcatccgactctctaaatgtgatttatttcttgctttgagattggagaccactttgcattggccagggtgtcttgggagcccggctggcctccgcggccggcgtcccctgcctccaccctgtgcccgagggggtgtccggtcctgcccatccgatactctggtggaaatgtggctctttgcagcatgtacgtttctccctgattttggttgatgcatatttccccgtttaagtagccgttagggcgcagtatcggcagcttgacacccaccaagcaaaagtttcagcctggaaaaaaaatgggggggaagggtggangaaaaggagggagagaaggtggaaatggtttttttttttttttttctattttctttctttttttttttttttttttttggtcaacagccgtttttctagttccaagttttaaatacatggaaggaagtccgggagaaccatatgaaggagcaggaggagaggaagaaactttttttccttcttttccaggagtagctggaaattaagatcgggttccttttctgccagcttggaagggcaaccccatgactgattgcgattctgaggatgtctatgcaaagttggattcttgttacagtgtatccaatctgaagtattgcacatctgaactgggactgttaacactgatgccaatacagtgtggggtgccagaaagtgtctgctgatatttgtggaaaaaaaatctattttgtttacctactgtatcaaaggggagtctgggggagaatggtagtattttttttttttatcagctgtgaaaaaaatgttacagatctgcacattttcgtgtgtactatggtgtgtgtgtgtatgtgtgtggtgtgtgtgtgttttaagtttagccttttgtttttgttttttggttggcagtaaccgattttaatgactagcttttaaaaatacagtacaaagactttgtaaatgtgattcagggcccccagcacccctgtgtctgcagagtgccttcaaaactcagctgttccagccggtgccaacctgtgaacttcccaccatatcccagaatctgctattccccaaaccacttcccagtttcctttcagtaatctttctgaaggagccaggacaatagggcctgttgtttagtgaatttctttattattttcagcctttaaaatgtaatttccatctcttgcaatgaatttgtttcccttttttttgcttcattttgtttaaattttcaggtatttagctcccctttcatatactcaagatgaactgaaagacagcataacatagtgtgccaaggtctttaatttgagactcctatatcccagtgctatgtcattcattggagg

SEQ ID NO: 70517 - DNA, 2749 bp, Homo sapiens
tacagggcaaacacatttcttaataagtgcagtttgttaaaatcatgttaaaacatatgagtcaaggggaagtaaaaataaagggtatcactgtaggaaaagcttttgggtctggcacctgggagaccactggagcaggaggagaggaagaaactttttttccttcttttccaggagtagctggaaattaagatcgggttccttttctgccagcttggaagggcaaccccatgactgattgcgattctgaggatgtctatgcaaagttggattcttgttacagtgtatccaatctgaagtattgcacatctgaactgggactgttaacactgatgccaatacagtgtggggtgccagaaagtgtctgctgatatttgtggaaaaaaaatctattttgtttacctactgtatcaaaggggagtctgggggagaatggtagtattttttttttttatcagctgtgaaaaaaatgttacagatctgcacattttcgtgtgtactatggtgtgtgtgtgtatgtgtgtggtgtgtgtgtgttttaagtttagccttttgtttttgttttttggttggcagtaaccgattttaatgactagcttttaaaaatacagtacaaagactttgtaaatgtgattcagggcccccagcacccctgtgtctgcagagtgccttcaaaactcagctgttccagccggtgccaacctgtgaacttcccaccatatcccagaatctgctattccccaaaccacttcccagtttcctttcagtaatctttctgaaggagccaggacaatagggcctgttgtttagtgaatttctttattattttcagcctttaaaatgtaatttccatctcttgcaatgaatttgtttcccttttttttgcttcattttgtttaaattttcaggtatttagctcccctttcatattatttttaaattttttaattacctgttgtagggtgttcctccagaagcaaagagcaaaattttactgttgtgatgtaccaattctaactaattgtaatttttaatttcatgcgtttaatcattgtctcttcattttaagacttttaatacaaatgtcatttttaaagaaacaaacccaaaactattgtttgtgtttctgtgtttcatattcagtgatttaatacagtatcatggctgaggtggatggggcaggtgcatgatactcttcagagctatttgtgaaattttaaagacagaagtgtctcagtgacaagttggatgacactactcccaactttttaaatttggagaaaaccatcaaggtcgaggaagccctgggtatggccattaccatctgattagaagatgaacaggtattttgaatctgatctgacatggaacagtttacctcattgtaggtagggaacaagagaacccatctattaaaattgccttagatctgggaaagtaaccatccttctggcaaagtaggatggcacttttaagtttttcttccttttttccctctgtttatattgcacatcaagtcaaaaacatgtttgggaaagatggttttcaattctgaagttatacctagtgatgttttttgcagtacatttgaatggattgtagacactgcctcaacccttttgaggttttgatttggaaatagatttaaaagaaaacaggctaagataatatccttgttctcatttacaccctgcagtttggaccacatttgacctcataagtttttccttttaacagtaggaggcagtgtgagctttttattttttatttttcttaaggtggtcttagtaatataacatgttcatacatatcaagagagtacttggtataccttaggtctatgaagtgtagctgaaatctgaagagtcttgacaaagggatttacacccttgacaaaaccaaaagaaattaacaggccacaggtttctttaaagctgtgttaacatatcttgccttaaaatgtgtgtgtgtgtttttgctttgcttttttttttttgcccaagaggcatctcagtactccagcaatggaggaagaatagagaattttgcctggcaatggtcctactgccattttttttttcccactctgatctcacttaagtttgatatcaaacacaattgggaggcaatagtatcaatatcctaaatgtagaaattaaaagatactgtataattttatgcctttgcaaagattcgttcttgtatttgaataaattcagttgctaaagtagatccaaagtgttaaaaatgctgaagtcatgtcaagtactgtctggagggtttttttaagaaaaggcatttggcatttaactgtctcttgttttatttttaagtttttggaaaccttttgacataaaatgctgccaagtatctaagaaatgtatatactgacagaagatatttgaaagtggaaaattggaaatgaaatatgttgctgggtgcgttaatcacctccgcccaggatttagtcacttgcaggacctctttatagtctaggatggcagagcagaagattttaatatgcttttattaagtgatgtaaaataaatgctttttggattatcaatgaaagcaattttatgtgtgcctgaagcaagaaaatagcgtttttggttttatctcatattttcttggcaaaattgagagaaattaggaacactgctatttttttcttaaaaatgtttttaagaatatgttcgtttctttgactattaagaaccccttgtggtattagtgtgtgaagagataa

SEQ ID NO: 70518 - DNA, 2312 bp, Homo sapiens
  misc_feature (55)..(55): n is a, c, g, or t
tagaggatccctgtgatccgacacctctttttgtctgttagttatttctccaggngaaaaggcaataattttctaagacccgtgtgtggtgtgtgtgtgttttaagtttagccttttgtttttgttttttggttggcagtaaccgattttaatgactagcttttaaaaatacagtacaaagactttgtaaatgtgattcagggcccccagcacccctgtgtctgcagagtgccttcaaaactcagctgttccagccggtgccaacctgtgaacttcccaccatatcccagaatctgctattccccaaaccacttcccagtttcctttcagtaatctttctgaaggagccaggacaatagggcctgttgtttagtgaatttctttattattttcagcctttaaaatgtaatttccatctcttgcaatgaatttgtttcccttttttttgcttcattttgtttaaattttcaggtatttagctcccctttcatattatttttaaattttttaattacctgttgtagggtgttcctccagaagcaaagagcaaaattttactgttgtgatgtaccaattctaactaattgtaatttttaatttcatgcgtttaatcattgtctcttcattttaagacttttaatacaaatgtcatttttaaagaaacaaacccaaaactattgtttgtgtttctgtgtttcatattcagtgatttaatacagtatcatggctgaggtggatggggcaggtgcatgatactcttcagagctatttgtgaaattttaaagacagaagtgtctcagtgacaagttggatgacactactcccaactttttaaatttggagaaaaccatcaaggtcgaggaagccctgggtatggccattaccatctgattagaagatgaacaggtattttgaatctgatctgacatggaacagtttacctcattgtaggtagggaacaagagaacccatctattaaaattgccttagatctgggaaagtaaccatccttctggcaaagtaggatggcacttttaagtttttcttccttttttccctctgtttatattgcacatcaagtcaaaaacatgtttgggaaagatggttttcaattctgaagttatacctagtgatgttttttgcagtacatttgaatggattgtagacactgcctcaacccttttgaggttttgatttggaaatagatttaaaagaaaacaggctaagataatatccttgttctcatttacaccctgcagtttggaccacatttgacctcataagtttttccttttaacagtaggaggcagtgtgagctttttattttttatttttcttaaggtggtcttagtaatataacatgttcatacatatcaagagagtacttggtataccttaggtctatgaagtgtagctgaaatctgaagagtcttgacaaagggatttacacccttgacaaaaccaaaagaaattaacaggccacaggtttctttaaagctgtgttaacatatcttgccttaaaatgtgtgtgtgtgtttttgctttgcttttttttttttgcccaagaggcatctcagtactccagcaatggaggaagaatagagaattttgcctggcaatggtcctactgccattttttttttcccactctgatctcacttaagtttgatatcaaacacaattgggaggcaatagtatcaatatcctaaatgtagaaattaaaagatactgtataattttatgcctttgcaaagattcgttcttgtatttgaataaattcagttgctaaagtagatccaaagtgttaaaaatgctgaagtcatgtcaagtactgtctggagggtttttttaagaaaaggcatttggcatttaactgtctcttgttttatttttaagtttttggaaaccttttgacataaaatgctgccaagtatctaagaaatgtatatactgacagaagatatttgaaagtggaaaattggaaatgaaatatgttgctgggtgcgttaatcacctccgcccaggatttagtcacttgcaggacctctttatagtctaggatggcagagcagaagattttaatatgcttttattaagtgatgtaaaataaatgctttttggattatcaatgaaagcaattttatgtgtgcctgaagcaagaaaatagcgtttttggttttatctcatattttcttggcaaaattgagagaaattaggaacactgctatttttttcttaaaaatgtttttaagaatatgttcgtttctttgactattaagaaccccttgtggtattagtgtgtgaagagataa

SEQ ID NO: 70519 - DNA, 2503 bp, Homo sapiens
  misc_feature (1387)..(1387): n is a, c, g, or t
agcggagtagaggctgtgggagagagcgcgatgggccgcggcggtgggcgcacgttccgcggggactcatgccacgcgcgtcccggcccgacgcgcaattagcagccacctccgcagcccgccgccaccgcctccctgccctcccgggctgccgcagctaggagctccagccgtcgcctcgcgcaggctgcgggcattgtcctctcggttcgccgcccgggctgctgctgccgccgcggactgctgcggggcccggacccgcaccccagggatacgctgccgccgccgccggccggcccggcgcccggcctccgttcggtggtttccgccctgcgttctctgggttgctctctcctgggtttttcctgcgtagctgaggaaggggaagagaagtccagccgccaagcccagccttccccggcgcgcagccccgacggggccgcggcaggcgcggcgagagcgctgacggagccatgagagagtacaaagtggtggtgctgggctcgggcggcgtgggcaagtccgcgctcaccgtgcagttcgtgacgggctccttcatcgagaagtacgacccgaccatcgaagacttttaccgcaaggagattgaggtggactcgtcgccgtcggtgctggagatcctggatacggcgggcaccgagcagttcgcgtccatgcgggacctgtacatcaagaacggccagggcttcatcctggtctacagcctcgtcaaccagcagagcttccaggacatcaagcccatgcgggaccagatcatccgcgtgaagcggtacgagcgcgtgcccatgatcctggtgggcaacaaggtggacctggagggtgagcgcgaggtctcgtacggggagggcaaggccctggctgaggagtggagctgccccttcatggagacgtcggccaaaaacaaagcctcggtagacgagctatttgccgagatcgtgcggcagatgaactacgcggcgcagcccaacggcgatgagggctgctgctcggcctgcgtgatcctctgaggcggccaccgcgcgccggccgcgctctgcgcacaaaagccaaacgcatccgactctctaaatgtgatttatttcttgctttgagattggagaccactttgcattggccagggtgtcttgggagcccggctggcctccgcggccggcgtcccctgcctccaccctgtgcccgagggggtgtccggtcctgcccatccgatactctggtggaaatgtggctctttgcagcatgtacgtttctccctgattttggttgatgcatatttccccgtttaagtagccgttagggcgcagtatcggcagcttgacacccaccaagcaaaagtttcagcctggaaaaaaaatgggggggaagggtggangaaaaggagggagagaaggtggaaatggtttttttttttttttttctattttctttctttttttttttttttttttttggtcaacagccgtttttctagttccaagttttaaatacatggaaggaagtccgggagaaccatatgaaggagcaggaggagaggaagaaactttttttccttcttttccaggagtagctggaaattaagatcgggttccttttctgccagcttggaagggcaaccccatgactgattgcgattctgaggatgtctatgcaaagttggattcttgttacagtgtatccaatctgaagtattgcacatctgaactgggactgttaacactgatgccaatacagtgtggggtgccagaaagtgtctgctgatatttgtggaaaaaaaatctattttgtttacctactgtatcaaaggggagtctgggggagaatggtagtattttttttttttatcagctgtgaaaaaaatgttacagatctgcacattttcgtgtgtactatggtgtgtgtgtgtatgtgtgtggtgtgtgtgtgttttaagtttagccttttgtttttgttttttggttggcagtaaccgattttaatgactagcttttaaaaatacagtacaaagactttgtaaatgtgattcagggcccccagcacccctgtgtctgcagagtgccttcaaaactcagctgttccagccggtgccaacctgtgaacttcccaccatatcccagaatctgctattccccaaaccacttcccagtttcctttcagtaatctttctgaaggagccaggacaatagggcctgttgtttagtgaatttctttattattttcagcctttaaaatgtaatttccatctcttgcaatgaatttgtttcccttttttttgcttcattttgtttaaattttcaggtatttagctcccctttcatattatttttaaattttttaattacctgttgtagggtgttcctccagaagcaaagagcaaaattttactgttgtgatgtaccaattctaactaattgtaatttttaatttcatgcgtttaatcattgtctcttcattttaagacttttaatacaaatgtcatttttaaagaaac

SEQ ID NO: 70520 - DNA, 3362 bp, Homo sapiens
agcggagtagaggctgtgggagagagcgcgatgggccgcggcggtgggcgcacgttccgcggggactcatgccacgcgcgtcccggcccgacgcgcaattagcagccacctccgcagcccgccgccaccgcctccctgccctcccgggctgccgcagctaggagctccagccgtcgcctcgcgcaggctgcgggcattgtcctctcggttcgccgcccgggctgctgctgccgccgcggactgctgcggggcccggacccgcaccccagggatacgctgccgccgccgccggccggcccggcgcccggcctccgttcggtggtttccgccctgcgttctctgggttgctctctcctgggtttttcctgcgtagctgaggaaggggaagagaagtccagccgccaagcccagccttccccggcgcgcagccccgacggggccgcggcaggcgcggcgagagcgctgacggagccatgagagagtacaaagtggtggtgctgggctcgggcggcgtgggcaagtccgcgctcaccgtgcagttcgtgacgggctccttcatcgagaagtacgacccgaccatcgaagacttttaccgcaaggagattgaggtggactcgtcgccgtcggtgctggagatcctggatacggcgggcaccgagcagttcgcgtccatgcgggacctgtacatcaagaacggccagggcttcatcctggtctacagcctcgtcaaccagcagagcttccaggacatcaagcccatgcgggaccagatcatccgcgtgaagcggagtagctggaaattaagatcgggttccttttctgccagcttggaagggcaaccccatgactgattgcgattctgaggatgtctatgcaaagttggattcttgttacagtgtatccaatctgaagtattgcacatctgaactgggactgttaacactgatgccaatacagtgtggggtgccagaaagtgtctgctgatatttgtggaaaaaaaatctattttgtttacctactgtatcaaaggggagtctgggggagaatggtagtattttttttttttatcagctgtgaaaaaaatgttacagatctgcacattttcgtgtgtactatggtgtgtgtgtgtatgtgtgtggtgtgtgtgtgttttaagtttagccttttgtttttgttttttggttggcagtaaccgattttaatgactagcttttaaaaatacagtacaaagactttgtaaatgtgattcagggcccccagcacccctgtgtctgcagagtgccttcaaaactcagctgttccagccggtgccaacctgtgaacttcccaccatatcccagaatctgctattccccaaaccacttcccagtttcctttcagtaatctttctgaaggagccaggacaatagggcctgttgtttagtgaatttctttattattttcagcctttaaaatgtaatttccatctcttgcaatgaatttgtttcccttttttttgcttcattttgtttaaattttcaggtatttagctcccctttcatattatttttaaattttttaattacctgttgtagggtgttcctccagaagcaaagagcaaaattttactgttgtgatgtaccaattctaactaattgtaatttttaatttcatgcgtttaatcattgtctcttcattttaagacttttaatacaaatgtcatttttaaagaaacaaacccaaaactattgtttgtgtttctgtgtttcatattcagtgatttaatacagtatcatggctgaggtggatggggcaggtgcatgatactcttcagagctatttgtgaaattttaaagacagaagtgtctcagtgacaagttggatgacactactcccaactttttaaatttggagaaaaccatcaaggtcgaggaagccctgggtatggccattaccatctgattagaagatgaacaggtattttgaatctgatctgacatggaacagtttacctcattgtaggtagggaacaagagaacccatctattaaaattgccttagatctgggaaagtaaccatccttctggcaaagtaggatggcacttttaagtttttcttccttttttccctctgtttatattgcacatcaagtcaaaaacatgtttgggaaagatggttttcaattctgaagttatacctagtgatgttttttgcagtacatttgaatggattgtagacactgcctcaacccttttgaggttttgatttggaaatagatttaaaagaaaacaggctaagataatatccttgttctcatttacaccctgcagtttggaccacatttgacctcataagtttttccttttaacagtaggaggcagtgtgagctttttattttttatttttcttaaggtggtcttagtaatataacatgttcatacatatcaagagagtacttggtataccttaggtctatgaagtgtagctgaaatctgaagagtcttgacaaagggatttacacccttgacaaaaccaaaagaaattaacaggccacaggtttctttaaagctgtgttaacatatcttgccttaaaatgtgtgtgtgtgtttttgctttgcttttttttttttgcccaagaggcatctcagtactccagcaatggaggaagaatagagaattttgcctggcaatggtcctactgccattttttttttcccactctgatctcacttaagtttgatatcaaacacaattgggaggcaatagtatcaatatcctaaatgtagaaattaaaagatactgtataattttatgcctttgcaaagattcgttcttgtatttgaataaattcagttgctaaagtagatccaaagtgttaaaaatgctgaagtcatgtcaagtactgtctggagggtttttttaagaaaaggcatttggcatttaactgtctcttgttttatttttaagtttttggaaaccttttgacataaaatgctgccaagtatctaagaaatgtatatactgacagaagatatttgaaagtggaaaattggaaatgaaatatgttgctgggtgcgttaatcacctccgcccaggatttagtcacttgcaggacctctttatagtctaggatggcagagcagaagattttaatatgcttttattaagtgatgtaaaataaatgctttttggattatcaatgaaagcaattttatgtgtgcctgaagcaagaaaatagcgtttttggttttatctcatattttcttggcaaaattgagagaaattaggaacactgctatttttttcttaaaaatgtttttaagaatatgttcgtttctttgactattaagaaccccttgtggtattagtgtgtgaagagataa

SEQ ID NO: 70521 - DNA, 344 bp, Homo sapiens
ttattatatatttttatataattatatttatatgaataaataaaaccataaatgaatatatgcatgtatatatacacaacacaaataaagctatctgttcatctttcctctatctgatgatgcaacaggcttaccatataagaaatgccatgaaatcacaggacacgctacagaaaggagggtataaaatataactataactatattaactactaataccagcagtaactggaggaatattccttgcctggaaaagcaatttcaattaacagaattattttgttgacaacaagttttttatttaacttgttaagatcatgtagggcaggattgggagaggcaaa

SEQ ID NO: 70522 - DNA, 323 bp, Homo sapiens
cggcactgttctcaatagcaaagacttggaaccaacccaaatgctgatcaatggtagactggataaagacaatgtggcacatgcgcagttcaatgtggctggatcatagaatatgaagtgatacctgattctaaatcaggctgggtttataccatgcaggaccttgaggatcctgttaaatatctgggactgtatttaaacagtactgagaagctagcaaacttgtgaggaacagagaatgatataattcatatttatgtctagaaaagatctctttcatagatctgggtcaaaagtggattagaggggtcaagaatatattt

SEQ ID NO: 70523 - DNA, 259 bp, Homo sapiens
gtaatgggaaaggtattttatttctttttgaaattatttccagctgaatgatgttagtaaaaatacagagagaatacaacaaatgacatttagtaattttttctgactaacccattttagggttgtttatatacaaagaagaatatgaacaagaacaaatttaataaatagctgtagcctaatacacaaccgaaagaccgtaactccaacagcagagataccctgagaacagaataaggaggtggtgctgagcgtgtaa

SEQ ID NO: 70524 - DNA, 326 bp, Homo sapiens
tcacagaagtaatggaaatggcaagtaaatatatgaggaaatagtaattatcaaaaaatgcaaactgaaacaacgagaacttctgtctatcagactgctgacaataaaacatttattacatactaatggaacaggtctgagaaagtgggcattttcacacttttttgaatgagagtataaattagtacaatcttttcaaagagcagtttggcaacattccacaaaatttcaaaattatacattcttaggctcttctaaaattttatttttctttcttagtcttggtaatagtttaaaaaaactgttgaaccagcagtgggattgag

SEQ ID NO: 70525 - DNA, 397 bp, Homo sapiens
atagttcctaatgatttgtgtctatctaatgggttattgagaaaatcaaataaaataatgcatgcaaagtacttttagcacaggtccaatatccatggtaagaatacaaatgtggctgggcgcagtggctcacacctgtaatctctgcactttaggaggccaaggtggacagatcacctgaggtcaggagttcgggaccagactggccaacatgatgaaaccctgtcactactaaaattacaaaaaattagccaggcatggtgggacacacctgaaatcccagctactcaggagcctgaggcaggagaatcacttgaacccaggaggcggaggttgcagtgagccaagatggcaccactgcactctagcctgggcaacaagagtgaaactccatcta

SEQ ID NO: 70526 - DNA, 925 bp, Homo sapiens
gaaaaaatattcaaaatggaaagtccatttatgaatgtattaatattaaaatccaaagttatgtttttttataatgtctacattataatgtttacaaaggccataaaatcatttcagaaagttctcatcctccagatattgaccaataaaacttcatttcctagaaaaaagaagaaatgttataatttatacaaagatgaagtaagattttggaattacgtatacttacaccttcattttggatttgatttttgaatggatgcttaaaattctgatattcaactaatgacttagttttaccatcaaaaaatttagattatgatttttttgcatctcacttttcataataaatgtaatatagatacaatttattctgttttttgttgatgttattattgtttccactgctattgaaatcgttcttttaaccatgaatgtgcagaatcagttgattttccatgtgacagcttctgctaggaatctgcagtggaactggaagtatttgcaatgaaagaacttttttctttaattaaaatagaattcccatagaatcaacaattcctcctggtcatcaaacgcgaggtttttcctgtacttggtagagcagagtgtgtgtgtgtttgtgcgttgtgtgtgtgttgtttggtgagaatgatgagagctgagcattgtgaaaatacaggcgggggtggggtaacagagctgggtaggggtccagggcgcttagattgccttattgtccaggcttagatgcctcttacccagagccatcaggtgtaccctatatagctccagcctttctgcctactcctgagaagataaactgggatcctgcagtctggattcctagaaggagatggaaagcccagccatatccccagtttgacttgaccagtagtaaaactagcactacagtttgatccct

SEQ ID NO: 70527 - DNA, 2117 bp, Homo sapiens
taaagagatcagctgacttgcccaaccttcacctaacagccagtgtgcaaacccaggtgtggtaggccccagggcttgtctcagagagaaaacacactagggtttgtggaactctgattgagagcttcaggtaggttaaggccacactgttccttcactttctctcctcaattctgttttcagggtagagaagttacccagtcctgccaccccacaggcaactaagctctaaattccaagaagagagaacaggtaaccactgagagtcatgggctggtgagggccaggtatagttatccctacattgaaccatttcctttatcttacttagtttggaaaaactttgcagataaggctttgtacagaaaacttcaaaggaaatagtttcctaatctggcctagggcacacaggtaagaaaagaagaaacatcctctaagcagattgagggagagaaaaaagaatgcataagtcttgagggaattgagacaagctgggggcctcatgctattgtgagtctccctgcagcccaagtggaagcttggctcctaacaagcacaagctgccaattgttaccttcttctgagagccttgctaaaaaagtaactctgggaaaactcttataggttcctgaccatgaatccatcttttttattccccccaaaagttattcaactattagatcaatggataataactatgaggttttgggtgactatttagatggaggaaagtgtattaaggttggaaactaaattctatccttaatactactgttttctaatttttgtttttttgcctgatgtaaatgaaaggcatatatgttaaagattggctttaggaaaaaaaaaaaaataccctgtgcaaagtttatttcagcttgacttgacctacagtctacagacctggagtctataattaccagctgtggtgaaatgaatgatagatttctttctacctgcatactcaatgcagttgtgcaaaaaaagccccgcggggttgggataagacgtagaaggctgagagggctcaaaatggatttcactgagagtttggcatgggataaccctatagtcaatgtctgttatggtaccctgtatgctcatggccttcttggagacagggctcagaggtcattccttaaatacagacagaagtcatcttagtgttcagaaccattctgtgatcagtggccttagaacatgttccctctactgttccctacccagaggggatcctgtggcagactggtgatccccactgtttagaaggtggagagggagagtaaatctgggtttctatataagaaaataggttatttcgtggcgtcttaaaattgtatcctgacaaaagctgaattaggaggataccaccctatccccacaatggagatcacaatgggtaatttgttaagttccttaaatttttcactgataaaaatggaagtaaagctaccattctttgtgtacaatgtaaatttaatgtaaaactgcatcagaattaccataccaatgtccagggactagggagtacatagccattcattctcgaatcctgccattcattcagcatatattgtgtgcccgtagtgttaaagcactagtcctggtggagtaagcccatggaagaactaggctgtaaggtgtctagactgtcttcctcactgcttcctggaaggagggcatccaatttatttttaaatgtttttattctaacataaagcaatccattttttgttctgttatttaacagaaactttagtatcaactctatttcatggttgttgcagttgaagtgtttctggtttattttttgctcaatgtgtaaagaaacctgctgtgattattttacagatgagaaacaggcagagaggacaagggatttaaaaagtttcacagttaattagaagtggggctccaacttgacatcaggattcctgacatctcatttctcaaatagttgaaagatcacttttgactttcaagtaactccttatttttacattggttaatactgtttcttagctgtttgtacctgacattttcttaacacatatccaaaaaggtaaaagtttcattaaaggattctaatgatcattttagtatgaataacaaacatt

SEQ ID NO: 70528 - DNA, 535 bp, Homo sapiens
tgccatgttattttaatttattagagtctggttccacagaggagaacttagccttacatgttagaagcctggattgtctatccaggcccttttctggacttagcaaagtttaagaatggatatagtgctgaaaggtcataagtgtagacactacacactacagcaagatgttggctctctaccctataaggtgaatgaccttctgagttagtgatgcctcaccaattcccatgttccctaagtccagagagcctctttcttccaaaggactctttgaaaaagagaaggatgttcatacagaaaagcaaaacatatcagaaattgaataaagattgatggaattattttgtaagtatatggttgctacagcaaccattaagcttaagacctaacctggacaaatcacttgctaaagaataataataattgcttatgtttcttgcttatattaagttttatatgttgttattctaagtgttttgcctacattaattcatttaaccccatgatatagatactattaccctcactttac

SEQ ID NO: 70529 - DNA, 1191 bp, Homo sapiens
attcggcacaggatagcctcttccggcaaccattaaagggcacggttgctagggagacgcggcggtaacctggaccttaaaagtttgttgtcgttagggaataggtgggaatatggttgtgggattaatgaaacacagtaccaaagagattccagaaagagaactggtgtaggaatagggcctgcatgggaggagttcaaagatgcttcttggagggagccgataacccgcgggtggagcctacccgagacagggcatcactgtgttgccaaggctggtcttgaactggctcaagcaatctgcccacctcggtctcccaaagtgctgggattacaggagtgagccactgcgccctgcctggaactctatgaggaaataccattctcattttacagaatttatgatttatgaatatgcctgttaacaaatcacctatgattaatacatgtggaggcatatcttccccttatcatgaagagctctggaaattaaattttcaacatttaagtggagaaaggggtcataaatcaaggccaacattttcaatcacaaaagaattcatcttgagattcaatcaaacacaaaattccaaagagaaggaagaattgttggaactagctagaaaaatcattctcagatgtaagagaaaattgggtctcaaaaccctgggctctggaaggcatgtgcatcttcctgctgcatggactgaagtaatatatctggctcaatgcaaaggggaaatccaagatgaatctttaaatatgctttatgcatctctggaccatgcttcctttgattatgatcatctgcctgccttattttttgttgcggaatcggttttatacagactgtgttgtgatgcatccctcaaaacatatttatattcagttgaaataaagctagcaaagattggctatttggtcttcttacgactttttatatttttcctgcatggtcatctagaaagttttaaacaacatttacttaggcttcaaccatatttatacgcactttctttctctggagcatcatatcacaagtatccaaacatcttttcaaatgtgcaattcatcctgaaagcctcggaaattataggtaaaagagaactccgttctgaatccatttttagacctgtggaagataagaaaagattgagaacaccgatctggaatgggggggattgaaatacac

SEQ ID NO: 70530 - DNA, 1191 bp, Homo sapiens
attcggcacaggatagcctcttccggcaaccattaaagggcacggttgctagggagacgcggcggtaacctggaccttaaaagtttgttgtcgttagggaataggtgggaatatggttgtgggattaatgaaacacagtaccaaagagattccagaaagagaactggtgtaggaatagggcctgcatgggaggagttcaaagatgcttcttggagggagccgataacccgcgggtggagcctacccgagacagggcatcactgtgttgccaaggctggtcttgaactggctcaagcaatctgcccacctcggtctcccaaagtgctgggattacaggagtgagccactgcgccctgcctgaaattgaacacaaatgtggtggagacgggacagggcaggtggaaattcacttataagtcctgattggctaagccctggtcacgagaccgtaaaagagcaacgtctgtctcagagcgactcccacagcgtccttagcaaccagccttggttcccagcggctcagagcgcagcggccaacattttcaatcacaaaagaattcatcttgagattcaatcaaacacaaaattccaaagagaaggaagaattgttggaactagctagaaaaatcattctcagatgtaagagaaaattgggtctcaaaaccctgggctctggaaggcatgtgcatcttcctgctgcatggactgaagtaatatatctggctcaatgcaaaggggaaatccaagatgaatctttaaatatgctttatgcatctctggaccatgcttcctttgattatgatcatctgcctgccttattttttgttgcggaatcggttttatacagactgtgttgtgatgcatccctcaaaacatatttatattcagttgaaataaagctagcaaagattggctatttggtcttcttacgactttttatatttttcctgcatggtcatctagaaagttttaaacaacatttacttaggcttcaaccatatttatacgcactttctttctctggagcatcatatcacaagtatccaaacatcttttcaaatgtgcaattcatcctgaaagcctcggaaattataggtaaaagagaactccgttctgaatccatttttagacctgtggaagataagaaaagattgagaacaccgatctggaatgggggggattgaaatacac

SEQ ID NO: 70531 - DNA, 896 bp, Homo sapiens
attcggcacaggatagcctcttccggcaaccattaaagggcacggttgctagggagacgcggcggtaacctggaccttaaaagtttgttgtcgttagggaataggtgggaatatggttgtgggattaatgaaacacagtaccaaagagattccagaaagagaactggtgtaggaatagggcctgcatgggaggagttcaaagatgcttcttggagggagccgataacccgcgggtggagcctacccgagacagggcatcactgtgttgccaaggctggtcttgaactggctcaagcaatctgcccacctcggtctcccaaagtgctgggattacaggagtgagccactgcgccctgcctgaaattgaacacaaatgtggtggagacgggacagggcaggtggaaattcacttataagtcctgattggctaagccctggtcacgagaccgtaaaagagcaacgtctgtctcagagcgactcccacagcgtccttagcaaccagccttggttcccagcggctcagagcgcagcgaatttatgatttatgaatatgcctgttaacaaatcacctatgattaatacatgtggaggcatatcttccccttatcatgaagagctctggaaattaaattttcaacatttaagtggagaaaggggtcataaatcaagattatttccttgggataaagtttctacaatgagtgcaagagcaattgaaaagaactttcacaaagactttacagtcacaaataatatactttttctagttgttttctgtgctatccttgtcccaataccatagtgatccatattgtaaaaaaaagtagcaggagaagttgttatccacctagaatcctacagagaagaaaataaaattcaaaatatatcattaaaaa

SEQ ID NO: 70532 - DNA, 1328 bp, Homo sapiens
attcggcacaggatagcctcttccggcaaccattaaagggcacggttgctagggagacgcggcggtaacctggaccttaaaagtttgttgtcgttagggaataggtgggaatatggttgtgggattaatgaaacacagtaccaaagagattccagaaagagaactggtgtaggaatagggcctgcatgggaggagttcaaagatgcttcttggagggagccgataacccgcgggtggagcctacccgagacagggcatcactgtgttgccaaggctggtcttgaactggctcaagcaatctgcccacctcggtctcccaaagtgctgggattacaggagtgagccactgcgccctgcctgaaattgaacacaaatgtggtggagacgggacagggcaggtggaaattcacttataagtcctgattggctaagccctggtcacgagaccgtaaaagagcaacgtctgtctcagagcgactcccacagcgtccttagcaaccagccttggttcccagcggctcagagcgcagcgaatttatgatttatgaatatgcctgttaacaaatcacctatgattaatacatgtggaggcatatcttccccttatcatgaagagctctggaaattaaattttcaacatttaagtggagaaaggggtcataaatcaaggccaacattttcaatcacaaaagaattcatcttgagattcaatcaaacacaaaattccaaagagaaggaagaattgttggaactagctagaaaaatcattctcagatgtaagagaaaattgggtctcaaaaccctgggctctggaaggcatgtgcatcttcctgctgcatggactgaagtaatatatctggctcaatgcaaaggggaaatccaagatgaatctttaaatatgctttatgcatctctggaccatgcttcctttgattatgatcatctgcctgccttattttttgttgcggaatcggttttatacagactgtgttgtgatgcatccctcaaaacatatttatattcagttgaaataaagctagcaaagattggctatttggtcttcttacgactttttatatttttcctgcatggtcatctagaaagttttaaacaacatttacttaggcttcaaccatatttatacgcactttctttctctggagcatcatatcacaagtatccaaacatcttttcaaatgtgcaattcatcctgaaagcctcggaaattataggtaaaagagaactccgttctgaatccatttttagacctgtggaagataagaaaagattgagaacaccgatctggaatgggggggattgaaatacac

SEQ ID NO: 70533 - DNA, 1679 bp, Homo sapiens
attcggcacaggatagcctcttccggcaaccattaaagggcacggttgctagggagacgcggcggtaacctggaccttaaaagtttgttgtcgttagggaataggtgggaatatggttgtgggattaatgaaacacagtaccaaagagattccagaaagagaactggtgtaggaatagggcctgcatgggaggagttcaaagatgcttcttggagggagccgataacccgcgggtggagcctacccgagacagggcatcactgtgttgccaaggctggtcttgaactggctcaagcaatctgcccacctcggtctcccaaagtgctgggattacaggagtgagccactgcgccctgcctgaaattgaacacaaatgtggtggagacgggacagggcaggtggaaattcacttataagtcctgattggctaagccctggtcacgagaccgtaaaagagcaacgtctgtctcagagcgactcccacagcgtccttagcaaccagccttggttcccagcggctcagagcgcagcgaactcatctgaaagacttttataaatgacagtgcatcaacagttgagcatgtgttaacgtggagtggtatattaatagaaagaagcataatatagcacaaagcactcagtcaagcttctagtccagaaagcgtatgattttatctgaagtaatttggaataaatttacttgaaggcaaggtattctatatgagaagttaggccaaatgttgatttggacaaaagtgaatgtagtaaaatgggaaaaaaatcctgaaggctggcatcaaaataactcttaaacaatgaactattacagagatttccacttgagtcatgacttatgccatcttcccctcaagtgcaacataagaatttatgatttatgaatatgcctgttaacaaatcacctatgattaatacatgtggaggcatatcttccccttatcatgaagagctctggaaattaaattttcaacatttaagtggagaaaggggtcataaatcaaggccaacattttcaatcacaaaagaattcatcttgagattcaatcaaacacaaaattccaaagagaaggaagaattgttggaactagctagaaaaatcattctcagatgtaagagaaaattgggtctcaaaaccctgggctctggaaggcatgtgcatcttcctgctgcatggactgaagtaatatatctggctcaatgcaaaggggaaatccaagatgaatctttaaatatgctttatgcatctctggaccatgcttcctttgattatgatcatctgcctgccttattttttgttgcggaatcggttttatacagactgtgttgtgatgcatccctcaaaacatatttatattcagttgaaataaagctagcaaagattggctatttggtcttcttacgactttttatatttttcctgcatggtcatctagaaagttttaaacaacatttacttaggcttcaaccatatttatacgcactttctttctctggagcatcatatcacaagtatccaaacatcttttcaaatgtgcaattcatcctgaaagcctcggaaattataggtaaaagagaactccgttctgaatccatttttagacctgtggaagataagaaaagattgagaacaccgatctggaatgggggggattgaaatacac

SEQ ID NO: 70534 - DNA, 249 bp, Homo sapiens
ctgtcaccagagattgagaagcaatgctttactttctctgaaaaaaacccaaattcttcaaattataaaaaagtggatttttttattagaaacagtgaatgtaaaaaggaagttgatttcagtatgtatcatcctgatgatgaagctgatgaaatgaagtctttattgggaatatttgatggtattttctaaaacaaacaaatactttttatattgataagagaaagaataaagacacctaatcacaaa

SEQ ID NO: 70535 - DNA, 329 bp, Homo sapiens
ggttcgaatggcagcgggagtgttcttctgatattaattttgatttacattttagattacggtctccattataggaggcaatttgatcctcctctaccactgctccattatctgccttgctacttaatttcctactattctactatcttaaagggaacgtgctaggataacatgggtttatattttgaggctgttttactgtagactttctgaaagtcggaagcagagcagaccatactattcgaacaagagaatgtaaatggtagtagcgatgtaaatgactatgcaaactatattttaccttggttaaactgcaaagcagtggtatg

SEQ ID NO: 70536 - DNA, 569 bp, Homo sapiens
tcagccggacaccagaagacaagcagagagactcctccagacccactcagaccacgtgcacgccctccaagatggtatcccgtaaggctgtggctgctctgctggtggtgcatgtagctgccatgctggcctcccagacggaagccttcgtccccatcttcacctatggcgaactccagaggatgcaggaaaaggaacggaataaagggcaaaagaaatccctgagtgtatggcagaggtctggggaggaaggtcctgtagaccctgcggagcccatcagggaagaagaaaacgaaatgatcaagctgactgctcctctggaaattggaatgaggatgaactccagacagctggaaaagtacccggccaccctggaagggctgctgagtgagatgcttccccagcatgccaagtgatggccacgctggggagaaggtggacagatttgggaggcccctcctgcccaagtgaggccctgggaatttacagagcctgccagctgggcttggaaggaaaacaccctttccaaagcaaattcccctccagcaaataaagcatgaaatatacag

SEQ ID NO: 70537 - DNA, 525 bp, Homo sapiens
cacaaaaaaatttaataatgccaaattttggcaagggtggagggaaatatatattatcatgtaaatataaattattatgactttctggaagggaatatgataatagtaaaaactttagaaatgtgcgtaccctttgattctgcaattccacgtctaggaaaacatttatggatatacactaagaatgatgtacaagaacatttctcacattatacatgggagcaggcaccataccaagtgtccacagaggcagctaacatgtgccaggcatggtgccaagggcttttgcacttattcttatctaattatcacaacagttctatgaggtataggtaaaccattttcaatgtccaacagattgtgaaactaagactgagagaggttaagtcacttgtccagagtcacacagcaaagaagtggcagacctaactagcattgtctaacctgggcagtttcttaaataatctgtgatacatccatagaaggaaataactatgtggtccataaaagtcctcttagaagcat

SEQ ID NO: 70538 - DNA, 313 bp, Homo sapiens
atgaagtaatctttctccctctcttgtctcccttagatcccaagcagctgcagttttgggttatagtttgtcctgctacttaaccacctgccttttcagaggtccatgacaattcaattcagttctttcaggcatttatcaggctgcttctctaggttagaacctatgggggatgctgaaaattcatcttagtcaaagtcatgaccactgctttcaagttgttcactgtctagcagcagagctaggtaattaaacattcagttcaatataaacaatgctgtgatagagatacacatcgtgtggtgggttcaca

SEQ ID NO: 70539 - DNA, 494 bp, Homo sapiens
aattgttctctgccattgggttgtccgtgaagaatttcaacctatgaacatttctaaacattcagagaagttgaaataattgtacagcgaacacctgtacaccaaccatcctcccaattctacaatttatatgttactattcttgtttcattctgcctctatccttctatccctccatgttctttttttgatgcatttcaaagttgcccacatcaatccaattccccttaccccaacacttcatcttacactcattaaccagagttctcaaagggtttttaataacatgaaatgcttttttgaaaaaagtaagatgtaaaattaaacatactgcatggccttagccattcaaaaatatatcaaaaaggccaggcacggtggcttatgcttgtaatcccagcacattggttggccaaggcgaaaggattgcttaaacccaggagttggagagcctgggcaacatagtgggactctgtctctataaaaaattaaaa

SEQ ID NO: 70540 - DNA, 387 bp, Homo sapiens
gtgttaagtagattacattttttattctttctggccacttattctcttttgtaggaatctatcaacatgatgaggtaatttaagacatttttgtgacggtgaaatgaaccatcgcaaatgtccaacaaaaaagggaggcataagtaaaagatgacacatcttaggaatatactttcaaaaactatgttttcaaaagcattcctattcataataaaatgtgaacttcaaagtaatgttatgcaatcatatacatacagtttctaatatgaaattaattttctctaatagccacagtcacatacctgtgcatatgatagaatttatgttccagaatttttaaagtattacctctgcatagtggggcttgttggtaattattttgattat

SEQ ID NO: 70541 - DNA, 565 bp, Homo sapiens
cacaattcccaaatccttgcactaggtggggccagcctcctgttgtgtagactcatcaactataccagtcctctgttcctggtctctggagcttcaatttgggaaagtgacccattagcttctgaggaccagggtgagagagggcaaacttgaatgcccttcacaatggagagatgtgtgcagaccggacagacatcagttcctttatcagtgcacaggtagctgcaatgcctgcatgtggagagataaaacccagacaaagaggcagacatgagcagatgagctcccccgaacaggagacaagtgggctgagaggtgaaggaagaggatgagggcagccacgaacgctcaatgagacatgacaagtcaagtgtggagcccaggcccttcacccagaggagctcaaaaaatattagcagccgttaccattggagcctctgcctcctaaacctgcctcaatatctatggagggtgggagcagagtcacttttcctcactggacctcagtttactcctcagaaagacagcagtgatgatgccctctcaagatatcctctaactccag

SEQ ID NO: 70542 - DNA, 476 bp, Homo sapiens
atgatgatagcaggttccttccaaacaggaaaagaagtcgtaactgaaaaccctcacttcttccatccctgcagaaagccaagcctcttcaccacaggagactgttttgtttccttcttgagacagcaggaagtgggagacttggaaaatctattgtcaactgatatacgatgcacgcggacatgcagaagatgggagtgaagttgctgcttcagatcagtcacagtacttgcgtctcagtcacagaaattccatgagggtgggctgctatattcccactatttatgtggcgttaccagaggcaacttccaaaatccacgaggaagcaaaactgtgggatggctcattctcagaaacatagatggactttggagaacttgtctatgcattttttttgtttgtttgagaagacccattatggctttcttgtttatatcaatataggaaggaagctgtcaaaagtacacatgaatcac

SEQ ID NO: 70543 - DNA, 220 bp, Homo sapiens
cgataacagtataaattctgtagagttgtataaaagttaaatgaatgaatagatgacaacagcttagaacatggctttagcagattgtaaatactatgtaaatattggatattttattttcagtatatgtatatattctttctacagagcaagctctttatgcattaatagtaatcttgctaaaaatccaaatctattcagaatgagtactacagaattt

SEQ ID NO: 70544 - DNA, 692 bp, Homo sapiens
gattttgagtacaactgatataatattgcaagtatttttctattgtgcattttgtttacttgtattattaattgatattattccattattccttagaaaatattttaaatttgccctcagtgagacatttgcttaagtcagtaataggtctgcaatttagtgtcaggcttgaaatgtgacctagtgcggctcaggagacggggtattagggttggtagattgcccgtgaaagtctttgcaaagccaaaaattcatggatgaagccaaattcaggagctttgtcataattagacagtagagttcagagtgtggtttcttgatacattctttgtggtgctttccttttgcccttgattgcttgttttcccgcagtaatggttactctctctcaggttatttgaggagtaagtaaccgtattctaaatgtggttggtgaaacagcagcatcagcatcacctgagagctaggtggaaatgcagaatatcagacctactgaatcagtatcttctttttaacaagatcatcaggtggtgcacataaaatttaagaagtactgcaccaacagattgggaagaatagagagagagatctcactgagaacaggaaataatatcaagtgaaaaagacagtgggcaggctgaacaccaacttcaaaaacaaatccccaaacagaaacaaagccttttaaagaa

SEQ ID NO: 70545 - DNA, 531 bp, Homo sapiens
gcaacaagaggaatgaatattcctgaaggaggcagattattagacccagagtatactttctgaggtaccctacgcgaaggaaggatcattgcaccattacggagacgaggatacaaactgtcaggcctctgagcccaagctaagccatcacatctcctgtgacctgcacatatacatccagatgacctgaagcaaatgaagaaccacaaaaaataacattccaccattgtgatctgttcctacccaccctaactgatcaattgaccttatgacaataccccctccccgcccttgcaataatatactttgtcatactcccccgcccttaagaaggtactttgtaatattctccccgcccttgagaatgtactttgtgagatccaccccctgcctataaaaaattgctcctaactccaccgcctatcccaaacctataagaactaatgataatcccagcaccctttgctgactcctttcttggacacagcctgcttgcacccaggtgaaataaacagccttgttgctcacaca

SEQ ID NO: 70546 - DNA, 701 bp, Homo sapiens
gaagtgggaggggaaggagaaaagaaaagaaaaaattacagttatcacccattcttggcttccaaattaaatttaagacacattatcatttcaaatccacctgaaaaaagtaacccccaaatgtacttttgcctcctactgacggtggaacttgggcaagattcctaagtcttctgtgcctcagcttcctcgtttataagatggaattaaccagttgtacttgcctcataggtttgtggcagaattgaaataagacatgtagagtaagaatgaactacttttagtaatattttttgtcaacaccaacgtgaggaacgtggtggttaaaaaagcacagactcaacgggctgggttcaaaccctggctcttccatcaacaactgtgaccttgggaaagtttaggaacctccctgagcttctgttttctcatctgtggaattaagataaaaataatatttacctccgagggaggctgtaaggaggctctgacatgcataagcagtgtattaggtttacagctattttggtgatgatgaaaccaaggctaatgggaggtggcacccagccctagagcagctggctatatcatacgttcacagatatgcccaggacaatcacttgaacccaggaggcagaggttgcagtgagccgaggatctgccactgcactccagcctgggtgacagagcaagactctgtctca

SEQ ID NO: 70547 - DNA, 798 bp, Homo sapiens
catttattagctatatggctttgggtaaatttttaaaaatctatctgtatctcatttccttatctgcaaaattgaaaaattatacattaaatgctgattgaatgagaattaaatgagctagttcatcaaagtgctttgcacagtgcctggcatgtagtatcatttcatactggctgctgttatcatcatcatcatcatcatcatcatcatcatcatgtgggactgagacctgaaagaagccagtgtgcatcacagagatgagaaggggagaggaaggattcactgagcctctctagggctccaggcccagttcctttctgtttctgagtccagctgcatctctgcctcaggagtccatggctgaggctactcactatccttacagagccagctgcatctccttaattaagctcattctgctttattcctgttattatacaaacacaacattaatgtttgttaaaaaattgtttccctgagaggaaatgtgaacatctaaggtcttcccaagtatttcatttttaaccaataaggtgattggataaaccatttttgatagttcggtcacctttgaatattcctgcccttttatgtggtatataattcttagagaatagagattatatattgggtatggaggtcggggaagacataaccactaaatagagaggtggtgccctaatatgaatcctcagaccagggttgtttaatagaaatataatgcaagtcacatatttactttaaattttcaagttaccactttaagaaaaatctcgtgaaggccaggcacggtggctc

SEQ ID NO: 70548 - DNA, 744 bp, Homo sapiens
catttattagctatatggctttgggtaaatttttaaaaatctatctgtatctcatttccttatctgcaaaattgaaaaattatacattaaatgctgattgaatgagaattaaatgagctagttcatcaaagtgctttgcacagtgcctggcatgtagtatcatttcatactggctgctgttatcatcatcatcatcatcatcatcatcatcatcatgtgggactgagacctgaaagaagccagtgtgcatcacagagatgagaaggggagaggaaggattcactgagcctctctagggctccaggcccagttcctttctgtttctgagtccagctgcatctctgcctcaggagtccatggctgaggctactcactatccttacagagccagctgcatctccttaattaagctcattctgctttattcctgttattatacaaacacaacattaatgtttgttaaaaaattaaccaataaggtgattggataaaccatttttgatagttcggtcacctttgaatattcctgcccttttatgtggtatataattcttagagaatagagattatatattgggtatggaggtcggggaagacataaccactaaatagagaggtggtgccctaatatgaatcctcagaccagggttgtttaatagaaatataatgcaagtcacatatttactttaaattttcaagttaccactttaagaaaaatctcgtgaaggccaggcacggtggctc

SEQ ID NO: 70549 - DNA, 153 bp, Homo sapiens
gaagcctaatgatttgaattccagtgggtaaggaaggaagcaatgtttttatgtcctctccaccttggaacagggtgggctatttctccatttatgtgggctggcagcagatggggaggtaagggcttctcatgatccacagcaccacagtgc

SEQ ID NO: 70550 - DNA, 4664 bp, Homo sapiens
  misc_feature (33)..(33): n is a, c, g, or t
  misc_feature (47)..(47): n is a, c, g, or t
  misc_feature (2301)..(2301): n is a, c, g, or t
  misc_feature (2326)..(2326): n is a, c, g, or t
  misc_feature (2704)..(2704): n is a, c, g, or t
  misc_feature (2717)..(2717): n is a, c, g, or t
  misc_feature (2719)..(2719): n is a, c, g, or t
  misc_feature (3369)..(3369): n is a, c, g, or t
  misc_feature (3558)..(3558): n is a, c, g, or t
  misc_feature (3579)..(3579): n is a, c, g, or t
  misc_feature (3589)..(3589): n is a, c, g, or t
  misc_feature (3609)..(3609): n is a, c, g, or t
gagacacaattttactcttgttgcccaggttgnagtgcaatggtgcnattatcggctcactccaacttccacttcccaggttccagcgattgtcctgcctcagcctcccgagtagctgggattacaggtgcctgccaccacgctcggctaatttttgtatttttggtagagacggggtttcaccacgttgaccaggcttatctcaaactcctgacctcaagtgatccgcctgtctcggcctcccaaagtgctgggattacaggtgtgagcctctgcacctgaccctccttcctctttactaacagagattagcaaggaaggcaaaggtataaagaccagcatgaaatggaggcattcttctggatataagcttagatataccagtcaactgaaaaggaaacaaccttctcattctcagacgtaggatctgatggttttgctgtgtaatcttcccaggcctcctctccgctactttaggaaatgatgttgctttagagtcacactgctggctttgaagctgagaagggccacgagcctcgtaatccaggtggcctctagaaactgacaaagatgggaaactgccttctcccataaaacctccggaagaaatgcagccctgctgaggctttgattttaccccaataggggccgttttggacttctgacctccagaactacaaggaaaagcatgtaggttgtttgagtgattaacacaagtggggaatcacccactcaggcacagagccaagtccttgattttactccagcattgaacctggggacagaattcctgagataaagttaaagctctcctctttgtgtgtgtggaagggaaataggaagatgggtgtggagacggggagtggaaaagacactcactttctttgcccctaaaaagattctctgtgcccaactccctacacgattctggaagtatggagaaaatgcctgaactgcaaatgtgaagtaatcatctcatgagactcctcttaggatttctcttttcccattttctgcttgagtctgctttttctacttcctagagttccatcaaagccccgctagaatgcccaatctctttgcacgctaccaaggttttccgtggtccagggtgggacgtacaggcacaatatcccttcctaggagacttgtagcctgtagaggtaagagtaatgaacaagaggtaaacaaaccaaacaaacaacacctttcaagagagatctgcctgaggagcaatattggaaatcagaaatggctcatgaagtttgctaagcaaaaaaaagcaaatcctgcccgaacagaattagcaaaggaaccgatatgcaggcaaattcagtcacacgagggtggtccgagcagacacccccaactgcacaccttgctttagatcaacagaagaccgatggctgcaggtaataagggaagaaccacactcgggagaaaataacaccaaaaaaagtgaaaccaacaacagtcattgtgactgccacgacttagcatgcatgtaccacgtgttaggcacataggattccgacttctctatcctcacttgataatttctttgtctgattttgtaaaagagagaacaggcttggggagattacatgtccctcgcttctaggtagctgagcctgaatatgaatgcatgtttgctggagataaagccatcacacaggtggaacgcctttagagagtgtgatagacagaatcttgtctcatgccaaagatgcctgcatcgtaatctctgaaaggtgtgaatacgtcaccttgcctggcaaaagaaccttggcagatgtaataaaggatcttgaaatggaagagttgccaggattatccaggtggacccaaagtaatcacaaagttccttacaagaggaagaccagagaaggaggtatgtgatgctggaagccagggctggagtctgaaggccacaatgctggctttgaagatgaaaagggccatgagccatgtaatctgggtggcctctagaaaccggcaaagggaggaaactacattctcccaaagaacctccagaagaaatgcaacactgttgacgtttgattttactccagcaagacccattttggacttctgacctccagaactgcaagaaaatacatttgtgttgttttaaattacacctaaattggtgatcatttagttatagcaacaataagaacctcctacagaaatggaagtctaagcatgttcagaagcagaagaacggagcccccagagagagcgtgttggggggaagcacagattatgccaaattatcctagcagctgcagtcatgaatgnttaggatgtgcctagcattgttcanaattattatataaactaatttagtccccacaatagccttgtgaggctggcacaacctcacctccatttatcaatgaggtaactgggcagagagacagtaagcacttggtcccagattgcacagtgagtcaatgaggtgaacaaggattgaggacaaggcattctgaccctggagcctgccctcgtcatcccaactggaccctgcatggataattagagggccatattctggaagaaataggataggattcattaaccatttccacctaaatcacgggggttcagcactgtgccaggcacatggataagacatgcttggcactctgaaaagtagtttgggaggtgaacctgataagtgagttgtcagctataacccggnaataccttcctanangattgggcatgctggggagaaagtctagaagaggtcacaccagaggccagaggtatcagtggaaaagtcaaaggttcctgggaggaaagagaaggcaggcagacagacacacatcggggttagaagggtgcaaaggcagagtaacttggatgaacaagacaggcccaagccatggtcagaggctgggggtgcaggcctgcccagagccgcaggagaggacacccgaaaggctggaggagagaagatgaaatgccagatctcaggcaacacaatgctgagcagaggtaataatctgaactgcacggatgtagggatgcagagaagtagattgttaggagctgaattgtttccctccaaaacatgtggatgtcctaacccccagtagctgtgaatgtgaccttattggaaatggggtctctgcagaagatcaagtaaagatgatttggataggccctaatccaatatgaccatgtcctcactaaaagggaaaatagagacacagagacatccatgctcacggggagaactctatgtaaacatgcaggtggagattcaggtgacatatctacaagcaaggagcacccatgactgccagccaaccacagaagctggccgggcatgggggctcatgcctgtaatcccagcacttngggaggccgaggcgggtggttcacctgaggtcaggagtttgagaccagcctggccaaaatggtgaaaccctatctctactaaaaaatgcaaaaaaataagccaagcatggtggtgcatgcctgtaatcccagctactcaggaggctgagccaggagaattgcttgaacccaggaggcagaggttgcagngagctgaaatttcaccactgnactccagccncagcaacagagcaagactcngtctcaaaaaaaaaaaaaaatagttctgcaaatatttatggagcacccagtctgctctgaactaggctctttttaagtcccaagagttcagagatgaagaaaacgctgttcctgtcctcaaggaaatccaaacctatcaggatttactggaaacactactgatgtaccccttgtttttaacttgacaaagaacaaaaccataaagaaaagtttctagagattagattgcggttatataaactcacttttttttaatgcatacactcttatttcaaattatttcaaaataaagtcgcatttccacaggccagaggctattttcccataattttcttccagcattgtttatcctgtattttttatgagtttcggtgttattaccgagttttcaacaatcattaggtagtgcctgagacacaattgaatacaattttattaccccagccaacagacataaatatttaatccttccgctccacatgacaatgtatattttgggggggggtaataaattgctttttggggttgcccataggatgggcaccttctacaaatctgcttcgacgttttctctaatgcgctattgaatacatcaacactgtttgcagccctaagtgaggcattataatttttttttaatgataaagcaaagcgttccatcgaagacaaagtatcaggtggagatgagctcactgttcctgattctactgggcattctgcccaaccagaggaaggcagaggatttcttcagaatgctgcagaaggaccctgcagcctggcacctaacaaagctcaccttggaaacacaagggcagaaggaagtcaatgtcactacagagaaagcctgtggacactcactttgcttccagggatcagcagagggccagggaataaacatacagccctcagccactaataccaccgtgccaaggcagcaggtttcctaggcaggaccggctcagtctgtctcttgaaaataccatttccatccatggcatgcaaacttgcctcaggcattggagagaaattctttctaacagggatgattaacccac

SEQ ID NO: 70551 - DNA, 1041 bp, Homo sapiens
gatgtctttaagctgcagcagctattgttagttgtttaagacactccatcactgcctttgatcggaaactttctcatcaccattatgtgcatcggtgcaggcaccttaaatttcactgggtcttgggattagtcatattatagagagacacagagatgtgagaaataaattgaaaaaaggtctgtagcaacagattttacaccataaaagagtaaattattaggtgttaggaaaaatataaatgttgcaaacggtgtgttttatatactgttgccaagaataaaaatatgccaaatatgggggaaaaaggtgttggttaatctgacttctggctggcccccaccctgcagctcttagcactgctgggctgttttatagggcagtaacccagtcaccaaagcaaagagaattcgaataagggacttggaagatatgccaacttggggactaattattgccttgttaaacagtgagatggggttattgtacatttttgtgtatggtagttaaaatgtattttaaaaaagaagtttttagaaaccaagaattccccaaattcaagaagtaactgataaagtagtttatggaaatgtaatctccccatagaaccagattgtgcaacaaaaaaggagaaggaacgatgttaaatgggaaacagaatgggggtgacccttccagatggctttctggaaactcctttcaagccagccacccaccagacgatgctaccaaatggcccctgtattcgttttttagggctgccataacaaagtgtcacaagctgggtggcttacaacaataaaaatctaccattttacagttctggaggccacaagtgtgaaatcaagatgtcagcagtgccatactctctctgaagtctgttggagagaactcttctttgtctctcccagtttctggtggtttccagcaatccgtggcttccttggcttgtcgtcgcatcattccagtctcagtcatcatgcggcctcctcactatgtgtctgtctgtgtttacattttcctcttctcataagggcagca

SEQ ID NO: 70552 - DNA, 2936 bp, Homo sapiens
ggaatggcactcagggcaaaggcagaggtgtgcgtggcagcgccctggctgtccctgcaaagggcacgggcactgggcactagagccgctcgggcccctaggacggtgctgccgtttgaagccatgccccagcatccaggcaacaggtggctgaggctgctgcagatctggagggagcagggttatgagcacctgcacctggagatgcaccagaccttccaggagctggggcccattttcaggtacaacttgggaggaccacgcatggtgtgtgtgatgctgccggaggatgtggagaagctgcaacaggtggacagcctgcatccctgcaggatgatcctggagccctgggtggcctacagacaacatcgtgggcacaaatgtggcgtgttcttgttgaatgggcctgaatggcgcttcaaccgattgcggctgaacccagatgtgctgtcgcccaaggccgtgcagaggttcctcccgatggtggatgcagtggccagggacttctcccaggccctgaagaagaaggtgctgcagaacgcccgggggagcctgaccctggacgtccagcccagcatcttccactacaccatagaagccagcaacttagctctttttggagagcggctgggcctggttggccacagccccagttctgccagcctgaacttcctccatgccctggaggtcatgttcaaatccaccgtccagctcatgttcatgcccaggagcctgtctcgctggatcagacccaaggtgtggaaggagcactttgaggcctgggactgcatcttccagtacggtgacaactgtatccagaaaatctaccaggaactggccttcaaccgccctcaacactacacaggcatcgtggcagagctcctgttgaaggcggaactgtcactagaagccatcaaggccaactctatggaactcactgcagggagcgtggacacgacagcgtttcccttgctgatgacgctctttgagctggctcggaaccccgacgtgcagcagatcctgcgccaggagagcctggccgccgcagccagcatcagtgaacatccccagaaggcaaccaccgagctgcccttgctgcgggcggccctcaaggagaccttgcggctctaccctgtgggtctgtttttggagcgagtggtgagctcagacttggtgcttcagaactaccacatcccagctgggacattggtacaggttttcctctactcgctgggtcgcaatgccgccttgttcccgaggcctgagcggtataatccccagcgctggctagacatcaggggctccggcaggaacttccaccacgtgccctttggctttggcatgcgccagtgcctcgggcggcgcctggcagaggcagagatgctgctgctgctgcaccacgtgctgaagcacttcctggtggagacactaactcaagaggacataaagatggtctacagcttcatattgaggcctggcacgtcccccctcctcactttcagagcgattaactagtcttgcatctgcacccagggtcccagcctggccaccagcttccctctgcctgaccccaggccacctgtcttctctcccacatgcacagcttcctgagtcacccctctgtccagccagctcctgcacaaatggaactccccagggcctccaggactggggcttgccaggcttgtcaaatagcaaggccagggcacagctggagacgatcttgctggcagggcctggccttgtccccagccccacctggccccttctccagcaagcagtgccctctggacagcttgactctactcccagcgctggctccaggctcctcatgaggccatgcaagggtgctgtgattttgtcccttgccttcctgcctagtctcacatgtccctgtccctctcgccctggccagggcctctgtgcagacagtgtcagagtcattaagcgggatcccagcatctcagagtccagtcaagttccctcctgcagcctgaccccaggcagctcgagcatgccctgagctctctgaaagttgtcaccctggaatacgatcctgcagggtagactaaaaaggcccctgtggtcacttatcctgacacattttcaagtgatacaactgagtctcgaggggcgtgtgttccccagctgatcatgtcagcctcatgccccaggcctcgtctttcatggaccaggtcttgttcaagcagcgagtgttgggtcctctgcttcctgagctgtcccctggagaaggtcccgaggatgctgtcaggagatggaagagtcatgtggggtgggaacctggggtgtggttccagaaatgtttttggcaacaggagagacaggattgggccaacaaggactcagatgagttttattgactcattcctctggttgatacggagccatgtcatgtgccacgacctggggtgggcacagggaggctgcagttccctacgtgaacctgccttgggcctcatctgctcctagcccagcagagagagttgacccctcctgaactggccactccccagtgctcctgtgcagggataggaagtgccccagggtgagaacgtgcccagccacatcatctttatctcctgggattttcattagggcaaagatctcagcagccagctcctggtagctgatgaggatcagagcgtttgttcccccatgaaaggggaaatacttaggtaatcattccaggtgtgttcagtagttccaggactcagggactcaggccagtcaccctgtgaccgcaggttgctttcccaccctgggcaatgcagtgcagcatgggaaaggaataagggggcaacaaggtgcacagacctcagagatggcttccttgtttatggggctctcacagatacccatccaactcctctagtcagcactagatcatgggatcctaaaataaaccttggaaaaat

SEQ ID NO: 70553 - DNA, 120 bp, Homo sapiens
agccttagtaatggcaatgaagtgcggggatagaatgttcactatttttttatgtgctgttaaaatttcatacctcctgttctatcttgaagtcttacagttttggaatggtgagtgggg

SEQ ID NO: 70554 - DNA, 194 bp, Homo sapiens
ctttttcacctatgaaagacaagaagaggccttctcacattcattacattcatagggtttctcaccagtaggaattctttgatgttgagtaagatgcgccctctgcctaaaggccttcctacattcctgacattcaaagggtttctcaccagtgtgaattctctggtgttaagagttgaacaatcaataaagga

SEQ ID NO: 70555 - DNA, 440 bp, Homo sapiens
cgatttgctgctgtgggtcatgggccagtgccaagaagcccaggcacgccaagcacagtgttttaggaaaaccgcggctttcagagagcagcttcaggataattgttcaattccattagggattctggctccgaatgcacctcggaacctggccccagtgtctcctccaggggaacttagaggtcccccactccataccttggctggctttctttttgatttgtttaattttcaagaaccatcattactggaatctcgtatctgattgcggtgttcatggaaagaaaaatgggaacaagggctgagagacagtgaggcttccagggtgatcaggttgactcgcagagggagaaataacagattcccaaatgcggattctggcacttacacgtttctgagtttccgatctggagatcggagaggtcaccgtcctagggctt

SEQ ID NO: 70556 - DNA, 1011 bp, Homo sapiens
gcagttccaccagctgaggccaggcagcagaggccagtttgtctttgctggccagaagatggtgctcatggccatactctggccttgcagatgtcactagtgttacttctagtgactccagattacagactggccccccaatctcaccccagcccaccagagaagggggctcaggacaccctggaccccaagtcctcagcatccagggatttccaaactggcgctcaccccctgactccaccaggatggcaacttcaattatcactctcagcctggaaggggactctgtgggacacagagggaacacgatttctcaggctgtcccttcaatcattgcccttctccgaagatcgctcctgctggagtcggacatcttcatcttctacctggctcaagctgggccagagtgtgtggttctcccaggggtggttggaccccaggactgaggaccagagtccactcatagcctggccctggagatgacaagggccacccaggccaagtgccccagggcagggtgccagcccctggcctggtgctggagtggggaagacacactcacccacggtgctgtaagggcctgagctgtgctcagctgccggccatgctacctccaagggacaggtaacagtcttagatcctctggctctcaggaagtggcagggggtcccaggacacctccggggtcttggaggatgtctcctaaactcctgccaggtgatagaggtgcttctcacttcttccttccccaaggcaaaggggctgttctgagccagcctggaggaacatgagtagtgggcccctggcctgcaacccctttggagagtggaggtcctggggggctccccgccctccccctgttgccctcccctccctgggatgctggggcacacgtggagtcattcctgtgagaaccagcctggcctgtgttaaactcttgtgccttggaaatccagatctttaaaattttatgtatttattaacatcgccattgggccccaaaaaaatgtg

SEQ ID NO: 70557 - DNA, 321 bp, Homo sapiens
tattcaattgcctactcagcttctctactcggatgtctaatggacaaaattaacatgtccccaaatggactctgaagctcctcctctcaaacttgtcccactcttaggattccccatcttgctcatgccagaaccattcttccacttgctcagatccaaaaccttggaatcaaaacccacatgtggttcatggaaaatcccattgactctatcttcaagatatatccaaagtctcatccctttcatcaccttcatacacaagctacagacataactcctgggttgttaccacagcctcctaactggcctcttcccatccat

SEQ ID NO: 70558 - DNA, 2999 bp, Homo sapiens
  misc_feature (538)..(538): n is a, c, g, or t
  misc_feature (555)..(555): n is a, c, g, or t
  misc_feature (2589)..(2589): n is a, c, g, or t
  misc_feature (2657)..(2657): n is a, c, g, or t
  misc_feature (2741)..(2741): n is a, c, g, or t
  misc_feature (2778)..(2778): n is a, c, g, or t
  misc_feature (2840)..(2840): n is a, c, g, or t
gatcacatggacacaggaaggggaatatcacactctggggactgtggtggggtcgggggatgggggagggatagcattgggagatatacctaatgctagatgacgagttagtgggtgcagcgcaccagcatggcacatgtatacatatgtaactaacctgcacaatgtgcacatgtaccctaaaacttaaagtataataataaaaaaaaaaaattaatctgtgtaatccaccatgctaaatgtatgaagaggaaaaatctctttagctttgactgatgcagatatcaatgcagaaaacacatttgacagaatccaattattgggtataatctttttaaatgctcaataaactacaaatagaagggaactcttcaacctgatcaaagataagatttacaccattataaaagagcaagtttgggctccttttgcctctttgcccttccaccttctgtgacatgatgatgtagcaggtgccttactggcaccttgatcttggacttcccagcctccagaactatgggaaaataaatttccnttcactataaattaccnagtctcaggtatgctgttatagcagcacaaaacagactaagatatattccttattgaacagaaatgcaaaatcctcaataagacattagtaaattaaatccaggaacatatataaaggagcatacaccatgaccaaatgggattatcccaggaatttaaagaaatttaataccccatgctaatagaacagaataaaggacaaaaaccatatgattgggctgggcatagtggttcaagcttgtaaactcagcattttgggaggttgaagtgggtggatcacctgaggtcaggagttcaagaccagcctgaccaacatggtgaaaccccatttctactaaaaatacaaaattagctgggcatggtggcacatgcctgtaatcccagctactcgggaggctgagggaggagaatctcttgaagccaggaggcagaggttgcagttagcccagatcacaccattgcactccagcctaggcaacaagagtgaaactccgtcttaaaaaaaaaaaaaatcatcttactaggtacagaaaaagcatctgaccaaatctaatacccattcatgatttagcaaaaacaaaaatgaaacaaaaaaattctttcaacaggccagaaatagaagggaatttcctcaacctgataaaaggcatttatgaaaagcctatagttaacaccatatttgccggatgtttcagaacaatgcaaggaagtcatgtctcactacttttattcagcattatacagggggttctagccagtgcatgaagacaagaaaaagaaataaaagcctcatagattggaaaggaagatgtaaaactgttgcagacaacaggatcctgtatatagaaaatcctaaggcactcacacacgagaaaaaatttactacaaccataaacaagttcatcaagttttcagaatagtaaatcaatatataaaatcaattatatttttatatatgctagcaaatcaaaaatgaaattaagacagtgattccattcgtaatagtatcgaggagactacttaggaataatacaacaaaaagataccagatttatacactcaactacaaaatgttgatgagagaaattaaagaagacataaataagtggagagacatttcatgtttaaaaattgaaagtctcaatattattaagttggcaattcttcctaaattaacacaatccctgtgaaaatcccagtaggctttttatggaaatcaacaagctgatcacaaaattcctgtgaaagagatccaaaatagcgaaaacaatatttaaaaagaacgaagctggaggactcacactcatctatttaaaagcctactataaagctataataatcaaaacagtgtggcagtaacataaagatatatttatatggaacagaactgacagtaccaaaataaaccttcacatttatagtcagttcattttcaataaagatgctgaggcaattcaattgtattttcaacaaattgtgctgggacaattgaatatctacatataaaaagaatttatacacttacctcacatcatacacaaaaattaattccaaatgaataaaaaatgcaagagcaaatgctataagattataagatatttagaagaaaacatagaagaatatttttgtgaccttgggttaagcacagattttttagctgcagcaccaaaatcataattcatatgtgaacaattaacaaattggatttcaagatttaaaatgttttcttatcaaaacacaacatcaagaaaatgagaagtcaagccacagattgggagaaaatatttgcaaatcctataatggataaaggactcatataaaaaatgcctttctttctttctttctttctttcttctttcctttcttccttccttctttctttcttttttctttctttctttcccttccttccttctttctttctttctctttctctctctttctttctttctttctctctctctctctctctctctctctccttccttccttccttccttccttccttccttccttctttcagatggagtctcnctctgtcatccaggctggagtgcagtgacacaatcttggctcactgcaaccgccacctcctggattcnagcaattctcctgcctcagcctccggagtagctgggactacagtcgtatgccatcactccaggctaatttttgtatttttaatngagagggggtttcaccatgttggctaggctggtctcnaactcctgaccttagttgatctgcccacctcggcctcccaaagtgccgggattacaggcatnagccactgcacccagcccacttacaattcaataataagaaaaataaacccatttttaaatgggcaaaaaatttgaatcatcattttaccaaagaagatatatgaatgaccaatgtttaagtaactcttaggaagtcaggaaaaagcaatgagaaatgag

SEQ ID NO: 70559 - DNA, 279 bp, Homo sapiens
agtggtagatctactaaatacagacttaaaaaaaaaaaaacaactcctggggctgtgaaagaaaacagagactttaaaacaactctcttaaagatgctcagaggaatgaagtccctgaccatccagctaaaccattgggtacagcccatgaatctgtatgtaatcacacatctggccatttctacttccatgcagagtacacaaccagttgcactgcttgaagttctgcccactgggaagatttcccttcactgttgtccttcaagaatgtcctagaaa

SEQ ID NO: 70560 - DNA, 251 bp, Homo sapiens
  misc_feature (44)..(45): n is a, c, g, or t
gaatggctccaagccaacctggggcctatcaaccaagaccaggnnttacttcacttcctggaagtaccataactcctcctcaagttgtgacaaccaaaaatgtatccagacatcaccaatgtcccctggagtgtggggagggaatctcctcaagttgagaaccacagcactagaaattaaagcagttagaaatcccagatattaacccctggaaagccacgtggactttattttcccagtttgataaatcg

SEQ ID NO: 70561 - DNA, 437 bp, Homo sapiens
gattcatatttcactacatatgtagtattttagctttataacttaccacacaaaattttagactgactaaaaaattcactagaaatagcaacaagtgaaatgtatatattaattttttaaataagtattttatttctatccagaattttacatatgagacatggtgtggttctaaattggtctcatgcaaaccaaaaaccagggtgcacttggaaaaagaaaaatgaacgttcattaaagttaaatcccacatcctaagtgtgaagtcttgaaaacactgaacaaagacttcacttgtccacatgtcttatttggtgtttttgttcgtttgtttgtttctgtttttgttttgttttgttttgttttgagacggagtctcactctgttgcccaggctggagtgcaatggcctgatcttggctcactacaacctctgcc

SEQ ID NO: 70562 - DNA, 204 bp, Homo sapiens
caatttatttctgaccaaataaaattttctgatgttcctttggatgaatgtttgtccatatctgggaactgtgtgctgtgacttggagaaatgatcactcccttagagtcagatgacctcaattctaaccacgctctaccatttatgatttgtgtgaccttagcaggttcatacttcctcataaagtgaagatagtatctgcct

SEQ ID NO: 70563 - DNA, 462 bp, Homo sapiens
gaaacccttcatgcattccttttgttcgaaggtaggggtggcgtggactgggtgggctgcagagagagagcttgggatagccaaaatcaagccagggaacagctcgaataccgctgtttgaaacctctccttctgtcttttatattctgtctctaaaaaagagatgctgtggagaaacaaacattttgccttgttggtcactgctggaaatagaagttttttcgctgcagggcaattctgtaaatgtgcttcccagctttaggaggtctgaggctactcttctccaataaccttccttcccactggaccttctcactcacagcactgctgccctctggacaagccacagtggacaaatatgtcaagctgaagatgcacaaataatttcaagttcagttctcagggattcaaaggacatgaaaattcttgtagcaaatcttgaataaagagttcattaaacca

SEQ ID NO: 70564 - DNA, 1059 bp, Homo sapiens
tgcataaaagaggcaaccccaaaagtgtagcaggtactgaataacagatttgcagccttgggtatccacattaaaatttgaaatctaagtgaattacttcaagctgatttcttaggtcaaggagagattatggtccttaaatgcctgataaggtcacatacacaatttcaagtgcattatagtaaatccatgtgacagctcctacagctactaacctgcttctgccctcacggtagcgtgcacaatcttcatcgcatgtcctgggtggtggtaggagcagtagaaaccccctgggtcatgtcagatttagaaaatataagcaatggctcatacacgaattttaagttgtaacctacatgtgataagttgctttatcttccaaatgtaataaaaaccagaagttactttgaaataaattgaaggattagcagtggtgactgaggaataaaaattataatttaaaattgtccttaaggctggaattcttaacttattgaccttatatcctacatattataggactttgtaaatttaggctgatatggaaatgtatatttatatcaaatttaaatttttagaatgatggtgctactatattctaattgttaatttgataattgtaattgtaatttgttaatttgttctaataatgttttcatgacattattcatttgctgcttggcttgatggcataacaagtatgggttatttaccctgaaaaggaaacagtatcacccttccagaatctctatttacagctacaaaagatgcaacacacctgtttctggaccacttccagatcagatgtgatgcatgctttagatcatttactttgatctaggaattactgtctggcatttcgtggtgtagggtaggtgtctccagcactgtataggtgtctggaattgagataagaatcaatttcaatacaaaatacattttttgcttaaagcacgcaaggattctatgaattcaggtaaattcacagggtggaaaacaggaactaatgttatatattcctgtagttatcttcataatgaagcagaaagaaaaacaaaa

SEQ ID NO: 70565 - DNA, 759 bp, Homo sapiens
ttttttttactaatttactaccttccttgatgtccacagatcctaccctcggccaaatcaccacctcctctccctgacatattatagtattcttctgacttgctttctacttgccccgttctgtgcctaaagaaagcacttcagtgggtttacgctgcgtgttcataccccctgaacctaaaataaaagttgaaaaaaaaatgaagctgtgattgtcgtggtcaacaacaccccaggggatgtagtcctgcctccctctcagcctcacttggaagcagtccttcgctcttccgtgttccagccgctctgctcttctcagtaccttgaacttaactcactctttcctgacttggaacctttgagatgttccgtctgcctggaactcaattccaaaccatccttgtgtggttggctccttctgtttctttaagtcttgatttaaaagttccttccaaaaaagagacttgctctgattacattcagtgttcctgcctcccaatcgtctgtaccacggctccatggtcacggcattcctcttccttctgtctcacatattacaggctgctgcgggggtgcaggggggaagctactgcaaaatccatgggatcagctgggcgtggtggcagtggctcatgcctgtaatcccagcactttgggaggccgaggagggtggatcacgaggtcagggtggatcaagaggtcaggagatcgagaccatcctggccaacacagtgaaaccccgtctctactaaaagtcga

SEQ ID NO: 70566 - DNA, 224 bp, Homo sapiens
aaaaaaattaaaaattagtaacattttaaccatttaagaccagtcacattcattataacatctgaaagcaggacaatggaactatttaaacttttagggaagtatcttaagaaagacaaacatataatcatatctcttatgaaatacacagctctcctattcaagccaaaggatctttctagacaaagaaacagattttggacaaaataagacactcagtattt

SEQ ID NO: 70567 - DNA, 240 bp, Homo sapiens
ttcatgctcatgtaaccttcttaatagtgccttgtctgctgggtttgtagctgtaagcagttctgcaaactggccctataaaaatattgatgctgtccattaaaatgaatctctctctctcactcagtctctctctctgtctgtctctctttcttctctctcctgccatgtgtgtgtctctctctactcctctgattttgtcctctctctctattctgctactctctctcctctcctccg

SEQ ID NO: 70568 - DNA, 1387 bp, Homo sapiens
ccggcagtcggagcagccttggagcaggaggagcagcagcagcagcagccgtcgccgtttgcggagcgcagccgagccggccatggcgttgtcgatgccgttgaacgggctgaaggaggaggacaaagagcccctcattgagctcctcgtcaaagctggcagtgatggtgaaagcataggaaactgccccttttcccagaggctcttcatgattctttggctcaaaggagttgtatttagtgtgacgactgttgacctgaaaaggaagccagcagacctgcagaacttggctcccgggacccacccaccatttataactttcaacagtgaagtcaaaacggatgtaaataagattgaggaatttcttgaagaagtcttatgccctcccaagtacttaaagctttcaccaaaacacccagaatcaaatactgctggaatggacatctttgccaaattctctgcatatatcaagaattcaaggccagaggctaatgaagcactggagaggggtctcctgaaaaccctgcagaaactggatgaatatctgaattctcctctccctgatgaaattgatgaaaatagtatggaggacataaagttttctacacgtaaatttctggatggcaatgaaatgacattagctgattgcaacctgctgcccaaactgcatattgtcaaggtggtggccaaaaaatatcgcaactttgatattccaaaagaaatgactggcatctggagatacctaactaatgcatacagtagggacgagttcaccaatacctgtcccagtgataaggaggttgaaatagcatatagtgatgtagccaaaagactcaccaagtaaaatcgcgtttgtaaaagagatgtcttcatgtcttcccctaagaatacgcttttcctaacaggctactccttcctgtagagcagaaattgtattttgcacgaacatgcagttattgaagattaggatcaaggatagacaaggtatagtagttatcttaaaatatacactcctaagcagtattattttaaaatcctttaccctggctacctcccctacccgggttcccctctctttaatttggagacactccaccacaaacttttcactttagaggtagcttgccatctcttcaggagccctcaccattgtgtccattcactgtgtatagatggcagaacttttgaggtgcaatgtttaattgttcacaaattagtagaccacgaattgaataaggcagccccaaacgcgggcttactggttggtacacacaaaattttatggactcgggatctcgaacatggaccgagatctaaggcacgcacggtcaaaacatgggaaacaggaaccggaagacaccaatcaccacaacatcaacactccaca

SEQ ID NO: 70569 - DNA, 856 bp, Homo sapiens
ccggcagtcggagcagccttggagcaggaggagcagcagcagcagcagccgtcgccgtttgcggagcgcagccgagccggccatggcgttgtcgatgccgttgaacgggctgaaggaggaggacaaagagcccctcattgagctcctcgtcaaagctggcagtgatggtgaaagcataggaaactgccccttttcccagaggctcttcatgattctttggctcaaaggagttgtatttagtgtgacgactgttgacctgaaaaggaagccagcagacctgcagaacttggctcccgggacccacccaccatttataactttcaacagtgaagtcaaaacggatgtaaataagattgaggaatttcttgaagaagtcttatgccctcccaagtacttaaagctttcaccaaaacacccagaatcaaatactgctggaatggacatctttgccaaattctctgcatatatcaagaattcaaggccagaggctaatgaagcactggagaggggtctcctgaaaaccctgcagaaactggatgaatatctgaattctcctctccctgatgaaattgatgaaaatagtatggaggacataaagttttctacacgtaaatttctggatggcaatgaaatgacattagctgattgcaacctgctgcccaaactgcatattgtcaaggtggtggccaaaaaatatcgcaactttgatattccaaaagaaatgactggcatctggagatacctaactaatgcatacagtagggacgagttcaccaatacctgtcccagtgataaggaggttgaaatagcatatagtgatgtagccaaaagactcaccaagtaaaatcgcgtttgt

SEQ ID NO: 70570 - DNA, 844 bp, Homo sapiens
ccggcagtcggagcagccttggagcaggaggagcagcagcagcagcagccgtcgccgtttgcggagcgcagccgagccggccatggcgttgtcgatgccgttgaacgggctgaaggaggaggacaaagagcccctcattgagctcctcgtcaaagctggcagtgatggtgaaagcataggaaactgccccttttcccagaggctcttcatgattctttggctcaaaggagttgtatttagtgtgacgactgttgacctgaaaaggaagccagcagacctgcagaacttggctcccgggacccacccaccatttataactttcaacagtgaagtcaaaacggatgtaaataagattgaggaatttcttgaagaagtcttatgccctcccaagtacttaaagctttcaccaaaacacccagaatcaaatactgctggaatggacatctttgccaaattctctgcatatatcaagaattcaaggccagaggctaatgaagcactggagaggggtctcctgaaaaccctgcagaaactggatgaatatctgaattctcctctccctgatgaaattgatgaaaatagtatggaggacataaagttttctacacgtaaatttctggatggcaatgaaatgacattagctgattgcaacctgctgcccaaactgcatattgtcaaggtggtggccaaaaaatatcgcaactttgatattccaaaagaaatgactggcatctggagatacctaactaatgcatacagtagggacgagttcaccagggggtgggggggggggggggggggggggggcatatggtgatgtagggggggactcaccaagtaaaat

SEQ ID NO: 70571 - DNA, 610 bp, Homo sapiens
ccactcctaaggaaggccccaagtgggtgagcagcccctccagcaaagatgcaggagcccctggcctagagctccccctgcccacagccccatctgccctctgtccctctgggtgttttcttttcttttcttttttttttttttaagagacagggtcttaatctgtcatacaggctgtagtgctgtggcgcaatattgcaatacagctcactgctacagccccaggcttaagtgatcttcttgcctcagtctcccgagtagctggaaccacaatctcataccaccacgccccacgcctggtaaatttttaaatgtttttgtaaagacagggtactgctgtgttgcccaggctggtctctaattcctagtctcaagcgatccttccgctttggcctcccaaagcactgggattacaggtgtgagccactgtgcccagccctgctctaggttttcatttggatttgctgcctagtggaaggcacaggatggggcagtgccttctgccagtgagggaggctccaggtagatgtcattgctgaactggagctcccctggaagcaatgtggcccagcccttcctgggcagccccttctgccaccaggagccttag

SEQ ID NO: 70572 - DNA, 152 bp, Homo sapiens
aacagaacagcctcagaaactgccaggctccccatcataaatcctgtgtggctcagaaactgccaggctccccatcataaatcctgtgtggctacaaatggtgagaattcaaggaaatggaaagagaccaattgccctgttgggaaaaccat

SEQ ID NO: 70573 - DNA, 540 bp, Homo sapiens
agagacagattcttgctatgtttccatgctgcttttgaatgcctggcctcaagaaattttcctgtcttggcttcccagggaaattcttttaatttcaaaaacatccttttattattcatgtattttaaagagatggaatcttgctctgtcgcccaacctacattgcaatggcaaaatcatagctcattacaacctcaaaatactgggctaagagatcctcccacctcagtctcctgagtagctagaattacaggcatgaaccatggcggccagctcaaaagtatccctttaaataggaagcttatacaatttccataatacattttaagatgtttaattcatgcataagactccctttaaaaatatatctactatataaatgaaatgcccacgctagtctcaaattcctgggctcaagcaatctttctgccttggcctcccaaagtgctgggctaataggcaccctgggagggcgatacagctggatcgcttgagccctggagttggagaccagcctgagcaacaagcaaaagcccgtct

SEQ ID NO: 70574 - DNA, 1927 bp, Homo sapiens
gacgagccgggtcactagtacggcgcagtgtgcctggaatatcggctaggcagttttcagaaagaagtttctagtaaacaaactcatctagagagagaaaaatgtgcatattatatccatattaattctattcatgcagcttctttgtctttttctctctccctctcacactctaggatagagttgcacacaaatatgagctttgtttaaaaggtgcctttgcaaacaagactcaactgtactttagagcagaaataaaatgatgttggtattctgttgttgaatatggctttggacaaaacattcaagccttctgagtcccagggtttttgtgctgaaaaatgattagagagctatttagtcatcactatactctttagatctgagcataaaaaaaagagagagagacaaaggaggaaaggactaaacaacatcctccaacaaatccttattgagatcaatgtcctcaaatgtcacatttgtatttcccagaaaatgttcctcccttcctgatccctgccaaaagatgaagtgtttcacttattacctataagagaattatattttgaaaaattccattctcataagtagccctagtatgccagtagtgtggagagaatttaatttttaaaactaacttttcaaagggaaaccaaaggagatgagtaccatttacaaatcagaatttaaaaaactggtcatattcttgccaccaaaggacgagtacacctgtgttaaattttacttgctaaaacaaaaaataagttatcttttgtacctaaaggggggtcatcaaatttcacagagtactctctcaggaactgtaatgatggtaagagagaaatcaaatagatgttagattaatgccacctccaccagaaatgtagctctttgtagtctgtaaccaatttagattggccctttttctctgatctaaatctagattggtagtgaaattcccaagtgctttccacttttatacacagtcatttgtcaatgctcctctctccaaggggctgcaagtgtgaaatccctacatgcagagctaaacttagcagtaagactgactctgccacacctgttacaactgtgcactgtcagagatgggagctgcactctgcatcattcaaaacaaattagcagataggctaagacttggatagggcatatatttttcaaaactcaaagtgactcacattattacaccttgatggtctaagttgtgtgtttattcaacacccagattcagtggaccctttaaaatttgagctttggcagccaaacatggacttcctcaagactggcaacaccccccctccagaacttcttaagaacacacatcttccctcattccaggctctcacttttgtgcccacagtatttgaatgcactttacatttgagaagtcagtggctggctaaatgaaggaactgattatactttcaacagcagtgaatagcaagatacaaaataccttgttgctgaatctaatagagatacagactgaaaatctattctctgcccatctgaccttcccaacccaaatttcaggagaataaaactgctttttaagcactgacttggatgaagatttctaatttatgattaggttactcacatggaaaactatcaacctctttcatcacaactaccccatggggatccagctcgtcactgagcattaaccaaagcacacagcacagattacaccaaaatagcagcataacaccccccacccaatttccagtgacaatataaatggaaatgcttttaagcagatgtgtcattataatgactcacatggtatttaatctttaggaaaataaactgaatgtttttattgtagcaaacttactgtaaagaaaagaatttttacattatatttattccccaatgtattaacatatattactgctcaaaaaggcag

SEQ ID NO: 70575 - DNA, 204 bp, Homo sapiens
ggatccggttgcagtgagccgagattatgccactgcactccagcctggacgacagagcgagactgtctcaaaagaaaaaaaaaagaaagaaaagaaaaaccaagacccaggaatttcctcacaataccatgtttatgaaactcaaaaacaggcagaacgaaacaccatgcttttcagcatgcagacatggttgataaaactttt

SEQ ID NO: 70576 - DNA, 367 bp, Homo sapiens
tataaactgtaccttaaagggaaagagtcaaatacacccacccccgctacacgcacagacactggtactgtctcttaaggcaaacaaacaaacaaaaattgatgaagggaagtttctttttatagaagtattctggctaagagaaacaaatgaaggaatgacagatcataaattttttctcctccaattaatatgttgaggcagtattcacatatctgataatatcacaaaaggagaaacaatcagacttatttatctaatgattgcatagaacattatggagtagtcctgctaaaggaaagaaaggaagaaaataaaaatctgaactgaatctgattaagactctatatcttactaccaagtttca

SEQ ID NO: 70577 - DNA, 1545 bp, Homo sapiens
gggaagaggagttaggctccggcagagcccctcagttccccagttctgtcatcctgctggcacggcccagtcctgaatgggacacctctccatccagctctgcctggcgtcggctgggcagcccttcccatggggctccagctgggggatggggccaatgcacatgagccacaggtgataggactctggccccaggtggttatacgggctggagaaggacatgcagaagacagacatccactaccactcgctgactggggaggccgacttcaactggcggttcatctttaccatggactacctggcggcggagcgcacgtgtgtccagagccagaaggtaacaggcctggggcgtgaggggcaacaggccacaacaaacagacccaggctcctggagctcctccccccacccctccagaggcttgcaatctgtcccagaacatcagaaacatgtcctcaggtggaaaccctcttccttgatagtctatcactgctgggtggagggccactgaggggtgcaagggaaacgtccaggagacaggccggtaacacgcccttccgccatttccccaggattacatatggagcctggatgccacgtccatgaagttcccagcccgacttatcatccaggtctgggacaatgacatcttctcccccgacgacttcctaggggtcctggagctggatttgtctgacatgcccctcccggctcggcacgccaagcagtgctccatcaggatgatggacgccgaccccaagtggccctatttcatccaatacaagcacttctccctctttaagaagaagactgtgactggctggtggccttgccaggtcctcgatggtggcaaatggcgcttgtcgggcaaggtgaagatgagcctggagattctgtcagagaaggaagccttaatcaagccagccgggcgaggccagtcggaacccaaccagtaccccacacttcatcctcccctacgcaccaacacctctttcacgtggctgcggtcaccagttcaaaacttctgctatattttctggaaacgctatcgcttcaaactcatagcctttatggtcatatcgattatagcacttatgctgtttaacttcatctattcagctccgcactatttggccatgagctggatcaaacctcaacttcagctgtatcctcccattaaaatattcaatatcatcaattcactaaacaccagcaacgccagctcttccatccttcccacccaggatccaaacctaaagcctacaatagaccatgagtggaaactccacccaggacccacaaatcacctgagtgatattttcccagaacttccagccccaggagactaattagtccatgctgcctggctttcctcctgctaccaacagccctccccttgggctggctaccagttctttgtttctatcttctagaatatatgcaagatgctaggaatattctggctattgtgttcagaaatcactttcaacaagacgagcagagctgtaattttccactgaaataaacaagttctataacagaga

SEQ ID NO: 70578 - DNA, 417 bp, Homo sapiens
gagacgcggtttcaccatgttggccaggctggtctcaaactcctgacctcaggtgatccactcacctcggcctcccaaaatgctgggattacaggcgtgagacactgtgcctggcccagtagttgcttttttaaaaaagaaagctctttgcatcagattacttgacctgaaggttctccctgccattctctgacatctccctggctcctggacagacgcaccaacacctctttcacgtggctgcggtcaccagttcaaaacttctgctatattttctggaaacgctatcgcttcaaactcatagcctttatggtcatatcgattatagcacttatgctgtttaacttcatctattcagctccggtgagtggcagccatgggggcaaggacaaaggtggtctcgggatgactctgggg

SEQ ID NO: 70579 - DNA, 749 bp, Homo sapiens
cgcccttccgccatttccccaggattacatatggagcctggatgccacgtccatgaagttcccagcccgacttatcatccaggtctgggacaatgacatcttctcccccgacgacttcctaggtgaggtcctgacacagggcttgtgaccacaggacagggagctccttcttgctgatgtcatttttctgggctcaggggtcctggagctggatttgtctgacatgcccctcccggctcggcacgccaagcagtgctccatcaggatgatggacgccgaccccaagtggccctatttcatccaatacaagcacttctccctctttaagaagaagactgtgactggctggtggccttgccaggtcctcgatggtggcaaatggcgcttgtcggtaggagctggggagtgtctactgattagggctgctatgccacatgtcctggctctaacagacatctagggacctagctaaatcccttttcctttcttgatcccgggaagaggtcctaaaactacccggctcctgctgtctgcactcagcctccccctcacccatggtgttcctagggcaaggtgaagatgagcctggagattctgtcagagaaggaagccttaatcaagccagccgggcgaggccagtcggaacccaaccagtaccccacacttcatcctcccctgtaagggtccttggggcaaaagcaccagatctttcttgctcctcagtgtgtatggggtggtgaccagtgggc

SEQ ID NO: 70580 - DNA, 5858 bp, Homo sapiens
  misc_feature (597)..(597): n is a, c, g, or t
  misc_feature (1289)..(1289): n is a, c, g, or t
  misc_feature (1867)..(1867): n is a, c, g, or t
  misc_feature (2545)..(2546): n is a, c, g, or t
  misc_feature (4439)..(4439): n is a, c, g, or t
gatctctcccatgaagtgaccaggatagagaagcaccagaaccgccaaaagtatgggctgtgcgtcatcttcctttcctgtaccatgatgcccaactttaaagagctgatccatttcgaggtcagcatcggtcactatgggaacaagatggacctgaattacaagcctctagtctcaagcacaccgtacagcccagtgatatatgatgggaacatctaccattatgtgccctggtacaacaccaagcctgtcgtggccgtgacctccaactgggaggacgtcagcttccgcatgaactgcctcaacctcctccacttcactcgggaccgcctgaaagccaacctggacaccctgaaatccacgcggaatccgaaggatccagctctcctctaccagtgggagaaactgctgagggagctggcagaggactgcaagcgccctctgccctgcatgacctatcagcccaaagccaccagcctggacaggaagaggtggcagctccgcagcctcctcctgcaggaactggcccaaaaggcaagcaagccaagcccaaggacatggtggccacagcggaggactggctgtaccgcctcaacnccgtgctccctgagccccagatgggcctccctgacgtgatgatttggctggtggcaaggagcagcgagtggcctatgcacagtacccagagggtgaaggacagaaggatgtgctcccagctcacctccgggtctgcatgtggcttggcaatgtcacagacagcaaggacctgcagctgctccgccagggtgacacagcggtgtacgccgagatggtgagtgtatgagaatcaggccaagtataaagaccagtgggggcagcaggggctgtatcactgccccaacttctcggatgtcatggggaacaagaccctccccatgacggatttccaaccacccctgggatggcactggcaggacagctggacagtggaacctcagagaaggctcctcctggacatagacatcaacaagagccaggtgctggaggaggtatatgagaaccagggccgtgacaccagagggcctggggcctgccgccatcccaaacacagacgtgaatggacagcccatggaggcccgggagaacgtgaagtgcccccaaggctggcactttaagaaggactgggtggtggagctgaaccacgcagtggacagtaagggctgggagtatggagtggggatcccaccgtcgggcctgccccaggtctggagcccggtggagaagacctaccactcgtgccgccgccggcntgggcggtgtgcgcttcaggaaccatggggagctgagccacgagcaggagaccctctccttcctgcagctgggcctggccaagggcgaggaggagggctgggagtatgacaccttcggctccaagttccacctcaaccctcagccccagagccggttccgccgccgctgctggcgccgcaggctggcccccaacaaggacaagggcatcgcgcccatattcctcctggaggggtccttggctatggatctgaaataccacgctgggaaggaagaggacagcaagacatggccatggggtctggacagacagttcagggacccccagaggcaggacacccggccccccaacttgcccttcatctactgcaccttcaataagccccactactaccagctcttctgctacatctaccaggcccggaacctggtgtccaatcagatcctgacattccaagggcccttcattcgggtggtcttcctgaaccacagccagtgcacccaaaccctgaggagctctgcaggccccacatgggcccagacactcatcttccagcacctccttctgtacgagaacccncaggacaccaaagagagcccaccgcttgtggtgctggagctgtggcagcgtgacttctggggcaaggagagcttgtggggacggagcgtgtggcccccaatggtctggctggatctccaggaccggatcctgccccccatgaggtggcatccccttgtaaaggagttggggaaggaagagggcgagatcttggcatcctgtgagctgatcctccagactgagaagcttggagagaagcagctgcctatcttaagcgttccctggaagaatggggcatacacactccccaagagcatccagcccacgataaagaggatggccattgaggtgctggcgatgtgggatggggacggtgggcaggacaggcgggggtggtctggagtgcgctgcagccttctgctggtcctccctgactactggatccaaagctcacaccccgaaaaagactacctgggaggtggagggagacaggagagaaacgaagaggttctggtgtaacactggaaatcattttaccacaaacctctgcagtgaggagtaggcaaagggctgtagcatgcatgatcacttgtgggactcacgctgcccctgcgcagtagcaactactttgcagagaaggaaatagaggctccaagagataacacattccacgcacagtgatgcagggactaactgacnnggccatttaggcccagccctgtctgactgcagatgccaggatgttgctcacctctcttctgagagtagcatgagggtcctcattcagaagctgtgtgccctgccgcaaatgtggcaaagagcacaagacggtcaggcctctgggactgaaggcttccccaagatcaggcaacttggctggttcccgctttaggccccgaggaggcccaaagtcagggtgcagctatttcctggcaggatgccaggtcactgaatggccatggggtcctcaatgagctagacggcacaggggccctgagaaatccaggcacttcctgcttcttcaggcctcagaggcagtcggcttcaggaactcctacctgagaactgatgaggccagacaaggcagcgggtgaggaggggcaatgcctgcgggctatggaggtcagtggaggatgcagccagtggccagaggtcacctccctcatgggttgggggacagcgtcccagccccgagggcaagcactgatccctcacaggacggggaagcctgtccttgtgcgccttcagacactggctcctctgcagccccattccctggccctgcaggctcctgctgcaccgctattgcccctcagcccccttctctggccaggaccccattacagaggcgctgcctgccccttgtcctgccctccttctttgttctggtagatcctggcctggggcttcggaacatgaagaaggcgagctccccccagctcctggtggaattcggggaagagtccctgaggacagaacccatcagggactttcagaccaaccccaacttccccgagtctgagtctgtcctagtcctcacagtgctcatgccgacggaggaggcctatgcactgcccctcgtggtgaaggtggtagacaactgggccttcggccagcagaccgtgacgggccaggccaacatcgacttcctccagccctacttctgtgacccctgggctcaagactatatgcacccaaagcttccaacgctgtctgagaagaagcaccaagacttcctaggctacctctacagaaagttctggttcaagtccagtaaagcagaggatgagtatgagcatgaggtggactggtggagcaagctgttctgggccacagatgagcacaagtccctgaagtacaagtacaaagactaccacaccctcaaggtgtatgagtgtgagctggaggccgtgccagccttccagggcctgcaggacttctgccagaccttcaaactctaccaggagcagcccaagttggacagccccgtggtaggggagttcaagggccttttccgcatctacccctttcctgagaatccagaagccccaaagcccccgctgcagttcttggtttggccagagagagaggacttcccccagccgtgcttggtgcgggtgtacatggtacgagccatcaacctgcagccccaggactacaatggcctgcttatgtgatcctgaaactgggcaagacagagcttggcaaccgggacatgtaccagcccaacactctggatcccatctttggcatgatgtttgaactcacctgcaacatacccctggagaaggacctagagatccagctctatgacttcgacctattttcacctgatgataagataggaaccacagtcatcgaccttgaaaaccgactcctatctggctttggagctcattgtgggctctccaaatcctactgccagtcagggccctttagatggcgggatcagatgcccccaagctacctcctagaacgctatgccaagcggaaagggctacctccgcctctgttcagtcctgaggaagatgctgttttctataatgggaaaaagttcaagctgcaaagctttgagcccaaaacccctactgtncatggtttgggacccaagaaggaacgccttgcactgtacctcctgcacacccaggggctggtacctgagcacgtggagacccgcacactgtacagccacagccagccaggcatcgaccagggaaaggtgcaaatgtgggtggacatcttccccaagaagctggggcctcctggcccccaagtcaacatcaaccccagaaagcctaaacggtatgagctgcgatgcatcatctggaagactgccaatgtggacctggtggatgacaatttaagtagagagaagacgagcgacatctacatcaaagggtggttatacgggctggagaaggacatgcagaagacagacatccactaccactcgctgactggggaggccgacttcaactggcggttcatctttaccatggactacctggcggcggagcgcacgtgtgtccagagccagaaggattacatatggagcctggatgccacgtccatgaagttcccagcccgacttatcatccaggtctgggacaatgacatcttctcccccgacgacttcctaggggtcctggagctggatttgtctgacatgcccctcccggctcggcacgccaagcagtgctccatcaggatgatggacgccgaccccaagtggccctatttcatccaatacaagcacttctccctctttaagaagaagactgtgactggctggtggccttgccaggtcctcgatggtggcaaatggcgcttgtcgggcaaggtgaagatgagcctggagattctgtcagagaaggaagccttaatcaagccagccgggcgaggccagtcggaacccaaccagtaccccacacttcatcctcccctacgcaccaacacctctttcacgtggctgcggtcaccagttcaaaacttctgctatattttctggaaacgctatcgcttcaaactcatagcctttatggtcatatcgattatagcacttatgctgtttaacttcatctattcagctccgcactatttggccatgagctggatcaaacctcaacttcagctgtatcctcccattaaaatattcaatatcatcaattcactaaacaccagcaacgccagctcttccatccttcccacccaggatccaaacctaaagcctacaatagaccatgagtggaaactccacccaggacccacaaatcacctgagtgatattttcccagaacttccagccccaggagactaattagtccatgctgcctggctttcctcctgctaccaacagccctccccttgggctggctaccagttctttgtttctatcttctagaatatatgcaagatgctaggaatattctggctattgtgttcagaaatcactttcaacaagacgagcagagctgtaattttccactgaaataaacaagttctataacagaga

SEQ ID NO: 70581 - DNA, 845 bp, Homo sapiens
gtagggaagaggagttaggctccggcagagcccctcagttccccagttctgtcatcctgctggcacggcccagtcctgaatgggacacctctccatccagctctgcctggcgtcggctgggcagcccttcccatggggctccagctgggggatggggccaatgcacatgagccacaggtgataggactctggccccaggtggttatacgggctggagaaggacatgcagaagacagacatccactaccactcgctgactggggaggccgacttcaactggcggttcatctttaccatggactacctggcggcggagcgcacgtgtgtccagagccagaaggtaacaggcctggggcgtgaggggcaacaggccacaacaaacagacccaggctcctggagctcctccccccacccctccagaggcttgcaatctgtcccagaacatcagaaacatgtcctcaggtggaaaccctcttccttgatagtctatcactgctgggtggagggccactgaggggtgcaagggaaacgtccaggagacaggccggtaacacgcccttccgccatttccccaggattacatatggagcctggatgccacgtccatgaagttcccagcccgacttatcatccaggtctgggacaatgacatcttctcccccgacgacttcctaggtgaggtcctgacacagggcttgtgaccacaggacagggagctccttcttgctgatgtcatttttctgggctcaggggtcctggagctggatttgtctgacatgcccctcccggctcggcacgccaagcagtgctccatcaggatgatggacgccgaccccaagtggcc

SEQ ID NO: 70582 - DNA, 1343 bp, Homo sapiens
aatagcactgatttttagtattttgagagtgtgttctggctaacattagttacaatagtttgtttcgattctcttggattttttgtgtatacaatcatatttttagtgaataatggtattgtttctatttttataacttcgttactttttcttgtcttactatgttttattacagaacaggagcagtgatagtgggtatccttgtcttctgacttcaaagagaatgcttctaatttttcaccattaagtattatatttattgtagattggggtagatatcctgcattagcagaaggaagaatttttctgttctcaggttactaagagttgttttttaatcatgaatatgtgtattttgaattttaccatgtttattctgaatctgttgaggtaacactacatttttctaatgttaaaccatctttgccccctggtcatgtgtattattttttcctacattattggattccttggctaatattttagaatgtctccatctgcaaactgaaatgagactggcctacagtttttctttcacataaaatccttgtctgattttggttagaattgagcaaacatgatgaggttataagagcttcataaaataaattgaggatctttaccttcttttctattctccagaacagttcatataagataggaggaagtatctctatcttaaaggtatggtagaacctagaaaaaaactactgttttttgtttgttgctggggagagtgtagatttttaactactgatttaatttctgtaatgcttacaggtctgtttctgtttcatttctccaattcctagttaactcactccagtctgatttttagttctatgagtatactgaaattccttttatctagcttggtgcctaccgaattctaaacatagacccaaactcaaaggtcacttttcatccttatcctgttcagtggcacctggccttgctggccattcctgccttcctgaaacactcttccttgttatcttccacaggactgccctctcctggctttctgcttctagcttctccatggccccatcttaggccctcttccctttttctctctgtactctcttctctttttttctttcctcctccgcctcctctctaccctcttcttaagtgttctcacccattcccatcattttgaaagctgttatgcttatgactcccaaagttttgtcttcagtgtaaacctctcctgcacactctggatagccaggggcctacttgactctgcccctgggagtattagaagcatctcagcctcaacacagctaaaaccctccttccaccagcataattcctgtcagctaatgggaccctgtcta

SEQ ID NO: 70583 - DNA, 429 bp, Homo sapiens
tttttgaaataaagtctggctctgttgcccagactaaagtgccatgacttgatcatggcttactgcaacctcagcctcctggattcaagcaatcctctcacgtcagccacccaggtagcggggactacagacacatgccaccaaatctggctttttaaaaattttttctagcaatgaggtctcactaagttgtccaggttgggctcaaactcctgggctcaagcagtcctcccacttggcctcccaaagtgctgggattacaagagtgagccactgcactcagcccatactccttttcttaacacttagagcatttcaaggaaaggcaacaattaaaaaaattctttagtttgttacacatgatcttttagacattgtgctaatattggcttattattccaatcctaacactactaatgacagttacga

SEQ ID NO: 70584 - DNA, 2875 bp, Homo sapiens
ccacgcgtccgagcaagaacagctaaaatgaaagccatcattcatcttactcttcttgctctcctttctgtaaacacagccaccaaccaaggcaactcagctgatgctgtaacaaccacagaaactgcgactagtggtcctacagtagctgcagctgataccactgaaactaatttccctgaaactgctagcaccacagcaaatacaccttctttcccaacagctacttcacctgctccccccataattagtacacatagttcctccacaattcctacacctgctccccccataattagtacacatagttcctccacaattcctatacctactgctgcagacagtgagtcaaccacaaatgtaaattcattagctacctctgacataatcaccgcttcatctccaaatgatggattaatcacaatggttccttctgaaacacaaagtaacaatgaaatgtcccccaccacagaagacaatcaatcatcagggcctcccactggcaccgctttattggagaccagcaccctaaacagcacaggtcccagcaatccttgccaagatgatccctgtgcagataattcgttatgtgttaagctgcataatacaagtttttgcctgtgtttagaagggtattactacaactcttctacatgtaagaaaggaaaggtattccctgggaagatttcagtgacagtatcagaaacatttgacccagaagagaaacattccatggcctatcaagacttgcatagtgaaattactagcttgtttaaagatgtatttggcacatctgtttatggacagactgtaattcttactgtaagcacatctctgtcaccaagatctgaaatgcgtgctgatgacaagtttgttaatgtaacaatagtaacaattttggcagaaaccacaagtgacaatgagaagactgtgactgagaaaattaataaagcaattagaagtagctcaagcaactttctaaactatgatttgacccttcggtgtgattattatggctgtaaccagactgcggatgactgcctcaatggtttagcatgcgattgcaaatctgacctgcaaaggcctaacccacagagccctttctgcgttgcttccagtctcaagtgtcctgatgcctgcaacgcacagcacaagcaatgcttaataaagaagagtggtggggcccctgagtgtgcgtgcgtgcccggctaccaggaagatgctaatgggaactgccaaaagtgtgcatttggctacagtggactcgactgtaaggacaaatttcagctgatcctcactattgtgggcaccatcgctggcattgtcattctcagcatgataattgcattgattgtcacagcaagatcaaataacaaaacgaagcatattgaagaagagaacttgattgacgaagactttcaaaatctaaaactgcggtcgacaggcttcaccaatcttggagcagaagggagcgtctttcctaaggtcaggataacggcctccagagacagccagatgcaaaatccctattcaagacacagcagcatgccccgccctgactattagaatcataagaatgtggaacccgccatggcccccaaccaatgtacaagctattatttagagtgtttagaaagactgatggagaagtgagcaccagtaaagatctggcctccggggtttttcttccatctgacatctgccagcctctctgaatggaagttgtgaatgtttgcaacgaatccagctcacttgctaaataagaatctatgacattaaatgtagtagatgctattagcgcttgtcagagaggtggttttcttcaatcagtacaaagtactgagacaatggttagggttgttttcttaattcttttcctggtagggcaacaagaaccatttccaatctagaggaaagctccccagcattgcttgctcctgggcaaacattgctcttgagttaagtgacctaattcccctgggagacatacgcatcaactgtggaggtccgaggggatgagaagggatacccaccatctttcaagggtcacaagctcactctctgacaagtcagaatagggacactgcttctatccctccaatggagagattctggcaacctttgaacagcccagagcttgcaacctagcctcacccaagaagactggaaagagacatatctctcagctttttcaggaggcgtgcctgggaatccaggaactttttgatgctaattagaaggcctggactaaaaatgtccactatggggtgcactctacagtttttgaaatgctaggaggcagaaggggcagagagtaaaaaacatgacctggtagaaggaagagaggcaaaggaaactgggtggggaggatcaattagagaggaggcacctgggatccaccttcttccttaggtcccctcctccatcagcaaaggagcacttctctaatcatgccctcccgaagactggctgggagaaggtttaaaaacaaaaaatccaggagtaagagccttaggtcagtttgaaattggagacaaactgtctggcaaagggtgcgagagggagcttgtgctcaggagtccagccgtccagcctcggggtgtaggtttctgaggtgtgccattggggcctcagccttctctggtgacagaggctcagctgtggccaccaacacacaaccacacacacacaaccacacacacaaatgggggcaaccacatccagtacaagcttttacaaatgttattagtgtccttttttatttctaatgccttgtcctcttaaaagttattttatttgttattattatttgttcttgactgttaattgtgaatggtaatgcaataaagtgcctttgttagatggtgaacttgtg

SEQ ID NO: 70585 - DNA, 531 bp, Homo sapiens
  misc_feature (475)..(475): n is a, c, g, or t
tcgtacattaaaccctccgtgaagggaaacgggccagaagggcttccaccgctgaggggcagagagcccgtttcttttttaatttaaaaatatttttaaaaagaacattaacatttacttcaagaaactttctgccattgtcaaatcctaattcctcttactgattacagatcaaataacaaaacgaagcatattgaagaagagaacttgattgacgaagactttcaaaatctaaaactgcggtcgacaggcttcaccaatcttggagcagaagggagcgtctttcctaaggtcaggataacggcctccagagacagccagatgcaaaatccctattcaagacacagcagcatgccccgccctgactattaggtgagtcagtgggctttttctcctgcttttgggagtgaatgcaccagggcagagcagagacctggttgctgaatcttcaatccttggctgccccgcaggcttnttgtttttaataaattttattatgttatatgatattttaataattaaaattatata

SEQ ID NO: 70586 - DNA, 1871 bp, Homo sapiens
tgaggccaacgaggcaaaagtttcaaaggttgtcctgtatggggtgttttgtgcgtcttgaataaaataatgaagtgctttatttcattatttgtggggcatcaagtctgcaacttattctttcataaaactgttagtgttctttggttatgcaacttattcttaattggttcagaaatgttaataattagggaatctgggtgataagtgtgtgagaacgccgtaatatatgtattttgtaacttacaaataaatgtgagattatttcagaatttaaaaatatttttaaaaagaacattaacatttacttcaagaaactttctgccattgtcaaatcctaattcctcttactgattacagatcaaataacaaaacgaagcatattgaagaagagaacttgattgacgaagactttcaaaatctaaaactgcggtcgacaggcttcaccaatcttggagcagaagggagcgtctttcctaaggtcaggataacggcctccagagacagccagatgcaaaatccctattcaagacacagcagcatgccccgccctgactattagaatcataagaatgtggaacccgccatggcccccaaccaatgtacaagctattatttagagtgtttagaaagactgatggagaagtgagcaccagtaaagatctggcctccggggtttttcttccatctgacatctgccagcctctctgaatggaagttgtgaatgtttgcaacgaatccagctcacttgctaaataagaatctatgacattaaatgtagtagatgctattagcgcttgtcagagaggtggttttcttcaatcagtacaaagtactgagacaatggttagggttgttttcttaattcttttcctggtagggcaacaagaaccatttccaatctagaggaaagctccccagcattgcttgctcctgggcaaacattgctcttgagttaagtgacctaattcccctgggagacatacgcatcaactgtggaggtccgaggggatgagaagggatacccaccatctttcaagggtcacaagctcactctctgacaagtcagaatagggacactgcttctatccctccaatggagagattctggcaacctttgaacagcccagagcttgcaacctagcctcacccaagaagactggaaagagacatatctctcagctttttcaggaggcgtgcctgggaatccaggaactttttgatgctaattagaaggcctggactaaaaatgtccactatggggtgcactctacagtttttgaaatgctaggaggcagaaggggcagagagtaaaaaacatgacctggtagaaggaagagaggcaaaggaaactgggtggggaggatcaattagagaggaggcacctgggatccaccttcttccttaggtcccctcctccatcagcaaaggagcacttctctaatcatgccctcccgaagactggctgggagaaggtttaaaaacaaaaaatccaggagtaagagccttaggtcagtttgaaattggagacaaactgtctggcaaagggtgcgagagggagcttgtgctcaggagtccagccgtccagcctcggggtgtaggtttctgaggtgtgccattggggcctcagccttctctggtgacagaggctcagctgtggccaccaacacacaaccacacacacacaaccacacacacaaatgggggcaaccacatccagtacaagcttttacaaatgttattagtgtccttttttatttctaatgccttgtcctcttaaaagttattttatttgttattattatttgttcttgactgttaattgtgaatggtaatgcaataaagtgcctttgttagatggtgaacttgtg

SEQ ID NO: 70587 - DNA, 1604 bp, Homo sapiens
tagaggacccctcttcgtatgataccaccaggggcgtgctgttcgtggcattgtcattctcagcatgataattgcattgattgtcacagcaagatcaaataacaaaacgaagcatattgaagaagagaacttgattgacgaagactttcaaaatctaaaactgcggtcgacaggcttcaccaatcttggagcagaagggagcgtctttcctaaggtcaggataacggcctccagagacagccagatgcaaaatccctattcaagacacagcagcatgccccgccctgactattagaatcataagaatgtggaacccgccatggcccccaaccaatgtacaagctattatttagagtgtttagaaagactgatggagaagtgagcaccagtaaagatctggcctccggggtttttcttccatctgacatctgccagcctctctgaatggaagttgtgaatgtttgcaacgaatccagctcacttgctaaataagaatctatgacattaaatgtagtagatgctattagcgcttgtcagagaggtggttttcttcaatcagtacaaagtactgagacaatggttagggttgttttcttaattcttttcctggtagggcaacaagaaccatttccaatctagaggaaagctccccagcattgcttgctcctgggcaaacattgctcttgagttaagtgacctaattcccctgggagacatacgcatcaactgtggaggtccgaggggatgagaagggatacccaccatctttcaagggtcacaagctcactctctgacaagtcagaatagggacactgcttctatccctccaatggagagattctggcaacctttgaacagcccagagcttgcaacctagcctcacccaagaagactggaaagagacatatctctcagctttttcaggaggcgtgcctgggaatccaggaactttttgatgctaattagaaggcctggactaaaaatgtccactatggggtgcactctacagtttttgaaatgctaggaggcagaaggggcagagagtaaaaaacatgacctggtagaaggaagagaggcaaaggaaactgggtggggaggatcaattagagaggaggcacctgggatccaccttcttccttaggtcccctcctccatcagcaaaggagcacttctctaatcatgccctcccgaagactggctgggagaaggtttaaaaacaaaaaatccaggagtaagagccttaggtcagtttgaaattggagacaaactgtctggcaaagggtgcgagagggagcttgtgctcaggagtccagccgtccagcctcggggtgtaggtttctgaggtgtgccattggggcctcagccttctctggtgacagaggctcagctgtggccaccaacacacaaccacacacacacaaccacacacacaaatgggggcaaccacatccagtacaagcttttacaaatgttattagtgtccttttttatttctaatgccttgtcctcttaaaagttattttatttgttattattatttgttcttgactgttaattgtgaatggtaatgcaataaagtgcctttgttagatggtgaacttgtg

SEQ ID NO: 70588 - DNA, 1575 bp, Homo sapiens
  misc_feature (4)..(4): n is a, c, g, or t
gtgngcgatcccatgagagcgcttttctcacagatggacacttcacagataagtgtcattatgaggtgctgactaccagcgcacctggtgctacagaaacattgtactgcgagctctttcaaaatctaaaactgcggtcgacaggcttcaccaatcttggagcagaagggagcgtctttcctaaggtcaggataacggcctccagagacagccagatgcaaaatccctattcaagacacagcagcatgccccgccctgactattagaatcataagaatgtggaacccgccatggcccccaaccaatgtacaagctattatttagagtgtttagaaagactgatggagaagtgagcaccagtaaagatctggcctccggggtttttcttccatctgacatctgccagcctctctgaatggaagttgtgaatgtttgcaacgaatccagctcacttgctaaataagaatctatgacattaaatgtagtagatgctattagcgcttgtcagagaggtggttttcttcaatcagtacaaagtactgagacaatggttagggttgttttcttaattcttttcctggtagggcaacaagaaccatttccaatctagaggaaagctccccagcattgcttgctcctgggcaaacattgctcttgagttaagtgacctaattcccctgggagacatacgcatcaactgtggaggtccgaggggatgagaagggatacccaccatctttcaagggtcacaagctcactctctgacaagtcagaatagggacactgcttctatccctccaatggagagattctggcaacctttgaacagcccagagcttgcaacctagcctcacccaagaagactggaaagagacatatctctcagctttttcaggaggcgtgcctgggaatccaggaactttttgatgctaattagaaggcctggactaaaaatgtccactatggggtgcactctacagtttttgaaatgctaggaggcagaaggggcagagagtaaaaaacatgacctggtagaaggaagagaggcaaaggaaactgggtggggaggatcaattagagaggaggcacctgggatccaccttcttccttaggtcccctcctccatcagcaaaggagcacttctctaatcatgccctcccgaagactggctgggagaaggtttaaaaacaaaaaatccaggagtaagagccttaggtcagtttgaaattggagacaaactgtctggcaaagggtgcgagagggagcttgtgctcaggagtccagccgtccagcctcggggtgtaggtttctgaggtgtgccattggggcctcagccttctctggtgacagaggctcagctgtggccaccaacacacaaccacacacacacaaccacacacacaaatgggggcaaccacatccagtacaagcttttacaaatgttattagtgtccttttttatttctaatgccttgtcctcttaaaagttattttatttgttattattatttgttcttgactgttaattgtgaatggtaatgcaataaagtgcctttgttagatggtgaacttgtg

SEQ ID NO: 70589 - DNA, 2574 bp, Homo sapiens
ccacgcgtccgagcaagaacagctaaaatgaaagccatcattcatcttactcttcttgctctcctttctgtaaacacagccaccaaccaaggcaactcagctgatgctgtaacaaccacagaaactgcgactagtggtcctacagtagctgcagctgataccactgaaactaatttccctgaaactgctagcaccacagcaaatacaccttctttcccaacagctacttcacctgctccccccataattagtacacatagttcctccacaattcctacacctgctccccccataattagtacacatagttcctccacaattcctatacctactgctgcagacagtgagtcaaccacaaatgtaaattcattagctacctctgacataatcaccgcttcatctccaaatgatggattaatcacaatggttccttctgaaacacaaagtaacaatgaaatgtcccccaccacagaagacaatcaatcatcagggcctcccactggcaccgctttattggagaccagcaccctaaacagcacaggtcccagcaatccttgccaagatgatccctgtgcagataattcgttatgtgttaagctgcataatacaagtttttgcctgtgtttagaagggtattactacaactcttctacatgtaagaaaggaaaggtattccctgggaagatttcagtgacagtatcagaaacatttgacccagaagagaaacattccatggcctatcaagacttgcatagtgaaattactagcttgtttaaagatgtatttggcacatctgtttatggacagactgtaattcttactgtaagcacatctctgtcaccaagatctgaaatgcgtgctgatgacaagtttgttaatgtaacaatagtaacaattttggcagaaaccacaagtgacaatgagaagactgtgactgagaaaattaataaagcaattagaagtagctcaagcaactttctaaactatgatttgacccttcggtgtgattattatggctgtaaccagactgcggatgactgcctcaatggtttagcatgcgattgcaaatctgacctgcaaaggcctaacccacagagccctttctgcgttgcttccagtctcaagtgtcctgatgcctgcaacgcacagcacaagcaatgcttaataaagaagagtggtggggcccctgagtgtgcgtgcgtgcccggctaccaggaagatgctaatgggaactgccaaaagtgtgcatttggctacagtggactcgactgtaaggacaaatttcagctgatcctcactattgtgggcaccatcgctggcattgtcattctcagcatgataattgcattgattgtcacagcaagatcaaataacaaaacgaagcatattgaagaagagaacttgattgacgaagactttcaaaatctaaaactgcggtcgacaggcttcaccaatcttggagcagaagggagcgtctttcctaaggtcaggataacggcctccagagacagccagatgcaaaatccctattcaagacacagcagcatgccccgccctgactattagaatcataagaatgtggaacccgccatggcccccaaccaatgtacaagctattatttagagtgtttagaaagactgatggagaagtgagcaccagtaaagatctggcctccggggtttttcttccatctgacatctgccagcctctctgaatggaagttgtgaatgtttgcaacgaatccagctcacttgctaaataagaatctatgacattaaatgtagtagatgctattagcgcttgtcagagaggtggttttcttcaatcagtacaaagtactgagacaatggttagggttgttttcttaattcttttcctggtagggcaacaagaaccatttccaatctagaggaaagctccccagcattgcttgctcctgggcaaacattgctcttgagttaagtgacctaattcccctgggagacatacgcatcaactgtggaggtccgaggggatgagaagggatacccaccatctttcaagggtcacaagctcactctctgacaagtcagaatagggacactgcttctatccctccaatggagagattctggcaacctttgaacagcccagagcttgcaacctagcctcacccaagaagaactggctgggagaaggtttaaaaacaaaaaatccaggagtaagagccttaggtcagtttgaaattggagacaaactgtctggcaaagggtgcgagagggagcttgtgctcaggagtccagccgtccagcctcggggtgtaggtttctgaggtgtgccattggggcctcagccttctctggtgacagaggctcagctgtggccaccaacacacaaccacacacacacaaccacacacacaaatgggggcaaccacatccagtacaagcttttacaaatgttattagtgtccttttttatttctaatgccttgtcctcttaaaagttattttatttgttattattatttgttcttgactgttaattgtgaatggtaatgcaataaagtgcctttgttagatggtgaacttgtg

SEQ ID NO: 70590 - DNA, 1341 bp, Homo sapiens
gttgcagaaaggatgccccgccctgactatagaatcataagaatgtggaacccgccatggcccccaaccaatgtacaagctattatttagagtgtttagaaagactgatggagaagtgagcaccagtaaagatctggcctccggggtttttcttccatctgacatctgccagcctctctgaatggaagttgtgaatgtttgcaacgaatccagctcacttgctaaataagaatctatgacattaaatgtagtagatgctattagcgcttgtcagagaggtggttttcttcaatcagtacaaagtactgagacaatggttagggttgttttcttaattcttttcctggtagggcaacaagaaccatttccaatctagaggaaagctccccagcattgcttgctcctgggcaaacattgctcttgagttaagtgacctaattcccctgggagacatacgcatcaactgtggaggtccgaggggatgagaagggatacccaccatctttcaagggtcacaagctcactctctgacaagtcagaatagggacactgcttctatccctccaatggagagattctggcaacctttgaacagcccagagcttgcaacctagcctcacccaagaagactggaaagagacatatctctcagctttttcaggaggcgtgcctgggaatccaggaactttttgatgctaattagaaggcctggactaaaaatgtccactatggggtgcactctacagtttttgaaatgctaggaggcagaaggggcagagagtaaaaaacatgacctggtagaaggaagagaggcaaaggaaactgggtggggaggatcaattagagaggaggcacctgggatccaccttcttccttaggtcccctcctccatcagcaaaggagcacttctctaatcatgccctcccgaagactggctgggagaaggtttaaaaacaaaaaatccaggagtaagagccttaggtcagtttgaaattggagacaaactgtctggcaaagggtgcgagagggagcttgtgctcaggagtccagccgtccagcctcggggtgtaggtttctgaggtgtgccattggggcctcagccttctctggtgacagaggctcagctgtggccaccaacacacaaccacacacacacaaccacacacacaaatgggggcaaccacatccagtacaagcttttacaaatgttattagtgtccttttttatttctaatgccttgtcctcttaaaagttattttatttgttattattatttgttcttgactgttaattgtgaatggtaatgcaataaagtgcctttgttagatggtgaacttgtg

SEQ ID NO: 70591 - DNA, 2337 bp, Homo sapiens
ccacgcgtccgagcaagaacagctaaaatgaaagccatcattcatcttactcttcttgctctcctttctgtaaacacagccaccaaccaaggcaactcagctgatgctgtaacaaccacagaaactgcgactagtggtcctacagtagctgcagctgataccactgaaactaatttccctgaaactgctagcaccacagcaaatacaccttctttcccaacagctacttcacctgctccccccataattagtacacatagttcctccacaattcctacacctgctccccccataattagtacacatagttcctccacaattcctatacctactgctgcagacagtgagtcaaccacaaatgtaaattcattagctacctctgacataatcaccgcttcatctccaaatgatggattaatcacaatggttccttctgaaacacaaagtaacaatgaaatgtcccccaccacagaagacaatcaatcatcagggcctcccactggcaccgctttattggagaccagcaccctaaacagcacaggtcccagcaatccttgccaagatgatccctgtgcagataattcgttatgtgttaagctgcataatacaagtttttgcctgtgtttagaagggtattactacaactcttctacatgtaagaaaggaaaggtattccctgggaagatttcagtgacagtatcagaaacatttgacccagaagagaaacattccatggcctatcaagacttgcatagtgaaattactagcttgtttaaagatgtatttggcacatctgtttatggacagactgtaattcttactgtaagcacatctctgtcaccaagatctgaaatgcgtgctgatgacaagtttgttaatgtaacaatagtaacaattttggcagaaaccacaagtgacaatgagaagactgtgactgagaaaattaataaagcaattagaagtagctcaagcaactttctaaactatgatttgacccttcggtgtgattattatggctgtaaccagactgcggatgactgcctcaatggtttagcatgcgattgcaaatctgacctgcaaaggcctaacccacagagccctttctgcgttgcttccagtctcaagtgtcctgatgcctgcaacgcacagcacaagcaatgcttaataaagaagagtggtggggcccctgagtgtgcgtgcgtgcccggctaccaggaagatgctaatgggaactgccaaaagtgtgcatttggctacagtggactcgactgtaaggacaaatttcagctgatcctcactattgtgggcaccatcgctggcattgtcattctcagcatgataattgcattgattgtcacagcaagatcaaataacaaaacgaagcatattgaagaagagaacttgattgacgaagactttcaaaatctaaaactgcggtcgacaggcttcaccaatcttggagcagaagggagcgtctttcctaaggtcaggataacggcctccagagacagccagatgcaaaatccctattcaagacacagcagcatgccccgccctgactattagaatcataagaatgtggaacccgccatggcccccaaccaatgtacaagctattatttagagtgtttagaaagactgatggagaagtgagcaccagtaaagatctggcctccggggtttttcttccatctgacatctgccagcctctctgaatggaagttgtgaatgtttgcaacgaatccagctcacttgctaaataagaatctatgacattaaatgtagtagatgctattagcgcttgtcagagaggtggttttcttcaatcagtacaaagtactgagacaatggttagggttgttttcttaattcttttcctggtagggcaacaagaaccatttccaatctagaggaaagctccccagcattgcttgctcctgggcaaacattgctcttgagttaagtgacctaattcccctgggagacatacgcatcaactgtggaggtccgaggggatgagaagggatacccaccatctttcaagggtcacaagctcactctctgacaagtcagaatagggacactgcttctatccctccaatggagagattctggcaacctttgaacagcccagagcttgcaacctagcctcacccaagaagactggaaagagacatatctctcagctttttcaggaggcgtgcctgggaatccaggaactttttgatgctaattagaaggcctggactaaaaatgtccactatggggtgcactctacagtttttgaaatgctaggaggcagaaggggcagagcagggggatcctgctagagtcgtc

SEQ ID NO: 70592 - DNA, 822 bp, Homo sapiens
  misc_feature (22)..(22): n is a, c, g, or t
cgagctcggtaccccggatganggcggacactgcttctatccctccaatggagagattctggcaacctttgaacagcccagagcttgcaacctagcctcacccaagaagactggaaagagacatatctctcagctttttcaggaggcgtgcctgggaatccaggaactttttgatgctaattagaaggcctggactaaaaatgtccactatggggtgcactctacagtttttgaaatgctaggaggcagaaggggcagagagtaaaaaacatgacctggtagaaggaagagaggcaaaggaaactgggtggggaggatcaattagagaggaggcacctgggatccaccttcttccttaggtcccctcctccatcagcaaaggagcacttctctaatcatgccctcccgaagactggctgggagaaggtttaaaaacaaaaaatccaggagtaagagccttaggtcagtttgaaattggagacaaactgtctggcaaagggtgcgagagggagcttgtgctcaggagtccagccgtccagcctcggggtgtaggtttctgaggtgtgccattggggcctcagccttctctggtgacagaggctcagctgtggccaccaacacacaaccacacacacacaaccacacacacaaatgggggcaaccacatccagtacaagcttttacaaatgttattagtgtccttttttatttctaatgccttgtcctcttaaaagttattttatttgttattattatttgttcttgactgttaattgtgaatggtaatgcaataaagtgcctttgttagatggtgaacttgtg

SEQ ID NO: 70593 - DNA, 790 bp, Homo sapiens
tgaggccaacgaggcaaaagtttcaaaggttgtcctgtatggggtgttttgtgcgtcttgaataaaataatgaagtgctttatttcattatttgtggggcatcaagtctgcaacttattctttcataaaactgttagtgttctttggttatgcaacttattcttaattggttcagaaatgttaataattagggaatctgggtgataagtgtgtgagaacgccgtaatatatgtattttgtaacttacaaataaatgtgagattatttcagaatttaaaaatatttttaaaaagaacattaacatttacttcaagaaactttctgccattgtcaaatcctaattcctcttactgattacagatcaaataacaaaacgaagcatattgaagaagagaacttgattgacgaagactttcaaaatctaaaactgcggtcgacaggcttcaccaatcttggagcagaagggagcgtctttcctaaggtcaggataacggcctccagagacagccagatgcaaaatccctattcaagacacagcagcatgccccgccctgactattagaatcataagaatgtggaacccgccatggcccccaaccaatgtacaagctattatttagagtgtttagaaagactgatggagaagtgagcaccagtaaagatctggcctccggggtttttcttccatctgacatctgccagcctctctgaatggaagttgtgaatgtttgcaacgaatccagctcacttgctaaataagaatctatgacattaaatgtagtagatgcta

SEQ ID NO: 70594 - DNA, 721 bp, Homo sapiens
  misc_feature (665)..(665): n is a, c, g, or t
tgaggccaacgaggcaaaagtttcaaaggttgtcctgtatggggtgttttgtgcgtcttgaataaaataatgaagtgctttatttcattatttgtggggcatcaagtctgcaacttattctttcataaaactgttagtgttctttggttatgcaacttattcttaattggttcagaaatgttaataattagggaatctgggtgataagtgtgtgagaacgccgtaatatatgtattttgtaacttacaaataaatgtgagattatttcagaatttaaaaatatttttaaaaagaacattaacatttacttcaagaaactttctgccattgtcaaatcctaattcctcttactgattacagatcaaataacaaaacgaagcatattgaagaagagaacttgattgacgaagactttcaaaatctaaaactgcggtcgacaggcttcaccaatcttggagcagaagggagcgtctttcctaaggtcaggataacggcctccagagacagccagatgcaaaatccctattcaagacacagcagcatgccccgccctgactattaggtgagtcagtgggctttttctcctgcttttgggagtgaatgcaccagggcagagcagagacctggttgctgaatcttcaatccttggctgccccgcaggcttnttgtttttaataaattttattatgttatatgatattttaataattaaaattatata

SEQ ID NO: 70595 - DNA, 1319 bp, Homo sapiens
ccacgcgtccgagcaagaacagctaaaatgaaagccatcattcatcttactcttcttgctctcctttctgtaaacacagccaccaaccaaggcaactcagctgatgctgtaacaaccacagaaactgcgactagtggtcctacagtagctgcagctgataccactgaaactaatttccctgaaactgctagcaccacagcaaatacaccttctttcccaacagctacttcacctgctccccccataattagtacacatagttcctccacaattcctacacctgctccccccataattagtacacatagttcctccacaattcctatacctactgctgcagacagtgagtcaaccacaaatgtaaattcattagctacctctgacataatcaccgcttcatctccaaatgatggattaatcacaatggttccttctgaaacacaaagtaacaatgaaatgtcccccaccacagaagacaatcaatcatcagggcctcccactggcaccgctttattggagaccagcaccctaaacagcacaggtcccagcaatccttgccaagatgatccctgtgcagataattcgttatgtgttaagctgcataatacaagtttttgcctgtgtttagaagggtattactacaactcttctacatgtaagaaaggaaaggtattccctgggaagatttcagtgacagtatcagaaacatttgacccagaagagaaacattccatggcctatcaagacttgcatagtgaaattactagcttgtttaaagatgtatttggcacatctgtttatggacagactgtaattcttactgtaagcacatctctgtcaccaagatctgaaatgcgtgctgatgacaagtttgttaatgtaacaatagtaacaattttggcagaaaccacaagtgacaatgagaagactgtgactgagaaaattaataaagcaattagaagtagctcaagcaactttctaaactatgatttgacccttcggtgtgattattatggctgtaaccagactgcggatgactgcctcaatggtttagcatgcgattgcaaatctgacctgcaaaggcctaacccacagagccctttctgcgttggcgttggtaagtgtttcacctgcttctaaatgttcttcataacatcactttctcttcttttgcaacataaaaaattcactcctttagtttccacatgcatttcagagtccgagtgatctgacttctgactttagacatatggaccatggctgggacctttgctagcccatgtccagcttcacagggggcacatcatgtgtggagtcaa

SEQ ID NO: 70596 - DNA, 1358 bp, Homo sapiens
ccacgcgtccgagcaagaacagctaaaatgaaagccatcattcatcttactcttcttgctctcctttctgtaaacacagccaccaaccaaggcaactcagctgatgctgtaacaaccacagaaactgcgactagtggtcctacagtagctgcagctgataccactgaaactaatttccctgaaactgctagcaccacagcaaatacaccttctttcccaacagctacttcacctgctccccccataattagtacacatagttcctccacaattcctacacctgctccccccataattagtacacatagttcctccacaattcctatacctactgctgcagacagtgagtcaaccacaaatgtaaattcattagctacctctgacataatcaccgcttcatctccaaatgatggattaatcacaatggttccttctgaaacacaaagtaacaatgaaatgtcccccaccacagaagacaatcaatcatcagggcctcccactggcaccgctttattggagaccagcaccctaaacagcacaggtcccagcaatccttgccaagatgatccctgtgcagataattcgttatgtgttaagctgcataatacaagtttttgcctgtgtttagaagggtattactacaactcttctacatgtaagaaaggaaaggtattccctgggaagatttcagtgacagtatcagaaacatttgacccagaagagaaacattccatggcctatcaagacttgcatagtgaaattactagcttgtttaaagatgtatttggcacatctgtttatggacagactgtaattcttactgtaagcacatctctgtcaccaagatctgaaatgcgtgctgatgacaagtttgttaatgtaacaatagtaacaattttggcagaaaccacaagtgacaatgagaagactgtgactgagaaaattaataaagcaattagaagtagctcaagcaactttctaaactatgatttgacccttcggtgtgattattatggctgtaaccagactgcggatgactgcctcaatggtttagcatgcgattgcaaatctgacctgcaaaggcctaacccacagagccctttctgcgttgcacaagcaatgcttaataaagaagagtggtggggcccctgagtgtgcgtgcgtgcccggctaccaggaagatgctaatgggaactgccaaaagtgtgcatttggctacagtggactcgactgtaaggacaaatttcagctgatcctcactattgtgggcaccatcgctggcattgtcattctcagcatgataattgcattgtgaatggtaatgcaataaagtgcctttgttagatggtgaacttgtg

SEQ ID NO: 70597 - DNA, 839 bp, Homo sapiens
gcggccgctcgcgattggaaccaactcttctacatgtaagaaaggaaaggtattccctgggaagatttcagtgacagtatcagaaacatttgacccagaagagaaacattccatggcctatcaagacttgcatagtgaaattactagcttggtaagtattttccaactttcctttctgtaaagcattctttgttctaacactgagttgcagagtgtagagctggtcttcaggtggttcacgctcgtaccatcgtaccagttgttcaaacagtgaaatgtacctttactggtcggtaaacagcagctgtcctgagcgcctccaccggtgccaccacttcttcattgcccaggcctctcccctgggacccttggaccaccccatggtcttgcacctggaggcgtggcacctggcctggcatggcagagggcctgcagaagctggctccagccataccatacccattgttttataagctattaacacagttttaaatggacagataaatatcatgaagttttaaaataaattatttccacagaatgaaagagaaaaaatttaaagatgttgtttttcttttttatattcaaatttgcataaattttcatactagtctggcttttaaaaaaatgtctagaagaagaattacatctgaatatctgttacttatttttcccattttcaaaaatgttggcatgaacaatagtttcccatcatttagattattgtgagcaagtgcacacatgtgagcaagcatgaaaggaaagggtctttccattctgcagccacagatgttagctctggaaggaccctcagagcatgtccagccaatacagctcaa

SEQ ID NO: 70598 - DNA, 562 bp, Homo sapiens
tccagaagggatgcaccagaactcccttgcaaccattagagtagagttaggaaaatagagacaacttactttcttcaaggtcctcttagcagcctttgtgggggcagtcccagctcagaccctaagaagtctcccagggtccattttctacccagttggatcctgttaaaagctagatagagcattatttttttctgcctcatttgatttgtagaaaatgtgaaaaaaaaattttttttacttgttattaaatctgttttcctccacagtttaaagatgtatttggcacatctgtttatggacagactgtaattcttactgtaaggtaagtttgttatggacaattttggaggcagatgtgtgtctgtctaacttccgagcttctcttgaggtctgcatgtaacattaaggccctctgtggcaagtcacaagttaagaggagagggtcagtctcagtctgagcactgcaaaggggactgtgtgccttggccctgcctctgatgtcaccccaactctgggcagggcatggcctggggaaggcaaaattctgtctgtgattggc

SEQ ID NO: 70599 - DNA, 2255 bp, Homo sapiens
gcggccgctcgcgattggaaccaactcttctacatgtaagaaaggaaaggtattccctgggaagatttcagtgacagtatcagaaacatttgacccagaagagaaacattccatggcctatcaagacttgcatagtgaaattactagcttgtttaaagatgtatttggcacatctgtttatggacagactgtaattcttactgtaagcacatctctgtcaccaagatctgaaatgcgtgctgatgacaagtttgttaatgtaacaatagtaacaattttggcagaaaccacaagtgacaatgagaagactgtgactgagaaaattaataaagcaattagaagtagctcaagcaactttctaaactatgatttgacccttcggtgtgattattatggctgtaaccagactgcggatgactgcctcaatggtttagcatgcgattgcaaatctgacctgcaaaggcctaacccacagagccctttctgcgttgcttccagtctcaagtgtcctgatgcctgcaacgcacagcacaagcaatgcttaataaagaagagtggtggggcccctgagtgtgcgtgcgtgcccggctaccaggaagatgctaatgggaactgccaaaagtgtgcatttggctacagtggactcgactgtaaggacaaatttcagctgatcctcactattgtgggcaccatcgctggcattgtcattctcagcatgataattgcattgattgtcacagcaagatcaaataacaaaacgaagcatattgaagaagagaacttgattgacgaagactttcaaaatctaaaactgcggtcgacaggcttcaccaatcttggagcagaagggagcgtctttcctaaggtcaggataacggcctccagagacagccagatgcaaaatccctattcaagacacagcagcatgccccgccctgactattagaatcataagaatgtggaacccgccatggcccccaaccaatgtacaagctattatttagagtgtttagaaagactgatggagaagtgagcaccagtaaagatctggcctccggggtttttcttccatctgacatctgccagcctctctgaatggaagttgtgaatgtttgcaacgaatccagctcacttgctaaataagaatctatgacattaaatgtagtagatgctattagcgcttgtcagagaggtggttttcttcaatcagtacaaagtactgagacaatggttagggttgttttcttaattcttttcctggtagggcaacaagaaccatttccaatctagaggaaagctccccagcattgcttgctcctgggcaaacattgctcttgagttaagtgacctaattcccctgggagacatacgcatcaactgtggaggtccgaggggatgagaagggatacccaccatctttcaagggtcacaagctcactctctgacaagtcagaatagggacactgcttctatccctccaatggagagattctggcaacctttgaacagcccagagcttgcaacctagcctcacccaagaagactggaaagagacatatctctcagctttttcaggaggcgtgcctgggaatccaggaactttttgatgctaattagaaggcctggactaaaaatgtccactatggggtgcactctacagtttttgaaatgctaggaggcagaaggggcagagagtaaaaaacatgacctggtagaaggaagagaggcaaaggaaactgggtggggaggatcaattagagaggaggcacctgggatccaccttcttccttaggtcccctcctccatcagcaaaggagcacttctctaatcatgccctcccgaagactggctgggagaaggtttaaaaacaaaaaatccaggagtaagagccttaggtcagtttgaaattggagacaaactgtctggcaaagggtgcgagagggagcttgtgctcaggagtccagccgtccagcctcggggtgtaggtttctgaggtgtgccattggggcctcagccttctctggtgacagaggctcagctgtggccaccaacacacaaccacacacacacaaccacacacacaaatgggggcaaccacatccagtacaagcttttacaaatgttattagtgtccttttttatttctaatgccttgtcctcttaaaagttattttatttgttattattatttgttcttgactgttaattgtgaatggtaatgcaataaagtgcctttgttagatggtgaacttgtg

SEQ ID NO: 70600 - DNA, 1701 bp, Homo sapiens
tgggaactctgacatgctccccacaggggctctttaacactgtttcctattgctcactgtatttcaggtgtgcatttggctacagtggactcgactgtaaggacaaatttcagctgatcctcactattgtgggcaccatcgctggcattgtcattctcagcatgataattgcattgattgtcacagcaagatcaaataacaaaacgaagcatattgaagaagagaacttgattgacgaagactttcaaaatctaaaactgcggtcgacaggcttcaccaatcttggagcagaagggagcgtctttcctaaggtcaggataacggcctccagagacagccagatgcaaaatccctattcaagacacagcagcatgccccgccctgactattagaatcataagaatgtggaacccgccatggcccccaaccaatgtacaagctattatttagagtgtttagaaagactgatggagaagtgagcaccagtaaagatctggcctccggggtttttcttccatctgacatctgccagcctctctgaatggaagttgtgaatgtttgcaacgaatccagctcacttgctaaataagaatctatgacattaaatgtagtagatgctattagcgcttgtcagagaggtggttttcttcaatcagtacaaagtactgagacaatggttagggttgttttcttaattcttttcctggtagggcaacaagaaccatttccaatctagaggaaagctccccagcattgcttgctcctgggcaaacattgctcttgagttaagtgacctaattcccctgggagacatacgcatcaactgtggaggtccgaggggatgagaagggatacccaccatctttcaagggtcacaagctcactctctgacaagtcagaatagggacactgcttctatccctccaatggagagattctggcaacctttgaacagcccagagcttgcaacctagcctcacccaagaagactggaaagagacatatctctcagctttttcaggaggcgtgcctgggaatccaggaactttttgatgctaattagaaggcctggactaaaaatgtccactatggggtgcactctacagtttttgaaatgctaggaggcagaaggggcagagagtaaaaaacatgacctggtagaaggaagagaggcaaaggaaactgggtggggaggatcaattagagaggaggcacctgggatccaccttcttccttaggtcccctcctccatcagcaaaggagcacttctctaatcatgccctcccgaagactggctgggagaaggtttaaaaacaaaaaatccaggagtaagagccttaggtcagtttgaaattggagacaaactgtctggcaaagggtgcgagagggagcttgtgctcaggagtccagccgtccagcctcggggtgtaggtttctgaggtgtgccattggggcctcagccttctctggtgacagaggctcagctgtggccaccaacacacaaccacacacacacaaccacacacacaaatgggggcaaccacatccagtacaagcttttacaaatgttattagtgtccttttttatttctaatgccttgtcctcttaaaagttattttatttgttattattatttgttcttgactgttaattgtgaatggtaatgcaataaagtgcctttgttagatggtgaacttgtg

SEQ ID NO: 70601 - DNA, 1794 bp, Homo sapiens
ccacgcgtccgagcaagaacagctaaaatgaaagccatcattcatcttactcttcttgctctcctttctgtaaacacagccaccaaccaaggcaactcagctgatgctgtaacaaccacagaaactgcgactagtggtcctacagtagctgcagctgataccactgaaactaatttccctgaaactgctagcaccacagcaaatacaccttctttcccaacagctacttcacctgctccccccataattagtacacatagttcctccacaattcctacacctgctccccccataattagtacacatagttcctccacaattcctatacctactgctgcagacagtgagtcaaccacaaatgtaaattcattagctacctctgacataatcaccgcttcatctccaaatgatggattaatcacaatggttccttctgaaacacaaagtaacaatgaaatgtcccccaccacagaagacaatcaatcatcagggcctcccactggcaccgctttattggagaccagcaccctaaacagcacaggtcccagcaatccttgccaagatgatccctgtgcagataattcgttatgtgttaagctgcataatacaagtttttgcctgtgtttagaagggtattactacaactcttctacatgtaagaaaggaaaggtattccctgggaagatttcagtgacagtatcagaaacatttgacccagaagagaaacattccatggcctatcaagacttgcatagtgaaattactagcttgtttaaagatgtatttggcacatctgtttatggacagactgtaattcttactgtaagcacatctctgtcaccaagatctgaaatgcgtgctgatgacaagtttgttaatgtaacaatagtaacaattttggcagaaaccacaagtgacaatgagaagactgtgactgagaaaattaataaagcaattagaagtagctcaagcaactttctaaactatgatttgacccttcggtgtgattattatggctgtaaccagactgcggatgactgcctcaatggtttagcatgcgattgcaaatctgacctgcaaaggcctaacccacagagccctttctgcgttgcttccagtctcaagtgtcctgatgcctgcaacgcacagcacaagcaatgcttaataaagaagagtggtggggcccctgagtgtgcgtgcgtgcccggctaccaggaagatgctaatgggaactgccaaaagtgtgcatttggctacagtggactcgactgtaaggacaaatttcagctgatcctcactattgtgggcaccatcgctggcattgtcattctcagcatgataattgcattgattgtcacagcaagatcaaataacaaaacgaagcatattgaagaagagaacttgattgacgaagactttcaaaatctaaaactgcggtcgacaggcttcaccaatcttggagcagaagggagcgtctttcctaaggtcaggataacggcctccagagacagccagatgcaaaatccctattcaagacacagcagcatgccccgccctgactattagaatcataagaatgtggaacccgccatggcccccaaccaatgtacaagctattatttagagtgtttagaaagactgatggagaagtgagcaccagtaaagatctggcctccggggtttttcttccatctgacatctgccagcctctctgaatggaagttgtgaatgtttgcaacgaatccagctcacttgctaaataagaatctatgacattaaatgtagtagatgcta

SEQ ID NO: 70602 - DNA, 351 bp, Homo sapiens
actgtcggtggcagactcccggctgaagcttcgcaccagcatcctcatcaatgccctgggcagcaacacctgcctggccaaggtggatctgagcggcaatggcatggaggacatcggggccaagatgctgtctaaggccctgcagataaactcctccctcagaactatcctatgggatcggaacaatacatctgccctgggcttcctggacatcgcaagggccctggagagcaaccacacgctgcgcttcatgtccttccccgtgagcgacatctcccaagcctatcgcagcgcgcctgagcgcaccgaggacgtctggcagaagatccaatggtgcttagtgaggaacaa

SEQ ID NO: 70603 - DNA, 1004 bp, Homo sapiens
tctttcccttcctgtaagtgtcgctagttgctgcctcgtatctcaggtttttctctgtttttgagaaatggacagttttttgaccaggatgtgacttcatgtttcctatggtgacttctaaaaccagcacagaatgatatgactcaacacagaccgacttggttatggggatgatgagccgcacagacctcactagttgtgcacaaataatgtgctatgatggggtgtaaagtgaaggcagaagagggtcagccgcattgttatgatactgggaaagtgctggtcaacgatttgagttagtttttagatatacattgaaatctttaatcagacattctcaagtttcacacagtagtttttgatgttatgtacacacacaccaaatgtgtaacagttcaccacttccagagtgtggtcatgcccaaaacatgtttaagaaaggaaagcagtagctccttgctaacgatgtttcaggaggtttggggcacttggttttaatgagcttctgtcatttagggcttctcttggccatggtccccttccttctggaactgtgatgtagtcacatcctacagcctttagtgctggttcactagtgtcagataatcagttcttggaatcgagactgccgtggcgaaggggtggcctcggaggcaggctctggagctgcttggatgtctttaggtggggtggtggctggctctcttcagcatgtaattggggaaaccctcgcgtctactaggggtgatacagatggtgattttaaagagcaaaactagacttctatgtgagaagtgctggaaaatgatttaggacatgtgtaaagttagatggaaagactgtaaatgtttaatatgaatatagtgttcttttgaagtaaggccagctgttgaacggttaaactgtgcatttctcattttgatgtgtcatgtatgttaatgtatgaaatgattaaataaaatcaaaactggtacctgtttatacataaaacaaaaaaaaaaaaa

SEQ ID NO: 70604 - DNA, 971 bp, Homo sapiens
gcgggtgtgaatcggccgaggctgtttttgagaaatggacagttttttgaccaggatgtgacttcatgtttcctatggtgacttctaaaaccagcacagaatgatatgactcaacacagaccgacttggttatggggatgatgagccgcacagacctcactagttgtgcacaaataatgtgctatgatggggtgtaaagtgaaggcagaagagggtcagccgcattgttatgatactgggaaagtgctggtcaacgatttgagttagtttttagatatacattgaaatctttaatcagacattctcaagtttcacacagtagtttttgatgttatgtacacacacaccaaatgtgtaacagttcaccacttccagagtgtggtcatgcccaaaacatgtttaagaaaggaaagcagtagctccttgctaacgatgtttcaggaggtttggggcacttggttttaatgagcttctgtcatttagggcttctcttggccatggtccccttccttctggaactgtgatgtagtcacatcctacagcctttagtgctggttcactagtgtcagataatcagttcttggaatcgagactgccgtggcgaaggggtggcctcggaggcaggctctggagctgcttggatgtctttaggtggggtggtggctggctctcttcagcatgtaattggggaaaccctcgcgtctactaggggtgatacagatggtgattttaaagagcaaaactagacttctatgtgagaagtgctggaaaatgatttaggacatgtgtaaagttagatggaaagactgtaaatgtttaatatgaatatagtgttcttttgaagtaaggccagctgttgaacggttaaactgtgcatttctcattttgatgtgtcatgtatgttaatgtatgaaatgattaaataaaatcaaaactggtacctgtttatacataaaacaaaaaaaaaaaaa

SEQ ID NO: 70605 - DNA, 850 bp, Homo sapiens
ggtggtctagaggatctccttcccaccagcaagactcactagttgtgcacaaataatgtgctatgatggggtgtaaagtgaaggcagaagagggtcagccgcattgttatgatactgggaaagtgctggtcaacgatttgagttagtttttagatatacattgaaatctttaatcagacattctcaagtttcacacagtagtttttgatgttatgtacacacacaccaaatgtgtaacagttcaccacttccagagtgtggtcatgcccaaaacatgtttaagaaaggaaagcagtagctccttgctaacgatgtttcaggaggtttggggcacttggttttaatgagcttctgtcatttagggcttctcttggccatggtccccttccttctggaactgtgatgtagtcacatcctacagcctttagtgctggttcactagtgtcagataatcagttcttggaatcgagactgccgtggcgaaggggtggcctcggaggcaggctctggagctgcttggatgtctttaggtggggtggtggctggctctcttcagcatgtaattggggaaaccctcgcgtctactaggggtgatacagatggtgattttaaagagcaaaactagacttctatgtgagaagtgctggaaaatgatttaggacatgtgtaaagttagatggaaagactgtaaatgtttaatatgaatatagtgttcttttgaagtaaggccagctgttgaacggttaaactgtgcatttctcattttgatgtgtcatgtatgttaatgtatgaaatgattaaataaaatcaaaactggtacctgtttatacataaaacaaaaaaaaaaaaa

SEQ ID NO: 70606 - DNA, 819 bp, Homo sapiens
tctttcccttcctgtaagtgtcgctagttgctgcctcgtatctcaggtttttctctgtttttgagaaatggacagttttttgaccaggatgtgacttcatgtttcctatggtgacttctaaaaccagcacagaatgatatgactcaacacagaccgacttggttatggggatgatgagccgcacagacctcactagttgtgcacaaataatgtgctatgatggggtgtaaagtgaaggcagaagagggtcagccgcattgttatgatactgggaaagtgctggtcaacgatttgagttagtttttagatatacattgaaatctttaatcagacattctcttggccatggtccccttccttctggaactgtgatgtagtcacatcctacagcctttagtgctggttcactagtgtcagataatcagttcttggaatcgagactgccgtggcgaaggggtggcctcggaggcaggctctggagctgcttggatgtctttaggtggggtggtggctggctctcttcagcatgtaattggggaaaccctcgcgtctactaggggtgatacagatggtgattttaaagagcaaaactagacttctatgtgagaagtgctggaaaatgatttaggacatgtgtaaagttagatggaaagactgtaaatgtttaatatgaatatagtgttcttttgaagtaaggccagctgttgaacggttaaactgtgcatttctcattttgatgtgtcatgtatgttaatgtatgaaatgattaaataaaatcaaaactggtacctgtttatacataaaacaaaaaaaaaaaaa

SEQ ID NO: 70607 - DNA, 255 bp, Homo sapiens
gatgaatttgtaagagtggtctataaatttaaaaaattagtcctttgagtataatacctcaaaactttatgccagtttgttgtttcaccattgcctttgtttattgtggttttctcagcaggatgttttcacctttacataactgagtttatcaatatttttcttatagcttctggattttatattatgcttcccactctaatgataaaacacacttttctatccaagtgaaattaattttgatataaagactaa

SEQ ID NO: 70608 - DNA, 393 bp, Homo sapiens
ggatttatctgcctattccagacgttcatgtgaaggacaatctgtgggcctttgtgtctgatacggcagagctttgtgctgttgcggcgcacccatgctgcggcagagcttggtgccgtggaggcgcacccttgctgcagcaggcatcagagcacagccctccctgtggcagggtcatgcgggtcatgcacccatcagctgatggacacctgaatggtctctgtttggccctttgcagcgctgctgtgaacacagacctgcgagtgtcgtggagacgtgtgggcatttctcgggcgtacctaggtgtaggtcgctgcactgccttttgtttggagaccagccctttgaagattattgtttcatattctctcttgggaaaacttcttgggtttg

SEQ ID NO: 70609 - DNA, 516 bp, Homo sapiens
ggggacaggaagcagttttcaggcagagaactgaaggagagacaggccaaagaaaggagaagcaaatgaatgcagtagctcagaggagtgccaaaaaggaggtggggaagagaggaaacctccaagagaacacgggctgaaactgaaggcagtctgagttagggatacatcatttaagtgaatagcagaaatgggagacctgcagagtcagagaagggggaggaggctgcttcccgggaaggcagagtcagaagcaagcaggtgaggggagcgcagcaagatctgaggtcgggcaaggggcagagctgagaggcagaaaggtctggaagagaggaaagggtctgaatggtaaacgggaacaagagctgagaaggggaacaggcaagcacggtgcagccaagtccgaggggatcaggggaatgagctggggcacggaagggtcagaaagccagccgaggggcatcccggggtgcagcaggctctgcgagagggcagacaagaaatgcgggtagtagg

SEQ ID NO: 70610 - DNA, 440 bp, Homo sapiens
ctgggagctgtaagtcaaggaggatggagtggagacactgaggtttaggaagaagaaaacacactttgtgtctcctgctcccgatgataataaaatggtaaaagcacatctgtcttgaagacttgaagcacatcaagtcttacttgaaacagtaaaaaaaatggtttccctattcctaaaatacgttccttaatgtctaaatttcctttaatcagggacaaatgtttgatttcataattgaagataggaaactttaaaaagatcattagttaagggaaagaacacaactgtaaaatgtcataatcaaagtgtaagtgagacaccctaccaccatcacactatacacaaaattaatttgaaatgacctaaagtcgtgtaaaagccaacactattaaaacttttaaaagaaaatgggaaaaaattatgaccttgacataggc

SEQ ID NO: 70611 - DNA, 350 bp, Homo sapiens
aaaattcttaatttgcccaccggcctcagggggatctgacttatatctgtctctgcagcctcatctcacaccagacaccccctcactgtgaggatgtcagtcaggttgtctcctacctctgggcctttgcacaggccactctccctgactgtgctaacagctgaaaggaaagattcccataccctgcagacgaggtcaggacctggtattgtgcattcacagagcctggcacattcctccattgctaatggtgggtttacttgtgcagattatttgactggtgcttctctctggcactagactgtaacctgagttggggcaaggctggtgagtggctcaccatagccacc

SEQ ID NO: 70612 - DNA, 417 bp, Homo sapiens
gttggaagagggttttggatatattggataataggtttccttacataagcatgcatgaagtattttattaatgttcagtcatcttgtgtgggcctcactttttacacagccttgtgtgaggcatgatgtccctgttgaacatcagctggacatcacccaagggtcaggtggagacagttggagaccacagcaatagggctttgcattgtggaggggacaagaccgtataatctttgaatcttggggtttaccattagatacgctgatatgtaagactgaaagagacctgagcccctgtgcctggcttctgagaaagtattgggaatgcagcagaacatgacagctaagtgcccagactttgcagctggactgggtttgagttctggatatactcttttctggttggacaacttttta

SEQ ID NO: 70613 - DNA, 449 bp, Homo sapiens
atatccactcctgctctccctcctgcaggtgaccccagccatgaggaccatcgccatccttgctgccattctcctggtggccctgcaggcccaggctgagtcactccaggaaagagctgatgaggctacaacccagaagcagtctggggaagacaaccaggaccttgctatctcctttgcaggaaatggactctctgctcttagaacctcaggttctcaggcaagagccacctgctattgccgaaccggccgttgtgctacccgtgagtccctctccggggtgtgtgaaatcagtggccgcctctacagactctgctgtcgctgagcttcctagatagaaaccaaagcagtgcaagattcagttcaaggtcctgaaaaaagaaaaacattttactctgtgtaccttgtgtctttctaaatttctctctccaaaataaagttcaagcatt

SEQ ID NO: 70614 - DNA, 431 bp, Homo sapiens
tgttctgttttctctttttgtaaactttcactgcagcattatgttgatttgtgttctgtgtctgttttggctcaatttccttacctttccgtttgaatttttttctttgttttcttcaccccatattccaaatgtcattagaccaaaccaacatttgttttgcaaagtgcatattttgacccacacgtgtaaaagccttgttgtgagtgtatgagcctgtatctgtctgctgtgagacacgcatggccaggacagcccgctgtgggtcgcatgcctcgccgctgtccttaatatgaagcaaggttcatattacgccccttctagttcccagttaattaacggctcaagtaatctgcaaacacgtcgtgtttgctaattactgaaactcgaacttagtagcccctcccccagatttcctgtcaaccccttta

SEQ ID NO: 70615 - DNA, 214 bp, Homo sapiens
gtcaggtttattgatgtgtaatttacatctagtaaaattggcacttttatgcgtgtagttctatgaattttaacaaaggcatacagttgtgtaactgtcacctatcaactaaaatattatttgtacttcttaaaaagacttgttggaatcagtaatttatatatgtcagagtcagtgtaaggagttgctcaaatttggaaaaattacaaaaaat

SEQ ID NO: 70616 - DNA, 464 bp, Homo sapiens
tctttttttttttctggagacagaatctggatctgtcacccaggctggagtgcagtggcgcaatcttggcttactgcaacctccgccgcctggggttcaagcgattctcccacctcattctcccgagtagctgagattacaggtgcgtgctaccacgctcgctattttttgtatttttagtagagacagggattcactatgttggccaggctggtcttgaagtcttgacctcagatgatccacctgcctcagcctctcaaagtgctggaattacaggcgtgagccaccgcgccctgcccagtttctgccaatgattatatacttgatatataaacatccttaaatataaaatgttccgtatgattgcacataaaaaatttgttcagcaacgacaatttgtcaacatattaatgtaataaatagtttgaactggaatcacctataaaaaatgataaatcctggaa

SEQ ID NO: 70617 - DNA, 290 bp, Homo sapiens
gttttttcttcctattctcaagttatcaaactcctactcctgctgctgcagtcacttcagatgtcatctctttccctaaggctccttggcaagatggaaggggctccttctgtttgtccccctactgccattcatagctgatgagagggtgctgccttgtgtccacacctctgatttaacactcctcagaatgtgcgacctgtttccctttgagctactctaagccatatgtctcatgcctctgtctagccccaagggccagcagcacagctgcccaaagtagaagttca

SEQ ID NO: 70618 - DNA, 339 bp, Homo sapiens
caaatatcccacgggatatgcttatactaaaaaatattgttatttatgtaaaattcaaattttactgggcatcctgtttcggtttgtttgttgttttcctaaaacccatctctgaatgattgatctggcatatacactaatctcagcaaggcatagccattaacaacagcacagggctgtggaacaagccgtctggtttctaaccctaaccccaccactttcaggccacagaacactgagcaagtcacttaaccttgctgggcctcagttttctcatctgtaaaatagggataatactgaatccccctagtattttcatttatttatttatttttgaga

SEQ ID NO: 70619 - DNA, 4606 bp, Homo sapiens
  misc_feature (508)..(508): n is a, c, g, or t
  misc_feature (557)..(557): n is a, c, g, or t
  misc_feature (1050)..(1050): n is a, c, g, or t
  misc_feature (1062)..(1062): n is a, c, g, or t
  misc_feature (1132)..(1132): n is a, c, g, or t
  misc_feature (1475)..(1475): n is a, c, g, or t
  misc_feature (2297)..(2298): n is a, c, g, or t
  misc_feature (2412)..(2412): n is a, c, g, or t
  misc_feature (3501)..(3501): n is a, c, g, or t
  misc_feature (4307)..(4307): n is a, c, g, or t
  misc_feature (4354)..(4355): n is a, c, g, or t
gcttgcatgtggagcccactaaggcccgaaggggctggcctgcccaagttcacggctctgccgcaagcttgctgcagatcaccatctcctccattcctggccccaactccccttgcatatggagcaaggaaagatcttttgaatgctgaacgggcctgagacaccttcctgaaggaaagctgtccttggatccaggcattgtgaccttgttacttcatttggccttcatgaccacctgtctagggccttcatcaacctcttttacagatgagccctcttggatgataagtaaatggcagcatttggatgtgaccctggtctctctgagcttagctctggactcccctccctcgtgcccctctcaaacaagcaagaagaaggcaggagagtaagttctaatcctggctgtgccactgactccctatgtggtcacaatgaagtcttttccctctcagcacctctgttgctatacctgcacaacgaggagctttgcttggccaggaagagngcacaataggtacagagtgcagatatttctgggcccatagacaaggaanggtgggaggaggggagcaatggtggaccctcttggttgacaaatctaaacaataatatggagcctgagaaagccaaataccagctccccagcttcctctgcagccaggcatggccatctgactgagttcaaactgatgggacattttgtaaaagtcttatgagaggttctagagatgcttttgctttcttgataaagagccatttgcagctggcacttcccctgtcccctccagtcttgaacatggatgcgatgcctggagctatggcagccatcttgcagctgtgaggctcagagagtcccagagataacatttggaacagtgttgagcccctggaccaatacagcagctgcctagctccaggcttcctgttgagtgaggaaaaacaagcaccatgttttcaatgagtagttctgaatgatacaagcagggctggtagacatccccacagttataccaatttttttgccataaacaatattaccatattttntctatttccccnggatacaggggaccaataacaacacaagaggggccaggggcccagggggaaggaaccagatggggagggntgaggactcacgaagttagaagctggggaaggaggctctgcaatagtggaaacaagcgggagccgtaccgtccagtcttaggggtcccgagagtgggcaagggtgtagccaatggagaaggagctggagaagaccattcatggggggggcaggacaaactggtgggatggaggaaggagactgcaaagactgaggctgcaaagcctccccttcgccctcagtggacccactcccacagcccagctgacctccgatgtaggccacagagaagcccctgcgggtggtgctgcggtctgtgtgcagcagaagcagaagctggttgtggcttgaggtcacgggtggnggcaggtggtgtccacaccaattccccagcaggggtgcctcctcgctggccccatcgaaggccgccagatggtcaaagtcacaggtcttggtcaggctgttgggctcctccaggtccaggtccaggaagaacaccttgacctggtagcccgggggcaggcggatggtccagtggcagcggatgttgttggggtaggagctggggtactgtgggctggagaagttgccccgcatggccatgtatacctcctggcattctcctggatgggggatggggaggtggaaggagcaacagtgaggggagaggagaagtcactctctgcagttacagcttaggcagcaggtgccacagtggtccaaaaaccaccagcaggttgtgggcaccatggctagcacaccagacaattgatcccaactatctgaaagttgggatgcttgatcccaaagcttgttttaaactgcaactagctgaaagctgggacttgcattccagttgacagtccccttcacaggtgtaggccctgttaggaattcaataataatacacaatacctgtcctcagagttacctctgaactccctggcttgacagatgatgtggttcatgcctggcctttccccttttctcactgccccatttggtatgtactatgagcataccaaacactctctgccctccaggcctttgcacatgctgttcctcctgcttggaatgcccttcccttctgcttccgtctaactccttcagggtactgctcaattctcttctccacgaagtcatccatgattcttactgatggatagcacagatcataatggcttgnnctgtctgtttccttataatctctctaactagactgtaaagttcccacgacttcatccattcatttgtacgaaaattgagtacctactatgtgccaggtacaaagataagcccanaagggactcagtcagacaggggagattgacatgcaaaccacacacagaagtgacaaatgttagatcatagtgtaaaaaacttatataaggagttgaaaaaaggattaattctggtaaaacagtaagtcttcgcagaggtgacatgcttatgtcttggcataggccaagggtatgctagagcattccaggcagagagagtgcagaaagctcaaggctgcggggggcagaaaggtgtgacccctgcaagtgtaatggggagacaggagcccagtaggcacaggaggattcagggtggagcgccagcccctcctacctgagaagtagtaggccttgaagccacggcctctgatgttgaagtcggacttgaagaccacctgcagttcgtggcccagagacacgagggtggggggcctggtgctgccacagtagtggtgcccacgggtggggccaggccccccaagcacagccacgtagtcataggtgcactcttcattgccctccacctggaagtccacgaacaccagcttgacgtgggcagggccagcggcccggatcacccagtggcactccatgctgttcgggtagttgttggggtactcaggactggtgaggacccctgacaggccagtcaggacgccgccacacacatctgcaagggagcccacttgagctgacctttctttctccttgtggctcccaatttcctcccttgggaacaagacactccaacatgctgcccccacaggtatctcattagggcctcattaccatccagcaagcacctgctacccaagtagcaagtgtagcacgtgctcaggcccagcacttggcacctatgctgcctgttcaaatcctcagagtagccgcacaaggactgtgctgcagtttctctgattttataattaagaaaagggaggcaaagacaagttcagtagcttacttgagtttgagttcacccaggcagaccttgagataaggatttgagtgcaaggagtttacttgggagatccaggggcccccaggtggggagggagggagaggacagagaaggggaggtgtgttcaagtcagctgctgaccttgggggganctctggggacggggtaaagcacatacttcagagttctgtcaatctaggagcaagggagctgcggcatttatatgccaactccccagagtgcaggcagagggctgctgtgggctgggagtgccctactgagacttcagaaaaaagccctccagcatagaactgtggaggttggcagaagcacatcgacgtggcagggcccagggaatgtggtcagggccctgagagcaggtcacccgactggtaactgggaaagtgggatttgaacccaggaagactaactatggatcctgtgcacttgacccttgtgaccttcactgtccactcctacgaggccagtggggcacagaggctgaggtgcctgagctcaggaatgtgatcaaacctccctaatggatgaggaaaccaagacttagagagaggacctgatgaagtagagcttggtttgacatctgaagacaagtagtctcccatctctgccttttattagctgtgtgactctagggaagtaacccagcctctctgagcctcattggaacattagaaatcataagactgaaccagcttgatccactgggctcagacttgagcacagtctgaaaatatgctgctggaaactctcaggaagccagcttggccagtacaactacacggcaagtgtgggtgaatgctgcgacttgctggaggtcaccagcagggaggacatatgtgggatgtgtttcctgagactccagcatctcgccctatggcacggctgtgtgaccagggctctggatggggcatctaaggacttggcgtcttttcccagngctggcccagccatgtaactttaggaaggccctctcagggactcagnntttgtgaaatgagagggcaggtttagatagcctgtgagatcccttccaacactaacaaccttcgcggagacttcccaactgtgccctggggctccccagcagccccctggagcacctgctggcacctggtgcaaatttcattcttatggtgtatttcaagctctcttttaatgtaatgaaaagatagcacccacagactttaatatctttaacaagatattaaaatttaaatattctacatttaaaaattt

SEQ ID NO: 70620 - DNA, 4540 bp, Homo sapiens
agtgaggccgcggcggaggggacggggctaggccgggtcgccgcctgacgcgacgcgtcctcacgggcgcctacgtcacggcgtcgaggcggaagatggtgcacctccgggccggcggttgctgagctgacccggacggcgagggagcgggagcccgagcccgaccactccggctgccgcggggtgcggcgcagccaccgccatgtcgctgctgcagtcggcgctcgacttcttggcgggtccaggctccctgggcggtgcttccggccgcgaccagagtgacttcgtggggcagacggtggaactgggcgagctgcggctgcgggtgcggcgggtcctggccgaaggagggtttgcatttgtgtatgaagctcaagatgtggggagtggcagagagtatgcattaaagaggctattatccaatgaagaggaaaagaacagagccatcattcaagaagtttgcttcatgaaaaagctttccggccacccgaacattgtccagttttgttctgcagcgtctataggaaaagaggagtcagacacggggcaggctgagttcctcttgctcacagagctctgtaaagggcagctggtggaatttttgaagaaaatggaatctcgaggccccctttcgtgcgacacggttctgaagatcttctaccagacgtgccgcgccgtgcagcacatgcaccggcagaagccgcccatcatccacagggacctcaaggttgagaacttgttgcttagtaaccaagggaccattaagctgtgtgactttggcagtgccacgaccatctcgcactaccctgactacagctggagcgcccagaggcgagccctggtggaggaagagatcacgaggaatacaacaccaatgtatagaacaccagaaatcatagacttgtattccaacttcccgatcggcgagaagcaggatatctgggccctgggctgcatcttgtacctgctgtgcttccggcagcacccttttgaggatggagcgaaacttcgaatagtcaatgggaagtactcgatccccccgcacgacacgcagtacacggtcttccacagcctcatccgcgccatgctgcaggtgaacccggaggagcggctgtccatcgccgaggtggtgcaccagctgcaggagatcgcggccgcccgcaacgtgaaccccaagtctcccatcacagagctcctggagcagaatggaggctacgggagcgccacactgtcccgagggccaccccctcccgtgggccccgctggcagtggctacagtggaggcctggcgctggcggagtacgaccagccgtatggcggcttcctggacattctgcggggtgggacagagcggctcttcaccaacctcaaggacacctcctccaaggtcatccagtccgtcgctaattatgcaaagggtgacctggacatatcttacatcacatccagaattgcagtgatgtcattcccagcagaaggtgtggagtcagcgctcaaaaacaacatcgaagatgtgcggttgttcctggactccaagcacccagggcactatgccgtctacaacctgtccccgaggacctaccggccctccaggttccacaaccgggtctccgagtgtggctgggcagcacggcgggccccacacctgcacaccctgtacaacatctgcaggaacatgcacgcctggctgcggcaggaccacaagaacgtctgcgtcgtgcactgcatggacgggagagccgcgtctgctgtggccgtctgctccttcctgtgcttctgccgtctcttcagcaccgcggaggccgccgtgtacatgttcagcatgaagcgctgcccaccaggcatctggccatcccacaaaaggtacatcgagtacatgtgtgacatggtggcggaggagcccatcacaccccacagcaagcccatcctggtgagggccgtggtcatgacacccgtgccgctgttcagcaagcagaggagcggctgcaggcccttctgcgaggtctacgtgggggacgagcgtgtggccagcacctcccaggagtacgacaagatgcgggactttaagattgaagatggcaaagcggtgattcccctgggcgtcacggtgcaaggagacgtgctcatcgtcatctatcacgcccggtccactctgggcggccggctgcaggccaagatggcatccatgaagatgttccagattcagttccacacggggtttgtgcctcggaacgccaccactgtgaaatttgccaagtatgacctggacgcgtgtgacattcaagaaaaatacccggatttatttcaagtgaacctggaagtggaggtggagcccagggacaggccgagccgggaagccccaccatgggagaactcgagcatgagggggctgaaccccaaaatcctgttttccagccgggaggagcagcaagacattctgtctaagtttgggaagccggagcttccccggcagcctggctccacggctcagtatgatgctggggcagggtccccggaagccgaacccacagactctgactcaccgccaagcagcagcgcggacgccagtcgcttcctgcacacgctggactggcaggaagagaaggaggcagagactggtgcagaaaatgcctcttccaaggagagcgagtctgccctgatggaggacagagacgagagtgaggtgtcagatgaagggggatccccgatctccagcgagggccaggaacccagggccgacccagagccccccggcctggcagcagggctggtgcagcaggacttggtttttgaggtggagacaccggctgtgctgccagagcctgtgccacaggaagacggggtcgacctcctgggcctgcactccgaggtgggcgcagggccagctgtacccccgcaggcctgcaaggccccctccagcaacaccgacctgctcagctgcctccttgggccccctgaggccgcctcccaggggcccccggaggatctgctcagcgaggacccgctgctcctggcaagcccggcccctcccctgagcgtgcagagcaccccaagaggagggccccctgccgctgctgacccctttggcccgcttctgccgtcttcaggcaacaactcccagccctgctccaatcctgatctcttcggcgaatttctcaattcggactctgtgaccgtcccaccatccttcccgtctgcccacagtgctccgcccccatcctgcagcgccgacttcctgcacctgggggatctgccaggagagcccagcaagatgacagcctcgtccagcaacccagacctgctgggaggatgggctgcctggaccgagactgcagcgtcggcagtggcccccacgccagccacagaaggccccctcttctctcctggaggtcagccggccccttgtggctctcaggccagctggaccaagtctcagaacccggacccatttgctgaccttggcgacctcagctccggcctccaaggctcaccagctggattccctcctgggggcttcattcccaaaacggccaccacgcccaaaggcagcagctcctggcagacaagtcggccgccagcccagggcgcctcatggccccctcaggccaagccgccccccaaagcctgcacacagccaaggcctaactatgcctcgaacttcagtgtgatcggggcgcgggaggagcggggggtccgcgcacccagctttgctcaaaagccaaaagtctctgagaacgactttgaagatctgttgtccaatcaaggcttctcctccaggtctgacaagaaagggccaaagaccattgcagagatgaggaagcaggacctggctaaagacacggacccactcaagctgaagctcctggactggattgagggcaaggagcggaacatccgggccctgctgtccacgctgcacacagtgctgtgggacggggagagccgctggacgcccgtgggcatggccgacctggtggctccggagcaagtgaagaagcactatcgccgcgcggtgctggccgtgcaccccgacaaggctgcggggcagccgtacgagcagcacgccaagatgatcttcatggagctgaatgacgcctggtcggagtttgagaaccagggctcccggcccctcttctgaggccgcagtggtggtggctgcgcacacagctccacaggttgggagccgtcgtgggacctgggtccccaccgtgaggaccccgtgggcgacagcaggtgtggccagggtggggctccgagccccgggtcaccgcccgcccagcgttccaggcacatgaagagaaagcattccaaagcctctgattgttgtttcctttttctcctcccgaaggaacagctgattcatgctcctcccgcaattgtcacgtctgtgatttatttggtgtttcgggcgtggcctctggagccccggcacgtggtgggccacgctgctggcgctcatgggccctggtgtttgcaccgcactttgtaatcagtcccgtggttgtctgtacagaattaaactattttccgatgaaaaaaa

SEQ ID NO: 70621 - DNA, 388 bp, Homo sapiens
acgggtgatacggttacgggtacagcagggtcctggccgaaggagggtttgcatttgtgtatgaagctcaagatgtggggagtggcagagagtatgcattaaagaggctattatccaatgaagaggaaaagaacagagccatcattcaagaagtttgcttcatgaaaaagctttccggccacccgaaagcccctgtgcttgcagcagtgtccaccccagtgtctaacagtcctcccgggctgccagccctgactgtcgggcccccaagtggtcacctccccgtgtatgaaaaggccttcagccctgactgcttcctgacactccctccttggcctccctgtggtgccatcccagcatgtgctgattctacagcacggcagaaatgctg

SEQ ID NO: 70622 - DNA, 4605 bp, Homo sapiens
agtgaggccgcggcggaggggacggggctaggccgggtcgccgcctgacgcgacgcgtcctcacgggcgcctacgtcacggcgtcgaggcggaagatggtgcacctccgggccggcggttgctgagctgacccggacggcgagggagcgggagcccgagcccgaccactccggctgccgcggggtgcggcgcagccaccgccatgtcgctgctgcagtcggcgctcgacttcttggcgggtccaggctccctgggcggtgcttccggccgcgaccagagtgacttcgtggggcagacggtggaactgggcgagctgcggctgcgggtgcggcgggtcctggccgaaggagggtttgcatttgtgtatgaagctcaagatgtggggagtggcagagagtatgcattaaagaggctattatccaatgaagaggaaaagaacagagccatcattcaagaagtttgcttcatgaaaaagctttccggccacccgaacattgtccagttttgttctgcagcgtctataggaaaagaggagtcagacacggggcaggctgagttcctcttgctcacagagctctgtaaagggcagctggtggaatttttgaagaaaatggaatctcgaggccccctttcgtgcgacacggttctgaagatcttctaccagacgtgccgcgccgtgcagcacatgcaccggcagaagccgcccatcatccacagggacctcaaggttgagaacttgttgcttagtaaccaagggaccattaagctgtgtgactttggcagtgccacgaccatctcgcactaccctgactacagctggagcgcccagaggcgagccctggtggaggaagagatcacgaggaatacaacaccaatgtatagaacaccagaaatcatagacttgtattccaacttcccgatcggcgagaagcaggatatctgggccctgggctgcatcttgtacctgctgtgcttccggcagcacccttttgaggatggagcgaaacttcgaatagtcaatgggaagtactcgatccccccgcacgacacgcagtacacggtcttccacagcctcatccagggagtggcctctggtggtctgtgacctctgccagtgcagggggtgctgacccgcctggggaaccgtggggccgagcgcgctgtgcttctgctgcaggcgccatgctgcaggtgaacccggaggagcggctgtccatcgccgaggtggtgcaccagctgcaggagatcgcggccgcccgcaacgtgaaccccaagtctcccatcacagagctcctggagcagaatggaggctacgggagcgccacactgtcccgagggccaccccctcccgtgggccccgctggcagtggctacagtggaggcctggcgctggcggagtacgaccagccgtatggcggcttcctggacattctgcggggtgggacagagcggctcttcaccaacctcaaggacacctcctccaaggtcatccagtccgtcgctaattatgcaaagggtgacctggacatatcttacatcacatccagaattgcagtgatgtcattcccagcagaaggtgtggagtcagcgctcaaaaacaacatcgaagatgtgcggttgttcctggactccaagcacccagggcactatgccgtctacaacctgtccccgaggacctaccggccctccaggttccacaaccgggtctccgagtgtggctgggcagcacggcgggccccacacctgcacaccctgtacaacatctgcaggaacatgcacgcctggctgcggcaggaccacaagaacgtctgcgtcgtgcactgcatggacgggagagccgcgtctgctgtggccgtctgctccttcctgtgcttctgccgtctcttcagcaccgcggaggccgccgtgtacatgttcagcatgaagcgctgcccaccaggcatctggccatcccacaaaaggtacatcgagtacatgtgtgacatggtggcggaggagcccatcacaccccacagcaagcccatcctggtgagggccgtggtcatgacacccgtgccgctgttcagcaagcagaggagcggctgcaggcccttctgcgaggtctacgtgggggacgagcgtgtggccagcacctcccaggagtacgacaagatgcgggactttaagattgaagatggcaaagcggtgattcccctgggcgtcacggtgcaaggagacgtgctcatcgtcatctatcacgcccggtccactctgggcggccggctgcaggccaagatggcatccatgaagatgttccagattcagttccacacggggtttgtgcctcggaacgccaccactgtgaaatttgccaagtatgacctggacgcgtgtgacattcaagaaaaatacccggatttatttcaagtgaacctggaagtggaggtggagcccagggacaggccgagccgggaagccccaccatgggagaactcgagcatgagggggctgaaccccaaaatcctgttttccagccgggaggagcagcaagacattctgtctaagtttgggaagccggagcttccccggcagcctggctccacggctcagtatgatgctggggcagggtccccggaagccgaacccacagactctgactcaccgccaagcagcagcgcggacgccagtcgcttcctgcacacgctggactggcaggaagagaaggaggcagagactggtgcagaaaatgcctcttccaaggagagcgagtctgccctgatggaggacagagacgagagtgaggtgtcagatgaagggggatccccgatctccagcgagggccaggaacccagggccgacccagagccccccggcctggcagcagggctggtgcagcaggacttggtttttgaggtggagacaccggctgtgctgccagagcctgtgccacaggaagacggggtcgacctcctgggcctgcactccgaggtgggcgcagggccagctgtacccccgcaggcctgcaaggccccctccagcaacaccgacctgctcagctgcctccttgggccccctgaggccgcctcccaggggcccccggaggatctgctcagcgaggacccgctgctcctggcaagcccggcccctcccctgagcgtgcagagcaccccaagaggagggccccctgccgctggcaacaactcccagccctgctccaatcctgatctcttcggcgaatttctcaattcggactctgtgaccgtcccaccatccttcccgtctgcccacagtgctccgcccccatcctgcagcgccgacttcctgcacctgggggatctgccaggagagcccagcaagatgacagcctcgtccagcaacccagacctgctgggaggatgggctgcctggaccgagactgcagcgtcggcagtggcccccacgccagccacagaaggccccctcttctctcctggaggtcagccggccccttgtggctctcaggccagctggaccaagtctcagaacccggacccatttgctgaccttggcgacctcagctccggcctccaaggctcaccagctggattccctcctgggggcttcattcccaaaacggccaccacgcccaaaggcagcagctcctggcagacaagtcggccgccagcccagggcgcctcatggccccctcaggccaagccgccccccaaagcctgcacacagccaaggcctaactatgcctcgaacttcagtgtgatcggggcgcgggaggagcggggggtccgcgcacccagctttgctcaaaagccaaaagtctctgagaacgactttgaagatctgttgtccaatcaaggcttctcctccaggtctgacaagaaagggccaaagaccattgcagagatgaggaagcaggacctggctaaagacacggacccactcaagctgaagctcctggactggattgagggcaaggagcggaacatccgggccctgctgtccacgctgcacacagtgctgtgggacggggagagccgctggacgcccgtgggcatggccgacctggtggctccggagcaagtgaagaagcactatcgccgcgcggtgctggccgtgcaccccgacaaggctgcggggcagccgtacgagcagcacgccaagatgatcttcatggagctgaatgacgcctggtcggagtttgagaaccagggctcccggcccctcttctgaggccgcagtggtggtggctgcgcacacagctccacaggttgggagccgtcgtgggacctgggtccccaccgtgaggaccccgtgggcgacagcaggtgtggccagggtggggctccgagccccgggtcaccgcccgcccagcgttccaggcacatgaagagaaagcattccaaagcctctgattgttgtttcctttttctcctcccgaaggaacagctgattcatgctcctcccgcaattgtcacgtctgtgatttatttggtgtttcgggcgtggcctctggagccccggcacgtggtgggccacgctgctggcgctcatgggccctggtgtttgcaccgcactttgtaatcagtcccgtggttgtctgtacagaattaaactattttccgatgaaaaaaa

SEQ ID NO: 70623 - DNA, 4332 bp, Homo sapiens
agtgaggccgcggcggaggggacggggctaggccgggtcgccgcctgacgcgacgcgtcctcacgggcgcctacgtcacggcgtcgaggcggaagatggtgcacctccgggccggcggttgctgagctgacccggacggcgagggagcgggagcccgagcccgaccactccggctgccgcggggtgcggcgcagccaccgccatgtcgctgctgcagtcggcgctcgacttcttggcgggtccaggctccctgggcggtgcttccggccgcgaccagagtgacttcgtggggcagacggtggaactgggcgagctgcggctgcgggtgcggcgggtcctggccgaaggagggtttgcatttgtgtatgaagctcaagatgtggggagtggcagagagtatgcattaaagggcagctggtggaatttttgaagaaaatggaatctcgaggccccctttcgtgcgacacggttctgaagatcttctaccagacgtgccgcgccgtgcagcacatgcaccggcagaagccgcccatcatccacagggacctcaaggttgagaacttgttgcttagtaaccaagggaccattaagctgtgtgactttggcagtgccacgaccatctcgcactaccctgactacagctggagcgcccagaggcgagccctggtggaggaagagatcacgaggaatacaacaccaatgtatagaacaccagaaatcatagacttgtattccaacttcccgatcggcgagaagcaggatatctgggccctgggctgcatcttgtacctgctgtgcttccggcagcacccttttgaggatggagcgaaacttcgaatagtcaatgggaagtactcgatccccccgcacgacacgcagtacacggtcttccacagcctcatccgcgccatgctgcaggtgaacccggaggagcggctgtccatcgccgaggtggtgcaccagctgcaggagatcgcggccgcccgcaacgtgaaccccaagtctcccatcacagagctcctggagcagaatggaggctacgggagcgccacactgtcccgagggccaccccctcccgtgggccccgctggcagtggctacagtggaggcctggcgctggcggagtacgaccagccgtatggcggcttcctggacattctgcggggtgggacagagcggctcttcaccaacctcaaggacacctcctccaaggtcatccagtccgtcgctaattatgcaaagggtgacctggacatatcttacatcacatccagaattgcagtgatgtcattcccagcagaaggtgtggagtcagcgctcaaaaacaacatcgaagatgtgcggttgttcctggactccaagcacccagggcactatgccgtctacaacctgtccccgaggacctaccggccctccaggttccacaaccgggtctccgagtgtggctgggcagcacggcgggccccacacctgcacaccctgtacaacatctgcaggaacatgcacgcctggctgcggcaggaccacaagaacgtctgcgtcgtgcactgcatggacgggagagccgcgtctgctgtggccgtctgctccttcctgtgcttctgccgtctcttcagcaccgcggaggccgccgtgtacatgttcagcatgaagcgctgcccaccaggcatctggccatcccacaaaaggtacatcgagtacatgtgtgacatggtggcggaggagcccatcacaccccacagcaagcccatcctggtgagggccgtggtcatgacacccgtgccgctgttcagcaagcagaggagcggctgcaggcccttctgcgaggtctacgtgggggacgagcgtgtggccagcacctcccaggagtacgacaagatgcgggactttaagattgaagatggcaaagcggtgattcccctgggcgtcacggtgcaaggagacgtgctcatcgtcatctatcacgcccggtccactctgggcggccggctgcaggccaagatggcatccatgaagatgttccagattcagttccacacggggtttgtgcctcggaacgccaccactgtgaaatttgccaagtatgacctggacgcgtgtgacattcaagaaaaatacccggatttatttcaagtgaacctggaagtggaggtggagcccagggacaggccgagccgggaagccccaccatgggagaactcgagcatgagggggctgaaccccaaaatcctgttttccagccgggaggagcagcaagacattctgtctaagtttgggaagccggagcttccccggcagcctggctccacggctcagtatgatgctggggcagggtccccggaagccgaacccacagactctgactcaccgccaagcagcagcgcggacgccagtcgcttcctgcacacgctggactggcaggaagagaaggaggcagagactggtgcagaaaatgcctcttccaaggagagcgagtctgccctgatggaggacagagacgagagtgaggtgtcagatgaagggggatccccgatctccagcgagggccaggaacccagggccgacccagagccccccggcctggcagcagggctggtgcagcaggacttggtttttgaggtggagacaccggctgtgctgccagagcctgtgccacaggaagacggggtcgacctcctgggcctgcactccgaggtgggcgcagggccagctgtacccccgcaggcctgcaaggccccctccagcaacaccgacctgctcagctgcctccttgggccccctgaggccgcctcccaggggcccccggaggatctgctcagcgaggacccgctgctcctggcaagcccggcccctcccctgagcgtgcagagcaccccaagaggagggccccctgccgctggcaacaactcccagccctgctccaatcctgatctcttcggcgaatttctcaattcggactctgtgaccgtcccaccatccttcccgtctgcccacagtgctccgcccccatcctgcagcgccgacttcctgcacctgggggatctgccaggagagcccagcaagatgacagcctcgtccagcaacccagacctgctgggaggatgggctgcctggaccgagactgcagcgtcggcagtggcccccacgccagccacagaaggccccctcttctctcctggaggtcagccggccccttgtggctctcaggccagctggaccaagtctcagaacccggacccatttgctgaccttggcgacctcagctccggcctccaaggctcaccagctggattccctcctgggggcttcattcccaaaacggccaccacgcccaaaggcagcagctcctggcagacaagtcggccgccagcccagggcgcctcatggccccctcaggccaagccgccccccaaagcctgcacacagccaaggcctaactatgcctcgaacttcagtgtgatcggggcgcgggaggagcggggggtccgcgcacccagctttgctcaaaagccaaaagtctctgagaacgactttgaagatctgttgtccaatcaaggcttctcctccaggtctgacaagaaagggccaaagaccattgcagagatgaggaagcaggacctggctaaagacacggacccactcaagctgaagctcctggactggattgagggcaaggagcggaacatccgggccctgctgtccacgctgcacacagtgctgtgggacggggagagccgctggacgcccgtgggcatggccgacctggtggctccggagcaagtgaagaagcactatcgccgcgcggtgctggccgtgcaccccgacaaggctgcggggcagccgtacgagcagcacgccaagatgatcttcatggagctgaatgacgcctggtcggagtttgagaaccagggctcccggcccctcttctgaggccgcagtggtggtggctgcgcacacagctccacaggttgggagccgtcgtgggacctgggtccccaccgtgaggaccccgtgggcgacagcaggtgtggccagggtggggctccgagccccgggtcaccgcccgcccagcgttccaggcacatgaagagaaagcattccaaagcctctgattgttgtttcctttttctcctcccgaaggaacagctgattcatgctcctcccgcaattgtcacgtctgtgatttatttggtgtttcgggcgtggcctctggagccccggcacgtggtgggccacgctgctggcgctcatgggccctggtgtttgcaccgcactttgtaatcagtcccgtggttgtctgtacagaattaaactattttccgatgaaaaaaa

SEQ ID NO: 70624 - DNA, 3794 bp, Homo sapiens
gtcacccctgttgttcccgcaggccccggtgtcacccctgcatttcccatgttcccgatatcacccctgtgttccctgcagtccccagtgtcacccctgcgctccccacggctccgatgtcacccctgcattccccgtgggcctgggcatcacccctgctctccccgcaggcccaggcgtcacccctgcgctccccgtgggcctaggcatcacccctgctctccccgcaggccctgggctgcatcttgtacctgctgtgcttccggcagcacccttttgaggatggagcgaaacttcgaatagtcaatgggaagtactcgatccccccgcacgacacgcagtacacggtcttccacagcctcatccgcgccatgctgcaggtgaacccggaggagcggctgtccatcgccgaggtggtgcaccagctgcaggagatcgcggccgcccgcaacgtgaaccccaagtctcccatcacagagctcctggagcagaatggaggctacgggagcgccacactgtcccgagggccaccccctcccgtgggccccgctggcagtggctacagtggaggcctggcgctggcggagtacgaccagccgtatggcggcttcctggacattctgcggggtgggacagagcggctcttcaccaacctcaaggacacctcctccaaggtcatccagtccgtcgctaattatgcaaagggtgacctggacatatcttacatcacatccagaattgcagtgatgtcattcccagcagaaggtgtggagtcagcgctcaaaaacaacatcgaagatgtgcggttgttcctggactccaagcacccagggcactatgccgtctacaacctgtccccgaggacctaccggccctccaggttccacaaccgggtctccgagtgtggctgggcagcacggcgggccccacacctgcacaccctgtacaacatctgcaggaacatgcacgcctggctgcggcaggaccacaagaacgtctgcgtcgtgcactgcatggacgggagagccgcgtctgctgtggccgtctgctccttcctgtgcttctgccgtctcttcagcaccgcggaggccgccgtgtacatgttcagcatgaagcgctgcccaccaggcatctggccatcccacaaaaggtacatcgagtacatgtgtgacatggtggcggaggagcccatcacaccccacagcaagcccatcctggtgagggccgtggtcatgacacccgtgccgctgttcagcaagcagaggagcggctgcaggcccttctgcgaggtctacgtgggggacgagcgtgtggccagcacctcccaggagtacgacaagatgcgggactttaagattgaagatggcaaagcggtgattcccctgggcgtcacggtgcaaggagacgtgctcatcgtcatctatcacgcccggtccactctgggcggccggctgcaggccaagatggcatccatgaagatgttccagattcagttccacacggggtttgtgcctcggaacgccaccactgtgaaatttgccaagtatgacctggacgcgtgtgacattcaagaaaaatacccggatttatttcaagtgaacctggaagtggaggtggagcccagggacaggccgagccgggaagccccaccatgggagaactcgagcatgagggggctgaaccccaaaatcctgttttccagccgggaggagcagcaagacattctgtctaagtttgggaagccggagcttccccggcagcctggctccacggctcagtatgatgctggggcagggtccccggaagccgaacccacagactctgactcaccgccaagcagcagcgcggacgccagtcgcttcctgcacacgctggactggcaggaagagaaggaggcagagactggtgcagaaaatgcctcttccaaggagagcgagtctgccctgatggaggacagagacgagagtgaggtgtcagatgaagggggatccccgatctccagcgagggccaggaacccagggccgacccagagccccccggcctggcagcagggctggtgcagcaggacttggtttttgaggtggagacaccggctgtgctgccagagcctgtgccacaggaagacggggtcgacctcctgggcctgcactccgaggtgggcgcagggccagctgtacccccgcaggcctgcaaggccccctccagcaacaccgacctgctcagctgcctccttgggccccctgaggccgcctcccaggggcccccggaggatctgctcagcgaggacccgctgctcctggcaagcccggcccctcccctgagcgtgcagagcaccccaagaggagggccccctgccgctggcaacaactcccagccctgctccaatcctgatctcttcggcgaatttctcaattcggactctgtgaccgtcccaccatccttcccgtctgcccacagtgctccgcccccatcctgcagcgccgacttcctgcacctgggggatctgccaggagagcccagcaagatgacagcctcgtccagcaacccagacctgctgggaggatgggctgcctggaccgagactgcagcgtcggcagtggcccccacgccagccacagaaggccccctcttctctcctggaggtcagccggccccttgtggctctcaggccagctggaccaagtctcagaacccggacccatttgctgaccttggcgacctcagctccggcctccaaggctcaccagctggattccctcctgggggcttcattcccaaaacggccaccacgcccaaaggcagcagctcctggcagacaagtcggccgccagcccagggcgcctcatggccccctcaggccaagccgccccccaaagcctgcacacagccaaggcctaactatgcctcgaacttcagtgtgatcggggcgcgggaggagcggggggtccgcgcacccagctttgctcaaaagccaaaagtctctgagaacgactttgaagatctgttgtccaatcaaggcttctcctccaggtctgacaagaaagggccaaagaccattgcagagatgaggaagcaggacctggctaaagacacggacccactcaagctgaagctcctggactggattgagggcaaggagcggaacatccgggccctgctgtccacgctgcacacagtgctgtgggacggggagagccgctggacgcccgtgggcatggccgacctggtggctccggagcaagtgaagaagcactatcgccgcgcggtgctggccgtgcaccccgacaaggctgcggggcagccgtacgagcagcacgccaagatgatcttcatggagctgaatgacgcctggtcggagtttgagaaccagggctcccggcccctcttctgaggccgcagtggtggtggctgcgcacacagctccacaggttgggagccgtcgtgggacctgggtccccaccgtgaggaccccgtgggcgacagcaggtgtggccagggtggggctccgagccccgggtcaccgcccgcccagcgttccaggcacatgaagagaaagcattccaaagcctctgattgttgtttcctttttctcctcccgaaggaacagctgattcatgctcctcccgcaattgtcacgtctgtgatttatttggtgtttcgggcgtggcctctggagccccggcacgtggtgggccacgctgctggcgctcatgggccctggtgtttgcaccgcactttgtaatcagtcccgtggttgtctgtacagaattaaactattttccgatgaaaaaaa

SEQ ID NO: 70625 - DNA, 4535 bp, Homo sapiens
agtgaggccgcggcggaggggacggggctaggccgggtcgccgcctgacgcgacgcgtcctcacgggcgcctacgtcacggcgtcgaggcggaagatggtgcacctccgggccggcggttgctgagctgacccggacggcgagggagcgggagcccgagcccgaccactccggctgccgcggggtgcggcgcagccaccgccatgtcgctgctgcagtcggcgctcgacttcttggcgggtccaggctccctgggcggtgcttccggccgcgaccagagtgacttcgtggggcagacggtggaactgggcgagctgcggctgcgggtgcggcgggtcctggccgaaggagggtttgcatttgtgtatgaagctcaagatgtggggagtggcagagagtatgcattaaagaggctattatccaatgaagaggaaaagaacagagccatcattcaagaagtttgcttcatgctctgttcactcggagagcccgccggctgcctgagtgtgggttcgggtggacacagccacgccgcagcctccctgcgcacagccccctgagggccctgcctcctcctgccacgcgcgggatggactttggtgtcgctgtggtcagtgcacagaactgtggacatggttatgtacgttctcctttaacaagacaactgcagaaaaagctttccggccacccgaacattgtccagttttgttctgcagcgtctataggaaaagaggagtcagacacggggcaggctgagttcctcttgctcacagagctctgtaaagggcagctggtggaatttttgaagaaaatggaatctcgaggccccctttcgtgcgacacggttctgaagatcttctaccagacgtgccgcgccgtgcagcacatgcaccggcagaagccgcccatcatccacagggacctcaaggttgagaacttgttgcttagtaaccaagggaccattaagctgtgtgactttggcagtgccacgaccatctcgcactaccctgactacagctggagcgcccagaggcgagccctggtggaggaagagatcacgaggaatacaacaccaatgtatagaacaccagaaatcatagacttgtattccaacttcccgatcggcgagaagcaggatatctgggccctgggctgcatcttgtacctgctgtgcttccggcagcacccttttgaggatggagcgaaacttcgaatagtcaatgggaagtactcgatccccccgcacgacacgcagtacacggtcttccacagcctcatccgcgccatgctgcaggtgaacccggaggagcggctgtccatcgccgaggtggtgcaccagctgcaggagatcgcggccgcccgcaacgtgaaccccaagtctcccatcacagagctcctggagcagaatggaggctacgggagcgccacactgtcccgagggccaccccctcccgtgggccccgctggcagtggctacagtggaggcctggcgctggcggagtacgaccagccgtatggcggcttcctggacattctgcggggtgggacagagcggctcttcaccaacctcaaggacacctcctccaaggtcatccagtccgtcgctaattatgcaaagggtgacctggacatatcttacatcacatccagaattgcagtgatgtcattcccagcagaaggtgtggagtcagcgctcaaaaacaacatcgaagatgtgcggttgttcctggactccaagcacccagggcactatgccgtctacaacctgtccccgaggacctaccggccctccaggttccacaaccgggtctccgagtgtggctgggcagcacggcgggccccacacctgcacaccctgtacaacatctgcaggaacatgcacgcctggctgcggcaggaccacaagaacgtctgcgtcgtgcactgcatggacgggagagccgcgtctgctgtggccgtctgctccttcctgtgcttctgccgtctcttcagcaccgcggaggccgccgtgtacatgttcagcatgaagcgctgcccaccaggcatctggccatcccacaaaaggtacatcgagtacatgtgtgacatggtggcggaggagcccatcacaccccacagcaagcccatcctggtgagggccgtggtcatgacacccgtgccgctgttcagcaagcagaggagcggctgcaggcccttctgcgaggtctacgtgggggacgagcgtgtggccagcacctcccaggagtacgacaagatgcgggactttaagattgaagatggcaaagcggtgattcccctgggcgtcacggtgcaaggagacgtgctcatcgtcatctatcacgcccggtccactctgggcggccggctgcaggccaagatggcatccatgaagatgttccagattcagttccacacggggtttgtgcctcggaacgccaccactgtgaaatttgccaagtatgacctggacgcgtgtgacattcaagaaaaatacccggatttatttcaagtgaacctggaagtggaggtggagcccagggacaggccgagccgggaagccccaccatgggagaactcgagcatgagggggctgaaccccaaaatcctgttttccagccgggaggagcagcaagacattctgtctaagtttgggaagccggagcttccccggcagcctggctccacggctcagtatgatgctggggcagggtccccggaagccgaacccacagactctgactcaccgccaagcagcagcgcggacgccagtcgcttcctgcacacgctggactggcaggaagagaaggaggcagagactggtgcagaaaatgcctcttccaaggagagcgagtctgccctgatggaggacagagacgagagtgaggtgtcagatgaagggggatccccgatctccagcgagggccaggaacccagggccgacccagagccccccggcctggcagcagggctggtgcagcaggacttggtttttgaggtggagacaccggctgtgctgccagagcctgtgccacaggaagacggggtcgacctcctgggcctgcactccgaggtgggcgcagggccagctgtacccccgcaggcctgcaaggccccctccagcaacaccgacctgctcagctgcctccttgggccccctgaggccgcctcccaggggcccccggaggatctgctcagcgaggacccgctgctcctggcaagcccggcccctcccctgagcgtgcagagcaccccaagaggagggccccctgccgctggcaacaactcccagccctgctccaatcctgatctcttcggcgaatttctcaattcggactctgtgaccgtcccaccatccttcccgtctgcccacagtgctccgcccccatcctgcagcgccgacttcctgcacctgggggatctgccaggagagcccagcaagatgacagcctcgtccagcaacccagacctgctgggaggatgggctgcctggaccgagactgcagcgtcggcagtggcccccacgccagccacagaaggccccctcttctctcctggaggtcagccggccccttgtggctctcaggccagctggaccaagtctcagaacccggacccatttgctgaccttggcgacctcagctccggcctccaaggctcaccagctggattccctcctgggggcttcattcccaaaacggccaccacgcccaaaggcagcagctcctggcagacaagtcggccgccagcccagggcgcctcatggccccctcaggccaagccgccccccaaagcctgcacacagccaaggcctaactatgcctcgaacttcagtgtgatcggggcgcgggaggagcggggggtccgcgcacccagctttgctcaaaagccaaaagtctctgagaacgactttgaagatctgttgtccaatcaaggcttctcctccaggtctgacaagaaagggccaaagaccattgcagagatgaggaagcaggacctggctaaagacacggacccactcaagctgaagctcctggactggattgagggcaaggagcggaacatccgggccctgctgtccacgctgcacacagtgctgtgggacggggagagccgctggacgcccgtgggcatggccgacctggtggctccggagcaagtgaagaagcactatcgccgcgcggtgctggccgtgcaccccgacaaggctgcggggcagccgtacgagcagcacgccaagatgatcttcatggagctgaatgacgcctggtcggagtttgagaaccagggctcccggcccctcttctgaggccgcagtggtggtggctgcgcacacagctccacagggaacagctgattcatgctcctcccgcaattgtcacgtctgtgatttatttggtgtttcgggcgtggcctctggagccccggcacgtggtgggccacgctgctggcgctcatgggccctggtgtttgcaccgcactttgtaatcagtcccgtggttgtctgtacagaattaaactattttccgatgaaaaaaa

SEQ ID NO: 70626 - DNA, 4188 bp, Homo sapiens
agtgaggccgcggcggaggggacggggctaggccgggtcgccgcctgacgcgacgcgtcctcacgggcgcctacgtcacggcgtcgaggcggaagatggtgcacctccgggccggcggttgctgagctgacccggacggcgagggagcgggagcccgagcccgaccactccggctgccgcggggtgcggcgcagccaccgccatgtcgctgctgcagtcggcgctcgacttcttggcgggtccaggctccctgggcggtgcttccggccgcgaccagagtgacttcgtggggcagacggtggaactgggcgagctgcggctgcgggtgcggcgggtcctggccgaaggagggtttgcatttgtgtatgaagctcaagatgtggggagtggcagagagtatgcattaaagaggctattatccaatgaagaggaaaagaacagagccatcattcaagaagtttgcttcatgctctgttcactcggagagcccgccggctgcctgagtgtgggttcgggtggacacagccacgccgcagcctccctgcgcacagccccctgagggccctgcctcctcctgccacgcgcgggatggactttggtgtcgctgtggtcagtgcacagaactgtggacatggttatgtacgttctcctttaacaagacaactgcagaaaaagctttccggccacccgaacattgtccagttttgttctgcagcgtctataggaaaagaggagtcagacacggggcaggctgagttcctcttgctcacagagctctgtaaagggcagctggtggaatttttgaagaaaatggaatctcgaggccccctttcgtgcgacacggttctgaagatcttctaccagacgtgccgcgccgtgcagcacatgcaccggcagaagccgcccatcatccacagggacctcaaggttgagaacttgttgcttagtaaccaagggaccattaagctgtgtgactttggcagtgccacgaccatctcgcactaccctgactacagctggagcgcccagaggcgagccctggtggaggaagagatcacgaggaatacaacaccaatgtatagaacaccagaaatcatagacttgtattccaacttcccgatcggcgagaagcaggatatctgggccctgggctgcatcttgtacctgctgtgcttccggcagcacccttttgaggatggagcgaaacttcgaatagtcaatgggaagtactcgatccccccgcacgacacgcagtacacggtcttccacagcctcatccgcgccatgctgcaggtgaacccggaggagcggctgtccatcgccgaggtggtgcaccagctgcaggagatcgcggccgcccgcaacgtgaaccccaagtctcccatcacagagctcctggagcagaatggaggctacgggagcgccacactgtcccgagggccaccccctcccgtgggccccgctggcagtggctacagtggaggcctggcgctggcggagtacgaccagccgtatggcggcttcctggacattctgcggggtgggacagagcggctcttcaccaacctcaaggacacctcctccaaggtcatccagtccgtcgctaattatgcaaagggtgacctggacatatcttacatcacatccagaattgcagtgatgtcattcccagcagaaggtgtggagtcagcgctcaaaaacaacatcgaagatgtgcggttgttcctggactccaagcacccagggcactatgccgtctacaacctgtccccgaggacctaccggccctccaggttccacaaccgggtctccgagtgtggctgggcagcacggcgggccccacacctgcacaccctgtacaacatctgcaggaacatgcacgcctggctgcggcaggaccacaagaacgtctgcgtcgtgcactgcatggacgggagagccgcgtctgctgtggccgtctgctccttcctgtgcttctgccgtctcttcagcaccgcggaggccgccgtgtacatgttcagcatgaagcgctgcccaccaggcatctggccatcccacaaaaggtacatcgagtacatgtgtgacatggtggcggaggagcccatcacaccccacagcaagcccatcctggtgagggccgtggtcatgacacccgtgccgctgttcagcaagcagaggagcggctgcaggcccttctgcgaggtctacgtgggggacgagcgtgtggccagcacctcccaggagtacgacaagatgcgggactttaagattgaagatggcaaagcggtgattcccctgggcgtcacggtgcaaggagacgtgctcatcgtcatctatcacgcccggtccactctgggcggccggctgcaggccaagatggcatccatgaagatgttccagattcagttccacacggggtttgtgcctcggaacgccaccactgtgaaatttgccaagtatgacctggacgcgtgtgacattcaagaaaaatacccggatttatttcaagtgaacctggaagtggaggtggagcccagggacaggccgagccgggaagccccaccatgggagaactcgagcatgagggggctgaaccccaaaatcctgttttccagccgggaggagcagcaagacattctgtctaagtttgggaagccggagcttccccggcagcctggctccacggctcagtatgatgctggggcagggtccccggaagccgaacccacagactctgactcaccgccaagcagcagcgcggacgccagtcgcttcctgcacacgctggactggcaggaagagaaggaggcagagactggtgcagaaaatgcctcttccaaggagagcgagtctgccctgatggaggacagagacgagagtgaggtgtcagatgaagggggatccccgatctccagcgagggccaggaacccagggccgacccagagccccccggcctggcagcagggctggtgcagcaggacttggtttttgaggtggagacaccggctgtgctgccagagcctgtgccacaggaagacggggtcgacctcctgggcctgcactccgaggtgggcgcagggccagctgtacccccgcaggcctgcaaggccccctccagcaacaccgacctgctcagctgcctccttgggccccctgaggccgcctcccaggggcccccggaggatctgctcagcgaggacccgctgctcctggcaagcccggcccctcccctgagcgtgcagagcaccccaagaggagggccccctgccgctggcaacaactcccagccctgctccaatcctgatctcttcggcgaatttctcaattcggactctgtgaccgtcccaccatccttcccgtctgcccacagtgctccgcccccatcctgcagcgccgacttcctgcacctgggggatctgccaggagagcccagcaagatgacagcctcgtccagcaacccagacctgctgggaggatgggctgcctggaccgagactgcagcgtcggcagtggcccccacgccagccacagaaggccccctcttctctcctggaggtcagccggccccttgtggctctcaggccagctggaccaagtctcagaacccggacccatttgctgaccttggcgacctcagctccggcctccaaggctcaccagctggattccctcctgggggcttcattcccaaaacggccaccacgcccaaaggcagcagctcctggcagacaagtcggccgccagcccagggcgcctcatggccccctcaggccaagccgccccccaaagcctgcacacagccaaggcctaactatgcctcgaacttcagtgtgatcggggcgcgggaggagcggggggtccgcgcacccagctttgctcaaaagccaaaagtctctgagaacgactttgaagatctgttgtccaatcaaggcttctcctccaggtctgacaagaaagggccaaagaccattgcagagatgaggaagcaggacctggctaaagacacggacccactcaagctgaagctcctggactggattgagggcaaggagcggaacatccgggccctgctgtccacgctgcagggccacgctgctggcgctcatgggccctggtgtttgcaccgcactttgtaatcagtcccgtggttgtctgtacagaattaaactattttccgatgaaaaaaa

SEQ ID NO: 70627 - DNA, 2345 bp, Homo sapiens
agtgaggccgcggcggaggggacggggctaggccgggtcgccgcctgacgcgacgcgtcctcacgggcgcctacgtcacggcgtcgaggcggaagatggtgcacctccgggccggcggttgctgagctgacccggacggcgagggagcgggagcccgagcccgaccactccggctgccgcggggtgcggcgcagccaccgccatgtcgctgctgcagtcggcgctcgacttcttggcgggtccaggctccctgggcggtgcttccggccgcgaccagagtgacttcgtggggcagacggtggaactgggcgagctgcggctgcgggtgcggcgggtcctggccgaaggagggtttgcatttgtgtatgaagctcaagatgtggggagtggcagagagtatgcattaaagaggctattatccaatgaagaggaaaagaacagagccatcattcaagaagtttgcttcatgaaaaagctttccggccacccgaacattgtccagttttgttctgcagcgtctataggaaaagaggagtcagacacggggcaggctgagttcctcttgctcacagagctctgtaaagccccccggcctggcagcagggctggtgcagcaggacttggtttttgaggtggagacaccggctgtgctgccagagcctgtgccacaggaagacggggtcgacctcctgggcctgcactccgaggtgggcgcagggccagctgtacccccgcaggcctgcaaggccccctccagcaacaccgacctgctcagctgcctccttgggccccctgaggccgcctcccaggggcccccggaggatctgctcagcgaggacccgctgctcctggcaagcccggcccctcccctgagcgtgcagagcaccccaagaggagggccccctgccgctggcaacaactcccagccctgctccaatcctgatctcttcggcgaatttctcaattcggactctgtgaccgtcccaccatccttcccgtctgcccacagtgctccgcccccatcctgcagcgccgacttcctgcacctgggggatctgccaggagagcccagcaagatgacagcctcgtccagcaacccagacctgctgggaggatgggctgcctggaccgagactgcagcgtcggcagtggcccccacgccagccacagaaggccccctcttctctcctggaggtcagccggccccttgtggctctcaggccagctggaccaagtctcagaacccggacccatttgctgaccttggcgacctcagctccggcctccaaggctcaccagctggattccctcctgggggcttcattcccaaaacggccaccacgcccaaaggcagcagctcctggcagacaagtcggccgccagcccagggcgcctcatggccccctcaggccaagccgccccccaaagcctgcacacagccaaggcctaactatgcctcgaacttcagtgtgatcggggcgcgggaggagcggggggtccgcgcacccagctttgctcaaaagccaaaagtctctgagaacgactttgaagatctgttgtccaatcaaggcttctcctccaggtctgacaagaaagggccaaagaccattgcagagatgaggaagcaggacctggctaaagacacggacccactcaagctgaagctcctggactggattgagggcaaggagcggaacatccgggccctgctgtccacgctgcacacagtgctgtgggacggggagagccgctggacgcccgtgggcatggccgacctggtggctccggagcaagtgaagaagcactatcgccgcgcggtgctggccgtgcaccccgacaaggctgcggggcagccgtacgagcagcacgccaagatgatcttcatggagctgaatgacgcctggtcggagtttgagaaccagggctcccggcccctcttctgaggccgcagtggtggtggctgcgcacacagctccacaggttgggagccgtcgtgggacctgggtccccaccgtgaggaccccgtgggcgacagcaggtgtggccagggtggggctccgagccccgggtcaccgcccgcccagcgttccaggcacatgaagagaaagcattccaaagcctctgattgttgtttcctttttctcctcccgaaggaacagctgattcatgctcctcccgcaattgtcacgtctgtgatttatttggtgtttcgggcgtggcctctggagccccggcacgtggtgggccacgctgctggcgctcatgggccctggtgtttgcaccgcactttgtaatcagtcccgtggttgtctgtacagaattaaactattttccgatgaaaaaaa

SEQ ID NO: 70628 - DNA, 1981 bp, Homo sapiens
caaagtgctgggattacaggcgtgagccactgcgcccggctgaacggaactttttaatcttaagagcctagagtccgtttaacactgtcacctggacagttctttgcggtgaatagaagtggagcatccaggcctccccgtgccgtgggaagcacgccgccagctccgcacagtcaagtgatgtttgtgtaaccaccgactatacccctaggatccccaaggaaggagccacccctcggccagtcaccatgtctgcggtgctcctctcacgcccttgtccccttgggctcgggcatcacccctgctctcccctcagacctgggagtcacccctgcactccgaggtgggcgcagggccagctgtacccccgcaggcctgcaaggccccctccagcaacaccgacctgctcagctgcctccttgggccccctgaggccgcctcccaggggcccccggaggatctgctcagcgaggacccgctgctcctggcaagcccggcccctcccctgagcgtgcagagcaccccaagaggagggccccctgccgctggcaacaactcccagccctgctccaatcctgatctcttcggcgaatttctcaattcggactctgtgaccgtcccaccatccttcccgtctgcccacagtgctccgcccccatcctgcagcgccgacttcctgcacctgggggatctgccaggagagcccagcaagatgacagcctcgtccagcaacccagacctgctgggaggatgggctgcctggaccgagactgcagcgtcggcagtggcccccacgccagccacagaaggccccctcttctctcctggaggtcagccggccccttgtggctctcaggccagctggaccaagtctcagaacccggacccatttgctgaccttggcgacctcagctccggcctccaaggctcaccagctggattccctcctgggggcttcattcccaaaacggccaccacgcccaaaggcagcagctcctggcagacaagtcggccgccagcccagggcgcctcatggccccctcaggccaagccgccccccaaagcctgcacacagccaaggcctaactatgcctcgaacttcagtgtgatcggggcgcgggaggagcggggggtccgcgcacccagctttgctcaaaagccaaaagtctctgagaacgactttgaagatctgttgtccaatcaaggcttctcctccaggtctgacaagaaagggccaaagaccattgcagagatgaggaagcaggacctggctaaagacacggacccactcaagctgaagctcctggactggattgagggcaaggagcggaacatccgggccctgctgtccacgctgcacacagtgctgtgggacggggagagccgctggacgcccgtgggcatggccgacctggtggctccggagcaagtgaagaagcactatcgccgcgcggtgctggccgtgcaccccgacaaggctgcggggcagccgtacgagcagcacgccaagatgatcttcatggagctgaatgacgcctggtcggagtttgagaaccagggctcccggcccctcttctgaggccgcagtggtggtggctgcgcacacagctccacaggttgggagccgtcgtgggacctgggtccccaccgtgaggaccccgtgggcgacagcaggtgtggccagggtggggctccgagccccgggtcaccgcccgcccagcgttccaggcacatgaagagaaagcattccaaagcctctgattgttgtttcctttttctcctcccgaaggaacagctgattcatgctcctcccgcaattgtcacgtctgtgatttatttggtgtttcgggcgtggcctctggagccccggcacgtggtgggccacgctgctggcgctcatgggccctggtgtttgcaccgcactttgtaatcagtcccgtggttgtctgtacagaattaaactattttccgatgaaaaaaa

SEQ ID NO: 70629 - DNA, 1467 bp, Homo sapiens
gcctcgtgccgaatcggcacgaggcctgccgctggcaacaactcccagccctgctccaatcctgatctcttcggcgaatttctcaattcggactctgtgaccgtcccaccatccttcccgtctgcccacagtgctccgcccccatcctgcagcgccgacttcctgcacctgggggatctgccaggagagcccagcaagatgacagcctcgtccagcaacccagacctgctgggaggatgggctgcctggaccgagactgcagcgtcggcagtggcccccacgccagccacagaaggccccctcttctctcctggaggtcagccggccccttgtggctctcaggccagctggaccaagtctcagaacccggacccatttgctgaccttggcgacctcagctccggcctccaaggctcaccagctggattccctcctgggggcttcattcccaaaacggccaccacgcccaaaggcagcagctcctggcagacaagtcggccgccagcccagggcgcctcatggccccctcaggccaagccgccccccaaagcctgcacacagccaaggcctaactatgcctcgaacttcagtgtgatcggggcgcgggaggagcggggggtccgcgcacccagctttgctcaaaagccaaaagtctctgagaacgactttgaagatctgttgtccaatcaaggcttctcctccaggtctgacaagaaagggccaaagaccattgcagagatgaggaagcaggacctggctaaagacacggacccactcaagctgaagctcctggactggattgagggcaaggagcggaacatccgggccctgctgtccacgctgcacacagtgctgtgggacggggagagccgctggacgcccgtgggcatggccgacctggtggctccggagcaagtgaagaagcactatcgccgcgcggtgctggccgtgcaccccgacaaggctgcggggcagccgtacgagcagcacgccaagatgatcttcatggagctgaatgacgcctggtcggagtttgagaaccagggctcccggcccctcttctgaggccgcagtggtggtggctgcgcacacagctccacaggttgggagccgtcgtgggacctgggtccccaccgtgaggaccccgtgggcgacagcaggtgtggccagggtggggctccgagccccgggtcaccgcccgcccagcgttccaggcacatgaagagaaagcattccaaagcctctgattgttgtttcctttttctcctcccgaaggaacagctgattcatgctcctcccgcaattgtcacgtctgtgatttatttggtgtttcgggcgtggcctctggagccccggcacgtggtgggccacgctgctggcgctcatgggccctggtgtttgcaccgcactttgtaatcagtcccgtggttgtctgtacagaattaaactattttccgatgaaaaaaa

SEQ ID NO: 70630 - DNA, 1400 bp, Homo sapiens
caagaggtgtccgctcctagggccctgagcacagcctggcgccccgccacatttgcctgctgctgagacaccaaactgtgctctcttctggttccttcttcccaggggatctgccaggagagcccagcaagatgacagcctcgtccagcaacccagacctgctgggaggatgggctgcctggaccgagactgcagcgtcggcagtggcccccacgccagccacagaaggccccctcttctctcctggaggtcagccggccccttgtggctctcaggccagctggaccaagtctcagaacccggacccatttgctgaccttggcgacctcagctccggcctccaaggctcaccagctggattccctcctgggggcttcattcccaaaacggccaccacgcccaaaggcagcagctcctggcagacaagtcggccgccagcccagggcgcctcatggccccctcaggccaagccgccccccaaagcctgcacacagccaaggcctaactatgcctcgaacttcagtgtgatcggggcgcgggaggagcggggggtccgcgcacccagctttgctcaaaagccaaaagtctctgagaacgactttgaagatctgttgtccaatcaaggcttctcctccaggtctgacaagaaagggccaaagaccattgcagagatgaggaagcaggacctggctaaagacacggacccactcaagctgaagctcctggactggattgagggcaaggagcggaacatccgggccctgctgtccacgctgcacacagtgctgtgggacggggagagccgctggacgcccgtgggcatggccgacctggtggctccggagcaagtgaagaagcactatcgccgcgcggtgctggccgtgcaccccgacaaggctgcggggcagccgtacgagcagcacgccaagatgatcttcatggagctgaatgacgcctggtcggagtttgagaaccagggctcccggcccctcttctgaggccgcagtggtggtggctgcgcacacagctccacaggttgggagccgtcgtgggacctgggtccccaccgtgaggaccccgtgggcgacagcaggtgtggccagggtggggctccgagccccgggtcaccgcccgcccagcgttccaggcacatgaagagaaagcattccaaagcctctgattgttgtttcctttttctcctcccgaaggaacagctgattcatgctcctcccgcaattgtcacgtctgtgatttatttggtgtttcgggcgtggcctctggagccccggcacgtggtgggccacgctgctggcgctcatgggccctggtgtttgcaccgcactttgtaatcagtcccgtggttgtctgtacagaattaaactattttccgatgaaaaaaa

SEQ ID NO: 70631 - DNA, 945 bp, Homo sapiens
cttgaggccgggaggcaaaggctgcagagagctgagatcacgccattgcactctggcctgggtgacagagtggagaccctgtctcaaacaaaaaaaagtttctgttcttttctagctcaaaagccaaaagtctctgagaacgactttgaagatctgttgtccaatcaaggcttctcctccaggtctgacaagaaagggccaaagaccattgcagagatgaggaagcaggacctggctaaagacacggacccactcaagctgaagctcctggactggattgagggcaaggagcggaacatccgggccctgctgtccacgctgcacacagtgctgtgggacggggagagccgctggacgcccgtgggcatggccgacctggtggctccggagcaagtgaagaagcactatcgccgcgcggtgctggccgtgcaccccgacaaggctgcggggcagccgtacgagcagcacgccaagatgatcttcatggagctgaatgacgcctggtcggagtttgagaaccagggctcccggcccctcttctgaggccgcagtggtggtggctgcgcacacagctccacaggttgggagccgtcgtgggacctgggtccccaccgtgaggaccccgtgggcgacagcaggtgtggccagggtggggctccgagccccgggtcaccgcccgcccagcgttccaggcacatgaagagaaagcattccaaagcctctgattgttgtttcctttttctcctcccgaaggaacagctgattcatgctcctcccgcaattgtcacgtctgtgatttatttggtgtttcgggcgtggcctctggagccccggcacgtggtgggccacgctgctggcgctcatgggccctggtgtttgcaccgcactttgtaatcagtcccgtggttgtctgtacagaattaaactattttccgatgaaaaaaa

SEQ ID NO: 70632 - DNA, 1927 bp, Homo sapiens
agtgaggccgcggcggaggggacggggctaggccgggtcgccgcctgacgcgacgcgtcctcacgggcgcctacgtcacggcgtcgaggcggaagatggtgcacctccgggccggcggttgctgagctgacccggacggcgagggagcgggagcccgagcccgaccactccggctgccgcggggtgcggcgcagccaccgccatgtcgctgctgcagtcggcgctcgacttcttggcgggtccaggctccctgggcggtgcttccggccgcgaccagagtgacttcgtggggcagacggtggaactgggcgagctgcggctgcgggtgcggcgggtcctggccgaaggagggtttgcatttgtgtatgaagctcaagatgtggggagtggcagagagtatgcattaaagaggctattatccaatgaagaggaaaagaacagagccatcattcaagaagtttgcttcatgaaaaagctttccggccacccgaacattgtccagttttgttctgcagcgtctataggaaaagaggagtcagacacggggcaggctgagttcctcttgctcacagagctctgtaaagggcagctggtggaatttttgaagaaaatggaatctcgaggccccctttcgtgcgacacggttctgaagatcttctaccagacgtgccgcgccgtgcagcacatgcaccggcagaagccgcccatcatccacagggacctcaaggttgagaacttgttgcttagtaaccaagggaccattaagctgtgtgactttggcagtgccacgaccatctcgcactaccctgactacagctggagcgcccagaggcgagccctggtggaggaagagaagctgctctgggtgcggccactctggagcggggcccttgtgccaggtgagacacccttctcctcagcaagcggacttggtgcgcagcaggccaatacgtcggtgccgacatgccatgaagcacgggaggccgtaggagattgagggaggtgaatgactcagtcctcatcgtaaggagcgcgctgaggccgaagatgagcagcggagctggtgcatggggccgactggcctgaggtcatcccggggcatagtgtgcgggacaggctgcccctcagtctgctgtgcatttggaaagctgcacggaagtggtgcaacataaaaaatactgtttgtgggatgcaacttttcctttgaaatgtttgtattttttcagatcacgaggaatacaacaccaatgtatagaacaccagaaatcatagacttgtattccaacttcccgatcggcgagaagcaggatatctgggtgaggtctggcgcctctcagtggcagtgcctggctccgtgcgccctacttaacctgaggcggcgtgggccgggcacctgccactcggaactggcctgcctcctccaccccctcttcccctcccgtccccttttctttttcctttccttaagaatcactgtggctgccactgtttttttgggtttttttggagacagggtcttcctctgtcacccaggctggagtgcagtggtgtgacctcggctcaggctcaccgcagcctcccgcccctgggctcaagggatcctcccacctcagcctcccgagtagctgggaccacaggtgctcaccaccatgcccggctattattttgtatttttggtagaaggggtggtctcaccatgtcgcccaggccggtctcgaactcctgagctcaagcggtccacctgcctcagcctcccaaagtgctgcgattacaggcttgagccactgcaccctgcccaaccttgactacttctaatagggatgagtcgagtagcagttgggggcgtcctgtgcggctgggtctgcctgaggctcccctcggccccgtccatggcttgttgtgcatctggccctgagtgccttggccc

SEQ ID NO: 70633 - DNA, 975 bp, Homo sapiens
agtgaggccgcggcggaggggacggggctaggccgggtcgccgcctgacgcgacgcgtcctcacgggcgcctacgtcacggcgtcgaggcggaagatggtgcacctccgggccggcggttgctgagctgacccggacggcgagggagcgggagcccgagcccgaccactccggctgccgcggggtgcggcgcagccaccgccatgtcgctgctgcagtcggcgctcgacttcttggcgggtccaggctccctgggcggtgcttccggccgcgaccagagtgacttcgtggggcagacggtggaactgggcgagctgcggctgcgggtgcggcgggtcctggccgaaggagggtttgcatttgtgtatgaagctcaagatgtggggagtggcagagagtatgcattaaagaggctattatccaatgaagaggaaaagaacagagccatcattcaagaagtttgcttcatgaaaaagctttccggccacccgaacattgtccagttttgttctgcagcgtctataggaaaagaggagtcagacacggggcaggctgagttcctcttgctcacagagctctgtaaagccccccggcctggcagcagggctggtgcagcaggacttggtttttgaggtggagacaccggctgtgctgccagagcctgtgccacaggaagacggggtcgacctcctgggcctgcactccgaggtgggcgcagggccagctgtacccccgcaggcctgcaaggccccctccagcaacaccgacctgctcagctgcctccttgggccccctgaggccgcctcccaggggcccccggaggatctgctcagcgaggacccgctgctcctggcaagcccggcccctcccctgagcgtgcagagcaccccaagaggagggccccctgccgctggtacgtgtttctgttctgaaggcgagtggcttcacagtagatgagtgatgaggctgagtcatt

SEQ ID NO: 70634 - DNA, 1854 bp, Homo sapiens
agtgaggccgcggcggaggggacggggctaggccgggtcgccgcctgacgcgacgcgtcctcacgggcgcctacgtcacggcgtcgaggcggaagatggtgcacctccgggccggcggttgctgagctgacccggacggcgagggagcgggagcccgagcccgaccactccggctgccgcggggtgcggcgcagccaccgccatgtcgctgctgcagtcggcgctcgacttcttggcgggtccaggctccctgggcggtgcttccggccgcgaccagagtgacttcgtggggcagacggtggaactgggcgagctgcggtgctcctggcaagcccggcccctcccctgagcgtgcagagcaccccaagaggagggccccctgccgctgctgacccctttggcccgcttctgccgtcttcaggcaacaactcccagccctgctccaatcctgatctcttcggcgaatttctcaattcggactctgtgaccgtcccaccatccttcccgtctgcccacagtgctccgcccccatcctgcagcgccgacttcctgcacctgggggatctgccaggagagcccagcaagatgacagcctcgtccagcaacccagacctgctgggaggatgggctgcctggaccgagactgcagcgtcggcagtggcccccacgccagccacagaaggccccctcttctctcctggaggtcagccggccccttgtggctctcaggccagctggaccaagtctcagaacccggacccatttgctgaccttggcgacctcagctccggcctccaaggctcaccagctggattccctcctgggggcttcattcccaaaacggccaccacgcccaaaggcagcagctcctggcagacaagtcggccgccagcccagggcgcctcatggccccctcaggccaagccgccccccaaagcctgcacacagccaaggcctaactatgcctcgaacttcagtgtgatcggggcgcgggaggagcggggggtccgcgcacccagctttgctcaaaagccaaaagtctctgagaacgactttgaagatctgttgtccaatcaaggcttctcctccaggtctgacaagaaagggccaaagaccattgcagagatgaggaagcaggacctggctaaagacacggacccactcaagctgaagctcctggactggattgagggcaaggagcggaacatccgggccctgctgtccacgctgcacacagtgctgtgggacggggagagccgctggacgcccgtgggcatggccgacctggtggctccggagcaagtgaagaagcactatcgccgcgcggtgctggccgtgcaccccgacaaggctgcggggcagccgtacgagcagcacgccaagatgatcttcatggagctgaatgacgcctggtcggagtttgagaaccagggctcccggcccctcttctgaggccgcagtggtggtggctgcgcacacagctccacaggttgggagccgtcgtgggacctgggtccccaccgtgaggaccccgtgggcgacagcaggtgtggccagggtggggctccgagccccgggtcaccgcccgcccagcgttccaggcacatgaagagaaagcattccaaagcctctgattgttgtttcctttttctcctcccgaaggaacagctgattcatgctcctcccgcaattgtcacgtctgtgatttatttggtgtttcgggcgtggcctctggagccccggcacgtggtgggccacgctgctggcgctcatgggccctggtgtttgcaccgcactttgtaatcagtcccgtggttgtctgtacagaattaaactattttccgatgaaaaaaa

SEQ ID NO: 70635 - DNA, 4707 bp, Homo sapiens
agtgaggccgcggcggaggggacggggctaggccgggtcgccgcctgacgcgacgcgtcctcacgggcgcctacgtcacggcgtcgaggcggaagatggtgcacctccgggccggcggttgctgagctgacccggacggcgagggagcgggagcccgagcccgaccactccggctgccgcggggtgcggcgcagccaccgccatgtcgctgctgcagtcggcgctcgacttcttggcgggtccaggctccctgggcggtgcttccggccgcgaccagagtgacttcgtggggcagacggtggaactgggcgagctgcggctgcgggtgcggcgggtcctggccgaaggagggtttgcatttgtgtatgaagctcaagatgtggggagtggcagagagtatgcattaaagaggctattatccaatgaagaggaaaagaacagagccatcattcaagaagtttgcttcatgctctgttcactcggagagcccgccggctgcctgagtgtgggttcgggtggacacagccacgccgcagcctccctgcgcacagccccctgagggccctgcctcctcctgccacgcgcgggatggactttggtgtcgctgtggtcagtgcacagaactgtggacatggttatgtacgttctcctttaacaagacaactgcagaaaaagctttccggccacccgaacattgtccagttttgttctgcagcgtctataggaaaagaggagtcagacacggggcaggctgagttcctcttgctcacagagctctgtaaagggcagctggtggaatttttgaagaaaatggaatctcgaggccccctttcgtgcgacacggttctgaagatcttctaccagacgtgccgcgccgtgcagcacatgcaccggcagaagccgcccatcatccacagggacctcaaggttgagaacttgttgcttagtaaccaagggaccattaagctgtgtgactttggcagtgccacgaccatctcgcactaccctgactacagctggagcgcccagaggcgagccctggtggaggaagagatcacgaggaatacaacaccaatgtatagaacaccagaaatcatagacttgtattccaacttcccgatcggcgagaagcaggatatctgggccctgggctgcatcttgtacctgctgtgcttccggcagcacccttttgaggatggagcgaaacttcgaatagtcaatgggaagtactcgatccccccgcacgacacgcagtacacggtcttccacagcctcatccgcgccatgctgcaggtgaacccggaggagcggctgtccatcgccgaggtggtgcaccagctgcaggagatcgcggccgcccgcaacgtgaaccccaagtctcccatcacagagctcctggagcagaatggaggctacgggagcgccacactgtcccgagggccaccccctcccgtgggccccgctggcagtggctacagtggaggcctggcgctggcggagtacgaccagccgtatggcggcttcctggacattctgcggggtgggacagagcggctcttcaccaacctcaaggacacctcctccaaggtcatccagtccgtcgctaattatgcaaagggtgacctggacatatcttacatcacatccagaattgcagtgatgtcattcccagcagaaggtgtggagtcagcgctcaaaaacaacatcgaagatgtgcggttgttcctggactccaagcacccagggcactatgccgtctacaacctgtccccgaggacctaccggccctccaggttccacaaccgggtctccgagtgtggctgggcagcacggcgggccccacacctgcacaccctgtacaacatctgcaggaacatgcacgcctggctgcggcaggaccacaagaacgtctgcgtcgtgcactgcatggacgggagagccgcgtctgctgtggccgtctgctccttcctgtgcttctgccgtctcttcagcaccgcggaggccgccgtgtacatgttcagcatgaagcgctgcccaccaggcatctggccatcccacaaaaggtacatcgagtacatgtgtgacatggtggcggaggagcccatcacaccccacagcaagcccatcctggtgagggccgtggtcatgacacccgtgccgctgttcagcaagcagaggagcggctgcaggcccttctgcgaggtctacgtgggggacgagcgtgtggccagcacctcccaggagtacgacaagatgcgggactttaagattgaagatggcaaagcggtgattcccctgggcgtcacggtgcaaggagacgtgctcatcgtcatctatcacgcccggtccactctgggcggccggctgcaggccaagatggcatccatgaagatgttccagattcagttccacacggggtttgtgcctcggaacgccaccactgtgaaatttgccaagtatgacctggacgcgtgtgacattcaagaaaaatacccggatttatttcaagtgaacctggaagtggaggtggagcccagggacaggccgagccgggaagccccaccatgggagaactcgagcatgagggggctgaaccccaaaatcctgttttccagccgggaggagcagcaagacattctgtctaagtttgggaagccggagcttccccggcagcctggctccacggctcagtatgatgctggggcagggtccccggaagccgaacccacagactctgactcaccgccaagcagcagcgcggacgccagtcgcttcctgcacacgctggactggcaggaagagaaggaggcagagactggtgcagaaaatgcctcttccaaggagagcgagtctgccctgatggaggacagagacgagagtgaggtgtcagatgaagggggatccccgatctccagcgagggccaggaacccagggccgacccagagccccccggcctggcagcagggctggtgcagcaggacttggtttttgaggtggagacaccggctgtgctgccagagcctgtgccacaggaagacggggtcgacctcctgggcctgcactccgaggtgggcgcagggccagctgtacccccgcaggcctgcaaggccccctccagcaacaccgacctgctcagctgcctccttgggccccctgaggccgcctcccaggggcccccggaggatctgctcagcgaggacccgctgctcctggcaagcccggcccctcccctgagcgtgcagagcaccccaagaggagggccccctgccgctggcaacaactcccagccctgctccaatcctgatctcttcggcgaatttctcaattcggactctgtgaccgtcccaccatccttcccgtctgcccacagtgctccgcccccatcctgcagcgccgacttcctgcacctgggggatctgccaggagagcccagcaagatgacagcctcgtccagcaacccagacctgctgggaggatgggctgcctggaccgagactgcagcgtcggcagtggcccccacgccagccacagaaggccccctcttctctcctggaggtcagccggccccttgtggctctcaggccagctggaccaagtctcagaacccggacccatttgctgaccttggcgacctcagctccggcctccaaggctcaccagctggattccctcctgggggcttcattcccaaaacggccaccacgcccaaaggcagcagctcctggcagacaagtcggccgccagcccagggcgcctcatggccccctcaggccaagccgccccccaaagcctgcacacagccaaggcctaactatgcctcgaacttcagtgtgatcggggcgcgggaggagcggggggtccgcgcacccagctttgctcaaaagccaaaagtctctgagaacgactttgaagatctgttgtccaatcaaggcttctcctccaggtctgacaagaaagggccaaagaccattgcagagatgaggaagcaggacctggctaaagacacggacccactcaagctgaagctcctggactggattgagggcaaggagcggaacatccgggccctgctgtccacgctgcacacagtgctgtgggacggggagagccgctggacgcccgtgggcatggccgacctggtggctccggagcaagtgaagaagcactatcgccgcgcggtgctggccgtgcaccccgacaaggctgcggggcagccgtacgagcagcacgccaagatgatcttcatggagctgaatgacgcctggtcggagtttgagaaccagggctcccggcccctcttctgaggccgcagtggtggtggctgcgcacacagctccacaggttgggagccgtcgtgggacctgggtccccaccgtgaggaccccgtgggcgacagcaggtgtggccagggtggggctccgagccccgggtcaccgcccgcccagcgttccaggcacatgaagagaaagcattccaaagcctctgattgttgtttcctttttctcctcccgaaggaacagctgattcatgctcctcccgcaattgtcacgtctgtgatttatttggtgtttcgggcgtggcctctggagccccggcacgtggtgggccacgctgctggcgctcatgggccctggtgtttgcaccgcactttgtaatcagtcccgtggttgtctgtacagaattaaactattttccgatgaaaaaaa

SEQ ID NO: 70636 - DNA, 4880 bp, Homo sapiens
agtgaggccgcggcggaggggacggggctaggccgggtcgccgcctgacgcgacgcgtcctcacgggcgcctacgtcacggcgtcgaggcggaagatggtgcacctccgggccggcggttgctgagctgacccggacggcgagggagcgggagcccgagcccgaccactccggctgccgcggggtgcggcgcagccaccgccatgtcgctgctgcagtcggcgctcgacttcttggcgggtccaggctccctgggcggtgcttccggccgcgaccagagtgacttcgtggggcagacggtggaactgggcgagctgcggctgcgggtgcggcgggtcctggccgaaggagggtttgcatttgtgtatgaagctcaagatgtggggagtggcagagagtatgcattaaagaggctattatccaatgaagaggaaaagaacagagccatcattcaagaagtttgcttcatgaaaaagctttccggccacccgaacattgtccagttttgttctgcagcgtctataggaaaagaggagtcagacacggggcaggctgagttcctcttgctcacagagctctgtaaagggcagctggtggaatttttgaagaaaatggaatctcgaggccccctttcgtgcgacacggttctgaagatcttctaccagacgtgccgcgccgtgcagcacatgcaccggcagaagccgcccatcatccacagggacctcaaggttgagaacttgttgcttagtaaccaagggaccattaagctgtgtgactttggcagtgccacgaccatctcgcactaccctgactacagctggagcgcccagaggcgagccctggtggaggaagagaagctgctctgggtgcggccactctggagcggggcccttgtgccaggtgagacacccttctcctcagcaagcggacttggtgcgcagcaggccaatacgtcggtgccgacatgccatgaagcacgggaggccgtaggagattgagggaggtgaatgactcagtcctcatcgtaaggagcgcgctgaggccgaagatgagcagcggagctggtgcatggggccgactggcctgaggtcatcccggggcatagtgtgcgggacaggctgcccctcagtctgctgtgcatttggaaagctgcacggaagtggtgcaacataaaaaatactgtttgtgggatgcaacttttcctttgaaatgtttgtattttttcagatcacgaggaatacaacaccaatgtatagaacaccagaaatcatagacttgtattccaacttcccgatcggcgagaagcaggatatctgggccctgggctgcatcttgtacctgctgtgcttccggcagcacccttttgaggatggagcgaaacttcgaatagtcaatgggaagtactcgatccccccgcacgacacgcagtacacggtcttccacagcctcatccgcgccatgctgcaggtgaacccggaggagcggctgtccatcgccgaggtggtgcaccagctgcaggagatcgcggccgcccgcaacgtgaaccccaagtctcccatcacagagctcctggagcagaatggaggctacgggagcgccacactgtcccgagggccaccccctcccgtgggccccgctggcagtggctacagtggaggcctggcgctggcggagtacgaccagccgtatggcggcttcctggacattctgcggggtgggacagagcggctcttcaccaacctcaaggacacctcctccaaggtcatccagtccgtcgctaattatgcaaagggtgacctggacatatcttacatcacatccagaattgcagtgatgtcattcccagcagaaggtgtggagtcagcgctcaaaaacaacatcgaagatgtgcggttgttcctggactccaagcacccagggcactatgccgtctacaacctgtccccgaggacctaccggccctccaggttccacaaccgggtctccgagtgtggctgggcagcacggcgggccccacacctgcacaccctgtacaacatctgcaggaacatgcacgcctggctgcggcaggaccacaagaacgtctgcgtcgtgcactgcatggacgggagagccgcgtctgctgtggccgtctgctccttcctgtgcttctgccgtctcttcagcaccgcggaggccgccgtgtacatgttcagcatgaagcgctgcccaccaggcatctggccatcccacaaaaggtacatcgagtacatgtgtgacatggtggcggaggagcccatcacaccccacagcaagcccatcctggtgagggccgtggtcatgacacccgtgccgctgttcagcaagcagaggagcggctgcaggcccttctgcgaggtctacgtgggggacgagcgtgtggccagcacctcccaggagtacgacaagatgcgggactttaagattgaagatggcaaagcggtgattcccctgggcgtcacggtgcaaggagacgtgctcatcgtcatctatcacgcccggtccactctgggcggccggctgcaggccaagatggcatccatgaagatgttccagattcagttccacacggggtttgtgcctcggaacgccaccactgtgaaatttgccaagtatgacctggacgcgtgtgacattcaagaaaaatacccggatttatttcaagtgaacctggaagtggaggtggagcccagggacaggccgagccgggaagccccaccatgggagaactcgagcatgagggggctgaaccccaaaatcctgttttccagccgggaggagcagcaagacattctgtctaagtttgggaagccggagcttccccggcagcctggctccacggctcagtatgatgctggggcagggtccccggaagccgaacccacagactctgactcaccgccaagcagcagcgcggacgccagtcgcttcctgcacacgctggactggcaggaagagaaggaggcagagactggtgcagaaaatgcctcttccaaggagagcgagtctgccctgatggaggacagagacgagagtgaggtgtcagatgaagggggatccccgatctccagcgagggccaggaacccagggccgacccagagccccccggcctggcagcagggctggtgcagcaggacttggtttttgaggtggagacaccggctgtgctgccagagcctgtgccacaggaagacggggtcgacctcctgggcctgcactccgaggtgggcgcagggccagctgtacccccgcaggcctgcaaggccccctccagcaacaccgacctgctcagctgcctccttgggccccctgaggccgcctcccaggggcccccggaggatctgctcagcgaggacccgctgctcctggcaagcccggcccctcccctgagcgtgcagagcaccccaagaggagggccccctgccgctggcaacaactcccagccctgctccaatcctgatctcttcggcgaatttctcaattcggactctgtgaccgtcccaccatccttcccgtctgcccacagtgctccgcccccatcctgcagcgccgacttcctgcacctgggggatctgccaggagagcccagcaagatgacagcctcgtccagcaacccagacctgctgggaggatgggctgcctggaccgagactgcagcgtcggcagtggcccccacgccagccacagaaggccccctcttctctcctggaggtcagccggccccttgtggctctcaggccagctggaccaagtctcagaacccggacccatttgctgaccttggcgacctcagctccggcctccaaggctcaccagctggattccctcctgggggcttcattcccaaaacggccaccacgcccaaaggcagcagctcctggcagacaagtcggccgccagcccagggcgcctcatggccccctcaggccaagccgccccccaaagcctgcacacagccaaggcctaactatgcctcgaacttcagtgtgatcggggcgcgggaggagcggggggtccgcgcacccagctttgctcaaaagccaaaagtctctgagaacgactttgaagatctgttgtccaatcaaggcttctcctccaggtctgacaagaaagggccaaagaccattgcagagatgaggaagcaggacctggctaaagacacggacccactcaagctgaagctcctggactggattgagggcaaggagcggaacatccgggccctgctgtccacgctgcacacagtgctgtgggacggggagagccgctggacgcccgtgggcatggccgacctggtggctccggagcaagtgaagaagcactatcgccgcgcggtgctggccgtgcaccccgacaaggctgcggggcagccgtacgagcagcacgccaagatgatcttcatggagctgaatgacgcctggtcggagtttgagaaccagggctcccggcccctcttctgaggccgcagtggtggtggctgcgcacacagctccacaggttgggagccgtcgtgggacctgggtccccaccgtgaggaccccgtgggcgacagcaggtgtggccagggtggggctccgagccccgggtcaccgcccgcccagcgttccaggcacatgaagagaaagcattccaaagcctctgattgttgtttcctttttctcctcccgaaggaacagctgattcatgctcctcccgcaattgtcacgtctgtgatttatttggtgtttcgggcgtggcctctggagccccggcacgtggtgggccacgctgctggcgctcatgggccctggtgtttgcaccgcactttgtaatcagtcccgtggttgtctgtacagaattaaactattttccgatgaaaaaaa

SEQ ID NO: 70637 - DNA, 4233 bp, Homo sapiens
agcctctgcctctcacaacatgtctgccatgcacggagattcactctctcctcacagctctgtggccccagcctctgcctctcgcaagtgcctccgtgtgtttgtgaggctctccattgttaaccttgaaccagtcgggtgagcttgggtggacggcttcctcctcccagataccctcacgtaccctggggttctgggtgtcacagaagctgctctgggtgcggccactctggagcggggcccttgtgccaggtgagacacccttctcctcagcaagcggacttggtgcgcagcaggccaatacgtcggtgccgacatgccatgaagcacgggaggccgtaggagattgagggaggtgaatgactcagtcctcatcgtaaggagcgcgctgaggccgaagatgagcagcggagctggtgcatggggccgactggcctgaggtcatcccggggcatagtgtgcgggacaggctgcccctcagtctgctgtgcatttggaaagctgcacggaagtggtgcaacataaaaaatactgtttgtgggatgcaacttttcctttgaaatgtttgtattttttcagatcacgaggaatacaacaccaatgtatagaacaccagaaatcatagacttgtattccaacttcccgatcggcgagaagcaggatatctgggccctgggctgcatcttgtacctgctgtgcttccggcagcacccttttgaggatggagcgaaacttcgaatagtcaatgggaagtactcgatccccccgcacgacacgcagtacacggtcttccacagcctcatccgcgccatgctgcaggtgaacccggaggagcggctgtccatcgccgaggtggtgcaccagctgcaggagatcgcggccgcccgcaacgtgaaccccaagtctcccatcacagagctcctggagcagaatggaggctacgggagcgccacactgtcccgagggccaccccctcccgtgggccccgctggcagtggctacagtggaggcctggcgctggcggagtacgaccagccgtatggcggcttcctggacattctgcggggtgggacagagcggctcttcaccaacctcaaggacacctcctccaaggtcatccagtccgtcgctaattatgcaaagggtgacctggacatatcttacatcacatccagaattgcagtgatgtcattcccagcagaaggtgtggagtcagcgctcaaaaacaacatcgaagatgtgcggttgttcctggactccaagcacccagggcactatgccgtctacaacctgtccccgaggacctaccggccctccaggttccacaaccgggtctccgagtgtggctgggcagcacggcgggccccacacctgcacaccctgtacaacatctgcaggaacatgcacgcctggctgcggcaggaccacaagaacgtctgcgtcgtgcactgcatggacgggagagccgcgtctgctgtggccgtctgctccttcctgtgcttctgccgtctcttcagcaccgcggaggccgccgtgtacatgttcagcatgaagcgctgcccaccaggcatctggccatcccacaaaaggtacatcgagtacatgtgtgacatggtggcggaggagcccatcacaccccacagcaagcccatcctggtgagggccgtggtcatgacacccgtgccgctgttcagcaagcagaggagcggctgcaggcccttctgcgaggtctacgtgggggacgagcgtgtggccagcacctcccaggagtacgacaagatgcgggactttaagattgaagatggcaaagcggtgattcccctgggcgtcacggtgcaaggagacgtgctcatcgtcatctatcacgcccggtccactctgggcggccggctgcaggccaagatggcatccatgaagatgttccagattcagttccacacggggtttgtgcctcggaacgccaccactgtgaaatttgccaagtatgacctggacgcgtgtgacattcaagaaaaatacccggatttatttcaagtgaacctggaagtggaggtggagcccagggacaggccgagccgggaagccccaccatgggagaactcgagcatgagggggctgaaccccaaaatcctgttttccagccgggaggagcagcaagacattctgtctaagtttgggaagccggagcttccccggcagcctggctccacggctcagtatgatgctggggcagggtccccggaagccgaacccacagactctgactcaccgccaagcagcagcgcggacgccagtcgcttcctgcacacgctggactggcaggaagagaaggaggcagagactggtgcagaaaatgcctcttccaaggagagcgagtctgccctgatggaggacagagacgagagtgaggtgtcagatgaagggggatccccgatctccagcgagggccaggaacccagggccgacccagagccccccggcctggcagcagggctggtgcagcaggacttggtttttgaggtggagacaccggctgtgctgccagagcctgtgccacaggaagacggggtcgacctcctgggcctgcactccgaggtgggcgcagggccagctgtacccccgcaggcctgcaaggccccctccagcaacaccgacctgctcagctgcctccttgggccccctgaggccgcctcccaggggcccccggaggatctgctcagcgaggacccgctgctcctggcaagcccggcccctcccctgagcgtgcagagcaccccaagaggagggccccctgccgctggcaacaactcccagccctgctccaatcctgatctcttcggcgaatttctcaattcggactctgtgaccgtcccaccatccttcccgtctgcccacagtgctccgcccccatcctgcagcgccgacttcctgcacctgggggatctgccaggagagcccagcaagatgacagcctcgtccagcaacccagacctgctgggaggatgggctgcctggaccgagactgcagcgtcggcagtggcccccacgccagccacagaaggccccctcttctctcctggaggtcagccggccccttgtggctctcaggccagctggaccaagtctcagaacccggacccatttgctgaccttggcgacctcagctccggcctccaaggctcaccagctggattccctcctgggggcttcattcccaaaacggccaccacgcccaaaggcagcagctcctggcagacaagtcggccgccagcccagggcgcctcatggccccctcaggccaagccgccccccaaagcctgcacacagccaaggcctaactatgcctcgaacttcagtgtgatcggggcgcgggaggagcggggggtccgcgcacccagctttgctcaaaagccaaaagtctctgagaacgactttgaagatctgttgtccaatcaaggcttctcctccaggtctgacaagaaagggccaaagaccattgcagagatgaggaagcaggacctggctaaagacacggacccactcaagctgaagctcctggactggattgagggcaaggagcggaacatccgggccctgctgtccacgctgcacacagtgctgtgggacggggagagccgctggacgcccgtgggcatggccgacctggtggctccggagcaagtgaagaagcactatcgccgcgcggtgctggccgtgcaccccgacaaggctgcggggcagccgtacgagcagcacgccaagatgatcttcatggagctgaatgacgcctggtcggagtttgagaaccagggctcccggcccctcttctgaggccgcagtggtggtggctgcgcacacagctccacaggttgggagccgtcgtgggacctgggtccccaccgtgaggaccccgtgggcgacagcaggtgtggccagggtggggctccgagccccgggtcaccgcccgcccagcgttccaggcacatgaagagaaagcattccaaagcctctgattgttgtttcctttttctcctcccgaaggaacagctgattcatgctcctcccgcaattgtcacgtctgtgatttatttggtgtttcgggcgtggcctctggagccccggcacgtggtgggccacgctgctggcgctcatgggccctggtgtttgcaccgcactttgtaatcagtcccgtggttgtctgtacagaattaaactattttccgatgaaaaaaa

SEQ ID NO: 70638 - DNA, 4590 bp, Homo sapiens
agtgaggccgcggcggaggggacggggctaggccgggtcgccgcctgacgcgacgcgtcctcacgggcgcctacgtcacggcgtcgaggcggaagatggtgcacctccgggccggcggttgctgagctgacccggacggcgagggagcgggagcccgagcccgaccactccggctgccgcggggtgcggcgcagccaccgccatgtcgctgctgcagtcggcgctcgacttcttggcgggtccaggctccctgggcggtgcttccggccgcgaccagagtgacttcgtggggcagacggtggaactgggcgagctgcggctgcgggtgcggcgggtcctggccgaaggagggtttgcatttgtgtatgaagctcaagatgtggggagtggcagagagtatgcattaaagaggctattatccaatgaagaggaaaagaacagagccatcattcaagaagtttgcttcatgctctgttcactcggagagcccgccggctgcctgagtgtgggttcgggtggacacagccacgccgcagcctccctgcgcacagccccctgagggccctgcctcctcctgccacgcgcgggatggactttggtgtcgctgtggtcagtgcacagaactgtggacatggttatgtacgttctcctttaacaagacaactgcagaaaaagctttccggccacccgaacattgtccagttttgttctgcagcgtctataggaaaagaggagtcagacacggggcaggctgagttcctcttgctcacagagctctgtaaagggcagctggtggaatttttgaagaaaatggaatctcgaggccccctttcgtgcgacacggttctgaagatcttctaccagacgtgccgcgccgtgcagcacatgcaccggcagaagccgcccatcatccacagggacctcaaggttgagaacttgttgcttagtaaccaagggaccattaagctgtgtgactttggcagtgccacgaccatctcgcactaccctgactacagctggagcgcccagaggcgagccctggtggaggaagagatcacgaggaatacaacaccaatgtatagaacaccagaaatcatagacttgtattccaacttcccgatcggcgagaagcaggatatctgggccctgggctgcatcttgtacctgctgtgcttccggcagcacccttttgaggatggagcgaaacttcgaatagtcaatgggaagtactcgatccccccgcacgacacgcagtacacggtcttccacagcctcatccgcgccatgctgcaggtgaacccggaggagcggctgtccatcgccgaggtggtgcaccagctgcaggagatcgcggccgcccgcaacgtgaaccccaagtctcccatcacagagctcctggagcagaatggaggctacgggagcgccacactgtcccgagggccaccccctcccgtgggccccgctggcagtggctacagtggaggcctggcgctggcggagtacgaccagccgtatggcggcttcctggacattctgcggggtgggacagagcggctcttcaccaacctcaaggacacctcctccaaggtcatccagtccgtcgctaattatgcaaagggtgacctggacatatcttacatcacatccagaattgcagtgatgtcattcccagcagaaggtgtggagtcagcgctcaaaaacaacatcgaagatgtgcggttgttcctggactccaagcacccagggcactatgccgtctacaacctgtccccgaggacctaccggccctccaggttccacaaccgggtctccgagtgtggctgggcagcacggcgggccccacacctgcacaccctgtacaacatctgcaggaacatgcacgcctggctgcggcaggaccacaagaacgtctgcgtcgtgcactgcatggacgggagagccgcgtctgctgtggccgtctgctccttcctgtgcttctgccgtctcttcagcaccgcggaggccgccgtgtacatgttcagcatgaagcgctgcccaccaggcatctggccatcccacaaaaggtacatcgagtacatgtgtgacatggtggcggaggagcccatcacaccccacagcaagcccatcctggtgagggccgtggtcatgacacccgtgccgctgttcagcaagcagaggagcggctgcaggcccttctgcgaggtctacgtgggggacgagcgtgtggccagcacctcccaggagtacgacaagatgcgggactttaagattgaagatggcaaagcggtgattcccctgggcgtcacggtgcaaggagacgtgctcatcgtcatctatcacgcccggtccactctgggcggccggctgcaggccaagatggcatccatgaagatgttccagattcagttccacacggggtttgtgcctcggaacgccaccactgtgaaatttgccaagtatgacctggacgcgtgtgacattcaagaaaaatacccggatttatttcaagtgaacctggaagtggaggtggagcccagggacaggccgagccgggaagccccaccatgggagaactcgagcatgagggggctgaaccccaaaatcctgttttccagccgggaggagcagcaagacattctgtctaagtttgggaagccggagcttccccggcagcctggctccacggctcagtatgatgctggggcagggtccccggaagccgaacccacagactctgactcaccgccaagcagcagcgcggacgccagtcgcttcctgcacacgctggactggcaggaagagaaggaggcagagactggtgcagaaaatgcctcttccaaggagagcgagtctgccctgatggaggacagagacgagagtgaggtgtcagatgaagggggatccccgatctccagcgagggccaggaacccagggccgacccagagccccccggcctggcagcagggctggtgcagcaggacttggtttttgaggtggagacaccggctgtgctgccagagcctgtgccacaggaagacggggtcgacctcctgggcctgcactccgaggtgggcgcagggccagctgtacccccgcaggcctgcaaggccccctccagcaacaccgacctgctcagctgcctccttgggccccctgaggccgcctcccaggggcccccggaggatctgctcagcgaggacccgctgctcctggcaagcccggcccctcccctgagcgtgcagagcaccccaagaggagggccccctgccgctggcaacaactcccagccctgctccaatcctgatctcttcggcgaatttctcaattcggactctgtgaccgtcccaccatccttcccgtctgcccacagtgctccgcccccatcctgcagcgccgacttcctgcacctgggggatctgccaggagagcccagcaagatgacagcctcgtccagcaacccagacctgctgggaggatgggctgcctggaccgagactgcagcgtcggcagtggcccccacgccagccacagaaggccccctcttctctcctggaggtcagccggccccttgtggctctcaggccagctggaccaagtctcagaacccggacccatttgctgaccttggcgacctcagctccggcctccaaggctcaccagctggattccctcctgggggcttcattcccaaaacggccaccacgcccaaaggcagcagctcctggcagacaagtcggccgccagcccagggcgcctcatggccccctcaggccaagccgccccccaaagcctgcacacagccaaggcctaactatgcctcgaacttcagtgtgatcggggcgcgggaggagcggggggtccgcgcacccagctttgctcaaaagccaaaagtctctgagaacgactttgaagatctgttgtccaatcaaggcttctcctccaggtctgacaagaaagggccaaagaccattgcagagatgaggaagcaggacctggctaaagacacggacccactcaagctgaagctcctggactggattgagggcaaggagcggaacatccgggccctgctgtccacgctgcacacagtgctgtgggacggggagagccgctggacgcccgtgggcatggccgacctggtggctccggagcaagtgaagaagcactatcgccgcgcggtgctggccgtgcaccccgacaaggctgcggggcagccgtacgagcagcacgccaagatgatcttcatggagctgaatgacgcctggtcggagtttgagaaccagggctcccggcccctcttctgaggccgcagtggtggtggctgcgcacacagctccacaggttgggagccgtcgtgggacctgggtccccaccgtgaggaccccgtgggcgacagcaggtgtggccagggtggggctccgagccccgggtcaccgcccgcccagcgttccaggcacatgaagagaaagcattccaaagcctctgattgttgtttcctttttctcctcccgaaggaacaggtgttcatgtcctccgaatgtcacgttggattattggcgtcggggtgcttgggccgggtgtggcactgt

SEQ ID NO: 70639 - DNA, 4228 bp, Homo sapiens
agtgaggccgcggcggaggggacggggctaggccgggtcgccgcctgacgcgacgcgtcctcacgggcgcctacgtcacggcgtcgaggcggaagatggtgcacctccgggccggcggttgctgagctgacccggacggcgagggagcgggagcccgagcccgaccactccggctgccgcggggtgcggcgcagccaccgccatgtcgctgctgcagtcggcgctcgacttcttggcgggtccaggctccctgggcggtgcttccggccgcgaccagagtgacttcgtggggcagacggtggaactgggcgagctgcggctgcgggtgcggcgggtcctggccgaaggagggtttgcatttgtgtatgaagctcaagatgtggggagtggcagagagtatgcattaaagaggctattatccaatgaagaggaaaagaacagagccatcattcaagaagtttgcttcatgctctgttcactcggagagcccgccggctgcctgagtgtgggttcgggtggacacagccacgccgcagcctccctgcgcacagccccctgagggccctgcctcctcctgccacgcgcgggatggactttggtgtcgctgtggtcagtgcacagaactgtggacatggttatgtacgttctcctttaacaagacaactgcagaaaaagctttccggccacccgaacattgtccagttttgttctgcagcgtctataggaaaagaggagtcagacacggggcaggctgagttcctcttgctcacagagctctgtaaagggcagctggtggaatttttgaagaaaatggaatctcgaggccccctttcgtgcgacacggttctgaagatcttctaccagacgtgccgcgccgtgcagcacatgcaccggcagaagccgcccatcatccacagggacctcaaggttgagaacttgttgcttagtaaccaagggaccattaagctgtgtgactttggcagtgccacgaccatctcgcactaccctgactacagctggagcgcccagaggcgagccctggtggaggaagagatcacgaggaatacaacaccaatgtatagaacaccagaaatcatagacttgtattccaacttcccgatcggcgagaagcaggatatctgggccctgggctgcatcttgtacctgctgtgcttccggcagcacccttttgaggatggagcgaaacttcgaatagtcaatgggaagtactcgatccccccgcacgacacgcagtacacggtcttccacagcctcatccgcgccatgctgcaggtgaacccggaggagcggctgtccatcgccgaggtggtgcaccagctgcaggagatcgcggccgcccgcaacgtgaaccccaagtctcccatcacagagctcctggagcagaatggaggctacgggagcgccacactgtcccgagggccaccccctcccgtgggccccgctggcagtggctacagtggaggcctggcgctggcggagtacgaccagccgtatggcggcttcctggacattctgcggggtgggacagagcggctcttcaccaacctcaaggacacctcctccaaggtcatccagtccgtcgctaattatgcaaagggtgacctggacatatcttacatcacatccagaattgcagtgatgtcattcccagcagaaggtgtggagtcagcgctcaaaaacaacatcgaagatgtgcggttgttcctggactccaagcacccagggcactatgccgtctacaacctgtccccgaggacctaccggccctccaggttccacaaccgggtctccgagtgtggctgggcagcacggcgggccccacacctgcacaccctgtacaacatctgcaggaacatgcacgcctggctgcggcaggaccacaagaacgtctgcgtcgtgcactgcatggacgggagagccgcgtctgctgtggccgtctgctccttcctgtgcttctgccgtctcttcagcaccgcggaggccgccgtgtacatgttcagcatgaagcgctgcccaccaggcatctggccatcccacaaaaggtacatcgagtacatgtgtgacatggtggcggaggagcccatcacaccccacagcaagcccatcctggtgagggccgtggtcatgacacccgtgccgctgttcagcaagcagaggagcggctgcaggcccttctgcgaggtctacgtgggggacgagcgtgtggccagcacctcccaggagtacgacaagatgcgggactttaagattgaagatggcaaagcggtgattcccctgggcgtcacggtgcaaggagacgtgctcatcgtcatctatcacgcccggtccactctgggcggccggctgcaggccaagatggcatccatgaagatgttccagattcagttccacacggggtttgtgcctcggaacgccaccactgtgaaatttgccaagtatgacctggacgcgtgtgacattcaagaaaaatacccggatttatttcaagtgaacctggaagtggaggtggagcccagggacaggccgagccgggaagccccaccatgggagaactcgagcatgagggggctgaaccccaaaatcctgttttccagccgggaggagcagcaagacattctgtctaagtttgggaagccggagcttccccggcagcctggctccacggctcagtatgatgctggggcagggtccccggaagccgaacccacagactctgactcaccgccaagcagcagcgcggacgccagtcgcttcctgcacacgctggactggcaggaagagaaggaggcagagactggtgcagaaaatgcctcttccaaggagagcgagtctgccctgatggaggacagagacgagagtgaggtgtcagatgaagggggatccccgatctccagcgagggccaggaacccagggccgacccagagccccccggcctggcagcagggctggtgcagcaggacttggtttttgaggtggagacaccggctgtgctgccagagcctgtgccacaggaagacggggtcgacctcctgggcctgcactccgaggtgggcgcagggccagctgtacccccgcaggcctgcaaggccccctccagcaacaccgacctgctcagctgcctccttgggccccctgaggccgcctcccaggggcccccggaggatctgctcagcgaggacccgctgctcctggcaagcccggcccctcccctgagcgtgcagagcaccccaagaggagggccccctgccgctggcaacaactcccagccctgctccaatcctgatctcttcggcgaatttctcaattcggactctgtgaccgtcccaccatccttcccgtctgcccacagtgctccgcccccatcctgcagcgccgacttcctgcacctgggggatctgccaggagagcccagcaagatgacagcctcgtccagcaacccagacctgctgggaggatgggctgcctggaccgagactgcagcgtcggcagtggcccccacgccagccacagaaggccccctcttctctcctggaggtcagccggccccttgtggctctcaggccagctggaccaagtctcagaacccggacccatttgctgaccttggcgacctcagctccggcctccaaggctcaccagctggattccctcctgggggcttcattcccaaaacggccaccacgcccaaaggcagcagctcctggcagacaagtcggccgccagcccagggcgcctcatggccccctcaggccaagccgccccccaaagcctgcacacagccaaggcctaactatgcctcgaacttcagtgtgatcggggcgcgggaggagcggggggtccgcgcacccagctttgctcaaaagccaaaagtctctgagaacgactttgaagatctgttgtccaatcaaggcttctcctccaggtctgacaagaaagggccaaagaccattgcagagatgaggaagcaggacctggctaaagacacggacccactcaagctgaagctcctggactggattgagggcaaggagcggaacatccgggccctgctgtccacgctgcacacagtgctgtgggacggggagagccgctggacgcccgtgggcatggccgacctggtggctccggagcaagtgaagaagcactatcgccgcgcggtgctggccgtgcaccccgacaaggtgagcagagctgccaggcggccgc

SEQ ID NO: 70640 - DNA, 3590 bp, Homo sapiens
agtgaggccgcggcggaggggacggggctaggccgggtcgccgcctgacgcgacgcgtcctcacgggcgcctacgtcacggcgtcgaggcggaagatggtgcacctccgggccggcggttgctgagctgacccggacggcgagggagcgggagcccgagcccgaccactccggctgccgcggggtgcggcgcagccaccgccatgtcgctgctgcagtcggcgctcgacttcttggcgggtccaggctccctgggcggtgcttccggccgcgaccagagtgacttcgtggggcagacggtggaactgggcgagctgcggctgcgggtgcggcgggtcctggccgaaggagggtttgcatttgtgtatgaagctcaagatgtggggagtggcagagagtatgcattaaagaggctattatccaatgaagaggaaaagaacagagccatcattcaagaagtttgcttcatgctctgttcactcggagagcccgccggctgcctgagtgtgggttcgggtggacacagccacgccgcagcctccctgcgcacagccccctgagggccctgcctcctcctgccacgcgcgggatggactttggtgtcgctgtggtcagtgcacagaactgtggacatggttatgtacgttctcctttaacaagacaactgcagaaaaagctttccggccacccgaacattgtccagttttgttctgcagcgtctataggaaaagaggagtcagacacggggcaggctgagttcctcttgctcacagagctctgtaaagggcagctggtggaatttttgaagaaaatggaatctcgaggccccctttcgtgcgacacggttctgaagatcttctaccagacgtgccgcgccgtgcagcacatgcaccggcagaagccgcccatcatccacagggacctcaaggttgagaacttgttgcttagtaaccaagggaccattaagctgtgtgactttggcagtgccacgaccatctcgcactaccctgactacagctggagcgcccagaggcgagccctggtggaggaagagatcacgaggaatacaacaccaatgtatagaacaccagaaatcatagacttgtattccaacttcccgatcggcgagaagcaggatatctgggccctgggctgcatcttgtacctgctgtgcttccggcagcacccttttgaggatggagcgaaacttcgaatagtcaatgggaagtactcgatccccccgcacgacacgcagtacacggtcttccacagcctcatccgcgccatgctgcaggtgaacccggaggagcggctgtccatcgccgaggtggtgcaccagctgcaggagatcgcggccgcccgcaacgtgaaccccaagtctcccatcacagagctcctggagcagaatggaggctacgggagcgccacactgtcccgagggccaccccctcccgtgggccccgctggcagtggctacagtggaggcctggcgctggcggagtacgaccagccgtatggcggcttcctggacattctgcggggtgggacagagcggctcttcaccaacctcaaggacacctcctccaaggtcatccagtccgtcgctaattatgcaaagggtgacctggacatatcttacatcacatccagaattgcagtgatgtcattcccagcagaaggtgtggagtcagcgctcaaaaacaacatcgaagatgtgcggttgttcctggactccaagcacccagggcactatgccgtctacaacctgtccccgaggacctaccggccctccaggttccacaaccgggtctccgagtgtggctgggcagcacggcgggccccacacctgcacaccctgtacaacatctgcaggaacatgcacgcctggctgcggcaggaccacaagaacgtctgcgtcgtgcactgcatggacgggagagccgcgtctgctgtggccgtctgctccttcctgtgcttctgccgtctcttcagcaccgcggaggccgccgtgtacatgttcagcatgaagcgctgcccaccaggcatctggccatcccacaaaaggtacatcgagtacatgtgtgacatggtggcggaggagcccatcacaccccacagcaagcccatcctggtgagggccgtggtcatgacacccgtgccgctgttcagcaagcagaggagcggctgcaggcccttctgcgaggtctacgtgggggacgagcgtgtggccagcacctcccaggagtacgacaagatgcgggactttaagattgaagatggcaaagcggtgattcccctgggcgtcacggtgcaaggagacgtgctcatcgtcatctatcacgcccggtccactctgggcggccggctgcaggccaagatggcatccatgaagatgttccagattcagttccacacggggtttgtgcctcggaacgccaccactgtgaaatttgccaagtatgacctggacgcgtgtgacattcaagaaaaatacccggatttatttcaagtgaacctggaagtggaggtggagcccagggacaggccgagccgggaagccccaccatgggagaactcgagcatgagggggctgaaccccaaaatcctgttttccagccgggaggagcagcaagacattctgtctaagtttgggaagccggagcttccccggcagcctggctccacggctcagtatgatgctggggcagggtccccggaagccgaacccacagactctgactcaccgccaagcagcagcgcggacgccagtcgcttcctgcacacgctggactggcaggaagagaaggaggcagagactggtgcagaaaatgcctcttccaaggagagcgagtctgccctgatggaggacagagacgagagtgaggtgtcagatgaagggggatccccgatctccagcgagggccaggaacccagggccgacccagagccccccggcctggcagcagggctggtgcagcaggacttggtttttgaggtggagacaccggctgtgctgccagagcctgtgccacaggaagacggggtcgacctcctgggcctgcactccgaggtgggcgcagggccagctgtacccccgcaggcctgcaaggccccctccagcaacaccgacctgctcagctgcctccttgggccccctgaggccgcctcccaggggcccccggaggatctgctcagcgaggacccgctgctcctggcaagcccggcccctcccctgagcgtgcagagcaccccaagaggagggccccctgccgctgctgacccctttggcccgcttctgccgtcttcaggcaacaactcccagccctgctccaatcctgatctcttcggcgaatttctcaattcggactctgtgaccgtcccaccatccttcccgtctgcccacagtgctccgcccccatcctgcagcgccgacttcctgcacctgggggatctgccaggagagcccagcaagatgacagcctcgtccagcaacccagacctgctgggaggatgggctgcctggaccgagactgcagcgtcggcagtggcccccacgccagccacagaagaggcccctcacccgaaggacag

SEQ ID NO: 70641 - DNA, 2014 bp, Homo sapiens
caaagtgctgggattacaggcgtgagccactgcgcccggctgaacggaactttttaatcttaagagcctagagtccgtttaacactgtcacctggacagttctttgcggtgaatagaagtggagcatccaggcctccccgtgccgtgggaagcacgccgccagctccgcacagtcaagtgatgtttgtgtaaccaccgactatacccctaggatccccaaggaaggagccacccctcggccagtcaccatgtctgcggtgctcctctcacgcccttgtccccttgggctcgggcatcacccctgctctcccctcagacctgggagtcacccctgcactccgaggtgggcgcagggccagctgtacccccgcaggcctgcaaggccccctccagcaacaccgacctgctcagctgcctccttgggccccctgaggccgcctcccaggggcccccggaggatctgctcagcgaggacccgctgctcctggcaagcccggcccctcccctgagcgtgcagagcaccccaagaggagggccccctgccgctgctgacccctttggcccgcttctgccgtcttcaggcaacaactcccagccctgctccaatcctgatctcttcggcgaatttctcaattcggactctgtgaccgtcccaccatccttcccgtctgcccacagtgctccgcccccatcctgcagcgccgacttcctgcacctgggggatctgccaggagagcccagcaagatgacagcctcgtccagcaacccagacctgctgggaggatgggctgcctggaccgagactgcagcgtcggcagtggcccccacgccagccacagaaggccccctcttctctcctggaggtcagccggccccttgtggctctcaggccagctggaccaagtctcagaacccggacccatttgctgaccttggcgacctcagctccggcctccaaggctcaccagctggattccctcctgggggcttcattcccaaaacggccaccacgcccaaaggcagcagctcctggcagacaagtcggccgccagcccagggcgcctcatggccccctcaggccaagccgccccccaaagcctgcacacagccaaggcctaactatgcctcgaacttcagtgtgatcggggcgcgggaggagcggggggtccgcgcacccagctttgctcaaaagccaaaagtctctgagaacgactttgaagatctgttgtccaatcaaggcttctcctccaggtctgacaagaaagggccaaagaccattgcagagatgaggaagcaggacctggctaaagacacggacccactcaagctgaagctcctggactggattgagggcaaggagcggaacatccgggccctgctgtccacgctgcacacagtgctgtgggacggggagagccgctggacgcccgtgggcatggccgacctggtggctccggagcaagtgaagaagcactatcgccgcgcggtgctggccgtgcaccccgacaaggctgcggggcagccgtacgagcagcacgccaagatgatcttcatggagctgaatgacgcctggtcggagtttgagaaccagggctcccggcccctcttctgaggccgcagtggtggtggctgcgcacacagctccacaggttgggagccgtcgtgggacctgggtccccaccgtgaggaccccgtgggcgacagcaggtgtggccagggtggggctccgagccccgggtcaccgcccgcccagcgttccaggcacatgaagagaaagcattccaaagcctctgattgttgtttcctttttctcctcccgaaggaacagctgattcatgctcctcccgcaattgtcacgtctgtgatttatttggtgtttcgggcgtggcctctggagccccggcacgtggtgggccacgctgctggcgctcatgggccctggtgtttgcaccgcactttgtaatcagtcccgtggttgtctgtacagaattaaactattttccgatgaaaaaaa

SEQ ID NO: 70642 - DNA, 2004 bp, Homo sapiens
agtgaggccgcggcggaggggacggggctaggccgggtcgccgcctgacgcgacgcgtcctcacgggcgcctacgtcacggcgtcgaggcggaagatggtgcacctccgggccggcggttgctgagctgacccggacggcgagggagcgggagcccgagcccgaccactccggctgccgcggggtgcggcgcagccaccgccatgtcgctgctgcagtcggcgctcgacttcttggcgggtccaggctccctgggcggtgcttccggccgcgaccagagtgacttcgtggggcagacggtggaactgggcgagctgcggctgcgggtgcggcgggtcctggccgaaggagggtttgcatttgtgtatgaagctcaagatgtggggagtggcagagagtatgcattaaagaggctattatccaatgaagaggaaaagaacagagccatcattcaagaagtttgcttcatgctctgttcactcggagagcccgccggctgcctgagtgtgggttcgggtggacacagccacgccgcagcctccctgcgcacagccccctgagggccctgcctcctcctgccacgcgcgggatggactttggtgtcgctgtggtcagtgcacagaactgtggacatggttatgtacgttctcctttaacaagacaactgcagaaaaagctttccggccacccgaacattgtccagttttgttctgcagcgtctataggaaaagaggagtcagacacggggcaggctgagttcctcttgctcacagagctctgtaaagggcagctggtggaatttttgaagaaaatggaatctcgaggccccctttcgtgcgacacggttctgaagatcttctaccagacgtgccgcgccgtgcagcacatgcaccggcagaagccgcccatcatccacagggacctcaaggttgagaacttgttgcttagtaaccaagggaccattaagctgtgtgactttggcagtgccacgaccatctcgcactaccctgactacagctggagcgcccagaggcgagccctggtggaggaagagatcacgaggaatacaacaccaatgtatagaacaccagaaatcatagacttgtattccaacttcccgatcggcgagaagcaggatatctgggccctgggctgcatcttgtacctgctgtgcttccggcagcacccttttgaggatggagcgaaacttcgaatagtcaatgggaagtactcgatccccccgcacgacacgcagtacacggtcttccacagcctcatccgcgccatgctgcaggtgaacccggaggagcggctgtccatcgccgaggtggtgcaccagctgcaggagatcgcggccgcccgcaacgtgaaccccaagtctcccatcacagagctcctggagcagaatggaggctacgggagcgccacactgtcccgagggccaccccctcccgtgggccccgctggcagtggctacagtggaggcctggcgctggcggagtacgaccagccgtatggcggcttcctggacattctgcggggtgggacagagcggctcttcaccaacctcaaggacacctcctccaaggtcatccagtccgtcgctaattatgcaaagggtgacctggacatatcttacatcacatccagaattgcagtgatgtcattcccagcagaaggtgtggagtcagcgctcaaaaacaacatcgaagatgtgcggttgttcctggactccaagcacccagggcactatgccgtctacaacctgtccccgaggacctaccggccctccaggttccacaaccgggtctccgagtgtggctgggcagcacggcgggccccacacctgcacaccctgtacaacatctgcaggaacatgcacgcctggctgcggcaggaccacaagaacgtctgcgtcgtgcactgcatggacgggagagccgcgtctgctgtggccgtctgaaaatctgaataaagtatggacatgaaataatcataaaaaaaa

SEQ ID NO: 70643 - DNA, 1200 bp, Homo sapiens
tcaggggaccccccaaacccaaaggaaggccccctcttctctcctggaggtcagccggccccttgtggctctcaggccagctggaccaagtctcagaacccggacccatttgctgaccttggcgacctcagctccggcctccaaggctcaccagctggattccctcctgggggcttcattcccaaaacggccaccacgcccaaaggcagcagctcctggcagacaagtcggccgccagcccagggcgcctcatggccccctcaggccaagccgccccccaaagcctgcacacagccaaggcctaactatgcctcgaacttcagtgtgatcggggcgcgggaggagcggggggtccgcgcacccagctttgctcaaaagccaaaagtctctgagaacgactttgaagatctgttgtccaatcaaggcttctcctccaggtctgacaagaaagggccaaagaccattgcagagatgaggaagcaggacctggctaaagacacggacccactcaagctgaagctcctggactggattgagggcaaggagcggaacatccgggccctgctgtccacgctgcacacagtgctgtgggacggggagagccgctggacgcccgtgggcatggccgacctggtggctccggagcaagtgaagaagcactatcgccgcgcggtgctggccgtgcaccccgacaaggctgcggggcagccgtacgagcagcacgccaagatgatcttcatggagctgaatgacgcctggtcggagtttgagaaccagggctcccggcccctcttctgaggccgcagtggtggtggctgcgcacacagctccacaggttgggagccgtcgtgggacctgggtccccaccgtgaggaccccgtgggcgacagcaggtgtggccagggtggggctccgagccccgggtcaccgcccgcccagcgttccaggcacatgaagagaaagcattccaaagcctctgattgttgtttcctttttctcctcccgaaggaacagctgattcatgctcctcccgcaattgtcacgtctgtgatttatttggtgtttcgggcgtggcctctggagccccggcacgtggtgggccacgctgctggcgctcatgggccctggtgtttgcaccgcactttgtaatcagtcccgtggttgtctgtacagaattaaactattttccgatgaaaaaaa

SEQ ID NO: 70644 - DNA, 1362 bp, Homo sapiens
agtgaggccgcggcggaggggacggggctaggccgggtcgccgcctgacgcgacgcgtcctcacgggcgcctacgtcacggcgtcgaggcggaagatggtgcacctccgggccggcggttgctgagctgacccggacggcgagggagcgggagcccgagcccgaccactccggctgccgcggggtgcggcgcagccaccgccatgtcgctgctgcagtcggcgctcgacttcttggcgggtccaggctccctgggcggtgcttccggccgcgaccagagtgacttcgtggggcagacggtggaactgggcgagctgcggctgcgggtgcggcgggtcctggccgaaggagggtttgcatttgtgtatgaagctcaagatgtggggagtggcagagagtatgcattaaagaggctattatccaatgaagaggaaaagaacagagccatcattcaagaagtttgcttcatgaaaaagctttccggccacccgaacattgtccagttttgttctgcagcgtctataggaaaagaggagtcagacacggggcaggctgagttcctcttgctcacagagctctgtaaagggcagctggtggaatttttgaagaaaatggaatctcgaggccccctttcgtgcgacacggttctgaagatcttctaccagacgtgccgcgccgtgcagcacatgcaccggcagaagccgcccatcatccacagggacctcaaggttgagaacttgttgcttagtaaccaagggaccattaagctgtgtgactttggcagtgccacgaccatctcgcactaccctgactacagctggagcgcccagaggcgagccctggtggaggaagaggtgagctgagtggggcctatgctgggggaagctggcccttcccacattccacgccctgagtgcggagtgctgttttccgccggggtgctttgagtctcgctctgtcaccaggctggagtgcagtggtgcaatcccggctcactgcaacctccgcctcctgggttcaagcgattcttctgcctctgcctcccgagtagctggggttacaggcacacaccaccacgcccagctaatttttgtgtttttggtagggacggggtttcaccgtgttggccaggatggtctctatctcttgacgtcatttgtgatccacccgcgtcagcctcccaaagtgctgggattacaggcgtgagcaatgtaataaacagactttattttttagagcagttgaaggtaacaggaagtggagctgaaaacacagggtggccccatccatgccctctcacagcccctccttcctctgagcccctcacgtccttggctctcctccgaagcttcttttcccagag

SEQ ID NO: 70645 - DNA, 390 bp, Homo sapiens
tggccccaggccctgaaacatgaagaccacctggccctgtgtcgtccggagtgggctctatatagttgagggcagggcgtgcagtgggacagtgtctgtgagccgggctgagcccaccccacgtgaccaggcacttcctcagcgtcgtgcctcagtttccgcggtgcagaggaggagggcaggcaggtgcccagggctcggcaagctccgtgtctcccgcagctcctggactggattgagggcaaggagcggaacatccgggccctgctgtccacgctgcacacagtgctgtgggacggggagagccgctggacgcccgtgggcatggccgacctggtggctccggagcaagtgaagaagcactatcgccgcgcggtgctggccgtgcac

SEQ ID NO: 70646 - DNA, 2124 bp, Homo sapiens
cggatctgcctcaatgcaatacaacatctaagcgaagagtgagattccaagaaatagacgatagcttggatcacgatgaagttggaggtggctcctgtattttgctggtcttgctgtgcatagcaacggttttcctcagtgttggagggactgcattatactgcactttcggtgacatggagtcacctgtttgtactgactttgcagacaacatggacttctattacactaagttacttcagggagtggcagaactgaagcactggatctacctctcctagcagcattccagacacagacatgctggcagtgagagtgaaaggcgggagactttctaaacagtttttctttcaggaattctgtagcattcccccttccctctgttaggaaccaaggacatcagaaatagcaactttaagtggcaagccggaggaactctgttagaataatccacacagtgaggcaaatatcaatctaagcattgtggatggaaggaatggtctttggagagagcatatccatctcctcctcactgcctcctaatgtcatgaggtacactgagcagaattaaacagggtagtcttaaccacactatttttagctaccttgtcaagctaatggttaaagaacacttttggtttacacttgttgggtcatagaagttgctttccgccatcacgcaataagttcgtgtgtaatcagaaggagttaccttatggtttcagtgtcattctttagttaacttgggagctgtgtaatttaggctttgcgtattatttcacttctgttctccacttatgaagtgattgtgtgttcgcgtgtgtgtgcgtgcgcatgtgcttccggcagttaacataagcaaatacccaacatcacaaagatgatctttcttcttttaacttgatgatgatgtgcaggcacaaatctttggagaaggcttaactgtagaatagatgaattctagaactcttgaccctgcaatgagaaactgtgacagatctgtgtcaattaacttgattagccagaaattaatcacaggcctagagaccaaagaaaaagctcccctgagtctcaggcaacagttttgtcacggatgcaaagcttcctgaaatcatgaatgctggactcagtttggcaaacgcttacacctattatgttctgagattctgagaaccagaatgcaaacttaagtaagatacagttcccactgtaggtgttttaatcctggtcttatatagaataaaccagtactttgctgagtgaaatcaccatatagaattcagtattaacagatcatgcattcagatgcttgaatgtgcattcttgttgtgggcttgatttagatcctattgcggggtcattacgcgaaaattcaatcataccttccatagacaaatgtctgatttttgtttaaatctgtccgttaggtggcctttccttatctgaggtgtagtggtctaacatttaggaagccttgctttgactttatcgggcagcattaaaaaaaaaacaacaaagaaaaaccaaacatgaattatagtttttaacaagtgatctttatctcctgtcttctgttaggatcatttgaaagaaaaagggagaacttactttctagttgttactggctggcacagtacctccctttgtgtttctgcttatttatttagattatgtgaatcttaaagggctttttatatcagttgaaagtgtgttactgcgcatgcatttggtgattccagtgctagatatttaattactgtgtatttagtgttttgattttctataatttcagttccgcgtgtttttacacttgttcattttaaattgatgtttcattttcacttataatactgtttgacttgtctctacaataggcatgaaatcgcaactagaaaaattagggcagtttttaaaaatgtcatagttatctattgcatgaactggagtaattccacctggtggtgaaaggattgttatttcacacatgaaaaattcatccagttttactaaaatgtaattttttctgtcatttgaaagtactgacaactatttgtaactaatcttccttaagaactgtatttgagggtatcaaatcaagcttgtaatttaaaatctgtaccaaca

SEQ ID NO: 70647 - DNA, 1179 bp, Homo sapiens
cggatctgcctcaatgcaatacaacatctaagcgaagagtgagattccaagaaatagacgatagcttggatcacgatgaagttggaggtggctcctgtattttgctggtcttgctgtgcatagcaacggttttcctcagtgttggagggactgcattatactgcactttcggtgacatggagtcacctgtttgtactgactttgcagacaacatggacttctattacactaagttacttcagggagtggcagaactgaagcactggatctacctctcctagcagcattccagacacagacatgctggcagtgagagtgaaaggcgggagactttctaaacagtttttctttcaggaattctgtagcattcccccttccctctgttaggaaccaaggacatcagaaatagcaactttaagtggcaagccggaggaactctgttagaataatccacacagtgaggcaaatatcaatctaagcattgtggatggaaggaatggtctttggagagagcatatccatctcctcctcactgcctcctaatgtcatgaggtacactgagcagaattaaacagggtagtcttaaccacactatttttagctaccttgtcaagctaatggttaaagaacacttttggtttacacttgttgggtcatagaagttgctttccgccatcacgcaataagttcgtgtgtaatcagaaggagttaccttatggtttcagtgtcattctttagttaacttgggagctgtgtaatttaggctttgcgtattatttcacttctgttctccacttatgaagtgattgtgtgttcgcgtgtgtgtgcgtgcgcatgtgcttccggcagttaacataagcaaatacccaacatcacaaagatgatctttcttcttttaacttgatgatgatgtgcaggcacaaatctttggagaaggcttaactgtagaatagatgaattctagaactcttgaccctgcaatgagaaactgtgacagatctgtgtcaattaacttgattagccagaaattaatcacaggcctagagaccaaagaaaaagctcccctgagtctcaggcaacagttttgtcacggatgcaaagcttcctgaaatcatgaatgctggactcagtttggcaaacgctacaaactaagaccctacccctaagagcggggtcctc

SEQ ID NO: 70648 - DNA, 2716 bp, Homo sapiens
cggatctgcctcaatgcaatacaacatctaagcgaagagtgagattccaagaaatagacgatagcttggatcacgatgaagttggaggtggctcctgtattttgctggtcttgctgtgcatagcaacggttttcctcagtgttggagggactgcattatactgcactttcggtgacatggagtcacctgtttgtactgactttgcagacaacatggacttctattacactaagttacttcagggagtggcagaactgaagcactggatctacctctcctagcagcattccagacacagacatgctggcagtgagagtgaaaggcgggagactttctaaacagtttttctttcaggaattctgtagcattcccccttccctctgttaggaaccaaggacatcagaaatagcaactttaagtggcaagccggaggaactctgttagaataatccacacagtgaggcaaatatcaatctaagcattgtggatggaaggaatggtctttggagagagcatatccatctcctcctcactgcctcctaatgtcatgaggtacactgagcagaattaaacagggtagtcttaaccacactatttttagctaccttgtcaagctaatggttaaagaacacttttggtttacacttgttgggtcatagaagttgctttccgccatcacgcaataagttcgtgtgtaatcagaaggagttaccttatggtttcagtgtcattctttagttaacttgggagctgtgtaatttaggctttgcgtattatttcacttctgttctccacttatgaagtgattgtgtgttcgcgtgtgtgtgcgtgcgcatgtgcttccggcagttaacataagcaaatacccaacatcacaaagatgatctttcttcttttaacttgatgatgatgtgcaggcacaaatctttggagaaggcttaactgtagaatagatgaattctagaactcttgaccctgcaatgagaaactgtgacagatctgtgtcaattaacttgattagccagaaattaatcacaggcctagagaccaaagaaaaagctcccctgagtctcaggcaacagttttgtcacggatgcaaagcttcctgaaatcatgaatgctggactcagtttggcaaacgcttacacctattatgttctgagattctgagaaccagaatgcaaacttaagtaagatacagttcccactgtaggtgttttaatcctggtcttatatagaataaaccagtactttgctgagtgaaatcaccatatagaattcagtattaacagatcatgcattcagatgcttgaatgtgcattcttgttgtgggcttgatttagatcctattgcggggtcattacgcgaaaattcaatcataccttccatagacaaatgtctgatttttgtttaaatctgtccgttaggtggcctttccttatctgaggtgtagtggtctaacatttaggaagccttgctttgactttatcgggcagcattaaaaaaaaaacaacaaagaaaaaccaaacatgaattatagtttttaacaagtgatctttatctcctgtcttctgttaggatcatttgaaagaaaaagggagaacttactttctagttgttactggctggcacagtacctccctttgtgtttctgcttatttatttagattatgtgaatcttaaagggctttttatatcagttgaaagtgtgttactgcgcatgcatttggtgattccagtgctagatatttaattactgtgtatttagtgttttgattttctataatttcagttccgcgtgtttttacacttgttcattttaaattgatgtttcattttcacttataatactgtttgacttgtctctatcatgtcaccataaactgtaatattttcaagggttatagatcaaagatatttatttagaaatgtacaagataatgaaatttagattccttatacttaaggctgattttattagaagattattttaatgttctattataaattttaagaatttgtattcaaattgtatgtaaaatatgtaaaatgttgacggtactatattaagtggttctataaaagctattcacaagttctactgtgatggacatcctcatcatagacaaacctcctctgttttatcctcaatttctagttacagaaatttggtgatgcttatttttgccaattttatgtcaaaataagttaaaacttccctcctgttcacctcttgggtctctatcctgtgtaacctctggtgtagtatttgcccataggcaaccagagccacttcctctgaacccaacatctcctggggaccttcgcagcaagaggaaagcactgagacaatagcttgctaagcaggggcccagtggtgtctcagagaaaccatgggtgtcctcgccacttcccagggagggtgaggtgagctcgggaacataacgatgttttgacttacaataggcatgaaatcgcaactagaaaaattagggcagtttttaaaaatgtcatagttatctattgcatgaactggagtaattccacctggtggtgaaaggattgttatttcacacatgaaaaattcatccagttttactaaaatgtaattttttctgtcatttgaaagtactgacaactatttgtaactaatcttccttaagaactgtatttgagggtatcaaatcaagcttgtaatttaaaatctgtaccaaca

SEQ ID NO: 70649 - DNA, 2971 bp, Homo sapiens
cggatctgcctcaatgcaatacaacatctaagcgaagagtgagattccaagaaatagacgatagcttggatcacgatgaagttggaggtggctcctgtattttgctggtcttgctgtgcatagcaacggttttcctcagtgttggagggactgcattatactgcactttcggtgacatggagtcacctgtttgtactgactttgcagacaacatggacttctattacactaagttacttcagggagtggcagaactgaagcactggatctacctctcctagcagcattccagacacagacatgctggcagtgagagtgaaaggcgggagactttctaaacagtttttctttcaggaattctgtagcattcccccttccctctgttaggaaccaaggacatcagaaatagcaactttaagtggcaagccggaggaactctgttagaataatccacacagtgaggcaaatatcaatctaagcattgtggatggaaggaatggtctttggagagagcatatccatctcctcctcactgcctcctaatgtcatgaggtacactgagcagaattaaacagggtagtcttaaccacactatttttagctaccttgtcaagctaatggttaaagaacacttttggtttacacttgttgggtcatagaagttgctttccgccatcacgcaataagttcgtgtgtaatcagaaggagttaccttatggtttcagtgtcattctttagttaacttgggagctgtgtaatttaggctttgcgtattatttcacttctgttctccacttatgaagtgattgtgtgttcgcgtgtgtgtgcgtgcgcatgtgcttccggcagttaacataagcaaatacccaacatcacaaagatgatctttcttcttttaacttgatgatgatgtgcaggcacaaatctttggagaaggcttaactgtagaatagatgaattctagaactcttgaccctgcaatgagaaactgtgacagatctgtgtcaattaacttgattagccagaaattaatcacaggcctagagaccaaagaaaaagctcccctgagtctcaggcaacagttttgtcacggatgcaaagcttcctgaaatcatgaatgctggactcagtttggcaaacgcttacacctattatgttctgagattctgagaaccagaatgcaaacttaagtaagatacagttcccactgtaggtgttttaatcctggtcttatatagaataaaccagtactttgctgagtgaaatcaccatatagaattcagtattaacagatcatgcattcagatgcttgaatgtgcattcttgttgtgggcttgatttagatcctattgcggggtcattacgcgaaaattcaatcataccttccatagacaaatgtctgatttttgtttaaatctgtccgttaggtggcctttccttatctgaggtgtagtggtctaacatttaggaagccttgctttgactttatcgggcagcattaaaaaaaaaacaacaaagaaaaaccaaacatgaattatagtttttaacaagtgatctttatctcctgtcttctgttaggatcatttgaaagaaaaagggagaacttactttctagttgttactggctggcacagtacctccctttgtgtttctgcttatttatttagattatgtgaatcttaaagggctttttatatcagttgaaagtgtgttactgcgcatgcatttggtgattccagtgctagatatttaattactgtgtatttagtgttttgattttctataatttcagttccgcgtgtttttacacttgttcattttaaattgatgtttcattttcacttataatactgtttgacttgtctctatcatgtcaccataaactgtaatattttcaagggttatagatcaaagatatttatttagaaatgtacaagataatgaaatttagattccttatacttaaggctgattttattagaagattattttaatgttctattataaattttaagaatttgtattcaaattgtatgtaaaatatgtaaaatgttgacggtactatattaagtggttctataaaagctattcacaagttctactgtgatggacatcctcatcatagacaaacctcctctgttttatcctcaatttctagttacagaaatttggtgatgcttatttttgccaattttatgtcaaaataagttaaaacttccctcctgttcacctcttgggtctctatcctgtgtaacctctggtgtagtatttgcccataggcaaccagagccacttcctctgaacccaacatctcctggggaccttcgcagcaagaggaaagcactgagacaatagcttgctaagcaggggcccagtggtgtctcagagaaaccatgggtgtcctcgccacttcccagggagggtgaggtgagctcgggaacataacgatgttttgacttacaataggcatgaaatcgcaactagaaaaattagggcagtttttaaaaatgtcatagttatctattgcatgaactggagtaattccacctggtggtgaaaggattgttatttcacacatgaaaaattcatccagttttactaaaatgtaattttttctgtcatttgaaagtactgacaactatttgtaactaatcttccttaagaactgtatttgagggtatcaaatcaagcttgtaatttaaaatctgtaccaacaaagtgtctcagagagtttatttgaaccattgggtgctgagaaaaaactgctttaaagtgaaactttgatttcagaagttgatctggccctacaagtagacagtcatctactttgggaagactaataggtccttaggtaacggctcttctgctttaaaatacctcccccatctgctgacagtagctgaagattattctaaacattcattcttttagatttaaaaataaaaatcttctggaggatttaagatttgaa

SEQ ID NO: 70650 - DNA, 2328 bp, Homo sapiens
cggatctgcctcaatgcaatacaacatctaagcgaagagtgagattccaagaaatagacgatagcttggatcacgatgaagttggaggtggctcctgtattttgctggtcttgctgtgcatagcaacggttttcctcagtgttggagggactgcattatactgcactttcggtgacatggagtcacctgtttgtactgactttgcagacaacatggacttctattacactaagttacttcagggagtggcagaactgaagcactggatctacctctcctagcagcattccagacacagacatgctggcagtgagagtgaaaggcgggagactttctaaacagtttttctttcaggaattctgtagcattcccccttccctctgttaggaaccaaggacatcagaaatagcaactttaagtggcaagccggaggaactctgttagaataatccacacagtgaggcaaatatcaatctaagcattgtggatggaaggaatggtctttggagagagcatatccatctcctcctcactgcctcctaatgtcatgaggtacactgagcagaattaaacagggtagtcttaaccacactatttttagctaccttgtcaagctaatggttaaagaacacttttggtttacacttgttgggtcatagaagttgctttccgccatcacgcaataagttcgtgtgtaatcagaaggagttaccttatggtttcagtgtcattctttagttaacttgggagctgtgtaatttaggctttgcgtattatttcacttctgttctccacttatgaagtgattgtgtgttcgcgtgtgtgtgcgtgcgcatgtgcttccggcagttaacataagcaaatacccaacatcacaaagatgatctttcttcttttaacttgatgatgatgtgcaggcacaaatctttggagaaggcttaactgtagaatagatgaattctagaactcttgaccctgcaatgagaaactgtgacagatctgtgtcaattaacttgattagccagaaattaatcacaggcctagagaccaaagaaaaagctcccctgagtctcaggcaacagttttgtcacggatgcaaagcttcctgaaatcatgaatgctggactcagtttggcaaacgcttacacctattatgttctgagattctgagaaccagaatgcaaacttaagtaagatacagttcccactgtaggtgttttaatcctggtcttatatagaataaaccagtactttgctgagtgaaatcaccatatagaattcagtattaacagatcatgcattcagatgcttgaatgtgcattcttgttgtgggcttgatttagatcctattgcggggtcattacgcgaaaattcaatcataccttccatagacaaatgtctgatttttgtttaaatctgtccgttaggtggcctttccttatctgaggtgtagtggtctaacatttaggaagccttgctttgactttatcgggcagcattaaaaaaaaaacaacaaagaaaaaccaaacatgaattatagtttttaacaagtgatctttatctcctgtcttctgttaggatcatttgaaagaaaaagggagaacttactttctagttgttactggctggcacagtacctccctttgtgtttctgcttatttatttagattatgtgaatcttaaagggctttttatatcagttgaaagtgtgttactgcgcatgcatttggtgattccagtgctagatatttaattactgtgtatttagtgttttgattttctataatttcagttccgcgtgtttttacacttgttcattttaaattgatgtttcattttcacttataatactgtttgacttgtctctatcatgtcaccataaactgtaatattttcaagggttatagatcaaagatatttatttagaaatgtacaagataatgaaatttagattccttatacttaaggctgattttattagaagattattttaatgttctattataaattttaagaatttgtattcaaattgtatgtaaaatatgtaaaatgttgacggtactatattaagtggttctataaaagctattcacaagttctactgtgatggacatcctcatcatagacaaacctcctctgttttatcctcaatttctagttacagaaatttggtgatgcttatttttgccaattttatgtcaaaataagttaaaacttccctcctgttcacctcttgggtctctatcctgtgtaacctctggtgtagtggtctaacatttaggaagccttgctttgactttatcgggcagcattaagaaatataacaac

SEQ ID NO: 70651 - DNA, 2286 bp, Homo sapiens
cggatctgcctcaatgcaatacaacatctaagcgaagagtgagattccaagaaatagacgatagcttggatcacgatgaagttggaggtggctcctgtattttgctggtcttgctgtgcatagcaacggttttcctcagtgttggagggactgcattatactgcactttcggtgacatggagtcacctgtttgtactgactttgcagacaacatggacttctattacactaagttacttcagggagtggcagaactgaagcactggatctacctctcctagcagcattccagacacagacatgctggcagtgagagtgaaaggcgggagactttctaaacagtttttctttcaggaattctgtagcattcccccttccctctgttaggaaccaaggacatcagaaatagcaactttaagtggcaagccggaggaactctgttagaataatccacacagtgaggcaaatatcaatctaagcattgtggatggaaggaatggtctttggagagagcatatccatctcctcctcactgcctcctaatgtcatgaggtacactgagcagaattaaacagggtagtcttaaccacactatttttagctaccttgtcaagctaatggttaaagaacacttttggtttacacttgttgggtcatagaagttgctttccgccatcacgcaataagttcgtgtgtaatcagaaggagttaccttatggtttcagtgtcattctttagttaacttgggagctgtgtaatttaggctttgcgtattatttcacttctgttctccacttatgaagtgattgtgtgttcgcgtgtgtgtgcgtgcgcatgtgcttccggcagttaacataagcaaatacccaacatcacaaagatgatctttcttcttttaacttgatgatgatgtgcaggcacaaatctttggagaaggcttaactgtagaatagatgaattctagaactcttgaccctgcaatgagaaactgtgacagatctgtgtcaattaacttgattagccagaaattaatcacaggcctagagaccaaagaaaaagctcccctgagtctcaggcaacagttttgtcacggatgcaaagcttcctgaaatcatgaatgctggactcagtttggcaaacgcttacacctattatgttctgagattctgagaaccagaatgcaaacttaagtaagatacagttcccactgtaggtgttttaatcctggtcttatatagaataaaccagtactttgctgagtgaaatcaccatatagaattcagtattaacagatcatgcattcagatgcttgaatgtgcattcttgttgtgggcttgatttagatcctattgcggggtcattacgcgaaaattcaatcataccttccatagacaaatgtctgatttttgtttaaatctgtccgttaggtggcctttccttatctgaggtgtagtggtctaacatttaggaagccttgctttgactttatcgggcagcattaaaaaaaaaacaacaaagaaaaaccaaacatgaattatagtttttaacaagtgatctttatctcctgtcttctgttaggatcatttgaaagaaaaagggagaacttactttctagttgttactggctggcacagtacctccctttgtgtttctgcttatttatttagattatgtgaatcttaaagggctttttatatcagttgaaagtgtgttactgcgcatgcatttggtgattccagtgctagatatttaattactgtgtatttagtgttttgattttctataatttcagttccgcgtgtttttacacttgttcattttaaattgatgtttcattttcacttataatactgtttgacttgtctctacaataggcatgaaatcgcaactagaaaaattagggcagtttttaaaaatgtcatagttatctattgcatgaactggagtaattccacctggtggtgaaaggattgttatttcacacatgaaaaattcatccagttttactaaaatgtaattttttctgtcatttgaaagtactgacaactatttgtaactaatcttccttaagaactgtatttgagggtatcaaatcaagcttgtaatttaaaatctgtaccaacaaagtgtctcagagagtttatttgaaccattgggtgctgagaaaaaactgctttaaagtgaaactttgatttcagaagttgatctggccctacaagtagacagtcatctactttgggaagactaataggtccttaggtaacagaaccgtcgggggatcctcta

SEQ ID NO: 70652 - DNA, 1992 bp, Homo sapiens
  misc_feature (1830)..(1830): n is a, c, g, or t
  misc_feature (1897)..(1897): n is a, c, g, or t
  misc_feature (1912)..(1912): n is a, c, g, or t
  misc_feature (1992)..(1992): n is a, c, g, or t
cggatctgcctcaatgcaatacaacatctaagcgaagagtgagattccaagaaatagacgatagcttggatcacgatgaagttggaggtggctcctgtattttgctggtcttgctgtgcatagcaacggttttcctcagtgttggagggactgcattatactgcactttcggtgacatggagtcacctgtttgtactgactttgcagacaacatggacttctattacactaagttacttcagggagtggcagaactgaagcactggatctacctctcctagcagcattccagacacagacatgctggcagtgagagtgaaaggcgggagactttctaaacagtttttctttcaggaattctgtagcattcccccttccctctgttaggaaccaaggacatcagaaatagcaactttaagtggcaagccggaggaactctgttagaataatccacacagtgaggcaaatatcaatctaagcattgtggatggaaggaatggtctttggagagagcatatccatctcctcctcactgcctcctaatgtcatgaggtacactgagcagaattaaacagggtagtcttaaccacactatttttagctaccttgtcaagctaatggttaaagaacacttttggtttacacttgttgggtcatagaagttgctttccgccatcacgcaataagttcgtgtgtaatcagaaggagttaccttatggtttcagtgtcattctttagttaacttgggagctgtgtaatttaggctttgcgtattatttcacttctgttctccacttatgaagtgattgtgtgttcgcgtgtgtgtgcgtgcgcatgtgcttccggcagttaacataagcaaatacccaacatcacaaagatgatctttcttcttttaacttgatgatgatgtgcaggcacaaatctttggagaaggcttaactgtagaatagatgaattctagaactcttgaccctgcaatgagaaactgtgacagatctgtgtcaattaacttgattagccagaaattaatcacaggcctagagaccaaagaaaaagctcccctgagtctcaggcaacagttttgtcacggatgcaaagcttcctgaaatcatgaatgctggactcagtttggcaaacgcttacacctattatgttctgagattctgagaaccagaatgcaaacttaagtaagatacagttcccactgtaggtgttttaatcctggtcttatatagaataaaccagtactttgctgagtgaaatcaccatatagaattcagtattaacagatcatgcattcagatgcttgaatgtgcattcttgttgtgggcttgatttagatcctattgcggggtcattacgcgaaaattcaatcataccttccatagacaaatgtctgatttttgtttaaatctgtccgttaggtggcctttccttatctgaggtgtagtggtctaacatttaggaagccttgctttgactttatcgggcagcattaaaaaaaaaacaacaaagaaaaaccaaacatgaattatagtttttaacaagtgatctttatctcctgtcttctgttaggatcatttgaaagatgtttctgcttatttatttagattatgtgaatcttaaagggctttttatatcagttgaaagtgtgttactgcgcatgcatttggtgattccagtgctagatatttaattactgtgtatttagtgttttgattttctataatttcagttccgcgtgtttttacacttgttcattttaaattgatgtttcattttcacttataatactgtttgacttgtctctacataactgatatttcngggtatgacaagtattattagatgtcagatatgaattaattctatctaaggtgtttatagagatatntatgtctatataatntaagaattgattcaaatgatgtaaattgtaaatgtgacggactatataagtgtctataaagcttccacagtctactggan

SEQ ID NO: 70653 - DNA, 393 bp, Homo sapiens
actggtatcaagattacactggccttataaaatgagttaggtggctttccctgttttctgttctttgataaactttgtatttattatggaaagcaaaaaatatgcaatacatttgagaagacattaccaaccattactaaagaacataaatgaacatctgattaaaatacagacatacacatgtttatacctaggaagacaatacatttatgaagatttcaattctgacccaatatattctgtaaaactcagtggagctctaatcaaaatcccctcaacttgataaactgatcttaaaattaataggtcaaaacaaatggtcaagaatatctaaaacttattctagttaattttaaaactatagaacactgatatacaaccatataagccaaa

SEQ ID NO: 70654 - DNA, 428 bp, Homo sapiens
cttgtctctctccatgcatgcattcttatagcatgacaaagttggcagtatacaagttttggaagcaggcctgagttcaaatcccaatgttctataatatggacatgatttgtgattgaataaaaaaaatttttaaatgtgcggcatttgtgagataattggaaattttaacgtaattgaatatctaatatcaagcagtcactactttttttcgagtgtgacgatgtgggtagtttaagaaaaaggccttatcttttagaaatacatacggaaacatttgtggataaaacgttgggctgttatttgcttacaaaagttgtgggagtagatggggtgtggattggatggttgttgggacaggatgattagtacctaattctgtctgcacttacgtatgattgaaattctccctaggatatagaactaaa

SEQ ID NO: 70655 - DNA, 189 bp, Homo sapiens
gcggccgcctactactactactactgctcgaattcaagcttctaacgatgtacggggacatgactaatttatcgatttttatcaatttttatcagttttatatttataagccttatttatgatgtatatttaatgttaatattgtgcaaacttatatttaaaacttgcctggtttctaaaccctctgtg

SEQ ID NO: 70656 - DNA, 1865 bp, Homo sapiens
gtgtcacccccagcgggcgcgggccggagcacgggcacccagcatgggggtactgctcacacagaggacgctgctcagtctggtccttgcactcctgtttccaagcatggcgagcatggcggctataggcagctgctcgaaagagtaccgcgtgctccttggccagctccagaagcagacagatctcatgcaggacaccagcagactcctggacccctatatacgtatccaaggcctggatgttcctaaactgagagagcactgcagggagcgccccggggccttccccagtgaggagaccctgagggggctgggcaggcggggcttcctgcagaccctcaatgccacactgggctgcgtcctgcacagactggccgacttagagcagcgcctccccaaggcccaggatttggagaggtctgggctgaacatcgaggacttggagaagctgcagatggcgaggccgaacatcctcgggctcaggaacaacatctactgcatggcccagctgctggacaactcagacacggctgagcccacgaaggctggccggggggcctctcagccgcccacccccacccctgcctcggatgcttttcagcgcaagctggagggctgcaggttcctgcatggctaccatcgcttcatgcactcagtggggcgggtcttcagcaagtggggggagagcccgaaccggagccggagacacagcccccaccaggccctgaggaagggggtgcgcaggaccagaccctccaggaaaggcaagagactcatgaccaggggacagctgccccggtagcctcgagagcaccccttgccggtgaaggatgcggcaggtgctctgtggatgagaggaaccatcgcaggatgacagctcccgggtccccaaacctgttcccctctgctactagccactgagaagtgcactttaagaggtgggagctgggcagacccctctacctcctccaggctgggagacagagtcaggctgttgcgctcccacctcagccccaagttccccaggcccagtggggtggccgggcgggccacgcgggaccgactttccattgattcaggggtctgatgacacaggctgactcatggccgggctgactgcccccctgccttgctccccgaggcctgccggtccttccctctcatgacttgcagggccgttgcccccagacttcctcctttccgtgtttctgaaggggaggtcacagcctgagctggcctcctatgcctcatcatgtcccaaaccagacacctggatgtctgggtgacctcactttaggcagctgtaacagcggcagggtgtcccaggagccctgatccgggggtccagggaatggagctcaggtcccaggccagccccgaagtcgccacgtggcctggggcaggtcactttacctctgtggacctgttttctctttgtgaagctagggagttagaggctgtacaaggcccccactgcctgtcggttgcttggattccctgacgtaaggtggatattaaaaatctgtaaatcaggacaggtggtgcaaatggcgctgggaggtgtacacggaggtctctgtaaaagcagacccacctcccagcgccgggaagcccgtcttgggtcctcgctgctggctgctccccctggtggtggatcctggaattttctcacgcaggagccattgctctcctagagggggtctcagaaactgcgaggccagttccttggagggacatgactaatttatcgatttttatcaatttttatcagttttatatttataagccttatttatgatgtatatttaatgttaatattgtgcaaacttatatttaaaacttgcctggtttctaaaccctctgtg

SEQ ID NO: 70657 - DNA, 621 bp, Homo sapiens
  misc_feature (621)..(621): n is a, c, g, or t
ctgtggtccagtgatctccaaaaatgctttgtaacagcagatgattagattttaaaagatcagtttagctggcagtttgcctgttcatctactcccataaattcagtgggtgggcctgactcagtgtgtcggagtagaagctcaggtgaggaaccttaatctaacctgaccaggctgattgacagcagtggagagactgccatacaaccaaaccatggggacacatgaacttctttggaaactggcctgtctgggtcacagtgtgtcctctgcttgttaagaagatgcctggcacagcagtagttagattacttgtaaaatagaaaccttggaatgtctaatgactagattgggaaataagataattggattctagttctgtatttacctccaagctgtattttgatgttgggagactcacttcatttccttgggtatcagttttctcatctgtaaaaggaaatgagtacagtcatttgaaaatacttctagttttattatgttccttgaaatatgggactattggcaccaccccctcacttgaacaatatgagttggcatattaatattaatcttagttaaaagtgttagctgaacaaaatgatagaaacaaaaaaaaan

SEQ ID NO: 70658 - DNA, 193 bp, Homo sapiens
taaatgcctaattggatttctgtctgtctgctatctaatgtttaaaaaaacctaaaattcatttattgattagttgtttaatataattcagagtaatgtgaataggtaataatattaatatgcagtctaaatactgacttttcatcattccataacctggactgatgaaaagtcagtatttagactgcatatt

SEQ ID NO: 70659 - DNA, 1588 bp, Homo sapiens
  misc_feature (183)..(183): n is a, c, g, or t
  misc_feature (281)..(281): n is a, c, g, or t
agtatataagtgtctagcacagtccttggcacatagaaagtgctctgtaaacagtacttcgcatcaaattcttgggatgaatgaaagtgagtgcctggcgctgcacataagaaaagacgtggcagcaaaccatcctcccgacatgacgtgctgcgttggtgcgtttacgtccctgttccttcngaaagactcaaaattgtgttggagctactggtgcacctttgtaagacctgcactaacgaccgcgccactgggaagggcacttctttatgaagtcgccntattcccagggagactggtcaacccatacaatgtgaaaaaaaaagaagctatgtgaaaaaatattcccctttgtcatagagaaggagaacttggtgaggctgggcagctgcaggagcctcagtttttcagataacagaacagagtagaccttgagggtccatttccctttttgttttaggaagtgctgtagaagggggcaaagagatctttgatatgagaaggtatttcttcaaagcagcatcgtgcctgaaatagcattgttctttacgctgagagaggaggaaatgggaatttggtgttcaacgggtttaaagtttcagttacaagaaatggacaagtccgagagctctgctgtgccacatcatgcctaaagtcaccgagactgtgttgtacacttttttgttaaaaggtaaatctcatgttaaatgttgttactacaattaaaaagaagccctaggctgtgtttgcagaaaggcactaaccatacatgtgctcaagagcccttttgtgttttcttcacttcatgttgtagttcaatttagttttgctttgcaaggatcctcggaaagtgtatcatcagcaatgacttttattttagaactaaatgtgaaccacggggggaatcatgatcgacattgctcgttgtcctttcttcctccctgtgggctgtgaatccaactcgtcctgggagcagggcgctctcgccttctgttcctctccgagctcagtgcacagaagcattctgcttacccagctgggactgctgactgcaccatcgagcacgcaggttgcactgttctcagcagctacactggattatatgccgcctttcttactgactgattatgaacttaaaacaaattcactctgctgctgtgaattatacatttatttttaagcatttatttcaactcgagatgagcggtctctcctgtaaatttctccctgctggatctttgctctggtttctggtgacatagtgtgagtgccggcagccgcgagcctcagaaggaaaattacaaagggaatactcagtaaatgatgtattgcctttcgcatcagtagcctgcttggaaatgttcaaattatcagcccaggagactccagtgctgtggacatgggtctgaacgaattgatcacctaggggctactgagaacgcggtgctctgtaagtatccatggatgcacagcgcagacgcggaaagggatccccagaatgttccttctgttgctggtttagattgtgaggaaaaaatgcattttccatgagtctttaacttagtattaaatgttgttactggttgat

SEQ ID NO: 70660 - DNA, 467 bp, Homo sapiens
cgaatgtgtttttgactgttaactgggttcgctttccagatctgtctttcccaaatgaaaggttagtcccatagaccactggctattcagggaaattactctctacctccccatgacatggatgataagtgttgagggatgaacactctggaaactcttagcatggattttgaattccagatttctttataggagatgtataaaaaggagtttatagcatacaaaaattatactgctcttcccagtaagggactaaaaggacatttgaaatctttacattttagatgtttttgtgaattataaatatctcctttttcctcgcttcatgctaacttgtctctagataaaatcttatttcttcatacattggaccacaaggcataaagaaggtagctcagcgccactgagattgtgttctgcataatatttggaaggcttccatttccattgaaaacaaatccatgagt

SEQ ID NO: 70661 - DNA, 305 bp, Homo sapiens
aaaaattcaaaccttactccaagtcttctaatataggagtgattgttttaggagcatttaatattgcagtataagttaaaccactgctgatcagcatccatttacacagggacttatatgcctattgcttacaaagtatgagttaattcctggattcattaacaactctttttcctgtgtttaaaacagcgtgtcttgttatgttgcccaggctggtttcaaactcctggcttaaagcaattctcctgtctgagcctcccagcagtttagagttgtgagccactacacctggccaaccactcttt

SEQ ID NO: 70662 - DNA, 1400 bp, Homo sapiens
  misc_feature (1141)..(1141): n is a, c, g, or t
  misc_feature (1367)..(1367): n is a, c, g, or t
aaaaaaactacgtgtccagaaggtattgaggtattgacacggatgcctacacctaggtttatttattaaaagcgcttttttacattccttgcaatactgatggtgatgatgcgcaggtctcattggtttcattcttgcagttgccatacagtgcctttccatttatttaacccccacctgaacggcataaactgagtgttcagctggtgttttttactgtaaacaataaggagactttgctcttcatttaaaccaaaatcatatttcatattttacgctcgagggtttttaccggttcctttttacactccttaaaacagtttttaagtcgtttggaacaagatattttttctttcctggcagcttttaacattatagcaaatttgtgtctgggggactgctggtcactgtttctcacagttgcaaatcaaggcatttgcaaccaagaaaaaaaaaattttttgttttatttgaaactggaccggataaacggtgtttgagcggctgctgtatatagttttaaatggtttattgcacctccttaagttgcacttatgtgggggggtggggttgatagaagtttttaatcacaaagtcacaggacttttttcttttgtaactgagctaaaaagggctgcttttcggtgggggcagatgaaggctcacaggagccctttctcttagagggggcaagtacccttcccttatatctttaatttgaggaatgtatgagataacagttgcagttgactgaaatgccactggaatttgaaaacttgacttttttttctttccttttttttttttttttttttaaaaaaaagaaacaaaaaacccacaaaaactacttgcccctcctagggaagctgtgtgccaaagaaccagtgtcataacccctccctcctgctgagctgacgttgcattgttgcatatcccagctactctgtgggttttgtgaagctgtgtgtgaagtctctacctcattgtagtatatgcaggcaagactgcactctcctacagatgtgtggagtaagctgtggtgtagtttttttggcacataataaacacgttgcagcagaaaaaaaaaaaaaaaaaagatttgcggccttttttttttttttttttgagtatacaccattgnggggatataatttattttggaattttctccattcagcttaaaaggtgtttcttcccaagaaactgaacttttctgtcaaatgcacttgatcgaataggagaattgggttcataaaatggattcattgaaaattttatatataaatcataaacatcagtaaagaagttctttattccatcttcttgtctatgtcatgaagcataataaacctcatatgccccgcggnggacaatgctgacacaaaccactcgttgaacct

SEQ ID NO: 70663 - DNA, 162 bp, Homo sapiens
tcaaactttacccctgctcaagcagtaggtgaaatgaaacatcagttttaaagaaaaaaaaccctgtaattctaagcttctttaaccacatgccactgcccaccacttccccaaagcccttcctttgtttccagggcaggtgacaaccctcactttttctag

SEQ ID NO: 70664 - DNA, 222 bp, Homo sapiens
tcactccgtagtgtgcacttggtgagggcagcagctcgccacagctgccagccgtctgtccattcacccatctgtccatctggcagcccgctgttcagacccgtctgtctgtccgcccatctgtaagcccatctctgtcccattgtctatctgaccatctttctcttactgtcctctttgtctagctatctggcctatctgtcgatccatcttcgtgtctgt

SEQ ID NO: 70665 - DNA, 209 bp, Homo sapiens
aagttgctggtctatgattctttttatttttatgattttattttagtttattttatttttgagacagagtctcgttctgtcacccaggctggagcgcagtggtgtgttctcggctcaccgcaacctccgcctcccaggttcaagcgtttcttgtgcctcagcctcccaggcagttgggattacaggtgagcaccaccactcccggctaa

SEQ ID NO: 70666 - DNA, 338 bp, Homo sapiens
cagcctccacgaagagaaaatggcggaatgggccttcgcctcccttttataacggctgtactcaaccgctgtatcttggaagcttggttttgattgggtgagaaggaacctttttcgacaactcttattggataatagtctcctgctctgactggataatcttaactaatcagagttggagacttatccaatctgtgttgtagtacagagtctgctctcatcctatcagaaagaggcttccagggtatgtcatttgaatacagacattataaaagggaggcaaagatctgcacctgccgtggaggttgggctcatgtgctcctctgcattggagttag

SEQ ID NO: 70667 - DNA, 349 bp, Homo sapiens
tgcctcaccctcctgagtagctgggactacaggcacgtgccaccatatccagctaatttttgtatttttagtagagacgggatttcaacatgttggccagaatggtctcgatctcttgacctcgtgatccacctgctttggcctcccaaagtgctgggattacagacatgagccacagcgcctggcctcctagacattcttaaggaaggaagcaggatgttgatttatattttagtatgagctccttattttactgtgaactactaacagttctcagaccagcacagtgtgggccacagttagagtagcactgtgagtataaatgacagtaaattttagtaacacagtg

SEQ ID NO: 70668 - DNA, 587 bp, Homo sapiens
cacttaaagactggactcagaggaagtgtaatgggtgaacactcaaagcacaggaggagaggtaatgctgttatttcatcagtgacaactctaccatggagacgctgattttagaccttggaagttgtatgggactatcacaggaccatggccaacctttggagtaggcactcctgggtccctggccccatctccatttctactttctgctccctgaagctaaaatctgttgagttcacgatcttcattctgagaagctgggatcttctgcattcatctgtacacagttctttccagtctccctcctgacttcagtgtgctaaaccaggtacctgaggaaggcaggatgcagcaggtttactccatcacatccagatcaataaccattaacattgtgcatagatggagtcctcccagcactctacagagtgggctttgtccctcatctcttctggaagtgctgattaaaaaaaaaattcctgtagatctcaagcccctggattcttagaaaccctctgttccaaacaacccaatctactcactgcccctaactgcctggttcttaaacaagagtgtgtttcaatatc

SEQ ID NO: 70669 - DNA, 826 bp, Homo sapiens
atgtaatatatggctgagtacgggggcgtccatctcttcattatcacatgcatcatctgaagcgggaccgggcaccaaggtactctcgggagagtcagcgggcatggcgggtggagcgctcgaagtcgtacaatcagagacctctgtacgtgactgtcaagttatctctatacaaagatctaacctgtttggattcatatgttaacgatgagttccagggaactaatggaacctcactggaacaatccctgtgccttatagaggtaatacatacaatattccaatatgcctatggctactggacacatacccatataatccccctatctgttttgttaagcctactagttcaatgactattaaaacaggaaagcatgttgatgcaaatgggaagatatatcttccttatctacatgaatggaaacacccacagtcagacttgttggggcttattcaggtcatgattgtggtatttggagatgaacctccagtcttctctcgtcctatttcggcatcctatccgccataccaggcaacggggccaccaaatacttcctacatgccaggcatgccaggtggaatctctccatacccatccggataccctcccaatcccagtggttacccaggctgtccttacccacctggtggtccatatcctgccacaacaagttctcagtacccttctcagcctcctgtgaccactgttgcccattatggatggcccatttagcttaggacaccattacgatcgtcttctaacttttgggtcagttgataactttgaaggcggttgaaagtaaataattgtaccctgtctcatata

SEQ ID NO: 70670 - DNA, 2065 bp, Homo sapiens
aatatagaaaagtttgtaaaaaaagaggtggtacggttggaatttcgggatgttgtttgaggccgggttgggggtgtgcgattgtgtgggacggtctggggcagcccagcagcggctgaccctctgcctgcggggaagggagtcgccaggcggccgtcatggcggtgtcggagagccagctcaagaaaatggtgtccaagtacaaatacagagacctaactgtacgtgaaactgtcaatgttattactctatacaaagatctcaaacctgttttggattcatatgtttttaacgatggcagttccagggaactaatgaacctcactggaacaatccctgtgccttatagaggtaatacatacaatattccaatatgcctatggctactggacacatacccatataatccccctatctgttttgttaagcctactagttcaatgactattaaaacaggaaagcatgttgatgcaaatgggaagatatatcttccttatctacatgaatggaaacacccacagtcagacttgttggggcttattcaggtcatgattgtggtatttggagatgaacctccagtcttctctcgtcctatttcggcatcctatccgccataccaggcaacggggccaccaaatacttcctacatgccaggcatgccaggtggaatctctccatacccatccggataccctcccaatcccagtggttacccaggctgtccttacccacctggtggtccatatcctgccacaacaagttctcagtacccttctcagcctcctgtgaccactgttggtcccagtagggatggcacaatcagcgaggacaccatccgagcctctctcatctctgcggtcagtgacaaactgagatggcggatgaaggaggaaatggatcgtgcccaggcagagctcaatgccttgaaacgaacagaagaagacctgaaaaagggtcaccagaaactggaagagatggttacccgtttagatcaagaagtagccgaggttgataaaaacatagaacttttgaaaaagaaggatgaagaactcagttctgctctggaaaaaatggaaaatcagtctgaaaacaatgatatcgatgaagttatcattcccacagctcccttatacaaacagatcctgaatctgtatgcagaagaaaacgctattgaagacactatcttttacttgggagaagccttgagaaggggcgtgatagacctggatgtcttcctgaagcatgtacgtcttctgtcccgtaaacagttccagctgagggcactaatgcaaaaagcaagaaagactgccggtctcagtgacctctactgacttctctgataccagctggaggttgagctcttcttaaagtattcttctcttccttttatcagtaggtgcccagaataagttattgcagtttatcattcaagtgtaaaatattttgaatcaataatatattttctgttttcttttggtaaagactggcttttattaatgcactttctatcctctgtaaactttttgtgctgaatgttgggactgctaaataaaatttgttgcataaaaaaaaaaaaaaaaaaaaaaaaaaaaaaaaaaaaaaaaaaaaaaaaaaaaacaaaaaaaaaaagaaaaaaaaaaaaacaaaacaaaaaaacagaaagaagaacaacacgacacaaacaacacaataagacgaatcaacggagggagggggcagcgccccggctaccatcacatcgctccggccgcgggcggccccacaccgacccaccaccacacctctgccgagcggacgcacgctacagcgcttcataccaagaccgtcgaggggccggcctaccgacaaaaaactatccgcagcgcgaagagcaagaacaaccactcacaaccacgagccatcagaaggacgacacaccaaccgcgggacggaacagacacgaataacagcgccaccccaaccagaccaaaaagaaccacagcaaaaaaacacaaccaacagggagagcagcaaacacaaacactcaccccgcgccaaacaatgcccagccgagcaaaaaaaatag

SEQ ID NO: 70671 - DNA, 1582 bp, Homo sapiens
aatatagaaaagtttgtaaaaaaagaggtggtacggttggaatttcgggatgttgtttgaggccgggttgggggtgtgcgattgtgtgggacggtctggggcagcccagcagcggctgaccctctgcctgcggggaagggagtcgccaggcggccgtcatggcggtgtcggagagccagctcaagaaaatggtgtccaagttatagaagacatatgggaagccatagaagattgtgacccagtacaaatacagagacctaactgtacgtgaaactgtcaatgttattactctatacaaagatctcaaacctgttttggattcatatgctaatgaacctcactggaacaatccctgtgccttatagaggtaatacatacaatattccaatatgcctatggctactggacacatacccatataatccccctatctgttttgttaagcctactagttcaatgactattaaaacaggaaagcatgttgatgcaaatgggaagatatatcttccttatctacatgaatggaaacacccacagtcagacttgttggggcttattcaggtcatgattgtggtatttggagatgaacctccagtcttctctcgtcctatttcggcatcctatccgccataccaggcaacggggccaccaaatacttcctacatgccaggcatgccaggtggaatctctccatacccatccggataccctcccaatcccagtggttacccaggctgtccttacccacctggtggtccatatcctgccacaacaagttctcagtacccttctcagcctcctgtgaccactgttggtcccagtagggatggcacaatcagcgaggacaccatccgagcctctctcatctctgcggtcagtgacaaactgagatggcggatgaaggaggaaatggatcgtgcccaggcagagctcaatgccttgaaacgaacagaagaagacctgaaaaagggtcaccagaaactggaagagatggttacccgtttagatcaagaagtagccgaggttgataaaaacatagaacttttgaaaaagaaggatgaagaactcagttctgctctggaaaaaatggaaaatcagtctgaaaacaatgatatcgatgaagttatcattcccacagctcccttatacaaacagatcctgaatctgtatgcagaagaaaacgctattgaagacactatcttttacttgggagaagccttgagaaggggcgtgatagacctggatgtcttcctgaagcatgtacgtcttctgtcccgtaaacagttccagctgagggcactaatgcaaaaagcaagaaagactgccggtctcagtgacctctactgacttctctgataccagctggaggttgagctcttcttaaagtattcttctcttccttttatcagtaggtgcccagaataagttattgcagtttatcattcaagtgtaaaatattttgaatcaataatatattttctgttttcttttggtaaagactggcttttattaatgcactttctatcctctgtaaactttttgtgctgaatgttgggactgctaaataaaatttgttgcataa

SEQ ID NO: 70672 - DNA, 1251 bp, Homo sapiens
aatatagaaaagtttgtaaaaaaagaggtggtacggttggaatttcgggatgttgtttgaggccgggttgggggtgtgcgattgtgtgggacggtctggggcagcccagcagcggctgaccctctgcctgcggggaagggagtcgccaggcggccgtcatggcggtgtcggagagccagctcaagaaaatggtgtccaagccacagtcagacttgttggggcttattcaggtcatgattgtggtatttggagatgaacctccagtcttctctcgtcctatttcggcatcctatccgccataccaggcaacggggccaccaaatacttcctacatgccaggcatgccaggtggaatctctccatacccatccggataccctcccaatcccagtggttacccaggctgtccttacccacctggtggtccatatcctgccacaacaagttctcagtacccttctcagcctcctgtgaccactgttggtcccagtagggatggcacaatcagcgaggacaccatccgagcctctctcatctctgcggtcagtgacaaactgagatggcggatgaaggaggaaatggatcgtgcccaggcagagctcaatgccttgaaacgaacagaagaagacctgaaaaagggtcaccagaaactggaagagatggttacccgtttagatcaagaagtagccgaggttgataaaaacatagaacttttgaaaaagaaggatgaagaactcagttctgctctggaaaaaatggaaaatcagtctgaaaacaatgatatcgatgaagttatcattcccacagctcccttatacaaacagatcctgaatctgtatgcagaagaaaacgctattgaagacactatcttttacttgggagaagccttgagaaggggcgtgatagacctggatgtcttcctgaagcatgtacgtcttctgtcccgtaaacagttccagctgagggcactaatgcaaaaagcaagaaagactgccggtctcagtgacctctactgacttctctgataccagctggaggttgagctcttcttaaagtattcttctcttccttttatcagtaggtgcccagaataagttattgcagtttatcattcaagtgtaaaatattttgaatcaataatatattttctgttttcttttggtaaagactggcttttattaatgcactttctatcctctgtaaactttttgtgctgaatgttgggactgctaaataaaatttgttgcataa

SEQ ID NO: 70673 - DNA, 1057 bp, Homo sapiens
tagacgatcgttaaggcgagccgggtagcaaaggctccttcctccgcgcgttcggacaacacagcagctcagcccgccgatgatgcaggcgcgcggtgctggcccgcctctggtggctgcacgccctattcttcctacatgccaggcatgccaggtggaatctctccatacccatccggataccctcccaatcccagtggttacccaggctgtccttacccacctggtggtccatatcctgccacaacaagttctcagtacccttctcagcctcctgtgaccactgttggtcccagtagggatggcacaatcagcgaggacaccatccgagcctctctcatctctgcggtcagtgacaaactgagatggcggatgaaggaggaaatggatcgtgcccaggcagagctcaatgccttgaaacgaacagaagaagacctgaaaaagggtcaccagaaactggaagagatggttacccgtttagatcaagaagtagccgaggttgataaaaacatagaacttttgaaaaagaaggatgaagaactcagttctgctctggaaaaaatggaaaatcagtctgaaaacaatgatatcgatgaagttatcattcccacagctcccttatacaaacagatcctgaatctgtatgcagaagaaaacgctattgaagacactatcttttacttgggagaagccttgagaaggggcgtgatagacctggatgtcttcctgaagcatgtacgtcttctgtcccgtaaacagttccagctgagggcactaatgcaaaaagcaagaaagactgccggtctcagtgacctctactgacttctctgataccagctggaggttgagctcttcttaaagtattcttctcttccttttatcagtaggtgcccagaataagttattgcagtttatcattcaagtgtaaaatattttgaatcaataatatattttctgttttcttttggtaaagactggcttttattaatgcactttctatcctctgtaaactttttgtgctgaatgttgggactgctaaataaaatttgttgcataa

SEQ ID NO: 70674 - DNA, 1511 bp, Homo sapiens
aatatagaaaagtttgtaaaaaaagaggtggtacggttggaatttcgggatgttgtttgaggccgggttgggggtgtgcgattgtgtgggacggtctggggcagcccagcagcggctgaccctctgcctgcggggaagggagtcgccaggcggccgtcatggcggtgtcggagagccagctcaagaaaatggtgtccaagtacaaatacagagacctaactgtacgtgaaactgtcaatgttattactctatacaaagatctcaaacctgttttggattcatatgtttttaacgatggcagttccagggaactaatgaacctcactggaacaatccctgtgccttatagaggtaatacatacaatattccaatatgcctatggctactggacacatacccatataatccccctatctgttttgttaagcctactagttcaatgactattaaaacaggaaagcatgttgatgcaaatgggaagatatatcttccttatctacatgaatggaaacacccacagtcagacttgttggggcttattcaggtcatgattgtggtatttggagatgaacctccagtcttctctcgtcctatttcggcatcctatccgccataccaggcaacggggccaccaaatacttcctacatgccaggcatgccaggtggaatctctccatacccatccggataccctcccaatcccagtggttacccaggctgtccttacccacctggtggtccatatcctgccacaacaagttctcagtacccttctcagcctcctgtgaccactgttggtcccagtagggatggcacaatcagcgaggacaccatccgagcctctctcatctctgcggtcagtgacaaactgagatggcggatgaaggaggaaatggatcgtgcccaggcagagctcaatgccttgaaacgaacagaagaagacctgaaaaagggtcaccagaaactggaagagatggttacccgtttagatcaagaagtagccgaggttgataaaaacatagaacttttgaaaaagaaggatgaagaactcagttctgctctggaaaaaatggaaaatcagtctgaaaacaatgatatcgatgaagttatcattcccacagctcccttatacaaacagatcctgaatctgtatgcagaagaaaacgctattgaagacactatcttttacttgggagaagccttgagaaggggcgtgatagacctggatgtcttcctgaagcatgtacgtcttctgtcccgtaaacagttccagctgagggcactaatgcaaaaagcaagaaagactgccggtctcagtgacctctactgacttctctgataccagctggaggttgagctcttcttaaagtattcttctcttccttttatcagtaggtgcccagaataagttattgcagtttatcattcaagtttttattaatgcactttctatcctctgtaaactttttgtgctgaatgttgggactgctaaataaaatttgttgcataa

SEQ ID NO: 70675 - DNA, 1680 bp, Homo sapiens
aatatagaaaagtttgtaaaaaaagaggtggtacggttggaatttcgggatgttgtttgaggccgggttgggggtgtgcgattgtgtgggacggtctggggcagcccagcagcggctgaccctctgcctgcggggaagggagtcgccaggcggccgtcatggcggtgtcggagagccagctcaagaaaatggtgtccaagtacaaatacagagacctaactgtacgtgaaactgtcaatgttattactctatacaaagatctcaaacctgttttggattcatatgtttttaacgatggcagttccagggaactaatgaacctcactggaacaatccctgtgccttatagaggtaatacatacaatattccaatatgcctatggctactggacacatacccatataatccccctatctgttttgttaagcctactagttcaatgactattaaaacaggaaagcatgttgatgcaaatgggaagatatatcttccttatctacatgaatggaaacacccacagtcagacttgttggggcttattcaggtcatgattgtggtatttggagatgaacctccagtcttctctcgtcctatttcggcatcctatccgccataccaggcaacggggccaccaaatacttcctacatgccaggcatgccaggtggaatctctccatacccatccggataccctcccaatcccagtggttacccaggctgtccttacccacctggtggtccatatcctgccacaacaagttctcagtacccttctcagcctcctgtgaccactgttggtcccagtagggatggcacaatcagcgaggacaccatccgagcctctctcatctctgcggtcagtgacaaactgagatggcggatgaaggaggaaatggatcgtgcccaggcagagctcaatgccttgaaacgaacagaagaagacctgaaaaagggtcaccagaaactggaagagatggttacccgtttagatcaagaagtagccgaggttgataaaaacatagaacttttgaaaaagaaggatgaagaactcagttctgctctggaaaaaatggaaaatcagtctgaaaacaatgatatcgatgaagttatcattcccacagctcccttatacaaacagatcctgaatctgtatgcagaagaaaacgctattgaagacactatcttttacttgggagaagccttgagaaggggcgtgatagacctggatgtcttcctgaagagtactgaggattggtctgagcaggggaagagaagtgggctggtggctgcagttctctgcccacaggcagcattaagatgagtgtaactcttctgtgcctgggtggatcaggagcatgtacgtcttctgtcccgtaaacagttccagctgagggcactaatgcaaaaagcaagaaagactgccggtctcagtgacctctactgacttctctgataccagctggaggttgagctcttcttaaagtattcttctcttccttttatcagtaggtgcccagaataagttattgcagtttatcattcaagtgtaaaatattttgaatcaataatatattttctgttttcttttggtaaagactggcttttattaatgcactttctatcctctgtaaactttttgtgctgaatgttgggactgctaaataaaatttgttgcataa

SEQ ID NO: 70676 - DNA, 2393 bp, Homo sapiens
aatatagaaaagtttgtaaaaaaagaggtggtacggttggaatttcgggatgttgtttgaggccgggttgggggtgtgcgattgtgtgggacggtctggggcagcccagcagcggctgaccctctgcctgcggggaagggagtcgccaggcggccgtcatggcggtgtcggagagccagctcaagaaaatggtgtccaagtacaaatacagagacctaactgtacgtgaaactgtcaatgttattactctatacaaagatctcaaacctgttttggattcatatgtttttaacgatggcagttccagggaactaatgaacctcactggaacaatccctgtgccttatagaggtaatacatacaatattccaatatgcctatggctactggacacatacccatataatccccctatctgttttgttaagcctactagttcaatgactattaaaacaggaaagcatgttgatgcaaatgggaagatatatcttccttatctacatgaatggaaacacccacagtcagacttgttggggcttattcaggtcatgattgtggtatttggagatgaacctccagtcttctctcgtcctatttcggcatcctatccgccataccaggcaacggggccaccaaatacttcctacatgccaggcatgccaggtggaatctctccatacccatccggataccctcccaatcccagtggttacccaggctgtccttacccacctggtggtccatatcctgccacaacaagttctcagtacccttctcagcctcctgtgaccactgttggtcccagtagggatggcacaatcagcgaggacaccatccgagcctctctcatctctgcggtcagtgacaaactgagatggcggatgaaggaggaaatggatcgtgcccaggcagagctcaatgccttgaaacgaacagaagaagacctgaaaaagggtcaccagaaactggaagagatggttacccgtttagatcaagaagtagccgaggttgataaaaacatagaacttttgaaaaagaaggatgaagaactcagttctgctctggaaaaaatggaaaatcagtctgaaaacaatgatatcgatgaagttatcattcccacagctcccttatacaaacagatcctgaatctgtatgcagaagaaaacgctattgaagacactatcttttacttgggagaagccttgagaaggggcgtgatagacctggatgtcttcctgaagagtactgaggattggtctgagcaggggaagagaagtgggctggtggctgcagttctctgcccacaggcagcattaagatgagtgtaactcttctgtgcctgggtggatcaggaggtacgatcagatttccattggttctttgaggtcataccacctaaattgagatcactgattgtgccacctccattttttatctgttaattttcttagagttatataactttagaccagttttcccacatcaaagtatcaggctgccctttcaagccctcttgtatgaaagttgtctcaagcttaatgctgttgtacagaggaaaatctagtaagcgaagtttggctactgctgtctcttgggtcatggagaacatggttttagggataatagcagccacccttgggatatctgatccagctgtagctggagcctggtcaggtcatgtgctgatcttgcctatctcctctcactgtgggggaatggccaaaccatgtgcctcagaagtggtacaaccacatgaatggctggatataaaccagagacccaagagaggactctttttctgtacaatctcttgcttgagtggcatggcttaggaaaagaaagtgtaggtcaaactcctgagccagatcctgcaatgtaatgctttccctgttgagtaagcctttataatatgcagcttaaaagccacatataatgaggtattcattccaaaggttggcaggtcatgagttagggttcttagatcccatctaggttacaaattgtctattttatgcctgggcctaaatcaaagccattctaaactattcaaacttttctcccctcccagcatgtacgtcttctgtcccgtaaacagttccagctgagggcactaatgcaaaaagcaagaaagactgccggtctcagtgacctctactgacttctctgataccagctggaggttgagctcttcttaaagtattcttctcttccttttatcagtaggtgcccagaataagttattgcagtttatcattcaagtgtaaaatattttgaatcaataatatattttctgttttcttttggtaaagactggcttttattaatgcactttctatcctctgtaaactttttgtgctgaatgttgggactgctaaataaaatttgttgcataa

SEQ ID NO: 70677 - DNA, 779 bp, Homo sapiens
catgctgttccagaggatccccagcacatttagtcatcgagacaccatccgagcctctctcatctctgcggtcagtgacaaactgagatggcggatgaaggaggaaatggatcgtgcccaggcagagctcaatgccttgaaacgaacagaagaagacctgaaaaagggtcaccagaaactggaagagatggttacccgtttagatcaagaagtagccgaggttgataaaaacatagaacttttgaaaaagaaggatgaagaactcagttctgctctggaaaaaatggaaaatcagtctgaaaacaatgatatcgatgaagttatcattcccacagctcccttatacaaacagatcctgaatctgtatgcagaagaaaacgctattgaagacactatcttttacttgggagaagccttgagaaggggcgtgatagacctggatgtcttcctgaagcatgtacgtcttctgtcccgtaaacagttccagctgagggcactaatgcaaaaagcaagaaagactgccggtctcagtgacctctactgacttctctgataccagctggaggttgagctcttcttaaagtattcttctcttccttttatcagtaggtgcccagaataagttattgcagtttatcattcaagtgtaaaatattttgaatcaataatatattttctgttttcttttggtaaagactggcttttattaatgcactttctatcctctgtaaactttttgtgctgaatgttgggactgctaaataaaatttgttgcataa

SEQ ID NO: 70678 - DNA, 1133 bp, Homo sapiens
aatatagaaaagtttgtaaaaaaagaggtggtacggttggaatttcgggatgttgtttgaggccgggttgggggtgtgcgattgtgtgggacggtctggggcagcccagcagcggctgaccctctgcctgcggggaagggagtcgccaggcggccgtcatggcggtgtcggagagccagctcaagaaaatggtgtccaagtacaaatacagagacctaactgtacgtgaaactgtcaatgttattactctatacaaagatctcaaacctgttttggattcatatgtttttaacgatggcagttccagggaactaatgaacctcactggaacaatccctgtgccttatagaggtaatacatacaatattccaatatgcctatggctactggacacatacccatataatccccctatctgttttgttaagcctactagttcaatgactattaaaacaggaaagcatgttgatgcaaatgggaagatatatcttccttatctacatgaatggaaacacccacagtcagacttgttggggcttattcaggtcatgattgtggtatttggagatgaacctccagtcttctctcgtcctatttcggcatcctatccgccataccaggcaacggggccaccaaatacttcctacatgccaggcatgccaggtggaatctctccatacccatccggataccctcccaatcccagtggttacccaggctgtccttacccacctggtggtccatatcctgccacaacaagttctcagtacccttctcagcctcctgtgaccactgttggtcccagtagggatggcacaatcagcgaggacaccatccgagcctctctcatctctgcggtcagtgacaaactgagatggcggatgaaggaggaaatggatcgtgcccaggcagagctcaatgccttgaaacgaacagaagaagacctgaaaaagggtcaccagaaactggaagagatggttacccgtttagatcaagaagtagccgaggttgataaaaacatagaacttttgaaaaagaaggatgaagaactcagttctgctcatgcatatagggacatccatttaggtaacatccattttaggtaacatgcacattaggtcacagacatttag

SEQ ID NO: 70679 - DNA, 597 bp, Homo sapiens
atataatcgaggtcggtaccctgagcagaggtgccgaggttgataaaaacatagaacttttgaaaaagaaggatgaagaactcagttctgctctggaaaaaatggaaaatcagtctgaaaacaatgatatcgatgaagttatcattcccacagctcccttatacaaacagatcctgaatctgtatgcagaagaaaacgctattgaagacactatcttttacttgggagaagccttgagaaggggcgtgatagacctggatgtcttcctgaagcatgtacgtcttctgtcccgtaaacagttccagctgagggcactaatgcaaaaagcaagaaagactgccggtctcagtgacctctactgacttctctgataccagctggaggttgagctcttcttaaagtattcttctcttccttttatcagtaggtgcccagaataagttattgcagtttatcattcaagtgtaaaatattttgaatcaataatatattttctgttttcttttggtaaagactggcttttattaatgcactttctatcctctgtaaactttttgtgctgaatgttgggactgctaaataaaatttgttgcataa

SEQ ID NO: 70680 - DNA, 896 bp, Homo sapiens
ggttggcctactggaaaaaaaaaaaaaatgagtgttgtttgaggccgggttgggggtgtgcgattgtgtgggacggtctggggcagcccagcagcggctgaccctctgcctgcggggaagggagtcgccaggcggccgtcatggcggtgtcggagagccagctcaagaaaatggtgtccaagtacaaatacagagacctaactgtacgtgaaactgtcaatgttattactctatacaaagatctcaaacctgttttggattcatatgtttttaacgatggcagttccagggaactaatgaacctcactggaacaatccctgtgccttatagaggtaatacatacaatattccaatatgcctatggctactggacacatacccatataatccccctatctgttttgttaagcctactagttcaatgactattaaaacaggaaagcatgttgatgcaaatgggaagatatatcttccttatctacatgaatggaaacacccacagtcagacttgttggggcttattcaggtcatgattgtggtatttggagatgaacctccagtcttctctcgtcctatttcggcatcctatccgccataccaggcaacggggccaccaaatacttcctacatgccaggcatgccaggtggaatctctccatacccatccggataccctcccaatcccagtggttacccaggctgtccttacccacctggtggtccatatcctgccacaacaagttctcagtacccttctcagcctcctgtgaccactgttgcccattatggatggcccatttagcttaggacaccattacgatcgtcttctaacttttgggtcagttgataactttgaaggcggttgaaagtaaataattgtaccctgtctcatata

SEQ ID NO: 70681 - DNA, 1081 bp, Homo sapiens
aatatagaaaagtttgtaaaaaaagaggtggtacggttggaatttcgggatgttgtttgaggccgggttgggggtgtgcgattgtgtgggacggtctggggcagcccagcagcggctgaccctctgcctgcggggaagggagtcgccaggcggccgtcatggcggtgtcggagagccagctcaagaaaatggtgtccaagttatagaagacatatgggaagccatagaagattgtgacccagtacaaatacagagacctaactgtacgtgaaactgtcaatgttattactctatacaaagatctcaaacctgttttggattcatatgctaatgaacctcactggaacaatccctgtgccttatagaggtaatacatacaatattccaatatgcctatggctactggacacatacccatataatccccctatctgttttgttaagcctactagttcaatgactattaaaacaggaaagcatgttgatgcaaatgggaagatatatcttccttatctacatgaatggaaacacccacagtcagacttgttggggcttattcaggtcatgattgtggtatttggagatgaacctccagtcttctctcgtcctatttcggcatcctatccgccataccaggcaacggggccaccaaatacttcctacatgccaggcatgccaggtggaatctctccatacccatccggataccctcccaatcccagtggttacccaggctgtccttacccacctggtggtccatatcctgccacaacaagttctcagtacccttctcagcctcctgtgaccactgttggagctgctgctaccgtcgctgcagccacggcaggcaccgccaccgctgccagaggagtgggcttgggaaagaagtggtcacctcacttggagctttgctcagaagcatcctcgtcccctgcagccctcccacgggaacgactggataaaagtgagctggtacagaaagccaactcactgagcaggctgagcgctatgatgatatggctgtagtcacgaaaggcagtcacacacgaagcgaggaatgaatccaacgaagagagaaatc

SEQ ID NO: 70682 - DNA, 667 bp, Homo sapiens
aatgacgcggtactttgagggtagaggcgttttagtgcaaatcaaagtaggttggggattcacttaacacaaacagtaaatgtgaacttactgtccccacagacttcagtgccctgaacggttagagaaattaatgaaggagctccaccaggtgccttcacaactctgagtcatatcagaatctctccacagctctcctttcaaaaatgacaccgtgacatttcaggatgtgaaaaaaacttactggaaagtgtgtaagaaaatataaaatactattgtacaatgtgataatgtatcatcagcttgttattttcagtgtgcttccttgtagcgccggactaccatttctgaattttggatttggtattttttttaaagaatcaaactcttaaaagaggaaatgcttataccaatagcctgtatgaagcaaaatttatgtgaaagctaaagatatgcatgcagttaaatatataaataaatctcaatgccatacaaaaaaaaaaaaaaaaaagggcggccgccctttttttttttttttgggggcaaaccttgttttaattgcaaacaacttaatttacagcacattcaataatgaaccaacaggagagttgctgactttgtaacatatgaatatataaaaatcccttgcaattcaggtagtcaaggg

SEQ ID NO: 70683 - DNA, 542 bp, Homo sapiens
tcatattcatccctaaatttgtaccagtatacttataatacattgtacagtggcaataaaataaatttttgttagttctgtggagtcaaatgaagaacaaaactctatgaattttgcaatatgctgctttaactagtgctatttttatatacttgaagcaagaaccttgctgcacatcatgtttaaaaccacttaactctattaaaataaattaattaaatgaaattttcatgattggggtcctacaaagaaaattatcaagctgagttgaaaaccgatgagaaatggctaacctttttctttttactgaaaagcaactctgtagctgacttgaattttttttcattttgtagccacagtcagacttgttggggcttattcaggtcatgattgtggtatttggagatgaacctccagtcttctctcgtcctatttcggcatcctatccgccataccaggcaacggggccaccaaatagtaagtagaattgagattttactttaaaactcatataaacaaaagagaacagaaacctttgtaaa

SEQ ID NO: 70684 - DNA, 1566 bp, Homo sapiens
aatatagaaaagtttgtaaaaaaagaggtggtacggttggaatttcgggatgttgtttgaggccgggttgggggtgtgcgattgtgtgggacggtctggggcagcccagcagcggctgaccctctgcctgcggggaagggagtcgccaggcggccgtcatggcggtgtcggagagccagctcaagaaaatggtgtccaagtacaaatacagagacctaactgtacgtgaaactgtcaatgttattactctatacaaagatctcaaacctgttttggattcatatgtttttaacgatggcagttccagggaactaatgaacctcactggaacaatccctgtgccttatagaggtaatacatacaatattccaatatgcctatggctactggacacatacccatataatccccctatctgttttgttaagcctactagttcaatgactattaaaacaggaaagcatgttgatgcaaatgggaagatatatcttccttatctacatgaatggaaacacccacagtcagacttgttggggcttattcaggtcatgattgtggtatttggagatgaacctccagtcttctctcgtcctatttcggcatcctatccgccataccaggcaacggggccaccaaatacttcctacatgccaggcatgccaggtggaatctctccatacccatccggataccctcccaatcccagtggttacccaggctgtccttacccacctggtggtccatatcctgccacaacaagttctcagtacccttctcagcctcctgtgaccactgttggtcccagtagggatggcacaatcagcgaggacaccatccgagcctctctcatctctgcggtcagtgacaaactgagatggcggatgaaggaggaaatggatcgtgcccaggcagagctcaatgccttgaaacgaacagaagaagacctgaaaaagggtcaccagaaactggaagagatggttacccgtttagatcaagaagtagccgaggttgataaaaacatagaacttttgaaaaagaaggatgaagaactcagttctgctctggaaaaaatggaaaatcagtctgaaaacaatgatatcgatgaagttatcattcccacagctcccttatacaaacagatcctgaatctgtatgcagaagaaaacgctattgaagacactatcttttacttgggagaagccttgagaaggggcgtgatagacctggatgtcttcctgaagcatgtacgtcttctgtcccgtaaacagttccagctgagggcactaatgcaaaaagcaagaaagactgccggtctcagtgacctctactgacttctctgataccagctggaggttgagctcttcttaaagtattcttctcttccttttatcagtaggtgcccagaataagttattgcagtttatcattcaagtgtaaaatattttgaatcaataatatattttctgttttcttttggtaaagactggcttttattaatgcactttctatcctctgtaaactttttgtgctgaatgttgggactgctaaataaaatttgttgcataa

SEQ ID NO: 70685 - DNA, 1548 bp, Homo sapiens
ggttggcctactggaaaaaaaaaaaaaatgagtgttgtttgaggccgggttgggggtgtgcgattgtgtgggacggtctggggcagcccagcagcggctgaccctctgcctgcggggaagggagtcgccaggcggccgtcatggcggtgtcggagagccagctcaagaaaatggtgtccaagtacaaatacagagacctaactgtacgtgaaactgtcaatgttattactctatacaaagatctcaaacctgttttggattcatatgtttttaacgatggcagttccagggaactaatgaacctcactggaacaatccctgtgccttatagaggtaatacatacaatattccaatatgcctatggctactggacacatacccatataatccccctatctgttttgttaagcctactagttcaatgactattaaaacaggaaagcatgttgatgcaaatgggaagatatatcttccttatctacatgaatggaaacacccacagtcagacttgttggggcttattcaggtcatgattgtggtatttggagatgaacctccagtcttctctcgtcctatttcggcatcctatccgccataccaggcaacggggccaccaaatacttcctacatgccaggcatgccaggtggaatctctccatacccatccggataccctcccaatcccagtggttacccaggctgtccttacccacctggtggtccatatcctgccacaacaagttctcagtacccttctcagcctcctgtgaccactgttggtcccagtagggatggcacaatcagcgaggacaccatccgagcctctctcatctctgcggtcagtgacaaactgagatggcggatgaaggaggaaatggatcgtgcccaggcagagctcaatgccttgaaacgaacagaagaagacctgaaaaagggtcaccagaaactggaagagatggttacccgtttagatcaagaagtagccgaggttgataaaaacatagaacttttgaaaaagaaggatgaagaactcagttctgctctggaaaaaatggaaaatcagtctgaaaacaatgatatcgatgaagttatcattcccacagctcccttatacaaacagatcctgaatctgtatgcagaagaaaacgctattgaagacactatcttttacttgggagaagccttgagaaggggcgtgatagacctggatgtcttcctgaagcatgtacgtcttctgtcccgtaaacagttccagctgagggcactaatgcaaaaagcaagaaagactgccggtctcagtgacctctactgacttctctgataccagctggaggttgagctcttcttaaagtattcttctcttccttttatcagtaggtgcccagaataagttattgcagtttatcattcaagtgtaaaatattttgaatcaataatatattttctgttttcttttggtaaagactggcttttattaatgcactttctatcctctgtaaactttttgtgctgaatgttgggactgctaaataaaatttgttgcataa

SEQ ID NO: 70686 - DNA, 1641 bp, Homo sapiens
ggttggcctactggaaaaaaaaaaaaaatgagtgttgtttgaggccgggttgggggtgtgcgattgtgtgggacggtctggggcagcccagcagcggctgaccctctgcctgcggggaagggagtcgccaggcggccgtcatggcggtgtcggagagccagctcaagaaaatggtgtccaagtacaaatacagagacctaactgtacgtgaaactgtcaatgttattactctatacaaagatctcaaacctgttttggattcatatgtttttaacgatggcagttccagggaactaatgaacctcactggaacaatccctgtgccttatagaggtaatacatacaatattccaatatgcctatggctactggacacatacccatataatccccctatctgttttgttaagcctactagttcaatgactattaaaacaggaaagcatgttgatgcaaatgggaagatatatcttccttatctacatgaatggaaacacagatgggattttgccatgttggcccagctggtctcaaactcctggcttcaagcagtccacccaccttggcctcccaaagtgctgggattacagccacagtcagacttgttggggcttattcaggtcatgattgtggtatttggagatgaacctccagtcttctctcgtcctatttcggcatcctatccgccataccaggcaacggggccaccaaatacttcctacatgccaggcatgccaggtggaatctctccatacccatccggataccctcccaatcccagtggttacccaggctgtccttacccacctggtggtccatatcctgccacaacaagttctcagtacccttctcagcctcctgtgaccactgttggtcccagtagggatggcacaatcagcgaggacaccatccgagcctctctcatctctgcggtcagtgacaaactgagatggcggatgaaggaggaaatggatcgtgcccaggcagagctcaatgccttgaaacgaacagaagaagacctgaaaaagggtcaccagaaactggaagagatggttacccgtttagatcaagaagtagccgaggttgataaaaacatagaacttttgaaaaagaaggatgaagaactcagttctgctctggaaaaaatggaaaatcagtctgaaaacaatgatatcgatgaagttatcattcccacagctcccttatacaaacagatcctgaatctgtatgcagaagaaaacgctattgaagacactatcttttacttgggagaagccttgagaaggggcgtgatagacctggatgtcttcctgaagcatgtacgtcttctgtcccgtaaacagttccagctgagggcactaatgcaaaaagcaagaaagactgccggtctcagtgacctctactgacttctctgataccagctggaggttgagctcttcttaaagtattcttctcttccttttatcagtaggtgcccagaataagttattgcagtttatcattcaagtgtaaaatattttgaatcaataatatattttctgttttcttttggtaaagactggcttttattaatgcactttctatcctctgtaaactttttgtgctgaatgttgggactgctaaataaaatttgttgcataa

SEQ ID NO: 70687 - DNA, 1357 bp, Homo sapiens
ggttggcctactggaaaaaaaaaaaaaatgagtgttgtttgaggccgggttgggggtgtgcgattgtgtgggacggtctggggcagcccagcagcggctgaccctctgcctgcggggaagggagtcgccaggcggccgtcatggcggtgtcggagagccagctcaagaaaatggtgtccaagtacaaatacagagacctaactgtacgtgaaactgtcaatgttattactctatacaaagatctcaaacctgttttggattcatatgtttttaacgatggcagttccagggaactaatgaacctcactggaacaatccctgtgccttatagaggtaatacatacaatattccaatatgcctatggctactggacacatacccatataatccccctatctgttttgttaagcctactagttcaatgactattaaaacaggaaagcatgttgatgcaaatgggaagatatatcttccttatctacatgaatggaaacactggttacccaggctgtccttacccacctggtggtccatatcctgccacaacaagttctcagtacccttctcagcctcctgtgaccactgttggtcccagtagggatggcacaatcagcgaggacaccatccgagcctctctcatctctgcggtcagtgacaaactgagatggcggatgaaggaggaaatggatcgtgcccaggcagagctcaatgccttgaaacgaacagaagaagacctgaaaaagggtcaccagaaactggaagagatggttacccgtttagatcaagaagtagccgaggttgataaaaacatagaacttttgaaaaagaaggatgaagaactcagttctgctctggaaaaaatggaaaatcagtctgaaaacaatgatatcgatgaagttatcattcccacagctcccttatacaaacagatcctgaatctgtatgcagaagaaaacgctattgaagacactatcttttacttgggagaagccttgagaaggggcgtgatagacctggatgtcttcctgaagcatgtacgtcttctgtcccgtaaacagttccagctgagggcactaatgcaaaaagcaagaaagactgccggtctcagtgacctctactgacttctctgataccagctggaggttgagctcttcttaaagtattcttctcttccttttatcagtaggtgcccagaataagttattgcagtttatcattcaagtgtaaaatattttgaatcaataatatattttctgttttcttttggtaaagactggcttttattaatgcactttctatcctctgtaaactttttgtgctgaatgttgggactgctaaataaaatttgttgcataa

SEQ ID NO: 70688 - DNA, 938 bp, Homo sapiens
tcccagtggttacccaggactgggagggtatccggatgggtatggagagattccacctggcatgcctcccaatcccagtggttacccaggctgtccttacccacctggtggtccatatcctgccacaacaagttctcagtacccttctcagcctcctgtgaccactgttggtcccagtagggatggcacaatcagcgaggacaccatccgagcctctctcatctctgcggtcagtgacaaactgagatggcggatgaaggaggaaatggatcgtgcccaggcagagctcaatgccttgaaacgaacagaagaagacctgaaaaagggtcaccagaaactggaagagatggttacccgtttagatcaagaagtagccgaggttgataaaaacatagaacttttgaaaaagaaggatgaagaactcagttctgctctggaaaaaatggaaaatcagtctgaaaacaatgatatcgatgaagttatcattcccacagctcccttatacaaacagatcctgaatctgtatgcagaagaaaacgctattgaagacactatcttttacttgggagaagccttgagaaggggcgtgatagacctggatgtcttcctgaagcatgtacgtcttctgtcccgtaaacagttccagctgagggcactaatgcaaaaagcaagaaagactgccggtctcagtgacctctactgacttctctgataccagctggaggttgagctcttcttaaagtattcttctcttccttttatcagtaggtgcccagaataagttattgcagtttatcattcaagtgtaaaatattttgaatcaataatatattttctgttttcttttggtaaagactggcttttattaatgcactttctatcctctgtaaactttttgtgctgaatgttgggactgctaaataaaatttgttgcataa

SEQ ID NO: 70689 - DNA, 1957 bp, Homo sapiens
aatatagaaaagtttgtaaaaaaagaggtggtacggttggaatttcgggatgttgtttgaggccgggttgggggtgtgcgattgtgtgggacggtctggggcagcccagcagcggctgaccctctgcctgcggggaagggagtcgccaggcggccgtcatggcggtgtcggagagccagctcaagaaaatggtgtccaagtacaaatacagagacctaactgtacgtgaaactgtcaatgttattactctatacaaagatctcaaacctgttttggattcatatgtttttaacgatggcagttccagggaactaatgaacctcactggaacaatccctgtgccttatagaggtaatacatacaatattccaatatgcctatggctactggacacatacccatataatccccctatctgttttgttaagcctactagttcaatgactattaaaacaggaaagcatgttgatgcaaatgggaagatatatcttccttatctacatgaatggaaacacccacagtcagacttgttggggcttattcaggtcatgattgtggtatttggagatgaacctccagtcttctctcgtcctatttcggcatcctatccgccataccaggcaacggggccaccaaatacttcctacatgccaggcatgccaggtggaatctctccatacccatccggataccctcccaatcccagtggttacccaggctgtccttacccacctggtggtccatatcctgccacaacaagttctcagtacccttctcagcctcctgtgaccactgttggtcccagtagggatggcacaatcagcgaggacaccatccgagcctctctcatctctgcggtcagtgacaaactgagatggcggatgaaggaggaaatggatcgtgcccaggcagagctcaatgccttgaaacgaacagaagaagacctgaaaaagggtcaccagaaactggaagagatggttacccgtttagatcaagaagtagccgaggttgataaaaacatagaacttttgaaaaagaaggatgaagaactcagttctgctctggaaaaaatggaaaatcagtctgaaaacaatgatatcgatgaagttatcattcccacagctcccttatacaaacagatcctgaatctgtatgcagaagaaaacgctattgaagacactatcttttacttgggagaagccttgagaaggggcgtgatagacctggatgtcttcctgaagcatgtacgtcttctgtcccgtaaacagttccagctgagggcactaatgcaaaaagcaagaaagactgccggtctcagtgacctctactgacttctctgataccagctggaggttgagctcttcttaaagtattcttctcttccttttatcaacttcagtgccctgaacggttagagaaattaatgaaggagctccaccaggtgccttcacaactctgagtcatatcagaatctctccacagctctcctttcaaaaatgacaccgtgacatttcaggatgtgaaaaaaacttactggaaagtgtgtaagaaaatataaaatactattgtacaatgtgataatgtatcatcagcttgttattttcagtgtgcttccttgtagcgccggactaccatttctgaattttggatttggtattttttttaaagaatcaaactcttaaaagaggaaatgcttataccaatagcctgtatgaagcaaaatttatgtgaaagctaaagatatgcatgcagttaaatatataaataaatctcaatgccatacaaaaaaaaaaaaaaaaaagggcggccgccctttttttttttttttgggggcaaaccttgttttaattgcaaacaacttaatttacagcacattcaataatgaaccaacaggagagttgctgactttgtaacatatgaatatataaaaatcccttgcaattcaggtagtcaaggg

SEQ ID NO: 70690 - DNA, 1512 bp, Homo sapiens
aatatagaaaagtttgtaaaaaaagaggtggtacggttggaatttcgggatgttgtttgaggccgggttgggggtgtgcgattgtgtgggacggtctggggcagcccagcagcggctgaccctctgcctgcggggaagggagtcgccaggcggccgtcatggcggtgtcggagagccagctcaagaaaatggtgtccaagtacaaatacagagacctaactgtacgtgaaactgtcaatgttattactctatacaaagatctcaaacctgttttggattcatatgtttttaacgatggcagttccagggaactaatgaacctcactggaacaatccctgtgccttatagaggtaatacatacaatattccaatatgcctatggctactggacacatacccatataatccccctatctgttttgttaagcctactagttcaatgactattaaaacaggaaagcatgttgatgcaaatgggaagatatatcttccttatctacatgaatggaaacacccacagtcagacttgttggggcttattcaggtcatgattgtggtatttggagatgaacctccagtcttctctcgtcctatttcggcatcctatccgccataccaggcaacggggccaccaaatacttcctacatgccaggcatgccaggtggaatctctccatacccatccggataccctcccaatcccagtggttacccaggctgtccttacccacctggtggtccatatcctgccacaacaagttctcagtacccttctcagcctcctgtgaccactgttggtcccagtagggatggcacaatcagcgaggacaccatccgagcctctctcatctctgcggtcagtgacaaactgagatggcggatgaaggaggaaatggatcgtgcccaggcagagctcaatgccttgaaacgaacagaagaagacctgaaaaagggtcaccagaaactggaagagatggttacccgtttagatcaagaagtagccgaggttgataaaaacatagaacttttgaaaaagaaggatgaagaactcagttctgctctggaaaaaatggaaaatcagtctgaaaacaatgatatcgatgaagttatcattcccacagctcccttatacaaacagatcctgaatctgtatgcagaagaaaacgctattgaagacactatcttttacttgggagaagccttgagaaggggcgtgatagacctggatgtcttcctgaagcatgtacgtcttctgtcccgtaaacagttccagctgagggcactaatgcagctggaggttgagctcttcttaaagtattcttctcttccttttatcagtaggtgcccagaataagttattgcagtttatcattcaagtgtaaaatattttgaatcaataatatattttctgttttcttttggtaaagactggcttttattaatgcactttctatcctctgtaaactttttgtgctgaatgttgggactgctaaataaaatttgttgcataa

SEQ ID NO: 70691 - DNA, 1204 bp, Homo sapiens
aatatagaaaagtttgtaaaaaaagaggtggtacggttggaatttcgggatgttgtttgaggccgggttgggggtgtgcgattgtgtgggacggtctggggcagcccagcagcggctgaccctctgcctgcggggaagggagtcgccaggcggccgtcatggcggtgtcggagagccagctcaagaaaatggtgtccaagtacaaatacagagacctaactgtacgtgaaactgtcaatgttattactctatacaaagatctcaaacctgttttggattcatatgtttttaacgatggcagttccagggaactaatgaacctcactggaacaatccctgtgccttatagaggtaatacatacaatattccaatatgcctatggctactggacacatacccatataatccccctatctgttttgttaagcctactagttcaatgactattaaaacaggaaagcatgttgatgcaaatgggaagatatatcttccttatctacatgaatggaaacacccacagtcagacttgttggggcttattcaggtcatgattgtggtatttggagatgaacctccagtcttctctcgtcctatttcggcatcctatccgccataccaggcaacggggccaccaaatacttcctacatgccaggcatgccaggtggaatctctccatacccatccggataccctcccaatcccagtggttacccaggctgtccttacccacctggtggtccatatcctgccacaacaagttctcagtacccttctcagcctcctgtgaccactgttggtcccagtagggatggcacaatcagcgaggacaccatccgagcctctctcatctctgcggtcagtgacaaactgagatggcggatgaaggaggaaatggatcgtgcccaggcagagctcaatgccttgaaacgaacagaagaagacctgaaaaagggtcaccagaaactggaagagatggttacccgtttagatcaagaagtagccgaggttgataaaaacatagaacttttgaaaaagaaggatgaagaactcagttctgctctggaaaaaatggaaaatcagtctgaaaacaatgatatcgatgaagttatcattcccacagctcccttatacaaacagatcctgaatctgtatgcagaagaaaacgctattgaagacatccaggtctatcacgcccctcgtgc

SEQ ID NO: 70692 - DNA, 1047 bp, Homo sapiens
ggttggcctactggaaaaaaaaaaaaaatgagtgttgtttgaggccgggttgggggtgtgcgattgtgtgggacggtctggggcagcccagcagcggctgaccctctgcctgcggggaagggagtcgccaggcggccgtcatggcggtgtcggagagccagctcaagaaaatggtgtccaagtacaaatacagagacctaactgtacgtgaaactgtcaatgttattactctatacaaagatctcaaacctgttttggattcatatgtttttaacgatggcagttccagggaactaatgaacctcactggaacaatccctgtgccttatagaggtaatacatacaatattccaatatgcctatggctactggacacatacccatataatccccctatctgttttgttaagcctactagttcaatgactattaaaacaggaaagcatgttgatgcaaatgggaagatatatcttccttatctacatgaatggaaacacccacagtcagacttgttggggcttattcaggtcatgattgtggtatttggagatgaacctccagtcttctctcgtcctatttcggcatcctatccgccataccaggcaacggggccaccaaatacttcctacatgccaggcatgccaggtggaatctctccatacccatccggataccctcccaatcccagtggttacccaggctgtccttacccacctggtggtccatatcctgccacaacaagttctcagtacccttctcagcctcctgtgaccactgttggagctgctgctaccgtcgctgcagccacggcaggcaccgccaccgctgccagaggagtgggcttgggaaagaagtggtcacctcacttggagctttgctcagaagcatcctcgtcccctgcagccctcccacgggaacgactggataaaagtgagctggtacagaaagccaactcactgagcaggctgagcgctatgatgatatggctgtagtcacgaaaggcagtcacacacgaagcgaggaatgaatccaacgaagagagaaatc

SEQ ID NO: 70693 - DNA, 870 bp, Homo sapiens
  misc_feature (694)..(694): n is a, c, g, or t
  misc_feature (738)..(738): n is a, c, g, or t
  misc_feature (747)..(747): n is a, c, g, or t
ggttggcctactggaaaaaaaaaaaaaatgagtgttgtttgaggccgggttgggggtgtgcgattgtgtgggacggtctggggcagcccagcagcggctgaccctctgcctgcggggaagggagtcgccaggcggccgtcatggcggtgtcggagagccagctcaagaaaatggtgtccaagtacaaatacagagacctaactgtacgtgaaactgtcaatgttattactctatacaaagatctcaaacctgttttggattcatatgtttttaacgatggcagttccagggaactaatgaacctcactggaacaatccctgtgccttatagaggtaatacatacaatattccaatatgcctatggctactggacacatacccatataatccccctatctgttttgttaagcctactagttcaatgactattaaaacaggaaagcatgttgatgcaaatgggaagatatatcttccttatctacatgaatggaaacacccacagtcagacttgttggggcttattcaggtcatgattgtggtatttggagatgaacctccagtcttctctcgtcctatttcggcatcctatccgccataccaggcaacggggccaccaaatacttcctacatgccaggcatgccaggtggaatctctccatacccatccggataccctcccaatcccagtggganataaaaatgcatgattaaaaactaagaataaaaaacctattttnatgtttccnaaaggaaattgtttattctacagactcagtaggtagacacaaacataaagatttccctagaagacatagagtgggatttgataacactgtctgttattttctgtacattgtggtaggtccagg

SEQ ID NO: 70694 - DNA, 711 bp, Homo sapiens
gaaaggaagataagaaggataccactcggcattgtttgcctggatccagtcctgccacaagccaataccaccaccaccctttttttaaaatcaattttatgaccctgaggcaataattcttgccctcctcccatgcatacttttcactacactgatcttaactacctgaaactgagaacatttagataaaaatcagagaatttgaggtcaatttagtagcacagcaaccacatacataaataattgcaaaaaaaagtgatgaagcataaatacaacacactgtcatggtacaaaaaagaaagatcaactcagcttagacggtttatagttcatcagccagaggttggcttattcttttttttaagggacgtagtctataactacatcacagaaaaaacaacatgtaggtgtccccttactcaagaaaggccttgtgacactggaggtaagtttggaagaatatggatctgtcaacctgaggaattgggaaagatgcaaatatggatctgtcaacctgaggaattgggaaagatgcaaatagataaaaacagaactatggtccaacagatgtggtatatttggtatggtggattagatacatccacaaattctttgctgcccatcctagtaagaggcatggcctaattcctctccccttgaaaatacactgacatttagtgacattttattaaatctgtacccttttgtacc

SEQ ID NO: 70695 - DNA, 433 bp, Homo sapiens
agttaagaaactggagttgaagctctaaagtggagtcctaaatttaaatgcctgtgtgacctggtagataccatgaaaatacctgacattgtcagggggtaggagcaccatgacaaagtggaaagggtaggatatgccccaaggagggagctggtccccagaatcggacagctgttgccaggcacgaatgaagtgttgtaagatcttgtctgaaaaatgggaaatatggaaatacagatttttttttttgagacggatcttttaaaacataaagtcgagtgatttttaaagccctgtgctggccaaaccaaacacagttgcagggtatatgttaccctcaggctgtcagattgcaatttctctgtaagagggtgaggtatctgaactatatttactaagacccatttagccagaaatgccttcataattgttt

SEQ ID NO: 70696 - DNA, 1930 bp, Homo sapiens
aaaaaaaaaaaaaaaaaaaaaaaaaacaactctcagaggagcattgcccgtcagacagcaactcagagaataaccagagaacaaccagattgaaacaatggaggatctttgtgtggcaaacacactctttgccctcaatttattcaagcatctggcaaaagcaagccccacccagaacctcttcctctccccatggagcatctcgtccaccatggccatggtctacatgggctccaggggcagcaccgaagaccagatggccaaggtgcttcagtttaatgaagtgggagccaatgcagttacccccatgactccagagaactttaccagctgtgggttcatgcagcagatccagaagggtagttatcctgatgcgattttgcaggcacaagctgcagataaaatccattcatccttccgctctctcagctctgcaatcaatgcatccacaggggattatttactggaaagtgtcaataagctgtttggtgagaagtctgcgagcttccgggaagaatatattcgactctgtcagaaatattactcctcagaaccccaggcagtagacttcctagaatgtgcagaagaagctagaaaaaagattaattcctgggtcaagactcaaaccaaaggcaaaatcccaaacttgttacctgaaggttctgtagatggggataccaaggatggtcctggtgaatgctgtctacttcaaaggaaagtggaaaactccatttgagaagaaactaaatgggctttatcctttccgtgtaaactcggctcagcgcacacctgtacaagatgatgtacttgcgtgaaaagctaaacattggatacatagaagacctaaaggctcagattctagaactcccatatgctggagatgttagcatgttcttgttgcttccagatgaaattgccgatgtgtccactggcttggagctgctggaaagtgaaataacctatgacaaactcaacaagtggaccagcaaagacaaaatggctgaagatgaagttgaggtatacataccccagttcaaattagaagagcattatgaactcagatccattctgagaagcatgggcatggaggacgccttcaacaagggacgggccaatttctcagggatgtcggagaggaatgacctgtttctttctgaagtgttccaccaagccatggtggatgtgaatgaggagggcactgaagcagccgctggcacaggaggtgttatgacagggagaactggacatggaggcccacagtttgtggcagatcatccttttctttttcttattatgcataagataaccaactgcattttatttttcggcagattttcctcaccctaaaactaagcgtgctgcttctgcaaaagatttttgtagatgagctgtgtgcctcagaattgctatttcaaattgccaaaaatttagagatgttttctacatatttctgctcttctgaacaacttctgctacccactaaataaaaacacagaaataattagacaattgtctattataacatgacaaccctattaatcatttggtcttctaaaatgggatcatgcccatttagattttccttactatcagtttatttttataacattaacttttactttgttatttattattttatataatggtgagtttttaaattattgctcactgcctatttaatgtagctaataaagttatagaagcagatgatctgttaatttcctatctaataaatgcctttaattgttctcataatgaagaataagtaggtatccctccatgcccttctgtaataaatatctggaaaaaacattaaacaataggcaaatatatgttatgtgcatttctagaaatacataacacatatatatgtctgtatcttatattcaattgcaagtatataataaataaacctgcttccaaacaacaa

SEQ ID NO: 70697 - DNA, 2048 bp, Homo sapiens
aaaaaaaaaaaaaaaaaaaaaaaaaacaactctcagaggagcattgcccgtcagacagcaactcagagaataaccagagaacaaccagattgaaacaatggaggatctttgtgtggcaaacacactctttgccctcaatttattcaagcatctggcaaaagcaagccccacccagaacctcttcctctccccatggagcatctcgtccaccatggccatggtctacatgggctccaggggcagcaccgaagaccagatggccaaggtgcttcagtttaatgaagtgggagccaatgcagttacccccatgactccagagaactttaccagctgtgggttcatgcagcagatccagaagggtagttatcctgatgcgattttgcaggcacaagctgcagataaaatccattcatccttccgctctctcagctctgcaatcaatgcatccacaggggattatttactggaaagtgtcaataagctgtttggtgagaagtctgcgagcttccgggaagaatatattcgactctgtcagaaatattactcctcagaaccccaggcagtagacttcctagaatgtgcagaagaagctagaaaaaagattaattcctgggtcaagactcaaaccaaaggcaaaatcccaaacttgttacctgaaggttctgtagatggggataccaaggatggtcctggtgaatgctgtctacttcaaaggaaagtggaaaactccatttgagaagaaactaaatgggctttatcctttccgtgtaaactcggctcagcgcacacctgtacaagatgatgtacttgcgtgaaaagctaaacattggatacatagaagacctaaaggctcagattctagaactcccatatgctggagatgttagcatgttcttgttgcttccagatgaaattgccgatgtgtccactggcttggagctgctggaaagtgaaataacctatgacaaactcaacaagtggaccagcaaagacaaaatggctgaagatgaagttgaggtatacataccccagttcaaattagaagagcattatgaactcagatccattctgagaagcatgggcatggaggacgccttcaacaagggacgggccaatttctcagggatgtcggagaggaatgacctgtttctttctgaagtgttccaccaagccatggtggatgtgaatgaggagggcactgaagcagccgctggcacaggaggtgttatgacagggagaactggacatggaggcccacagtttgtggcagatcatccttttctttttcttattatgcataagataaccaactgcattttatttttcggcagattttcctcaccctaaaactaagcgtgctgcttctgcaaaagatttttgtagatgagctgtgtgcctcagaattgctatttcaaattgccaaaaatttagagatgttttctacatatttctgctcttctgaacaacttctgctacccactaaataaaaacacagaaataattagacaattgtctattataacatgacaaccctattaatcatttggtcttctaaaatgggatcatgcccatttagattttccttactatcagtttatttttataacattaacttttactttgttatttattattttatataatggtgagtttttaaattattgctcactgcctatttaatgtagctaataaagttatagaagcagatgatctgttaatttcctatctaataaatgcctttaattgttctcataatgaagaataagtaggtatccctccatgcccttctgtaataaatatctggaaaaaacattaaacaataggcaaatatatgttatgtgcatttctagaaatacataacacatatatatgtctgtatcttatattcaattgcaagtatataataaataaacctgcttccaaacaacaaaaaaaaaaaaaaagaagaggaagaagggaagagaaaaaggaagaagaaggaggaaaaaggtggtggggggggtgggacgggaaaggggtttgagaaaaagtggggggggggggggaaa

SEQ ID NO: 70698 - DNA, 1723 bp, Homo sapiens
cagaatctacccttgacacccaaccttctccagccagcagtgtatctcctgcaagatatccagctacatcttcagtgacccttgtagatgtgagtgccttgaggccaaacaccactcctcaacccagcaattccagtatgactacccgaggcttcaactatccctggacctccagtgggacagataccaaaaaatcagtttcacggatacctagtgaaacatacagttcatccccctcaggtgcaggctcaacacttcatgacaatgtctttaccagcacagccagagcattttcagaagtccccacaactgccaatggatctacgaaaactaatcacgtccatatcactggtattgtggtcaataagcccaaagatggaatgtcctggccagtgattgtagcagctttactcttttgctgcatgatattgtttggtcttggagtgagaaaatggtgtcagtaccaaaaagaaatgatggtcctggtgaatgctgtctacttcaaaggaaagtggaaaactccatttgagaagaaactaaatgggctttatcctttccgtgtaaactcggctcagcgcacacctgtacaagatgatgtacttgcgtgaaaagctaaacattggatacatagaagacctaaaggctcagattctagaactcccatatgctggagatgttagcatgttcttgttgcttccagatgaaattgccgatgtgtccactggcttggagctgctggaaagtgaaataacctatgacaaactcaacaagtggaccagcaaagacaaaatggctgaagatgaagttgaggtatacataccccagttcaaattagaagagcattatgaactcagatccattctgagaagcatgggcatggaggacgccttcaacaagggacgggccaatttctcagggatgtcggagaggaatgacctgtttctttctgaagtgttccaccaagccatggtggatgtgaatgaggagggcactgaagcagccgctggcacaggaggtgttatgacagggagaactggacatggaggcccacagtttgtggcagatcatccttttctttttcttattatgcataagataaccaactgcattttatttttcggcagattttcctcaccctaaaactaagcgtgctgcttctgcaaaagatttttgtagatgagctgtgtgcctcagaattgctatttcaaattgccaaaaatttagagatgttttctacatatttctgctcttctgaacaacttctgctacccactaaataaaaacacagaaataattagacaattgtctattataacatgacaaccctattaatcatttggtcttctaaaatgggatcatgcccatttagattttccttactatcagtttatttttataacattaacttttactttgttatttattattttatataatggtgagtttttaaattattgctcactgcctatttaatgtagctaataaagttatagaagcagatgatctgttaatttcctatctaataaatgcctttaattgttctcataatgaagaataagtaggtatccctccatgcccttctgtaataaatatctggaaaaaacattaaacaataggcaaatatatgttatgtgcatttctagaaatacataacacatatatatgtctgtatcttatattcaattgcaagtatataataaataaacctgcttccaaacaacaa

SEQ ID NO: 70699 - DNA, 969 bp, Homo sapiens
  misc_feature (28)..(28): n is a, c, g, or t
  misc_feature (64)..(64): n is a, c, g, or t
  misc_feature (66)..(66): n is a, c, g, or t
  misc_feature (94)..(94): n is a, c, g, or t
  misc_feature (99)..(99): n is a, c, g, or t
  misc_feature (115)..(115): n is a, c, g, or t
  misc_feature (120)..(120): n is a, c, g, or t
  misc_feature (125)..(125): n is a, c, g, or t
  misc_feature (129)..(130): n is a, c, g, or t
  misc_feature (135)..(136): n is a, c, g, or t
  misc_feature (152)..(152): n is a, c, g, or t
  misc_feature (154)..(154): n is a, c, g, or t
  misc_feature (157)..(159): n is a, c, g, or t
  misc_feature (163)..(164): n is a, c, g, or t
  misc_feature (166)..(166): n is a, c, g, or t
  misc_feature (170)..(171): n is a, c, g, or t
  misc_feature (184)..(184): n is a, c, g, or t
  misc_feature (188)..(190): n is a, c, g, or t
  misc_feature (203)..(203): n is a, c, g, or t
gtgaaaaaccaatgacaaacacaacatntgacctgcaatgacaaaattgctgatgatgatggtntngacacacaccccatgccaaataatgatntcacnattgacacatacccanacttntaatnattnngattnntgctcccccaacaatngnctnnncaanncncatnngttgctgatgtgnaatnnnttgtgcttgcttnaaccaagccatggtggatgtgaatgaggagggcactgaagcagccgctggcacaggaggtgttatgacagggagaactggacatggaggcccacagtttgtggcagatcatccttttctttttcttattatgcataagataaccaactgcattttatttttcggcagattttcctcaccctaaaactaagcgtgctgcttctgcaaaagatttttgtagatgagctgtgtgcctcagaattgctatttcaaattgccaaaaatttagagatgttttctacatatttctgctcttctgaacaacttctgctacccactaaataaaaacacagaaataattagacaattgtctattataacatgacaaccctattaatcatttggtcttctaaaatgggatcatgcccatttagattttccttactatcagtttatttttataacattaacttttactttgttatttattattttatataatggtgagtttttaaattattgctcactgcctatttaatgtagctaataaagttatagaagcagatgatctgttaatttcctatctaataaatgcctttaattgttctcataatgaagaataagtaggtatccctccatgcccttctgtaataaatatctggaaaaaacattaaacaataggcaaatatatgttatgtgcatttctagaaatacataacacatatatatgtctgtatcttatattcaattgcaagtatataataaataaacctgcttccaaacaacaa

SEQ ID NO: 70700 - DNA, 955 bp, Homo sapiens
aaaaaaaaaaaaaaaaaaaaaaaaaacaactctcagaggagcattgcccgtcagacagcaactcagagaataaccagagaacaaccagattgaaacaatggaggatctttgtgtggcaaacacactctttgccctcaatttattcaagcatctggcaaaagcaagccccacccagaacctcttcctctccaccaagccatggtggatgtgaatgaggagggcactgaagcagccgctggcacaggaggtgttatgacagggagaactggacatggaggcccacagtttgtggcagatcatccttttctttttcttattatgcataagataaccaactgcattttatttttcggcagattttcctcaccctaaaactaagcgtgctgcttctgcaaaagatttttgtagatgagctgtgtgcctcagaattgctatttcaaattgccaaaaatttagagatgttttctacatatttctgctcttctgaacaacttctgctacccactaaataaaaacacagaaataattagacaattgtctattataacatgacaaccctattaatcatttggtcttctaaaatgggatcatgcccatttagattttccttactatcagtttatttttataacattaacttttactttgttatttattattttatataatggtgagtttttaaattattgctcactgcctatttaatgtagctaataaagttatagaagcagatgatctgttaatttcctatctaataaatgcctttaattgttctcataatgaagaataagtaggtatccctccatgcccttctgtaataaatatctggaaaaaacattaaacaataggcaaatatatgttatgtgcatttctagaaatacataacacatatatatgtctgtatcttatattcaattgcaagtatataataaataaacctgcttccaaacaacaa

SEQ ID NO: 70701 - DNA, 391 bp, Homo sapiens
tttgcaagagtcccagcagtctggttaccccattttcctgcaaagatttaatagtggagtacttgcatgaagcctcgtatttcaaagactttacaagtgtggctgctgtatattttattagcatgcaagggggcactgtcaccaactcacttgtcaaaaataaatgaatagagtgcattggcgatgcatttattcattatctatttgacatgtgactgagcctgcagggctggggaagtgataaaagatctcctggttttcacttcaaagaggtgccttctgcactacaactctgtcaggcgttggttgccccaggtgaatatgattaaagtgagggacccaagaaagtgattccattgatggcaccgtggggaggggagaaggtaggctt

SEQ ID NO: 70702 - DNA, 389 bp, Homo sapiens
aggctagtcttgaactcctgggctcaaacgatctgcccgccttggcctcccaacaagtcattttttggggggaaaaaaaaatcagaaataactagttaaggactgggtgtggtggctcacacctgaaatcccatcactttgggaggcataggcaggaggatcacctgaggtcaagagtttgagaccagcctggccaacatggtgaaatcccatctctactaaaaatacaaaaattagctgggcactgggggtggtggtgcgtgcctgtaatcccagctacttgggaggctgaggcaggagaatcgcttgaacctgggaggtggaggttgcactaagcagagattgcgccactgcactccagcctgggcgacagagtgagactccatctc

SEQ ID NO: 70703 - DNA, 3794 bp, Homo sapiens
cgaaaggccggcctggctgcgacagcctgggtaagaggtgtaggtcggcttggttttctgctacccggagctgggcaagcgggtgggagaacagcgaagacagcgtgagcctgggccgttgcctcgaggctctcgcccggcttctcttgccgacccgccacgtttgtttggatttaatcttcaggttgccggcgcccgcccgcccgctggcctcgcggtgtgagagggaagcacccgtgcctgtggctggtggctggcgcctggagggtccgcacacccgcccggccgcgccgcttgcccgcggcagccgcgtccctgaaccgcggagtcgtgtttgtgtttgacccgcgggcgccggtggcgcgcggccgaggccggtgtcggcggggcggggcggtcgcggcggaggcagaggaagagggagcgggagctctgcgaggccgggcgccgccatggaactgggcccggagcccccgcaccgccgccgcctgctcttcgcctgcagcccccctcccgcgtcgcagcccgtcgtgaaggcgctatttggcgcttcagccgccgggggactgtcgcctgtcaccaacctgaccgtcactatggaccagctgcagggtctgggcagtgattatgagcaaccactggaggtgaagaacaacagtaatctgcagagaatgggctcctccgagtcaacagattcaggtttctgtctagattctcctgggccattggacagtaaagaaaaccttgaaaatcctatgagaagaatacattccctacctcagaagctgttgggatgtagtccagctctgaagaggagccattctgattctcttgaccatgacatctttcagctcatcgacccagatgagaacaaggaaaatgaagcctttgagtttaagaagccagtaagacctgtatctcgtggctgcctgcactctcatggactccaggagggtaaagatctcttcacacagaggcagaactctgccccagctcggatgctttcctcaaatgaaagagatagcagtgaaccagggaatttcattcctctttttacaccccagtcacctgtgacagccactttgtctgatgaggatgatggcttcgtggaccttctcgatggagagaatctgaagaatgaggaggagaccccctcgtgcatggcaagcctctggacagctcctctcgtcatgagaactacaaaccttgacaaccgatgcaagctgtttgactccccttccctgtgtagctccagcactcggtcagtgttgaagagaccagaacgatctcaagaggagtctccacctggaagtacaaagaggaggaagagcatgtctggggccagccccaaagagtcaactaatccagagaaggcccatgagactcttcatcagtctttatccctggcatcttcccccaaaggaaccattgagaacattttggacaatgacccaagggaccttataggagacttctccaagggttatctctttcatacagttgctgggaaacatcaggatttaaaatacatctctccagaaattatggcatctgttttgaatggcaagtttgccaacctcattaaagagtttgttatcatcgactgtcgatacccatatgaatacgagggaggccacatcaagggtgcagtgaacttgcacatggaagaagaggttgaagacttcttattgaagaagcccattgtacctactgatggcaagcgtgtcattgttgtgtttcactgcgagttttcttctgagagaggtccccgcatgtgccggtatgtgagagagagagatcgcctgggtaatgaataccccaaactccactaccctgagctgtatgtcctgaaggggggatacaaggagttctttatgaaatgccagtcttactgtgagccccctagctaccggcccatgcaccacgaggactttaaagaagacctgaagaagttccgcaccaagagccggacctgggcaggggagaagagcaagagggagatgtacagtcgtctgaagaagctctgagggcggcaggaccagccagcagcagcccaagcttccctccatccccctttaccctctttgctgcagagaaacttaagcaaaggggacagctgtgtgacatttggagagggggcctgggacttccatgccttaaacctacctcccacactcccaaggttggagcccagggcatcttgctggctacgcctcttctgtccctgttagacgtcctccgtccatatcagaactgtgccacaatgcagttctgagcaccgtgtcaagctgctctgagccacagtgggatgaaccagccggggccttatcgggctccagccatctcatgaggggagaggagacggaggggagtagagaagttacacagaaatgctgctggccaaatagcaaagacaacctgggaaggaaaggtctttgtgggataatccatatgtttaatttattcaacttcatcaatcactttattttatttttttttctaactcctggagacttattttactgcttcattaggttgaaatactgccattctaggtagggttttattatcccagggactacctcggcttttaatttaaaaaaaaaaaagaagtgggtaagaaaatgcaaacctgttataagttatcggacagaaagctaggtgctctgtcacccccaggaggcgctgtggtactggggctgctgctatttaagccaagaactgaggtcctggtgagagcgttggacccaggcttggctgcctgacataagctaaatctcccagacccaccactggctaccgatatctatttggtgggaggtgtggccctgttcttcctcaccccagttccatgacattggctggtataggagccacagtcaggaaagcacttgaggcagcatctgttgggccacccccggctcagtgctggaatgttgcagtgtaggtttcccagggaaggggggtgggggtaggtgggctccacaggatgggggaggagcatgtccactgagtatcttccttatgttgctgtgatattgatagcttttattttctaatttttaaaaaatggtcatattatgagtcaaagagtatcaaatcagtgttggatggaccacccaagggtgaggagaggggctggaagccctgggcattaggagaagggagtgggtgctggcatggacatgactggatagaattttctcaggagggagcttggtggattttgaaggtaaaactttctgggtttatcatgttttaattttagagacagggagtgatgaatcatcaccggttgtccccttatctaactccataaaagtgggaatttcaaaagaacacctcatccaaggagctggggcagacttcattgattctagagagacctgtttcagtgcctactcatccctgccctctggtgccagcctccttaccatcacggcttcactgaggtgtaggtgggtttttcttaaacaggagacagtctctcccctcttacctcaacttcttggggtgggaatcagtgatactggagatggctagttgctgtgttacgggtttgagttacatttggctataaaacaatcttgttgggaaaaatgtgggggagaggacttcttcctacacgcgcattgagacagattccaactggttaatgatattgtttgtaagaaagagattctgttggttgactgcctaaagagaaaggtgggatggccttcagattataccagcttagctagcattactaaccaactgttggaagctctgaaaataaaagatcttgaacccat

SEQ ID NO: 70704 - DNA, 3674 bp, Homo sapiens
cgaaaggccggcctggctgcgacagcctgggtaagaggtgtaggtcggcttggttttctgctacccggagctgggcaagcgggtgggagaacagcgaagacagcgtgagcctgggccgttgcctcgaggctctcgcccggcttctcttgccgacccgccacgtttgtttggatttaatcttcaggttgccggcgcccgcccgcccgctggcctcgcggtgtgagagggaagcacccgtgcctgtggctggtggctggcgcctggagggtccgcacacccgcccggccgcgccgcttgcccgcggcagccgcgtccctgaaccgcggagtcgtgtttgtgtttgacccgcgggcgccggtggcgcgcggccgaggccggtgtcggcggggcggggcggtcgcggcggaggcagaggaagagggagcgggagctctgcgaggccgggcgccgccatggaactgggcccggagcccccgcaccgccgccgcctgctcttcgcctgcagcccccctcccgcgtcgcagcccgtcgtgaaggcgctatttggcgcttcagccgccgggggactgtcgcctgtcaccaacctgaccgtcactatggaccagctgcagggtctgggcagtgattatgagcaaccactggaggtgaagaacaacagtaatctgcagagaatgggctcctccgagtcaacagattcaggtttctgtctagattctcctgggccattggacagtaaagaaaaccttgaaaatcctatgagaagaatacattccctacctcagaagctgttgggatgtagtccagctctgaagaggagccattctgattctcttgaccatgacatctttcagctcatcgacccagatgagaacaaggaaaatctttcctcaaatgaaagagatagcagtgaaccagggaatttcattcctctttttacaccccagtcacctgtgacagccactttgtctgatgaggatgatggcttcgtggaccttctcgatggagagaatctgaagaatgaggaggagaccccctcgtgcatggcaagcctctggacagctcctctcgtcatgagaactacaaaccttgacaaccgatgcaagctgtttgactccccttccctgtgtagctccagcactcggtcagtgttgaagagaccagaacgatctcaagaggagtctccacctggaagtacaaagaggaggaagagcatgtctggggccagccccaaagagtcaactaatccagagaaggcccatgagactcttcatcagtctttatccctggcatcttcccccaaaggaaccattgagaacattttggacaatgacccaagggaccttataggagacttctccaagggttatctctttcatacagttgctgggaaacatcaggatttaaaatacatctctccagaaattatggcatctgttttgaatggcaagtttgccaacctcattaaagagtttgttatcatcgactgtcgatacccatatgaatacgagggaggccacatcaagggtgcagtgaacttgcacatggaagaagaggttgaagacttcttattgaagaagcccattgtacctactgatggcaagcgtgtcattgttgtgtttcactgcgagttttcttctgagagaggtccccgcatgtgccggtatgtgagagagagagatcgcctgggtaatgaataccccaaactccactaccctgagctgtatgtcctgaaggggggatacaaggagttctttatgaaatgccagtcttactgtgagccccctagctaccggcccatgcaccacgaggactttaaagaagacctgaagaagttccgcaccaagagccggacctgggcaggggagaagagcaagagggagatgtacagtcgtctgaagaagctctgagggcggcaggaccagccagcagcagcccaagcttccctccatccccctttaccctctttgctgcagagaaacttaagcaaaggggacagctgtgtgacatttggagagggggcctgggacttccatgccttaaacctacctcccacactcccaaggttggagcccagggcatcttgctggctacgcctcttctgtccctgttagacgtcctccgtccatatcagaactgtgccacaatgcagttctgagcaccgtgtcaagctgctctgagccacagtgggatgaaccagccggggccttatcgggctccagccatctcatgaggggagaggagacggaggggagtagagaagttacacagaaatgctgctggccaaatagcaaagacaacctgggaaggaaaggtctttgtgggataatccatatgtttaatttattcaacttcatcaatcactttattttatttttttttctaactcctggagacttattttactgcttcattaggttgaaatactgccattctaggtagggttttattatcccagggactacctcggcttttaatttaaaaaaaaaaaagaagtgggtaagaaaatgcaaacctgttataagttatcggacagaaagctaggtgctctgtcacccccaggaggcgctgtggtactggggctgctgctatttaagccaagaactgaggtcctggtgagagcgttggacccaggcttggctgcctgacataagctaaatctcccagacccaccactggctaccgatatctatttggtgggaggtgtggccctgttcttcctcaccccagttccatgacattggctggtataggagccacagtcaggaaagcacttgaggcagcatctgttgggccacccccggctcagtgctggaatgttgcagtgtaggtttcccagggaaggggggtgggggtaggtgggctccacaggatgggggaggagcatgtccactgagtatcttccttatgttgctgtgatattgatagcttttattttctaatttttaaaaaatggtcatattatgagtcaaagagtatcaaatcagtgttggatggaccacccaagggtgaggagaggggctggaagccctgggcattaggagaagggagtgggtgctggcatggacatgactggatagaattttctcaggagggagcttggtggattttgaaggtaaaactttctgggtttatcatgttttaattttagagacagggagtgatgaatcatcaccggttgtccccttatctaactccataaaagtgggaatttcaaaagaacacctcatccaaggagctggggcagacttcattgattctagagagacctgtttcagtgcctactcatccctgccctctggtgccagcctccttaccatcacggcttcactgaggtgtaggtgggtttttcttaaacaggagacagtctctcccctcttacctcaacttcttggggtgggaatcagtgatactggagatggctagttgctgtgttacgggtttgagttacatttggctataaaacaatcttgttgggaaaaatgtgggggagaggacttcttcctacacgcgcattgagacagattccaactggttaatgatattgtttgtaagaaagagattctgttggttgactgcctaaagagaaaggtgggatggccttcagattataccagcttagctagcattactaaccaactgttggaagctctgaaaataaaagatcttgaacccat

SEQ ID NO: 70705 - DNA, 3640 bp, Homo sapiens
cgaaaggccggcctggctgcgacagcctgggttgccggcgcccgcccgcccgctggcctcgcggtgtgagagggaagcacccgtgcctgtggctggtggctggcgcctggagggtccgcacacccgcccggccgcgccgcttgcccgcggcagccgcgtccctgaaccgcggagtcgtgtttgtgtttgacccgcgggcgccggtggcgcgcggccgaggccggtgtcggcggggcggggcggtcgcggcggaggcagaggaagagggagcgggagctctgcgaggccgggcgccgccatggaactgggcccggagcccccgcaccgccgccgcctgctcttcgcctgcagcccccctcccgcgtcgcagcccgtcgtgaaggcgctatttggcgcttcagccgccgggggactgtcgcctgtcaccaacctgaccgtcactatggaccagctgcagggtctgggcagtgattatgagcaaccactggaggtgaagaacaacagtaatctgcagagaatgggctcctccgagtcaacagattcaggtttctgtctagattctcctgggccattggacagtaaagaaaaccttgaaaatcctatgagaagaatacattccctacctcagaagctgttgggatgtagtccagctctgaagaggagccattctgattctcttgaccatgacatctttcagctcatcgacccagatgagaacaaggaaaatgaagcctttgagtttaagaagccagtaagacctgtatctcgtggctgcctgcactctcatggactccaggagggtaaagatctcttcacacagaggcagaactctgccccagctcggatgctttcctcaaatgaaagagatagcagtgaaccagggaatttcattcctctttttacaccccagtcacctgtgacagccactttgtctgatgaggatgatggcttcgtggaccttctcgatggagagaatctgaagaatgaggaggagaccccctcgtgcatggcaagcctctggacagctcctctcgtcatgagaactacaaaccttgacaaccgatgcaagctgtttgactccccttccctgtgtagctccagcactcggtcagtgttgaagagaccagaacgatctcaagaggagtctccacctggaagtacaaagaggaggaagagcatgtctggggccagccccaaagagtcaactaatccagagaaggcccatgagactcttcatcagtctttatccctggcatcttcccccaaaggaaccattgagaacattttggacaatgacccaagggaccttataggagacttctccaagggttatctctttcatacagttgctgggaaacatcaggatttaaaatacatctctccagaaattatggcatctgttttgaatggcaagtttgccaacctcattaaagagtttgttatcatcgactgtcgatacccatatgaatacgagggaggccacatcaagggtgcagtgaacttgcacatggaagaagaggttgaagacttcttattgaagaagcccattgtacctactgatggcaagcgtgtcattgttgtgtttcactgcgagttttcttctgagagaggtccccgcatgtgccggtatgtgagagagagagatcgcctgggtaatgaataccccaaactccactaccctgagctgtatgtcctgaaggggggatacaaggagttctttatgaaatgccagtcttactgtgagccccctagctaccggcccatgcaccacgaggactttaaagaagacctgaagaagttccgcaccaagagccggacctgggcaggggagaagagcaagagggagatgtacagtcgtctgaagaagctctgagggcggcaggaccagccagcagcagcccaagcttccctccatccccctttaccctctttgctgcagagaaacttaagcaaaggggacagctgtgtgacatttggagagggggcctgggacttccatgccttaaacctacctcccacactcccaaggttggagcccagggcatcttgctggctacgcctcttctgtccctgttagacgtcctccgtccatatcagaactgtgccacaatgcagttctgagcaccgtgtcaagctgctctgagccacagtgggatgaaccagccggggccttatcgggctccagccatctcatgaggggagaggagacggaggggagtagagaagttacacagaaatgctgctggccaaatagcaaagacaacctgggaaggaaaggtctttgtgggataatccatatgtttaatttattcaacttcatcaatcactttattttatttttttttctaactcctggagacttattttactgcttcattaggttgaaatactgccattctaggtagggttttattatcccagggactacctcggcttttaatttaaaaaaaaaaaagaagtgggtaagaaaatgcaaacctgttataagttatcggacagaaagctaggtgctctgtcacccccaggaggcgctgtggtactggggctgctgctatttaagccaagaactgaggtcctggtgagagcgttggacccaggcttggctgcctgacataagctaaatctcccagacccaccactggctaccgatatctatttggtgggaggtgtggccctgttcttcctcaccccagttccatgacattggctggtataggagccacagtcaggaaagcacttgaggcagcatctgttgggccacccccggctcagtgctggaatgttgcagtgtaggtttcccagggaaggggggtgggggtaggtgggctccacaggatgggggaggagcatgtccactgagtatcttccttatgttgctgtgatattgatagcttttattttctaatttttaaaaaatggtcatattatgagtcaaagagtatcaaatcagtgttggatggaccacccaagggtgaggagaggggctggaagccctgggcattaggagaagggagtgggtgctggcatggacatgactggatagaattttctcaggagggagcttggtggattttgaaggtaaaactttctgggtttatcatgttttaattttagagacagggagtgatgaatcatcaccggttgtccccttatctaactccataaaagtgggaatttcaaaagaacacctcatccaaggagctggggcagacttcattgattctagagagacctgtttcagtgcctactcatccctgccctctggtgccagcctccttaccatcacggcttcactgaggtgtaggtgggtttttcttaaacaggagacagtctctcccctcttacctcaacttcttggggtgggaatcagtgatactggagatggctagttgctgtgttacgggtttgagttacatttggctataaaacaatcttgttgggaaaaatgtgggggagaggacttcttcctacacgcgcattgagacagattccaactggttaatgatattgtttgtaagaaagagattctgttggttgactgcctaaagagaaaggtgggatggccttcagattataccagcttagctagcattactaaccaactgttggaagctctgaaaataaaagatcttgaacccat

SEQ ID NO: 70706 - DNA, 2068 bp, Homo sapiens
cgaaaggccggcctggctgcgacagcctgggttgccggcgcccgcccgcccgctggcctcgcggtgtgagagggaagcacccgtgcctgtggctggtggctggcgcctggagggtccgcacacccgcccggccgcgccgcttgcccgcggcagccgcgtccctgaaccgcggagtcgtgtttgtgtttgacccgcgggcgccggtggcgcgcggccgaggccggtgtcggcggggcggggcggtcgcggcggaggcagaggaagagggagcgggagctctgcgaggccgggcgccgccatggaactgggcccggagcccccgcaccgccgccgcctgctcttcgcctgcagcccccctcccgcgtcgcagcccgtcgtgaaggcgctatttggcgcttcatttggagagggggcctgggacttccatgccttaaacctacctcccacactcccaaggttggagcccagggcatcttgctggctacgcctcttctgtccctgttagacgtcctccgtccatatcagaactgtgccacaatgcagttctgagcaccgtgtcaagctgctctgagccacagtgggatgaaccagccggggccttatcgggctccagccatctcatgaggggagaggagacggaggggagtagagaagttacacagaaatgctgctggccaaatagcaaagacaacctgggaaggaaaggtctttgtgggataatccatatgtttaatttattcaacttcatcaatcactttattttatttttttttctaactcctggagacttattttactgcttcattaggttgaaatactgccattctaggtagggttttattatcccagggactacctcggcttttaatttaaaaaaaaaaaagaagtgggtaagaaaatgcaaacctgttataagttatcggacagaaagctaggtgctctgtcacccccaggaggcgctgtggtactggggctgctgctatttaagccaagaactgaggtcctggtgagagcgttggacccaggcttggctgcctgacataagctaaatctcccagacccaccactggctaccgatatctatttggtgggaggtgtggccctgttcttcctcaccccagttccatgacattggctggtataggagccacagtcaggaaagcacttgaggcagcatctgttgggccacccccggctcagtgctggaatgttgcagtgtaggtttcccagggaaggggggtgggggtaggtgggctccacaggatgggggaggagcatgtccactgagtatcttccttatgttgctgtgatattgatagcttttattttctaatttttaaaaaatggtcatattatgagtcaaagagtatcaaatcagtgttggatggaccacccaagggtgaggagaggggctggaagccctgggcattaggagaagggagtgggtgctggcatggacatgactggatagaattttctcaggagggagcttggtggattttgaaggtaaaactttctgggtttatcatgttttaattttagagacagggagtgatgaatcatcaccggttgtccccttatctaactccataaaagtgggaatttcaaaagaacacctcatccaaggagctggggcagacttcattgattctagagagacctgtttcagtgcctactcatccctgccctctggtgccagcctccttaccatcacggcttcactgaggtgtaggtgggtttttcttaaacaggagacagtctctcccctcttacctcaacttcttggggtgggaatcagtgatactggagatggctagttgctgtgttacgggtttgagttacatttggctataaaacaatcttgttgggaaaaatgtgggggagaggacttcttcctacacgcgcattgagacagattccaactggttaatgatattgtttgtaagaaagagattctgttggttgactgcctaaagagaaaggtgggatggccttcagattataccagcttagctagcattactaaccaactgttggaagctctgaaaataaaagatcttgaacccat

SEQ ID NO: 70707 - DNA, 3776 bp, Homo sapiens
cgaaaggccggcctggctgcgacagcctgggtaagaggtgtaggtcggcttggttttctgctacccggagctgggcaagcgggtgggagaacagcgaagacagcgtgagcctgggccgttgcctcgaggctctcgcccggcttctcttgccgacccgccacgtttgtttggatttaatcttcaggttgccggcgcccgcccgcccgctggcctcgcggtgtgagagggaagcacccgtgcctgtggctggtggctggcgcctggagggtccgcacacccgcccggccgcgccgcttgcccgcggcagccgcgtccctgaaccgcggagtcgtgtttgtgtttgacccgcgggcgccggtggcgcgcggccgaggccggtgtcggcggggcggggcggtcgcggcggaggcagaggaagagggagcgggagctctgcgaggccgggcgccgccatggaactgggcccggagcccccgcaccgccgccgcctgctcttcgcctgcagcccccctcccgcgtcgcagcccgtcgtgaaggcgctatttggcgcttcagccgccgggggactgtcgcctgtcaccaacctgaccgtcactatggaccagctgcagggtctgggcagtgattatgagcaaccactggaggtgaagaacaacagtaatctgcagagaatgggctcctccgagtcaacagattcaggtttctgtctagattctcctgggccattggacagtaaagaaaaccttgaaaatcctatgagaagaatacattccctacctcagaagctgttgggatgtagtccagctctgaagaggagccattctgattctcttgaccatgacatctttcagctcatcgacccagatgagaacaaggaaaatgaagcctttgagtttaagaagccagtaagacctgtatctcgtggctgcctgcactctcatggactccaggagggtaaagatctcttcacacagaggcagaactctgccccagctcggatgctttcctcaaatgaaagagatagcagtgaaccttttacaccccagtcacctgtgacagccactttgtctgatgaggatgatggcttcgtggaccttctcgatggagagaatctgaagaatgaggaggagaccccctcgtgcatggcaagcctctggacagctcctctcgtcatgagaactacaaaccttgacaaccgatgcaagctgtttgactccccttccctgtgtagctccagcactcggtcagtgttgaagagaccagaacgatctcaagaggagtctccacctggaagtacaaagaggaggaagagcatgtctggggccagccccaaagagtcaactaatccagagaaggcccatgagactcttcatcagtctttatccctggcatcttcccccaaaggaaccattgagaacattttggacaatgacccaagggaccttataggagacttctccaagggttatctctttcatacagttgctgggaaacatcaggatttaaaatacatctctccagaaattatggcatctgttttgaatggcaagtttgccaacctcattaaagagtttgttatcatcgactgtcgatacccatatgaatacgagggaggccacatcaagggtgcagtgaacttgcacatggaagaagaggttgaagacttcttattgaagaagcccattgtacctactgatggcaagcgtgtcattgttgtgtttcactgcgagttttcttctgagagaggtccccgcatgtgccggtatgtgagagagagagatcgcctgggtaatgaataccccaaactccactaccctgagctgtatgtcctgaaggggggatacaaggagttctttatgaaatgccagtcttactgtgagccccctagctaccggcccatgcaccacgaggactttaaagaagacctgaagaagttccgcaccaagagccggacctgggcaggggagaagagcaagagggagatgtacagtcgtctgaagaagctctgagggcggcaggaccagccagcagcagcccaagcttccctccatccccctttaccctctttgctgcagagaaacttaagcaaaggggacagctgtgtgacatttggagagggggcctgggacttccatgccttaaacctacctcccacactcccaaggttggagcccagggcatcttgctggctacgcctcttctgtccctgttagacgtcctccgtccatatcagaactgtgccacaatgcagttctgagcaccgtgtcaagctgctctgagccacagtgggatgaaccagccggggccttatcgggctccagccatctcatgaggggagaggagacggaggggagtagagaagttacacagaaatgctgctggccaaatagcaaagacaacctgggaaggaaaggtctttgtgggataatccatatgtttaatttattcaacttcatcaatcactttattttatttttttttctaactcctggagacttattttactgcttcattaggttgaaatactgccattctaggtagggttttattatcccagggactacctcggcttttaatttaaaaaaaaaaaagaagtgggtaagaaaatgcaaacctgttataagttatcggacagaaagctaggtgctctgtcacccccaggaggcgctgtggtactggggctgctgctatttaagccaagaactgaggtcctggtgagagcgttggacccaggcttggctgcctgacataagctaaatctcccagacccaccactggctaccgatatctatttggtgggaggtgtggccctgttcttcctcaccccagttccatgacattggctggtataggagccacagtcaggaaagcacttgaggcagcatctgttgggccacccccggctcagtgctggaatgttgcagtgtaggtttcccagggaaggggggtgggggtaggtgggctccacaggatgggggaggagcatgtccactgagtatcttccttatgttgctgtgatattgatagcttttattttctaatttttaaaaaatggtcatattatgagtcaaagagtatcaaatcagtgttggatggaccacccaagggtgaggagaggggctggaagccctgggcattaggagaagggagtgggtgctggcatggacatgactggatagaattttctcaggagggagcttggtggattttgaaggtaaaactttctgggtttatcatgttttaattttagagacagggagtgatgaatcatcaccggttgtccccttatctaactccataaaagtgggaatttcaaaagaacacctcatccaaggagctggggcagacttcattgattctagagagacctgtttcagtgcctactcatccctgccctctggtgccagcctccttaccatcacggcttcactgaggtgtaggtgggtttttcttaaacaggagacagtctctcccctcttacctcaacttcttggggtgggaatcagtgatactggagatggctagttgctgtgttacgggtttgagttacatttggctataaaacaatcttgttgggaaaaatgtgggggagaggacttcttcctacacgcgcattgagacagattccaactggttaatgatattgtttgtaagaaagagattctgttggttgactgcctaaagagaaaggtgggatggccttcagattataccagcttagctagcattactaaccaactgttggaagctctgaaaataaaagatcttgaacccat

SEQ ID NO: 70708 - DNA, 3626 bp, Homo sapiens
cgaaaggccggcctggctgcgacagcctgggtaagaggtgtaggtcggcttggttttctgctacccggagctgggcaagcgggtgggagaacagcgaagacagcgtgagcctgggccgttgcctcgaggctctcgcccggcttctcttgccgacccgccacgtttgtttggatttaatcttcaggttgccggcgcccgcccgcccgctggcctcgcggtgtgagagggaagcacccgtgcctgtggctggtggctggcgcctggagggtccgcacacccgcccggccgcgccgcttgcccgcggcagccgcgtccctgaaccgcggagtcgtgtttgtgtttgacccgcgggcgccggtggcgcgcggccgaggccggtgtcggcggggcggggcggtcgcggcggaggcagaggaagagggagcgggagctctgcgaggccgggcgccgccatggaactgggcccggagcccccgcaccgccgccgcctgctcttcgcctgcagcccccctcccgcgtcgcagcccgtcgtgaaggcgctatttggcgcttcagccgccgggggactgtcgcctgtcaccaacctgaccgtcactatggaccagctgcagggtctgggcagtgattatgagcaaccactggaggtgaagaacaacagtaatctgcagagaatgggctcctccgagtcaacagattcaggtttctgtctagattctcctgggccattggacagtaaagaaaaccttgaaaatcctatgagaagaatacattccctacctcagaagctgttgggatgtagtccagctctgaagaggagccattctgattctcttgaccatgacatctttcagctcatcgacccagatgagaacaaggaaaatgaagcctttgagtttaagaagccagtaagacctgtatctcgtggctgcctgcactctcatggactccaggagggtaaagatctcttcacacagaggcagaactctgccccagctcggatgctttcctcaaatgaaagagatagcagtgaaccagggaatttcattcctctttttacaccccagtcacctgtgacagccactttgtctgatgaggatgatggcttcgtggaccttctcgatggagagaatctgaagaatgaggaggagaccccctcgtgcatggcaagcctctggacagctcctctcgtcatgagaactacaaaccttgacaaccgatgcaagctgtttgactccccttccctgtgtagctccagcactcggtcagtgttgaagagaccagaacgatctcaagaggagtctccacctggaagtacaaagaggaggaagagcatgtctggggccagccccaaagagtcaactaatccagagaaggcccatgagactcttcatcagtctttatccctggcatcttcccccaaaggaaccattgagaacattttggacaatgacccaagggaccttataggagacttctccaagggttatctctttcatacagttgctgggaaacatcaggatttaaaatacatctctccagaaattatggcatctgttttgaatggcaagtttgccaacctcattaaagagtttgttatcatcgactgtcgatacccatatgaatacgagggaggccacatcaagggtgcagtgaacttgcacatggaagaagaggttgaagacttcttattgaagaagcccattgtacctactgatggcaagcgtgtcattgttgtgtttcactgcgagttttcttctgagagaggtccccgcatgtgccggtatgtgagagagagagatcgcctgggtaatgaataccccaaactccactaccctgagctgtatgtcctgaaggggggatacaaggagttctttatgaaatgccagtcttactgtgagccccctagctaccggcccatgcaccacgaggactttaaagaagacctgaagaagttccgcaccaagagccggacctgggcaggggagaagagcaagagggagatgtacagtcgtctgaagaagctctgagggcggcaggaccagccagcagcagcccaagcttccctccatccccctttaccctctttgctgcagagaaacttaagcaaaggggacagctgtgtgacatttggagagggggcctgggacttccatgccttaaacctactccagccatctcatgaggggagaggagacggaggggagtagagaagttacacagaaatgctgctggccaaatagcaaagacaacctgggaaggaaaggtctttgtgggataatccatatgtttaatttattcaacttcatcaatcactttattttatttttttttctaactcctggagacttattttactgcttcattaggttgaaatactgccattctaggtagggttttattatcccagggactacctcggcttttaatttaaaaaaaaaaaagaagtgggtaagaaaatgcaaacctgttataagttatcggacagaaagctaggtgctctgtcacccccaggaggcgctgtggtactggggctgctgctatttaagccaagaactgaggtcctggtgagagcgttggacccaggcttggctgcctgacataagctaaatctcccagacccaccactggctaccgatatctatttggtgggaggtgtggccctgttcttcctcaccccagttccatgacattggctggtataggagccacagtcaggaaagcacttgaggcagcatctgttgggccacccccggctcagtgctggaatgttgcagtgtaggtttcccagggaaggggggtgggggtaggtgggctccacaggatgggggaggagcatgtccactgagtatcttccttatgttgctgtgatattgatagcttttattttctaatttttaaaaaatggtcatattatgagtcaaagagtatcaaatcagtgttggatggaccacccaagggtgaggagaggggctggaagccctgggcattaggagaagggagtgggtgctggcatggacatgactggatagaattttctcaggagggagcttggtggattttgaaggtaaaactttctgggtttatcatgttttaattttagagacagggagtgatgaatcatcaccggttgtccccttatctaactccataaaagtgggaatttcaaaagaacacctcatccaaggagctggggcagacttcattgattctagagagacctgtttcagtgcctactcatccctgccctctggtgccagcctccttaccatcacggcttcactgaggtgtaggtgggtttttcttaaacaggagacagtctctcccctcttacctcaacttcttggggtgggaatcagtgatactggagatggctagttgctgtgttacgggtttgagttacatttggctataaaacaatcttgttgggaaaaatgtgggggagaggacttcttcctacacgcgcattgagacagattccaactggttaatgatattgtttgtaagaaagagattctgttggttgactgcctaaagagaaaggtgggatggccttcagattataccagcttagctagcattactaaccaactgttggaagctctgaaaataaaagatcttgaacccat

SEQ ID NO: 70709 - DNA, 1275 bp, Homo sapiens
  misc_feature (3)..(3): n is a, c, g, or t
  misc_feature (6)..(6): n is a, c, g, or t
  misc_feature (15)..(16): n is a, c, g, or t
atncangtgctctanngtgatggagagcaccagcaaagccttagggcccatccctggcctcctgttacccacagaggggtaggcccttggctctcttccactatgacgtcagcttccattcttcctttcttatagacaattttccatttcaaggaaatcagagcccttaatagttcagtgaggtcactttgctgagcacaatcccatacccttcagcctctgctccacagagcctaagcaaaagatagaaactcacaacttccttgttttgttatctggaaattatcccaggatctggtgcttactcagcatattcaaggaaggtcttacttcattcttccttgattgtgaccatgcccaggctctctgctccctataaaaggcaggcagagccaccgaggagcagagaggttgagaacaacccagaaaccttcacctctcatgctgaagctcacacccttgccctccaagatgaaggtttctgcagcgcttctgtgcctgctgctcatggcagccactttcagccctcagggacttgctcagccagattcagtttccattccaatcacctgctgctttaacgtgatcaataggaaaattcctatccagaggctggagagctacacaagaatcaccaacatccaatgtcccaaggaagctgtgatcttcaagaccaaacggggcaaggaggtctgtgctgaccccaaggagagatgggtcagggattccatgaagcatctggaccaaatatttcaaaatctgaagccatgagccttcatacatggactgagagtcagagcttgaagaaaagcttatttattttccccaacctcccccaggtgcagtgtgacattattttattataacatccacaaagagattatttttaaataatttaaagcataatatttcttaaaaagtatttaattatatttaagttgttgatgttttaactctatctgtcatacatcctagtgaatgtaaaatgcaaaatcctggtgatgtgttttttgtttttgttttcctgtgagctcaactaagttcacggcaaaatgtcattgttctccctcctacctgtctgtagtgttgtggggtcctcccatggatcatcaaggtgaaacactttggtattctttggcaatcagtgctcctgtaagtcaaatgtgtgctttgtactgctgttgttgaaattgatgttactgtatataactatggaattttgaaaaaaaatttcaaaaagaaaaaaatatatataatttaaaactaaaaaaaaaa

SEQ ID NO: 70710 - DNA, 833 bp, Homo sapiens
  misc_feature (3)..(3): n is a, c, g, or t
  misc_feature (6)..(6): n is a, c, g, or t
  misc_feature (15)..(16): n is a, c, g, or t
  misc_feature (833)..(833): n is a, c, g, or t
atncangtgctctanngtgatggagagcaccagcaaagccttagggcccatccctggcctcctgttacccacagaggggtaggcccttggctctcttccactatgacgtcagcttccattcttcctttcttatagacaattttccatttcaaggaaatcagagcccttaatagttcagtgaggtcactttgctgagcacaatcccatacccttcagcctctgctccacagagcctaagcaaaagatagaaactcacaacttccttgttttgttatctggaaattatcccaggatctggtgcttactcagcatattcaaggaaggtcttacttcattcttccttgattgtgaccatgcccaggctctctgctccctataaaaggcaggcagagccaccgaggagcagagaggttgagaacaacccagaaaccttcacctctcatgctgaagctcacacccttgccctccaagatgaaggtttctgcagcgcttctgtgcctgctgctcatggcagccactttcagccctcagggacttgctcagccagattcagtttccattccaatcacctgctgctttaacgtgatcaataggaaaattcctatccagaggctggagagctacacaagaatcaccaacatccaatgtcccaaggaagctgtgatcttcaagaccaaacggggcaaggaggtctgtgctgaccccaaggagagatgggtcagggattccatgaagcatctggaccaaatatttcaaaatctgaagccatgagccttcatacatggactgagagtcagagcttgaagttataacatccacgagatttttttttn

SEQ ID NO: 70711 - DNA, 788 bp, Homo sapiens
  misc_feature (3)..(3): n is a, c, g, or t
  misc_feature (6)..(6): n is a, c, g, or t
  misc_feature (15)..(16): n is a, c, g, or t
atncangtgctctanngtgatggagagcaccagcaaagccttagggcccatccctggcctcctgttacccacagaggggtaggcccttggctctcttccactatgacgtcagcttccattcttcctttcttatagacaattttccatttcaaggaaatcagagcccttaatagttcagtgaggtcactttgctgagcacaatcccatacccttcagcctctgctccacagagcctaagcaaaagatagaaactcacaacttccttgttttgttatctggaaattatcccaggatctggtgcttactcagcatattcaaggaaggtcttacttcattcttccttgattgtgaccatgcccaggctctctgctccctataaaaggcaggcagagccaccgaggagcagagaggttgagaacaacccagaaaccttcacctctcatgctgaagctcacacccttgccctccaagatgaaggtttctgcagcgcttctgtgcctgctgctcatggcagccactttcagccctcagggacttgctcagccaggtaagacctctccctttttaaggggagaccaaaagaggaattaagaagagccattatgtcacagctcattaggaacaacccagttttgggaggagacagtggagccgctacagcaacaaccctcccattgtttggggaaataatccagaacgaagaactgtttctcactgtgggtgtaaaggacatttcaggccgtagtggagagggagaaactattgcctgaagcttcaaattttggtta

SEQ ID NO: 70712 - DNA, 1222 bp, Homo sapiens
  misc_feature (3)..(3): n is a, c, g, or t
  misc_feature (6)..(6): n is a, c, g, or t
  misc_feature (15)..(16): n is a, c, g, or t
atncangtgctctanngtgatggagagcaccagcaaagccttagggcccatccctggcctcctgttacccacagaggggtaggcccttggctctcttccactatgacgtcagcttccattcttcctttcttatagacaattttccatttcaaggaaatcagagcccttaatagttcagtgaggtcactttgctgagcacaatcccatacccttcagcctctgctccacagagcctaagcaaaagatagaaactcacaacttccttgttttgttatctggaaattatcccaggatctggtgcttactcagcatattcaaggaaggtcttacttcattcttccttgattgtgaccatgcccaggctctctgctccctataaaaggcaggcagagccaccgaggagcagagaggttgagaacaacccagaaaccttcacctctcatgctgaagctcacacccttgccctccaagatgaaggtttctgcagcgcttctgtgcctgctgctcatggcagccactttcagccctcagggacttgctcagccagattcagtttccattccaatcacctgctgctttaacgtgatcaataggaaaattcctatccagaggctggagagctacacaagaatcaccaacatccaatgtcccaaggaagctgtgatcttcaagaccaaacggggcaaggaggtctgtgctgaccccaaggagagatgggtcagggattccatgaagcatctggaccaaatatttcaaaatctgaagccatgagccttcatacatggactgagagtcagagcttgaagaaaagcttatttattttccccaacctcccccaggtgcagtgtgacattattttattataacatccacaaagagattatttttaaataatttaaagcataatatttcttaaaaagtatttaattatatttaagttgttgatgttttaactctatctgtcatacatcctagtgaatgtaataagttcacggcaaaatgtcattgttctccctcctacctgtctgtagtgttgtggggtcctcccatggatcatcaaggtgaaacactttggtattctttggcaatcagtgctcctgtaagtcaaatgtgtgctttgtactgctgttgttgaaattgatgttactgtatataactatggaattttgaaaaaaaatttcaaaaagaaaaaaatatatataatttaaaactaaaaaaaaaa

SEQ ID NO: 70713 - DNA, 378 bp, Homo sapiens
tccgggtccttcacctaaggaccaagggctgatcagttctagggaccaatggcccacagtcctgtgcaggatcttcaaagtcttccatctaattgtgccctctctcccccacagcttcaagaccaaacggggcaaggaggtctgtgctgaccccaaggagagatgggtcagggattccatgaagcatctggaccaaatatttcaaaatctgaagccatgagccttcatacatggactgagagtcagagcttgaagaaaagcttatttattttccccaacctcccccaggtgcagtgtgacattattttattataacatccacaaagagattatttttaaataatttaaagcataatatttcttaaaaagtatttaatt

SEQ ID NO: 70714 - DNA, 435 bp, Homo sapiens
ccaccgaggagcagagaggttgagaacaacccagaaaccttcacctctcatgctgaagctcacacccttgccctccaagatgaaggtttctgcagcgcttctgtgcctgctgctcatggcagccactttcagccctcagggacttgctcagccaggtaagacctctccctttttaaggggagaccaaaagaggaattaagaagagccattatgtcacagctcattaggaacaaaaccagaactaaaggctcaggtcactgaggctggttcccttgatctttcctgaccccagttttgggaggagacagtggagccgctacagcaacaaccctcccattgtttggggaaataatccagaacgaagaactgtttctcactgtgggtgtaaaggacatttcaggccgtagtggagagggagaaactattgcctgaagc

SEQ ID NO: 70715 - DNA, 541 bp, Homo sapiens
tgctgagattataggcatgagccactgtgcgtggccacatgaccagttttagacaatgagttttgagaacttataatatgtataactttagggctgaacttttacttgataaagtgagaccttctagaattctttttttctgtctgccatgataactagctatgtttcttcaggtggttactaaatgaatgcatgtggagcaatgttccagctgacctgcaatgaacatgtggtttcagtgagaaatatacctctgtcatttaagccgttattgtctgggagttgcttgttatcttagcataatacagcctaacctgactgttaacacagcttaatcttacatcttctttaggtcttgacttacctctaatgttttcctcaaggccttaaggattgcacccatacccaccccatcactctatccccttctctactttatattcctctacaatacctatcttaatataacatcacatagtttgcttgtttattttattattcatctcctcctgccaccagaatgtaagcccatgaaggcagc

SEQ ID NO: 70716 - DNA, 515 bp, Homo sapiens
aattaacatcctagaacaaacactgatgtactccaagaacccaaaacttcccatcagaagatcagcagtcttgtttgccttttatcgaagtacatggatcacaatgagctcaggaggatgggtactgactggatagaggacgatctgagagacctgctgtgtgaccctgagccctcgctgtgcatcatcgcttcccagactctgttactagtccagatggcgagggccgaaccaaaacctaagcagagagtgaactggttgcagaagctcatgggcaggtcctctgcctagaaacacaaggcaagcaacatcagagacagaatcttgctatgttgtgcggcaagctagtcttgaactcatggcctcaagtcatcctcctgtgtcagcctcccaaagtgctgggattacaagcatgcaccacggcacccagcagaattccagtcttgagaaacaggtcaaggacagcttcaaaagagattctaaataaatgttaatgttacaatgttaaaaaaaaa

SEQ ID NO: 70717 - DNA, 559 bp, Homo sapiens
aattaacatcctagaacaaacactgatgtactccaagaacccaaaacttcccatcagaagatcagcagtcttgtttgccttttatcgaagtacatggatcacaatgagctcaggaggatgggtactgactggatagaggacgatctcaggggcttttacctccaacctgtgtttgcctaccgctagatctgagagacctgctgtgtgaccctgagccctcgctgtgcatcatcgcttcccagactctgttactagtccagatggcgagggccgaaccaaaacctaagcagagagtgaactggttgcagaagctcatgggcaggtcctctgcctagaaacacaaggcaagcaacatcagagacagaatcttgctatgttgtgcggcaagctagtcttgaactcatggcctcaagtcatcctcctgtgtcagcctcccaaagtgctgggattacaagcatgcaccacggcacccagcagaattccagtcttgagaaacaggtcaaggacagcttcaaaagagattctaaataaatgttaatgttacaatgttaaaaaaaaa

SEQ ID NO: 70718 - DNA, 265 bp, Homo sapiens
taaaaatttttttttaatttaaattaaaattttttttttgagatgcgatctcgctgttactgtggctggagtgcctattcacagtcacgatcatggtgcactgcctccttgaactcctggtctcaaatgatcctcctggttctgcctcccaagtaactgtgtctgtatttgtgagttaccactcccagctatgtgctgtcttttgatgaacagaactttaattttaatgcagttaaatttatggattatgctttttcagtcttgt

SEQ ID NO: 70719 - DNA, 633 bp, Homo sapiens
ctccctaccttttagtctccgtgaggaagacaagctgttgcattatcatattcctctgtgctgagcagctcaagactcagccacaatatgcaaattgctttaatgccatattacggcagttgatttagacatttgccagtgcaccaaaccatgagagattgtccgacctaatgccacctggcagatgtgtacccagagatttttctgtagctccatgtttcccataaagggcattggaaatgcacagatgaagatcttcctttggaaccaggcacatttggccccttctcagtgactgcactgtggaactcttcttaagaaaatattgaaaacagcttaatgctttcatatagtgaccgacatttagttgaaaactactgctgcatagcaaatattgtgactcttcatgtgtccacaggagctcttgtgtgggtttaaagctatgaagtgtattcacattgtgaagttttaattatctttattgaaattaattgtgtaaaaatggtatgtgctctattaggtattcagtttgtatgtgaattctatatagaaagtggtttttgttctttgagtttgttttatttcttgaagattacaataaatatctaagagactatattcctgaaaaaaaaa

SEQ ID NO: 70720 - DNA, 322 bp, Homo sapiens
gctaaaaaaagctagtatacaagtaaaatggaacttatttgtataaaactgttgagaagttatttttaaatcaaaattgattttgaccatttaacactaactttaaacacagagattataaattgatgattattgctttattgttactagggtaacactggtgtaccagttactgggggaaccttagaataattaattattctgttttagttaaaacatttaaatatagggcagagttctaccatttcctaaaataaagttggtctttgaatgaatgactcaattaaacagagctgctttttcaatctaaaacacagccata

SEQ ID NO: 70721 - DNA, 2303 bp, Homo sapiens
  misc_feature (330)..(330): n is a, c, g, or t
  misc_feature (2298)..(2298): n is a, c, g, or t
  misc_feature (2303)..(2303): n is a, c, g, or t
ggcacatgctcgctgtctgtgtcttgtcatctcgtcttttgtcttggatcttaccttgtctttgtccctgaatctccttgttcctctcatctctcccggtgtttacatctgtctttttccctgagcctcgctccctccatccattcctccgccctctcattttttttcccgactccctcctgcctcctccctttctcctttgattttcctggtccctcatctctcctccctcctctttctcactctcatgctccctttttcgctctcttgagtacatgcacttgctttctctctcttgcttttcctctttctcaccttagctcctggccncgggcgctgtctacaccccaccccatccctcgctctttgagaagcctctgtgcagtgcccaggtctggcggcccagcttggaagttcctgtggtaccccttgagagccctagggccacagcatttcctcccaggggtgacttggtagtgatacgctctgtttcttcacttctgcaattgccagacagcatagaggctgaggctggggccaggacccagacagagacacacggtcactgcagctgaagccgctgcccctgctacaggcaccaccaggaccagctgatcattccagcccacagcaatggagccacatgactcctcccacatggactctgagttccgatacactctcttcccgattgtttacagcatcatctttgtgctcggggtcattgctaatggctacgtgctgtgggtctttgcccgcctgtacccttgcaagaaattcaatgagataaagatcttcatggtgaacctcaccatggcggacatgctcttcttgatcaccctgccactttggattgtctactaccaaaaccagggcaactggatactccccaaattcctgtgcaacgtggctggctgccttttcttcatcaacacctactgctctgtggccttcctgggcgtcatcacttataaccgcttccaggcagtaactcggcccatcaagactgctcaggccaacacccgcaagcgtggcatctctttgtccttggtcatctgggtggccattgtgggagctgcatcctacttcctcatcctggactccaccaacacagtgcccgacagtgctggctcaggcaacgtcactcgctgctttgagcattacgagaagggcagcgtgccagtcctcatcatccacatcttcatcgtgttcagcttcttcctggtcttcctcatcatcctcttctgcaacctggtcatcatccgtaccttgctcatgcagccggtgcagcagcagcgcaacgctgaagtcaagcgccgggcgctgtggatggtgtgcacggtcttggcggtgttcatcatctgcttcgtgccccaccacgtggtgcagctgccctggacccttgctgagctgggcttccaggacagcaaattccaccaggccattaatgatgcacatcaggtcaccctctgcctccttagcaccaactgtgtcttagaccctgttatctactgtttcctcaccaagaagttccgcaagcacctcaccgaaaagttctacagcatgcgcagtagccggaaatgctcccgggccaccacggatacggtcactgaagtggttgtgccattcaaccagatccctggcaattccctcaaaaattagtccctgcttccaggcctgaagtcttctcctccatgaacatcatggactgagctgggggaagaagggatatctactgtggtctgggcaccacctctgtgggcactggtgggccattagatttggaggctacctcacctgggcagggatgatggcagagccaggctgttggaaaatccagaactcaaatgagccccttcatccgcctgtgggcgcatactacagtaactgtgactgatgactttatcctgagtcccttaatcttatggggccggaaggaatgtcagggccaggtgcagaccttgggggaagactttaaaccacctagttctccccgatggggcatcggtctaaagctttgggggagtgggcgcagtggctcacacctgtaatcccagcactttgggaggccgaggtgggcagatcatgggtcaagagatcgagaccatcctggccaacattgtaaaaccccatctctactaaaacatacaaaaattagccgggcatggtggcacacgcctgtagtcccagctactcaggaggctgaggcaggagaatcgcttgaacctgggaggcagaggttgcagtgaacctagattgcaccattgcactctagcctggcaacagagcgagattccntctcn

SEQ ID NO: 70722 - DNA, 1936 bp, Homo sapiens
  misc_feature (1931)..(1931): n is a, c, g, or t
  misc_feature (1936)..(1936): n is a, c, g, or t
ctggtggcctttaatacctggctgttgctgaaaggtctttagaaacggcgctaacagcaggtttgtggaatgccggatcgctcaacggcctgacgtgggcaaaaacctcgccttccgcacccatcattatattgatgctcattgccgccgccttactggtacgccggatgcgcttgctggaaatgggacacacggtcactgcagctgaagccgctgcccctgctacaggcaccaccaggaccagctgatcattccagcccacagcaatggagccacatgactcctcccacatggactctgagttccgatacactctcttcccgattgtttacagcatcatctttgtgctcggggtcattgctaatggctacgtgctgtgggtctttgcccgcctgtacccttgcaagaaattcaatgagataaagatcttcatggtgaacctcaccatggcggacatgctcttcttgatcaccctgccactttggattgtctactaccaaaaccagggcaactggatactccccaaattcctgtgcaacgtggctggctgccttttcttcatcaacacctactgctctgtggccttcctgggcgtcatcacttataaccgcttccaggcagtaactcggcccatcaagactgctcaggccaacacccgcaagcgtggcatctctttgtccttggtcatctgggtggccattgtgggagctgcatcctacttcctcatcctggactccaccaacacagtgcccgacagtgctggctcaggcaacgtcactcgctgctttgagcattacgagaagggcagcgtgccagtcctcatcatccacatcttcatcgtgttcagcttcttcctggtcttcctcatcatcctcttctgcaacctggtcatcatccgtaccttgctcatgcagccggtgcagcagcagcgcaacgctgaagtcaagcgccgggcgctgtggatggtgtgcacggtcttggcggtgttcatcatctgcttcgtgccccaccacgtggtgcagctgccctggacccttgctgagctgggcttccaggacagcaaattccaccaggccattaatgatgcacatcaggtcaccctctgcctccttagcaccaactgtgtcttagaccctgttatctactgtttcctcaccaagaagttccgcaagcacctcaccgaaaagttctacagcatgcgcagtagccggaaatgctcccgggccaccacggatacggtcactgaagtggttgtgccattcaaccagatccctggcaattccctcaaaaattagtccctgcttccaggcctgaagtcttctcctccatgaacatcatggactgagctgggggaagaagggatatctactgtggtctgggcaccacctctgtgggcactggtgggccattagatttggaggctacctcacctgggcagggatgatggcagagccaggctgttggaaaatccagaactcaaatgagccccttcatccgcctgtgggcgcatactacagtaactgtgactgatgactttatcctgagtcccttaatcttatggggccggaaggaatgtcagggccaggtgcagaccttgggggaagactttaaaccacctagttctccccgatggggcatcggtctaaagctttgggggagtgggcgcagtggctcacacctgtaatcccagcactttgggaggccgaggtgggcagatcatgggtcaagagatcgagaccatcctggccaacattgtaaaaccccatctctactaaaacatacaaaaattagccgggcatggtggcacacgcctgtagtcccagctactcaggaggctgaggcaggagaatcgcttgaacctgggaggcagaggttgcagtgaacctagattgcaccattgcactctagcctggcaacagagcgagattccntctcn

SEQ ID NO: 70723 - DNA, 1860 bp, Homo sapiens
  misc_feature (3)..(3): n is a, c, g, or t
  misc_feature (1855)..(1855): n is a, c, g, or t
  misc_feature (1860)..(1860): n is a, c, g, or t
ccncctgtgcactcattacctgcttcctgagctccccgagaagtcatccaggacctccccgagaagccgtccaggaaacatgctctcaggggacccccatctgcctcagcctctttgtcactgcctggaccattgtccctgctgtttctcaggcaccaccaggaccagctgatcattccagcccacagcaatggagccacatgactcctcccacatggactctgagttccgatacactctcttcccgattgtttacagcatcatctttgtgctcggggtcattgctaatggctacgtgctgtgggtctttgcccgcctgtacccttgcaagaaattcaatgagataaagatcttcatggtgaacctcaccatggcggacatgctcttcttgatcaccctgccactttggattgtctactaccaaaaccagggcaactggatactccccaaattcctgtgcaacgtggctggctgccttttcttcatcaacacctactgctctgtggccttcctgggcgtcatcacttataaccgcttccaggcagtaactcggcccatcaagactgctcaggccaacacccgcaagcgtggcatctctttgtccttggtcatctgggtggccattgtgggagctgcatcctacttcctcatcctggactccaccaacacagtgcccgacagtgctggctcaggcaacgtcactcgctgctttgagcattacgagaagggcagcgtgccagtcctcatcatccacatcttcatcgtgttcagcttcttcctggtcttcctcatcatcctcttctgcaacctggtcatcatccgtaccttgctcatgcagccggtgcagcagcagcgcaacgctgaagtcaagcgccgggcgctgtggatggtgtgcacggtcttggcggtgttcatcatctgcttcgtgccccaccacgtggtgcagctgccctggacccttgctgagctgggcttccaggacagcaaattccaccaggccattaatgatgcacatcaggtcaccctctgcctccttagcaccaactgtgtcttagaccctgttatctactgtttcctcaccaagaagttccgcaagcacctcaccgaaaagttctacagcatgcgcagtagccggaaatgctcccgggccaccacggatacggtcactgaagtggttgtgccattcaaccagatccctggcaattccctcaaaaattagtccctgcttccaggcctgaagtcttctcctccatgaacatcatggactgagctgggggaagaagggatatctactgtggtctgggcaccacctctgtgggcactggtgggccattagatttggaggctacctcacctgggcagggatgatggcagagccaggctgttggaaaatccagaactcaaatgagccccttcatccgcctgtgggcgcatactacagtaactgtgactgatgactttatcctgagtcccttaatcttatggggccggaaggaatgtcagggccaggtgcagaccttgggggaagactttaaaccacctagttctccccgatggggcatcggtctaaagctttgggggagtgggcgcagtggctcacacctgtaatcccagcactttgggaggccgaggtgggcagatcatgggtcaagagatcgagaccatcctggccaacattgtaaaaccccatctctactaaaacatacaaaaattagccgggcatggtggcacacgcctgtagtcccagctactcaggaggctgaggcaggagaatcgcttgaacctgggaggcagaggttgcagtgaacctagattgcaccattgcactctagcctggcaacagagcgagattccntctcn

SEQ ID NO: 70724 - DNA, 2249 bp, Homo sapiens
  misc_feature (330)..(330): n is a, c, g, or t
  misc_feature (2244)..(2244): n is a, c, g, or t
  misc_feature (2249)..(2249): n is a, c, g, or t
ggcacatgctcgctgtctgtgtcttgtcatctcgtcttttgtcttggatcttaccttgtctttgtccctgaatctccttgttcctctcatctctcccggtgtttacatctgtctttttccctgagcctcgctccctccatccattcctccgccctctcattttttttcccgactccctcctgcctcctccctttctcctttgattttcctggtccctcatctctcctccctcctctttctcactctcatgctccctttttcgctctcttgagtacatgcacttgctttctctctcttgcttttcctctttctcaccttagctcctggccncgggcgctgtctacaccccaccccatccctcgctctttgagaagcctctgtgcagtgcccaggtctggcggcccagcttggaagttcctgtggtaccccttgagagccctagggccacagcatttcctcccaggggtgacttggtagtgatacgctctgtttcttcacttctgcaattgccagacagcatagaggctgaggctggggccaggacccagacagagacacacggtcactgcagctgaagccgctgcccctgctacaggcaccaccaggaccagctgatcattccagcccacagcaatggagccacatgactcctcccacatggactctgagttccgatacactctcttcccgattgtttacagcatcatctttgtgctcggggtcattgctaatggctacgtgctgtgggtctttgcccgcctgtacccttgcaagaaattcaatgagataaagatcttcatggtgaacctcaccatggcggacatgctcttcttgatcaccctgccactttggattgtctactaccttttcttcatcaacacctactgctctgtggccttcctgggcgtcatcacttataaccgcttccaggcagtaactcggcccatcaagactgctcaggccaacacccgcaagcgtggcatctctttgtccttggtcatctgggtggccattgtgggagctgcatcctacttcctcatcctggactccaccaacacagtgcccgacagtgctggctcaggcaacgtcactcgctgctttgagcattacgagaagggcagcgtgccagtcctcatcatccacatcttcatcgtgttcagcttcttcctggtcttcctcatcatcctcttctgcaacctggtcatcatccgtaccttgctcatgcagccggtgcagcagcagcgcaacgctgaagtcaagcgccgggcgctgtggatggtgtgcacggtcttggcggtgttcatcatctgcttcgtgccccaccacgtggtgcagctgccctggacccttgctgagctgggcttccaggacagcaaattccaccaggccattaatgatgcacatcaggtcaccctctgcctccttagcaccaactgtgtcttagaccctgttatctactgtttcctcaccaagaagttccgcaagcacctcaccgaaaagttctacagcatgcgcagtagccggaaatgctcccgggccaccacggatacggtcactgaagtggttgtgccattcaaccagatccctggcaattccctcaaaaattagtccctgcttccaggcctgaagtcttctcctccatgaacatcatggactgagctgggggaagaagggatatctactgtggtctgggcaccacctctgtgggcactggtgggccattagatttggaggctacctcacctgggcagggatgatggcagagccaggctgttggaaaatccagaactcaaatgagccccttcatccgcctgtgggcgcatactacagtaactgtgactgatgactttatcctgagtcccttaatcttatggggccggaaggaatgtcagggccaggtgcagaccttgggggaagactttaaaccacctagttctccccgatggggcatcggtctaaagctttgggggagtgggcgcagtggctcacacctgtaatcccagcactttgggaggccgaggtgggcagatcatgggtcaagagatcgagaccatcctggccaacattgtaaaaccccatctctactaaaacatacaaaaattagccgggcatggtggcacacgcctgtagtcccagctactcaggaggctgaggcaggagaatcgcttgaacctgggaggcagaggttgcagtgaacctagattgcaccattgcactctagcctggcaacagagcgagattccntctcn

SEQ ID NO: 70725 - DNA, 2099 bp, Homo sapiens
  misc_feature (330)..(330): n is a, c, g, or t
  misc_feature (2094)..(2094): n is a, c, g, or t
  misc_feature (2099)..(2099): n is a, c, g, or t
ggcacatgctcgctgtctgtgtcttgtcatctcgtcttttgtcttggatcttaccttgtctttgtccctgaatctccttgttcctctcatctctcccggtgtttacatctgtctttttccctgagcctcgctccctccatccattcctccgccctctcattttttttcccgactccctcctgcctcctccctttctcctttgattttcctggtccctcatctctcctccctcctctttctcactctcatgctccctttttcgctctcttgagtacatgcacttgctttctctctcttgcttttcctctttctcaccttagctcctggccncgggcgctgtctacaccccaccccatccctcgctctttgagaagcctctgtgcagtgcccaggtctggcggcccagcttggaagttcctgtggtaccccttgagagccctagggccacagcatttcctcccaggggtgacttggtagtgatacgctctgtttcttcacttctgcaattgccagacagcatagaggctgaggctggggccaggacccagacagagacacacggtcactgcagctgaagccgctgcccctgctacaggcaccaccaggaccagctgatcattccagcccacagcaatggagccacatgactcctcccacatggactctgagttccgatacactctcttcccgattgtttacagcatcatctttgtgctcggggtcattgctaatggctacgtgctgtgggtctttgcccgcctgtacccttgcaagaaattcaatgagataaagatcttcatggtgaacctcaccatggcggacatgctcttcttgatcaccctgccactttggattgtctactaccaaaaccagggcaactggatactccccaaattcctgtgcaacgtggctggctgccttttcttcatcaacacctactgctctgtggccttcctgggcgtcatcacttataaccgcttccaggcagtaactcggcccatcaagactgctcaggccaacacccgcaagcgtggcatctctttgtccttggtcatcatccgtaccttgctcatgcagccggtgcagcagcagcgcaacgctgaagtcaagcgccgggcgctgtggatggtgtgcacggtcttggcggtgttcatcatctgcttcgtgccccaccacgtggtgcagctgccctggacccttgctgagctgggcttccaggacagcaaattccaccaggccattaatgatgcacatcaggtcaccctctgcctccttagcaccaactgtgtcttagaccctgttatctactgtttcctcaccaagaagttccgcaagcacctcaccgaaaagttctacagcatgcgcagtagccggaaatgctcccgggccaccacggatacggtcactgaagtggttgtgccattcaaccagatccctggcaattccctcaaaaattagtccctgcttccaggcctgaagtcttctcctccatgaacatcatggactgagctgggggaagaagggatatctactgtggtctgggcaccacctctgtgggcactggtgggccattagatttggaggctacctcacctgggcagggatgatggcagagccaggctgttggaaaatccagaactcaaatgagccccttcatccgcctgtgggcgcatactacagtaactgtgactgatgactttatcctgagtcccttaatcttatggggccggaaggaatgtcagggccaggtgcagaccttgggggaagactttaaaccacctagttctccccgatggggcatcggtctaaagctttgggggagtgggcgcagtggctcacacctgtaatcccagcactttgggaggccgaggtgggcagatcatgggtcaagagatcgagaccatcctggccaacattgtaaaaccccatctctactaaaacatacaaaaattagccgggcatggtggcacacgcctgtagtcccagctactcaggaggctgaggcaggagaatcgcttgaacctgggaggcagaggttgcagtgaacctagattgcaccattgcactctagcctggcaacagagcgagattccntctcn

SEQ ID NO: 70726 - DNA, 943 bp, Homo sapiens
  misc_feature (673)..(673): n is a, c, g, or t
  misc_feature (806)..(806): n is a, c, g, or t
tttaactaacacatattttatgcattagaaattatatttggttattttttcaggaagtgtattttttacattatttaattcctcagttaattaatttttacatttggctcttttctgatacattcaagaagaaatatatatattcctcatagtaaatcttaggccttgtatttccaaggtcttactgtgatttttaccttgaataattactgatatttcttcatggtttaatttttgtgtatttctgtgaagagcagccttggttttggatgccatgaaaggtttattatattgcacctactttatatttttaatcattcatattgattgataatctgtccattgcagaaatgaggagtttccaaaaagtttatggaaatatgtattataaaaaaaactatgcataaatttcaactttttgcacaaaaataaatggtatactagcttgttataacatgtctaaacaggatccagttgaaggcactgagaagaataagacatcagtttgaaaagagcctctattaaagcaacttgaattatgctaaaattgaagtaagaacaaacatcaaatgtatggtgaagcttgggtagaagaatggtataattgctgatgctctacaaaaagtttatggggataatgtcacaaagaaatgagcagtttacggccaggcanagtggcttgcacctgtaatcctggcactttgggaggccgaggcaggcggatcacgaagtcaagtgattgagaccagccttgccaacataatgaaaccccgcctctactaaaaatacaaaaaattagccgggcntagtggcgggcgcctgtagtcccagctactcgggaggctgaggcaggagaatggcgtgaacccgggaggcggagcttgcagtgagccgagatcccgccactgcactccagcctgggcgacagagcagactccgtctc

SEQ ID NO: 70727 - DNA, 2121 bp, Homo sapiens
ggttagattatgttgaaacacatctgtgtttcagatgtgttcagagctgaggtctcagctgaggctccactgaagcaggattcacttccaaaataacagagttgttgccaatattcagttcgtagcaaactactggaacaagaatctgttttcttgctgagtgaatttcttgccatgtggccctctccaaatgctggacataaaaaagtaggctgagcacagtggcgcacacctgtagtcccagcggtttgggaagccaaagtaggaggatcgcttgaggccaggagttcaaaactagcctgggcaatatagggagacccccatctctacaataaataaaaataaaagctttcatttacaatgatggtagaccaagaaatttgtcctagatcttcactgagaacatctagaaaagctggcagctgaacaaaattttaaaaacatctgggctgggcacggtggctcacacctttaatcccagcactttgggaggcaaggctaggggatcacttgagctcaggagtttgagaacagcctcagcaacatagggagaccccatctcttaaaaaaaaaaagataaactaaaaataaattaattaaaaacacctggttgaagacatcagcgagctggcaacaatgaagaattcctaaggaaacagaaactttgttaggggagctgttttcccttgtgttggccaattctgcgagtggtaagtgattgctgagctgttgaatggccattttgacaaccttatgggacaaggaagaaggggcctgcactggtaaaccctttcccttacttggagtgaggatcccaaatggctactcattaggagtaacagtggtccagaagtaagcaggccttcaaagggatggcagctcagcttcaaataccctcagtttctgaaattagattgaggttatctaaggtttttagagctctcagatgcatggcagaagcaaatctacatttgcttttcaggaagaaattaacatcctaggtgtggcagacagactctaaggtggccactatgatccctgtcccctggtattccttgtgtggagggagactcccatgacttgattctaatccatagactaccacgaagatgatgagatggacatgattacagcaaattctaatgttcatcttattaagagactcttgttgactttgaagaagcaagctgccatgatgtaaaccagcctttggagagggcctcatggcaagaaactaagggtggcctctagccagtagtcagcaagaaaacagatccttgttctagtagtgtgccaggaactgaagattgccaacaaccttgttattttggaagtgaatcctggttcagtggagccctagctgagaccttagctctggctaacaccttgattgcagtcttttgagaccaggaaacagaaagaagccagctaatctgtgcttggactcctgacccacagaacctgtgagataataaatgtgtcttgttcttaacacaccagatttgtggtaatattgttacacagtgtagaaaactaacaaactaggcctcaaaataaatctataaacagttttgcaggtacactgtagaacacacaataaaaagtagccacagaaagagacatgagtgaataccagcaggagcttctatttaaacatctgtagggacctccagatattggagttttcagagacaagcttaaaaaaaaaaagaaaaagaaaattaaacttacaagaattttggcaaagaactgaaaattatattaaaaacaaaatgaaacagctagatgggggggataagttctagcattcttctgcactgtaggatgactatagttaataatatatatttccaaatagaggatattgaatgttcccaacacaaatgagaaatgttttgagttgaagaatatgctgatttccctgatctaatcactgtgcagtaaatgtatcaacatatcaccatatatgccataaatatgtacaattattttgtgtcaatttaaaaaaaattttaaaggaaacactagaactgaaaattagcatgcttgaaattaggagactgatggatagaattgacagaacaggcatagctgaagaaagaattggtgaatgaacacaaa

SEQ ID NO: 70728 - DNA, 405 bp, Homo sapiens
ttttgacaattactgctgtctctgagcctgaccccaacaatatgactggctttttggaaaactgggtattttccttctcagtatagtgcattggcatacagtgctttttatcagtgtccattcatgccatgacatcctacctgcttcagctggaactctgaatgcttatgaggcaagagtactgaattggggaagtttggagacctaggtttaatcccctcctttgtgtcagttgtgttattgtgggggaaagcactgacctagtatccagaagatatgaggttaaatcacaggagaatttatttttattttaaactatacagacagagtctgttaaagggaattaaacaaattaatgagtatatgtgtctacacatgcaggtacaccaacaaacacttgtcagt

SEQ ID NO: 70729 - DNA, 391 bp, Homo sapiens
  misc_feature (58)..(58): n is a, c, g, or t
  misc_feature (60)..(60): n is a, c, g, or t
agcaaattcctttcttattggggagaagatttggatattaaatatatatatatttttntnacggagtctcactctgtcaccaggctggagtgcagtggcgtgatctcagctcactgcaacctccgactccctggttcaagtgattctcctgcctcagcctcccgagtagatgggattacaggcatgtgccaccacgcccagctaatttttgtatttttagtaaagacggggtttcaccatgttggccaggatggtctcaatctcctgacctcgtgatctgcctgctttggcctcccaaagtgctgggattacaggtatgagccaccacgcccagcctccagcactttctaatgctgtccctacatgcagtggcagctctacccttacaggg

SEQ ID NO: 70730 - DNA, 618 bp, Homo sapiens
tacttgtccaatggaaagtgtattggctcccttaggggagagaacccctatgttctaggttcttcacatttggtaacttgaaagagtttacttaatatcccaggggcttagcctccccccttgtaaaatgtagaaacaggctgactgttttcttatgagatacagcaagagaatgagaaatgcggtcagtataaccatcttcaaggaaccagtgctagacatggaaacctgtcttgatgctcaccaggagttgccccattcactatccatacctgcttctgaagggtggcccagatattatagtacaagttagtttgtacactgtttctatatttctcagaatgagggagtccttgaattcagcctttagttcctaacagtagtatcctcatagttaatttagaaggttcacaaagagataatatccccacttgatagttggtgaatctaagacacagaaaagtcaagatcacacagccagtgggacaggaattcaagtacctttcacttctccaggtttttttttttttttccgctgtggtgccattttctatgttttcccgctttttttgtatttttaacaacaattttattgaaatataattcaccctttaaagt

SEQ ID NO: 70731 - DNA, 591 bp, Homo sapiens
ggcagatacttttataattgaatcataggcctggagggtcagtcttttccctcataatacagatgagaaaatggtgagccttttaaaaagttaaaatcttggtatcagtttgtttgtgaaaacatctgtcttggaaccatttcaaaatttccttaatcacttactcaggtgtaatggaacaactagatgttggtattgttccatatattgtccttttagttgttcctgtattaggaagaatgagtgatcagacagacagtgtgagattcatggccacgcagtgctttgcaacgctaattagactcatgccacttgaggtaagtcaaagatacttgctttaaagacataatgttttctataacttgatccataataattgtaaccctttttagggccaggtacaaaggctcatgcctgtaatcccagcactttctgaggctgaggtgggtggatcatctgaggtcaggagtttgagtccagcctggccaacatgggtgaaaccctgtctctactaaaaaaaatacaaaaaaaagacaaaaacagttagctgggcatggtggtgtgtgcctgtagtctcagctactcgggatg

SEQ ID NO: 70732 - DNA, 8330 bp, Homo sapiens
agcaaagagcggagctgagggtacccggtttgaagtcgtgcgggtcggaggactgccgcctccgctaccgtcttggacccctgcttaccggccgccgcggggacgagctcgggtaggcggcagggcagatgcccgagggcctgcgctggaacgccccacgccgcaccggccgctcccctgtgctccgcggcctgggcctgcgccgctcagctctctggaaactagcgcctcagctgcgcggcgcgtaggtcgcggggagctccgaaccgccggcgcccggccatggcggtctccaggctagatcgcctttttattttactggatactggcactactcctgttacaagaaaagctgctgcacagcaacttggagaagtggtgaagcttcatccccatgaactaaataatctcctgtctaaagtgttgatatatttaaggagtgcaaattgggatacccggattgcagcaggacaagctgttgaagctatagtgaaaaatgtacctgagtggaatccagtgccgagaaccagacaagaacctacttccgaaagttctatggaagattcacctactacagagcgattgaattttgacagatttgatatatgtagattgttacaacatggtgcatcactcctgggatctgctggtgccgaatttgaagtccaagatgaaaaatcaggtgaagtggatcctaaagagaggatagcacgccaacgaaaattattacagaagaaacttggccttaatatgggagaagcaattggaatgagtactgaagaacttttcaatgatgaggatttggattataccccaacttcagcatcctttgttaacaaacaacctactcttcaggcagctgaattgattgactcagagtttcgagcaggaatgagcaatagacaaaagaacaaagctaaaagaatggccaagttatttgcaaaacagagatccagggatgcagtggaaactaatgagaagagcaatgatagcactgatggggagccagaagaaaagagacggaaaatagcaaatgttgttattaatcagtctgcaaatgattccaaagtcttgattgataatattccagacagctcttccttaattgaagagacaaatgaatggcctttggaaagcttttgtgaagaactttgcaatgacctttttaatccctcctgggaggttcgacatggtgcaggcactggacttagggaaattcttaaagctcatgggaaaagtggtggtaaaatgggtgacagcactttagaagagatgattcagcagcatcaagagtggttggaagacttggttattagactcctttgtgtttttgcattagacagatttggagactttgtttctgatgaagttgtggcaccagttcgtgaaacttgtgctcaaacattaggtgtggttttaaaacacatgaacgaaacaggagttcataagactgtggatgtgctgctaaaattacttacacaagaacaatgggaagttagacatggtggtctgctgggaataaaatatgctttggcagtccgtcaggatgtaattaatactttattgcctaaagttttaactagaataattgaaggactccaggatcttgatgatgatgtcagagctgttgctgcagcatcattagtgcctgtagtagaaagccttgtctatcttcagacacaaaaggtgcccttcattataaatacattgtgggatgctcttctggaattagatgatctaacagcttcaacaaatagtattatgactctcctttcatccttgttaacttaccctcaggtccaacaatgcagtattcagcagtcactgacagttttagttccacgtgtctggccttttttgcatcacactatatcatcagttcgaagagcagcattggaaactctgtttacgttattatcaacacaggaccagaactcttcatcttggcttatacctatactgcctgatatgctccgacacatttttcagttctgtgttttggaaagcagccaggaaattctggaccttattcacaaggtttggatggaactgttgagtaaggcttcagttcagtatgtggtagcagctgcttgcccatggatgggtgcttggctttgcttgatgatgcagccttctcatttacctatcgatttaaatatgttgctagaagtaaaagctagagccaaggaaaaaacaggtggtaaggtgcgccaaggccaaagccagaataaagaagtacttcaggagtatattgcaggtgccgacaccatcatggaagacccagccaccagggattttgtagttatgcgggccagaatgatggcagccaagttgttaggagcactttgttgctgtatttgtgatccaggtgtaaatgtggtaactcaagaaattaaaccagctgaatccctgggccagttactactcttccatttgaactccaagtctgctttacagaggattagtgtagctttggtaatctgtgaatgggctgctttacaaaaggagtgtaaagctgttaccttagctgtgcagccgcgtttacttgatatcctttcagaacatttatattatgacgaaattgccgttccattcacacgaatgcagaatgaatgtaaacaacttatatcatcattagctgatgtacatattgaagttggtaatcgagtaaacaacaatgttttaacaatagatcaagctagtgacttggtcactactgtttttaatgaagccacatcatctttcgatttaaatcctcaagtgttacaacagttagatagtaaacgacagcaggtccaaatgacagttacagagaccaaccaggagtggcaagtgttgcagttgagagtgcatacttttgctgcctgtgcagttgtgagcttgcagcagcttccggagaaattaaatcctatcataaaaccattaatggagacaattaaaaaagaagagaatacactagtgcaaaactatgcagctcagtgcatagctaaactccttcagcagtgcacaacaaggacgccctgtcccaattcaaaaattattaaaaacctctgtagctcactttgtgtggacccatatctaactccttgtgtcacatgtccagtaccaacacaaagtggccaggaaaattctaaaggatccacctcagaaaaagatggaatgcaccatactgtcaccaagcacagaggtataattacactctacaggcaccagaaagctgcctttgctatcacaagtaggcgaggtcctacccccaaagcagtaaaagctcaaatagcagatcttcctgcaggaagtagtggaaatattcttgttgaacttgatgaggcccagaagccttacctggtacaacggagaggagctgaatttgctttgacaactatagtaaagcattttggtggtgaaatggcagtgaagttgccacatctctgggatgctatggttggcccattgaggaatacaatcgacataaataattttgatggaaaatccctcctggataagggagatagccctgctcaagaattggtgaattctctgcaggtttttgaaacagcagcagcttcaatggattctgagcttcatcccttgttggtccagcatttgccacatctttatatgtgccttcaataccccagtactgcagtgaggcacatggctgctcgttgtgtaggtgtcatgagcaaaatagctaccatggaaacaatgaatatttttttggagaaggttcttccgtggctgggagcaattgatgacagtgtcaaacaagagggtgcaattgaagcacttgcctgtgtaatggaacaactagatgttggtattgttccatatattgtccttttagttgttcctgtattaggaagaatgagtgatcagacagacagtgtgagattcatggccacgcagtgctttgcaacgctaattagactcatgccacttgaggcaggcattccagaccctccaaacatgtcagcagaattaatccaattgaaagccaaggagcgacactttttggagcaattgttagatgggaaaaaattggaaaattataaaattccagtaccaatcaatgctgaactcagaaaatatcagcaggatggtgtgaactggttagcatttcttaataagtataaacttcatggaattctgtgtgatgacatgggtttaggaaaaactttacagtccatctgcattctagcaggagatcattgtcatagggcccaggaatatgcaagatcaaaattagcagaatgtatgccacttccttccttagtggtttgtccgccaacattaacaggccattgggtggatgaagtaggtaaattttgctctagagaatatctcaacccgttgcattacactggacctcccactgaaagaataaggttacagcaccaagtaaaaaggcacaatctaatagtggcttcatatgatgttgtgaggaatgacatagatttctttagaaatattaaatttaactactgcattcttgatgaaggccatgtcatcaaaaatggaaaaacaaagttgtcaaaagcagtaaaacaactgactgctaattataggattattctttctggaacaccaatccagaacaacgttttggagctgtggtcattatttgatttcctcatgccaggatttttgggtactgaacgccagtttgctgctcgatatggtaaacctatattagcaagtagggatgctcgaagctccagtcgagagcaagaagcaggtgttcttgctatggatgcgctgcaccgccaagtactaccgtttcttttgagaagaatgaaagaagatgttttgcaggatcttccacctaaaattattcaagactattattgtactcttagtcctctccaggttcagctctatgaagattttgctaagtctcgtgccaagtgtgatgttgatgaaacagtttcttcagctacactttctgaagaaactgaaaaaccaaagcttaaagctacaggccacgtattccaggcattacagtacttacgtaaactgtgcaaccatccagcattagtcttaacacctcaacatccagaattcaagaccactgccgaaaaactggcagttcagaattcttctctacatgatattcaacatgcccctaagctctcagctttgaaacaattgctgttggactgcggtttgggaaatggcagcacttccgagagtggcacagagtctgttgtggcccagcacaggatactgatattctgtcagctgaaaagcatgcttgatatagtagagcatgatctcctcaaacctcacttgccctctgtcacttatttgagattagatggcagcatacctcctggtcagaggcattccattgtttcccggtttaataatgatccatctatagacgttctgttacttaccactcacgttggtggcctgggacttaatttgacaggcgctgacacagtagtatttgtggagcatgactggaatcctatgcgagatctacaagccatggaccgggcccatcgcattgggcagaaacgtgtggttaacgtataccgattgataaccagaggaacattggaagaaaaaataatggggttgcagaaattcaagatgaacatagcgaatactgttattagccaagagaattctagtttgcagagcatggggactgatcagcttcttgatctgtttactcttgataaggatggcaaagcagaaaaagctgacacctctacttctgggaaagcaagtatgaaatcaattcttgaaaacctgagtgatctttgggatcaagagcagtatgattcagagtacagcctggaaaattttatgcattctctcaagtaactatcaaatattgtaaatgcaattgctgctagttcagttacatttctgctgatattcagcaaatttctaagtttatggtgaacttttaactcaatgtgtaaatagatctggagaatattcagcataatgctggctcttgtttcactgggggaaacaagttattctcaaatatttgcactgtattaaatttaaatgttaatgtgaaatggtttaaattttacatgctgaaaagctgcagagcagaggaaccaaaccaggtttatttgtgctaccaggaggtgttcttaatgggaacaggcctcctatctttagtcactttgtacaggatgatatccatgagtactttagtgtttgtatatgttttttcttttaaatagaacttgtttttataattgatttaaaatagggctttttttctataaaagccttaatgagccataattttaagaatataagaataatgactatgatattggtcagtcttagaacatgaaaatgtcagacaatgaatttaatcgggcccttggtggaaacatttatatatttaatgcagatgcatagtgtttttcaaatctttaacatcattttttcaacttttaagatataatatcaactattctaaatacaggtaatggtatatttaaggctaccataacatcctatttagagggtggttttttttaatttatctaatggctacgatatagccagattcaaataacatatgtactcaataggtttcaatcatatatataatatattttttgtaactatgaacatacacagttttccagaaatagattttacactgtttagaattccaacacctacagtggaaagactgtttattgtagtaatgcatggctgaagcataaaagggagagagaatttctttatatacacaaacatacatgaatatgcatatctatatgcatagatgtacctatcctgcacccaaaaaggtgcctggtattggcactaaaatcatgtagttatactgggcagcaataataattgggcatgaggctgattactcaatggtgagggtaggtatatgtagatagatgtgcatgtatgtgtttgtatatataattttataagtttcacgcataaattaatacatgcctgtgtgcatacatatgtatgggatatatttgtatatatatgtacaggtaataaacatccccaaggtttgtggctggccatacacataggcatcagtttaacaaccatcagacctcagctgtacaataacaggtgttttgtttaattaaaattatactgttctgcagcatttagacatttgtcacatttcattagctttgacaaccatactgtaacattaaacctagcattccacaagagaataaatataagattgaaactgtaaaatatatgcaactgtgtgttatttgtaggaaatggtcactagaaagagcaaaagattattcaggtatacaggttttttttcattgtttaggattttaactcaaaactttatgtagaacatttcagtatatttgagttgaatatttttttattaactatttatttgctagttccataaaccagctctttaacatagcttatagtaattgatattttcttagaataagtacagagcaatatatcattaaagggctatgaaggggcaaaagaaatcacaccataaaagttagtactttttcccaatctgaaatgtcagatagagctagaagtcagatatttaggctgtttaaactttctgagagtttaatcaaaaggtgtgtatttctagaaggatgactagaaaaatgatgtgtggttgcttctgaatgggaaacaggagtcagagctgacaggaaaacttagagtggctataacatttttaaaataatcttttgagttgtaaaatagtaaatcacacattccaacttttccatagaaaggaaaacatgtaaacaggtaagaactaagtattcttaattaaatgacccagtcattgtagtacatcttaagaataatgaagagatgtggagaattgaactgagtaatgaatgatattaaagaactgctgtcaatttcatggatgtgatgatttggtagttttttcaatgtatgggtgtgggaagtcaaacaagcatgatagaatgttaactattttaaactgggaattgggttcatagatatccattgtactacttcccttggtttttgtgtctttatgataggaaatagcaaactgttaaaaatatagattcagagattattagtcttatcatttgggtttcttgtaggaaaatcttaacatttgggggcctgggtataatttttgtttcatatattcactcatatatatgcttattgtatatgcttatttattctacaaacatttctccaaaaagtattctagtgaaagggtaaaagtctttgatgttgggactgattgaactggtatagccttattccttctggatggtttatatgaacttacttattcaaaagtaaatattccactg

SEQ ID NO: 70733 - DNA, 8458 bp, Homo sapiens
agcaaagagcggagctgagggtacccggtttgaagtcgtgcgggtcggaggactgccgcctccgctaccgtcttggacccctgcttaccggccgccgcggggacgagctcgggtaggcggcagggcagatgcccgagggcctgcgctggaacgccccacgccgcaccggccgctcccctgtgctccgcggcctgggcctgcgccgctcagctctctggaaactagcgcctcagctgcgcggcgcgtaggtcgcggggagctccgaaccgccggcgcccggccatggcggtctccaggctagatcgcctttttattttactggatactggcactactcctgttacaagaaaagctgctgcacagcaacttggagaagtggtgaagcttcatccccatgaactaaataatctcctgtctaaagtgttgatatatttaaggagtgcaaattgggatacccggattgcagcaggacaagctgttgaagctatagtgaaaaatgtacctgagtggaatccagtgccgagaaccagacaagaacctacttccgaaagttctatggaagattcacctactacagagcgattgaattttgacagatttgatatatgtagattgttacaacatggtgcatcactcctgggatctgctggtgccgaatttgaagtccaagatgaaaaatcaggtgaagtggatcctaaagagaggatagcacgccaacgaaaattattacagaagaaacttggccttaatatgggagaagcaattggaatgagtactgaagaacttttcaatgatgaggatttggattataccccaacttcagcatcctttgttaacaaacaacctactcttcaggcagctgaattgattgactcagagtttcgagcaggaatgagcaatagacaaaagaacaaagctaaaagaatggccaagttatttgcaaaacagagatccagggatgcagtggaaactaatgagaagagcaatgatagcactgatggggagccagaagaaaagagacggaaaatagcaaatgttgttattaatcagtctgcaaatgattccaaagtcttgattgataatattccagacagctcttccttaattgaagagacaaatgaatggcctttggaaagcttttgtgaagaactttgcaatgacctttttaatccctcctgggaggttcgacatggtgcaggcactggacttagggaaattcttaaagctcatgggaaaagtggtggtaaaatgggtgacagcactttagaagaggtaagtgtattaatgcaacaattatcaccaagtattaatagttggcatctttttccaatgtagggaagtaacgagtatgtgccgtgaagtaggaatgagaggtaaataagaggaagagatatgaaaagatgattcagcagcatcaagagtggttggaagacttggttattagactcctttgtgtttttgcattagacagatttggagactttgtttctgatgaagttgtggcaccagttcgtgaaacttgtgctcaaacattaggtgtggttttaaaacacatgaacgaaacaggagttcataagactgtggatgtgctgctaaaattacttacacaagaacaatgggaagttagacatggtggtctgctgggaataaaatatgctttggcagtccgtcaggatgtaattaatactttattgcctaaagttttaactagaataattgaaggactccaggatcttgatgatgatgtcagagctgttgctgcagcatcattagtgcctgtagtagaaagccttgtctatcttcagacacaaaaggtgcccttcattataaatacattgtgggatgctcttctggaattagatgatctaacagcttcaacaaatagtattatgactctcctttcatccttgttaacttaccctcaggtccaacaatgcagtattcagcagtcactgacagttttagttccacgtgtctggccttttttgcatcacactatatcatcagttcgaagagcagcattggaaactctgtttacgttattatcaacacaggaccagaactcttcatcttggcttatacctatactgcctgatatgctccgacacatttttcagttctgtgttttggaaagcagccaggaaattctggaccttattcacaaggtttggatggaactgttgagtaaggcttcagttcagtatgtggtagcagctgcttgcccatggatgggtgcttggctttgcttgatgatgcagccttctcatttacctatcgatttaaatatgttgctagaagtaaaagctagagccaaggaaaaaacaggtggtaaggtgcgccaaggccaaagccagaataaagaagtacttcaggagtatattgcaggtgccgacaccatcatggaagacccagccaccagggattttgtagttatgcgggccagaatgatggcagccaagttgttaggagcactttgttgctgtatttgtgatccaggtgtaaatgtggtaactcaagaaattaaaccagctgaatccctgggccagttactactcttccatttgaactccaagtctgctttacagaggattagtgtagctttggtaatctgtgaatgggctgctttacaaaaggagtgtaaagctgttaccttagctgtgcagccgcgtttacttgatatcctttcagaacatttatattatgacgaaattgccgttccattcacacgaatgcagaatgaatgtaaacaacttatatcatcattagctgatgtacatattgaagttggtaatcgagtaaacaacaatgttttaacaatagatcaagctagtgacttggtcactactgtttttaatgaagccacatcatctttcgatttaaatcctcaagtgttacaacagttagatagtaaacgacagcaggtccaaatgacagttacagagaccaaccaggagtggcaagtgttgcagttgagagtgcatacttttgctgcctgtgcagttgtgagcttgcagcagcttccggagaaattaaatcctatcataaaaccattaatggagacaattaaaaaagaagagaatacactagtgcaaaactatgcagctcagtgcatagctaaactccttcagcagtgcacaacaaggacgccctgtcccaattcaaaaattattaaaaacctctgtagctcactttgtgtggacccatatctaactccttgtgtcacatgtccagtaccaacacaaagtggccaggaaaattctaaaggatccacctcagaaaaagatggaatgcaccatactgtcaccaagcacagaggtataattacactctacaggcaccagaaagctgcctttgctatcacaagtaggcgaggtcctacccccaaagcagtaaaagctcaaatagcagatcttcctgcaggaagtagtggaaatattcttgttgaacttgatgaggcccagaagccttacctggtacaacggagaggagctgaatttgctttgacaactatagtaaagcattttggtggtgaaatggcagtgaagttgccacatctctgggatgctatggttggcccattgaggaatacaatcgacataaataattttgatggaaaatccctcctggataagggagatagccctgctcaagaattggtgaattctctgcaggtttttgaaacagcagcagcttcaatggattctgagcttcatcccttgttggtccagcatttgccacatctttatatgtgccttcaataccccagtactgcagtgaggcacatggctgctcgttgtgtaggtgtcatgagcaaaatagctaccatggaaacaatgaatatttttttggagaaggttcttccgtggctgggagcaattgatgacagtgtcaaacaagagggtgcaattgaagcacttgcctgtgtaatggaacaactagatgttggtattgttccatatattgtccttttagttgttcctgtattaggaagaatgagtgatcagacagacagtgtgagattcatggccacgcagtgctttgcaacgctaattagactcatgccacttgaggcaggcattccagaccctccaaacatgtcagcagaattaatccaattgaaagccaaggagcgacactttttggagcaattgttagatgggaaaaaattggaaaattataaaattccagtaccaatcaatgctgaactcagaaaatatcagcaggatggtgtgaactggttagcatttcttaataagtataaacttcatggaattctgtgtgatgacatgggtttaggaaaaactttacagtccatctgcattctagcaggagatcattgtcatagggcccaggaatatgcaagatcaaaattagcagaatgtatgccacttccttccttagtggtttgtccgccaacattaacaggccattgggtggatgaagtaggtaaattttgctctagagaatatctcaacccgttgcattacactggacctcccactgaaagaataaggttacagcaccaagtaaaaaggcacaatctaatagtggcttcatatgatgttgtgaggaatgacatagatttctttagaaatattaaatttaactactgcattcttgatgaaggccatgtcatcaaaaatggaaaaacaaagttgtcaaaagcagtaaaacaactgactgctaattataggattattctttctggaacaccaatccagaacaacgttttggagctgtggtcattatttgatttcctcatgccaggatttttgggtactgaacgccagtttgctgctcgatatggtaaacctatattagcaagtagggatgctcgaagctccagtcgagagcaagaagcaggtgttcttgctatggatgcgctgcaccgccaagtactaccgtttcttttgagaagaatgaaagaagatgttttgcaggatcttccacctaaaattattcaagactattattgtactcttagtcctctccaggttcagctctatgaagattttgctaagtctcgtgccaagtgtgatgttgatgaaacagtttcttcagctacactttctgaagaaactgaaaaaccaaagcttaaagctacaggccacgtattccaggcattacagtacttacgtaaactgtgcaaccatccagcattagtcttaacacctcaacatccagaattcaagaccactgccgaaaaactggcagttcagaattcttctctacatgatattcaacatgcccctaagctctcagctttgaaacaattgctgttggactgcggtttgggaaatggcagcacttccgagagtggcacagagtctgttgtggcccagcacaggatactgatattctgtcagctgaaaagcatgcttgatatagtagagcatgatctcctcaaacctcacttgccctctgtcacttatttgagattagatggcagcatacctcctggtcagaggcattccattgtttcccggtttaataatgatccatctatagacgttctgttacttaccactcacgttggtggcctgggacttaatttgacaggcgctgacacagtagtatttgtggagcatgactggaatcctatgcgagatctacaagccatggaccgggcccatcgcattgggcagaaacgtgtggttaacgtataccgattgataaccagaggaacattggaagaaaaaataatggggttgcagaaattcaagatgaacatagcgaatactgttattagccaagagaattctagtttgcagagcatggggactgatcagcttcttgatctgtttactcttgataaggatggcaaagcagaaaaagctgacacctctacttctgggaaagcaagtatgaaatcaattcttgaaaacctgagtgatctttgggatcaagagcagtatgattcagagtacagcctggaaaattttatgcattctctcaagtaactatcaaatattgtaaatgcaattgctgctagttcagttacatttctgctgatattcagcaaatttctaagtttatggtgaacttttaactcaatgtgtaaatagatctggagaatattcagcataatgctggctcttgtttcactgggggaaacaagttattctcaaatatttgcactgtattaaatttaaatgttaatgtgaaatggtttaaattttacatgctgaaaagctgcagagcagaggaaccaaaccaggtttatttgtgctaccaggaggtgttcttaatgggaacaggcctcctatctttagtcactttgtacaggatgatatccatgagtactttagtgtttgtatatgttttttcttttaaatagaacttgtttttataattgatttaaaatagggctttttttctataaaagccttaatgagccataattttaagaatataagaataatgactatgatattggtcagtcttagaacatgaaaatgtcagacaatgaatttaatcgggcccttggtggaaacatttatatatttaatgcagatgcatagtgtttttcaaatctttaacatcattttttcaacttttaagatataatatcaactattctaaatacaggtaatggtatatttaaggctaccataacatcctatttagagggtggttttttttaatttatctaatggctacgatatagccagattcaaataacatatgtactcaataggtttcaatcatatatataatatattttttgtaactatgaacatacacagttttccagaaatagattttacactgtttagaattccaacacctacagtggaaagactgtttattgtagtaatgcatggctgaagcataaaagggagagagaatttctttatatacacaaacatacatgaatatgcatatctatatgcatagatgtacctatcctgcacccaaaaaggtgcctggtattggcactaaaatcatgtagttatactgggcagcaataataattgggcatgaggctgattactcaatggtgagggtaggtatatgtagatagatgtgcatgtatgtgtttgtatatataattttataagtttcacgcataaattaatacatgcctgtgtgcatacatatgtatgggatatatttgtatatatatgtacaggtaataaacatccccaaggtttgtggctggccatacacataggcatcagtttaacaaccatcagacctcagctgtacaataacaggtgttttgtttaattaaaattatactgttctgcagcatttagacatttgtcacatttcattagctttgacaaccatactgtaacattaaacctagcattccacaagagaataaatataagattgaaactgtaaaatatatgcaactgtgtgttatttgtaggaaatggtcactagaaagagcaaaagattattcaggtatacaggttttttttcattgtttaggattttaactcaaaactttatgtagaacatttcagtatatttgagttgaatatttttttattaactatttatttgctagttccataaaccagctctttaacatagcttatagtaattgatattttcttagaataagtacagagcaatatatcattaaagggctatgaaggggcaaaagaaatcacaccataaaagttagtactttttcccaatctgaaatgtcagatagagctagaagtcagatatttaggctgtttaaactttctgagagtttaatcaaaaggtgtgtatttctagaaggatgactagaaaaatgatgtgtggttgcttctgaatgggaaacaggagtcagagctgacaggaaaacttagagtggctataacatttttaaaataatcttttgagttgtaaaatagtaaatcacacattccaacttttccatagaaaggaaaacatgtaaacaggtaagaactaagtattcttaattaaatgacccagtcattgtagtacatcttaagaataatgaagagatgtggagaattgaactgagtaatgaatgatattaaagaactgctgtcaatttcatggatgtgatgatttggtagttttttcaatgtatgggtgtgggaagtcaaacaagcatgatagaatgttaactattttaaactgggaattgggttcatagatatccattgtactacttcccttggtttttgtgtctttatgataggaaatagcaaactgttaaaaatatagattcagagattattagtcttatcatttgggtttcttgtaggaaaatcttaacatttgggggcctgggtataatttttgtttcatatattcactcatatatatgcttattgtatatgcttatttattctacaaacatttctccaaaaagtattctagtgaaagggtaaaagtctttgatgttgggactgattgaactggtatagccttattccttctggatggtttatatgaacttacttattcaaaagtaaatattccactg

SEQ ID NO: 70734 - DNA, 8404 bp, Homo sapiens
agcaaagagcggagctgagggtacccggtttgaagtcgtgcgggtcggaggactgccgcctccgctaccgtcttggacccctgcttaccggccgccgcggggacgagctcgggtaggcggcagggcagatgcccgagggcctgcgctggaacgccccacgccgcaccggccgctcccctgtgctccgcggcctgggcctgcgccgctcagctctctggaaactagcgcctcagctgcgcggcgcgtaggtcgcggggagctccgaaccgccggcgcccggccatggcggtctccaggctagatcgcctttttattttactggatactggcactactcctgttacaagaaaagctgctgcacagcaacttggagaagtggtgaagcttcatccccatgaactaaataatctcctgtctaaagtgttgatatatttaaggagtgcaaattgggatacccggattgcagcaggacaagctgttgaagctatagtgaaaaatgtacctgagtggaatccagtgccgagaaccagacaagaacctacttccgaaagttctatggaagattcacctactacagagcgattgaattttgacagatttgatatatgtagattgttacaacatggtgcatcactcctgggatctgctggtgccgaatttgaagtccaagatgaaaaatcaggtgaagtggatcctaaagagaggatagcacgccaacgaaaattattacagaagaaacttggccttaatatgggagaagcaattggaatgagtactgaagaacttttcaatgatgaggatttggattataccccaacttcagcatcctttgttaacaaacaacctactcttcaggcagctgaattgattgactcagagtttcgagcaggaatgagcaatagacaaaagaacaaagctaaaagaatggccaagttatttgcaaaacagagatccagggatgcagtggaaactaatgagaagagcaatgatagcactgatggggagccagaagaaaagagacggaaaatagcaaatgttgttattaatcagtctgcaaatgattccaaagtcttgattgataatattccagacagctcttccttaattgaagagacaaatgaatggcctttggaaagcttttgtgaagaactttgcaatgacctttttaatccctcctgggaggttcgacatggtgcaggcactggacttagggaaattcttaaagctcatgggaaaagtggtggtaaaatgggtgacagcactttagaagaggtaagtgtattaatgcaacaattatcaccaagtattaatagttggcatctttttccaatgtagggaagtaacgagtatgtgccgtgaagtaggaatgagaggtaaataagaggaagagatatgaaaagatgattcagcagcatcaagagtggttggaagacttggttattagactcctttgtgtttttgcattagacagatttggagactttgtttctgatgaagttgtggcaccagttcgtgaaacttgtgctcaaacattaggtgtggttttaaaacacatgaacgaaacaggagttcataagactgtggatgtgctgctaaaattacttacacaagaacaatgggaagttagacatggtggtctgctgggaataaaatatgctttggcagtccgtcaggatgtaattaatactttattgcctaaagttttaactagaataattgaaggactccaggatcttgatgatgatgtcagagctgttgctgcagcatcattagtgcctgtagtagaaagccttgtctatcttcagacacaaaaggtgcccttcattataaatacattgtgggatgctcttctggaattagatgatctaacagcttcaacaaatagtattatgactctcctttcatccttgttaacttaccctcaggtccaacaatgcagtattcagcagtcactgacagttttagttccacgtgtctggccttttttgcatcacactatatcatcagttcgaagagcagcattggaaactctgtttacgttattatcaacacaggaccagaactcttcatcttggcttatacctatactgcctgatatgctccgacacatttttcagttctgtgttttggaaagcagccaggaaattctggaccttattcacaaggtttggatggaactgttgagtaaggcttcagttcagtatgtggtagcagctgcttgcccatggatgggtgcttggctttgcttgatgatgcagccttctcatttacctatcgatttaaatatgttgctagaagtaaaagctagagccaaggaaaaaacaggtggtaaggtgcgccaaggccaaagccagaataaagaagtacttcaggagtatattgcaggtgccgacaccatcatggaagacccagccaccagggattttgtagttatgcgggccagaatgatggcagccaagttgttaggagcactttgttgctgtatttgtgatccaggtgtaaatgtggtaactcaagaaattaaaccagctgaatccctgggccagttactactcttccatttgaactccaagtctgctttacagaggattagtgtagctttggtaatctgtgaatgggctgctttacaaaaggagtgtaaagctgttaccttagctgtgcagccgcgtttacttgatatcctttcagaacatttatattatgacgaaattgccgttccattcacacgaatgcagaatgaatgtaaacaacttatatcatcattagctgatgtacatattgaagttggtaatcgagtaaacaacaatgttttaacaatagatcaagctagtgacttggtcactactgtttttaatgaagccacatcatctttcgatttaaatcctcaagtgttacaacagttagatagtaaacgacagcaggtccaaatgacagttacagagaccaaccaggagtggcaagtgttgcagttgagagtgcatacttttgctgcctgtgcagttgtgagcttgcagcagcttccggagaaattaaatcctatcataaaaccattaatggagacaattaaaaaagaagagaatacactagtgcaaaactatgcagctcagtgcatagctaaactccttcagcagtgcacaacaaggacgccctgtcccaattcaaaaattattaaaaacctctgtagctcactttgtgtggacccatatctaactccttgtgtcacatgtccagtaccaacacaaagtggccaggaaaattctaaaggatccacctcagaaaaagatggaatgcaccatactgtcaccaagcacagaggtataattacactctacaggcaccagaaagctgcctttgctatcacaagtaggcgaggtcctacccccaaagcagtaaaagctcaaatagcagatcttcctgcaggaagtagtggaaatattcttgttgaacttgatgaggcccagaagccttacctggtacaacggagaggagctgaatttgctttgacaactatagtaaagcattttggtggtgaaatggcagtgaagttgccacatctctgggatgctatggttggcccattgaggaatacaatcgacataaataattttgatggaaaatccctcctggataagggagatagccctgctcaagaattggtgaattctctgcaggtttttgaaacagcagcagcttcaatggattctgagcttcatcccttgttggtccagcatttgccacatctttatatgtgccttcaataccccagtactgcagtgaggcacatggctgctcgttgtgtaggtgtcatgagcaaaatagctaccatggaaacaatgaatatttttttggagaaggttcttccgtggctgggagcaattgatgacagtgtcaaacaagagggtgcaattgaagcacttgcctgtgtaatggaacaactagatgttggtattgttccatatattgtccttttagttgttcctgtattaggaagaatgagtgatcagacagacagtgtgagattcatggccacgcagtgctttgcaacgctaattagactcatgccacttgaggcaggcattccagaccctccaaacatgtcagcagaattaatccaattgaaagccaaggagcgacactttttggagcaattgttagatgggaaaaaattggaaaattataaaattccagtaccaatcaatgctgaactcagaaaatatcagcaggatggtgtgaactggttagcatttcttaataagtataaacttcatggaattctgtgtgatgacatgggtttaggaaaaactttacagtccatctgcattctagcaggagatcattgtcatagggcccaggaatatgcaagatcaaaattagcagaatgtatgccacttccttccttagtggtttgtccgccaacattaacaggccattgggtggatgaagtaggtaaattttgctctagagaatatctcaacccgttgcattacactggacctcccactgaaagaataaggttacagcaccaagtaaaaaggcacaatctaatagtggcttcatatgatgttgtgaggaatgacatagatttctttagaaatattaaatttaactactgcattcttgatgaaggccatgtcatcaaaaatggaaaaacaaagttgtcaaaagcagtaaaacaactgactgctaattataggattattctttctggaacaccaatccagaacaacgttttggagctgtggtcattatttgatttcctcatgccaggatttttgggtactgaacgccagtttgctgctcgatatggtaaacctatattagcaagtagggatgctcgaagctccagtcgagagcaagaagcaggtgttcttgctatggatgcgctgcaccgccaagtactaccgtttcttttgagaagaatgaaagaagatgttttgcaggatcttccacctaaaattattcaagactattattgtactcttagtcctctccaggttcagctctatgaagattttgctaagtctcgtgccaagtgtgatgttgatgaaacagtttcttcagctacactttctgaagaaactgaaaaaccaaagcttaaagctacaggccacgtattccaggcattacagtacttacgtaaactgtgcaaccatccagcattagtcttaacacctcaacatccagaattcaagaccactgccgaaaaactggcagttcagaattcttctctacatgatattcaacatgcccctaagctctcagctttgaaacaattgctgttggactgcggtttgggaaatggcagcacttccgagagtggcacagagtctgttgtggcccagcacaggatactgatattctgtcagctgaaaagcatgcttgatatagtagagcatgatctcctcaaacctcacttgccctctgtcacttatttgagattagatggcagcatacctcctggtcagaggcattccattgtttcccggtttaataatgatccatctatagacgttctgttacttaccactcacgttggtggcctgggacttaatttgacaggcgctgacacagtagtatttgtggagcatgactggaatcctatgcgagatctacaagccatggaccgggcccatcgcattgggcagaaacgtgtggttaacgtataccgattgataaccagaggaacattggaagaaaaaataatggggttgcagaaattcaagatgaacatagcgaatactgttattagccaagagaattctagtttgcagagcatggggactgatcagcttcttgatctgtttactcttgataaggatggcaaagcagaaaaagctgacacctctacttctgggaaagcaagtatgaaatcaattcttgaaaacctgagtgatctttgggatcaagagcagtatgattcagagtacagcctggaaaattttatgcattctctcaagtaactatcaaatattgtaaatgcaattgctgctagttcagttacatttctgctgatattcagcaaatttctaagtttatggtgaacttttaactcaatgtgtaaatagatctggagaatattcagcataatgctggctcttgtttcactgggggaaacaagttattctcaaatatttgcactgtattaaatttaaatgttaatgtgaaatggtttaaattttacatgctgaaaagctgcagagcagaggaaccaaaccaggtttatttgtgctaccaggaggtgttcttaatgggaacaggcctcctatctttagtcactttgtacaggatgatatccatgagtactttagtgtttgtatatgttttttcttttaaatagaacttgtttttataattgatttaaaatagggctttttttctataaaagccttaatgagccataattttaagaatataagaataatgactatgatattggtcagtcttagaacatgaatgcagatgcatagtgtttttcaaatctttaacatcattttttcaacttttaagatataatatcaactattctaaatacaggtaatggtatatttaaggctaccataacatcctatttagagggtggttttttttaatttatctaatggctacgatatagccagattcaaataacatatgtactcaataggtttcaatcatatatataatatattttttgtaactatgaacatacacagttttccagaaatagattttacactgtttagaattccaacacctacagtggaaagactgtttattgtagtaatgcatggctgaagcataaaagggagagagaatttctttatatacacaaacatacatgaatatgcatatctatatgcatagatgtacctatcctgcacccaaaaaggtgcctggtattggcactaaaatcatgtagttatactgggcagcaataataattgggcatgaggctgattactcaatggtgagggtaggtatatgtagatagatgtgcatgtatgtgtttgtatatataattttataagtttcacgcataaattaatacatgcctgtgtgcatacatatgtatgggatatatttgtatatatatgtacaggtaataaacatccccaaggtttgtggctggccatacacataggcatcagtttaacaaccatcagacctcagctgtacaataacaggtgttttgtttaattaaaattatactgttctgcagcatttagacatttgtcacatttcattagctttgacaaccatactgtaacattaaacctagcattccacaagagaataaatataagattgaaactgtaaaatatatgcaactgtgtgttatttgtaggaaatggtcactagaaagagcaaaagattattcaggtatacaggttttttttcattgtttaggattttaactcaaaactttatgtagaacatttcagtatatttgagttgaatatttttttattaactatttatttgctagttccataaaccagctctttaacatagcttatagtaattgatattttcttagaataagtacagagcaatatatcattaaagggctatgaaggggcaaaagaaatcacaccataaaagttagtactttttcccaatctgaaatgtcagatagagctagaagtcagatatttaggctgtttaaactttctgagagtttaatcaaaaggtgtgtatttctagaaggatgactagaaaaatgatgtgtggttgcttctgaatgggaaacaggagtcagagctgacaggaaaacttagagtggctataacatttttaaaataatcttttgagttgtaaaatagtaaatcacacattccaacttttccatagaaaggaaaacatgtaaacaggtaagaactaagtattcttaattaaatgacccagtcattgtagtacatcttaagaataatgaagagatgtggagaattgaactgagtaatgaatgatattaaagaactgctgtcaatttcatggatgtgatgatttggtagttttttcaatgtatgggtgtgggaagtcaaacaagcatgatagaatgttaactattttaaactgggaattgggttcatagatatccattgtactacttcccttggtttttgtgtctttatgataggaaatagcaaactgttaaaaatatagattcagagattattagtcttatcatttgggtttcttgtaggaaaatcttaacatttgggggcctgggtataatttttgtttcatatattcactcatatatatgcttattgtatatgcttatttattctacaaacatttctccaaaaagtattctagtgaaagggtaaaagtctttgatgttgggactgattgaactggtatagccttattccttctggatggtttatatgaacttacttattcaaaagtaaatattccactg

SEQ ID NO: 70735 - DNA, 3993 bp, Homo sapiens
agcaaagagcggagctgagggtacccggtttgaagtcgtgcgggtcggaggactgccgcctccgctaccgtcttggacccctgcttaccggccgccgcggggacgagctcgggtaggcggcagggcagatgcccgagggcctgcgctggaacgccccacgccgcaccggccgctcccctgtgctccgcggcctgggcctgcgccgctcagctctctggaaactagcgcctcagctgcgcggcgcgtaggtcgcggggagctccgaaccgccggcgcccggccatggcggtctccaggctagatcgcctttttattttactggatactggcactactcctgttacaagaaaagctgctgcacagcaacttggagaagtggtgaagcttcatccccatgaactaaataatctcctgtctaaagtgttgatatatttaaggagtgcaaattgggatacccggattgcagcaggacaagctgttgaagctatagtgaaaaatgtacctgagtggaatccagtgccgagaaccagacaagaacctacttccgaaagttctatggaagattcacctactacagagcgattgaattttgacagatttgatatatgtagattgttacaacatggtgcatcactcctgggatctgctggtgccgaatttgaagtccaagatgaaaaatcaggtgaagtggatcctaaagagaggatagcacgccaacgaaaattattacagaagaaacttggccttaatatgggagaagcaattggaatgagtactgaagaacttttcaatgatgaggatttggattataccccaacttcagcatcctttgttaacaaacaacctactcttcaggcagctgaattgattgactcagagtttcgagcaggaatgagcaatagacaaaagaacaaagctaaaagaatggccaagttatttgcaaaacagagatccagggatgcagtggaaactaatgagaagagcaatgatagcactgatggggagccagaagaaaagagacggaaaatagcaaatgttgttattaatcagtctgcaaatgattccaaagtcttgattgataatattccagacagctcttccttaattgaagagacaaatgaatggcctttggaaagcttttgtgaagaactttgcaatgacctttttaatccctcctgggaggttcgacatggtgcaggcactggacttagggaaattcttaaagctcatgggaaaagtggtggtaaaatgggtgacagcactttagaagaggtaagtgtattaatgcaacaattatcaccaagtattaatagttggcatctttttccaatgtagggaagtaacgagtatgtgccgtgaagtaggaatgagaggtaaataagaggaagagatatgaaaagatgattcagcagcatcaagagtggttggaagacttggttattagactcctttgtgtttttgcattagacagatttggagactttgtttctgatgaagttgtggcaccagttcgtgaaacttgtgctcaaacattaggtgtggttttaaaacacatgaacgaaacaggagttcataagactgtggatgtgctgctaaaattacttacacaagaacaatgggaagttagacatggtggtctgctgggaataaaatatgctttggcagtccgtcaggatgtaattaatactttattgcctaaagttttaactagaataattgaaggactccaggatcttgatgatgatgtcagagctgttgctgcagcatcattagtgcctgtagtagaaagccttgtctatcttcagacacaaaaggtgcccttcattataaatacattgtgggatgctcttctggaattagatgatctaacagcttcaacaaatagtattatgactctcctttcatccttgttaacttaccctcaggtccaacaatgcagtattcagcagtcactgacagttttagttccacgtgtctggccttttttgcatcacactatatcatcagttcgaagagcagcattggaaactctgtttacgttattatcaacacaggaccagaactcttcatcttggcttatacctatactgcctgatatgctccgacacatttttcagttctgtgttttggaaagcagccaggaaattctggaccttattcacaaggtttggatggaactgttgagtaaggcttcagttcagtatgtggtagcagctgcttgcccatggatgggtgcttggctttgcttgatgatgcagccttctcatttacctatcgatttaaatatgttgctagaagtaaaagctagagccaaggaaaaaacaggtggtaaggtgcgccaaggccaaagccagaataaagaagtacttcaggagtatattgcaggtgccgacaccatcatggaagacccagccaccagggattttgtagttatgcgggccagaatgatggcagccaagttgttaggagcactttgttgctgtatttgtgatccaggtgtaaatgtggtaactcaagaaattaaaccagctgaatccctgggccagttactactcttccatttgaactccaagtctgctttacagaggattagtgtagctttggtaatctgtgaatgggctgctttacaaaaggagtgtaaagctgttaccttagctgtgcagccgcgtttacttgatatcctttcagaacatttatattatgacgaaattgccgttccattcacacgaatgcagaatgaatgtaaacaacttatatcatcattagctgatgtacatattgaagttggtaatcgagtaaacaacaatgttttaacaatagatcaagctagtgacttggtcactactgtttttaatgaagccacatcatctttcgatttaaatcctcaagtgttacaacagttagatagtaaacgacagcaggtccaaatgacagttacagagaccaaccaggagtggcaagtgttgcagttgagagtgcatacttttgctgcctgtgcagttgtgagcttgcagcagcttccggagaaattaaatcctatcataaaaccattaatggagacaattaaaaaagaagagaatacactagtgcaaaactatgcagctcagtgcatagctaaactccttcagcagtgcacaacaaggacgccctgtcccaattcaaaaattattaaaaacctctgtagctcactttgtgtggacccatatctaactccttgtgtcacatgtccagtaccaacacaaagtggccaggaaaattctaaaggatccacctcagaaaaagatggaatgcaccatactgtcaccaagcacagaggtataattacactctacaggcaccagaaagctgcctttgctatcacaagtaggcgaggtcctacccccaaagcagtaaaagctcaaatagcagatcttcctgcaggaagtagtggaaatattcttgttgaacttgatgaggcccagaagccttacctggtacaacggagaggagctgaatttgctttgacaactatagtaaagcattttggtggtgaaatggcagtgaagttgccacatctctgggatgctatggttggcccattgaggaatacaatcgacataaataattttgatggaaaatccctcctggataagggagatagccctgctcaagaattggtgaattctctgcaggtttttgaaacagcagcagcttcaatggattctgagcttcatcccttgttggtccagcatttgccacatctttatatgtgccttcaataccccagtactgcagtgaggcacatggctgctcgttgtgtaggtgtcatgagcaaaatagctaccatggaaacaatgaatatttttttggagaaggttcttccgtggctgggagcaattgatgacagtgtcaaacaagagggtgcaattgaagcacttgcctatatttcacagagctcaaaagatggatgaagatcaaatcagtagaaactctggttcaaaaatactgaagatt

SEQ ID NO: 70736 - DNA, 2172 bp, Homo sapiens
agcaaagagcggagctgagggtacccggtttgaagtcgtgcgggtcggaggactgccgcctccgctaccgtcttggacccctgcttaccggccgccgcggggacgagctcgggtaggcggcagggcagatgcccgagggcctgcgctggaacgccccacgccgcaccggccgctcccctgtgctccgcggcctgggcctgcgccgctcagctctctggaaactagcgcctcagctgcgcggcgcgtaggtcgcggggagctccgaaccgccggcgcccggccatggcggtctccaggctagatcgcctttttattttactggatactggcactactcctgttacaagaaaagctgctgcacagcaacttggagaagtggtgaagcttcatccccatgaactaaataatctcctgtctaaagtgttgatatatttaaggagtgcaaattgggatacccggattgcagcaggacaagctgttgaagctatagtgaaaaatgtacctgagtggaatccagtgccgagaaccagacaagaacctacttccgaaagttctatggaagattcacctactacagagcgattgaattttgacagatttgatatatgtagattgttacaacatggtgcatcactcctgggatctgctggtgccgaatttgaagtccaagatgaaaaatcaggtgaagtggatcctaaagagaggatagcacgccaacgaaaattattacagaagaaacttggccttaatatgggagaagcaattggaatgagtactgaagaacttttcaatgatgaggatttggattataccccaacttcagcatcctttgttaacaaacaacctactcttcaggcagctgaattgattgactcagagtttcgagcaggaatgagcaatagacaaaagaacaaagctaaaagaatggccaagttatttgcaaaacagagatccagggatgcagtggaaactaatgagaagagcaatgatagcactgatggggagccagaagaaaagagacggaaaatagcaaatgttgttattaatcagtctgcaaatgattccaaagtcttgattgataatattccagacagctcttccttaattgaagagacaaatgaatggcctttggaaagcttttgtgaagaactttgcaatgacctttttaatccctcctgggaggttcgacatggtgcaggcactggacttagggaaattcttaaagctcatgggaaaagtggtggtaaaatgggtgacagcactttagaagaggtaagtgtattaatgcaacaattatcaccaagtattaatagttggcatctttttccaatgtagggaagtaacgagtatgtgccgtgaagtaggaatgagaggtaaataagaggaagagatatgaaaagatgattcagcagcatcaagagtggttggaagacttggttattagactcctttgtgtttttgcattagacagatttggagactttgtttctgatgaagttgtggcaccagttcgtgaaacttgtgctcaaacattaggtgtggttttaaaacacatgaacgaaacaggagttcataagactgtggatgtgctgctaaaattacttacacaagaacaatgggaagttagacatggtggtctgctgggaataaaatatgctttggcagtccgtcaggatgtaattaatactttattgcctaaagttttaactagaataattgaaggactccaggatcttgatgatgatgtcagagctgttgctgcagcatcattagtgcctgtagtagaaagccttgtctatcttcagacacaaaaggtgcccttcattataaatacattgtgggatgctcttctggaattagatgatctaacagcttcaacaaatagtattatgactctcctttcatccttgttaacttaccctcaggtccaacaatgcagtattcagcagtcactgacagttttagttccacgtgtctggccttttttgcatcacactatatcatcagttcgaagagcagcattggaaactctgtttacgttattatcaacacaggaccagctactcgggaggctgaggcacaagaattgcttgaacctgggaggcagaggctgcagtgagccgagattgcaccactgccaagcctggataacagagcaagaccctgtctcag

SEQ ID NO: 70737 - DNA, 364 bp, Homo sapiens
agtaaatttgtatttctctgttctggctaccttgcgcaaacaatatttttgtatacgtaacttttattttataatttttaaggtgttgatatatttaaggagtgcaaattgggatacccggattgcagcaggacaagctgttgaagctatagtgaaaaatgtacctgagtggaatccagtgccgagaaccagacaaggtgcttttaagtggagaaagtagttttaagtaaaaacctaactgtagaattaattataatatgcgttttgtattttaataatttcaattttaaagtcttaatttccatgcttttaggtacagctttgtcaggaaatgatactgaataaggtgatttttcaccacatt

SEQ ID NO: 70738 - DNA, 346 bp, Homo sapiens
gccttcaataccccagtactgcagtgaggcacatggctgctcgttgtgtaggtgtcatgagcaaaatagctaccatggaaacaatgaatatttttttggagaaggttcttccgtggctgggagcaattgatgacagtgtcaaacaagagggtgcaattgaagcacttgcctgtatcctttttcatttgacaaactgttcaggaattatattcatttcacttaaggataattaaaatgaaattgatgtgttctaatatgcacataaataacctgccttgttccaaaaaatacctattctttttacatcttattttgaaatatttttgtattttattacaaatgtgtt

SEQ ID NO: 70739 - DNA, 710 bp, Homo sapiens
tatggtacagtcatacaacaaaagagtgtgaacctgtcaaaaaagaatgtgatcgatgtatatatactgaaatttatagacttggtcttcttctgaggctgagactataggtacttattttaatttcaaaagttccaactcagcattcttttattcttttagactcttcaggcagctgaattgattgactcagagtttcgagcaggaatgagcaatagacaaaagaacaaagctaaaagaatggccaagttatttgcaaaacagagatccagggatgcagtggaaactaatgagaagaggtagtaatctttttttgcctattcacttaaaacaagagggctctgtggctttaatctgtgtctgcttgatttatagaaacattctgctgacatatttagctggggagtactgtttggattctcttactcaattgtcagagagtattcattgtactaggaactgagaccacttccccagaaaaatccacatgtacagacttttttcctactaattatcagttttgaatgagggctgaggatctccaaaggggagagcattccaggcagaagaaacaagtttaaatgccttaaacatggaataatcaagaaacaaatagaagggcagtatggccttctatactgggatgagtgcacaggagagtgatagagaatgaaatcagagaggtgtctaaggaccacaagttaagaata

SEQ ID NO: 70740 - DNA, 7221 bp, Homo sapiens
agcaaagagcggagctgagggtacccggtttgaagtcgtgcgggtcggaggactgccgcctccgctaccgtcttggacccctgcttaccggccgccgcggggacgagctcgggtaggcggcagggcagatgcccgagggcctgcgctggaacgccccacgccgcaccggccgctcccctgtgctccgcggcctgggcctgcgccgctcagctctctggaaactagcgcctcagctgcgcggcgcgtaggtcgcggggagctccgaaccgccggcgcccggccatggcggtctccaggctagatcgcctttttattttactggatactggcactactcctgttacaagaaaagctgctgcacagcaacttggagaagtggtgaagcttcatccccatgaactaaataatctcctgtctaaagtgttgatatatttaaggagtgcaaattgggatacccggattgcagcaggacaagctgttgaagctatagtgaaaaatgtacctgagtggaatccagtgccgagaaccagacaagaacctacttccgaaagttctatggaagattcacctactacagagcgattgaattttgacagatttgatatatgtagattgttacaacatggtgcatcactcctgggatctgctggtgccgaatttgaagtccaagatgaaaaatcaggtgaagtggatcctaaagagaggatagcacgccaacgaaaattattacagaagaaacttggccttaatatgggagaagcaattggaatgagtactgaagaacttttcaatgatgaggatttggattataccccaacttcagcatcctttgttaacaaacaacctactcttcaggcagctgaattgattgactcagagtttcgagcaggaatgagcaatagacaaaagaacaaagctaaaagaatggccaagttatttgcaaaacagagatccagggatgcagtggaaactaatgagaagagcaatgatagcactgatggggagccagaagaaaagagacggaaaatagcaaatgttgttattaatcagtctgcaaatgattccaaagtcttgattgataatattccagacagctcttccttaattgaagagacaaatgaatggcctttggaaagcttttgtgaagaactttgcaatgacctttttaatccctcctgggaggttcgacatggtgcaggcactggacttagggaaattcttaaagctcatgggaaaagtggtggtaaaatgggtgacagcactttagaagagatgattcagcagcatcaagagtggttggaagacttggttattagactcctttgtgtttttgcattagacagatttggagactttgtttctgatgaagttgtggcaccagttcgtgaaacttgtgctcaaacattaggtgtggttttaaaacacatgaacgaaacaggagttcataagactgtggatgtgctgctaaaattacttacacaagaacaatgggaagttagacatggtggtctgctgggaataaaatatgctttggcagtccgtcaggatgtaattaatactttattgcctaaagttttaactagaataattgaaggactccaggatcttgatgatgatgtcagagctgttgctgcagcatcattagtgcctgtagtagaaagccttgtctatcttcagacacaaaaggtgcccttcattataaatacattgtgggatgctcttctggaattagatgatctaacagcttcaacaaatagtattatgactctcctttcatccttgttaacttaccctcaggtccaacaatgcagtattcagcagtcactgacagttttagttccacgtgtctggccttttttgcatcacactatatcatcagttcgaagagcagcattggaaactctgtttacgttattatcaacacaggaccagaactcttcatcttggcttatacctatactgcctgatatgctccgacacatttttcagttctgtgttttggaaagcagccaggaaattctggaccttattcacaaggtttggatggaactgttgagtaaggcttcagttcagtatgtggtagcagctgcttgcccatggatgggtgcttggctttgcttgatgatgcagccttctcatttacctatcgatttaaatatgttgctagaagtaaaagctagagccaaggaaaaaacaggtggtaaggtgcgccaaggccaaagccagaataaagaagtacttcaggagtatattgcaggtgccgacaccatcatggaagacccagccaccagggattttgtagttatgcgggccagaatgatggcagccaagttgttaggagcactttgttgctgtatttgtgatccaggtgtaaatgtggtaactcaagaaattaaaccagctgaatccctgggccagttactactcttccatttgaactccaagtctgctttacagaggattagtgtagctttggtaatctgtgaatgggctgctttacaaaaggagtgtaaagctgttaccttagctgtgcagccgcgtttacttgatatcctttcagaacatttatattatgacgaaattgccgttccattcacacgaatgcagaatgaatgtaaacaacttatatcatcattagctgatgtacatattgaagttggtaatcgagtaaacaacaatgttttaacaatagatcaagctagtgacttggtcactactgtttttaatgaagccacatcatctttcgatttaaatcctcaagtgttacaacagttagatagtaaacgacagcaggtccaaatgacagttacagagaccaaccaggagtggcaagtgttgcagttgagagtgcatacttttgctgcctgtgcagttgtgagcttgcagcagcttccggagaaattaaatcctatcataaaaccattaatggagacaattaaaaaagaagagaatacactagtgcaaaactatgcagctcagtgcatagctaaactccttcagcagtgcacaacaaggacgccctgtcccaattcaaaaattattaaaaacctctgtagctcactttgtgtggacccatatctaactccttgtgtcacatgtccagtaccaacacaaagtggccaggaaaattctaaaggatccacctcagaaaaagatggaatgcaccatactgtcaccaagcacagaggtataattacactctacaggcaccagaaagctgcctttgctatcacaagtaggcgaggtcctacccccaaagcagtaaaagctcaaatagcagatcttcctgcaggaagtagtggaaatattcttgttgaacttgatgaggcccagaagccttacctggtacaacggagaggagctgaatttgctttgacaactatagtaaagcattttggtggtgaaatggcagtgaagttgccacatctctgggatgctatggttggcccattgaggaatacaatcgacataaataattttgatggaaaatccctcctggataagggagatagccctgctcaagaattggtgaattctctgcaggtttttgaaacagcagcagcttcaatggattctgagcttcatcccttgttggtccagcatttgccacatctttatatgtgccttcaataccccagtactgcagtgaggcacatggctgctcgttgtgtaggtgtcatgagcaaaatagctaccatggaaacaatgaatatttttttggagaaggttcttccgtggctgggagcaattgatgacagtgtcaaacaagagggtgcaattgaagcacttgcctgtgtaatggaacaactagatgttggtattgttccatatattgtccttttagttgttcctgtattaggaagaatgagtgatcagacagacagtgtgagattcatggccacgcagtgctttgcaacgctaattagactcatgccacttgaggcaggcattccagaccctccaaacatgtcagcagaattaatccaattgaaagccaaggagcgacactttttggagcaattgttagatgggaaaaaattggaaaattataaaattccagtaccaatcaatgctgaactcagaaaatatcagcaggatggtgtgaactggttagcatttcttaataagtataaacttcatggaattctgtgtgatgacatgggtttaggaaaaactttacagtccatctgcattctagcaggagatcattgtcatagggcccaggaatatgcaagatcaaaattagcagaatgtatgccacttccttccttagtggtttgtccgccaacattaacaggccattgggtggatgaagtaggtaaattttgctctagagaatatctcaacccgttgcattacactggacctcccactgaaagaataaggttacagcaccaagtaaaaaggcacaatctaatagtggcttcatatgatgttgtgaggaatgacatagatttctttagaaatattaaatttaactactgcattcttgatgaaggccatgtcatcaaaaatggaaaaacaaagttgtcaaaagcagtaaaacaactgactgctaattataggattattctttctggaacaccaatccagaacaacgttttggagctgtggtcattatttgatttcctcatgccaggatttttgggtactgaacgccagtttgctgctcgatatggtaaacctatattagcaagtagggatgctcgaagctccagtcgagagcaagaagcaggtgttcttgctatggatgcgctgcaccgccaagtactaccgtttcttttgagaagaatgaaagaagatgttttgcaggatcttccacctaaaattattcaagactattattgtactcttagtcctctccaggttcagctctatgaagattttgctaagtctcgtgccaagtgtgatgttgatgaaacagtttcttcagctacactttctgaagaaactgaaaaaccaaagcttaaagctacaggccacgtattccaggcattacagtacttacgtaaactgtgcaaccatccagcattagtcttaacacctcaacatccagaattcaagaccactgccgaaaaactggcagttcagaattcttctctacatgatattcaacatgcccctaagctctcagctttgaaacaattgctgttggactgcggtttgggaaatggcagcacttccgagagtggcacagagtctgttgtggcccagcacaggatactgatattctgtcagctgaaaagcatgcttgatatagtagagcatgatctcctcaaacctcacttgccctctgtcacttatttgagattagatggcagcatacctcctggtcagaggcattccattgtttcccggtttaataatgatccatctatagacgttctgttacttaccactcacgttggtggcctgggacttaatttgacaggcgctgacacagtagtatttgtggagcatgactggaatcctatgcgagatctacaagccatggaccgggcccatcgcattgggcagaaacgtgtggttaacgtataccgattgataaccagaggaacattggaagaaaaaataatggggttgcagaaattcaagatgaacatagcgaatactgttattagccaagagaattctagtttgcagagcatggggactgatcagcttcttgatctgtttactcttgataaggatggcaaagcagaaaaagctgacacctctacttctgggaaagcaagtatgaaatcaattcttgaaaacctgagtgatctttgggatcaagagcagtatgattcagagtacagcctggaaaattttatgcattctctcaagtaactatcaaatattgtaaatgcaattgctgctagttcagttacatttctgctgatattcagcaaatttctaagtttatggtgaacttttaactcaatgtgtaaatagatctggagaatattcagcataatgctggctcttgtttcactgggggaaacaagttattctcaaatatttgcactgtattaaatttaaatgttaatgtgaaatggtttaaattttacatgctgaaaagctgcagagcagaggaaccaaaccaggtttatttgtgctaccaggaggtgttcttaatgggaacaggcctcctatctttagtcactttgtacaggatgatatccatgagtactttagtgtttgtatatgttttttcttttaaatagaacttgtttttataattgatttaaaatagggctttttttctataaaagccttaatgagccataattttaagaatataagaataatgactatgatattggtcagtcttagaacatgaaaatgtcagacaatgaatttaatcgggcccttggtggaaacatttatatatttaatgcagatgcatagtgtttttcaaatctttaacatcattttttcaacttttaagatataatatcaactattctaaatacaggtaatggtatatttaaggctaccataacatcctatttagagggtggttttttttaatttatctaatggctacgatatagccagattcaaataacatatgtactcaataggtttcaatcatatatataatatattttttgtaactatgaacatacacagttttccagaaatagattttacactgtttagaattccaacacctacagtggaaagactgtttattgtagtaatgcatggctgaagcataaaagggagagagaatttctttatatacacaaacatacatgaatatgcatatctatatgcatagatgtacctatcctgcacccaaaaaggtgcctggtattggcactaaaatcatgtagttatactgggcagcaataataattgggcatgaggctgattactcaatggtgagggtaggtatatgtagatagatgtgcatgtatgtgtttgtatatataattttataagtttcacgcataaattaatacatgcctgtgtgcatacatatgtatgggatatatttgtatatatatgtacaggtaataaacatccccaaggtttgtggctggccatacacataggcatcagtttaacaaccatcagacctcagctgtacaataacaggtgttttgtttaattaaaattatactgttctgcagcatttagacatttgtcacatttcattagctttgacaaccatactgtaacattaaacctagcattccacaagagaataaatataagattgaaactgta

SEQ ID NO: 70741 - DNA, 8404 bp, Homo sapiens
agcaaagagcggagctgagggtacccggtttgaagtcgtgcgggtcggaggactgccgcctccgctaccgtcttggacccctgcttaccggccgccgcggggacgagctcgggtaggcggcagggcagatgcccgagggcctgcgctggaacgccccacgccgcaccggccgctcccctgtgctccgcggcctgggcctgcgccgctcagctctctggaaactagcgcctcagctgcgcggcgcgtaggtcgcggggagctccgaaccgccggcgcccggccatggcggtctccaggctagatcgcctttttattttactggatactggcactactcctgttacaagaaaagctgctgcacagcaacttggagaagtggtgaagcttcatccccatgaactaaataatctcctgtctaaagtgttgatatatttaaggagtgcaaattgggatacccggattgcagcaggacaagctgttgaagctatagtgaaaaatgtacctgagtggaatccagtgccgagaaccagacaagaacctacttccgaaagttctatggaagattcacctactacagagcgattgaattttgacagatttgatatatgtagattgttacaacatggtgcatcactcctgggatctgctggtgccgaatttgaagtccaagatgaaaaatcaggtgaagtggatcctaaagagaggatagcacgccaacgaaaattattacagaagaaacttggccttaatatgggagaagcaattggaatgagtactgaagaacttttcaatgatgaggatttggattataccccaacttcagcatcctttgttaacaaacaacctactcttcaggcagctgaattgattgactcagagtttcgagcaggaatgagcaatagacaaaagaacaaagctaaaagaatggccaagttatttgcaaaacagagatccagggatgcagtggaaactaatgagaagagcaatgatagcactgatggggagccagaagaaaagagacggaaaatagcaaatgttgttattaatcagtctgcaaatgattccaaagtcttgattgataatattccagacagctcttccttaattgaagagacaaatgaatggcctttggaaagcttttgtgaagaactttgcaatgacctttttaatccctcctgggaggttcgacatggtgcaggcactggacttagggaaattcttaaagctcatgggaaaagtggtggtaaaatgggtgacagcactttagaagaggtaagtgtattaatgcaacaattatcaccaagtattaatagttggcatctttttccaatgtagggaagtaacgagtatgtgccgtgaagtaggaatgagaggtaaataagaggaagagatatgaaaagatgattcagcagcatcaagagtggttggaagacttggttattagactcctttgtgtttttgcattagacagatttggagactttgtttctgatgaagttgtggcaccagttcgtgaaacttgtgctcaaacattaggtgtggttttaaaacacatgaacgaaacaggagttcataagactgtggatgtgctgctaaaattacttacacaagaacaatgggaagttagacatggtggtctgctgggaataaaatatgctttggcagtccgtcaggatgtaattaatactttattgcctaaagttttaactagaataattgaaggactccaggatcttgatgatgatgtcagagctgttgctgcagcatcattagtgcctgtagtagaaagccttgtctatcttcagacacaaaaggtgcccttcattataaatacattgtgggatgctcttctggaattagatgatctaacagcttcaacaaatagtattatgactctcctttcatccttgttaacttaccctcaggtccaacaatgcagtattcagcagtcactgacagttttagttccacgtgtctggccttttttgcatcacactatatcatcagttcgaagagcagcattggaaactctgtttacgttattatcaacacaggaccagaactcttcatcttggcttatacctatactgcctgatatgctccgacacatttttcagttctgtgttttggaaagcagccaggaaattctggaccttattcacaaggtttggatggaactgttgagtaaggcttcagttcagtatgtggtagcagctgcttgcccatggatgggtgcttggctttgcttgatgatgcagccttctcatttacctatcgatttaaatatgttgctagaagtaaaagctagagccaaggaaaaaacaggtggtaaggtgcgccaaggccaaagccagaataaagaagtacttcaggagtatattgcaggtgccgacaccatcatggaagacccagccaccagggattttgtagttatgcgggccagaatgatggcagccaagttgttaggagcactttgttgctgtatttgtgatccaggtgtaaatgtggtaactcaagaaattaaaccagctgaatccctgggccagttactactcttccatttgaactccaagtctgctttacagaggattagtgtagctttggtaatctgtgaatgggctgctttacaaaaggagtgtaaagctgttaccttagctgtgcagccgcgtttacttgatatcctttcagaacatttatattatgacgaaattgccgttccattcacacgaatgcagaatgaatgtaaacaacttatatcatcattagctgatgtacatattgaagttggtaatcgagtaaacaacaatgttttaacaatagatcaagctagtgacttggtcactactgtttttaatgaagccacatcatctttcgatttaaatcctcaagtgttacaacagttagatagtaaacgacagcaggtccaaatgacagttacagagaccaaccaggagtggcaagtgttgcagttgagagtgcatacttttgctgcctgtgcagttgtgagcttgcagcagcttccggagaaattaaatcctatcataaaaccattaatggagacaattaaaaaagaagagaatacactagtgcaaaactatgcagctcagtgcatagctaaactccttcagcagtgcacaacaaggacgccctgtcccaattcaaaaattattaaaaacctctgtagctcactttgtgtggacccatatctaactccttgtgtcacatgtccagtaccaacacaaagtggccaggaaaattctaaaggatccacctcagaaaaagatggaatgcaccatactgtcaccaagcacagaggtataattacactctacaggcaccagaaagctgcctttgctatcacaagtaggcgaggtcctacccccaaagcagtaaaagctcaaatagcagatcttcctgcaggaagtagtggaaatattcttgttgaacttgatgaggcccagaagccttacctggtacaacggagaggagctgaatttgctttgacaactatagtaaagcattttggtggtgaaatggcagtgaagttgccacatctctgggatgctatggttggcccattgaggaatacaatcgacataaataattttgatggaaaatccctcctggataagggagatagccctgctcaagaattggtgaattctctgcaggtttttgaaacagcagcagcttcaatggattctgagcttcatcccttgttggtccagcatttgccacatctttatatgtgccttcaataccccagtactgcagtgaggcacatggctgctcgttgtgtaggtgtcatgagcaaaatagctaccatggaaacaatgaatatttttttggagaaggttcttccgtggctgggagcaattgatgacagtgtcaaacaagagggtgcaattgaagcacttgcctgtgtaatggaacaactagatgttggtattgttccatatattgtccttttagttgttcctgtattaggaagaatgagtgatcagacagacagtgtgagattcatggccacgcagtgctttgcaacgctaattagactcatgccacttgaggcaggcattccagaccctccaaacatgtcagcagaattaatccaattgaaagccaaggagcgacactttttggagcaattgttagatgggaaaaaattggaaaattataaaattccagtaccaatcaatgctgaactcagaaaatatcagcaggatggtgtgaactggttagcatttcttaataagtataaacttcatggaattctgtgtgatgacatgggtttaggaaaaactttacagtccatctgcattctagcaggagatcattgtcatagggcccaggaatatgcaagatcaaaattagcagaatgtatgccacttccttccttagtggtttgtccgccaacattaacaggccattgggtggatgaagtaggtaaattttgctctagagaatatctcaacccgttgcattacactggacctcccactgaaagaataaggttacagcaccaagtaaaaaggcacaatctaatagtggcttcatatgatgttgtgaggaatgacatagatttctttagaaatattaaatttaactactgcattcttgatgaaggccatgtcatcaaaaatggaaaaacaaagttgtcaaaagcagtaaaacaactgactgctaattataggattattctttctggaacaccaatccagaacaacgttttggagctgtggtcattatttgatttcctcatgccaggatttttgggtactgaacgccagtttgctgctcgatatggtaaacctatattagcaagtagggatgctcgaagctccagtcgagagcaagaagcaggtgttcttgctatggatgcgctgcaccgccaagtactaccgtttcttttgagaagaatgaaagaagatgttttgcaggatcttccacctaaaattattcaagactattattgtactcttagtcctctccaggttcagctctatgaagattttgctaagtctcgtgccaagtgtgatgttgatgaaacagtttcttcagctacactttctgaagaaactgaaaaaccaaagcttaaagctacaggccacgtattccaggcattacagtacttacgtaaactgtgcaaccatccagcattagtcttaacacctcaacatccagaattcaagaccactgccgaaaaactggcagttcagaattcttctctacatgatattcaacatgcccctaagctctcagctttgaaacaattgctgttggactgcggtttgggaaatggcagcacttccgagagtggcacagagtctgttgtggcccagcacaggatactgatattctgtcagctggtcacttatttgagattagatggcagcatacctcctggtcagaggcattccattgtttcccggtttaataatgatccatctatagacgttctgttacttaccactcacgttggtggcctgggacttaatttgacaggcgctgacacagtagtatttgtggagcatgactggaatcctatgcgagatctacaagccatggaccgggcccatcgcattgggcagaaacgtgtggttaacgtataccgattgataaccagaggaacattggaagaaaaaataatggggttgcagaaattcaagatgaacatagcgaatactgttattagccaagagaattctagtttgcagagcatggggactgatcagcttcttgatctgtttactcttgataaggatggcaaagcagaaaaagctgacacctctacttctgggaaagcaagtatgaaatcaattcttgaaaacctgagtgatctttgggatcaagagcagtatgattcagagtacagcctggaaaattttatgcattctctcaagtaactatcaaatattgtaaatgcaattgctgctagttcagttacatttctgctgatattcagcaaatttctaagtttatggtgaacttttaactcaatgtgtaaatagatctggagaatattcagcataatgctggctcttgtttcactgggggaaacaagttattctcaaatatttgcactgtattaaatttaaatgttaatgtgaaatggtttaaattttacatgctgaaaagctgcagagcagaggaaccaaaccaggtttatttgtgctaccaggaggtgttcttaatgggaacaggcctcctatctttagtcactttgtacaggatgatatccatgagtactttagtgtttgtatatgttttttcttttaaatagaacttgtttttataattgatttaaaatagggctttttttctataaaagccttaatgagccataattttaagaatataagaataatgactatgatattggtcagtcttagaacatgaaaatgtcagacaatgaatttaatcgggcccttggtggaaacatttatatatttaatgcagatgcatagtgtttttcaaatctttaacatcattttttcaacttttaagatataatatcaactattctaaatacaggtaatggtatatttaaggctaccataacatcctatttagagggtggttttttttaatttatctaatggctacgatatagccagattcaaataacatatgtactcaataggtttcaatcatatatataatatattttttgtaactatgaacatacacagttttccagaaatagattttacactgtttagaattccaacacctacagtggaaagactgtttattgtagtaatgcatggctgaagcataaaagggagagagaatttctttatatacacaaacatacatgaatatgcatatctatatgcatagatgtacctatcctgcacccaaaaaggtgcctggtattggcactaaaatcatgtagttatactgggcagcaataataattgggcatgaggctgattactcaatggtgagggtaggtatatgtagatagatgtgcatgtatgtgtttgtatatataattttataagtttcacgcataaattaatacatgcctgtgtgcatacatatgtatgggatatatttgtatatatatgtacaggtaataaacatccccaaggtttgtggctggccatacacataggcatcagtttaacaaccatcagacctcagctgtacaataacaggtgttttgtttaattaaaattatactgttctgcagcatttagacatttgtcacatttcattagctttgacaaccatactgtaacattaaacctagcattccacaagagaataaatataagattgaaactgtaaaatatatgcaactgtgtgttatttgtaggaaatggtcactagaaagagcaaaagattattcaggtatacaggttttttttcattgtttaggattttaactcaaaactttatgtagaacatttcagtatatttgagttgaatatttttttattaactatttatttgctagttccataaaccagctctttaacatagcttatagtaattgatattttcttagaataagtacagagcaatatatcattaaagggctatgaaggggcaaaagaaatcacaccataaaagttagtactttttcccaatctgaaatgtcagatagagctagaagtcagatatttaggctgtttaaactttctgagagtttaatcaaaaggtgtgtatttctagaaggatgactagaaaaatgatgtgtggttgcttctgaatgggaaacaggagtcagagctgacaggaaaacttagagtggctataacatttttaaaataatcttttgagttgtaaaatagtaaatcacacattccaacttttccatagaaaggaaaacatgtaaacaggtaagaactaagtattcttaattaaatgacccagtcattgtagtacatcttaagaataatgaagagatgtggagaattgaactgagtaatgaatgatattaaagaactgctgtcaatttcatggatgtgatgatttggtagttttttcaatgtatgggtgtgggaagtcaaacaagcatgatagaatgttaactattttaaactgggaattgggttcatagatatccattgtactacttcccttggtttttgtgtctttatgataggaaatagcaaactgttaaaaatatagattcagagattattagtcttatcatttgggtttcttgtaggaaaatcttaacatttgggggcctgggtataatttttgtttcatatattcactcatatatatgcttattgtatatgcttatttattctacaaacatttctccaaaaagtattctagtgaaagggtaaaagtctttgatgttgggactgattgaactggtatagccttattccttctggatggtttatatgaacttacttattcaaaagtaaatattccactg

SEQ ID NO: 70742 - DNA, 4344 bp, Homo sapiens
agcaaagagcggagctgagggtacccggtttgaagtcgtgcgggtcggaggactgccgcctccgctaccgtcttggacccctgcttaccggccgccgcggggacgagctcgggtaggcggcagggcagatgcccgagggcctgcgctggaacgccccacgccgcaccggccgctcccctgtgctccgcggcctgggcctgcgccgctcagctctctggaaactagcgcctcagctgcgcggcgcgtaggtcgcggggagctccgaaccgccggcgcccggccatggcggtctccaggctagatcgcctttttattttactggatactggcactactcctgttacaagaaaagctgctgcacagcaacttggagaagtggtgaagcttcatccccatgaactaaataatctcctgtctaaagtgttgatatatttaaggagtgcaaattgggatacccggattgcagcaggacaagctgttgaagctatagtgaaaaatgtacctgagtggaatccagtgccgagaaccagacaagaacctacttccgaaagttctatggaagattcacctactacagagcgattgaattttgacagatttgatatatgtagattgttacaacatggtgcatcactcctgggatctgctggtgccgaatttgaagtccaagatgaaaaatcaggtgaagtggatcctaaagagaggatagcacgccaacgaaaattattacagaagaaacttggccttaatatgggagaagcaattggaatgagtactgaagaacttttcaatgatgaggatttggattataccccaacttcagcatcctttgttaacaaacaacctactcttcaggcagctgaattgattgactcagagtttcgagcaggaatgagcaatagacaaaagaacaaagctaaaagaatggccaagttatttgcaaaacagagatccagggatgcagtggaaactaatgagaagagcaatgatagcactgatggggagccagaagaaaagagacggaaaatagcaaatgttgttattaatcagtctgcaaatgattccaaagtcttgattgataatattccagacagctcttccttaattgaagagacaaatgaatggcctttggaaagcttttgtgaagaactttgcaatgacctttttaatccctcctgggaggttcgacatggtgcaggcactggacttagggaaattcttaaagctcatgggaaaagtggtggtaaaatgggtgacagcactttagaagaggtaagtgtattaatgcaacaattatcaccaagtattaatagttggcatctttttccaatgtagggaagtaacgagtatgtgccgtgaagtaggaatgagaggtaaataagaggaagagatatgaaaagatgattcagcagcatcaagagtggttggaagacttggttattagactcctttgtgtttttgcattagacagatttggagactttgtttctgatgaagttgtggcaccagttcgtgaaacttgtgctcaaacattaggtgtggttttaaaacacatgaacgaaacaggagttcataagactgtggatgtgctgctaaaattacttacacaagaacaatgggaagttagacatggtggtctgctgggaataaaatatgctttggcagtccgtcaggatgtaattaatactttattgcctaaagttttaactagaataattgaaggactccaggatcttgatgatgatgtcagagctgttgctgcagcatcattagtgcctgtagtagaaagccttgtctatcttcagacacaaaaggtgcccttcattataaatacattgtgggatgctcttctggaattagatgatctaacagcttcaacaaatagtattatgactctcctttcatccttgttaacttaccctcaggtccaacaatgcagtattcagcagtcactgacagttttagttccacgtgtctggccttttttgcatcacactatatcatcagttcgaagagcagcattggaaactctgtttacgttattatcaacacaggaccagaactcttcatcttggcttatacctatactgcctgatatgctccgacacatttttcagttctgtgttttggaaagcagccaggaaattctggaccttattcacaaggtttggatggaactgttgagtaaggcttcagttcagtatgtggtagcagctgcttgcccatggatgggtgcttggctttgcttgatgatgcagccttctcatttacctatcgatttaaatatgttgctagaagtaaaagctagagccaaggaaaaaacaggtggtaaggtgcgccaaggccaaagccagaataaagaagtacttcaggagtatattgcaggtgccgacaccatcatggaagacccagccaccagggattttgtagttatgcgggccagaatgatggcagccaagttgttaggagcactttgttgctgtatttgtgatccaggtgtaaatgtggtaactcaagaaattaaaccagctgaatccctgggccagttactactcttccatttgaactccaagtctgctttacagaggattagtgtagctttggtaatctgtgaatgggctgctttacaaaaggagtgtaaagctgttaccttagctgtgcagccgcgtttacttgatatcctttcagaacatttatattatgacgaaattgccgttccattcacacgaatgcagaatgaatgtaaacaacttatatcatcattagctgatgtacatattgaagttggtaatcgagtaaacaacaatgttttaacaatagatcaagctagtgacttggtcactactgtttttaatgaagccacatcatctttcgatttaaatcctcaagtgttacaacagttagatagtaaacgacagcaggtccaaatgacagttacagagaccaaccaggagtggcaagtgttgcagttgagagtgcatacttttgctgcctgtgcagttgtgagcttgcagcagcttccggagaaattaaatcctatcataaaaccattaatggagacaattaaaaaagaagagaatacactagtgcaaaactatgcagctcagtgcatagctaaactccttcagcagtgcacaacaaggacgccctgtcccaattcaaaaattattaaaaacctctgtagctcactttgtgtggacccatatctaactccttgtgtcacatgtccagtaccaacacaaagtggccaggaaaattctaaaggatccacctcagaaaaagatggaatgcaccatactgtcaccaagcacagaggtataattacactctacaggcaccagaaagctgcctttgctatcacaagtaggcgaggtcctacccccaaagcagtaaaagctcaaatagcagatcttcctgcaggaagtagtggaaatattcttgttgaacttgatgaggcccagaagccttacctggtacaacggagaggagctgaatttgctttgacaactatagtaaagcattttggtggtgaaatggcagtgaagttgccacatctctgggatgctatggttggcccattgaggaatacaatcgacataaataattttgatggaaaatccctcctggataagggagatagccctgctcaagaattggtgaattctctgcaggtttttgaaacagcagcagcttcaatggattctgagcttcatcccttgttggtccagcatttgccacatctttatatgtgccttcaataccccagtactgcagtgaggcacatggctgctcgttgtgtaggtgtcatgagcaaaatagctaccatggaaacaatgaatatttttttggagaaggttcttccgtggctgggagcaattgatgacagtgtcaaacaagagggtgcaattgaagcacttgcctgtgtaatggaacaactagatgttggtattgttccatatattgtccttttagttgttcctgtattaggaagaatgagtgatcagacagacagtgtgagattcatggccacgcagtgctttgcaacgctaattagactcatgccacttgaggtaagtcaaagatacttgctttaaagacataatgttttctataacttgatccataataattgtaaccctttttagggccaggtacaaaggctcatgcctgtaatcccagcactttctgaggctgaggtgggtggatcatctgaggtcaggagtttgagtccagcctggccaacatgggtgaaaccctgtctctactaaaaaaaatacaaaaaaaagacaaaaacagttagctgggcatggtggtgtgtgcctgtagtctcagctactcgggatg

SEQ ID NO: 70743 - DNA, 2648 bp, Homo sapiens
agcaaagagcggagctgagggtacccggtttgaagtcgtgcgggtcggaggactgccgcctccgctaccgtcttggacccctgcttaccggccgccgcggggacgagctcgggtaggcggcagggcagatgcccgagggcctgcgctggaacgccccacgccgcaccggccgctcccctgtgctccgcggcctgggcctgcgccgctcagctctctggaaactagcgcctcagctgcgcggcgcgtaggtcgcggggagctccgaaccgccggcgcccggccatggcggtctccaggctagatcgcctttttattttactggatactggcactactcctgttacaagaaaagctgctgcacagcaacttggagaagtggtgaagcttcatccccatgaactaaataatctcctgtctaaagtgttgatatatttaaggagtgcaaattgggatacccggattgcagcaggacaagctgttgaagctatagtgaaaaatgtacctgagtggaatccagtgccgagaaccagacaagaacctacttccgaaagttctatggaagattcacctactacagagcgattgaattttgacagatttgatatatgtagattgttacaacatggtgcatcactcctgggatctgctggtgccgaatttgaagtccaagatgaaaaatcaggtgaagtggatcctaaagagaggatagcacgccaacgaaaattattacagaagaaacttggccttaatatgggagaagcaattggaatgagtactgaagaacttttcaatgatgaggatttggattataccccaacttcagcatcctttgttaacaaacaacctactcttcaggcagctgaattgattgactcagagtttcgagcaggaatgagcaatagacaaaagaacaaagctaaaagaatggccaagttatttgcaaaacagagatccagggatgcagtggaaactaatgagaagagcaatgatagcactgatggggagccagaagaaaagagacggaaaatagcaaatgttgttattaatcagtctgcaaatgattccaaagtcttgattgataatattccagacagctcttccttaattgaagagacaaatgaatggcctttggaaagcttttgtgaagaactttgcaatgacctttttaatccctcctgggaggttcgacatggtgcaggcactggacttagggaaattcttaaagctcatgggaaaagtggtggtaaaatgggtgacagcactttagaagaggtaagtgtattaatgcaacaattatcaccaagtattaatagttggcatctttttccaatgtagggaagtaacgagtatgtgccgtgaagtaggaatgagaggtaaataagaggaagagatatgaaaagatgattcagcagcatcaagagtggttggaagacttggttattagactcctttgtgtttttgcattagacagatttggagactttgtttctgatgaagttgtggcaccagttcgtgaaacttgtgctcaaacattaggtgtggttttaaaacacatgaacgaaacaggagttcataagactgtggatgtgctgctaaaattacttacacaagaacaatgggaagttagacatggtggtctgctgggaataaaatatgctttggcagtccgtcaggatgtaattaatactttattgcctaaagttttaactagaataattgaaggactccaggatcttgatgatgatgtcagagctgttgctgcagcatcattagtgcctgtagtagaaagccttgtctatcttcagacacaaaaggtgcccttcattataaatacattgtgggatgctcttctggaattagatgatctaacagcttcaacaaatagtattatgactctcctttcatccttgttaacttaccctcaggtccaacaatgcagtattcagcagtcactgacagttttagttccacgtgtctggccttttttgcatcacactatatcatcagttcgaagagcagcattggaaactctgtttacgttattatcaacacaggaccagaactcttcatcttggcttatacctatactgcctgatatgctccgacacatttttcagttctgtgttttggaaagcagccaggaaattctggaccttattcacaaggtttggatggaactgttgagtaaggcttcagttcagtatgtggtagcagctgcttgcccatggatgggtgcttggctttgcttgatgatgcagccttctcatttacctatcgatttaaatatgttgctagaagtaaaagctagagccaaggaaaaaacaggtggtaaggtgcgccaaggccaaagccagaataaagaagtacttcaggagtatattgcaggtgccgacaccatcatggaagacccagccaccagggattttgtagttatgcgggccagaatgatggcagccaagtgagtgtacattaagtgtcaggtagtcatacatttacaagtctggctttcaaaggttatttaaccaacagaagattcctctgctgtctccatcagtccttccttccttcatcacactaattatagcctaaggaaaaattagagtaagcaaatacttctaattattttaaagctttaaaataggatttat

SEQ ID NO: 70744 - DNA, 536 bp, Homo sapiens
ggctgaggcaggagaatcgcttgaacctgggaggtggaggttgaagtgagctgagatcatgccactgcagcactccagcctgggcgacaggagcgaaactccatctcaaaaaaaaaaaaagaaagaaagaaaagaaaagaaaatagggctgttggattagataaaatcatgggctgaagtgcttaatgcagtatttcacacaaagtgctcaatacatagcggtcacgctgatgaggatgatgtgatgatgaggaatgtgggcatgtatgtctgcctcagagccgttcgttttagcactagctggtggtgtcaccagctctagctgcctccatcaactagtaggatttgaggaaatattggggaaagcaagacagaaacttcttgacacccctcagaggtaactgggttaatattctgcagagaagacgttagcttggtcctggcttttctgacagcagcggagggtgatggggacttttaaaaaagagcccagcactgccagcgctttgggaggatcgcttgaggccaggagtttg

SEQ ID NO: 70745 - DNA, 549 bp, Homo sapiens
cctgcctcagcctcctgagtagctaggactataggcacatgctaccacgcctggctaagtttttgtatttttagtagagatggggtttcacagtgttagccaggatggtctccatctgacctcatgatccgcccgtctgagcctccgaaagtgttgggattacaggcgtgagctactgcaccaggccagttctggtcatcttacaagcgttgtttttcaaccttcctatctcattctcttcctgctaaatgtatatgttttgttgattaaaggaaataagacttatctcccaaatttactgtcaagacatttgcaaagtaactgcagtaatagagtttaaccttggaaaatgttggttactgagaattattgatatcttaaccaaattaagctgttcatttccttggtttaatgagaacgtctcaatatgcttaagaatattcttttctgatttctttcaaattataggtatttttttcttttcttttttcttttttttttttttgagacggaatttcacccttgttgcccaggctggagtacagtggc

SEQ ID NO: 70746 - DNA, 442 bp, Homo sapiens
attggtttcctggggctgccataacaaagttccacaaactggatggcttaaaacaacagagatttgtgctctcatggttcaagaagccagaagtctgaaatcaaggtgtcagcagggctggttccttccaggagtctctgaaagagaaactgtcccacatacctcttttcttagcttctgctggtgtctggcaatccttggcactcctcgacttgtagctgcatcattacagtctctgcctccgttgtcatatggcctttgtgtctctgtatctaaatcttttcttttatcaagcaacagccattggatttagggccccacccccaacatagtatgatctcatcttaaatttgatgacatctacaaagttcctatttccaaataaggccatatttacaggtaccaggagttaaaacttcagcctatctttggagaagacaca

SEQ ID NO: 70747 - DNA, 510 bp, Homo sapiens
attctaaaaaggaacccctgaaggcttatgtaatagcttatttgatccacataaaaagcgagataggaaatcaagtttctgctagttagacaaaagctattttccttcattaaaatgagtgatgagaacaaaaatcaagaaaagacccttagaacaaatagagcctcaaataccactttggcagagtacagttatgctaagctagaactttaaatagcaacactctgcatacttttggcttaccccattgaaatcactatgagctattgttttattgtctgctgttacatgtaagttgctggcagctgctgatggtgattgctgcttggggaagaggaactggaaagaaagatcccttaccaactgttttccatgctgcccagatgtgaaaggctccactgccctagaaggataatggaggagttgaacattatcaaaaaaaatgatattttagaagctaggagctgaagtatcctcaaattaggagcctttctccatttattttcttag

SEQ ID NO: 70748 - DNA, 771 bp, Homo sapiens
cacatataaaaacactgtgtaattctaaaccgctatgcaaacctaaggtataatctcactttataatttgtgaaagtttactaattgttttacttttcttggcagagtgtctgaagatctactggaaagttataagtgtatttattttattttcaggggtgtcatcacactttgagctgctgtgacagtttactgctggaataactccatcccaaaattattactgtaaattgaagtcctatttttctgccccaagtgtattcttaatattaacagttggtaattagtctgtcctttggagagactctgaacagttttgaagagcatcctgcacgtttaatcagaacacttcaagccagacaatgaaatgtaacattcagtaaactgtgatagtgttcactaattgctgatgctatctctattgtgttacgtttaagttatattctttaatattttaagaatccttttatttatttatttatttatttatattttgctgtaattctttttaaaaactacaagacatttatagatgcaaaagtaaagagtaagttaatagaacactgttctgttttagagatcaatatatatgaaatgtttctcttggaaactgctaaaccaacaggtcatttattattataatattcacttgcctttcctcatttggatgatgtaaaaatgatcattattttgctactttatgccaatctgggtaactgcattccatatttagagagcatgttttggatttaagcagcttaaactactaga

SEQ ID NO: 70749 - DNA, 797 bp, Homo sapiens
tccacactcattagtcatgagagagttcatactggagaaaagccttatgagtgcagtgaatgtgggaaagtctttagatacaactccagcctcattaaacatcggagaattcacactggagagagaccttatcagtgcagtgaatgtggaagagtctttaaccaaaattctcatctcattcagcaccagaaagttcacaccagataaagaatgtatatataaagcagatggggaaagacttcacacagaaatctactctgatttagcactgggacctacgttttaaaaaaagtattcttgtagaatacagataacataaaatctaacatcttaaccatgttaaagtgtatagttcagtaccgttaagtcattcacattgtgcaatgaatatctagaagtcttttcaacttatgaaactaagtctataccttttaaaaccttattcctcactccatccagcctcttgacaagcaccgctctgtatgaattttactagtccgggtacctcatataagaaaacttaagttttggtcttcttgtggtttattttgtggcttattttgcttaacgttatatttttaaggtttcatgttctaatccattagaatttccatcctttttaaaggctgaataaaattctgttagtcatgtgttgcttaacagtggggaagtgtcctgagaaaagtgttattaggtgattttctttctttttttggtggtgggggggttgcgtgaatgcctaggctgtatggtatatcctatagcaccttgctacaaacttgtatagcatattactg

SEQ ID NO: 70750 - DNA, 424 bp, Homo sapiens
tgaccagtttcacttcttgccagtacttcccttgtgctgttttcctgtagcaacaaaacggaaactgagtttttgcagcctcagggtgcagattttagatctggttctggaagtcaaatagaggcctgaaatacagcttaacacatacacgcacacatacacgcacacacaaacacacacagagacacagacacatatatacacacatatatacatatgtacacacatatttacatatatacacacacacactgtcttgcaaaaagatattacattgttaaagctataatatctctgagaaaaatttaagagaagttccatagagggttaagtcctgttcatttttattcaacatcattcattaagtttattttttcagttttctggattgaaatttatttttgcttctatctaatatatatct

SEQ ID NO: 70751 - DNA, 192 bp, Homo sapiens
ggaccttgggcgagttgtcaaggctctctgaatattagtttcatcctttaaaaacctcggattatcacacctacttgataggctgacgtgagtgccacatgaggtcattcccacatagggagtgggcactgctaggcacacaggcagtgattgctgtcattctggaggttttagagcactgctgattgctgg

SEQ ID NO: 70752 - DNA, 642 bp, Homo sapiens
aatgaataatcagggtcactagatcaagtaacacaggcaagaatacatgttacttgataccttcaatgagatctctgccttctaagaatttttggtttaatagcattaaatttaaataacgccaactatattgtaacaagcacaatgaagggaacccctagcccagagtagggaatcaggaatgaggagagctgctaacaggaaactttccagagcaggctagacctcagctgaatcttcacaattaagtagtagctgactcaaccttgtttcatgaaacaaggctcccagtattctgctctatacactgagcttactatgttaagtaagactacataacagtgataacaaattattgaaatttcctatataaattttgtaaactggatttgttacttatcctacatcttaaaaactgaagatattcttagttcctactatgcaacacagtacactgtacctaaaatgcacaaaatgactgttgtagaaaagagccgtatccactgacattacaaaagagtaatcaataaatttcaaatgccaaaccctttttatggtggtccaaaaggaacagtgctagatgaatctagttaaattaccctctagaacagtgctgtccaatctgaagtggaatgtaaacca

SEQ ID NO: 70753 - DNA, 477 bp, Homo sapiens
ttcggactatttattccagttgcaatggggaaaaataaaggagtttttagacctcccatcccgtttacctccactcaccacttgtcagccagccaggatccgtagaatctgcttcacaaggcagcccactgtgtctgggtcctgcagtgattattacagaaaaggaaaggaaaggactgaagtccttttggaggatgaggccttgttgaatggggactgttgtaaggtgagggacggtctctgggtatgggactagggtctggtggtgtggactgtgtacccactagagccctgtagtggggaggggttacaaagccaggtaaacagcagtcctaggaaggaagaggcagataaaaaggtggataatgcatgcatttgttcttcaatgaattgtgtgtgtgtgtgtgtgacggactctcactctgttgcccaggctggagtgcagtggcgctatctcggctcactgcaacctctgcc

SEQ ID NO: 70754 - DNA, 413 bp, Homo sapiens
gtcggggatgttttcctctctgaagaggagttgcagtgagggctttacaggaaagttggccttccagctgtgtactaatggatacatagaaccttgccatttgtaccaagtggagaagaaccatcctaagcagaaggagcagcaggagcacactcatacaggcatgaaacaatataccatgtttagggacataaaagtagtttcctatttctaggtgataaagcaaaatggagagagctccagaatctcaagctaaagaggtgcttaaaacttatattaagagtaaatttttatgcttataaacatcatcagattattcactcatttgttcatgcatgcaagcatgcattcaaaaattttgtgactatttactacatatctgtctctttgacaggtcctttggcttccctggg

SEQ ID NO: 70755 - DNA, 468 bp, Homo sapiens
gggagacatcagctggatattgagatggaaggatgactatgagtatgagctattatagaaaccatggaatctttggccatctatgaaacaatttccatgggaaaatgacttgtttggactgtattttcacaaagctgatatttctggcccttagaatatgatacctgtttgtctaaaaaacatatatctattcagataggacaaaattccttttcactgcagtattgggagcctggaactagagttaccaacccctctgcgttaaagaaggagctgtcctgaggcttccatctctactgggcttgaggcaagaacattgttagggacggcctgctcttggcctctgtgccccagggattgcaaatgcatgttcctcaaaggtaagggctgtatcattcggctttctttgtattcacaggtacagcttgtgctaggcagccggtgttcaataaatatcgtgcctaagga

SEQ ID NO: 70756 - DNA, 483 bp, Homo sapiens
ggctaaacaatatatttatatgatcctcttagccctgccattctgtaattctttcaggaattttgtcattttggatttgcttgtctcataaaacaatgtgtagttgcttaaaaatcaactattctatttggttgacttggtctaaagtatttctcatgttgtctcgtcattcttttgactgttccttttttttttttttgccttggccagataggacaaaattccttttcactgcagtattgggagcctggaactagagttaccaacccctctgcgttaaagaaggagctgtcctgaggcttccatctctactgggcttgaggcaagaacattgttagggacggcctgctcttggcctctgtgccccagggattgcaaatgcatgttcctcaaaggtaagggctgtatcattcggctttctttgtattcacaggtacagcttgtgctaggcagccggtgttcaataaatatcgtgcctaagga

SEQ ID NO: 70757 - DNA, 2181 bp, Homo sapiens
gggtggggtttatgagccttagttcttggaggattataagagtacttccccagttttgaggctggacagttaatatactttatatcaattatacatttaatataatttaatttaaaataatttaaagattcttaggagatagtctgactttcctgacctagatgggaatgatcagatagggattttttttgtggcacaggctaaatttgatggtgacatttatattgttgagaatgttacatcttattttaccacaacttttaaaaaatgttacatcttttgcagtaggatcagttgtgaggcacatagtagctgaggctccatggagccacctttcatttctttcagtcagagaggaggacagtctctgtctctgcatttctggtgtcttgcttgtcggtggcagagccatgcttgccggcatttgcttaggcggccatagtagttgctaagtgtacaggtgactgggcagggatgggaggtggccacaggtcagagacaagtgctcagtcagtccctggtgccaggactgtgtgcctcggtgccttgggaaatggaagctccctggtgcagctgcagctgtgggtggaggtagagaagccagcaagaccttggtcttaaccccgtgttcattttcttgctagctgtgtgacgttgggctacctcgcttctctgagtacaaatggtgtgtggtgaatgggtcccaggtatgctacgagctttgagggctgctctttttctcttcatagcgataagtgttaaactgtctttcttaggaaacgttcacagacttgcaacagctgatgtcctctgagtactgtctgactccctcaggcaagttcctgaattcagtaccatcattattatttttgtgtaagactttgacaaagtatagcccctgccaccagagcagcctgtacagtgggtctctaaggtgggacctgccccgggcctgccatgcacgtgtgtgaaacagcgtgaaaagtgtcgcggtaaggtgaccctgggttacccaggcaaggctcggtgtttgtttcagaaagcagagaagtatgtaattgattttaaaagtttctgtttaaaatatttggctatgttttagactatgaaggaatgaactttgcttctctggataagaaagtcacatacattgttccagctccaagtttgttcggccctcgccacaagtggatgtagcgtttggccctttgtgtgccttgctggtgactctggttttgggagctcggatatgtcccagaagcaggcttatggcacttctgtagctcccttgctacccttcctttgtgtctagataagtgactgacatgcttttctttggtctcaggaaagtgggggctcagcaagaactgattaccgagccattcaactagccaaggaaaaaaagcagagaggagcggggagcaatgcaggtgaggccgtgtgtgctgcagccggacgagcaagggcctgagggttctctgtcactgttactggcagaagaaacacagcaggtgtttctgtgctcttggttttacttttctgttcagaatacccttttatcaactccttagttttatttgaacttaagggaaaaaattagtaacaaaattcccagcatcagtatgaacatattttatttgcctaaacaagctttgtgaaagttaagcgttcaaacaccagtgtcagttacctggaaggctactaaggtaaataagcaaagcaggccagttgtcaggaaagcagagattgtgcctggtgctgaatggccttggggcctgatcttggcatggcagagacctggggactgccactgtccccaggtacgtgtacatggagccaaactgtgtgtcctgtggcattgtcagagttatgttgaaatcttatttgaaaatgttagcaacttacttgcatttttaaagaccaaacaagagctggtaacctatggcctcaagcatctgtccttcctaaaaatggaatagtgggatgtagtgcttaatggaaactgctaaatctttttctaaaaactaacagtggatttttaaaatatattgttttttgtgtatttcatttgtcctttgtatttatctaaaagggttgatatgattttatatcttgctctctattcctaatagtattatgacttcttatttaaaataaataacaattgccggttttctgtta

SEQ ID NO: 70758 - DNA, 2057 bp, Homo sapiens
gggtggggtttatgagccttagttcttggaggattataagagtacttccccagttttgaggctggacagttaatatactttatatcaattatacatttaatataatttaatttaaaataatttaaagattcttaggagatagtctgactttcctgacctagatgggaatgatcagatagggattttttttgtggcacaggctaaatttgatggtgacatttatattgttgagaatgttacatcttattttaccacaacttttaaaaaatgttacatcttttgcagtaggatcagttgtgaggcacatagtagctgaggctccatggagccacctttcatttctttcagtcagagaggaggacagtctctgtctctgcatttctggtgtcttgcttgtcggtggcagagccatgcttgccggcatttgcttaggcggccatagtagttgctaagtgtacaggtgactgggcagggatgggaggtggccacaggtcagagacaagtgctcagtcagtccctggtgccaggactgtgtgcctcggtgccttgggaaatggaagctccctggtgcagctgcagctgtgggtggaggtagagaagccagcaagaccttggtcttaaccccgtgttcattttcttgctagctgtgtgacgttgggctacctcgcttctctgagtacaaatggtgtgtggtgaatgggtcccaggtatgctacgagctttgagggctgctctttttctcttcatagcgataagtgttaaactgtctttcttaggaaacgttcacagacttgcaacagctgatgtcctctgagtactgtctgactccctcaggcaagttcctgaattcagtaccatcattattatttttgtgtaagactttgacaaagtatagcccctgccaccagagcagcctgtacagtgggtctctaaggtgggacctgccccgggcctgccatgcacgtgtgtgaaacagcgtgaaaagtgtcgcggtaaggtgaccctgggttacccaggcaaggctcggtgtttgtttcagaaagcagagaagtatgtaattgattttaaaagtttctgtttaaaatatttggctatgttttagactatgaaggaatgaactttgcttctctggataagaaagtcacatacattgttccagctccaagtttgttcggccctcgccacaagtggatgtagcgtttggccctttgtgtgccttgctggtgactctggttttgggagctcggatatgtcccagaagcaggcttatggcacttctgtagctcccttgctacccttcctttgtgtctagataagtgactgacatgcttttctttggtctcaggaaagtgggggctcagcaagaactgattaccgagccattcaactagccaaggaaaaaaagcagagaggagcggggagcaatgcaggtgaggccgtgtgtgctgcagccggacgagcaagggcctgagggttctctgtcactgttactggcagaagaaacacagcaggtgtttctgtgctcttggttttacttttctgttcagaatacccttttatcaactccttagttttatttgaacttaagggaaaaaattagtaacaaaattcccagcatcagtatgaacatattttatttgcctaaacaagctttgtgaaagttaagcgttcaaacaccagtgtcagttacctggaaggctactaaggtaaataagcaaagcaggccagttgtcaggaaagcagagattgtgcctggtgctgaatggccttggggcctgatcttggcatggcagagacctggggactgccactgtccccaggtacgtgtacatggagccaaactgtgtgtcctgtggcattgtcagagttatgttgaaatcttatttgaaaatgttagcaacttacttgcatttttaaagaccaaacaagagctggtaacctatggcctcaagcatctgtccttcctaaaaatggaatagtgggatgtagtgcttaatggaaactgctaaatctttttctaaaaactaacagtggatttttaaaatatattgtttttt

SEQ ID NO: 70759 - DNA, 1544 bp, Homo sapiens
gggtggggtttatgagccttagttcttggaggattataagagtacttccccagttttgaggctggacagttaatatactttatatcaattatacatttaatataatttaatttaaaataatttaaagattcttaggagatagtctgactttcctgacctagatgggaatgatcagatagggattttttttgtggcacaggctaaatttgatggtgacatttatattgttgagaatgttacatcttattttaccacaacttttaaaaaatgttacatcttttgcagtaggatcagttgtgaggcacatagtagctgaggctccatggagccacctttcatttctttcagtcagagaggaggacagtctctgtctctgcatttctggtgtcttgcttgtcggtggcagagccatgcttgccggcatttgcttaggcggccatagtagttgctaagtgtacaggtgactgggcagggatgggaggtggccacaggtcagagacaagtgctcagtcagtccctggtgccaggactgtgtgcctcggtgccttgggaaatggaagctccctggtgcagctgcagctgtgggtggaggtagagaagccagcaagaccttggtcttaaccccgtgttcattttcttgctagctgtgtgacgttgggctacctcgcttctctgagtacaaatggtgtgtggtgaatgggtcccaggtatgctacgagctttgagggctgctctttttctcttcatagcgataagtgttaaactgtctttcttaggaaacgttcacagacttgcaacagctgatgtcctctgagtactgtctgactccctcaggcaagttcctgaattcagtaccatcattattatttttgtgtaagactttgacaaagtatagcccctgccaccagagcagcctgtacagtgggtctctaaggtgggacctgccccgggcctgccatgcacgtgtgtgaaacagcgtgaaaagtgtcgcggtaaggtgaccctgggttacccaggcaaggctcggtgtttgtttcagaaagcagagaagtatgtaattgattttaaaagtttctgtttaaaatatttggctatgttttagactatgaaggaatgaactttgcttctctggataagaaagtcacatacattgttccagctccaagtttgttcggccctcgccacaagtggatgtagcgtttggccctttgtgtgccttgctggtgactctggttttgggagctcggatatgtcccagaagcaggcttatggcacttctgtagctcccttgctacccttcctttgtgtctagataagtgactgacatgcttttctttggtctcaggaaagtgggggctcagcaagaactgattaccgagccattcaactagccaaggaaaaaaagcagagaggagcggggagcaatgcaggtgaggccgtgtgtgctgcagccggacgagcaagggcctgaggcgcccaggcacagcaggacgacgcaacaacagagccacgtgatgaggactcgcgcccgaggatgtataccc

SEQ ID NO: 70760 - DNA, 2649 bp, Homo sapiens
caagctgcggcccttcggctgtccagtgggcggctgtggcaagaagttcactacggtctataacctcaaggcgcacatgaagggccacgagcaggagagcctgttcaagtgcgaggtgtgcgccgagcgcttccccacgcacgccaagctcagctcccaccagcgcagcacttcgagcccgagcgcccttacaagtgtgactttcccggctgtgagaagacatttatcacagtgagtgccctgttttcccataaccgagcccacttcagggaacaagagctcttttcctgctcctttcctgggtgcagcaagcagtatgataaagcctgtcggctgaaaattcacctgcggagccatacaggtgaaagaccatttatttgtgactctgacagctgtggctggaccttcaccagcatgtccaaacttctaaggcacagaaggaaacatgacgatgaccggaggtttacctgccctgtcgagggctgtgggaaatcattcaccagagcagagcatctgaaaggccacagcataacccacctaggcacaaagccgttcgagtgtcctgtggaaggatgttgcgcgaggttctccgctcgtagcagtctgtacattcactctaagaaacacgtgcaggatgtgggtgctccgaaaagccgttgcccagtttctacctgcaacagactcttcacctccaagcacagcatgaaggcgcacatggtcagacagcacagccggcgccaagatctcttacctcagctagaagctccgagttctcttactcccagcagtgaactcagcagcccaggccaaagtgagctcactaacatggatcttgctgcactcttctctgacacacctgccaatgctagtggttctgcaggtgggtcggatgaggctctgaactccggaatcctgactattgacgtcacttctgtgagctcctctctgggagggaacctccctgctaataatagctccctagggccgatggaacccctggtcctggtggcccacagtgatattcccccaagcctggacagccctctggttctcgggacagcagccacggttctgcagcagggcagcttcagtgtggatgacgtgcagactgtgagtgcaggagcattaggctgtctggtggctctgcccatgaagaacttgagtgacgacccactggctttgacctccaatagtaacttagcagcacatatcaccacaccgacctcttcgagcaccccccgagaaaatgccagtgtcccggaactgctggctccaatcaaggtggagccggactcgccttctcgcccaggagcagttgggcagcaggaaggaagccatgggctgccccagtccacgttgcccagtccagcagagcagcacggtgcccaggacacagagctcagtgcaggcactggcaacttctatttggaaagtgggggctcagcaagaactgattaccgagccattcaactagccaaggaaaaaaagcagagaggagcggggagcaatgcaggagcctcacagtctactcagagaaaaataaaagaaggcaaaatgagtcctccccatttccatgcaagccagaacagttggttgtgtgggagcctcgtggtgcccagcggaggacggccaggaccagctccagcagctggggtgcagtgcggggcgcagggcgtccaggtccagctggtgcaggatgacccctccggcgaaggtgtcctgccctcggcccgcggcccagccaccttcctccccttcctcactgtggacctgcccgtctacgtcctccaggaggtgctcccctcatctggaggccctgctggaccggaggccacccagttcccaggaagcactatcaacctgcaggatctgcagtgacggcagcctcggcctgggcaggcccaaggccacggtctaggacacaccttccctgagactcatgacatgagcctggggagacctcatttggtttccgttcagaagaccagcgtagcccttttgagacttttgggtacatttatcaaaaatgttttccttttgttttaccaggaatgagttcgggctatactctttgaaactgcctttgtgagcaaagtgctttggcaaggcaagggtctccctcagcagggctaggtgcactacagcctctttccccgtgtcccgttggatctgagctgtgtagcacttgttgcattacaaagaaaaagacttctgcaggaaatagggtagagaacaggctgtctagtcagatgcagcttgatctgtggcaaaaccaagtgtggtctttcagcttcagtgtgttagcatcccagcacctgggatggggtttgtgggcaagttgattttgccacactgtagggcccaggtggtcccattgccaccgtgaagccaaattctagcccaagtctggtagagcagtcgggcagctagttttcgggggaggatgatgtggtgggacagaggacctcagtggcctattacggagccctcttcccagactaaattcatagccgagagctcggggggatggtagttaaaatttaaaataattttctaaattctgtatttggatattagtgtttaagtggtaatttggcaacagtttataaagtgatgttctgaataccataaattatgtgtaggactgtg

SEQ ID NO: 70761 - DNA, 2264 bp, Homo sapiens
caagctgcggcccttcggctgtccagtgggcggctgtggcaagaagttcactacggtctataacctcaaggcgcacatgaagggccacgagcaggagagcctgttcaagtgcgaggtgtgcgccgagcgcttccccacgcacgccaagctcagctcccaccagcgcagcacttcgagcccgagcgcccttacaagtgtgactttcccggctgtgagaagacatttatcacagtgagtgccctgttttcccataaccgagcccacttcagggaacaagagctcttttcctgctcctttcctgggtgcagcaagcagtatgataaagcctgtcggctgaaaattcacctgcggagccatacaggtgaaagaccatttatttgtgactctgacagctgtggctggaccttcaccagcatgtccaaacttctaaggcacagaaggaaacatgacgatgaccggaggtttacctgccctgtcgagggctgtgggaaatcattcaccagagcagagcatctgaaaggccacagcataacccacctaggcacaaagccgttcgagtgtcctgtggaaggatgttgcgcgaggttctccgctcgtagcagtctgtacattcactctaagaaacacgtgcaggatgtgggtgctccgaaaagccgttgcccagtttctacctgcaacagactcttcacctccaagcacagcatgaaggcgcacatggtcagacagcacagccggcgccaagatctcttacctcagctagaagctccgagttctcttactcccagcagtgaactcagcagcccaggccaaagtgagctcactaacatggatcttgctgcactcttctctgacacacctgccaatgctagtggttctgcaggtgggtcggatgaggctctgaactccggaatcctgactattgacgtcacttctgtgagctcctctctgggagggaacctccctgctaataatagctccctagggccgatggaacccctggtcctggtggcccacagtgatattcccccaagcctggacagccctctggttctcgggacagcagccacggttctgcagcagggcagcttcagtgtggatgacgtgcagactgtgagtgcaggagcattaggctgtctggtggctctgcccatgaagaacttgagtgacgacccactggctttgacctccaatagtaacttagcagcacatatcaccacaccgacctcttcgagcaccccccgagaaaatgccagtgtcccggaactgctggctccaatcaaggtggagccggactcgccttctcgcccaggagcagttgggcagcaggaaggaagccatgggctgccccagtccacgttgcccagtccagcagagcagcacggtgcccaggacacagagctcagtgcaggcactggcaacttctatttggaaagtgggggctcagcaagaactgattaccgagccattcaactagccaaggaaaaaaagcagagaggagcggggagcaatgcaggtgaggccgtgtgtgctgcagccggacgagcaagggcctgagggttctctgtcactgttactggcagaagaaacacagcaggtgtttctgtgctcttggttttacttttctgttcagaatacccttttatcaactccttagttttatttgaacttaagggaaaaaattagtaacaaaattcccagcatcagtatgaacatattttatttgcctaaacaagctttgtgaaagttaagcgttcaaacaccagtgtcagttacctggaaggctactaaggtaaataagcaaagcaggccagttgtcaggaaagcagagattgtgcctggtgctgaatggccttggggcctgatcttggcatggcagagacctggggactgccactgtccccaggtacgtgtacatggagccaaactgtgtgtcctgtggcattgtcagagttatgttgaaatcttatttgaaaatgttagcaacttacttgcatttttaaagaccaaacaagagctggtaacctatggcctcaagcatctgtccttcctaaaaatggaatagtgggatgtagtgcttaatggaaactgctaaatctttttctaaaaactaacagtggatttttaaaatatattgttttttgtgtatttcatttgtcctttgtatttatctaaaagggttgatatgattttatatcttgctctctattcctaatagtattatgacttcttatttaaaataaataacaattgccggttttctgtta

SEQ ID NO: 70762 - DNA, 2670 bp, Homo sapiens
caagctgcggcccttcggctgtccagtgggcggctgtggcaagaagttcactacggtctataacctcaaggcgcacatgaagggccacgagcaggagagcctgttcaagtgcgaggtgtgcgccgagcgcttccccacgcacgccaagctcagctcccaccagcgcagcacttcgagcccgagcgcccttacaagtgtgactttcccggctgtgagaagacatttatcacagtgagtgccctgttttcccataaccgagcccacttcagggaacaagagctcttttcctgctcctttcctgggtgcagcaagcagtatgataaagcctgtcggctgaaaattcacctgcggagccatacaggtgaaagaccatttatttgtgactctgacagctgtggctggaccttcaccagcatgtccaaacttctaaggcacagaaggaaacatgacgatgaccggaggtttacctgccctgtcgagggctgtgggaaatcattcaccagagcagagcatctgaaaggccacagcataacccacctaggcacaaagccgttcgagtgtcctgtggaaggatgttgcgcgaggttctccgctcgtagcagtctgtacattcactctaagaaacacgtgcaggatgtgggtgctccgaaaagccgttgcccagtttctacctgcaacagactcttcacctccaagcacagcatgaaggcgcacatggtcagacagcacagccggcgccaagatctcttacctcagctagaagctccgagttctcttactcccagcagtgaactcagcagcccaggccaaagtgagctcactaacatggatcttgctgcactcttctctgacacacctgccaatgctagtggttctgcaggtgggtcggatgaggctctgaactccggaatcctgactattgacgtcacttctgtgagctcctctctgggagggaacctccctgctaataatagctccctagggccgatggaacccctggtcctggtggcccacagtgatattcccccaagcctggacagccctctggttctcgggacagcagccacggttctgcagcagggcagcttcagtgtggatgacgtgcagactgtgagtgcaggagcattaggctgtctggtggctctgcccatgaagaacttgagtgacgacccactggctttgacctccaatagtaacttagcagcacatatcaccacaccgacctcttcgagcaccccccgagaaaatgccagtgtcccggaactgctggctccaatcaaggtggagccggactcgccttctcgcccaggagcagttgggcagcaggaaggaagccatgggctgccccagtccacgttgcccagtccagcagagcagcacggtgcccaggacacagagctcagtgcaggcactggcaacttctatttggaaagtgggggctcagcaagaactgattaccgagccattcaactagccaaggaaaaaaagcagagaggagcggggagcaatgcaggtgaggccgtgtgtgctgcagccggacgagcaagggcctgagggttctctgtcactgttactggcagaagaaacacagcaggtgtttctgtgctcttggttttacttttctgttcagaatacccttttatcaactccttagttttatttgaacttaagggaaaaaattagtaacaaaattcccagcatcagtatgaacatattttatttgcctaaacaagctttgtgaaagttaagcgttcaaacaccagtgtcagttacctggaaggctactaaggtaaataagcaaagcaggccagttgtcaggaaagcagagattgtgcctggtgctgaatggccttggggcctgatcttggcatggcagagacctggggactgccactgtccccaggtacgtgtacatggagccaaactgtgtgtcctgtggcattgtcagagttatgttgaaatcttatttgaaaatgttagcaacttacttgcatttttaaagaccaaacaagagctggtaacctatggcctcaagcatctgtccttcctaaaaatggaatagtgggatgtagtgcttaatggaaactgctaaatctttttctaaaaactaacagtggatttttaaaatatattgttttttgtgtatttcatttgtcctttgtatttatctaaaagggttgatatgattttatatcttgctctctattcctaatagtattatgacttcttatttaaaataaataacaattgccggttttctgttaatcagttttcttaaagccagtgtttcactatagtgtatgcatcagtgtgaattgtgacttaggaagggacacctcaacagttcacaaagtaccagaatggaacttgcagagataatagaaggaagtgtggtggtgaaatttgtagaaagagttgaccatataccaaggaaagttcatgaaggaaagcggatgcctttattgaacctggtagataatcttgaagaaaaaagagacaaacattcaagtatataacacgtgtcctatttattacattgctttggagtactatctataaaggaggtttgatgttttcattactgtttttgtaaatatttcagcattatctttaaaaagtaaggacattggccaggtgcggtggctcatacctgtaatcccagcactttgg

SEQ ID NO: 70763 - DNA, 1298 bp, Homo sapiens
tcagcgtgtactgactgcatctgtgctcccctggtcctggtggcccacagtgatattcccccaagcctggacagccctctggttctcgggacagcagccacggttctgcagcagggcagcttcagtgtggatgacgtgcagactgtgagtgcaggagcattaggctgtctggtggctctgcccatgaagaacttgagtgacgacccactggctttgacctccaatagtaacttagcagcacatatcaccacaccgacctcttcgagcaccccccgagaaaatgccagtgtcccggaactgctggctccaatcaaggtggagccggactcgccttctcgcccaggagcagttgggcagcaggaaggaagccatgggctgccccagtccacgttgcccagtccagcagagcagcacggtgcccaggacacagagctcagtgcaggcactggcaacttctatttggaaagtgggggctcagcaagaactgattaccgagccattcaactagccaaggaaaaaaagcagagaggagcggggagcaatgcaggtgaggccgtgtgtgctgcagccggacgagcaagggcctgagggttctctgtcactgttactggcagaagaaacacagcaggtgtttctgtgctcttggttttacttttctgttcagaatacccttttatcaactccttagttttatttgaacttaagggaaaaaattagtaacaaaattcccagcatcagtatgaacatattttatttgcctaaacaagctttgtgaaagttaagcgttcaaacaccagtgtcagttacctggaaggctactaaggtaaataagcaaagcaggccagttgtcaggaaagcagagattgtgcctggtgctgaatggccttggggcctgatcttggcatggcagagacctggggactgccactgtccccaggtacgtgtacatggagccaaactgtgtgtcctgtggcattgtcagagttatgttgaaatcttatttgaaaatgttagcaacttacttgcatttttaaagaccaaacaagagctggtaacctatggcctcaagcatctgtccttcctaaaaatggaatagtgggatgtagtgcttaatggaaactgctaaatctttttctaaaaactaacagtggatttttaaaatatattgttttttgtgtatttcatttgtcctttgtatttatctaaaagggttgatatgattttatatcttgctctctattcctaatagtattatgacttcttatttaaaataaataacaattgccggttttctgtta

SEQ ID NO: 70764 - DNA, 1136 bp, Homo sapiens
caagctgcggcccttcggctgtccagtgggcggctgtggcaagaagttcactacggtctataacctcaaggcgcacatgaagggccacgagcaggagagcctgttcaagtgcgaggtgtgcgccgagcgcttccccacgcacgccaagctcagctcccaccagcgcagcacttcgagcccgagcgcccttacaagtgtgactttcccggctgtgagaagacatttatcacagtgagtgccctgttttcccataaccgagcccacttcagggaacaagagctcttttcctgctcctttcctgggtgcagcaagcagtatgataaagcctgtcggctgaaaattcacctgcggagccatacaggtgaaagaccatttatttgtgactctgacagctgtggctggaccttcaccagcatgtccaaacttctaaggcacagaaggaaacatgacgatgaccggaggtttacctgccctgtcgagggctgtgggaaatcattcaccagagcagagcatctgaaaggccacagcataacccacctaggcacaaagccgttcgagtgtcctgtggaaggatgttgcgcgaggttctccgctcgtagcagtctgtacattcactctaagaaacacgtgcaggatgtgggtgctccgaaaagccgttgcccagtttctacctgcaacagactcttcacctccaacagagattgtgcctggtgctgaatggccttggggcctgatcttggcatggcagagacctggggactgccactgtccccaggtacgtgtacatggagccaaactgtgtgtcctgtggcattgtcagagttatgttgaaatcttatttgaaaatgttagcaacttacttgcatttttaaagaccaaacaagagctggtaacctatggcctcaagcatctgtccttcctaaaaatggaatagtgggatgtagtgcttaatggaaactgctaaatctttttctaaaaactaacagtggatttttaaaatatattgttttttgtgtatttcatttgtcctttgtatttatctaaaagggttgatatgattttatatcttgctctctattcctaatagtattatgacttcttatttaaaataaataacaattgccggttttctgtta

SEQ ID NO: 70765 - DNA, 1553 bp, Homo sapiens
caagctgcggcccttcggctgtccagtgggcggctgtggcaagaagttcactacggtctataacctcaaggcgcacatgaagggccacgagcaggagagcctgttcaagtgcgaggtgtgcgccgagcgcttccccacgcacgccaagctcagctcccaccagcgcagcacttcgagcccgagcgcccttacaagtgtgactttcccggctgtgagaagacatttatcacagtgagtgccctgttttcccataaccgagcccacttcagggaacaagagctcttttcctgctcctttcctgggtgcagcaagcagtatgataaagcctgtcggctgaaaattcacctgcggagccatacaggtgaaagaccatttatttgtgactctgacagctgtggctggaccttcaccagcatgtccaaacttctaaggcacagaaggaaacatgacgatgaccggaggtttacctgccctgtcgagggctgtgggaaatcattcaccagagcagagcatctgaaaggccacagcataacccacctaggcacaaagccgttcgagtgtcctgtggaaggatgttgcgcgaggttctccgctcgtagcagtctgtacattcactctaagaaacacgtgcaggatgtgggtgctccgaaaagccgttgcccagtttctacctgcaacagactcttcacctccaagaggtgctcccctcatctggaggccctgctggaccggaggccacccagttcccaggaagcactatcaacctgcaggatctgcagtgacggcagcctcggcctgggcaggcccaaggccacggtctaggacacaccttccctgagactcatgacatgagcctggggagacctcatttggtttccgttcagaagaccagcgtagcccttttgagacttttgggtacatttatcaaaaatgttttccttttgttttaccaggaatgagttcgggctatactctttgaaactgcctttgtgagcaaagtgctttggcaaggcaagggtctccctcagcagggctaggtgcactacagcctctttccccgtgtcccgttggatctgagctgtgtagcacttgttgcattacaaagaaaaagacttctgcaggaaatagggtagagaacaggctgtctagtcagatgcagcttgatctgtggcaaaaccaagtgtggtctttcagcttcagtgtgttagcatcccagcacctgggatggggtttgtgggcaagttgattttgccacactgtagggcccaggtggtcccattgccaccgtgaagccaaattctagcccaagtctggtagagcagtcgggcagctagttttcgggggaggatgatgtggtgggacagaggacctcagtggcctattacggagccctcttcccagactaaattcatagccgagagctcggggggatggtagttaaaatttaaaataattttctaaattctgtatttggatattagtgtttaagtggtaatttggcaacagtttataaagtgatgttctgaataccataaattatgtgtaggactgtg

SEQ ID NO: 70766 - DNA, 2805 bp, Homo sapiens
  misc_feature (769)..(769): n is a, c, g, or t
ccagcctgtcctgcatctgctcaagctctgagtgttgctgggaccgtgcatccacttcctgaacctgtctgtgcacagccctgcgtctagccccagagtagcccgcctccctgcccgaggcccccagggctgttttgcagcaggatgagatctgtttgaggccaccctgcccttcttctgcagggctggggcaaaagggctccgcaggccgtctcagccaccccatttctagggcggcctgcttgtggcgcactagcagcctttctatgctgaaggtggtgggggtcttttcagtgtttttctattttctttcctacgaaacagagcccctccagggcaggcccaggcccctcccagcctgtccgggccacagatacctgcagctgtggccagtttccaggaggtctttgagcacacctgcttcagcagccctgagcacacctgcatcttcagtctcagtttgaggggctggaatggggagggaagatgatttggaaggatttggggagagaagagatatacaagccggggctgtctgggtttggcccaggtgtgtgcccctcttcaccactccactttgtagattccctgtggcaggggatgcggttgcaggccccacggaagtgcggagggtggaggtgacgctggctctgagttgggaaacaggcacgtttgtgggttcagagtcctgggagagtctcgccaaggaaacaggaccaggcctggggctcagagaggcaagaggaggggcagcctgggcagaggtggnctgggaagggggcagggaagaggctgcgggcagctgggggtggccctgtgctggttggaagctagcggtgagcgtcagatgggggctgaagcttgtcttagagaggggcaggagcactggtcctttgtttccagcttctgaagaggtaagaactccccaggagcaggggcagggggagggggaggaccatccaaggaaacactgcctcagctggcagggcagaggtacagagtcaggaccagaggcttggcaatagggagacggtagggaagctggtgccactggcagaacaggagcaagtagggggtatacttttaagagatgcctgattaaacctgggtttgagttctttttctgtcccttaccagctagcgtagtcttggttacttaagcactccgggcctcagttttgtcatctatgaaatgggaacagtagtgcagaccttgacacacaggagcttctcaaacagaaggaatgagaggtgcagagcagcagcaccaggagctccgcttcggggtgtgaatggccatgggcggacatgcaggtgcaggacaggcgaagtgtgggacagatgaagtttctagcctggactgtgaggggcctggcagcctcccctctcaggagcccctctacctgccctggtccttccagctggcccgtaggcaagctggggcatgcagggaaggccctctgtggggcccgaggatttgctggagagcactgtgggtacacaaggttggtgggggtacagggcgtgccagggcacctgcaaggagttgaggagcgtgccttaggagggaaatcagtatttgggctgactgaggggaggagctggagagcagaaggttccaggcccagcaaaagctgctgggatcaaggtgacagaatgagaaccaggtgggaacaggtagtacccagcccccataaacaattcctgctgggtcctcgggcctcccttggaatacagggggtgggctggttctgccacgcattgcagctggaggagacttctcaggtgagacgaggaccgttgctgcactctcacagacatgtgacaggcctttctgtgttgccttcccaggatgacccctccggcgaaggtgtcctgccctcggcccgcggcccagccaccttcctccccttcctcactgtggacctgcccgtctacgtcctccaggaggtgctcccctcatctggaggccctgctggaccggaggccacccagttcccaggaagcactatcaacctgcaggatctgcagtgacggcagcctcggcctgggcaggcccaaggccacggtctaggacacaccttccctgagactcatgacatgagcctggggagacctcatttggtttccgttcagaagaccagcgtagcccttttgagacttttgggtacatttatcaaaaatgttttccttttgttttaccaggaatgagttcgggctatactctttgaaactgcctttgtgagcaaagtgctttggcaaggcaagggtctccctcagcagggctaggtgcactacagcctctttccccgtgtcccgttggatctgagctgtgtagcacttgttgcattacaaagaaaaagacttctgcaggaaatagggtagagaacaggctgtctagtcagatgcagcttgatctgtggcaaaaccaagtgtggtctttcagcttcagtgtgttagcatcccagcacctgggatggggtttgtgggcaagttgattttgccacactgtagggcccaggtggtcccattgccaccgtgaagccaaattctagcccaagtctggtagagcagtcgggcagctagttttcgggggaggatgatgtggtgggacagaggacctcagtggcctattacggagccctcttcccagactaaattcatagccgagagctcggggggatggtagttaaaatttaaaataattttctaaattctgtatttggatattagtgtttaagtggtaatttggcaacagtttataaagtgatgttctgaataccataaattatgtgtaggactgtg

SEQ ID NO: 70767 - DNA, 2464 bp, Homo sapiens
ctctagaggactttacctaaatggctgtgagaagacatttatcacagtgagtgccctgttttcccataaccgagcccacttcagggaacaagagctcttttcctgctcctttcctgggtgcagcaagcagtatgataaagcctgtcggctgaaaattcacctgcggagccatacaggtgaaagaccatttatttgtgactctgacagctgtggctggaccttcaccagcatgtccaaacttctaaggcacagaaggaaacatgacgatgaccggaggtttacctgccctgtcgagggctgtgggaaatcattcaccagagcagagcatctgaaaggccacagcataacccacctaggcacaaagccgttcgagtgtcctgtggaaggatgttgcgcgaggttctccgctcgtagcagtctgtacattcactctaagaaacacgtgcaggatgtgggtgctccgaaaagccgttgcccagtttctacctgcaacagactcttcacctccaagcacagcatgaaggcgcacatggtcagacagcacagccggcgccaagatctcttacctcagctagaagctccgagttctcttactcccagcagtgaactcagcagcccaggccaaagtgagctcactaacatggatcttgctgcactcttctctgacacacctgccaatgctagtggttctgcaggtgggtcggatgaggctctgaactccggaatcctgactattgacgtcacttctgtgagctcctctctgggagggaacctccctgctaataatagctccctagggccgatggaacccctggtcctggtggcccacagtgatattcccccaagcctggacagccctctggttctcgggacagcagccacggttctgcagcagggcagcttcagtgtggatgacgtgcagactgtgagtgcaggagcattaggctgtctggtggctctgcccatgaagaacttgagtgacgacccactggctttgacctccaatagtaacttagcagcacatatcaccacaccgacctcttcgagcaccccccgagaaaatgccagtgtcccggaactgctggctccaatcaaggtggagccggactcgccttctcgcccaggagcagttgggcagcaggaaggaagccatgggctgccccagtccacgttgcccagtccagcagagcagcacggtgcccaggacacagagctcagtgcaggcactggcaacttctatttggaaagtgggggctcagcaagaactgattaccgagccattcaactagccaaggaaaaaaagcagagaggagcggggagcaatgcaggagcctcacagtctactcagagaaaaataaaagaaggcaaaatgagtcctccccatttccatgcaagccagaacagttggttgtgtgggagcctcgtggtgcccagcggaggacggccaggaccagctccagcagctggggtgcagtgcggggcgcagggcgtccaggtccagctggtgcaggatgacccctccggcgaaggtgtcctgccctcggcccgcggcccagccaccttcctccccttcctcactgtggacctgcccgtctacgtcctccaggaggtgctcccctcatctggaggccctgctggaccggaggccacccagttcccaggaagcactatcaacctgcaggatctgcagtgacggcagcctcggcctgggcaggcccaaggccacggtctaggacacaccttccctgagactcatgacatgagcctggggagacctcatttggtttccgttcagaagaccagcgtagcccttttgagacttttgggtacatttatcaaaaatgttttccttttgttttaccaggaatgagttcgggctatactctttgaaactgcctttgtgagcaaagtgctttggcaaggcaagggtctccctcagcagggctaggtgcactacagcctctttccccgtgtcccgttggatctgagctgtgtagcacttgttgcattacaaagaaaaagacttctgcaggaaatagggtagagaacaggctgtctagtcagatgcagcttgatctgtggcaaaaccaagtgtggtctttcagcttcagtgtgttagcatcccagcacctgggatggggtttgtgggcaagttgattttgccacactgtagggcccaggtggtcccattgccaccgtgaagccaaattctagcccaagtctggtagagcagtcgggcagctagttttcgggggaggatgatgtggtgggacagaggacctcagtggcctattacggagccctcttcccagactaaattcatagccgagagctcggggggatggtagttaaaatttaaaataattttctaaattctgtatttggatattagtgtttaagtggtaatttggcaacagtttataaagtgatgttctgaataccataaattatgtgtaggactgtg

SEQ ID NO: 70768 - DNA, 2376 bp, Homo sapiens
atagactagtagatccccgagtttatcagacaggaggaagcagtatgatattactgtcggatgaaaattcacctgcggagccatacaggtgaaagaccatttatttgtgactctgacagctgtggctggaccttcaccagcatgtccaaacttctaaggcacagaaggaaacatgacgatgaccggaggtttacctgccctgtcgagggctgtgggaaatcattcaccagagcagagcatctgaaaggccacagcataacccacctaggcacaaagccgttcgagtgtcctgtggaaggatgttgcgcgaggttctccgctcgtagcagtctgtacattcactctaagaaacacgtgcaggatgtgggtgctccgaaaagccgttgcccagtttctacctgcaacagactcttcacctccaagcacagcatgaaggcgcacatggtcagacagcacagccggcgccaagatctcttacctcagctagaagctccgagttctcttactcccagcagtgaactcagcagcccaggccaaagtgagctcactaacatggatcttgctgcactcttctctgacacacctgccaatgctagtggttctgcaggtgggtcggatgaggctctgaactccggaatcctgactattgacgtcacttctgtgagctcctctctgggagggaacctccctgctaataatagctccctagggccgatggaacccctggtcctggtggcccacagtgatattcccccaagcctggacagccctctggttctcgggacagcagccacggttctgcagcagggcagcttcagtgtggatgacgtgcagactgtgagtgcaggagcattaggctgtctggtggctctgcccatgaagaacttgagtgacgacccactggctttgacctccaatagtaacttagcagcacatatcaccacaccgacctcttcgagcaccccccgagaaaatgccagtgtcccggaactgctggctccaatcaaggtggagccggactcgccttctcgcccaggagcagttgggcagcaggaaggaagccatgggctgccccagtccacgttgcccagtccagcagagcagcacggtgcccaggacacagagctcagtgcaggcactggcaacttctatttggaaagtgggggctcagcaagaactgattaccgagccattcaactagccaaggaaaaaaagcagagaggagcggggagcaatgcaggagcctcacagtctactcagagaaaaataaaagaaggcaaaatgagtcctccccatttccatgcaagccagaacagttggttgtgtgggagcctcgtggtgcccagcggaggacggccaggaccagctccagcagctggggtgcagtgcggggcgcagggcgtccaggtccagctggtgcaggatgacccctccggcgaaggtgtcctgccctcggcccgcggcccagccaccttcctccccttcctcactgtggacctgcccgtctacgtcctccaggaggtgctcccctcatctggaggccctgctggaccggaggccacccagttcccaggaagcactatcaacctgcaggatctgcagtgacggcagcctcggcctgggcaggcccaaggccacggtctaggacacaccttccctgagactcatgacatgagcctggggagacctcatttggtttccgttcagaagaccagcgtagcccttttgagacttttgggtacatttatcaaaaatgttttccttttgttttaccaggaatgagttcgggctatactctttgaaactgcctttgtgagcaaagtgctttggcaaggcaagggtctccctcagcagggctaggtgcactacagcctctttccccgtgtcccgttggatctgagctgtgtagcacttgttgcattacaaagaaaaagacttctgcaggaaatagggtagagaacaggctgtctagtcagatgcagcttgatctgtggcaaaaccaagtgtggtctttcagcttcagtgtgttagcatcccagcacctgggatggggtttgtgggcaagttgattttgccacactgtagggcccaggtggtcccattgccaccgtgaagccaaattctagcccaagtctggtagagcagtcgggcagctagttttcgggggaggatgatgtggtgggacagaggacctcagtggcctattacggagccctcttcccagactaaattcatagccgagagctcggggggatggtagttaaaatttaaaataattttctaaattctgtatttggatattagtgtttaagtggtaatttggcaacagtttataaagtgatgttctgaataccataaattatgtgtaggactgtg

SEQ ID NO: 70769 - DNA, 1878 bp, Homo sapiens
caagctgcggcccttcggctgtccagtgggcggctgtggcaagaagttcactacggtctataacctcaaggcgcacatgaagggccacgagcaggagagcctgttcaagtgcgaggtgtgcgccgagcgcttccccacgcacgccaagctcagctcccaccagcgcagcacttcgagcccgagcgcccttacaagtgtgactttcccggctgtgagaagacatttatcacagtgagtgccctgttttcccataaccgagcccacttcagggaacaagagctcttttcctgctcctttcctgggtgcagcaagcagtatgataaagcctgtcggctgaaaattcacctgcggagccatacaggtgaaagaccatttatttgtgactctgacagctgtggctggaccttcaccagcatgtccaaacttctaaggcacagaaggaaacatgacgatgaccggaggtttacctgccctgtcgagggctgtgggaaatcattcaccagagcagagcatctgaaaggccacagcataacccacctaggcacaaagccgttcgagtgtcctgtggaaggatgttgcgcgaggttctccgctcgtagcagtctgtacattcactctaagaaacacgtgcaggatgtgggtgctccgaaaagccgttgcccagtttctacctgcaacagactcttcacctccaagcacagcatgaaggcgcacatggtcagacagcacagccggcgccaagatctcttacctcagctagaagctccgagttctcttactcccagcagtgaactcagcagcccaggccaaagtgagctcactaacatggatcttgctgcactcttctctgacacacctgccaatgctagtggttctgcaggtgggtcggatgaggctctgaactccggaatcctgactattgacgtcacttctgtgagctcctctctgggagggaacctccctgctaataatagctccctagggccgatggaacccctggtcctggtggcccacagtgatattcccccaagcctggacagccctctggttctcgggacagcagccacggttctgcagcagggcagcttcagtgtggatgacgtgcagactgtgagtgcaggagcattaggctgtctggtggctctgcccatgaagaacttgagtgacgacccactggctttgacctccaatagtaacttagcagcacatatcaccacaccgacctcttcgagcaccccccgagaaaatgccagtgtcccggaactgctggctccaatcaaggtggagccggactcgccttctcgcccaggagcagttgggcagcaggaaggaagccatgggctgccccagtccacgttgcccagtccagcagagcagcacggtgcccaggacacagagctcagtgcaggcactggcaacttctatttggtatgaagcactctattcagtcaccaccatataggtcacttctctcatactcggtcttgaggatattctggattaatcctttctatgcagacgtttctggtttacaaaaggacgcagccctggactacaagtctggaactgacaagttcttatgaccttgacaaatcaccttaacccatctgagccttaaattctcatttatttcctgcataaggagatttggctaaatgctttctgaggtcctttggagtcctgtggctccatggtaatgtgctcctttccttgaagattgggggttttgtaatgttgagatactttgcctctatgcttgtcagctcatgaccagtcctagaagaggagtcgagacataagccaccttcagaggttcaatggaaactttaaaaccataccaaactcttttttaaaattagaattaacaagaaaaaaaaa

SEQ ID NO: 70770 - DNA, 1744 bp, Homo sapiens
cctagccggggtctctgcagtgcacgctctaggctacctttgggcccttttgaagcagctcttgggtttgttatgggtgttaagattttttcttttttctttgtgctttacttcatttcttaagaagcacatatttgtaaaacccatggagtagtgacttggaaaggagctggacagaggcagcagtccacccacaggtggggtatggagaccgcccgcttccttcctattccatgatgctgtggctctgggctgttggctgtcctcagttgcgcttgggattcctgccagccagcagctgctggagttagaggattctgctctccaagaatttgcagcttgtgtctgattaccgtaccgtctggcaaaaaaatacgtatgatgtttttacatttttaaaatcaaaatcctgatgtttttttgttcgtatggttgtttgtttcaacctcttaactcttgattttttctgttaagtgattttacgtctcttagctgtgcagaatgacaattaatgggaaggctgtcttccccatagtgagaccttggtaagggcagacctgactggtagattgtagattgggtgtgctcgtttttatatttcattttaggagcctcacagtctactcagagaaaaataaaagaaggcaaaatgagtcctccccatttccatgcaagccagaacagttggttgtgtgggagcctcgtggtgcccagcggaggacggccaggaccagctccagcagctggggtgcagtgcggggcgcagggcgtccaggtccagctggtgcaggatgacccctccggcgaaggtgtcctgccctcggcccgcggcccagccaccttcctccccttcctcactgtggacctgcccgtctacgtcctccaggaggtgctcccctcatctggaggccctgctggaccggaggccacccagttcccaggaagcactatcaacctgcaggatctgcagtgacggcagcctcggcctgggcaggcccaaggccacggtctaggacacaccttccctgagactcatgacatgagcctggggagacctcatttggtttccgttcagaagaccagcgtagcccttttgagacttttgggtacatttatcaaaaatgttttccttttgttttaccaggaatgagttcgggctatactctttgaaactgcctttgtgagcaaagtgctttggcaaggcaagggtctccctcagcagggctaggtgcactacagcctctttccccgtgtcccgttggatctgagctgtgtagcacttgttgcattacaaagaaaaagacttctgcaggaaatagggtagagaacaggctgtctagtcagatgcagcttgatctgtggcaaaaccaagtgtggtctttcagcttcagtgtgttagcatcccagcacctgggatggggtttgtgggcaagttgattttgccacactgtagggcccaggtggtcccattgccaccgtgaagccaaattctagcccaagtctggtagagcagtcgggcagctagttttcgggggaggatgatgtggtgggacagaggacctcagtggcctattacggagccctcttcccagactaaattcatagccgagagctcggggggatggtagttaaaatttaaaataattttctaaattctgtatttggatattagtgtttaagtggtaatttggcaacagtttataaagtgatgttctgaataccataaattatgtgtaggactgtg

SEQ ID NO: 70771 - DNA, 1054 bp, Homo sapiens
aatctcctgaacgctgcctgctgagacttctcaggtgagacgaggaccgttgctgcactctcacagacatgtgacaggcctttctgtgttgccttcccaggatgacccctccggcgaaggtgtcctgccctcggcccgcggcccagccaccttcctccccttcctcactgtggacctgcccgtctacgtcctccaggaggtgctcccctcatctggaggccctgctggaccggaggccacccagttcccaggaagcactatcaacctgcaggatctgcagtgacggcagcctcggcctgggcaggcccaaggccacggtctaggacacaccttccctgagactcatgacatgagcctggggagacctcatttggtttccgttcagaagaccagcgtagcccttttgagacttttgggtacatttatcaaaaatgttttccttttgttttaccaggaatgagttcgggctatactctttgaaactgcctttgtgagcaaagtgctttggcaaggcaagggtctccctcagcagggctaggtgcactacagcctctttccccgtgtcccgttggatctgagctgtgtagcacttgttgcattacaaagaaaaagacttctgcaggaaatagggtagagaacaggctgtctagtcagatgcagcttgatctgtggcaaaaccaagtgtggtctttcagcttcagtgtgttagcatcccagcacctgggatggggtttgtgggcaagttgattttgccacactgtagggcccaggtggtcccattgccaccgtgaagccaaattctagcccaagtctggtagagcagtcgggcagctagttttcgggggaggatgatgtggtgggacagaggacctcagtggcctattacggagccctcttcccagactaaattcatagccgagagctcggggggatggtagttaaaatttaaaataattttctaaattctgtatttggatattagtgtttaagtggtaatttggcaacagtttataaagtgatgttctgaataccataaattatgtgtaggactgtg

SEQ ID NO: 70772 - DNA, 954 bp, Homo sapiens
taggcaaccacgaatctgctttttgtttctgtggatttgtcttttctggacacttcttagaaacgtaattatataatatgtggtcttttgtgactgttttttttttcactttgcataatgttttcaaggttgatccgtgttgcatgtatcggaagttcttatggctgaataatatttcattgtgtagataaaccacattatttgtcagataatagacatttgggttattgctgtcttttggctattatgagtgttataaatatttgtgcacaagtatttgtgtagacatgtttgcatttctcttgggtatatacctaggagtgaaattgctggataatatgtttaactatttgaggactgatagactactttgtaaagtggccaacatgagtaagttttcatcacatttataaaatgttagtgtacttacattagcttgcaaagcatttaataagcagcaagagttaaaccacgttggtccaagtgaactgaaagcagacttctgtgttacatgtgtatgagttactgaacatgttccataatacaggagtgtgagcacactaacaggtaagtgcaggaaaacaagaagaaatattttcagagtatagtcaaaagtacactgagcatgggagaattgttttgacattttgctcaaaactatttctgaagaaaattcaacatttctttcacggaaagttttaggaacaggtaaatacaattatataaagtactggtagaatatgttcgttcagatgaccttgaagtgttttttcagacttatctgaacttgagatctgaactgaatttttattagaaactgttaaagcctctggcattgaaggttagttcataattggtgagttctgaatcacttcatttcctgcagtggttcctgagagaatcttagttcaaaggactgcccccgccaacccctgccccgccaaaaaaaaaaaa

SEQ ID NO: 70773 - DNA, 652 bp, Homo sapiens
ttctatactaggtatatgtagttagtaatagtgatttaaataatatctgtagagcacttcataggtttcagcatctttaatattatctctctgtttttataattacacttcgaaatcagtattaggtcttgcatcttacaattataataactgaagttcaaagaagttttgtgacttcttgaagactcagaagggaaacaaaggctggtacccagaccttgtaattgtgaaggctagtgctttacattttacttatttcctgaggtgaattaatcaaagcggtaataatgaaaacatttatttcatctttgtcaagcactattttaaacattttgtgcatttttaactccccacagcaacccaatgaattaaaaagttttatctccatttacaaatgaggcatagagcatttaggcagttcgcccacgatcacacagctagtgagcaactgcactgggatttgttcgctggcagtttggtgacaaaagaaaccccgtctcattagctgggcgtggtggcgcatgcctgtaatcccagctactcaggaggctgaggcaggagaatcgcttgaacccgggagtcggaggttgaggtgagccaagatcatgccattgtactccagcccaggcaacaagagtgaaacgccgtctca

SEQ ID NO: 70774 - DNA, 944 bp, Homo sapiens
agcggacttcgccattttcctccggaagtgcggatcccagcggcggtcgtgtagctgagcagccctggggcttggttctatgtccctgtggctatgtttccagtgtcctctgggtgtttccaagagcaacaagaaacgaataaatctctgacccttctcaggtgcagccagagagacactagcccactgatggatggacagacgtgggcagggtccgtgtcactaaaccacccaccactgccacagctgcctacaacagacacatcagatgacactccgggcaaataaatgattttcactgaggacttactggttttaataataggtcctggtgtagagaagtccctcaacctattgtgcaatgagtttgagaagcgggtaagctgtatgttttgtggttctgtttcataaatgcatctacaggaagaccaatattgactgaatgaagctttcatttaaagagctaaaatatgctttgtgtttttatatgtggatactactttaaacctaatgactattcattgtatcatagcttgtgatgtattctgctcacggcttttaaggtaaattgtgccatgatccactgccattctaattgctttaacaagtcattaccacactactgttacatcttaattatgcatacagacaggtagacttattttacatatgtgaactaactagttgtcaaagcaaatgcagattgtattctacaagtaaagtctttttctctctgaaatttctagggatgttctttaagtgaaattcatattcaaactgaagattttagttacaagaaactgagtgcagattaaagtcttttgtgattcaaacatagtcaagagtaccactgtgatatttcatggaagttatgcaataaaatgtctctaacctgcgaacaaatctatcaagcagacggcacagtactgaatttgaaaccagaa

SEQ ID NO: 70775 - DNA, 944 bp, Homo sapiens
gcttcttttccgacaaaacaccaaaaagtgcggatcccagcggcggtcgtgtagctgagcagccctggggcttggttctatgtccctgtggctatgtttccagtgtcctctgggtgtttccaagagcaacaagaaacgaataaatctctgacccttctcaggtgcagccagagagacactagcccactgatggatggacagacgtgggcagggtccgtgtcactaaaccacccaccactgccacagctgcctacaacagacacatcagatgacactccgggcaaataaatgattttcactgaggacttactggttttaataataggtcctggtgtagagaagtccctcaacctattgtgcaatgagtttgagaagcgggtaagctgtatgttttgtggttctgtttcataaatgcatctacaggaagaccaatattgactgaatgaagctttcatttaaagagctaaaatatgctttgtgtttttatatgtggatactactttaaacctaatgactattcattgtatcatagcttgtgatgtattctgctcacggcttttaaggtaaattgtgccatgatccactgccattctaattgctttaacaagtcattaccacactactgttacatcttaattatgcatacagacaggtagacttattttacatatgtgaactaactagttgtcaaagcaaatgcagattgtattctacaagtaaagtctttttctctctgaaatttctagggatgttctttaagtgaaattcatattcaaactgaagattttagttacaagaaactgagtgcagattaaagtcttttgtgattcaaacatagtcaagagtaccactgtgatatttcatggaagttatgcaataaaatgtctctaacctgcgaacaaatctatcaagcagacggcacagtactgaatttgaaaccagaa

SEQ ID NO: 70776 - DNA, 323 bp, Homo sapiens
ctttaggtacaaatcccagaaaaggtttgggtgtggatcctatcccccccaagctggtgagtgaggtggaggagctgtacaagtccatcacagcgctgcgggagaagcttctacaagcggagcagtccctgcgcaacctcaaggacatccacatgagcctggagaaggacgtcactgccatgaccaacagtctcttcatcgaccgccagaagtgcatggcccatcgtacttgctaccccaccattctgcagctggctggctaccagtgagcagcggcacggtgcttccccccaatcccccaaataaacagtgcgttagctttc

SEQ ID NO: 70777 - DNA, 605 bp, Homo sapiens
agcggacttcgccattttcctccggaagtgcggatcccagcggcggtcgtgtagctgagcagccctggggcttggttctatgtccctgtggctatgtttccagtgtcctctgggtgtttccaagagcaacaagaaacgaataaatctctgttgaagagataccatttgacattttagagatggctgcatgcaaactcttaaaacatttgaggaacacttttatccaacttttctcaagtcagagtacaggagcacaggctgttcgacgtaggccggacaactcttcagctttgctgcttagaagttcattccaccagatacaccctaaatcatcaccctaaagttccgtttcacagatctccagggaatggtcactgtgtagccaattacttggctaaggcaaaagaaaaaaaccttggctccttttcccagtaagttcctcattttcatctgagaccttacaagcctgggccttcagtgtccatccttctgtcagccttttaatcataactatttaacaagtctctgcaatggtccaaactttccctcatcttgctatcttcttccaagctctccaaatctctaacctctggccattacccaat

SEQ ID NO: 70778 - DNA, 2236 bp, Homo sapiens
ggctgtactggctgggattatgggcataagtgcggatcccagcggcggtcgtgtagctgagcagccctggggcttggttctatgtccctgtggctatgtttccagtgtcctctgggtgtttccaagagcaacaagaaacgaataaatctctgccccgcagcgcctccaccccagagacccggaccaagttcacacaggacaatctgtgccacgcccagcgcgagcgcctggactcggccaacctgtgggtgcttgtggactgcatccttcgcgacacctccgaggacctgggactccagtgtgacgccgtgaacctggccttcgggcgccgctgtgaggaactggaggacgtgcggcacaagctgcagcaccacctgcacaaggtggggcaccctgaaccccgaagacggctccggcgcctgcccaccactctgccccctctcatcacctggcctgggccctcaacacctttctcctctgtcccacttatcccgagggaccccagaagcaagtgtcacctctccgtaaacctatgtaaaaccaggtgacactgggtatgatcgcagtgtgttgcaacccccatgactgagcaggaggagctgtggggaggatggaggcaggagctggtctggggagcattgactgcctgggaggtccccaagagtcctggcctggcaggcagggctctgactctagggcctcagcatggcctttaccacctctgagtccccagtccttgagcaggatttgggtcctggtgaccaccaaggatgggggttcttggaccagagctaagagacaacaggctgcctgactctccagagcccgctgggggccccgtgcacattgttcccctcacccacgcctccccagggccactggtcaggaccaccctctggacacagccccaggagctgggtaggaccagactggtctctacattccatatgcccgggcatgggggcacaggcccaaggggcactgtcctgtctgcagatgctgcgggaaatcacagatcaggaacacaacgtggtggcactgaaggaggccatcaaggacaaggaggaacctctgcacatagcccagacccggctgtagctgctctcacaccggcccaacatgcagctgtgccgcgatgcagcccagttcaggtactgcctgggcctctgaggcagtcccaggtgcccccatccacctcctcgctgcgaccctctccaataaacactccaatctccacacacacatcccccacaggtgctgagaggggagggagactctgcggccacacacaacatgcaagcacgccttaaacacacagatatagacatgacactgggcaggtcatgggtcgggggcctccccgtgccagggacctgtgcccacgtggtctcaccccaccctgtgctacctcatcttcccgggaggaagctccttcagacaaggtgagctcctggaggccacggggccagagaggccagagagggccattccctgctgccctgagggtgctgtccccacctctggtggaaagtatgacctacgcctgggctacaggcatagatgggccgtccttttgtttcccttgttaacggatgcctggtggccccttctgagcctaagtacctttcttccttccctgcccctcagttccttcaaggaactgggtgcctccttccgtcaaatatcaggaatggaaagaactgagcctggtcggctgaggccagtcctgtcctgtcagggtcgagattgcacgcgggtcactcattcccactcaggcccgcgctccctgggaggaccctcgtaatttatgctctgccctagagccgctttcctggtaggatcctttcatggcgtcttcccaggacctcctgccagctcccattgggagttttgggtcccctccaccccagtaggtgcatacttctgccctccccagccccagctcacaccccccaacacccccaagctggtgagtgaggtggaggagctgtacaagtccatcacagcgctgcgggagaagcttctacaagcggagcagtccctgcgcaacctcaaggacatccacatgagcctggagaaggacgtcactgccatgaccaacagtctcttcatcgaccgccagaagtgcatggcccatcgtacttgctaccccaccattctgcagctggctggctaccagtgagcagcggcacggtgcttccccccaatcccccaaataaacagtgcgttagctttc

SEQ ID NO: 70779 - DNA, 2265 bp, Homo sapiens
  misc_feature (2251)..(2251): n is a, c, g, or t
ggctgtactggctgggattatgggcataagtgcggatcccagcggcggtcgtgtagctgagcagccctggggcttggttctatgtccctgtggctatgtttccagtgtcctctgggtgtttccaagagcaacaagaaacgaataaatctctgccccgcagcgcctccaccccagagacccggaccaagttcacacaggacaatctgtgccacgcccagcgcgagcgcctggactcggccaacctgtgggtgcttgtggactgcatccttcgcgacacctccgaggacctgggactccagtgtgacgccgtgaacctggccttcgggcgccgctgtgaggaactggaggacgtgcggcacaagctgcagcaccacctgcacaaggtggggcaccctgaaccccgaagacggctccggcgcctgcccaccactctgccccctctcatcacctggcctgggccctcaacacctttctcctctgtcccacttatcccgagggaccccagaagcaagtgtcacctctccgtaaacctatgtaaaaccaggtgacactgggtatgatcgcagtgtgttgcaacccccatgactgagcaggaggagctgtggggaggatggaggcaggagctggtctggggagcattgactgcctgggaggtccccaagagtcctggcctggcaggcagggctctgactctagggcctcagcatggcctttaccacctctgagtccccagtccttgagcaggatttgggtcctggtgaccaccaaggatgggggttcttggaccagagctaagagacaacaggctgcctgactctccagagcccgctgggggccccgtgcacattgttcccctcacccacgcctccccagggccactggtcaggaccaccctctggacacagccccaggagctgggtaggaccagactggtctctacattccatatgcccgggcatgggggcacaggcccaaggggcactgtcctgtctgcagatgctgcgggaaatcacagatcaggaacacaacgtggtggcactgaaggaggccatcaaggacaaggaggaacctctgcacatagcccagacccggctgtagctgctctcacaccggcccaacatgcagctgtgccgcgatgcagcccagttcaggtactgcctgggcctctgaggcagtcccaggtgcccccatccacctcctcgctgcgaccctctccaataaacactccaatctccacacacacatcccccacaggtgctgagaggggagggagactctgcggccacacacaacatgcaagcacgccttaaacacacagatatagacatgacactgggcaggtcatgggtcgggggcctccccgtgccagggacctgtgcccacgtggtctcaccccaccctgtgctacctcatcttcccgggaggaagctccttcagacaaggtgagctcctggaggccacggggccagagaggccagagagggccattccctgctgccctgagggtgctgtccccacctctggtggaaagtatgacctacgcctgggctacaggcatagatgggccgtccttttgtttcccttgttaacggatgcctggtggccccttctgagcctaagtacctttcttccttccctgcccctcagttccttcaaggaactgggtgcctccttccgtcaaatatcaggaatggaaagaactgagcctggtcggctgaggccagtcctgtcctgtcagggtcgagattgcacgcgggtcactcattcccactcaggcccgcgctccctgggaggaccctcgtaatttatgctctgccctagagccgctttcctggtaggatcctttcatggcgtcttcccaggacctcctgccagctcccattgggagttttgggtcccctccaccccagtaggtgcatacttctgccctccccagccccagctcacaccccccaacacccccaagctggtgagtgaggtggaggagctgtacaagtccatcacagcgctgcgggagaagcttctacaagcggagcagtccctgcgcaacctcaaggacatccacatgagcctggagaaggacgtcactgccatgaccaacagtctcttcatcgaccgccagaagtgcatggcccatcgtacttgctaccccaccattctgcagctggctggctaccagtgagcagcggcacggtgcttccccccaatcccccaaataaacagtgcgttagctttcaaaaaaacacaacanacaaaaaaaacact

SEQ ID NO: 70780 - DNA, 1816 bp, Homo sapiens
  misc_feature (158)..(158): n is a, c, g, or t
  misc_feature (299)..(299): n is a, c, g, or t
ggctgtactggctgggattatgggcataagtgcggatcccagcggcggtcgtgtagctgagcagccctggggcttggttctatgtccctgtggctatgtttccagtgtcctctgggtgtttccaagagcaacaagaaacgaataaatctctggaaaanatagtatctcttgttgcaagaaatggtccatctgtgatttcaagtctctcgcttgagtgaattggatggaagtggtgaatttcagccaaagtggccaaagaaatcctgttcctgtgataatgacgccatcagcctctgcanctctgtcttcccttctgccacatgttgcctgttctccgtgactttgccccgcagcgcctccaccccagagacccggaccaagttcacacaggacaatctgtgccacgcccagcgcgagcgcctggactcggccaacctgtgggtgcttgtggactgcatccttcgcgacacctccgaggacctgggactccagtgtgacgccgtgaacctggccttcgggcgccgctgtgaggaactggaggacgtgcggcacaagctgcagcaccacctgcacaagatgctgcgggaaatcacagatcaggaacacaacgtggtggcactgaaggaggccatcaaggacaaggaggaacctctgcacatagcccagacccggctgtagctgctctcacaccggcccaacatgcagctgtgccgcgatgcagcccagttcaggtactgcctgggcctctgaggcagtcccaggtgcccccatccacctcctcgctgcgaccctctccaataaacactccaatctccacacacacatcccccacaggtgctgagaggggagggagactctgcggccacacacaacatgcaagcacgccttaaacacacagatatagacatgacactgggcaggtcatgggtcgggggcctccccgtgccagggacctgtgcccacgtggtctcaccccaccctgtgctacctcatcttcccgggaggaagctccttcagacaaggtgagctcctggaggccacggggccagagaggccagagagggccattccctgctgccctgagggtgctgtccccacctctggtggaaagtatgacctacgcctgggctacaggcatagatgggccgtccttttgtttcccttgttaacggatgcctggtggccccttctgagcctaagtacctttcttccttccctgcccctcagttccttcaaggaactgggtgcctccttccgtcaaatatcaggaatggaaagaactgagcctggtcggctgaggccagtcctgtcctgtcagggtcgagattgcacgcgggtcactcattcccactcaggcccgcgctccctgggaggaccctcgtaatttatgctctgccctagagccgctttcctggtaggatcctttcatggcgtcttcccaggacctcctgccagctcccattgggagttttgggtcccctccaccccagtaggtgcatacttctgccctccccagccccagctcacaccccccaacacccccaagctggtgagtgaggtggaggagctgtacaagtccatcacagcgctgcgggagaagcttctacaagcggagcagtccctgcgcaacctcaaggacatccacatgagcctggagaaggacgtcactgccatgaccaacagtctcttcatcgaccgccagaagtgcatggcccatcgtacttgctaccccaccattctgcagctggctggctaccagtgagcagcggcacggtgcttccccccaatcccccaaataaacagtgcgttagctttc

SEQ ID NO: 70781 - DNA, 1451 bp, Homo sapiens
ggctgtactggctgggattatgggcataagtgcggatcccagcggcggtcgtgtagctgagcagccctggggcttggttctatgtccctgtggctatgtttccagtgtcctctgggtgtttccaagagcaacaagaaacgaataaatctctgccccgcagcgcctccaccccagagacccggaccaagttcacacaggacaatctgtgccacgcccagcgcgagcgcctggactcggccaacctgtgggtgcttgtggactgcatccttcgcgacacctccgaggacctgggactccagtgtgacgccgtgaacctggccttcgggcgccgctgtgaggaactggaggacgtgcggcacaagctgcagcaccacctgcacaaggtggggcaccctgaaccccgaagacggctccggcgcctgcccaccactctgccccctctcatcacctggcctgggccctcaacacctttctcctctgtcccacttatcccgagggaccccagaagcaagtgtcacctctccgtaaacctatgtaaaaccaggtgacactgggtatgatcgcagtgtgttgcaacccccatgactgagcaggaggagctgtggggaggatggaggcaggagctggtctggggagcattgactgcctgggaggtccccaagagtcctggcctggcaggcagggctctgactctagggcctcagcatggcctttaccacctctgagtccccagtccttgagcaggatttgggtcctggtgaccaccaaggatgggggttcttggaccagagctaagagacaacaggctgcctgactctccagagcccgctgggggccccgtgcacattgttcccctcacccacgcctccccagggccactggtcaggaccaccctctggacacagccccaggagctgggtaggaccagactggtctctacattccatatgcccgggcatgggggcacaggcccaaggggcactgtcctgtctgcagatgctgcgggaaatcacagatcaggaacacaacgtggtggcactgaaggaggccatcaaggacaaggaggaacctctgcacatagcccagacccggctgtagctgctctcacaccggcccaacatgcagctgtgccgcgatgcagcccagttcagccccagctcacaccccccaacacccccaagctggtgagtgaggtggaggagctgtacaagtccatcacagcgctgcgggagaagcttctacaagcggagcagtccctgcgcaacctcaaggacatccacatgagcctggagaaggacgtcactgccatgaccaacagtctcttcatcgaccgccagaagtgcatggcccatcgtacttgctaccccaccattctgcagctggctggctaccagtgagcagcggcacggtgcttccccccaatcccccaaataaacagtgcgttagctttc

SEQ ID NO: 70782 - DNA, 785 bp, Homo sapiens
ggctgtactggctgggattatgggcataagtgcggatcccagcggcggtcgtgtagctgagcagccctggggcttggttctatgtccctgtggctatgtttccagtgtcctctgggtgtttccaagagcaacaagaaacgaataaatctctgccccgcagcgcctccaccccagagacccggaccaagttcacacaggacaatctgtgccacgcccagcgcgagcgcctggactcggccaacctgtgggtgcttgtggactgcatccttcgcgacacctccgaggacctgggactccagtgtgacgccgtgaacctggccttcgggcgccgctgtgaggaactggaggacgtgcggcacaagctgcagcaccacctgcacaagatgctgcgggaaatcacagatcaggaacacaacgtggtggcactgaaggaggccatcaaggacaaggaggaacctctgcacatagcccagacccggctgtacctgctctcacaccggcccaacatgcagctgtgccgcgaagcagcccagttcagagcgctgtgggagaagcttctagaaggggagcagtccctttgcaacctcgaggacatccacatgagcctggagaaggatgttaccgccatgaccaacagtctcttcatcgaccgccagaagtgcatggcccatcgtacttgctacacccccatcctgcagctggctggctaccagtgagcagcggcacggtgcttccccccaatcccccaaataaacagtgcattagctttctgcaaagtgtgtgtg

SEQ ID NO: 70783 - DNA, 823 bp, Homo sapiens
ggctgtactggctgggattatgggcataagtgcggatcccagcggcggtcgtgtagctgagcagccctggggcttggttctatgtccctgtggctatgtttccagtgtcctctgggtgtttccaagagcaacaagaaacgaataaatctctgccccgcagcgcctccaccccagagacccggaccaagttcacacaggacaatctgtgccacgcccagcgcgagcgcctggactcggccaacctgtgggtgcttgtggactgcatccttcgcgacacctccgaggacctgggactccagtgtgacgccgtgaacctggccttcgggcgccgctgtgaggaactggaggacgtgcggcacaagctgcagcaccacctgcacaagatgctgcgggaaatcacagatcaggaacacaacgtggtggcactgaaggaggccatcaaggacaaggaggaacctctgcacatagcccagacccggctgtacctgctctcacaccggcccaacatgcagctgtgccgcgaagcagcccagttcagctggtgagtgaggtggaggagctgaacatgtccatcacagcgctgtgggagaagcttctagaaggggagcagtccctttgcaacctcgaggacatccacatgagcctggagaaggatgttaccgccatgaccaacagtctcttcatcgaccgccagaagtgcatggcccatcgtacttgctacacccccatcctgcagctggctggctaccagtgagcagcggcacggtgcttccccccaatcccccaaataaacagtgcattagctttctgcaaagtgtgtgtg

SEQ ID NO: 70784 - DNA, 891 bp, Homo sapiens
agcggacttcgccattttcctccggaagtgcggatcccagcggcggtcgtgtagctgagcagccctggggcttggttctatgtccctgtggctatgtttccagtgtcctctgggtgtttccaagagcaacaagaaacgaataaatctctgacccttctcaggtgcagccagagagacactagcccactgatggatggacagacgtgggcagggtccgtgtcactaaaccacccaccactgccacagctgcctacaacagacacatcagatgacactccgggcaaataaatgattttcactgaggacttactggttttaataataggtcctggtgtagagaagtccctcaacctattgtgcaatgagtttgagaagcgggtaagctgtatgttttgtggttctgtttcataaatgcatctacaggaagaccaatattgactgaatgaagctttcatttaaagagcttcattgtatcatagcttgtgatgtattctgctcacggcttttaaggtaaattgtgccatgatccactgccattctaattgctttaacaagtcattaccacactactgttacatcttaattatgcatacagacaggtagacttattttacatatgtgaactaactagttgtcaaagcaaatgcagattgtattctacaagtaaagtctttttctctctgaaatttctagggatgttctttaagtgaaattcatattcaaactgaagattttagttacaagaaactgagtgcagattaaagtcttttgtgattcaaacatagtcaagagtaccactgtgatatttcatggaagttatgcaataaaatgtctctaacctgcgaacaaatctatcaagcagacggcacagtactgaatttgaaaccagaa

SEQ ID NO: 70785 - DNA, 947 bp, Homo sapiens
  misc_feature (480)..(480): n is a, c, g, or t
  misc_feature (488)..(488): n is a, c, g, or t
  misc_feature (933)..(933): n is a, c, g, or t
agcggacttcgccattttcctccggaagtgcggatcccagcggcggtcgtgtagctgagcagccctggggcttggttctatgtccctgtggctatgtttccagtgtcctctgggtgtttccaagagcaacaagaaacgaataaatctctgacccttctcaggtgcagccagagagacactagcccactgatggatggacagacgtgggcagggtccgtgtcactaaaccacccaccactgccacagctgcctacaacagacacatcagatgacactccgggcaaataaatgattttcactgaggacttactggttttaataataggtcctggtgtagagaagtccctcaacctattgtgcaatgagtttgagaagcgggtaagctgtatgttttgtggttctgtttcataaatgcatctacaggaagaccaatattgactgaatgaagctttcatttaaagagcaaaaaaaaaaaaaaanaaaaaaanaaaaaattttgtggggggggggggagaaaaggttttataacccattctcgtgtggggcgcgcgcgcggggcccaactttggtctacgtgtggaactttgtggtcaggcagggtgtgtgtctcccagggagaaacccggggtcgcggacatgttcgttgcggtctctcggcccgtatagaaaagacggccgggggggggagcaacctcgagtggtggtgtttgggaccaatctcccaggtggggcgtggtctcgggaggggcgcattgcgagggcgcgtcttattccacaacggcggagttccgacggaggaaggtgctatatatataaaattaaacccggggccggttggggagaattttcacatttgactggtgaacattctttgcatccctttgtctaaagaactcatttggataaacggttcgacagaaaaaaacacaacanacaaaaaaaacact

SEQ ID NO: 70786 - DNA, 918 bp, Homo sapiens
ggctgtactggctgggattatgggcataagtgcggatcccagcggcggtcgtgtagctgagcagccctggggcttggttctatgtccctgtggctatgtttccagtgtcctctgggtgtttccaagagcaacaagaaacgaataaatctctgtgagttttttatttgttcttcactttgttttacactgtattttctgagtttatgggtgtctgtgaattaaaaaggaaaagtggaaataagtaaaactcaggttgaaggaaatatacataaataagataaagctgacctgtagatatagacaggttataaaagcttagagttgtctaagttgagtgcaaagtttcctctgatctttctgatgccgaaacaaaaaaggcagtcatgtttgttacgtgattggaatggaacccgaaaagagagcatgctgtgttcttgtgggacaggaaagcttgtgtgcaccaagtcttaaccaccaccttcattggtgacatagattatgtgctggaacatatttcacaccggtctggcagtaagcacttgtagtgttgtgcagtggaaacagtcatcttccgctaaggcatggcgtgttgtgcagtggaaatggtcattttccgctaaagcatggcgtgttgtgcagtggaaatggtcatctgacgctaaagcacagcatgttgtacagtggaaatggtcatcgtctgctaaagcacggcgtgttgtgcagtggaaatggtcatctcctgctaaagcacagcttccatcataaggtatgctccttgctcaaagagtgtggtcccaaacagcttttgggaggtcctccttgactcatggatgaaacccagaacatcttgaggactgagttaaccacaggtccttaaataactctccacacatttttcttagtttatctctacatgca

SEQ ID NO: 70787 - DNA, 1034 bp, Homo sapiens
ggctgtactggctgggattatgggcataagtgcggatcccagcggcggtcgtgtagctgagcagccctggggcttggttctatgtccctgtggaatgcacaagatttgcaaagactaggtgatagtggaaggtttggaagaactttcagaaggttgaggtgaattcagctgagaagaacagctatgtttccagtgtcctctgggtgtttccaagagcaacaagaaacgaataaatctctgacccttctcaggtgcagccagagagacactagcccactgatggatggacagacgtgggcagggtccgtgtcactaaaccacccaccactgccacagctgcctacaacagacacatcagatgacactccgggcaaataaatgattttcactgaggacttactggttttaataataggtcctggtgtagagaagtccctcaacctattgtgcaatgagtttgagaagcgggtaagctgtatgttttgtggttctgtttcataaatgcatctacaggaagaccaatattgactgaatgaagctttcatttaaagagctaaaatatgctttgtgtttttatatgtggatactactttaaacctaatgactattcattgtatcatagcttgtgatgtattctgctcacggcttttaaggtaaattgtgccatgatccactgccattctaattgctttaacaagtcattaccacactactgttacatcttaattatgcatacagacaggtagacttattttacatatgtgaactaactagttgtcaaagcaaatgcagattgtattctacaagtaaagtctttttctctctgaaatttctagggatgttctttaagtgaaattcatattcaaactgaagattttagttacaagaaactgagtgcagattaaagtcttttgtgattcaaacatagtcaagagtaccactgtgatatttcatggaagttatgcaataaaatgtctctaacctgcgaacaaatctatcaagcagacggcacagtactgaatttgaaaccagaa

SEQ ID NO: 70788 - DNA, 849 bp, Homo sapiens
ggctgtactggctgggattatgggcataagtgcggatcccagcggcggtcgtgtagctgagcagccctggggcttggttctatgtccctgtggctatgtttccagtgtcctctgggtgtttccaagagcaacaagaaacgaataaatctctgatggattttccctccagcctgggtgacagagtaagactccgtctcaaaaaaaaaaaaagcttaataatttattacatcccaaatttttaaaatttggagtgccttggcagtggggatggttcctaaaatggcgtatagaattagcgacagaatggtgtgtaaggtcctgaatctggtaaaatacaggggatgtatgtatgcggaattatgaggcataagtagccagtatctatagtagaatctacaagggctccttttgggacctgtagactagaatatacgtgtgtatgggggccttgagtggtatctctcagggttagaggtgctggttcaagcacaatttagattagggttggacaccagtcatggtccaactccatgcggtgggctccattgtaaaacttcactacttcagtacacaagcaacattagggaacttctaaacggaagtggattgcgactttcaagagtatagtggtggcctagggcattactggggaactttttaacaaatagattctactggtcctatgggttcataacaacacaggttggagcaactacaataggtgttcattaggtcaagactaatgcgggattatatcccaaataatttcttggggtgaatagtgtttactatataacctcgggtagggagaccagcggaccgctgtttggttagctaaccgtgggcacg

SEQ ID NO: 70789 - DNA, 1007 bp, Homo sapiens
ggctgtactggctgggattatgggcataagtgcggatcccagcggcggtcgtgtagctgagcagccctggggcttggttctatgtccctgtggctatgtttccagtgtcctctgggtgtttccaagagcaacaagaaacgaataaatctctgttgaagagataccatttgacattttagagatggctgcatgcaaactcttaaaacatttgagacccttctcaggtgcagccagagagacactagcccactgatggatggacagacgtgggcagggtccgtgtcactaaaccacccaccactgccacagctgcctacaacagacacatcagatgacactccgggcaaataaatgattttcactgaggacttactggttttaataataggtcctggtgtagagaagtccctcaacctattgtgcaatgagtttgagaagcgggtaagctgtatgttttgtggttctgtttcataaatgcatctacaggaagaccaatattgactgaatgaagctttcatttaaagagctaaaatatgctttgtgtttttatatgtggatactactttaaacctaatgactattcattgtatcatagcttgtgatgtattctgctcacggcttttaaggtaaattgtgccatgatccactgccattctaattgctttaacaagtcattaccacactactgttacatcttaattatgcatacagacaggtagacttattttacatatgtgaactaactagttgtcaaagcaaatgcagattgtattctacaagtaaagtctttttctctctgaaatttctagggatgttctttaagtgaaattcatattcaaactgaagattttagttacaagaaactgagtgcagattaaagtcttttgtgattcaaacatagtcaagagtaccactgtgatatttcatggaagttatgcaataaaatgtctctaacctgcgaacaaatctatcaagcagacggcacagtactgaatttgaaaccagaa

SEQ ID NO: 70790 - DNA, 757 bp, Homo sapiens
  misc_feature (290)..(290): n is a, c, g, or t
  misc_feature (298)..(298): n is a, c, g, or t
  misc_feature (743)..(743): n is a, c, g, or t
ggctgtactggctgggattatgggcataagtgcggatcccagcggcggtcgtgtagctgagcagccctggggcttggttctatgtccctgtggctatgtttccagtgtcctctgggtgtttccaagagcaacaagaaacgaataaatctctgccataggagttttagccaattcagagggcttgctgcctgcaatttggaaaattccttggatttgaccaaatcaggaagagacgggagaaaagtgaaacaagaataaagccccagacataaacaaaaaaaaaaaaaaanaaaaaaanaaaaaattttgtggggggggggggagaaaaggttttataacccattctcgtgtggggcgcgcgcgcggggcccaactttggtctacgtgtggaactttgtggtcaggcagggtgtgtgtctcccagggagaaacccggggtcgcggacatgttcgttgcggtctctcggcccgtatagaaaagacggccgggggggggagcaacctcgagtggtggtgtttgggaccaatctcccaggtggggcgtggtctcgggaggggcgcattgcgagggcgcgtcttattccacaacggcggagttccgacggaggaaggtgctatatatataaaattaaacccggggccggttggggagaattttcacatttgactggtgaacattctttgcatccctttgtctaaagaactcatttggataaacggttcgacagaaaaaaacacaacanacaaaaaaaacact

SEQ ID NO: 70791 - DNA, 754 bp, Homo sapiens
  misc_feature (158)..(158): n is a, c, g, or t
  misc_feature (299)..(299): n is a, c, g, or t
ggctgtactggctgggattatgggcataagtgcggatcccagcggcggtcgtgtagctgagcagccctggggcttggttctatgtccctgtggctatgtttccagtgtcctctgggtgtttccaagagcaacaagaaacgaataaatctctggaaaanatagtatctcttgttgcaagaaatggtccatctgtgatttcaagtctctcgcttgagtgaattggatggaagtggtgaatttcagccaaagtggccaaagaaatcctgttcctgtgataatgacgccatcagcctctgcanctctgtcttcccttctgccacatgttgcctgttctccgtgactttggtaagagcttccttgtgtatgaggatgatgtccaggatgttggtctggtgtccctgagacagactaacaggtccatggctgggtccaggtccttcctggactcattggccaaagagctactgatgttcttgaaggcatctctggtgaagtggatggcctagtcaagttccaagggcctggtgaggctgacagaaaaactggcaccgttctgatgctctttctatcagcgctgtgcatgtcatctgattggctgtcaactcatgggctgtgcaggatgaagctgcctggcccgtgtacatcttcttggacgaagcattggaagcatcagtcgtgctctccacgcttaagggtgcggtccccactgagggttgtctgaaggtctcacagaagcggcgcaaatctctctgaa

SEQ ID NO: 70792 - DNA, 1266 bp, Homo sapiens
aatcctccttttcagtcaagttctcacttagttgagagtgtgaccaaaatgtagggccttagcctcactcttagttaccattgttttgggtttccggtttagcacatcactcccattgttttgggtaatggttttagcacgtcactcccattgttttgggttctggttttagcatgttactcccattgttttgggtttctggtttagcacgtcactcccattgttttgggttctggttttagtacatcactcccattgttttgggttccggttttagtacatcagtcccattgttttgggtttctggtttagcatgtcactcccattgttttgggtttctggtttagcatgtcactcataggttacggtgtccttatgattgcacatttttttaatctgttgtcattccagttgaagagataccatttgacattttagagatggctgcatgcaaactcttaaaacatttgagacccttctcaggtgcagccagagagacactagcccactgatggatggacagacgtgggcagggtccgtgtcactaaaccacccaccactgccacagctgcctacaacagacacatcagatgacactccgggcaaataaatgattttcactgaggacttactggttttaataataggtcctggtgtagagaagtccctcaacctattgtgcaatgagtttgagaagcgggtaagctgtatgttttgtggttctgtttcataaatgcatctacaggaagaccaatattgactgaatgaagctttcatttaaagagctaaaatatgctttgtgtttttatatgtggatactactttaaacctaatgactattcattgtatcatagcttgtgatgtattctgctcacggcttttaaggtaaattgtgccatgatccactgccattctaattgctttaacaagtcattaccacactactgttacatcttaattatgcatacagacaggtagacttattttacatatgtgaactaactagttgtcaaagcaaatgcagattgtattctacaagtaaagtctttttctctctgaaatttctagggatgttctttaagtgaaattcatattcaaactgaagattttagttacaagaaactgagtgcagattaaagtcttttgtgattcaaacatagtcaagagtaccactgtgatatttcatggaagttatgcaataaaatgtctctaacctgcgaacaaatctatcaagcagacggcacagtactgaatttgaaaccagaa

SEQ ID NO: 70793 - DNA, 364 bp, Homo sapiens
ggctgtactggctgggattatgggcataagtgcggatcccagcggcggtcgtgtagctgagcagccctggggcttggttctatgtccctgtggctatgtttccagtgtcctctgggtgtttccaagagcaacaagaaacgaataaatctctgagaggtgcccagtgaatgcaggttccagacaaaaggtggagcctggcatcctgccctgcatgggctccagcctgctgccatctggggaaactgagtatggcgaggctcaaggatgtttctcagaccacaccagtccctgaaggtccgctgacctcccaatcttgacggacaatgagaagagcttcccaggccacctgcaataggttctggct

SEQ ID NO: 70794 - DNA, 1623 bp, Homo sapiens
ggctgtactggctgggattatgggcataagtgcggatcccagcggcggtcgtgtagctgagcagccctggggcttggttctatgtccctgtggctatgtttccagtgtcctctgggtgtttccaagagcaacaagaaacgaataaatctctgccccgcagcgcctccaccccagagacccggaccaagttcacacaggacaatctgtgccacgcccagcgcgagcgcctggactcggccaacctgtgggtgctggtggactgcatccttcgcgacacctccgaggacctgggactccagtgtgacgccgtgaacctggccttcgggcgccgctgtgaggaactggaggacgcgcggcacaagctgcagcaccacctgcacaagatgctgcgggaaatcacagatcaggaacacaacgtggtggcactgaaggaggccatcaaggacaaggaggaacctctgcacatagcccagacccggctgtagctgctctcacaccggcccaacatgcagctgtgccgcgatgcagcccagttcaggtactgcctgggcctctgaggcagtcccaggtgcccccatccacctcctcgctgcgaccctctccaataaacactccaatctccacacacacatcccccacaggtgctgagaggggagggagactctgcggccacacacaacatgcaagcacgccttaaacacacagatatagacatgacactgggcaggtcatgggtcgggggcctccccgtgccagggacctgtgcccacgtggtctcaccccaccctgtgctacctcatcttcccgggaggaagctccttcagacaaggtgagctcctggaggccacggggccagagaggccagagagggccattccctgctgccctgagggtgctgtccccacctctggtggaaagtatgacctacgcctgggctacaggcatagatgggccgtccttttgtttcccttgttaacggatgcctggtggccccttctgagcctaagtacctttcttccttccctgcccctcagttccttcaaggaactgggtgcctccttccgtcaaatatcaggaatggaaagaactgagcctggtcggctgaggccagtcctgtcctgtcagggtcgagattgcacgcgggtcactcattcccactcaggcccgcgctccctgggaggaccctcgtaatttatgctctgccctagagccgctttcctggtaggatcctttcatggcgtcttcccaggacctcctgccagctcccattgggagttttgggtcccctccaccccagtaggtgcatacttctgccctccccagccccagctcacaccccccaacacccccaagctggtgagtgaggtggaggagctgtacaagtccatcacagcgctgcgggagaagcttctacaagcggagcagtccctgcgcaacctcaaggacatccacatgagcctggagaaggacgtcactgccatgaccaacagtctcttcatcgaccgccagaagtgcatggcccatcgtacttgctaccccaccattctgcagctggctggctaccagtgagcagcggcacggtgcttccccccaatcccccaaataaacagtgcgttagctttc

SEQ ID NO: 70795 - DNA, 1623 bp, Homo sapiens
ggctgtactggctgggattatgggcataagtgcggatcccagcggcggtcgtgtagctgagcagccctggggcttggttctatgtccctgtggctatgtttccagtgtcctctgggtgtttccaagagcaacaagaaacgaataaatctctgccccgcagcgcctccaccccagagacccggaccaagttcacacaggacaatctgtgccacgcccagcgcgagcgcctggactcggccaacctgtgggtgcttgtggactgcatccttcgcgacacctccgaggacctgggactccagtgtgacgccgtgaacctggccttcgggcgccgctgtgaggaactggaggacgtgcggcacaagctgcagcaccacctgcacaagatgctgcgggaaatcacagatcaggaacacaacgtggtggcactgaaggaggccatcaaggacaaggaggaacctctgcacatagcccagacccggctgtagctgctctcacaccggcccaacatgcagctgtgccgcgatgcagcccagttcaggtactgcctgggcctctgaggcagtcccaggtgcccccatccacctcctcgctgcgaccctctccaataaacactccaatctccacacacacatcccccacaggtgctgagaggggagggagactctgcggccacacacaacatgcaagcacgccttaaacacacagatatagacatgacactgggcaggtcatgggtcgggggcctccccgtgccagggacctgtgcccacgtggtctcaccccaccctgtgctacctcatcttcccgggaggaagctccttcagacaaggtgagctcctggaggccacggggccagagaggccagagagggccattccctgctgccctgagggtgctgtccccacctctggtggaaagtatgacctacgcctgggctacaggcatagatgggccgtccttttgtttcccttgttaacggatgcctggtggccccttctgagcctaagtacctttcttccttccctgcccctcagttccttcaaggaactgggtgcctccttccgtcaaatatcaggaatggaaagaactgagcctggtcggctgaggccagtcctgtcctgtcagggtcgagattgcacgcgggtcactcattcccactcaggcccgcgctccctgggaggaccctcgtaatttatgctctgccctagagccgctttcctggtaggatcctttcatggcgtcttcccaggacctcctgccagctcccattgggagttttgggtcccctccaccccagtaggtgcatacttctgccctccccagccccagctcacaccccccaacacccccaagctggtgagtgaggtggaggagctgtacaagtccatcacagcgctgcgggagaagcttctacaagcggagcagtccctgcgcaacctcaaggacatccacatgagcctggagaaggacgtcactgccatgaccaacagtctcttcatcgaccgccagaagtgcatggcccatcgtacttgctaccccaccattctgcagctggctggctaccagtgagcagcggcacggtgcttccccccaatcccccaaataaacagtgcgttagctttc

SEQ ID NO: 70796 - DNA, 2212 bp, Homo sapiens
  misc_feature (2088)..(2088): n is a, c, g, or t
  misc_feature (2091)..(2091): n is a, c, g, or t
  misc_feature (2094)..(2094): n is a, c, g, or t
  misc_feature (2096)..(2097): n is a, c, g, or t
  misc_feature (2100)..(2101): n is a, c, g, or t
  misc_feature (2103)..(2103): n is a, c, g, or t
  misc_feature (2209)..(2209): n is a, c, g, or t
ggctgtactggctgggattatgggcataagtgcggatcccagcggcggtcgtgtagctgagcagccctggggcttggttctatgtccctgtggctatgtttccagtgtcctctgggtgtttccaagagcaacaagaaacgaataaatctctgccccgcagcgcctccaccccagagacccggaccaagttcacacaggacaatctgtgccacgcccagcgcgagcgcctggactcggccaacctgtgggtgcttgtggactgcatccttcgcgacacctccgaggacctgggactccagtgtgacgccgtgaacctggccttcgggcgccgctgtgaggaactggaggacgtgcggcacaagctgcagcaccacctgcacaaggtggggcaccctgaaccccgaagacggctccggcgcctgcccaccactctgccccctctcatcacctggcctgggccctcaacacctttctcctctgtcccacttatcccgagggaccccagaagcaagtgtcacctctccgtaaacctatgtaaaaccaggtgacactgggtatgatcgcagtgtgttgcaacccccatgactgagcaggaggagctgtggggaggatggaggcaggagctggtctggggagcattgactgcctgggaggtccccaagagtcctggcctggcaggcagggctctgactctagggcctcagcatggcctttaccacctctgagtccccagtccttgagcaggatttgggtcctggtgaccaccaaggatgggggttcttggaccagagctaagagacaacaggctgcctgactctccagagcccgctgggggccccgtgcacattgttcccctcacccacgcctccccagggccactggtcaggaccaccctctggacacagccccaggagctgggtaggaccagactggtctctacattccatatgcccgggcatgggggcacaggcccaaggggcactgtcctgtctgcagatgctgcgggaaatcacagatcaggaacacaacgtggtggcactgaaggaggccatcaaggacaaggaggaacctctgcacatagcccagacccggctgtagctgctctcacaccggcccaacatgcagctgtgccgcgatgcagcccagttcaggtactgcctgggcctctgaggcagtcccaggtgcccccatccacctcctcgctgcgaccctctccaataaacactccaatctccacacacacatcccccacaggtgctgagaggggagggagactctgcggccacacacaacatgcaagcacgccttaaacacacagatatagacatgacactgggcaggtcatgggtcgggggcctccccgtgccagggacctgtgcccacgtggtctcaccccaccctgtgctacctcatcttcccgggaggaagctccttcagacaaggtgagctcctggaggccacggggccagagaggccagagagggccattccctgctgccctgagggtgctgtccccacctctggtggaaagtatgacctacgcctgggctacaggcatagatgggccgtccttttgtttcccttgttaacggatgcctggtggccccttctgagcctaagtacctttcttccttccctgcccctcagttccttcaaggaactgggtgcctccttccgtcaaatatcaggaatggaaagaactgagcctggtcggctgaggccagtcctgtcctgtcagggtcgagattgcacgcgggtcactcattcccactcaggcccgcgctccctgggaggaccctcgtaatttatgctctgccctagagccgctttcctggtaggatcctttcatggcgtcttcccaggacctcctgccagctcccattgggagttttgggtcccctccaccccagtaggtgcatacttctgccctccccagccccagctcacaccccccaacacccccaagctggtgagtgaggtggaggagctgtacaagtccatcacagcgctgcgggagaagcttctacaagcggagcagtccctgcgcaacctcaaggacatccacatgagcctggagcaaccacgccnccnccncnnccnncnccccccccccccaccccccaccacacgcccccccccccccccccccccccccccccccccccccccccccccccccccaccccccccccccccccccccccccccnccc

SEQ ID NO: 70797 - DNA, 838 bp, Homo sapiens
ggctgtactggctgggattatgggcataagtgcggatcccagcggcggtcgtgtagctgagcagccctggggcttggttctatgtccctgtggctatgtttccagtgtcctctgggtgtttccaagagcaacaagaaacgaataaatctctgccccgcagcgcctccaccccagagacccggaccaagttcacacaggacaatctgtgccacgcccagcgcgagcgcctggactcggccaacctgtgggtgcttgtggactgcatccttcgcgacacctccgaggacctgggactccagtgtgacgccgtgaacctggccttcgggcgccgctgtgaggaactggaggacgtgcggcacaagctgcagcaccacctgcacaagatgctgcgggaaatcacagatcaggaacacaacgtggtggcactgaaggaggccatcaaggacaaggaggaacctctgcacatagcccagacccggctgtagctgctctcacaccggcccaacatgcagctgtgccgcgatgcagcccagttcagccccagctcacaccccccaacacccccaagctggtgagtgaggtggaggagctgtacaagtccatcacagcgctgcgggagaagcttctacaagcggagcagtccctgcgcaacctcaaggacatccacatgagcctggagaaggacgtcactgccatgaccaacagtctcttcatcgaccgccagaagtgcatggcccatcgtacttgctaccccaccattctgcagctggctggctaccagtgagcagcggcacggtgcttccccccaatcccccaaataaacagtgcgttagctttc

SEQ ID NO: 70798 - DNA, 792 bp, Homo sapiens
  misc_feature (792)..(792): n is a, c, g, or t
ggctgtactggctgggattatgggcataagtgcggatcccagcggcggtcgtgtagctgagcagccctggggcttggttctatgtccctgtggctatgtttccagtgtcctctgggtgtttccaagagcaacaagaaacgaataaatctctgggaccccgtcgatggcgcccagtacctgcgtctcaggaagaggttctggtggggcctccgcctgaggccgcgcccctggggcctgtcccgcgtccacgtgaacgcggagcgcagcattcaccatcccctccctgaaacagcggtccccgaggtgctccacaggcagggccgagctgggcaagggggagcccagcccctgaacgggccgccctgagcggcggggatgcaagaagagctcgccggctccaccagcccctaccccagatgcaggacctcagaccagagaggacctggagcccccgccccacggttgccaggaggcggacaggggcagctcctgggggggctaccgccccgaggccgttccgccagaacttgagcgacttgggaaggcgcagtgccctgcccttgaagaggaacctgtgtgctggaggcagcagcctgggagctcctcctccgaggacaccgcagaggcgagtgactctggcagcgcagcgctggctttcccgtccgcggaggagagctgtggggctgggtgagctggaccagtggagcacgggtggctgctctcggcctcctatggggagtggacagttagggggttgtccccatgcccagccggatgctggccactctgggn

SEQ ID NO: 70799 - DNA, 2317 bp, Homo sapiens
cagccttaccccttactggaggctgcaggaccctctacacacagacagctgtccagcacggaaggtgggctgaggccagggtgaacatgccagctaatgggacatcaccccagagattccctgccctgattccaggagaacctggcagatcttttgaggggtccgtgtcattcgaggatgtggctgtcgatttcacccgacaggagtggcacagactggaccctgctcagaggaccatgcacaaggatgtgatgctggagacctacagcaacctggcatctgtgggcctctgcgtggccaaaccagagatgatcttcaagttggagcgaggagaagagctgtggatattagaggaggaatcctcaggccatggttactcaggatctctctcactgctgtgtggcaatggttctgttggggataatgccctcaggcatgataatgaccttcttcaccatcagaagattcaaacattggatcaaaatgttgaatataatggatgcaggaaagccttccatgagaaaacaggctttgttagacgtaaaagaacacccagaggagataaaaactttgaatgtaatgaatgtgggaaagcttactgtaggaagtcaaaccttgttgaacatctgagaatacacacaggagagagaccctatgaatgcggtgaatgtgcaaaaaccttcagtgcaagatcatacctcattgctcatcagaaaactcacacaggggagaggccctttgaatgtaatgaatgtgggaaatcttttggcaggaagtcacaactcatcctacatacaagaacacacactggagagagaccctatgaatgtactgaatgtgggaaaaccttttctgagaaggcaaccctcacgattcatcagagaactcacacaggggagaaaccctatgaatgtagtgaatgtgggaaaacatttcgtgtaaagatatcccttacccaacaccacagaactcatacaggggagaaaccttatgaatgtggggagtgtgggaaaaacttccgtgcaaagaaatccctaaatcagcatcaaagaattcacacaggtgagaaaccctatgagtgtggtgaatgtgggaaattcttccgaatgaagatgactctcaataatcatcaaagaactcacacaggtgaaaagccctatcagtgtaatgaatgtgggaaatctttcagggtgcactcatctcttgggatccatcagagaattcacacaggagagaaaccttacgaatgtaatgagtgtggtaatgctttctatgtgaaagcacgcctaattgaacatcagaggatgcattcaggagagaaaccctacgaatgtagtgaatgtgggaaaatcttcagtatgaagaaatccctttgtcaacaccggagaactcacacaggagagaaaccttatgaatgtagtgaatgtggaaatgccttctatgtgaaagtacgcctcattgaacatcagcgaattcacacaggagagagaccctttgagtgtcaagaatgtgggaaagctttctgccggaaagcacacctcacagaacatcagagaactcacataggctggtcctggcgttgtacaatgaagaaagcctctcactgaagacttccctcaccattggatcaagctccttgggggcatatgatcaccagggcaccacagtgtgctgtgaaaatttggcacctacatttgtatcaaagtatgtcctgatccccttaggatagctcattgtttttattcagatttccctaattagtggtgtgtgaacatcttatctgttgattggctatttgggttttttcttctgtgcattgactgttcatgtcctctgctcattgttttcaaatgggctgttcatctcttgctttttggttcacatgttgttttttaacatatgagaatatataaaaatcctttttttttcagtcatatgtgttgcaaatatcttctcccagactgtcgttggttttttaaattttgccatctgttttcttctgctgaagttttatattttatttatttattttttattttttgagatggagtctcactctgtcacccaggctggagtgcaatggcatgacctcagctcatttcaaccttcgcctcccgggttcaagcgattctcctgcctcagtctcccaagtagctgggattacaggtgtgcaccaccatgcctggctaatttttgtatttttagtaaagacgggtttcaccatgttggccaggctggtctctaactcctgacctcaggtgatccacctgcctcggcctccaaaagtgttgggattacaggtgtgagccaccgtgcg

SEQ ID NO: 70800 - DNA, 157 bp, Homo sapiens
gcataaatgagatacaggaaagcacttagcatggcacgtggtaagttgcaagtattcagttaactgaagcacttaccatttatgccttcagttcattcaccacctcattaattgagaatcgagtggtttagagaacatacttagttgggaaatttag

SEQ ID NO: 70801 - DNA, 198 bp, Homo sapiens
gcccggcgaccgtaggcatcttctggaccacaaaatagaacattgccaggcaaggcagggcatttggggaatttgagagaaagcaggatgagtgatggaattgggagggtggcacaagatgttaaacagcatatcttagtcctcatctagggtataaaacaggacccatggactctagcatcctggaatgacagaggg

SEQ ID NO: 70802 - DNA, 3141 bp, Homo sapiens
  misc_feature (6)..(6): n is a, c, g, or t
  misc_feature (11)..(11): n is a, c, g, or t
  misc_feature (90)..(91): n is a, c, g, or t
  misc_feature (97)..(97): n is a, c, g, or t
  misc_feature (103)..(104): n is a, c, g, or t
tgcttntatanaagcatttaatgcaacagtgttcatctgagtattgcttttgagtgccaaaataccatgtttttcacactccaaactctnnggaagncttccnnagacaacttgtcccttatttataatactatatattaaagtaactgaaagtattcaaaataatgcttactttgtgcagagtccatgaactctaaccaaaatacataaatgtcaaatttgagcaatacattttgattgattttaaaattccatttgaggcactacttttctgaatagatgcccaaggaaaatattttaaaatattgttgtattaaaaaattgtttcctatagaatctgaaaagttctttaggtagacttttagtaaaatgtttgaacagtttaaatgctatttcagactgtcagaatgatgaatgtttttaaattattttcataatgatttatcactccagtttacagtacttgaaaaatttttttcgcttcacctaaataactggcatttttgtgttatgttcttttcctcgttttatactctgctctgaagcactttcaaattaaaaaaagaacagtattgtattctagggccattagtgaatgtgcatgagctattatagtcaatgaaataagcattatatgattgaagattaactaagaaaatggattatggtgtaattaaaaacaccaagataggcgggatgcagtggtttatgcctgtaatcccagcactttaagagaccaaggcaggcagattacctgaggttaggagttcgagaccagcctggctaacatggcgaaactctgtctctactaaaaatacaaaaattagccgagcgtggtggcaggcgtctgtagtcccagctacttgggaggctgaggcaggagaattgcctgaacccaggaggaggaggttccagtgagcctagatcatgccactgtactccatcctgggtgacaagagcaagactcttgtctcaaaaaaacaaaacaaaacaaaacaaaaacaccaagatattcctggaaaagctatgaaaatatgtttttcagttaaggggaagcacttatcaatgctgccagtcctggtaaagattgtcaactctaacataatataaagcaggcatttcttgtaataaatatgaagaggatattagccttgatcttagcataactctcttccaggtaggactccagcttctgaaagtaattttgtaatgctcatcaactgaagatgactgtaaagcttggcaccagttcctggaggcagccatgtttctgattaaagtctgggcctagagagctgtatggaaaggtttggaatagaggtgatttagcctaaagaaaattgctaaaccatgggttacacactggtggcctgtagtcctattttgttagacacagacaatggattttatttgtttttcatatttgaattaatttctgaattcttgaatattggcagattatgctacaggaatctaaattactctcatttctgcatgtcattaaaaaagtagagatgagtagcaggccccttttccctggggcatgtgcttcccagctacatacacagcacccaccacaccagagtttccctacctggcaactaccagttatcatcactccttaagcagctgttttcttacagtgaagaagttccgtttccatggtgctatcaaaagtaagaaaaggaactatagtttgagaggctgtgttcttaacccattgatgctcctaatgggccctgaagatatttgaccttgtgaccatgtgtaataaggtgatacatgttcatcaaattgtggtgtcctcctcccctgactttcaaatggaattcagatacaatttttacccttattacgattacctacaattataattatgctacttctaagtatatgacctggggcaagtttcttgacctctctatgcctcacattcctcaaccataaataggggataaaaatagtacctatatcatagagttgtcaaaagaattacatgagttaatgtgtggaaagcactgaagatagtgcctggtaaatacaatgtaccatgtaagtgttcactgttgcagtcctcatttattttctgattatactaacatttcacttattctgtgttgctcatgtcacctcctaatttgtaagtgactggtagaaagaaacttgtcccaagggtatctgaccttcacccacactcagcacttccatcagtctgcatcagttttagggcctggagatgtatttgcacatattgaaggaggtaaataactacagtgaataagataacattcagaaattcaggactgcgaccttagagatcatctagtccaggagttggcaagctttttctgtatgggaccagactgtaaatattttggctttgtggccatattgtctctgtggcaactactcaactctgctggtgcaatgcaaaagaagccatgggttatatggaatgaataggtgtggctgtgttccaataacactttatttatagacactgaaatttgaattgcatataattttcacatgtcattaaatattattcttcttttgattttttttcaaccttttaaaaatgtaaaaaccattctcagctctgggctataaaaaacaggtggaagatttcacccaggaattccacctggggatttttgttgaacagtgaagctacctgggccccactccaaacccattgaataaaaatctctgggtggtggggcaatggaatctgtgctgtgaacatgcgtgtgatccctaccagtgtggctctagggaccacactttaagaaactacccaagtgtggagactttatggccctcctcacagatctaaaaatgatttattaaggttggttataacaagtaccacactgcaaatatgaatatgatcacttttgtcttaaattacttaaatttactcttcacattctcttatttttattatcaaaatttcttgtagacaaaggtcattattttcttctactatgtttaaggaatgtgacagcaccttgaacttaccctaaaatcactgtacattagagaaatcctatttcatgttttcatcaatgtgggaatatgtgcatgtttagtgacattctttgtggtggcaaaaagtaaaataaactctgaaaataactt

SEQ ID NO: 70803 - DNA, 583 bp, Homo sapiens
gaaactccgtctcaaaaaaatgaaaaacagaagattgctaatcagaaacatgggatttgagcctctaaatagctattgactgattaaatacaatgtaaaatgtatcctttgggacttatcttcctctggggcctgttctggaattgcaggattgggttatgagtatgaataaacatgttagcaagcatgttgtgctgagaagtattgaagctgtgtaatatagtgaggagttatagatttcagtgtcagatacaacttggtttaaatcctggcttggctatatattagttgtttaagaagccatttcagctagctcacaaattcgttaagtgtggcctgtggacccttgggtctctaaggtggtacagaggcaatggagggtaaaactgctcgtgccttagcatgaaccaagggaatgacactagaatatactgattatcattgagttcttcaccaacatgcctgcacagtaaaataaaatgccagtttcacttaactctcaatcctttagaatatccattatttgaaaagtctggtgggattacaggcgtgagccactgcgtccggcctgagactccccatc

SEQ ID NO: 70804 - DNA, 1670 bp, Homo sapiens
gacacactcctctacaacaccagagactcccaaacacaaggccttatattgactcatttcagctcacatcctggcgactctcaagagagaaacctcagagtgactaaaatctccataatgagaagacatgtacattcagtatctattttggcattttccccaatacatctctgctcatctgactcttatcttggcatctgcttcctggtggatctgaactgacccataagccacgcttactggtgattttccagaagatgaatccggcctcggcgccccctccgctcccgccgcctgggcagcaagtgatccacgtcacgcaggacctagacacagacctcgaagccctcttcaactctgtcatgaatccgaagcctagctcgtggcggaagaagatcctgccggagtctttctttaaggagcctgattcgggctcgcactcgcgccagtccagcaccgactcgtcgggcggccacccggggcctcgactggctgggggtgcccagcatgtccgctcgcactcgtcgcccgcgtccctgcagctgggcaccggcgcgggtgctgcgggtagccccgcgcagcagcacgcgcacctccgccagcagtcctacgacgtgaccgacgagctgccactgcccccgggctgggagatgaccttcacggccactggccagaggtacttcctcaatcacatagaaaaaatcaccacatggcaagaccctaggaaggcgatgaatcagcctctgaatcatatgaacctccaccctgccgtcagttccacaccagtgcctcagaggtccatggcagtatcccagccaaatctcgtgatgaatcaccaacaccagcagcagatggcccccagtaccctgagccagcagaaccaccccactcagaacccacccgcagggctcatgagtatgcccaatgcgctgaccactcagcagcagcagcagcagaaactgcggcttcagagaatccagatggagagagaaaggattcgaatgcgccaagaggagctcatgaggcaggaagctgccctctgtcgacagctccccatggaagctgagactcttgccccagttcaggctgctgtcaacccacccacgatgaccccagacatgagatccatcactaataatagctcagatcctttcctcaatggagggccatatcattcgagggagcagagcactgacagtggcctggggttagggtgctacagtgtccccacaactccggaggacttcctcagcaatgtggatgagatggatacaggagaaaacgcaggacaaacacccatgaacatcaatccccaacagacccgtttccctgatttccttgactgtcttccaggaacaaacgttgacttaggaactttggaatctgaagacctgatccccctcttcaatgatgtagagtctgctctgaacaaaagtgagccctttctaacctggctgtaatcactaccattgtaacttggatgtagccatgaccttacatttcctgggcctcttggaaaaagtgatggagcagagcaagtctgcaggtgcaccacttcccgcctccatgactcgtgctccctcctttttatgttgccagtttaatcattgcctggttttgattgagagtaacttaagttaaacataaataaatattctattttcattttc

SEQ ID NO: 70805 - DNA, 5053 bp, Homo sapiens
  misc_feature (2587)..(2587): n is a, c, g, or t
aactttgtttatgggacagtccgggagctgctgcggccgcgctgtctgcttctcctgcgcctccttttcgcccagcactagcgccttaggccagctcgggggatgtgagagccgaagcccttagactgccaggcacagagtcgggtcgggatttgtcagccaagcctcggctccagctccgcaatctcgggactcacccgagcgacccaggcccgacggcaagttcgggcgggacggcggccgccgcgcgctcaggctcagcttcgctgcccgcccagaagatgaatccggcctcggcgccccctccgctcccgccgcctgggcagcaagtgatccacgtcacgcaggacctagacacagacctcgaagccctcttcaactctgtcatgaatccgaagcctagctcgtggcggaagaagatcctgccggagtctttctttaaggagcctgattcgggctcgcactcgcgccagtccagcaccgactcgtcgggcggccacccggggcctcgactggctgggggtgcccagcatgtccgctcgcactcgtcgcccgcgtccctgcagctgggcaccggcgcgggtgctgcgggtagccccgcgcagcagcacgcgcacctccgccagcagtcctacgacgtgaccgacgagctgccactgcccccgggctgggagatgaccttcacggccactggccagaggtacttcctcaatcacatagaaaaaatcaccacatggcaagaccctaggaaggcgatgaatcagcctctgaatcatatgaacctccaccctgccgtcagttccacaccagtgcctcagaggtccatggcagtatcccagccaaatctcgtgatgaatcaccaacaccagcagcagatggcccccagtaccctgagccagcagaaccaccccactcagaacccacccgcagggctcatgagtatgcccaatgcgctgaccactcagcagcagcagcagcagaaactgcggcttcagagaatccagatggagagagaaaggattcgaatgcgccaagaggagctcatgaggcaggaagctgccctctgtcgacagctccccatggaagctgagactcttgccccagttcaggctgctgtcaacccacccacgatgaccccagacatgagatccatcactaataatagctcagatcctttcctcaatggagggccatatcattcgagggagcagagcactgacagtggcctggggttagggtgctacagtgtccccacaactccggaggacttcctcagcaatgtggatgagatggatacaggagaaaacgcaggacaaacacccatgaacatcaatccccaacagacccgtttccctgatttccttgactgtcttccaggaacaaacgttgacttaggaactttggaatctgaagacctgatccccctcttcaatgatgtagagtctgctctgaacaaaagtgagccctttctaacctggctgtaatcactaccattgtaacttggatgtagccatgaccttacatttcctgggcctcttggaaaaagtgatggagcagagcaagtctgcaggtgcaccacttcccgcctccatgactcgtgctccctcctttttatgttgccagtttaatcattgcctggttttgattgagagtaacttaagttaaacataaataaatattctattttcattttctgcaagcctgcgttcttgtgacagattatacagaattgtgtctgcaggattgattatgcagaatacttttctctttcttctctgctgccccatggctaagctttatgggtgttaattgaaatttatacaccaattgattttaaaccataaaaagctgaccacaggcagttacttctgagggcatcttggtccaggaaatgtgcacaaaattcgacctgatttacagtttcaaaaactgtattgatgacagtagtaccaaatgctttaaaaactatttaacttgagctttaaaaatcattgtatggatagtaaaattctactgtatggaatacaatgtaattttgaatccatgctggctctgatggctcttattagtctgtatttataaaggcacacagtcctattgtagcttatctttcgttattttactgcagagcatctagacaacttagtccctccagcgggaaagtagcagcagcagcattagtcacagttcttacactacagatcttgtgaaagagaccagtttggtactaattatgagcattttattcaaacaaaagtttttgaaatattacaactggggatttaaaaaattgcagcttagaatctgatggtttttttttttcttgatgttgtttgtttgtttttgagatcgagttttgctcttgttgtccaggctggaatgcaatggcacaatctcggctcactgcaacctctgccttctgggttcaagcgattctcctgccttagcctcccgagtagctgggattacaggcgcctgccaccacgtccggctaattttttgtattttgagtagagacggggtttcaccataatggtcaggctgttctcaaactcctgatctcaggtgatccacccatctcggcctnccaaagtgctgggattactggcgtgagccaccgcacccggccttgatgtttattttataaagcactgtaattttgtagctgatgacaaaaggcagccaaatgtttttgataaatcagtggcaactgtatttttgtcttttgaaataactctgaaaacatcaggacaacatagatttcaacctgatagcacaccacacacagtgagctgttgctttttaaattctgaagccttgtcaggtttgcttcctagatttcaagtgtttaaaataattctatctatgaaactgaaggatgaagcagatctctgactgacatgtaaaaaaaaatgccctttgagggtgtatggtggagataaatgtttctgaattcagtaaaattgattcctaagtatattatcctaatcctgtttgctacagttggtataaaaaggcatgaaatatgtattcaatacctcttatgtaaccaaaaccatttttaattagcttttaaggactgagagagcatcatgttcaactggcatgcagtctgcctgcattgccaatgaagtcctcaactgtttaatattttgaactaatattatttataatctatgaatttaatcttttttgaaagactttaataatttgagtctctgagaggatactttcaatttccatgggggacttatttgttggggatcttaaataagattccttttgatctaccggaatatacatgtacagagtacattggatcatgttggaaagaaggcaagtgaaaaggtcagagatgaagtagcgaagttatggaatatcgtggaaaggatactagttgtgaaatggaaagagacaagttatagtaccccaaaagcaaaacaagcaggagatgcaagagatgccccaaaaggacaaagcaacaattttctgttgccacctttataccggaagactctgttgtagaagaaaagaaggctttggtgcaccttatgtgggaggaggaggggcagggcatgctgatgctgagcgtacaggcagacaagagcgtagcctgctgttgcctccatcactatgaaatgacttattttacctgaaggacccatggtttatgttcctctaattcctttcactctccctaagccctctgagagagatgaagatagatgattttattgctactaaattgaagggagcactatttctttttgtcttttgttagcaaaaaattgcaaaaagaattgtacattcttgctaaaaataaataaataaataaaaaattaaaaaaacaagggacctaacaaaactcagcagtgttactgtattttttaaaaatatttttatagactcattttcaggttattaaatgtaagagaaacagatacccctcttttttaaagtaggtaaatcattgatgatttatattaccaatttttagaagtaattttctagtaagcttgtggcatcagaaaatactagaagatttttttagttaaattagttagaacatttatgaatgaatataataaatattttttcagaataaaatatggaccctttgtgtttactaatagataaagccagatataatttttgtttttaaggccacaaaatatggcctttgttaaagaacactaaagttagaaatctaaagttagagcaactttttaatggctatttcctattattgtaagtgttaaaacccctgcagaattcttgataaggtgctatttatactatatttcttattataagataactgtctttagtcttcttagtactagtctttttagtactaaatcaatcagcaaacatcatcatttcaccccaaaattttgtcacagaaaaggcgtatcaaatgaaaaataatttcagagatctttctttcaagatattttttcctgataaaatacattgtcttgaagtaaatacattgtcaaaacctaattgcaattctgttaaatctaagtaatttttagacagtgtttcaccgtattatttaggatgtgaaatgccatttctttcactgattacaccatatacaggaaacaggtaaaacagtgaaaactttattgtgctggttgatgccaacttggttgaaaagctctctgcagaagaagtgatctagactgacagaagtgttgctaattacaagttgtgttctcatgacgtaattagaaagtaacttctcaaagtacaacttttatgaaaaaaataagctgttaaaaaaaggaaatcgtaggttaatttaattgggaaaatgggcaattgacagagaccattttcctaacacatatatgtgctagtactttaactttttaaaattttacttctacgttttgtaatataaaaatttctattttaagtttagaatgttatacgtaccgaaagtatgcagccaaatcgatcagatcaaaccattttacctggagtttggtactggtttttacttctctgaatctgtataagaaaaataaagacaattgaacttcca

SEQ ID NO: 70806 - DNA, 5501 bp, Homo sapiens
  misc_feature (3035)..(3035): n is a, c, g, or t
aactttgtttatgggacagtccgggagctgctgcggccgcgctgtctgcttctcctgcgcctccttttcgcccagcactagcgccttaggccagctcgggggatgtgagagccgaagcccttagactgccaggcacagagtcgggtcgggatttgtcagccaagcctcggctccagctccgcaatctcgggactcacccgagcgacccaggcccgacggcaagttcgggcgggacggcggccgccgcgcgctcaggctcagcttcgctgcccgcccaggtagtgcccgctggagctcgcgcgctcatccggcaccactccagggctccaggctcctcgggcttccggagtcgagacgtggtggagttggctcgggctgaacttctttcggggggctgcctgtcctggaatcgtgcgacctttcctttgccatcctgcggttcagcaagccccgagtgcagttattccctccacccctcgccctatcttctcctcctccaggcaacttctttgcttcaagaaagttgcataattctcgaggccaggagggacccctcccccatcctgctggtcttaccgctgagtgtctgggatctccaggcgggcaattatctgtctcctcgtttccttttccctctattctttctcccaccatctcgccctctcaccctgtaaccctcttacccacttcctccgactttaaataaaaggctgatctgaccttcttaagatgaatccggcctcggcgccccctccgctcccgccgcctgggcagcaagtgatccacgtcacgcaggacctagacacagacctcgaagccctcttcaactctgtcatgaatccgaagcctagctcgtggcggaagaagatcctgccggagtctttctttaaggagcctgattcgggctcgcactcgcgccagtccagcaccgactcgtcgggcggccacccggggcctcgactggctgggggtgcccagcatgtccgctcgcactcgtcgcccgcgtccctgcagctgggcaccggcgcgggtgctgcgggtagccccgcgcagcagcacgcgcacctccgccagcagtcctacgacgtgaccgacgagctgccactgcccccgggctgggagatgaccttcacggccactggccagaggtacttcctcaatcacatagaaaaaatcaccacatggcaagaccctaggaaggcgatgaatcagcctctgaatcatatgaacctccaccctgccgtcagttccacaccagtgcctcagaggtccatggcagtatcccagccaaatctcgtgatgaatcaccaacaccagcagcagatggcccccagtaccctgagccagcagaaccaccccactcagaacccacccgcagggctcatgagtatgcccaatgcgctgaccactcagcagcagcagcagcagaaactgcggcttcagagaatccagatggagagagaaaggattcgaatgcgccaagaggagctcatgaggcaggaagctgccctctgtcgacagctccccatggaagctgagactcttgccccagttcaggctgctgtcaacccacccacgatgaccccagacatgagatccatcactaataatagctcagatcctttcctcaatggagggccatatcattcgagggagcagagcactgacagtggcctggggttagggtgctacagtgtccccacaactccggaggacttcctcagcaatgtggatgagatggatacaggagaaaacgcaggacaaacacccatgaacatcaatccccaacagacccgtttccctgatttccttgactgtcttccaggaacaaacgttgacttaggaactttggaatctgaagacctgatccccctcttcaatgatgtagagtctgctctgaacaaaagtgagccctttctaacctggctgtaatcactaccattgtaacttggatgtagccatgaccttacatttcctgggcctcttggaaaaagtgatggagcagagcaagtctgcaggtgcaccacttcccgcctccatgactcgtgctccctcctttttatgttgccagtttaatcattgcctggttttgattgagagtaacttaagttaaacataaataaatattctattttcattttctgcaagcctgcgttcttgtgacagattatacagaattgtgtctgcaggattgattatgcagaatacttttctctttcttctctgctgccccatggctaagctttatgggtgttaattgaaatttatacaccaattgattttaaaccataaaaagctgaccacaggcagttacttctgagggcatcttggtccaggaaatgtgcacaaaattcgacctgatttacagtttcaaaaactgtattgatgacagtagtaccaaatgctttaaaaactatttaacttgagctttaaaaatcattgtatggatagtaaaattctactgtatggaatacaatgtaattttgaatccatgctggctctgatggctcttattagtctgtatttataaaggcacacagtcctattgtagcttatctttcgttattttactgcagagcatctagacaacttagtccctccagcgggaaagtagcagcagcagcattagtcacagttcttacactacagatcttgtgaaagagaccagtttggtactaattatgagcattttattcaaacaaaagtttttgaaatattacaactggggatttaaaaaattgcagcttagaatctgatggtttttttttttcttgatgttgtttgtttgtttttgagatcgagttttgctcttgttgtccaggctggaatgcaatggcacaatctcggctcactgcaacctctgccttctgggttcaagcgattctcctgccttagcctcccgagtagctgggattacaggcgcctgccaccacgtccggctaattttttgtattttgagtagagacggggtttcaccataatggtcaggctgttctcaaactcctgatctcaggtgatccacccatctcggcctnccaaagtgctgggattactggcgtgagccaccgcacccggccttgatgtttattttataaagcactgtaattttgtagctgatgacaaaaggcagccaaatgtttttgataaatcagtggcaactgtatttttgtcttttgaaataactctgaaaacatcaggacaacatagatttcaacctgatagcacaccacacacagtgagctgttgctttttaaattctgaagccttgtcaggtttgcttcctagatttcaagtgtttaaaataattctatctatgaaactgaaggatgaagcagatctctgactgacatgtaaaaaaaaatgccctttgagggtgtatggtggagataaatgtttctgaattcagtaaaattgattcctaagtatattatcctaatcctgtttgctacagttggtataaaaaggcatgaaatatgtattcaatacctcttatgtaaccaaaaccatttttaattagcttttaaggactgagagagcatcatgttcaactggcatgcagtctgcctgcattgccaatgaagtcctcaactgtttaatattttgaactaatattatttataatctatgaatttaatcttttttgaaagactttaataatttgagtctctgagaggatactttcaatttccatgggggacttatttgttggggatcttaaataagattccttttgatctaccggaatatacatgtacagagtacattggatcatgttggaaagaaggcaagtgaaaaggtcagagatgaagtagcgaagttatggaatatcgtggaaaggatactagttgtgaaatggaaagagacaagttatagtaccccaaaagcaaaacaagcaggagatgcaagagatgccccaaaaggacaaagcaacaattttctgttgccacctttataccggaagactctgttgtagaagaaaagaaggctttggtgcaccttatgtgggaggaggaggggcagggcatgctgatgctgagcgtacaggcagacaagagcgtagcctgctgttgcctccatcactatgaaatgacttattttacctgaaggacccatggtttatgttcctctaattcctttcactctccctaagccctctgagagagatgaagatagatgattttattgctactaaattgaagggagcactatttctttttgtcttttgttagcaaaaaattgcaaaaagaattgtacattcttgctaaaaataaataaataaataaaaaattaaaaaaacaagggacctaacaaaactcagcagtgttactgtattttttaaaaatatttttatagactcattttcaggttattaaatgtaagagaaacagatacccctcttttttaaagtaggtaaatcattgatgatttatattaccaatttttagaagtaattttctagtaagcttgtggcatcagaaaatactagaagatttttttagttaaattagttagaacatttatgaatgaatataataaatattttttcagaataaaatatggaccctttgtgtttactaatagataaagccagatataatttttgtttttaaggccacaaaatatggcctttgttaaagaacactaaagttagaaatctaaagttagagcaactttttaatggctatttcctattattgtaagtgttaaaacccctgcagaattcttgataaggtgctatttatactatatttcttattataagataactgtctttagtcttcttagtactagtctttttagtactaaatcaatcagcaaacatcatcatttcaccccaaaattttgtcacagaaaaggcgtatcaaatgaaaaataatttcagagatctttctttcaagatattttttcctgataaaatacattgtcttgaagtaaatacattgtcaaaacctaattgcaattctgttaaatctaagtaatttttagacagtgtttcaccgtattatttaggatgtgaaatgccatttctttcactgattacaccatatacaggaaacaggtaaaacagtgaaaactttattgtgctggttgatgccaacttggttgaaaagctctctgcagaagaagtgatctagactgacagaagtgttgctaattacaagttgtgttctcatgacgtaattagaaagtaacttctcaaagtacaacttttatgaaaaaaataagctgttaaaaaaaggaaatcgtaggttaatttaattgggaaaatgggcaattgacagagaccattttcctaacacatatatgtgctagtactttaactttttaaaattttacttctacgttttgtaatataaaaatttctattttaagtttagaatgttatacgtaccgaaagtatgcagccaaatcgatcagatcaaaccattttacctggagtttggtactggtttttacttctctgaatctgtataagaaaaataaagacaattgaacttcca

SEQ ID NO: 70807 - DNA, 4993 bp, Homo sapiens
  misc_feature (2527)..(2527): n is a, c, g, or t
aactttgtttatgggacagtccgggagctgctgcggccgcgctgtctgcttctcctgcgcctccttttcgcccagcactagcgccttaggccagctcgggggatgtgagagccgaagcccttagactgccaggcacagagtcgggtcgggatttgtcagccaagcctcggctccagctccgcaatctcgggactcacccgagcgacccaggcccgacgaagatgaatccggcctcggcgccccctccgctcccgccgcctgggcagcaagtgatccacgtcacgcaggacctagacacagacctcgaagccctcttcaactctgtcatgaatccgaagcctagctcgtggcggaagaagatcctgccggagtctttctttaaggagcctgattcgggctcgcactcgcgccagtccagcaccgactcgtcgggcggccacccggggcctcgactggctgggggtgcccagcatgtccgctcgcactcgtcgcccgcgtccctgcagctgggcaccggcgcgggtgctgcgggtagccccgcgcagcagcacgcgcacctccgccagcagtcctacgacgtgaccgacgagctgccactgcccccgggctgggagatgaccttcacggccactggccagaggtacttcctcaatcacatagaaaaaatcaccacatggcaagaccctaggaaggcgatgaatcagcctctgaatcatatgaacctccaccctgccgtcagttccacaccagtgcctcagaggtccatggcagtatcccagccaaatctcgtgatgaatcaccaacaccagcagcagatggcccccagtaccctgagccagcagaaccaccccactcagaacccacccgcagggctcatgagtatgcccaatgcgctgaccactcagcagcagcagcagcagaaactgcggcttcagagaatccagatggagagagaaaggattcgaatgcgccaagaggagctcatgaggcaggaagctgccctctgtcgacagctccccatggaagctgagactcttgccccagttcaggctgctgtcaacccacccacgatgaccccagacatgagatccatcactaataatagctcagatcctttcctcaatggagggccatatcattcgagggagcagagcactgacagtggcctggggttagggtgctacagtgtccccacaactccggaggacttcctcagcaatgtggatgagatggatacaggagaaaacgcaggacaaacacccatgaacatcaatccccaacagacccgtttccctgatttccttgactgtcttccaggaacaaacgttgacttaggaactttggaatctgaagacctgatccccctcttcaatgatgtagagtctgctctgaacaaaagtgagccctttctaacctggctgtaatcactaccattgtaacttggatgtagccatgaccttacatttcctgggcctcttggaaaaagtgatggagcagagcaagtctgcaggtgcaccacttcccgcctccatgactcgtgctccctcctttttatgttgccagtttaatcattgcctggttttgattgagagtaacttaagttaaacataaataaatattctattttcattttctgcaagcctgcgttcttgtgacagattatacagaattgtgtctgcaggattgattatgcagaatacttttctctttcttctctgctgccccatggctaagctttatgggtgttaattgaaatttatacaccaattgattttaaaccataaaaagctgaccacaggcagttacttctgagggcatcttggtccaggaaatgtgcacaaaattcgacctgatttacagtttcaaaaactgtattgatgacagtagtaccaaatgctttaaaaactatttaacttgagctttaaaaatcattgtatggatagtaaaattctactgtatggaatacaatgtaattttgaatccatgctggctctgatggctcttattagtctgtatttataaaggcacacagtcctattgtagcttatctttcgttattttactgcagagcatctagacaacttagtccctccagcgggaaagtagcagcagcagcattagtcacagttcttacactacagatcttgtgaaagagaccagtttggtactaattatgagcattttattcaaacaaaagtttttgaaatattacaactggggatttaaaaaattgcagcttagaatctgatggtttttttttttcttgatgttgtttgtttgtttttgagatcgagttttgctcttgttgtccaggctggaatgcaatggcacaatctcggctcactgcaacctctgccttctgggttcaagcgattctcctgccttagcctcccgagtagctgggattacaggcgcctgccaccacgtccggctaattttttgtattttgagtagagacggggtttcaccataatggtcaggctgttctcaaactcctgatctcaggtgatccacccatctcggcctnccaaagtgctgggattactggcgtgagccaccgcacccggccttgatgtttattttataaagcactgtaattttgtagctgatgacaaaaggcagccaaatgtttttgataaatcagtggcaactgtatttttgtcttttgaaataactctgaaaacatcaggacaacatagatttcaacctgatagcacaccacacacagtgagctgttgctttttaaattctgaagccttgtcaggtttgcttcctagatttcaagtgtttaaaataattctatctatgaaactgaaggatgaagcagatctctgactgacatgtaaaaaaaaatgccctttgagggtgtatggtggagataaatgtttctgaattcagtaaaattgattcctaagtatattatcctaatcctgtttgctacagttggtataaaaaggcatgaaatatgtattcaatacctcttatgtaaccaaaaccatttttaattagcttttaaggactgagagagcatcatgttcaactggcatgcagtctgcctgcattgccaatgaagtcctcaactgtttaatattttgaactaatattatttataatctatgaatttaatcttttttgaaagactttaataatttgagtctctgagaggatactttcaatttccatgggggacttatttgttggggatcttaaataagattccttttgatctaccggaatatacatgtacagagtacattggatcatgttggaaagaaggcaagtgaaaaggtcagagatgaagtagcgaagttatggaatatcgtggaaaggatactagttgtgaaatggaaagagacaagttatagtaccccaaaagcaaaacaagcaggagatgcaagagatgccccaaaaggacaaagcaacaattttctgttgccacctttataccggaagactctgttgtagaagaaaagaaggctttggtgcaccttatgtgggaggaggaggggcagggcatgctgatgctgagcgtacaggcagacaagagcgtagcctgctgttgcctccatcactatgaaatgacttattttacctgaaggacccatggtttatgttcctctaattcctttcactctccctaagccctctgagagagatgaagatagatgattttattgctactaaattgaagggagcactatttctttttgtcttttgttagcaaaaaattgcaaaaagaattgtacattcttgctaaaaataaataaataaataaaaaattaaaaaaacaagggacctaacaaaactcagcagtgttactgtattttttaaaaatatttttatagactcattttcaggttattaaatgtaagagaaacagatacccctcttttttaaagtaggtaaatcattgatgatttatattaccaatttttagaagtaattttctagtaagcttgtggcatcagaaaatactagaagatttttttagttaaattagttagaacatttatgaatgaatataataaatattttttcagaataaaatatggaccctttgtgtttactaatagataaagccagatataatttttgtttttaaggccacaaaatatggcctttgttaaagaacactaaagttagaaatctaaagttagagcaactttttaatggctatttcctattattgtaagtgttaaaacccctgcagaattcttgataaggtgctatttatactatatttcttattataagataactgtctttagtcttcttagtactagtctttttagtactaaatcaatcagcaaacatcatcatttcaccccaaaattttgtcacagaaaaggcgtatcaaatgaaaaataatttcagagatctttctttcaagatattttttcctgataaaatacattgtcttgaagtaaatacattgtcaaaacctaattgcaattctgttaaatctaagtaatttttagacagtgtttcaccgtattatttaggatgtgaaatgccatttctttcactgattacaccatatacaggaaacaggtaaaacagtgaaaactttattgtgctggttgatgccaacttggttgaaaagctctctgcagaagaagtgatctagactgacagaagtgttgctaattacaagttgtgttctcatgacgtaattagaaagtaacttctcaaagtacaacttttatgaaaaaaataagctgttaaaaaaaggaaatcgtaggttaatttaattgggaaaatgggcaattgacagagaccattttcctaacacatatatgtgctagtactttaactttttaaaattttacttctacgttttgtaatataaaaatttctattttaagtttagaatgttatacgtaccgaaagtatgcagccaaatcgatcagatcaaaccattttacctggagtttggtactggtttttacttctctgaatctgtataagaaaaataaagacaattgaacttcca

SEQ ID NO: 70808 - DNA, 5208 bp, Homo sapiens
  misc_feature (2742)..(2742): n is a, c, g, or t
aactttgtttatgggacagtccgggagctgctgcggccgcgctgtctgcttctcctgcgcctccttttcgcccagcactagcgccttaggccagctcgggggatgtgagagccgaagcccttagactgccaggcacagagtcgggtcgggatttgtcagccaagcctcggctccagctccgcaatctcgggactcacccgagcgacccaggcccgacggcaagttcgggcgggacggcggccgccgcgcgctcaggctcagcttcgctgcccgcccaggtagtgcccgctggagctcgcgcgctcatccggcaccactccagggctccaggctcctcgggcttccggagtcgagacgtggtggagttggctcgggctgaacttctttcggggggctgcctgtcctggaatcgtgcgacctttcctttgccatcaagatgaatccggcctcggcgccccctccgctcccgccgcctgggcagcaagtgatccacgtcacgcaggacctagacacagacctcgaagccctcttcaactctgtcatgaatccgaagcctagctcgtggcggaagaagatcctgccggagtctttctttaaggagcctgattcgggctcgcactcgcgccagtccagcaccgactcgtcgggcggccacccggggcctcgactggctgggggtgcccagcatgtccgctcgcactcgtcgcccgcgtccctgcagctgggcaccggcgcgggtgctgcgggtagccccgcgcagcagcacgcgcacctccgccagcagtcctacgacgtgaccgacgagctgccactgcccccgggctgggagatgaccttcacggccactggccagaggtacttcctcaatcacatagaaaaaatcaccacatggcaagaccctaggaaggcgatgaatcagcctctgaatcatatgaacctccaccctgccgtcagttccacaccagtgcctcagaggtccatggcagtatcccagccaaatctcgtgatgaatcaccaacaccagcagcagatggcccccagtaccctgagccagcagaaccaccccactcagaacccacccgcagggctcatgagtatgcccaatgcgctgaccactcagcagcagcagcagcagaaactgcggcttcagagaatccagatggagagagaaaggattcgaatgcgccaagaggagctcatgaggcaggaagctgccctctgtcgacagctccccatggaagctgagactcttgccccagttcaggctgctgtcaacccacccacgatgaccccagacatgagatccatcactaataatagctcagatcctttcctcaatggagggccatatcattcgagggagcagagcactgacagtggcctggggttagggtgctacagtgtccccacaactccggaggacttcctcagcaatgtggatgagatggatacaggagaaaacgcaggacaaacacccatgaacatcaatccccaacagacccgtttccctgatttccttgactgtcttccaggaacaaacgttgacttaggaactttggaatctgaagacctgatccccctcttcaatgatgtagagtctgctctgaacaaaagtgagccctttctaacctggctgtaatcactaccattgtaacttggatgtagccatgaccttacatttcctgggcctcttggaaaaagtgatggagcagagcaagtctgcaggtgcaccacttcccgcctccatgactcgtgctccctcctttttatgttgccagtttaatcattgcctggttttgattgagagtaacttaagttaaacataaataaatattctattttcattttctgcaagcctgcgttcttgtgacagattatacagaattgtgtctgcaggattgattatgcagaatacttttctctttcttctctgctgccccatggctaagctttatgggtgttaattgaaatttatacaccaattgattttaaaccataaaaagctgaccacaggcagttacttctgagggcatcttggtccaggaaatgtgcacaaaattcgacctgatttacagtttcaaaaactgtattgatgacagtagtaccaaatgctttaaaaactatttaacttgagctttaaaaatcattgtatggatagtaaaattctactgtatggaatacaatgtaattttgaatccatgctggctctgatggctcttattagtctgtatttataaaggcacacagtcctattgtagcttatctttcgttattttactgcagagcatctagacaacttagtccctccagcgggaaagtagcagcagcagcattagtcacagttcttacactacagatcttgtgaaagagaccagtttggtactaattatgagcattttattcaaacaaaagtttttgaaatattacaactggggatttaaaaaattgcagcttagaatctgatggtttttttttttcttgatgttgtttgtttgtttttgagatcgagttttgctcttgttgtccaggctggaatgcaatggcacaatctcggctcactgcaacctctgccttctgggttcaagcgattctcctgccttagcctcccgagtagctgggattacaggcgcctgccaccacgtccggctaattttttgtattttgagtagagacggggtttcaccataatggtcaggctgttctcaaactcctgatctcaggtgatccacccatctcggcctnccaaagtgctgggattactggcgtgagccaccgcacccggccttgatgtttattttataaagcactgtaattttgtagctgatgacaaaaggcagccaaatgtttttgataaatcagtggcaactgtatttttgtcttttgaaataactctgaaaacatcaggacaacatagatttcaacctgatagcacaccacacacagtgagctgttgctttttaaattctgaagccttgtcaggtttgcttcctagatttcaagtgtttaaaataattctatctatgaaactgaaggatgaagcagatctctgactgacatgtaaaaaaaaatgccctttgagggtgtatggtggagataaatgtttctgaattcagtaaaattgattcctaagtatattatcctaatcctgtttgctacagttggtataaaaaggcatgaaatatgtattcaatacctcttatgtaaccaaaaccatttttaattagcttttaaggactgagagagcatcatgttcaactggcatgcagtctgcctgcattgccaatgaagtcctcaactgtttaatattttgaactaatattatttataatctatgaatttaatcttttttgaaagactttaataatttgagtctctgagaggatactttcaatttccatgggggacttatttgttggggatcttaaataagattccttttgatctaccggaatatacatgtacagagtacattggatcatgttggaaagaaggcaagtgaaaaggtcagagatgaagtagcgaagttatggaatatcgtggaaaggatactagttgtgaaatggaaagagacaagttatagtaccccaaaagcaaaacaagcaggagatgcaagagatgccccaaaaggacaaagcaacaattttctgttgccacctttataccggaagactctgttgtagaagaaaagaaggctttggtgcaccttatgtgggaggaggaggggcagggcatgctgatgctgagcgtacaggcagacaagagcgtagcctgctgttgcctccatcactatgaaatgacttattttacctgaaggacccatggtttatgttcctctaattcctttcactctccctaagccctctgagagagatgaagatagatgattttattgctactaaattgaagggagcactatttctttttgtcttttgttagcaaaaaattgcaaaaagaattgtacattcttgctaaaaataaataaataaataaaaaattaaaaaaacaagggacctaacaaaactcagcagtgttactgtattttttaaaaatatttttatagactcattttcaggttattaaatgtaagagaaacagatacccctcttttttaaagtaggtaaatcattgatgatttatattaccaatttttagaagtaattttctagtaagcttgtggcatcagaaaatactagaagatttttttagttaaattagttagaacatttatgaatgaatataataaatattttttcagaataaaatatggaccctttgtgtttactaatagataaagccagatataatttttgtttttaaggccacaaaatatggcctttgttaaagaacactaaagttagaaatctaaagttagagcaactttttaatggctatttcctattattgtaagtgttaaaacccctgcagaattcttgataaggtgctatttatactatatttcttattataagataactgtctttagtcttcttagtactagtctttttagtactaaatcaatcagcaaacatcatcatttcaccccaaaattttgtcacagaaaaggcgtatcaaatgaaaaataatttcagagatctttctttcaagatattttttcctgataaaatacattgtcttgaagtaaatacattgtcaaaacctaattgcaattctgttaaatctaagtaatttttagacagtgtttcaccgtattatttaggatgtgaaatgccatttctttcactgattacaccatatacaggaaacaggtaaaacagtgaaaactttattgtgctggttgatgccaacttggttgaaaagctctctgcagaagaagtgatctagactgacagaagtgttgctaattacaagttgtgttctcatgacgtaattagaaagtaacttctcaaagtacaacttttatgaaaaaaataagctgttaaaaaaaggaaatcgtaggttaatttaattgggaaaatgggcaattgacagagaccattttcctaacacatatatgtgctagtactttaactttttaaaattttacttctacgttttgtaatataaaaatttctattttaagtttagaatgttatacgtaccgaaagtatgcagccaaatcgatcagatcaaaccattttacctggagtttggtactggtttttacttctctgaatctgtataagaaaaataaagacaattgaacttcca

SEQ ID NO: 70809 - DNA, 5096 bp, Homo sapiens
  misc_feature (2630)..(2630): n is a, c, g, or t
aactttgtttatgggacagtccgggagctgctgcggccgcgctgtctgcttctcctgcgcctccttttcgcccagcactagcgccttaggccagctcgggggatgtgagagccgaagcccttagactgccaggcacagagtcgggtcgggatttgtcagccaagcctcggctccagctccgcaatctcgggactcacccgagcgacccaggcccgacggcaagttcgggcgggacggcggccgccgcgcgctcaggctcagcttcgctgcccgcccaggtagtgcccgctggagctcgcgcgctcatccggcaccactccagggctccaggctcctcgggcttccggagtcgagacgtggtggagttggctcgggctgaacttctttcggggggctgcctgtcaagatgaatccggcctcggcgccccctccgctcccgccgcctgggcagcaagtgatccacgtcacgcaggacctagacacagacctcgaagccctcttcaactctgtcatgaatccgaagcctagctcgtggcggaagaagatcctgccggagtctttctttaaggagcctgattcgggctcgcatcgtcgcccgcgtccctgcagctgggcaccggcgcgggtgctgcgggtagccccgcgcagcagcacgcgcacctccgccagcagtcctacgacgtgaccgacgagctgccactgcccccgggctgggagatgaccttcacggccactggccagaggtacttcctcaatcacatagaaaaaatcaccacatggcaagaccctaggaaggcgatgaatcagcctctgaatcatatgaacctccaccctgccgtcagttccacaccagtgcctcagaggtccatggcagtatcccagccaaatctcgtgatgaatcaccaacaccagcagcagatggcccccagtaccctgagccagcagaaccaccccactcagaacccacccgcagggctcatgagtatgcccaatgcgctgaccactcagcagcagcagcagcagaaactgcggcttcagagaatccagatggagagagaaaggattcgaatgcgccaagaggagctcatgaggcaggaagctgccctctgtcgacagctccccatggaagctgagactcttgccccagttcaggctgctgtcaacccacccacgatgaccccagacatgagatccatcactaataatagctcagatcctttcctcaatggagggccatatcattcgagggagcagagcactgacagtggcctggggttagggtgctacagtgtccccacaactccggaggacttcctcagcaatgtggatgagatggatacaggagaaaacgcaggacaaacacccatgaacatcaatccccaacagacccgtttccctgatttccttgactgtcttccaggaacaaacgttgacttaggaactttggaatctgaagacctgatccccctcttcaatgatgtagagtctgctctgaacaaaagtgagccctttctaacctggctgtaatcactaccattgtaacttggatgtagccatgaccttacatttcctgggcctcttggaaaaagtgatggagcagagcaagtctgcaggtgcaccacttcccgcctccatgactcgtgctccctcctttttatgttgccagtttaatcattgcctggttttgattgagagtaacttaagttaaacataaataaatattctattttcattttctgcaagcctgcgttcttgtgacagattatacagaattgtgtctgcaggattgattatgcagaatacttttctctttcttctctgctgccccatggctaagctttatgggtgttaattgaaatttatacaccaattgattttaaaccataaaaagctgaccacaggcagttacttctgagggcatcttggtccaggaaatgtgcacaaaattcgacctgatttacagtttcaaaaactgtattgatgacagtagtaccaaatgctttaaaaactatttaacttgagctttaaaaatcattgtatggatagtaaaattctactgtatggaatacaatgtaattttgaatccatgctggctctgatggctcttattagtctgtatttataaaggcacacagtcctattgtagcttatctttcgttattttactgcagagcatctagacaacttagtccctccagcgggaaagtagcagcagcagcattagtcacagttcttacactacagatcttgtgaaagagaccagtttggtactaattatgagcattttattcaaacaaaagtttttgaaatattacaactggggatttaaaaaattgcagcttagaatctgatggtttttttttttcttgatgttgtttgtttgtttttgagatcgagttttgctcttgttgtccaggctggaatgcaatggcacaatctcggctcactgcaacctctgccttctgggttcaagcgattctcctgccttagcctcccgagtagctgggattacaggcgcctgccaccacgtccggctaattttttgtattttgagtagagacggggtttcaccataatggtcaggctgttctcaaactcctgatctcaggtgatccacccatctcggcctnccaaagtgctgggattactggcgtgagccaccgcacccggccttgatgtttattttataaagcactgtaattttgtagctgatgacaaaaggcagccaaatgtttttgataaatcagtggcaactgtatttttgtcttttgaaataactctgaaaacatcaggacaacatagatttcaacctgatagcacaccacacacagtgagctgttgctttttaaattctgaagccttgtcaggtttgcttcctagatttcaagtgtttaaaataattctatctatgaaactgaaggatgaagcagatctctgactgacatgtaaaaaaaaatgccctttgagggtgtatggtggagataaatgtttctgaattcagtaaaattgattcctaagtatattatcctaatcctgtttgctacagttggtataaaaaggcatgaaatatgtattcaatacctcttatgtaaccaaaaccatttttaattagcttttaaggactgagagagcatcatgttcaactggcatgcagtctgcctgcattgccaatgaagtcctcaactgtttaatattttgaactaatattatttataatctatgaatttaatcttttttgaaagactttaataatttgagtctctgagaggatactttcaatttccatgggggacttatttgttggggatcttaaataagattccttttgatctaccggaatatacatgtacagagtacattggatcatgttggaaagaaggcaagtgaaaaggtcagagatgaagtagcgaagttatggaatatcgtggaaaggatactagttgtgaaatggaaagagacaagttatagtaccccaaaagcaaaacaagcaggagatgcaagagatgccccaaaaggacaaagcaacaattttctgttgccacctttataccggaagactctgttgtagaagaaaagaaggctttggtgcaccttatgtgggaggaggaggggcagggcatgctgatgctgagcgtacaggcagacaagagcgtagcctgctgttgcctccatcactatgaaatgacttattttacctgaaggacccatggtttatgttcctctaattcctttcactctccctaagccctctgagagagatgaagatagatgattttattgctactaaattgaagggagcactatttctttttgtcttttgttagcaaaaaattgcaaaaagaattgtacattcttgctaaaaataaataaataaataaaaaattaaaaaaacaagggacctaacaaaactcagcagtgttactgtattttttaaaaatatttttatagactcattttcaggttattaaatgtaagagaaacagatacccctcttttttaaagtaggtaaatcattgatgatttatattaccaatttttagaagtaattttctagtaagcttgtggcatcagaaaatactagaagatttttttagttaaattagttagaacatttatgaatgaatataataaatattttttcagaataaaatatggaccctttgtgtttactaatagataaagccagatataatttttgtttttaaggccacaaaatatggcctttgttaaagaacactaaagttagaaatctaaagttagagcaactttttaatggctatttcctattattgtaagtgttaaaacccctgcagaattcttgataaggtgctatttatactatatttcttattataagataactgtctttagtcttcttagtactagtctttttagtactaaatcaatcagcaaacatcatcatttcaccccaaaattttgtcacagaaaaggcgtatcaaatgaaaaataatttcagagatctttctttcaagatattttttcctgataaaatacattgtcttgaagtaaatacattgtcaaaacctaattgcaattctgttaaatctaagtaatttttagacagtgtttcaccgtattatttaggatgtgaaatgccatttctttcactgattacaccatatacaggaaacaggtaaaacagtgaaaactttattgtgctggttgatgccaacttggttgaaaagctctctgcagaagaagtgatctagactgacagaagtgttgctaattacaagttgtgttctcatgacgtaattagaaagtaacttctcaaagtacaacttttatgaaaaaaataagctgttaaaaaaaggaaatcgtaggttaatttaattgggaaaatgggcaattgacagagaccattttcctaacacatatatgtgctagtactttaactttttaaaattttacttctacgttttgtaatataaaaatttctattttaagtttagaatgttatacgtaccgaaagtatgcagccaaatcgatcagatcaaaccattttacctggagtttggtactggtttttacttctctgaatctgtataagaaaaataaagacaattgaacttcca

SEQ ID NO: 70810 - DNA, 5269 bp, Homo sapiens
  misc_feature (2587)..(2587): n is a, c, g, or t
aactttgtttatgggacagtccgggagctgctgcggccgcgctgtctgcttctcctgcgcctccttttcgcccagcactagcgccttaggccagctcgggggatgtgagagccgaagcccttagactgccaggcacagagtcgggtcgggatttgtcagccaagcctcggctccagctccgcaatctcgggactcacccgagcgacccaggcccgacggcaagttcgggcgggacggcggccgccgcgcgctcaggctcagcttcgctgcccgcccagaagatgaatccggcctcggcgccccctccgctcccgccgcctgggcagcaagtgatccacgtcacgcaggacctagacacagacctcgaagccctcttcaactctgtcatgaatccgaagcctagctcgtggcggaagaagatcctgccggagtctttctttaaggagcctgattcgggctcgcactcgcgccagtccagcaccgactcgtcgggcggccacccggggcctcgactggctgggggtgcccagcatgtccgctcgcactcgtcgcccgcgtccctgcagctgggcaccggcgcgggtgctgcgggtagccccgcgcagcagcacgcgcacctccgccagcagtcctacgacgtgaccgacgagctgccactgcccccgggctgggagatgaccttcacggccactggccagaggtacttcctcaatcacatagaaaaaatcaccacatggcaagaccctaggaaggcgatgaatcagcctctgaatcatatgaacctccaccctgccgtcagttccacaccagtgcctcagaggtccatggcagtatcccagccaaatctcgtgatgaatcaccaacaccagcagcagatggcccccagtaccctgagccagcagaaccaccccactcagaacccacccgcagggctcatgagtatgcccaatgcgctgaccactcagcagcagcagcagcagaaactgcggcttcagagaatccagatggagagagaaaggattcgaatgcgccaagaggagctcatgaggcaggaagctgccctctgtcgacagctccccatggaagctgagactcttgccccagttcaggctgctgtcaacccacccacgatgaccccagacatgagatccatcactaataatagctcagatcctttcctcaatggagggccatatcattcgagggagcagagcactgacagtggcctggggttagggtgctacagtgtccccacaactccggaggacttcctcagcaatgtggatgagatggatacaggagaaaacgcaggacaaacacccatgaacatcaatccccaacagacccgtttccctgatttccttgactgtcttccaggaacaaacgttgacttaggaactttggaatctgaagacctgatccccctcttcaatgatgtagagtctgctctgaacaaaagtgagccctttctaacctggctgtaatcactaccattgtaacttggatgtagccatgaccttacatttcctgggcctcttggaaaaagtgatggagcagagcaagtctgcaggtgcaccacttcccgcctccatgactcgtgctccctcctttttatgttgccagtttaatcattgcctggttttgattgagagtaacttaagttaaacataaataaatattctattttcattttctgcaagcctgcgttcttgtgacagattatacagaattgtgtctgcaggattgattatgcagaatacttttctctttcttctctgctgccccatggctaagctttatgggtgttaattgaaatttatacaccaattgattttaaaccataaaaagctgaccacaggcagttacttctgagggcatcttggtccaggaaatgtgcacaaaattcgacctgatttacagtttcaaaaactgtattgatgacagtagtaccaaatgctttaaaaactatttaacttgagctttaaaaatcattgtatggatagtaaaattctactgtatggaatacaatgtaattttgaatccatgctggctctgatggctcttattagtctgtatttataaaggcacacagtcctattgtagcttatctttcgttattttactgcagagcatctagacaacttagtccctccagcgggaaagtagcagcagcagcattagtcacagttcttacactacagatcttgtgaaagagaccagtttggtactaattatgagcattttattcaaacaaaagtttttgaaatattacaactggggatttaaaaaattgcagcttagaatctgatggtttttttttttcttgatgttgtttgtttgtttttgagatcgagttttgctcttgttgtccaggctggaatgcaatggcacaatctcggctcactgcaacctctgccttctgggttcaagcgattctcctgccttagcctcccgagtagctgggattacaggcgcctgccaccacgtccggctaattttttgtattttgagtagagacggggtttcaccataatggtcaggctgttctcaaactcctgatctcaggtgatccacccatctcggcctnccaaagtgctgggattactggcgtgagccaccgcacccggccttgatgtttattttataaagcactgtaattttgtagctgatgacaaaaggcagccaaatgtttttgataaatcagtggcaactgtatttttgtcttttgaaataactctgaaaacatcaggacaacatagatttcaacctgatagcacaccacacacagtgagctgttgctttttaaattctgaagccttgtcaggtttgcttcctagatttcaagtgtttaaaataattctatctatgaaactgaaggatgaagcagatctctgactgacatgtaaaaaaaaatgccctttgagggtgtatggtggagataaatgtttctgaattcagtaaaattgattcctaagtatattatcctaatcctgtttgctacagttggtataaaaaggcatgaaatatgtattcaatacctcttatgtaaccaaaaccatttttaattagcttttaaggactgagagagcatcatgttcaactggcatgcagtctgcctgcattgccaatgaagtcctcaactgtttaatattttgaactaatattatttataatctatgaatttaatcttttttgaaagactttaataatttgagtctctgagaggatactttcaatttccatgggggacttatttgttggggatcttaaataagattccttttgatctaccggaatatacatgtacagagtacattggatcatgttggaaagaaggcaagtgaaaaggtcagagatgaagtagcgaagttatggaatatcgtggaaaggatactagttgtgaaatggaaagagacaagttatagtaccccaaaagcaaaacaagcaggagatgcaagagatgccccaaaaggacaaagcaacaattttctgttgccacctttataccggaagactctgttgtagaagaaaagaaggctttggtgcaccttatgtgggaggaggaggggcagggcatgctgatgctgagcgtacaggcagacaagagcgtagcctgctgttgcctccatcactatgaaatgacttattttacctgaaggacccatggtttatgttcctctaattcctttcactctccctaagccctctgagagagatgaagatagatgattttattgctactaaattgaagggagcactatttctttttgtcttttgttagcaaaaaattgcaaaaagaattgtacattcttgctaaaaataaataaataaataaaaaattaaaaaaacaagggacctaacaaaactcagcagtgttactgtattttttaaaaatatttttatagactcattttcaggttattaaatgtaagagaaacagatacccctcttttttaaagtaggtaaatcattgatgatttatattaccaatttttagaagtaattttctagtaagcttgtggcatcagaaaatactagaagatttttttagttaaattagttagaacatttatgaatgaatataataaatattttttcagaataaaatatggaccctttgtgtttactaatagataaagccagatataatttttgtttttaaggccacaaaatatggcctttgttaaagaacactaaagttagaaatctaaagttagagcaactttttaatggctatttcctattattgtaagtgttaaaacccctgcagaattcttgataaggtgctatttatactatatttcttattataagataactgtctttagtcttcttagtactagtctttttagtactaaatcaatcagcaaacatcatcatttcaccccaaaattttgtcacagaaaaggcgtatcaaatgaaaaataatttcagagatctttctttcaagatattttttcctgataaaatacattgtcttgaagtaaatacattgtcaaaacctaattgcaattctgttaaatctaagtaatttttagacagtgtttcaccgtattatttaggatgtgaaatgccatttctttcactgattacaccatatacaggaaacaggtaaaacagtgaaaactttattgtgctggttgatgccaacttggttgaaaagctctctgcagaagaagtgatctagactgacagaagtgttgctaattacaagttgtgttctcatgacgtaattagaaagtaacttctcaaagtacaacttttatgaaaaaaataagctgttaaaaaaaggaaatcgtaggttaatttaattgggaaaatgggcaattgacagagaccattttcctaacacatatatgtgctagtactttaactttttaaaattttacttctacgttttgtaatataaaaatttctattttaagtttagaatgttatacgtaccgaaagtatgcagccaaatcgatcagatcaaaccattttacctggagtttggtactggtttttacttctctgaatctgtataagaaaaataaagacaattgaacttccaaaaaaaatacaagaataagaataatagaaaaaagaaaaataatgaaagaagaacaagaaaacaaaggagagagacgaccgagatgaggagtgacggatcagagacacgatagagagccagggaagtatggagagccagacgaaaaagatgaacagggggagtcgggtcatggttaggaacatggttgagaatagacgtgtgacggtgagggggggt

SEQ ID NO: 70811 - DNA, 3802 bp, Homo sapiens
  misc_feature (35)..(37): n is a, c, g, or t
  misc_feature (1336)..(1336): n is a, c, g, or t
cctacctatcaccaccagcacccgacgaagaacannnagctttatgaagagaaaacgcaggacaaacacccatgaacatcaatccccaacagacccgtttccctgatttccttgactgtcttccaggaacaaacgttgacttaggaactttggaatctgaagacctgatccccctcttcaatgatgtagagtctgctctgaacaaaagtgagccctttctaacctggctgtaatcactaccattgtaacttggatgtagccatgaccttacatttcctgggcctcttggaaaaagtgatggagcagagcaagtctgcaggtgcaccacttcccgcctccatgactcgtgctccctcctttttatgttgccagtttaatcattgcctggttttgattgagagtaacttaagttaaacataaataaatattctattttcattttctgcaagcctgcgttcttgtgacagattatacagaattgtgtctgcaggattgattatgcagaatacttttctctttcttctctgctgccccatggctaagctttatgggtgttaattgaaatttatacaccaattgattttaaaccataaaaagctgaccacaggcagttacttctgagggcatcttggtccaggaaatgtgcacaaaattcgacctgatttacagtttcaaaaactgtattgatgacagtagtaccaaatgctttaaaaactatttaacttgagctttaaaaatcattgtatggatagtaaaattctactgtatggaatacaatgtaattttgaatccatgctggctctgatggctcttattagtctgtatttataaaggcacacagtcctattgtagcttatctttcgttattttactgcagagcatctagacaacttagtccctccagcgggaaagtagcagcagcagcattagtcacagttcttacactacagatcttgtgaaagagaccagtttggtactaattatgagcattttattcaaacaaaagtttttgaaatattacaactggggatttaaaaaattgcagcttagaatctgatggtttttttttttcttgatgttgtttgtttgtttttgagatcgagttttgctcttgttgtccaggctggaatgcaatggcacaatctcggctcactgcaacctctgccttctgggttcaagcgattctcctgccttagcctcccgagtagctgggattacaggcgcctgccaccacgtccggctaattttttgtattttgagtagagacggggtttcaccataatggtcaggctgttctcaaactcctgatctcaggtgatccacccatctcggcctnccaaagtgctgggattactggcgtgagccaccgcacccggccttgatgtttattttataaagcactgtaattttgtagctgatgacaaaaggcagccaaatgtttttgataaatcagtggcaactgtatttttgtcttttgaaataactctgaaaacatcaggacaacatagatttcaacctgatagcacaccacacacagtgagctgttgctttttaaattctgaagccttgtcaggtttgcttcctagatttcaagtgtttaaaataattctatctatgaaactgaaggatgaagcagatctctgactgacatgtaaaaaaaaatgccctttgagggtgtatggtggagataaatgtttctgaattcagtaaaattgattcctaagtatattatcctaatcctgtttgctacagttggtataaaaaggcatgaaatatgtattcaatacctcttatgtaaccaaaaccatttttaattagcttttaaggactgagagagcatcatgttcaactggcatgcagtctgcctgcattgccaatgaagtcctcaactgtttaatattttgaactaatattatttataatctatgaatttaatcttttttgaaagactttaataatttgagtctctgagaggatactttcaatttccatgggggacttatttgttggggatcttaaataagattccttttgatctaccggaatatacatgtacagagtacattggatcatgttggaaagaaggcaagtgaaaaggtcagagatgaagtagcgaagttatggaatatcgtggaaaggatactagttgtgaaatggaaagagacaagttatagtaccccaaaagcaaaacaagcaggagatgcaagagatgccccaaaaggacaaagcaacaattttctgttgccacctttataccggaagactctgttgtagaagaaaagaaggctttggtgcaccttatgtgggaggaggaggggcagggcatgctgatgctgagcgtacaggcagacaagagcgtagcctgctgttgcctccatcactatgaaatgacttattttacctgaaggacccatggtttatgttcctctaattcctttcactctccctaagccctctgagagagatgaagatagatgattttattgctactaaattgaagggagcactatttctttttgtcttttgttagcaaaaaattgcaaaaagaattgtacattcttgctaaaaataaataaataaataaaaaattaaaaaaacaagggacctaacaaaactcagcagtgttactgtattttttaaaaatatttttatagactcattttcaggttattaaatgtaagagaaacagatacccctcttttttaaagtaggtaaatcattgatgatttatattaccaatttttagaagtaattttctagtaagcttgtggcatcagaaaatactagaagatttttttagttaaattagttagaacatttatgaatgaatataataaatattttttcagaataaaatatggaccctttgtgtttactaatagataaagccagatataatttttgtttttaaggccacaaaatatggcctttgttaaagaacactaaagttagaaatctaaagttagagcaactttttaatggctatttcctattattgtaagtgttaaaacccctgcagaattcttgataaggtgctatttatactatatttcttattataagataactgtctttagtcttcttagtactagtctttttagtactaaatcaatcagcaaacatcatcatttcaccccaaaattttgtcacagaaaaggcgtatcaaatgaaaaataatttcagagatctttctttcaagatattttttcctgataaaatacattgtcttgaagtaaatacattgtcaaaacctaattgcaattctgttaaatctaagtaatttttagacagtgtttcaccgtattatttaggatgtgaaatgccatttctttcactgattacaccatatacaggaaacaggtaaaacagtgaaaactttattgtgctggttgatgccaacttggttgaaaagctctctgcagaagaagtgatctagactgacagaagtgttgctaattacaagttgtgttctcatgacgtaattagaaagtaacttctcaaagtacaacttttatgaaaaaaataagctgttaaaaaaaggaaatcgtaggttaatttaattgggaaaatgggcaattgacagagaccattttcctaacacatatatgtgctagtactttaactttttaaaattttacttctacgttttgtaatataaaaatttctattttaagtttagaatgttatacgtaccgaaagtatgcagccaaatcgatcagatcaaaccattttacctggagtttggtactggtttttacttctctgaatctgtataagaaaaataaagacaattgaacttcca

SEQ ID NO: 70812 - DNA, 2511 bp, Homo sapiens
tctgttttttcattatgcaaatctcctcttacctcttcagagtgaccaaagtgctgggattactggcgtgagccaccgcacccggccttgatgtttattttataaagcactgtaattttgtagctgatgacaaaaggcagccaaatgtttttgataaatcagtggcaactgtatttttgtcttttgaaataactctgaaaacatcaggacaacatagatttcaacctgatagcacaccacacacagtgagctgttgctttttaaattctgaagccttgtcaggtttgcttcctagatttcaagtgtttaaaataattctatctatgaaactgaaggatgaagcagatctctgactgacatgtaaaaaaaaatgccctttgagggtgtatggtggagataaatgtttctgaattcagtaaaattgattcctaagtatattatcctaatcctgtttgctacagttggtataaaaaggcatgaaatatgtattcaatacctcttatgtaaccaaaaccatttttaattagcttttaaggactgagagagcatcatgttcaactggcatgcagtctgcctgcattgccaatgaagtcctcaactgtttaatattttgaactaatattatttataatctatgaatttaatcttttttgaaagactttaataatttgagtctctgagaggatactttcaatttccatgggggacttatttgttggggatcttaaataagattccttttgatctaccggaatatacatgtacagagtacattggatcatgttggaaagaaggcaagtgaaaaggtcagagatgaagtagcgaagttatggaatatcgtggaaaggatactagttgtgaaatggaaagagacaagttatagtaccccaaaagcaaaacaagcaggagatgcaagagatgccccaaaaggacaaagcaacaattttctgttgccacctttataccggaagactctgttgtagaagaaaagaaggctttggtgcaccttatgtgggaggaggaggggcagggcatgctgatgctgagcgtacaggcagacaagagcgtagcctgctgttgcctccatcactatgaaatgacttattttacctgaaggacccatggtttatgttcctctaattcctttcactctccctaagccctctgagagagatgaagatagatgattttattgctactaaattgaagggagcactatttctttttgtcttttgttagcaaaaaattgcaaaaagaattgtacattcttgctaaaaataaataaataaataaaaaattaaaaaaacaagggacctaacaaaactcagcagtgttactgtattttttaaaaatatttttatagactcattttcaggttattaaatgtaagagaaacagatacccctcttttttaaagtaggtaaatcattgatgatttatattaccaatttttagaagtaattttctagtaagcttgtggcatcagaaaatactagaagatttttttagttaaattagttagaacatttatgaatgaatataataaatattttttcagaataaaatatggaccctttgtgtttactaatagataaagccagatataatttttgtttttaaggccacaaaatatggcctttgttaaagaacactaaagttagaaatctaaagttagagcaactttttaatggctatttcctattattgtaagtgttaaaacccctgcagaattcttgataaggtgctatttatactatatttcttattataagataactgtctttagtcttcttagtactagtctttttagtactaaatcaatcagcaaacatcatcatttcaccccaaaattttgtcacagaaaaggcgtatcaaatgaaaaataatttcagagatctttctttcaagatattttttcctgataaaatacattgtcttgaagtaaatacattgtcaaaacctaattgcaattctgttaaatctaagtaatttttagacagtgtttcaccgtattatttaggatgtgaaatgccatttctttcactgattacaccatatacaggaaacaggtaaaacagtgaaaactttattgtgctggttgatgccaacttggttgaaaagctctctgcagaagaagtgatctagactgacagaagtgttgctaattacaagttgtgttctcatgacgtaattagaaagtaacttctcaaagtacaacttttatgaaaaaaataagctgttaaaaaaaggaaatcgtaggttaatttaattgggaaaatgggcaattgacagagaccattttcctaacacatatatgtgctagtactttaactttttaaaattttacttctacgttttgtaatataaaaatttctattttaagtttagaatgttatacgtaccgaaagtatgcagccaaatcgatcagatcaaaccattttacctggagtttggtactggtttttacttctctgaatctgtataagaaaaataaagacaattgaacttcca

SEQ ID NO: 70813 - DNA, 2505 bp, Homo sapiens
  misc_feature (2)..(2): n is a, c, g, or t
anttgaatatgtgacttcagtccatagaatgagaggctcccaaagtgctgggattactggcgtgagccaccgcacccggccttgatgtttattttataaagcactgtaattttgtagctgatgacaaaaggcagccaaatgtttttgataaatcagtggcaactgtatttttgtcttttgaaataactctgaaaacatcaggacaacatagatttcaacctgatagcacaccacacacagtgagctgttgctttttaaattctgaagccttgtcaggtttgcttcctagatttcaagtgtttaaaataattctatctatgaaactgaaggatgaagcagatctctgactgacatgtaaaaaaaaatgccctttgagggtgtatggtggagataaatgtttctgaattcagtaaaattgattcctaagtatattatcctaatcctgtttgctacagttggtataaaaaggcatgaaatatgtattcaatacctcttatgtaaccaaaaccatttttaattagcttttaaggactgagagagcatcatgttcaactggcatgcagtctgcctgcattgccaatgaagtcctcaactgtttaatattttgaactaatattatttataatctatgaatttaatcttttttgaaagactttaataatttgagtctctgagaggatactttcaatttccatgggggacttatttgttggggatcttaaataagattccttttgatctaccggaatatacatgtacagagtacattggatcatgttggaaagaaggcaagtgaaaaggtcagagatgaagtagcgaagttatggaatatcgtggaaaggatactagttgtgaaatggaaagagacaagttatagtaccccaaaagcaaaacaagcaggagatgcaagagatgccccaaaaggacaaagcaacaattttctgttgccacctttataccggaagactctgttgtagaagaaaagaaggctttggtgcaccttatgtgggaggaggaggggcagggcatgctgatgctgagcgtacaggcagacaagagcgtagcctgctgttgcctccatcactatgaaatgacttattttacctgaaggacccatggtttatgttcctctaattcctttcactctccctaagccctctgagagagatgaagatagatgattttattgctactaaattgaagggagcactatttctttttgtcttttgttagcaaaaaattgcaaaaagaattgtacattcttgctaaaaataaataaataaataaaaaattaaaaaaacaagggacctaacaaaactcagcagtgttactgtattttttaaaaatatttttatagactcattttcaggttattaaatgtaagagaaacagatacccctcttttttaaagtaggtaaatcattgatgatttatattaccaatttttagaagtaattttctagtaagcttgtggcatcagaaaatactagaagatttttttagttaaattagttagaacatttatgaatgaatataataaatattttttcagaataaaatatggaccctttgtgtttactaatagataaagccagatataatttttgtttttaaggccacaaaatatggcctttgttaaagaacactaaagttagaaatctaaagttagagcaactttttaatggctatttcctattattgtaagtgttaaaacccctgcagaattcttgataaggtgctatttatactatatttcttattataagataactgtctttagtcttcttagtactagtctttttagtactaaatcaatcagcaaacatcatcatttcaccccaaaattttgtcacagaaaaggcgtatcaaatgaaaaataatttcagagatctttctttcaagatattttttcctgataaaatacattgtcttgaagtaaatacattgtcaaaacctaattgcaattctgttaaatctaagtaatttttagacagtgtttcaccgtattatttaggatgtgaaatgccatttctttcactgattacaccatatacaggaaacaggtaaaacagtgaaaactttattgtgctggttgatgccaacttggttgaaaagctctctgcagaagaagtgatctagactgacagaagtgttgctaattacaagttgtgttctcatgacgtaattagaaagtaacttctcaaagtacaacttttatgaaaaaaataagctgttaaaaaaaggaaatcgtaggttaatttaattgggaaaatgggcaattgacagagaccattttcctaacacatatatgtgctagtactttaactttttaaaattttacttctacgttttgtaatataaaaatttctattttaagtttagaatgttatacgtaccgaaagtatgcagccaaatcgatcagatcaaaccattttacctggagtttggtactggtttttacttctctgaatctgtataagaaaaataaagacaattgaacttcca

SEQ ID NO: 70814 - DNA, 1810 bp, Homo sapiens
ttatttggtggggttatttaaaataaaattccctttttatccccgcggaaaaaacacatgcaaagaggcccattggatcatgttggaaagaaggcaagtgaaaaggtcagagatgaagtagcgaagttatggaatatcgtggaaaggatactagttgtgaaatggaaagagacaagttatagtaccccaaaagcaaaacaagcaggagatgcaagagatgccccaaaaggacaaagcaacaattttctgttgccacctttataccggaagactctgttgtagaagaaaagaaggctttggtgcaccttatgtgggaggaggaggggcagggcatgctgatgctgagcgtacaggcagacaagagcgtagcctgctgttgcctccatcactatgaaatgacttattttacctgaaggacccatggtttatgttcctctaattcctttcactctccctaagccctctgagagagatgaagatagatgattttattgctactaaattgaagggagcactatttctttttgtcttttgttagcaaaaaattgcaaaaagaattgtacattcttgctaaaaataaataaataaataaaaaattaaaaaaacaagggacctaacaaaactcagcagtgttactgtattttttaaaaatatttttatagactcattttcaggttattaaatgtaagagaaacagatacccctcttttttaaagtaggtaaatcattgatgatttatattaccaatttttagaagtaattttctagtaagcttgtggcatcagaaaatactagaagatttttttagttaaattagttagaacatttatgaatgaatataataaatattttttcagaataaaatatggaccctttgtgtttactaatagataaagccagatataatttttgtttttaaggccacaaaatatggcctttgttaaagaacactaaagttagaaatctaaagttagagcaactttttaatggctatttcctattattgtaagtgttaaaacccctgcagaattcttgataaggtgctatttatactatatttcttattataagataactgtctttagtcttcttagtactagtctttttagtactaaatcaatcagcaaacatcatcatttcaccccaaaattttgtcacagaaaaggcgtatcaaatgaaaaataatttcagagatctttctttcaagatattttttcctgataaaatacattgtcttgaagtaaatacattgtcaaaacctaattgcaattctgttaaatctaagtaatttttagacagtgtttcaccgtattatttaggatgtgaaatgccatttctttcactgattacaccatatacaggaaacaggtaaaacagtgaaaactttattgtgctggttgatgccaacttggttgaaaagctctctgcagaagaagtgatctagactgacagaagtgttgctaattacaagttgtgttctcatgacgtaattagaaagtaacttctcaaagtacaacttttatgaaaaaaataagctgttaaaaaaaggaaatcgtaggttaatttaattgggaaaatgggcaattgacagagaccattttcctaacacatatatgtgctagtactttaactttttaaaattttacttctacgttttgtaatataaaaatttctattttaagtttagaatgttatacgtaccgaaagtatgcagccaaatcgatcagatcaaaccattttacctggagtttggtactggtttttacttctctgaatctgtataagaaaaataaagacaattgaacttcca

SEQ ID NO: 70815 - DNA, 4134 bp, Homo sapiens
  misc_feature (2587)..(2587): n is a, c, g, or t
aactttgtttatgggacagtccgggagctgctgcggccgcgctgtctgcttctcctgcgcctccttttcgcccagcactagcgccttaggccagctcgggggatgtgagagccgaagcccttagactgccaggcacagagtcgggtcgggatttgtcagccaagcctcggctccagctccgcaatctcgggactcacccgagcgacccaggcccgacggcaagttcgggcgggacggcggccgccgcgcgctcaggctcagcttcgctgcccgcccagaagatgaatccggcctcggcgccccctccgctcccgccgcctgggcagcaagtgatccacgtcacgcaggacctagacacagacctcgaagccctcttcaactctgtcatgaatccgaagcctagctcgtggcggaagaagatcctgccggagtctttctttaaggagcctgattcgggctcgcactcgcgccagtccagcaccgactcgtcgggcggccacccggggcctcgactggctgggggtgcccagcatgtccgctcgcactcgtcgcccgcgtccctgcagctgggcaccggcgcgggtgctgcgggtagccccgcgcagcagcacgcgcacctccgccagcagtcctacgacgtgaccgacgagctgccactgcccccgggctgggagatgaccttcacggccactggccagaggtacttcctcaatcacatagaaaaaatcaccacatggcaagaccctaggaaggcgatgaatcagcctctgaatcatatgaacctccaccctgccgtcagttccacaccagtgcctcagaggtccatggcagtatcccagccaaatctcgtgatgaatcaccaacaccagcagcagatggcccccagtaccctgagccagcagaaccaccccactcagaacccacccgcagggctcatgagtatgcccaatgcgctgaccactcagcagcagcagcagcagaaactgcggcttcagagaatccagatggagagagaaaggattcgaatgcgccaagaggagctcatgaggcaggaagctgccctctgtcgacagctccccatggaagctgagactcttgccccagttcaggctgctgtcaacccacccacgatgaccccagacatgagatccatcactaataatagctcagatcctttcctcaatggagggccatatcattcgagggagcagagcactgacagtggcctggggttagggtgctacagtgtccccacaactccggaggacttcctcagcaatgtggatgagatggatacaggagaaaacgcaggacaaacacccatgaacatcaatccccaacagacccgtttccctgatttccttgactgtcttccaggaacaaacgttgacttaggaactttggaatctgaagacctgatccccctcttcaatgatgtagagtctgctctgaacaaaagtgagccctttctaacctggctgtaatcactaccattgtaacttggatgtagccatgaccttacatttcctgggcctcttggaaaaagtgatggagcagagcaagtctgcaggtgcaccacttcccgcctccatgactcgtgctccctcctttttatgttgccagtttaatcattgcctggttttgattgagagtaacttaagttaaacataaataaatattctattttcattttctgcaagcctgcgttcttgtgacagattatacagaattgtgtctgcaggattgattatgcagaatacttttctctttcttctctgctgccccatggctaagctttatgggtgttaattgaaatttatacaccaattgattttaaaccataaaaagctgaccacaggcagttacttctgagggcatcttggtccaggaaatgtgcacaaaattcgacctgatttacagtttcaaaaactgtattgatgacagtagtaccaaatgctttaaaaactatttaacttgagctttaaaaatcattgtatggatagtaaaattctactgtatggaatacaatgtaattttgaatccatgctggctctgatggctcttattagtctgtatttataaaggcacacagtcctattgtagcttatctttcgttattttactgcagagcatctagacaacttagtccctccagcgggaaagtagcagcagcagcattagtcacagttcttacactacagatcttgtgaaagagaccagtttggtactaattatgagcattttattcaaacaaaagtttttgaaatattacaactggggatttaaaaaattgcagcttagaatctgatggtttttttttttcttgatgttgtttgtttgtttttgagatcgagttttgctcttgttgtccaggctggaatgcaatggcacaatctcggctcactgcaacctctgccttctgggttcaagcgattctcctgccttagcctcccgagtagctgggattacaggcgcctgccaccacgtccggctaattttttgtattttgagtagagacggggtttcaccataatggtcaggctgttctcaaactcctgatctcaggtgatccacccatctcggcctnccaaagtgctgggattactggcgtgagccaccgcacccggccttgatgtttattttataaagcactgtaattttgtagctgatgacaaaaggcagccaaatgtttttgataaatcagtggcaactgtatttttgtcttttgaaataactctgaaaacatcaggacaacatagatttcaacctgatagcacaccacacacagtgagctgttgctttttaaattctgaagccttgtcaggtttgcttcctagatttcaagtgtttaaaataattctatctatgaaactgaaggatgaagcagatctctgactgacatgtaaaaaaaaatgccctttgagggtgtatggtggagataaatgtttctgaattcagtaaaattgattcctaagtatattatcctaatcctgtttgctacagttggtataaaaaggcatgaaatatgtattcaatacctcttatgtaaccaaaaccatttttaattagcttttaaggactgagagagcatcatgttcaactggcatgcagtctgcctgcattgccaatgaagtcctcaactgtttaatattttgaactaatattatttataatctatgaatttaatcttttttgaaagactttaataatttgagtctctgagaggatactttcaatttccatgggggacttatttgttggggatcttaaataagattccttttgatctaccggaatatacatgtacagagtacattggatcatgttggaaagaaggcaagtgaaaaggtcagagatgaagtagcgaagttatggaatatcgtggaaaggatactagttgtgaaatggaaagagacaagttatagtaccccaaaagcaaaacaagcaggagatgcaagagatgccccaaaaggacaaagcaacaattttctgttgccacctttataccggaagactctgttgtagaagaaaagaaggctttggtgcaccttatgtgggaggaggaggggcagggcatgctgatgctgagcgtacaggcagacaagagcgtagcctgctgttgcctccatcactatgaaatgacttattttacctgaaggacccatggtttatgttcctctaattcctttcactctccctaagccctctgagagagatgaagatagatgattttattgctactaaattgaagggagcactatttctttttgtcttttgttagcaaaaaattgcaaaaagaattgtacattcttgctaaaaataaataaataaataaaaaattaaaaaaacaagggacctaacaaaactcagcagtgttactgtattttttaaaaatatttttatagactcattttcaggttattaaatgtaagagaaacagatacccctcttttttaaagtaggtaaatcattgatgatttatattaccaatttttagaagtaattttctagtaagcttgtggcatcagaaaatactagaagatttttctatctattagtatacacaaagggtccatattttattctgaaaaaatatttattatattcattcacaaatgttctaactaatttaac

SEQ ID NO: 70816 - DNA, 1694 bp, Homo sapiens
aactttgtttatgggacagtccgggagctgctgcggccgcgctgtctgcttctcctgcgcctccttttcgcccagcactagcgccttaggccagctcgggggatgtgagagccgaagcccttagactgccaggcacagagtcgggtcgggatttgtcagccaagcctcggctccagctccgcaatctcgggactcacccgagcgacccaggcccgacggcaagttcgggcgggacggcggccgccgcgcgctcaggctcagcttcgctgcccgcccagaagatgaatccggcctcggcgccccctccgctcccgccgcctgggcagcaagtgatccacgtcacgcaggacctagacacagacctcgaagccctcttcaactctgtcatgaatccgaagcctagctcgtggcggaagaagatcctgccggagtctttctttaaggagcctgattcgggctcgcactcgcgccagtccagcaccgactcgtcgggcggccacccggggcctcgactggctgggggtgcccagcatgtccgctcgcactcgtcgcccgcgtccctgcagctgggcaccggcgcgggtgctgcgggtagccccgcgcagcagcacgcgcacctccgccagcagtcctacgacgtgaccgacgagctgccactgcccccgggctgggagatgaccttcacggccactggccagaggtacttcctcaatcacatagaaaaaatcaccacatggcaagaccctaggaaggcgatgaatcagcctctgaatcatatgaacctccaccctgccgtcagttccacaccagtgcctcagaggtccatggcagtatcccagccaaatctcgtgatgaatcaccaacaccagcagcagatggcccccagtaccctgagccagcagaaccaccccactcagaacccacccgcagggctcatgagtatgcccaatgcgctgaccactcagcagcagcagcagcagaaactgcggcttcagagaatccagatggagagagaaaggattcgaatgcgccaagaggagctcatgaggcaggaagctgccctctgtcgacagctccccatggaagctgagactcttgccccagttcaggctgctgtcaacccacccacgatgaccccagacatgagatccatcactaataatagctcagatcctttcctcaatggagggccatatcattcgagggagcagagcactgacagtggcctggggttagggtgctacagtgtccccacaactccggaggacttcctcagcaatgtggatgagatggatacaggagaaaacgcaggacaaacacccatgaacatcaatccccaacagacccgtttccctgatttccttgactgtcttccaggaacaaacgttgacttaggaactttggaatctgaagacctgatccccctcttcaatgatgtagagtctgctctgaacaaaagtgagccctttctaacctggctgtaatcactaccattgtaacttggatgtagccatgaccttacatttcctgggcctcttggaaaaagtgatggagcagagcaagtctgcaggtgcaccacttcccgcctccatgactcgtgctccctcctttttatgttgccagtttaatcattgcctggttttgattgagagtaacttaagttaaacataaataaatattctattttcattttc

SEQ ID NO: 70817 - DNA, 449 bp, Homo sapiens
tgatcggtaacttggtcggtgatcggtaacttggttgtgatcggtacttggttgaaaagctctctgcagaagaagtgatctagactgacagaagtgttgctaattacaagttgtgttctcatgacgtaattagaaagtaacttctcaaagtacaacttttatgaaaaaaataagctgttaaaaaaaggaaatcgtaggttaatttaattgggaaaatgggcaattgacagagaccattttcctaacacatatatgtgctagtactttaactttttaaaattttacttctacgttttgtaatataaaaatttctattttaagtttagaatgttatacgtaccgaaagtatgcagccaaatcgatcagatcaaaccattttacctggagtttggtactggtttttacttctctgaatctgtataagaaaaataaagacaattgaacttcca

SEQ ID NO: 70818 - DNA, 2043 bp, Homo sapiens
aactttgtttatgggacagtccgggagctgctgcggccgcgctgtctgcttctcctgcgcctccttttcgcccagcactagcgccttaggccagctcgggggatgtgagagccgaagcccttagactgccaggcacagagtcgggtcgggatttgtcagccaagcctcggctccagctccgcaatctcgggactcacccgagcgacccaggcccgacggcaagttcgggcgggacggcggccgccgcgcgctcaggctcagcttcgctgcccgcccagaagatgaatccggcctcggcgccccctccgctcccgccgcctgggcagcaagtgatccacgtcacgcaggacctagacacagacctcgaagccctcttcaactctgtcatgaatccgaagcctagctcgtggcggaagaagatcctgccggagtctttctttaaggagcctgattcgggctcgcactcgcgccagtccagcaccgactcgtcgggcggccacccggggcctcgactggctgggggtgcccagcatgtccgctcgcactcgtcgcccgcgtccctgcagctgggcaccggcgcgggtgctgcgggtagccccgcgcagcagcacgcgcacctccgccagcagtcctacgacgtgaccgacgagctgccactgcccccgggctgggagatgaccttcacggccactggccagaggtacttcctcaatcacatagaaaaaatcaccacatggcaagaccctaggaaggcgatgaatcagcctctgaatcatatgaacctccaccctgccgtcagttccacaccagtgcctcagaggtccatggcagtatcccagccaaatctcgtgatgaatcaccaacaccagcagcagatggcccccagtaccctgagccagcagaaccaccccactcagaacccacccgcagggctcatgagtatgcccaatgcgctgaccactcagcagcagcagcagcagaaactgcggcttcagagaatccagatggagagagaaaggattcgaatgcgccaagaggagctcatgaggcaggaagctgccctctgtcgacagctccccatggaagctgagactcttgccccagttcaggctgctgtcaacccacccacgatgaccccagacatgagatccatcactaataatagctcagatcctttcctcaatggagggccatatcattcgagggagcagagcactgacagtggcctggggttagggtgctacagtgtccccacaactccggaggacttcctcagcaatgtggatgagatggatacaggagaaaacgcaggacaaacacccatgaacatcaatccccaacagacccgtttccctgatttccttgactgtcttccaggaacaaacgttgacttaggaactttggaatctgaagacctgatccccctcttcaatgatgtagagtctgctctgaacaaaagtgagccctttctaacctggctgtaatcactaccattgtaacttggatgtagccatgaccttacatttcctgggcctcttggaaaaagtgatggagcagagcaagtctgcaggtgcaccacttcccgcctccatgactcgtgctccctcctttttatgttgccagtttaatcattgcctggttttgattgagagtaacttaagttaaacataaataaatattctattttcattttctgcaagcctgcgttcttgtgacagattatacagaattgtgtctgcaggattgattatgcagaatacttttctctttcttctctgctgccccatggctaagctttatgggtgttaattgaaatttatacaccaattgattttaaaccataaaaagctgaccacaggcagttacttctgagggcatcttggtccaggaaatgtgcacaaaattcgacctgatttacagtttcaaaaactgtattgatgacagtagtaccaaatgctttaaaaactatttaacttgagctttaaaaatcattgtatggatagtaaaattctactgtatggaatacaatgtaattttgaatcc

SEQ ID NO: 70819 - DNA, 5029 bp, Homo sapiens
  misc_feature (2563)..(2563): n is a, c, g, or t
gacacactcctctacaacaccagagactcccaaacacaaggccttatattgactcatttcagctcacatcctggcgactctcaagagagaaacctcagagtgactaaaatctccataatgagaagacatgtacattcagtatctattttggcattttccccaatacatctctgctcatctgactcttatcttggcatctgcttcctggtggatctgaactgacccataagccacgcttactggtgattttccagaagatgaatccggcctcggcgccccctccgctcccgccgcctgggcagcaagtgatccacgtcacgcaggacctagacacagacctcgaagccctcttcaactctgtcatgaatccgaagcctagctcgtggcggaagaagatcctgccggagtctttctttaaggagcctgattcgggctcgcactcgcgccagtccagcaccgactcgtcgggcggccacccggggcctcgactggctgggggtgcccagcatgtccgctcgcactcgtcgcccgcgtccctgcagctgggcaccggcgcgggtgctgcgggtagccccgcgcagcagcacgcgcacctccgccagcagtcctacgacgtgaccgacgagctgccactgcccccgggctgggagatgaccttcacggccactggccagaggtacttcctcaatcacatagaaaaaatcaccacatggcaagaccctaggaaggcgatgaatcagcctctgaatcatatgaacctccaccctgccgtcagttccacaccagtgcctcagaggtccatggcagtatcccagccaaatctcgtgatgaatcaccaacaccagcagcagatggcccccagtaccctgagccagcagaaccaccccactcagaacccacccgcagggctcatgagtatgcccaatgcgctgaccactcagcagcagcagcagcagaaactgcggcttcagagaatccagatggagagagaaaggattcgaatgcgccaagaggagctcatgaggcaggaagctgccctctgtcgacagctccccatggaagctgagactcttgccccagttcaggctgctgtcaacccacccacgatgaccccagacatgagatccatcactaataatagctcagatcctttcctcaatggagggccatatcattcgagggagcagagcactgacagtggcctggggttagggtgctacagtgtccccacaactccggaggacttcctcagcaatgtggatgagatggatacaggagaaaacgcaggacaaacacccatgaacatcaatccccaacagacccgtttccctgatttccttgactgtcttccaggaacaaacgttgacttaggaactttggaatctgaagacctgatccccctcttcaatgatgtagagtctgctctgaacaaaagtgagccctttctaacctggctgtaatcactaccattgtaacttggatgtagccatgaccttacatttcctgggcctcttggaaaaagtgatggagcagagcaagtctgcaggtgcaccacttcccgcctccatgactcgtgctccctcctttttatgttgccagtttaatcattgcctggttttgattgagagtaacttaagttaaacataaataaatattctattttcattttctgcaagcctgcgttcttgtgacagattatacagaattgtgtctgcaggattgattatgcagaatacttttctctttcttctctgctgccccatggctaagctttatgggtgttaattgaaatttatacaccaattgattttaaaccataaaaagctgaccacaggcagttacttctgagggcatcttggtccaggaaatgtgcacaaaattcgacctgatttacagtttcaaaaactgtattgatgacagtagtaccaaatgctttaaaaactatttaacttgagctttaaaaatcattgtatggatagtaaaattctactgtatggaatacaatgtaattttgaatccatgctggctctgatggctcttattagtctgtatttataaaggcacacagtcctattgtagcttatctttcgttattttactgcagagcatctagacaacttagtccctccagcgggaaagtagcagcagcagcattagtcacagttcttacactacagatcttgtgaaagagaccagtttggtactaattatgagcattttattcaaacaaaagtttttgaaatattacaactggggatttaaaaaattgcagcttagaatctgatggtttttttttttcttgatgttgtttgtttgtttttgagatcgagttttgctcttgttgtccaggctggaatgcaatggcacaatctcggctcactgcaacctctgccttctgggttcaagcgattctcctgccttagcctcccgagtagctgggattacaggcgcctgccaccacgtccggctaattttttgtattttgagtagagacggggtttcaccataatggtcaggctgttctcaaactcctgatctcaggtgatccacccatctcggcctnccaaagtgctgggattactggcgtgagccaccgcacccggccttgatgtttattttataaagcactgtaattttgtagctgatgacaaaaggcagccaaatgtttttgataaatcagtggcaactgtatttttgtcttttgaaataactctgaaaacatcaggacaacatagatttcaacctgatagcacaccacacacagtgagctgttgctttttaaattctgaagccttgtcaggtttgcttcctagatttcaagtgtttaaaataattctatctatgaaactgaaggatgaagcagatctctgactgacatgtaaaaaaaaatgccctttgagggtgtatggtggagataaatgtttctgaattcagtaaaattgattcctaagtatattatcctaatcctgtttgctacagttggtataaaaaggcatgaaatatgtattcaatacctcttatgtaaccaaaaccatttttaattagcttttaaggactgagagagcatcatgttcaactggcatgcagtctgcctgcattgccaatgaagtcctcaactgtttaatattttgaactaatattatttataatctatgaatttaatcttttttgaaagactttaataatttgagtctctgagaggatactttcaatttccatgggggacttatttgttggggatcttaaataagattccttttgatctaccggaatatacatgtacagagtacattggatcatgttggaaagaaggcaagtgaaaaggtcagagatgaagtagcgaagttatggaatatcgtggaaaggatactagttgtgaaatggaaagagacaagttatagtaccccaaaagcaaaacaagcaggagatgcaagagatgccccaaaaggacaaagcaacaattttctgttgccacctttataccggaagactctgttgtagaagaaaagaaggctttggtgcaccttatgtgggaggaggaggggcagggcatgctgatgctgagcgtacaggcagacaagagcgtagcctgctgttgcctccatcactatgaaatgacttattttacctgaaggacccatggtttatgttcctctaattcctttcactctccctaagccctctgagagagatgaagatagatgattttattgctactaaattgaagggagcactatttctttttgtcttttgttagcaaaaaattgcaaaaagaattgtacattcttgctaaaaataaataaataaataaaaaattaaaaaaacaagggacctaacaaaactcagcagtgttactgtattttttaaaaatatttttatagactcattttcaggttattaaatgtaagagaaacagatacccctcttttttaaagtaggtaaatcattgatgatttatattaccaatttttagaagtaattttctagtaagcttgtggcatcagaaaatactagaagatttttttagttaaattagttagaacatttatgaatgaatataataaatattttttcagaataaaatatggaccctttgtgtttactaatagataaagccagatataatttttgtttttaaggccacaaaatatggcctttgttaaagaacactaaagttagaaatctaaagttagagcaactttttaatggctatttcctattattgtaagtgttaaaacccctgcagaattcttgataaggtgctatttatactatatttcttattataagataactgtctttagtcttcttagtactagtctttttagtactaaatcaatcagcaaacatcatcatttcaccccaaaattttgtcacagaaaaggcgtatcaaatgaaaaataatttcagagatctttctttcaagatattttttcctgataaaatacattgtcttgaagtaaatacattgtcaaaacctaattgcaattctgttaaatctaagtaatttttagacagtgtttcaccgtattatttaggatgtgaaatgccatttctttcactgattacaccatatacaggaaacaggtaaaacagtgaaaactttattgtgctggttgatgccaacttggttgaaaagctctctgcagaagaagtgatctagactgacagaagtgttgctaattacaagttgtgttctcatgacgtaattagaaagtaacttctcaaagtacaacttttatgaaaaaaataagctgttaaaaaaaggaaatcgtaggttaatttaattgggaaaatgggcaattgacagagaccattttcctaacacatatatgtgctagtactttaactttttaaaattttacttctacgttttgtaatataaaaatttctattttaagtttagaatgttatacgtaccgaaagtatgcagccaaatcgatcagatcaaaccattttacctggagtttggtactggtttttacttctctgaatctgtataagaaaaataaagacaattgaacttcca

SEQ ID NO: 70820 - DNA, 5419 bp, Homo sapiens
  misc_feature (2953)..(2953): n is a, c, g, or t
aactttgtttatgggacagtccgggagctgctgcggccgcgctgtctgcttctcctgcgcctccttttcgcccagcactagcgccttaggccagctcgggggatgtgagagccgaagcccttagactgccaggcacagagtcgggtcgggatttgtcagccaagcctcggctccagctccgcaatctcgggactcacccgagcgacccaggcccgacggcaagttcgggcgggacggcggccgccgcgcgctcaggctcagcttcgctgcccgcccaggtagtgcccgctggagctcgcgcgctcatccggcaccactccagggctccaggctcctcgggcttccggagtcgagacgtggtggagttggctcgggctgaacttctttcggggggctgcctgtcctggaatcgtgcgacctttcctttgccatcctgcggttcagcaagccccgagtgcagttattccctccacccctcgccctatcttctcctcctccaggcaacttctttgcttcaagaaagttgcataattctcgaggccaggagggacccctcccccatcctgctggtcttaccgctgagtgtctgggatctccaggcgggcaattatctgtctcctcgtttccttttccctctattctttctcccaccatctcgccctctcaccctgtaaccctcttacccacttcctccgactttaaataaaaggctgatctgaccttcttaagatgaatccggcctcggcgccccctccgctcccgccgcctgggcagcaagtgatccacgtcacgcaggacctagacacagacctcgaagccctcttcaactctgtcatgaatccgaagcctagctcgtggcggaagaagatcctgccggagtctttctttaaggagcctgattcgggctcgcatcgtcgcccgcgtccctgcagctgggcaccggcgcgggtgctgcgggtagccccgcgcagcagcacgcgcacctccgccagcagtcctacgacgtgaccgacgagctgccactgcccccgggctgggagatgaccttcacggccactggccagaggtacttcctcaatcacatagaaaaaatcaccacatggcaagaccctaggaaggcgatgaatcagcctctgaatcatatgaacctccaccctgccgtcagttccacaccagtgcctcagaggtccatggcagtatcccagccaaatctcgtgatgaatcaccaacaccagcagcagatggcccccagtaccctgagccagcagaaccaccccactcagaacccacccgcagggctcatgagtatgcccaatgcgctgaccactcagcagcagcagcagcagaaactgcggcttcagagaatccagatggagagagaaaggattcgaatgcgccaagaggagctcatgaggcaggaagctgccctctgtcgacagctccccatggaagctgagactcttgccccagttcaggctgctgtcaacccacccacgatgaccccagacatgagatccatcactaataatagctcagatcctttcctcaatggagggccatatcattcgagggagcagagcactgacagtggcctggggttagggtgctacagtgtccccacaactccggaggacttcctcagcaatgtggatgagatggatacaggagaaaacgcaggacaaacacccatgaacatcaatccccaacagacccgtttccctgatttccttgactgtcttccaggaacaaacgttgacttaggaactttggaatctgaagacctgatccccctcttcaatgatgtagagtctgctctgaacaaaagtgagccctttctaacctggctgtaatcactaccattgtaacttggatgtagccatgaccttacatttcctgggcctcttggaaaaagtgatggagcagagcaagtctgcaggtgcaccacttcccgcctccatgactcgtgctccctcctttttatgttgccagtttaatcattgcctggttttgattgagagtaacttaagttaaacataaataaatattctattttcattttctgcaagcctgcgttcttgtgacagattatacagaattgtgtctgcaggattgattatgcagaatacttttctctttcttctctgctgccccatggctaagctttatgggtgttaattgaaatttatacaccaattgattttaaaccataaaaagctgaccacaggcagttacttctgagggcatcttggtccaggaaatgtgcacaaaattcgacctgatttacagtttcaaaaactgtattgatgacagtagtaccaaatgctttaaaaactatttaacttgagctttaaaaatcattgtatggatagtaaaattctactgtatggaatacaatgtaattttgaatccatgctggctctgatggctcttattagtctgtatttataaaggcacacagtcctattgtagcttatctttcgttattttactgcagagcatctagacaacttagtccctccagcgggaaagtagcagcagcagcattagtcacagttcttacactacagatcttgtgaaagagaccagtttggtactaattatgagcattttattcaaacaaaagtttttgaaatattacaactggggatttaaaaaattgcagcttagaatctgatggtttttttttttcttgatgttgtttgtttgtttttgagatcgagttttgctcttgttgtccaggctggaatgcaatggcacaatctcggctcactgcaacctctgccttctgggttcaagcgattctcctgccttagcctcccgagtagctgggattacaggcgcctgccaccacgtccggctaattttttgtattttgagtagagacggggtttcaccataatggtcaggctgttctcaaactcctgatctcaggtgatccacccatctcggcctnccaaagtgctgggattactggcgtgagccaccgcacccggccttgatgtttattttataaagcactgtaattttgtagctgatgacaaaaggcagccaaatgtttttgataaatcagtggcaactgtatttttgtcttttgaaataactctgaaaacatcaggacaacatagatttcaacctgatagcacaccacacacagtgagctgttgctttttaaattctgaagccttgtcaggtttgcttcctagatttcaagtgtttaaaataattctatctatgaaactgaaggatgaagcagatctctgactgacatgtaaaaaaaaatgccctttgagggtgtatggtggagataaatgtttctgaattcagtaaaattgattcctaagtatattatcctaatcctgtttgctacagttggtataaaaaggcatgaaatatgtattcaatacctcttatgtaaccaaaaccatttttaattagcttttaaggactgagagagcatcatgttcaactggcatgcagtctgcctgcattgccaatgaagtcctcaactgtttaatattttgaactaatattatttataatctatgaatttaatcttttttgaaagactttaataatttgagtctctgagaggatactttcaatttccatgggggacttatttgttggggatcttaaataagattccttttgatctaccggaatatacatgtacagagtacattggatcatgttggaaagaaggcaagtgaaaaggtcagagatgaagtagcgaagttatggaatatcgtggaaaggatactagttgtgaaatggaaagagacaagttatagtaccccaaaagcaaaacaagcaggagatgcaagagatgccccaaaaggacaaagcaacaattttctgttgccacctttataccggaagactctgttgtagaagaaaagaaggctttggtgcaccttatgtgggaggaggaggggcagggcatgctgatgctgagcgtacaggcagacaagagcgtagcctgctgttgcctccatcactatgaaatgacttattttacctgaaggacccatggtttatgttcctctaattcctttcactctccctaagccctctgagagagatgaagatagatgattttattgctactaaattgaagggagcactatttctttttgtcttttgttagcaaaaaattgcaaaaagaattgtacattcttgctaaaaataaataaataaataaaaaattaaaaaaacaagggacctaacaaaactcagcagtgttactgtattttttaaaaatatttttatagactcattttcaggttattaaatgtaagagaaacagatacccctcttttttaaagtaggtaaatcattgatgatttatattaccaatttttagaagtaattttctagtaagcttgtggcatcagaaaatactagaagatttttttagttaaattagttagaacatttatgaatgaatataataaatattttttcagaataaaatatggaccctttgtgtttactaatagataaagccagatataatttttgtttttaaggccacaaaatatggcctttgttaaagaacactaaagttagaaatctaaagttagagcaactttttaatggctatttcctattattgtaagtgttaaaacccctgcagaattcttgataaggtgctatttatactatatttcttattataagataactgtctttagtcttcttagtactagtctttttagtactaaatcaatcagcaaacatcatcatttcaccccaaaattttgtcacagaaaaggcgtatcaaatgaaaaataatttcagagatctttctttcaagatattttttcctgataaaatacattgtcttgaagtaaatacattgtcaaaacctaattgcaattctgttaaatctaagtaatttttagacagtgtttcaccgtattatttaggatgtgaaatgccatttctttcactgattacaccatatacaggaaacaggtaaaacagtgaaaactttattgtgctggttgatgccaacttggttgaaaagctctctgcagaagaagtgatctagactgacagaagtgttgctaattacaagttgtgttctcatgacgtaattagaaagtaacttctcaaagtacaacttttatgaaaaaaataagctgttaaaaaaaggaaatcgtaggttaatttaattgggaaaatgggcaattgacagagaccattttcctaacacatatatgtgctagtactttaactttttaaaattttacttctacgttttgtaatataaaaatttctattttaagtttagaatgttatacgtaccgaaagtatgcagccaaatcgatcagatcaaaccattttacctggagtttggtactggtttttacttctctgaatctgtataagaaaaataaagacaattgaacttcca

SEQ ID NO: 70821 - DNA, 4394 bp, Homo sapiens
  misc_feature (1928)..(1928): n is a, c, g, or t
ccgcccacgcggcggggacgcgtgggcggcactggccagaggtacttcctcaatcacatagaaaaaatcaccacatggcaagaccctaggaaggcgatgaatcagcctctgaatcatatgaacctccaccctgccgtcagttccacaccagtgcctcagaggtccatggcagtatcccagccaaatctcgtgatgaatcaccaacaccagcagcagatggcccccagtaccctgagccagcagaaccaccccactcagaacccacccgcagggctcatgagtatgcccaatgcgctgaccactcagcagcagcagcagcagaaactgcggcttcagagaatccagatggagagagaaaggattcgaatgcgccaagaggagctcatgaggcaggaagctgccctctgtcgacagctccccatggaagctgagactcttgccccagttcaggctgctgtcaacccacccacgatgaccccagacatgagatccatcactaataatagctcagatcctttcctcaatggagggccatatcattcgagggagcagagcactgacagtggcctggggttagggtgctacagtgtccccacaactccggaggacttcctcagcaatgtggatgagatggatacaggagaaaacgcaggacaaacacccatgaacatcaatccccaacagacccgtttccctgatttccttgactgtcttccaggaacaaacgttgacttaggaactttggaatctgaagacctgatccccctcttcaatgatgtagagtctgctctgaacaaaagtgagccctttctaacctggctgtaatcactaccattgtaacttggatgtagccatgaccttacatttcctgggcctcttggaaaaagtgatggagcagagcaagtctgcaggtgcaccacttcccgcctccatgactcgtgctccctcctttttatgttgccagtttaatcattgcctggttttgattgagagtaacttaagttaaacataaataaatattctattttcattttctgcaagcctgcgttcttgtgacagattatacagaattgtgtctgcaggattgattatgcagaatacttttctctttcttctctgctgccccatggctaagctttatgggtgttaattgaaatttatacaccaattgattttaaaccataaaaagctgaccacaggcagttacttctgagggcatcttggtccaggaaatgtgcacaaaattcgacctgatttacagtttcaaaaactgtattgatgacagtagtaccaaatgctttaaaaactatttaacttgagctttaaaaatcattgtatggatagtaaaattctactgtatggaatacaatgtaattttgaatccatgctggctctgatggctcttattagtctgtatttataaaggcacacagtcctattgtagcttatctttcgttattttactgcagagcatctagacaacttagtccctccagcgggaaagtagcagcagcagcattagtcacagttcttacactacagatcttgtgaaagagaccagtttggtactaattatgagcattttattcaaacaaaagtttttgaaatattacaactggggatttaaaaaattgcagcttagaatctgatggtttttttttttcttgatgttgtttgtttgtttttgagatcgagttttgctcttgttgtccaggctggaatgcaatggcacaatctcggctcactgcaacctctgccttctgggttcaagcgattctcctgccttagcctcccgagtagctgggattacaggcgcctgccaccacgtccggctaattttttgtattttgagtagagacggggtttcaccataatggtcaggctgttctcaaactcctgatctcaggtgatccacccatctcggcctnccaaagtgctgggattactggcgtgagccaccgcacccggccttgatgtttattttataaagcactgtaattttgtagctgatgacaaaaggcagccaaatgtttttgataaatcagtggcaactgtatttttgtcttttgaaataactctgaaaacatcaggacaacatagatttcaacctgatagcacaccacacacagtgagctgttgctttttaaattctgaagccttgtcaggtttgcttcctagatttcaagtgtttaaaataattctatctatgaaactgaaggatgaagcagatctctgactgacatgtaaaaaaaaatgccctttgagggtgtatggtggagataaatgtttctgaattcagtaaaattgattcctaagtatattatcctaatcctgtttgctacagttggtataaaaaggcatgaaatatgtattcaatacctcttatgtaaccaaaaccatttttaattagcttttaaggactgagagagcatcatgttcaactggcatgcagtctgcctgcattgccaatgaagtcctcaactgtttaatattttgaactaatattatttataatctatgaatttaatcttttttgaaagactttaataatttgagtctctgagaggatactttcaatttccatgggggacttatttgttggggatcttaaataagattccttttgatctaccggaatatacatgtacagagtacattggatcatgttggaaagaaggcaagtgaaaaggtcagagatgaagtagcgaagttatggaatatcgtggaaaggatactagttgtgaaatggaaagagacaagttatagtaccccaaaagcaaaacaagcaggagatgcaagagatgccccaaaaggacaaagcaacaattttctgttgccacctttataccggaagactctgttgtagaagaaaagaaggctttggtgcaccttatgtgggaggaggaggggcagggcatgctgatgctgagcgtacaggcagacaagagcgtagcctgctgttgcctccatcactatgaaatgacttattttacctgaaggacccatggtttatgttcctctaattcctttcactctccctaagccctctgagagagatgaagatagatgattttattgctactaaattgaagggagcactatttctttttgtcttttgttagcaaaaaattgcaaaaagaattgtacattcttgctaaaaataaataaataaataaaaaattaaaaaaacaagggacctaacaaaactcagcagtgttactgtattttttaaaaatatttttatagactcattttcaggttattaaatgtaagagaaacagatacccctcttttttaaagtaggtaaatcattgatgatttatattaccaatttttagaagtaattttctagtaagcttgtggcatcagaaaatactagaagatttttttagttaaattagttagaacatttatgaatgaatataataaatattttttcagaataaaatatggaccctttgtgtttactaatagataaagccagatataatttttgtttttaaggccacaaaatatggcctttgttaaagaacactaaagttagaaatctaaagttagagcaactttttaatggctatttcctattattgtaagtgttaaaacccctgcagaattcttgataaggtgctatttatactatatttcttattataagataactgtctttagtcttcttagtactagtctttttagtactaaatcaatcagcaaacatcatcatttcaccccaaaattttgtcacagaaaaggcgtatcaaatgaaaaataatttcagagatctttctttcaagatattttttcctgataaaatacattgtcttgaagtaaatacattgtcaaaacctaattgcaattctgttaaatctaagtaatttttagacagtgtttcaccgtattatttaggatgtgaaatgccatttctttcactgattacaccatatacaggaaacaggtaaaacagtgaaaactttattgtgctggttgatgccaacttggttgaaaagctctctgcagaagaagtgatctagactgacagaagtgttgctaattacaagttgtgttctcatgacgtaattagaaagtaacttctcaaagtacaacttttatgaaaaaaataagctgttaaaaaaaggaaatcgtaggttaatttaattgggaaaatgggcaattgacagagaccattttcctaacacatatatgtgctagtactttaactttttaaaattttacttctacgttttgtaatataaaaatttctattttaagtttagaatgttatacgtaccgaaagtatgcagccaaatcgatcagatcaaaccattttacctggagtttggtactggtttttacttctctgaatctgtataagaaaaataaagacaattgaacttcca

SEQ ID NO: 70822 - DNA, 4262 bp, Homo sapiens
  misc_feature (6)..(6): n is a, c, g, or t
  misc_feature (132)..(132): n is a, c, g, or t
  misc_feature (146)..(146): n is a, c, g, or t
  misc_feature (172)..(172): n is a, c, g, or t
  misc_feature (201)..(201): n is a, c, g, or t
  misc_feature (241)..(241): n is a, c, g, or t
  misc_feature (296)..(296): n is a, c, g, or t
  misc_feature (1796)..(1796): n is a, c, g, or t
aagccngccccccagcctgcagaaagcgccacccgccgcatgggggctgcattgatggtactggcgcgcaagtggcggcttgagcgcagctgcaggccaggcaggcagggcaggcaggaaaagctggcgggncttgcaggagaaantgccaggattgggaggaggaagaaanagggatttgcgaaattggcggcgcaaagnagggatggctgcattggaggggcagggagaggctggcgcntgctggtgcgagcaggctgcgcccattgggagaggctggagagctgcttggcgcnccagtttgcagggctgctgtgcaagcgcgcagcgcgcagcgatgagcgcccagacatgagatccatcactaataatagctcagatcctttcctcaatggagggccatatcattcgagggagcagagcactgacagtggcctggggttagggtgctacagtgtccccacaactccggaggacttcctcagcaatgtggatgagatggatacaggagaaaacgcaggacaaacacccatgaacatcaatccccaacagacccgtttccctgatttccttgactgtcttccaggaacaaacgttgacttaggaactttggaatctgaagacctgatccccctcttcaatgatgtagagtctgctctgaacaaaagtgagccctttctaacctggctgtaatcactaccattgtaacttggatgtagccatgaccttacatttcctgggcctcttggaaaaagtgatggagcagagcaagtctgcaggtgcaccacttcccgcctccatgactcgtgctccctcctttttatgttgccagtttaatcattgcctggttttgattgagagtaacttaagttaaacataaataaatattctattttcattttctgcaagcctgcgttcttgtgacagattatacagaattgtgtctgcaggattgattatgcagaatacttttctctttcttctctgctgccccatggctaagctttatgggtgttaattgaaatttatacaccaattgattttaaaccataaaaagctgaccacaggcagttacttctgagggcatcttggtccaggaaatgtgcacaaaattcgacctgatttacagtttcaaaaactgtattgatgacagtagtaccaaatgctttaaaaactatttaacttgagctttaaaaatcattgtatggatagtaaaattctactgtatggaatacaatgtaattttgaatccatgctggctctgatggctcttattagtctgtatttataaaggcacacagtcctattgtagcttatctttcgttattttactgcagagcatctagacaacttagtccctccagcgggaaagtagcagcagcagcattagtcacagttcttacactacagatcttgtgaaagagaccagtttggtactaattatgagcattttattcaaacaaaagtttttgaaatattacaactggggatttaaaaaattgcagcttagaatctgatggtttttttttttcttgatgttgtttgtttgtttttgagatcgagttttgctcttgttgtccaggctggaatgcaatggcacaatctcggctcactgcaacctctgccttctgggttcaagcgattctcctgccttagcctcccgagtagctgggattacaggcgcctgccaccacgtccggctaattttttgtattttgagtagagacggggtttcaccataatggtcaggctgttctcaaactcctgatctcaggtgatccacccatctcggcctnccaaagtgctgggattactggcgtgagccaccgcacccggccttgatgtttattttataaagcactgtaattttgtagctgatgacaaaaggcagccaaatgtttttgataaatcagtggcaactgtatttttgtcttttgaaataactctgaaaacatcaggacaacatagatttcaacctgatagcacaccacacacagtgagctgttgctttttaaattctgaagccttgtcaggtttgcttcctagatttcaagtgtttaaaataattctatctatgaaactgaaggatgaagcagatctctgactgacatgtaaaaaaaaatgccctttgagggtgtatggtggagataaatgtttctgaattcagtaaaattgattcctaagtatattatcctaatcctgtttgctacagttggtataaaaaggcatgaaatatgtattcaatacctcttatgtaaccaaaaccatttttaattagcttttaaggactgagagagcatcatgttcaactggcatgcagtctgcctgcattgccaatgaagtcctcaactgtttaatattttgaactaatattatttataatctatgaatttaatcttttttgaaagactttaataatttgagtctctgagaggatactttcaatttccatgggggacttatttgttggggatcttaaataagattccttttgatctaccggaatatacatgtacagagtacattggatcatgttggaaagaaggcaagtgaaaaggtcagagatgaagtagcgaagttatggaatatcgtggaaaggatactagttgtgaaatggaaagagacaagttatagtaccccaaaagcaaaacaagcaggagatgcaagagatgccccaaaaggacaaagcaacaattttctgttgccacctttataccggaagactctgttgtagaagaaaagaaggctttggtgcaccttatgtgggaggaggaggggcagggcatgctgatgctgagcgtacaggcagacaagagcgtagcctgctgttgcctccatcactatgaaatgacttattttacctgaaggacccatggtttatgttcctctaattcctttcactctccctaagccctctgagagagatgaagatagatgattttattgctactaaattgaagggagcactatttctttttgtcttttgttagcaaaaaattgcaaaaagaattgtacattcttgctaaaaataaataaataaataaaaaattaaaaaaacaagggacctaacaaaactcagcagtgttactgtattttttaaaaatatttttatagactcattttcaggttattaaatgtaagagaaacagatacccctcttttttaaagtaggtaaatcattgatgatttatattaccaatttttagaagtaattttctagtaagcttgtggcatcagaaaatactagaagatttttttagttaaattagttagaacatttatgaatgaatataataaatattttttcagaataaaatatggaccctttgtgtttactaatagataaagccagatataatttttgtttttaaggccacaaaatatggcctttgttaaagaacactaaagttagaaatctaaagttagagcaactttttaatggctatttcctattattgtaagtgttaaaacccctgcagaattcttgataaggtgctatttatactatatttcttattataagataactgtctttagtcttcttagtactagtctttttagtactaaatcaatcagcaaacatcatcatttcaccccaaaattttgtcacagaaaaggcgtatcaaatgaaaaataatttcagagatctttctttcaagatattttttcctgataaaatacattgtcttgaagtaaatacattgtcaaaacctaattgcaattctgttaaatctaagtaatttttagacagtgtttcaccgtattatttaggatgtgaaatgccatttctttcactgattacaccatatacaggaaacaggtaaaacagtgaaaactttattgtgctggttgatgccaacttggttgaaaagctctctgcagaagaagtgatctagactgacagaagtgttgctaattacaagttgtgttctcatgacgtaattagaaagtaacttctcaaagtacaacttttatgaaaaaaataagctgttaaaaaaaggaaatcgtaggttaatttaattgggaaaatgggcaattgacagagaccattttcctaacacatatatgtgctagtactttaactttttaaaattttacttctacgttttgtaatataaaaatttctattttaagtttagaatgttatacgtaccgaaagtatgcagccaaatcgatcagatcaaaccattttacctggagtttggtactggtttttacttctctgaatctgtataagaaaaataaagacaattgaacttcca

SEQ ID NO: 70823 - DNA, 3801 bp, Homo sapiens
  misc_feature (2587)..(2587): n is a, c, g, or t
aactttgtttatgggacagtccgggagctgctgcggccgcgctgtctgcttctcctgcgcctccttttcgcccagcactagcgccttaggccagctcgggggatgtgagagccgaagcccttagactgccaggcacagagtcgggtcgggatttgtcagccaagcctcggctccagctccgcaatctcgggactcacccgagcgacccaggcccgacggcaagttcgggcgggacggcggccgccgcgcgctcaggctcagcttcgctgcccgcccagaagatgaatccggcctcggcgccccctccgctcccgccgcctgggcagcaagtgatccacgtcacgcaggacctagacacagacctcgaagccctcttcaactctgtcatgaatccgaagcctagctcgtggcggaagaagatcctgccggagtctttctttaaggagcctgattcgggctcgcactcgcgccagtccagcaccgactcgtcgggcggccacccggggcctcgactggctgggggtgcccagcatgtccgctcgcactcgtcgcccgcgtccctgcagctgggcaccggcgcgggtgctgcgggtagccccgcgcagcagcacgcgcacctccgccagcagtcctacgacgtgaccgacgagctgccactgcccccgggctgggagatgaccttcacggccactggccagaggtacttcctcaatcacatagaaaaaatcaccacatggcaagaccctaggaaggcgatgaatcagcctctgaatcatatgaacctccaccctgccgtcagttccacaccagtgcctcagaggtccatggcagtatcccagccaaatctcgtgatgaatcaccaacaccagcagcagatggcccccagtaccctgagccagcagaaccaccccactcagaacccacccgcagggctcatgagtatgcccaatgcgctgaccactcagcagcagcagcagcagaaactgcggcttcagagaatccagatggagagagaaaggattcgaatgcgccaagaggagctcatgaggcaggaagctgccctctgtcgacagctccccatggaagctgagactcttgccccagttcaggctgctgtcaacccacccacgatgaccccagacatgagatccatcactaataatagctcagatcctttcctcaatggagggccatatcattcgagggagcagagcactgacagtggcctggggttagggtgctacagtgtccccacaactccggaggacttcctcagcaatgtggatgagatggatacaggagaaaacgcaggacaaacacccatgaacatcaatccccaacagacccgtttccctgatttccttgactgtcttccaggaacaaacgttgacttaggaactttggaatctgaagacctgatccccctcttcaatgatgtagagtctgctctgaacaaaagtgagccctttctaacctggctgtaatcactaccattgtaacttggatgtagccatgaccttacatttcctgggcctcttggaaaaagtgatggagcagagcaagtctgcaggtgcaccacttcccgcctccatgactcgtgctccctcctttttatgttgccagtttaatcattgcctggttttgattgagagtaacttaagttaaacataaataaatattctattttcattttctgcaagcctgcgttcttgtgacagattatacagaattgtgtctgcaggattgattatgcagaatacttttctctttcttctctgctgccccatggctaagctttatgggtgttaattgaaatttatacaccaattgattttaaaccataaaaagctgaccacaggcagttacttctgagggcatcttggtccaggaaatgtgcacaaaattcgacctgatttacagtttcaaaaactgtattgatgacagtagtaccaaatgctttaaaaactatttaacttgagctttaaaaatcattgtatggatagtaaaattctactgtatggaatacaatgtaattttgaatccatgctggctctgatggctcttattagtctgtatttataaaggcacacagtcctattgtagcttatctttcgttattttactgcagagcatctagacaacttagtccctccagcgggaaagtagcagcagcagcattagtcacagttcttacactacagatcttgtgaaagagaccagtttggtactaattatgagcattttattcaaacaaaagtttttgaaatattacaactggggatttaaaaaattgcagcttagaatctgatggtttttttttttcttgatgttgtttgtttgtttttgagatcgagttttgctcttgttgtccaggctggaatgcaatggcacaatctcggctcactgcaacctctgccttctgggttcaagcgattctcctgccttagcctcccgagtagctgggattacaggcgcctgccaccacgtccggctaattttttgtattttgagtagagacggggtttcaccataatggtcaggctgttctcaaactcctgatctcaggtgatccacccatctcggcctnccaaagtgctgggattactggcgtgagccaccgcacccggccttgatgtttattttataaagcactgtaattttgtagctgatgacaaaaggcagccaaatgtttttgataaatcagtggcaactgtatttttgtcttttgaaataactctgaaaacatcaggacaacatagatttcaacctgatagcacaccacacacagtgagctgttgctttttaaattctgaagccttgtcaggtttgcttcctagatttcaagtgtttaaaataattctatctatgaaactgaaggatgaagcagatctctgactgacatgtaaaaaaaaatgccctttgagggtgtatggtggagataaatgtttctgaattcagtaaaattgattcctaagtatattatcctaatcctgtttgctacagttggtataaaaaggcatgaaatatgtattcaatacctcttatgtaaccaaaaccatttttaattagcttttaaggactgagagagcatcatgttcaactggcatgcagtctgcctgcattgccaatgaagtcctcaactgtttaatattttgaactaatattatttataatctatgaatttaatcttttttgaaagactttaataatttgagtctctgagaggatactttcaatttccatgggggacttatttgttggggatcttaaataagattccttttgatctaccggaatatacatgtacagagtacattggatcatgttggaaagaaggcaagtgaaaaggtcagagatgaagtagcgaagttatggaatatcgtggaaaggatactagttgtgaaatggaaagagacaagttatagtaccccaaaagcaaaacaagcaggagatgcaagagatgccccaaaaggacaaagcaacaattttctgttgccacctttataccggaagactctgttgtagaagaaaagaaggctttggtgcaccttatgtgggaggaggaggggcagggcatgctgatgctgagcgtacaggcagacaagagcgtagcctgctgttgcctccatcactatgaaatgacttattttacctgaaggacccatggtttatgttcctctaattcctttcactctccctaagccctctgagagagatgaagatagatgattttattgctactaaattgaagggagcacaatgtgataagctccatcttccaacctaatttttaattgtctc

SEQ ID NO: 70824 - DNA, 1819 bp, Homo sapiens
aactttgtttatgggacagtccgggagctgctgcggccgcgctgtctgcttctcctgcgcctccttttcgcccagcactagcgccttaggccagctcgggggatgtgagagccgaagcccttagactgccaggcacagagtcgggtcgggatttgtcagccaagcctcggctccagctccgcaatctcgggactcacccgagcgacccaggcccgacggcaagttcgggcgggacggcggccgccgcgcgctcaggctcagcttcgctgcccgcccaggtagtgcccgctggagctcgcgcgctcatccggcaccactccagggctccaggctcctcgggcttccggagtcgagacgtggtggagttggctcgggctgaacttctttcggggggctgcctgtcaagatgaatccggcctcggcgccccctccgctcccgccgcctgggcagcaagtgatccacgtcacgcaggacctagacacagacctcgaagccctcttcaactctgtcatgaatccgaagcctagctcgtggcggaagaagatcctgccggagtctttctttaaggagcctgattcgggctcgcactcgcgccagtccagcaccgactcgtcgggcggccacccggggcctcgactggctgggggtgcccagcatgtccgctcgcactcgtcgcccgcgtccctgcagctgggcaccggcgcgggtgctgcgggtagccccgcgcagcagcacgcgcacctccgccagcagtcctacgacgtgaccgacgagctgccactgcccccgggctgggagatgaccttcacggccactggccagaggtacttcctcaatcacatagaaaaaatcaccacatggcaagaccctaggaaggcgatgaatcagcctctgaatcatatgaacctccaccctgccgtcagttccacaccagtgcctcagaggtccatggcagtatcccagccaaatctcgtgatgaatcaccaacaccagcagcagatggcccccagtaccctgagccagcagaaccaccccactcagaacccacccgcagggctcatgagtatgcccaatgcgctgaccactcagcagcagcagcagcagaaactgcggcttcagagaatccagatggagagagaaaggattcgaatgcgccaagaggagctcatgaggcaggaagctgccctctgtcgacagctccccatggaagctgagactcttgccccagttcaggctgctgtcaacccacccacgatgaccccagacatgagatccatcactaataatagctcagatcctttcctcaatggagggccatatcattcgagggagcagagcactgacagtggcctggggttagggtgctacagtgtccccacaactccggaggacttcctcagcaatgtggatgagatggatacaggagaaaacgcaggacaaacacccatgaacatcaatccccaacagacccgtttccctgatttccttgactgtcttccaggaacaaacgttgacttaggaactttggaatctgaagacctgatccccctcttcaatgatgtagagtctgctctgaacaaaagtgagccctttctaacctggctgtaatcactaccattgtaacttggatgtagccatgaccttacatttcctgggcctcttggaaaaagtgatggagcagagcaagtctgcaggtgcaccacttcccgcctccatgactcgtgctccctcctttttatgttgccagtttaatcattgcctggttttgattgagagtaacttaagttaaacataaataaatattctattttcattttc

SEQ ID NO: 70825 - DNA, 755 bp, Homo sapiens
  misc_feature (755)..(755): n is a, c, g, or t
aacactgcctttgaggtggcagagaaatacctggatccaggcgaaggtggaggaagtggggcggctggcagcagggctagctggctctctggaggagcagatggctgggctacggcagcaggagcagaacattatcaactacaagactaacattgaccggctggagggtgaccaccagctgctgcaggagagcctggtgttcgacaataagcacaccgtctacagcatggagcacatccgcgtgggctgggagcagctgctcacctccattgcccgcaccatcaatgaagtggagaaccaggtactgacccgagacgccaagggactgagccaggagcagctcaacgagttccgagcatccttcaaccactttgacaggaagcggaatgggatgatggagcctgatgacttccgagcttgcctcatctccatgggctatgacctgggggaagtggagtttgctcgcatcatgaccatggtggaccccaacgcagctggggtggtgaccttccaggccttcatagacttcatgacccgagagacagccgagactgacacgactgagcaagttgtagcttccttcaagatcttggcaggagacaagaactacttcaccccgaggagctgggggaagctcctgccaagagggcgaatactgatccgcgatggtgcctacaaggttccgtgcccgttgaacctggataagtgcctctcagtgcccttgggagaggccttgccaaactgggttcttgagn

SEQ ID NO: 70826 - DNA, 479 bp, Homo sapiens
agccttgtgtgtggacatcttttataaatccacccatattagtaaatgatgccatcagccccattttgcagatgagaaaactgaagcccacatgggttagtgacttgcccaagagctttctcgtatatcccagacaagttggctcaaagcaacaggggctgaggtttgaggggctggagcccatctcccctaaagccatttcccagcccccagagctggctctggcataactgccctcctcccaggtccgaaagctggtgcccagccgtgaccagacactgcaggaggagctggcacggcagcaggtaaacgagaggctccggcgacagtttgcggcccaggccaatgccattggaccctggatccaggcgaaggtggaggtaagggctggatagtgggtccacctagggggatggggccaggctggacacaggagttggagcctcatgatgcctcatgctgcctgggaaccccctgca

SEQ ID NO: 70827 - DNA, 1094 bp, Homo sapiens
gggcatccagggtgagatccagaagttctgccagacgtatgggctgcggccctgctccaccaatccctacatcaccctcagcccgcaggacatcaacaccaagtgggatatggtccgaaagctggtgcccagccgtgaccagacactgcaggaggagctggcacggcagcaggtaaacgagaggctccggcgacagtttgcggcccaggccaatgccattggaccctggatccaggcgaaggtggaggaagtggggcggctggcagcagggctagctggctctctggaggagcagatggctgggctacggcagcaggagcagaacattatcaactacaagactaacattgaccggctggagggtgaccaccagctgctgcaggagagcctggtgttcgacaataagcacaccgtctacagcatggagcacatccgcgtgggctgggagcagctgctcacctccattgcccgcaccatcaatgaagtggagaaccaggtactgacccgagacgccaagggactgagccaggagcagctcaacgagttccgagcatccttcaaccactttgacaggaagcggaatgggatgatggagcctgatgacttccgagcttgcctcatctccatgggctatgacctgggggaagtggagtttgctcgcatcatgaccatggtggaccccaacgcagctggggtggtgaccttccaggccttcatagacttcatgacccgagagacagccgagactgacacgactgagcaagttgtagcttccttcaagatcttggcaggagacaagaactacatcacccccgaggagctgcggcgcgagctccctgccaagcaggccgagtactgcatccgccgtatggtgccctacaagggatccggggccccggctggagccctggactacgtggccttctccagtgccctctatggggagagcgacctttgaccccaaccactgaggttctctatgcaagatggagagaggatgcaccctgtggctgatcccatccgtccctcggagcaagggcctaagagaaaagccagccaagtgcttctgaataaagatccctctctgggtctct

SEQ ID NO: 70828 - DNA, 334 bp, Homo sapiens
agcaagttgtagcttccttcaagatcttggcaggagacaaggtgagtcccaggcggtggaggggctggtgggctagggcagggcacgggacctgtgggctcaacgcctcttctccccagaactacatcacccccgaggagctgcggcgcgagctccctgccaagcaggccgagtactgcatccgccgtatggtgccctacaagggatccggggccccggctggagccctggactacgtggccttctccagtgccctctatggggagagcgacctttgaccccaaccactgaggttctctatgcaagatggagagaggatgcaccctgtggctga

SEQ ID NO: 70829 - DNA, 1607 bp, Homo sapiens
attagtcactgcgcccaggagccagtttacacctagcgaaggcggaggcattggacaagcctgggtctgagcagacagaaccccttcctgcgaccctggagtcccaatcgtgctgccattttccttctgcccaggactctccagtcctcagtcaccttggacaaagaagtgtggatcctcagattccatcttttccaactccaaggtgccatggcagagaaggtgctggtaacaggtggggctggctacattggcagccacacggtgctggagctgctggaggctggctacttgcctgtggtcatcgataacttccataatgccttccgtggagggggctccctgcctgagagcctgcggcgggtccaggagctgacaggccgctctgtggagtttgaggagatggacattttggaccagggagccctacagcgtctcttcaaaaagtacagctttatggcggtcatccactttgcggggctcaaggccgtgggcgagtcggtgcagaagcctctggattattacagagttaacctgaccgggaccatccagcttctggagatcatgaaggcccacggggtgaagaacctggtgttcagcagctcagccactgtgtacgggaacccccagtacctgccccttgatgaggcccaccccacgggtggttgtaccaacccttacggcaagtccaagttcttcatcgaggaaatgatccgggacctgtgccaggcagacaagacttggaacgcagtgctgctgcgctatttcaaccccacaggtgcccatgcctctggctgcattggtgaggatccccagggcatacccaacaacctcatgccttatgtctcccaggtggcgatcgggcgacgggaggccctgaatgtctttggcaatgactatgacacagaggatggcacaggtgtccgggattacatccatgtcgtggatctggccaagggccacattgcagccttaaggaagctgaaagaacagtgtggctgccggatctacaacctgggcacgggcacaggctattcagtgctgcagatggtccaggctatggagaaggcctctgggaagaagatcccgtacaaggtggtggcacggcgggaaggtgatgtggcagcctgttacgccaaccccagcctggcccaagaggagctggggtggacagcagccttagggctggacaggatgtgtgaggatctctggcgctggcagaagcagaatccttcaggctttggcacgcaagcctgaggaccctcccctaccaaggaccaggaaaagcagcagctgcctgctctccagcctctggcaggaactcagggccctggagctgctggggccaagccaaggcctcccctacctcaaaccccagctgggcccgcttagcccaccaggcatgaggccaagggctccactgaccaggaggccgaggtctctaactcttatcttccacagggtccaagagttcatcaggacccccaagagtgagtgagggggcaaggctctggcacaaaacctcctcctcccaggcactcatttatattgctctgaaagagctttccaaagtatttaaaaataaaaacaagttttcttacactggg

SEQ ID NO: 70830 - DNA, 1525 bp, Homo sapiens
caggctgtactgtctggaagttacggatcgtggggcgcgggaacccgagcaggactctccagtcctcagtcaccttggacaaagaagtgtggatcctcagattccatcttttccaactccaaggtgccatggcagagaaggtgctggtaacaggtggggctggctacattggcagccacacggtgctggagctgctggaggctggctacttgcctgtggtcatcgataacttccataatgccttccgtggagggggctccctgcctgagagcctgcggcgggtccaggagctgacaggccgctctgtggagtttgaggagatggacattttggaccagggagccctacagcgtctcttcaaaaagtacagctttatggcggtcatccactttgcggggctcaaggccgtgggcgagtcggtgcagaagcctctggattattacagagttaacctgaccgggaccatccagcttctggagatcatgaaggcccacggggtgaagaacctggtgttcagcagctcagccactgtgtacgggaacccccagtacctgccccttgatgaggcccaccccacgggtggttgtaccaacccttacggcaagtccaagttcttcatcgaggaaatgatccgggacctgtgccaggcagacaagacttggaacgcagtgctgctgcgctatttcaaccccacaggtgcccatgcctctggctgcattggtgaggatccccagggcatacccaacaacctcatgccttatgtctcccaggtggcgatcgggcgacgggaggccctgaatgtctttggcaatgactatgacacagaggatggcacaggtgtccgggattacatccatgtcgtggatctggccaagggccacattgcagccttaaggaagctgaaagaacagtgtggctgccggatctacaacctgggcacgggcacaggctattcagtgctgcagatggtccaggctatggagaaggcctctgggaagaagatcccgtacaaggtggtggcacggcgggaaggtgatgtggcagcctgttacgccaaccccagcctggcccaagaggagctggggtggacagcagccttagggctggacaggatgtgtgaggatctctggcgctggcagaagcagaatccttcaggctttggcacgcaagcctgaggaccctcccctaccaaggaccaggaaaagcagcagctgcctgctctccagcctctggcaggaactcagggccctggagctgctggggccaagccaaggcctcccctacctcaaaccccagctgggcccgcttagcccaccaggcatgaggccaagggctccactgaccaggaggccgaggtctctaactcttatcttccacagggtccaagagttcatcaggacccccaagagtgagtgagggggcaaggctctggcacaaaacctcctcctcccaggcactcatttatattgctctgaaagagctttccaaagtatttaaaaataaaaacaagttttcttacactggg

SEQ ID NO: 70831 - DNA, 1558 bp, Homo sapiens
gggccgtcagcacttaaagggcccgcggctcgggcgtaggaggcggtgcctctgcagcaagcgtggggcgcgggaacccgagcaggactctccagtcctcagtcaccttggacaaagaagtgtggatcctcagattccatcttttccaactccaaggtgccatggcagagaaggtgctggtaacaggtggggctggctacattggcagccacacggtgctggagctgctggaggctggctacttgcctgtggtcatcgataacttccataatgccttccgtggagggggctccctgcctgagagcctgcggcgggtccaggagctgacaggccgctctgtggagtttgaggagatggacattttggaccagggagccctacagcgtctcttcaaaaagtacagctttatggcggtcatccactttgcggggctcaaggccgtgggcgagtcggtgcagaagcctctggattattacagagttaacctgaccgggaccatccagcttctggagatcatgaaggcccacggggtgaagaacctggtgttcagcagctcagccactgtgtacgggaacccccagtacctgccccttgatgaggcccaccccacgggtggttgtaccaacccttacggcaagtccaagttcttcatcgaggaaatgatccgggacctgtgccaggcagacaagacttggaacgcagtgctgctgcgctatttcaaccccacaggtgcccatgcctctggctgcattggtgaggatccccagggcatacccaacaacctcatgccttatgtctcccaggtggcgatcgggcgacgggaggccctgaatgtctttggcaatgactatgacacagaggatggcacaggtgtccgggattacatccatgtcgtggatctggccaagggccacattgcagccttaaggaagctgaaagaacagtgtggctgccggatctacaacctgggcacgggcacaggctattcagtgctgcagatggtccaggctatggagaaggcctctgggaagaagatcccgtacaaggtggtggcacggcgggaaggtgatgtggcagcctgttacgccaaccccagcctggcccaagaggagctggggtggacagcagccttagggctggacaggatgtgtgaggatctctggcgctggcagaagcagaatccttcaggctttggcacgcaagcctgaggaccctcccctaccaaggaccaggaaaagcagcagctgcctgctctccagcctctggcaggaactcagggccctggagctgctggggccaagccaaggcctcccctacctcaaaccccagctgggcccgcttagcccaccaggcatgaggccaagggctccactgaccaggaggccgaggtctctaactcttatcttccacagggtccaagagttcatcaggacccccaagagtgagtgagggggcaaggctctggcacaaaacctcctcctcccaggcactcatttatattgctctgaaagagctttccaaagtatttaaaaataaaaacaagttttcttacactggg

SEQ ID NO: 70832 - DNA, 1639 bp, Homo sapiens
gccggggttcattcattgccggcctgaggactcctagctcggccccgctccgcgctacagcccaaagcccagcctgagacccagccgccctcgtatgcccacggcctagctccccttccctccaacagacagactgggaaaaccgagtgggcgacggctgagcaaggactctccagtcctcagtcaccttggacaaagaagtgtggatcctcagattccatcttttccaactccaaggtgccatggcagagaaggtgctggtaacaggtggggctggctacattggcagccacacggtgctggagctgctggaggctggctacttgcctgtggtcatcgataacttccataatgccttccgtggagggggctccctgcctgagagcctgcggcgggtccaggagctgacaggccgctctgtggagtttgaggagatggacattttggaccagggagccctacagcgtctcttcaaaaagtacagctttatggcggtcatccactttgcggggctcaaggccgtgggcgagtcggtgcagaagcctctggattattacagagttaacctgaccgggaccatccagcttctggagatcatgaaggcccacggggtgaagaacctggtgttcagcagctcagccactgtgtacgggaacccccagtacctgccccttgatgaggcccaccccacgggtggttgtaccaacccttacggcaagtccaagttcttcatcgaggaaatgatccgggacctgtgccaggcagacaagacttggaacgcagtgctgctgcgctatttcaaccccacaggtgcccatgcctctggctgcattggtgaggatccccagggcatacccaacaacctcatgccttatgtctcccaggtggcgatcgggcgacgggaggccctgaatgtctttggcaatgactatgacacagaggatggcacaggtgtccgggattacatccatgtcgtggatctggccaagggccacattgcagccttaaggaagctgaaagaacagtgtggctgccggatctacaacctgggcacgggcacaggctattcagtgctgcagatggtccaggctatggagaaggcctctgggaagaagatcccgtacaaggtggtggcacggcgggaaggtgatgtggcagcctgttacgccaaccccagcctggcccaagaggagctggggtggacagcagccttagggctggacaggatgtgtgaggatctctggcgctggcagaagcagaatccttcaggctttggcacgcaagcctgaggaccctcccctaccaaggaccaggaaaagcagcagctgcctgctctccagcctctggcaggaactcagggccctggagctgctggggccaagccaaggcctcccctacctcaaaccccagctgggcccgcttagcccaccaggcatgaggccaagggctccactgaccaggaggccgaggtctctaactcttatcttccacagggtccaagagttcatcaggacccccaagagtgagtgagggggcaaggctctggcacaaaacctcctcctcccaggcactcatttatattgctctgaaagagctttccaaagtatttaaaaataaaaacaagttttcttacactggg

SEQ ID NO: 70833 - DNA, 1818 bp, Homo sapiens
gggccgtcagcacttaaagggcccgcggctcgggcgtaggaggcggtgcctctgcagcaagcgtggggcgcgggaacccgagcagtatctgtatctgtaaagtgccagtgataacacctgtctcaccgagatgctgggggaattcaggaaaatcatgcaaaagtgcctggtacggagcctggcacgcagagggctcttggtcaagtgggttggagctgcgtgagcccagaaggggatagaggcagcgtggaggaaggcggcagcgggcccggtcgctgggaatgaaaggcctcagtgtctggggcttcctccccgtactacccgcagagtttgttcagggtggaggactctccagtcctcagtcaccttggacaaagaagtgtggatcctcagattccatcttttccaactccaaggtgccatggcagagaaggtgctggtaacaggtggggctggctacattggcagccacacggtgctggagctgctggaggctggctacttgcctgtggtcatcgataacttccataatgccttccgtggagggggctccctgcctgagagcctgcggcgggtccaggagctgacaggccgctctgtggagtttgaggagatggacattttggaccagggagccctacagcgtctcttcaaaaagtacagctttatggcggtcatccactttgcggggctcaaggccgtgggcgagtcggtgcagaagcctctggattattacagagttaacctgaccgggaccatccagcttctggagatcatgaaggcccacggggtgaagaacctggtgttcagcagctcagccactgtgtacgggaacccccagtacctgccccttgatgaggcccaccccacgggtggttgtaccaacccttacggcaagtccaagttcttcatcgaggaaatgatccgggacctgtgccaggcagacaagacttggaacgcagtgctgctgcgctatttcaaccccacaggtgcccatgcctctggctgcattggtgaggatccccagggcatacccaacaacctcatgccttatgtctcccaggtggcgatcgggcgacgggaggccctgaatgtctttggcaatgactatgacacagaggatggcacaggtgtccgggattacatccatgtcgtggatctggccaagggccacattgcagccttaaggaagctgaaagaacagtgtggctgccggatctacaacctgggcacgggcacaggctattcagtgctgcagatggtccaggctatggagaaggcctctgggaagaagatcccgtacaaggtggtggcacggcgggaaggtgatgtggcagcctgttacgccaaccccagcctggcccaagaggagctggggtggacagcagccttagggctggacaggatgtgtgaggatctctggcgctggcagaagcagaatccttcaggctttggcacgcaagcctgaggaccctcccctaccaaggaccaggaaaagcagcagctgcctgctctccagcctctggcaggaactcagggccctggagctgctggggccaagccaaggcctcccctacctcaaaccccagctgggcccgcttagcccaccaggcatgaggccaagggctccactgaccaggaggccgaggtctctaactcttatcttccacagggtccaagagttcatcaggacccccaagagtgagtgagggggcaaggctctggcacaaaacctcctcctcccaggcactcatttatattgctctgaaagagctttccaaagtatttaaaaataaaaacaagttttcttacactggg

SEQ ID NO: 70834 - DNA, 1432 bp, Homo sapiens
gggccgtcagcacttaaagggcccgcggctcgggcgtaggaggcggtgcctctgcagcaagcgtggggcgcgggaacccgagcaggactctccagtcctcagtcaccttggacaaagaagtgtggatcctcagattccatcttttccaactccaaggagggggctccctgcctgagagcctgcggcgggtccaggagctgacaggccgctctgtggagtttgaggagatggacattttggaccagggagccctacagcgtctcttcaaaaagtacagctttatggcggtcatccactttgcggggctcaaggccgtgggcgagtcggtgcagaagcctctggattattacagagttaacctgaccgggaccatccagcttctggagatcatgaaggcccacggggtgaagaacctggtgttcagcagctcagccactgtgtacgggaacccccagtacctgccccttgatgaggcccaccccacgggtggttgtaccaacccttacggcaagtccaagttcttcatcgaggaaatgatccgggacctgtgccaggcagacaagacttggaacgcagtgctgctgcgctatttcaaccccacaggtgcccatgcctctggctgcattggtgaggatccccagggcatacccaacaacctcatgccttatgtctcccaggtggcgatcgggcgacgggaggccctgaatgtctttggcaatgactatgacacagaggatggcacaggtgtccgggattacatccatgtcgtggatctggccaagggccacattgcagccttaaggaagctgaaagaacagtgtggctgccggatctacaacctgggcacgggcacaggctattcagtgctgcagatggtccaggctatggagaaggcctctgggaagaagatcccgtacaaggtggtggcacggcgggaaggtgatgtggcagcctgttacgccaaccccagcctggcccaagaggagctggggtggacagcagccttagggctggacaggatgtgtgaggatctctggcgctggcagaagcagaatccttcaggctttggcacgcaagcctgaggaccctcccctaccaaggaccaggaaaagcagcagctgcctgctctccagcctctggcaggaactcagggccctggagctgctggggccaagccaaggcctcccctacctcaaaccccagctgggcccgcttagcccaccaggcatgaggccaagggctccactgaccaggaggccgaggtctctaactcttatcttccacagggtccaagagttcatcaggacccccaagagtgagtgagggggcaaggctctggcacaaaacctcctcctcccaggcactcatttatattgctctgaaagagctttccaaagtatttaaaaataaaaacaagttttcttacactggg

SEQ ID NO: 70835 - DNA, 2147 bp, Homo sapiens
gccggggttcattcattgccggcctgaggactcctagctcggccccgctccgcgctacagcccaaagcccagcctgagacccagccgccctcgtatgcccacggcctagctccccttccctccaacagacagactgggaaaaccgagtgggcgacggctgagcaaggactctccagtcctcagtcaccttggacaaagaagtgtggatcctcagattccatcttttccaactccaaggcaagtggaactagaaaataaggtgcctgtgtgtcaggtctccccagctctgctgtggcgggcccttaagatcacctcactgaaccctcacgctgcctcatgaagtttatacaattattagctctgttttacagagatagaaactgaggccaagaggctaattaatttccaaagcctaaggccagaaagtgatggtacccagacttgccccagggctgacttctgagccagtctggtacctagggcacactgccgcctccttccaaagcgagcttagggggcaggattccagtgggaaggaagctctgagcaggcagcctcagccacctctgagactctgtatcctgggccaggtgccatggcagagaaggtgctggtaacaggtggggctggctacattggcagccacacggtgctggagctgctggaggctggctacttgcctgtggtcatcgataacttccataatgccttccgtggtgagcggggcagtggggctggggctacttgaggggatggcagaagcaaaaccctgggttccacctccaccaccgggcggggaatgtgtgtctggctagtccctgggaacacagcaccccatgtcgtgatgatgtggcctacatgtaccctaccagagggggctccctgcctgagagcctgcggcgggtccaggagctgacaggccgctctgtggagtttgaggagatggacattttggaccagggagccctacagcgtctcttcaaaaagtacagctttatggcggtcatccactttgcggggctcaaggccgtgggcgagtcggtgcagaagcctctggattattacagagttaacctgaccgggaccatccagcttctggagatcatgaaggcccacggggtgaagaacctggtgttcagcagctcagccactgtgtacgggaacccccagtacctgccccttgatgaggcccaccccacgggtggttgtaccaacccttacggcaagtccaagttcttcatcgaggaaatgatccgggacctgtgccaggcagacaagacttggaacgcagtgctgctgcgctatttcaaccccacaggtgcccatgcctctggctgcattggtgaggatccccagggcatacccaacaacctcatgccttatgtctcccaggtggcgatcgggcgacgggaggccctgaatgtctttggcaatgactatgacacagaggatggcacaggtgtccgggattacatccatgtcgtggatctggccaagggccacattgcagccttaaggaagctgaaagaacagtgtggctgccggatctacaacctgggcacgggcacaggctattcagtgctgcagatggtccaggctatggagaaggcctctgggaagaagatcccgtacaaggtggtggcacggcgggaaggtgatgtggcagcctgttacgccaaccccagcctggcccaagaggagctggggtggacagcagccttagggctggacaggatgtgtgaggatctctggcgctggcagaagcagaatccttcaggctttggcacgcaagcctgaggaccctcccctaccaaggaccaggaaaagcagcagctgcctgctctccagcctctggcaggaactcagggccctggagctgctggggccaagccaaggcctcccctacctcaaaccccagctgggcccgcttagcccaccaggcatgaggccaagggctccactgaccaggaggccgaggtctctaactcttatcttccacagggtccaagagttcatcaggacccccaagagtgagtgagggggcaaggctctggcacaaaacctcctcctcccaggcactcatttatattgctctgaaagagctttccaaagtatttaaaaataaaaacaagttttcttacactggg

SEQ ID NO: 70836 - DNA, 1636 bp, Homo sapiens
caggctgtactgtctggaagttacggatcgtggggcgcgggaacccgagcaggactctccagtcctcagtcaccttggacaaagaagtgtggatcctcagattccatcttttccaactccaaggtgccatggcagagaaggtgctggtaacaggtggggctggctacattggcagccacacggtgctggagctgctggaggctggctacttgcctgtggtcatcgataacttccataatgccttccgtggagggggctccctgcctgagagcctgcggcgggtccaggagctgacaggccgctctgtggagtttgaggagatggacattttggaccagggagccctacagcgtctcttcaaaaagtacagctttatggcggtcatccactttgcggggctcaaggccgtgggcgagtcggtgcagaagcctctggattattacagagttaacctgaccgggaccatccagcttctggagatcatgaaggcccacggggtgaagaacctggtgttcagcagctcagccactgtgtacgggaacccccagtacctgccccttgatgaggcccaccccacgggtggttgtaccaacccttacggcaagtccaagttcttcatcgaggaaatgatccgggacctgtgccaggcagacaagacttggaacgcagtgctgctgcgctatttcaaccccacaggtgcccatgcctctggctgcattggtgaggatccccagggcatacccaacaacctcatgccttatgtctcccaggtggcgatcgggcgacgggaggccctgaatgtctttggcaatgactatgacacagaggatggcacaggtgtccgggattacatccatgtcgtggatctggccaagggccacattgcagccttaaggaagctgaaagaacagtgtggctgccggggtaggaagagaagggagaagtgagggaggggagggaccagatccaggcagagcggcccagaggcgtggtcagtccagcccgctccataaaccctgttctccgtgggccagatctacaacctgggcacgggcacaggctattcagtgctgcagatggtccaggctatggagaaggcctctgggaagaagatcccgtacaaggtggtggcacggcgggaaggtgatgtggcagcctgttacgccaaccccagcctggcccaagaggagctggggtggacagcagccttagggctggacaggatgtgtgaggatctctggcgctggcagaagcagaatccttcaggctttggcacgcaagcctgaggaccctcccctaccaaggaccaggaaaagcagcagctgcctgctctccagcctctggcaggaactcagggccctggagctgctggggccaagccaaggcctcccctacctcaaaccccagctgggcccgcttagcccaccaggcatgaggccaagggctccactgaccaggaggccgaggtctctaactcttatcttccacagggtccaagagttcatcaggacccccaagagtgagtgagggggcaaggctctggcacaaaacctcctcctcccaggcactcatttatattgctctgaaagagctttccaaagtatttaaaaataaaaacaagttttcttacactggg

SEQ ID NO: 70837 - DNA, 1507 bp, Homo sapiens
gggccgtcagcacttaaagggcccgcggctcgggcgtaggaggcggtgcctctgcagcaagcgtggggcgcgggaacccgagcaggactctccagtcctcagtcaccttggacaaagaagtgtggatcctcagattccatcttttccaactccaaggtgccatggcagagaaggtgctggtaacaggtggggctggctacattggcagccacacggtgctggagctgctggaggctggctacttgcctgtggtcatcgataacttccataatgccttccgtggagggggctccctgcctgagagcctgcggcgggtccaggagctgacaggccgctctgtggagtttgaggagatggacattttggaccagggagccctacagcgtctcttcaaaaagtcggtgcagaagcctctggattattacagagttaacctgaccgggaccatccagcttctggagatcatgaaggcccacggggtgaagaacctggtgttcagcagctcagccactgtgtacgggaacccccagtacctgccccttgatgaggcccaccccacgggtggttgtaccaacccttacggcaagtccaagttcttcatcgaggaaatgatccgggacctgtgccaggcagacaagacttggaacgcagtgctgctgcgctatttcaaccccacaggtgcccatgcctctggctgcattggtgaggatccccagggcatacccaacaacctcatgccttatgtctcccaggtggcgatcgggcgacgggaggccctgaatgtctttggcaatgactatgacacagaggatggcacaggtgtccgggattacatccatgtcgtggatctggccaagggccacattgcagccttaaggaagctgaaagaacagtgtggctgccggatctacaacctgggcacgggcacaggctattcagtgctgcagatggtccaggctatggagaaggcctctgggaagaagatcccgtacaaggtggtggcacggcgggaaggtgatgtggcagcctgttacgccaaccccagcctggcccaagaggagctggggtggacagcagccttagggctggacaggatgtgtgaggatctctggcgctggcagaagcagaatccttcaggctttggcacgcaagcctgaggaccctcccctaccaaggaccaggaaaagcagcagctgcctgctctccagcctctggcaggaactcagggccctggagctgctggggccaagccaaggcctcccctacctcaaaccccagctgggcccgcttagcccaccaggcatgaggccaagggctccactgaccaggaggccgaggtctctaactcttatcttccacagggtccaagagttcatcaggacccccaagagtgagtgagggggcaaggctctggcacaaaacctcctcctcccaggcactcatttatattgctctgaaagagctttccaaagtatttaaaaataaaaacaagttttcttacactggg

SEQ ID NO: 70838 - DNA, 1018 bp, Homo sapiens
cacacacccacccacaatcatcagtagacctcgtgttaatcggcagagggcctgatgaggcccaccccacgggtggttgtaccaacccttacggcaagtccaagttcttcatcgaggaaatgatccgggacctgtgccaggcagacaagacttggaacgcagtgctgctgcgctatttcaaccccacaggtgcccatgcctctggctgcattggtgaggatccccagggcatacccaacaacctcatgccttatgtctcccaggtggcgatcgggcgacgggaggccctgaatgtctttggcaatgactatgacacagaggatggcacaggtgtccgggattacatccatgtcgtggatctggccaagggccacattgcagccttaaggaagctgaaagaacagtgtggctgccggatctacaacctgggcacgggcacaggctattcagtgctgcagatggtccaggctatggagaaggcctctgggaagaagatcccgtacaaggtggtggcacggcgggaaggtgatgtggcagcctgttacgccaaccccagcctggcccaagaggagctggggtggacagcagccttagggctggacaggatgtgtgaggatctctggcgctggcagaagcagaatccttcaggctttggcacgcaagcctgaggaccctcccctaccaaggaccaggaaaagcagcagctgcctgctctccagcctctggcaggaactcagggccctggagctgctggggccaagccaaggcctcccctacctcaaaccccagctgggcccgcttagcccaccaggcatgaggccaagggctccactgaccaggaggccgaggtctctaactcttatcttccacagggtccaagagttcatcaggacccccaagagtgagtgagggggcaaggctctggcacaaaacctcctcctcccaggcactcatttatattgctctgaaagagctttccaaagtatttaaaaataaaaacaagttttcttacactggg

SEQ ID NO: 70839 - DNA, 1879 bp, Homo sapiens
caggctgtactgtctggaagttacggatcgtggggcgcgggaacccgagcaggactctccagtcctcagtcaccttggacaaagaagtgtggatcctcagattccatcttttccaactccaaggtgccatggcagagaaggtgctggtaacaggtggggctggctacattggcagccacacggtgctggagctgctggaggctggctacttgcctgtggtcatcgataacttccataatgccttccgtggagggggctccctgcctgagagcctgcggcgggtccaggagctgacaggccgctctgtggagtttgaggagatggacattttggaccagggagccctacagcgtctcttcaaaaagtacagctttatggcggtcatccactttgcggggctcaaggccgtgggcgagtcggtgcagaagcctctggattattacagagttaacctgaccgggaccatccagcttctggagatcatgaaggcccacggggtgaagaacctggtgttcagcagctcagccactgtgtacgggaacccccagtacctgccccttgatgaggcccaccccacgggtggttgtaccaacccttacggcaagtccaagttcttcatcgaggaaatgatccgggacctgtgccaggcagacaagacttggaacgcagtgctgctgcgctatttcaaccccacaggtgcccatgcctctggctgcattggtgaggatccccagggcatacccaacaacctcatgccttatgtctcccaggtggcgatcgggcgacgggaggccctgaatgtctttggcaatgactatgacacagaggatggcacaggtgtccgggattacatccatgtcgtggatctggccaagggccacattgcagccttaaggaagctgaaagaacagtgtggctgccggggtaggaagagaagggagaagtgagggaggggagggaccagatccaggcagagcggcccagaggcgtggtcagtccagcccgctccataaaccctgttctccgtgggccagatctacaacctgggcacgggcacaggctattcagtgctgcagatggtccaggctatggagaaggcctctgggaagaaggtaggcccccccgccccacccacctcacccacctcaccccacccagctctcagcaacagagcagctttggcccttcccactcacctctctggagggtacctggcactgcccagtctcctcagcctgcctagcacccggtgcctgcgggccagccgctgctctgcacttctgcttcttaaagacctggccagcagctgggccagggccggctcagctaagctccaactacctcctgtcttgcagatcccgtacaaggtggtggcacggcgggaaggtgatgtggcagcctgttacgccaaccccagcctggcccaagaggagctggggtggacagcagccttagggctggacaggatgtgtgaggatctctggcgctggcagaagcagaatccttcaggctttggcacgcaagcctgaggaccctcccctaccaaggaccaggaaaagcagcagctgcctgctctccagcctctggcaggaactcagggccctggagctgctggggccaagccaaggcctcccctacctcaaaccccagctgggcccgcttagcccaccaggcatgaggccaagggctccactgaccaggaggccgaggtctctaactcttatcttccacagggtccaagagttcatcaggacccccaagagtgagtgagggggcaaggctctggcacaaaacctcctcctcccaggcactcatttatattgctctgaaagagctttccaaagtatttaaaaataaaaacaagttttcttacactggg

SEQ ID NO: 70840 - DNA, 991 bp, Homo sapiens
acacaacactggtcagggcaatcattttttggatttgaccccaaaagttcaggcaacaaaagcaaacatagacaactgggattacaacaaaccaaaaagctgcagcatggcaaagtaaacagactgaagagacaacctacaaactgggagaatatatttgcaagcaatacatctaatatgggtttaatatacaaaatatagggcaggtgccacaactcatgccttatgtctcccaggtggcgatcgggcgacgggaggccctgaatgtctttggcaatgactatgacacagaggatggcacaggtgtccgggattacatccatgtcgtggatctggccaagggccacattgcagccttaaggaagctgaaagaacagtgtggctgccggatctacaacctgggcacgggcacaggctattcagtgctgcagatggtccaggctatggagaaggcctctgggaagaagatcccgtacaaggtggtggcacggcgggaaggtgatgtggcagcctgttacgccaaccccagcctggcccaagaggagctggggtggacagcagccttagggctggacaggatgtgtgaggatctctggcgctggcagaagcagaatccttcaggctttggcacgcaagcctgaggaccctcccctaccaaggaccaggaaaagcagcagctgcctgctctccagcctctggcaggaactcagggccctggagctgctggggccaagccaaggcctcccctacctcaaaccccagctgggcccgcttagcccaccaggcatgaggccaagggctccactgaccaggaggccgaggtctctaactcttatcttccacagggtccaagagttcatcaggacccccaagagtgagtgagggggcaaggctctggcacaaaacctcctcctcccaggcactcatttatattgctctgaaagagctttccaaagtatttaaaaataaaaacaagttttcttacactggg

SEQ ID NO: 70841 - DNA, 2022 bp, Homo sapiens
caggctgtactgtctggaagttacggatcgtggggcgcgggaacccgagcaggactctccagtcctcagtcaccttggacaaagaagtgtggatcctcagattccatcttttccaactccaaggtgccatggcagagaaggtgctggtaacaggtggggctggctacattggcagccacacggtgctggagctgctggaggctggctacttgcctgtggtcatcgataacttccataatgccttccgtggagggggctccctgcctgagagcctgcggcgggtccaggagctgacaggccgctctgtggagtttgaggagatggacattttggaccagggagccctacagcgtctcttcaaaaagtacagctttatggcggtcatccactttgcggggctcaaggccgtgggcgagtcggtgcagaagcctctggattattacagagttaacctgaccgggaccatccagcttctggagatcatgaaggcccacggggtgaagaacctggtgttcagcagctcagccactgtgtacgggaacccccagtacctgccccttgatgaggcccaccccacgggtggttgtaccaacccttacggcaagtccaagttcttcatcgaggaaatgatccgggacctgtgccaggcagacaagacttggaacgcagtgctgctgcgctatttcaaccccacaggtgcccatgcctctggctgcattggtgaggatccccagggcatacccaacaacctcatgccttatgtctcccaggtggcgatcgggcgacgggaggccctgaatgtctttggcaatgactatgacacagaggatggcacaggtgtccgggattacatccatgtcgtggatctggccaagggccacattgcagccttaaggaagctgaaagaacagtgtggctgccggggtaggaagagaagggagaagtgagggaggggagggaccagatccaggcagagcggcccagaggcgtggtcagtccagcccgctccataaaccctgttctccgtgggccagatctacaacctgggcacgggcacaggctattcagtgctgcagatggtccaggctatggagaaggcctctgggaagaaggtaggcccccccgccccacccacctcacccacctcaccccacccagctctcagcaacagagcagctttggcccttcccactcacctctctggagggtacctggcactgcccagtctcctcagcctgcctagcacccggtgcctgcgggccagccgctgctctgcacttctgcttcttaaagacctggccagcagctgggccagggccggctcagctaagctccaactacctcctgtcttgcagatcccgtacaaggtggtggcacggcgggaaggtgatgtggcagcctgttacgccaaccccagcctggcccaagaggagctggggtggacagcagccttagggctggacaggatgtgtgagtgctggcctgacccctgcagttaggggccagggaggggctaaatcagatctgggcatgcccacccagggcgggctgtggggtgggggaggctctgcattccaccgtgggccctgagcacacacctcgccgtgttgcaggtgaggatctctggcgctggcagaagcagaatccttcaggctttggcacgcaagcctgaggaccctcccctaccaaggaccaggaaaagcagcagctgcctgctctccagcctctggcaggaactcagggccctggagctgctggggccaagccaaggcctcccctacctcaaaccccagctgggcccgcttagcccaccaggcatgaggccaagggctccactgaccaggaggccgaggtctctaactcttatcttccacagggtccaagagttcatcaggacccccaagagtgagtgagggggcaaggctctggcacaaaacctcctcctcccaggcactcatttatattgctctgaaagagctttccaaagtatttaaaaataaaaacaagttttcttacactggg

SEQ ID NO: 70842 - DNA, 1574 bp, Homo sapiens
caggctgtactgtctggaagttacggatcgtggggcgcgggaacccgagcaggactctccagtcctcagtcaccttggacaaagaagtgtggatcctcagattccatcttttccaactccaaggtgccatggcagagaaggtgctggtaacaggtggggctggctacattggcagccacacggtgctggagctgctggaggctggctacttgcctgtggtcatcgataacttccataatgccttccgtggagggggctccctgcctgagagcctgcggcgggtccaggagctgacaggccgctctgtggagtttgaggagatggacattttggaccagggagccctacagcgtctcttcaaaaagtacagctttatggcggtcatccactttgcggggctcaaggccgtgggcgagtcggtgcagaagcctctggattattacagagttaacctgaccgggaccatccagcttctggagatcatgaaggcccacggggtgaagaacctggtgttcagcagctcagccactgtgtacgggaacccccagtacctgccccttgatgaggcccaccccacgggtggttgtaccaacccttacggcaagtccaagttcttcatcgaggaaatgatccgggacctgtgccaggcagacaagacttggaacgcagtgctgctgcgctatttcaaccccacaggtgcccatgcctctggctgcattggtgaggatccccagggcatacccaacaacctcatgccttatgtctcccaggtggcgatcgggcgacgggaggccctgaatgtctttggcaatgactatgacacagaggatggcacaggtgtccgggattacatccatgtcgtggatctggccaagggccacattgcagccttaaggaagctgaaagaacagtgtggctgccggatctacaacctgggcacgggcacaggctattcagtgctgcagatggtccaggctatggagaaggcctctgggaagaagatcccgtacaaggtggtggcacggcgggaaggtgatgtggcagcctgttacgccaaccccagcctggcccaagaggagctggggtggacagcagccttagggctggacaggatgtgtgaggatctctggcgctggcagaagcagaatccttcaggctttggcacgcaagcctgaggaccctcccctaccaaggaccaggaaaagcagcagctgcctgctctccagcctctggcaggaactcagggccctggagctgctggggccaagccaaggccaggcagacaagacttggaacgcagtgctgctgcgctatttcaaccccacaggtgcccatgcctctggctgcattggtgaggatcccaccaggcatgaggccaagggctccactgaccaggaggccgaggtctctaactcttatcttccacagggtccaagagttcatcaggacccccaagagtgagtgagggggcaaggctctggcacaaaacctcctcctcccaggcactcatttatattgctctgaaagagctttccaaagtatttaaaaataaaaacaagttttcttacactggg

SEQ ID NO: 70843 - DNA, 572 bp, Homo sapiens
gcggccgctcccacttcagatttagcccctccctggcccctaactgcaggggccagggaggggctaaatcagatctgggcatgcccacccagggcgggctgtggggtgggggaggctctgcattccaccgtgggccctgagcacacacctcgccgtgttgcaggtgaggatctctggcgctggcagaagcagaatccttcaggctttggcacgcaagcctgaggaccctcccctaccaaggaccaggaaaagcagcagctgcctgctctccagcctctggcaggaactcagggccctggagctgctggggccaagccaaggcctcccctacctcaaaccccagctgggcccgcttagcccaccaggcatgaggccaagggctccactgaccaggaggccgaggtctctaactcttatcttccacagggtccaagagttcatcaggacccccaagagtgagtgagggggcaaggctctggcacaaaacctcctcctcccaggcactcatttatattgctctgaaagagctttccaaagtatttaaaaataaaaacaagttttcttacactggg

SEQ ID NO: 70844 - DNA, 1481 bp, Homo sapiens
attagtcactgcgcccaggagccagtttacacctagcgaaggcggaggcattggacaagcctgggtctgagcagacagaaccccttcctgcgaccctggagtcccaatcgtgctgccattttccttctgcccaggactctccagtcctcagtcaccttggacaaagaagtgtggatcctcagattccatcttttccaactccaaggagggggctccctgcctgagagcctgcggcgggtccaggagctgacaggccgctctgtggagtttgaggagatggacattttggaccagggagccctacagcgtctcttcaaaaagtacagctttatggcggtcatccactttgcggggctcaaggccgtgggcgagtcggtgcagaagcctctggattattacagagttaacctgaccgggaccatccagcttctggagatcatgaaggcccacggggtgaagaacctggtgttcagcagctcagccactgtgtacgggaacccccagtacctgccccttgatgaggcccaccccacgggtggttgtaccaacccttacggcaagtccaagttcttcatcgaggaaatgatccgggacctgtgccaggcagacaagacttggaacgcagtgctgctgcgctatttcaaccccacaggtgcccatgcctctggctgcattggtgaggatccccagggcatacccaacaacctcatgccttatgtctcccaggtggcgatcgggcgacgggaggccctgaatgtctttggcaatgactatgacacagaggatggcacaggtgtccgggattacatccatgtcgtggatctggccaagggccacattgcagccttaaggaagctgaaagaacagtgtggctgccggatctacaacctgggcacgggcacaggctattcagtgctgcagatggtccaggctatggagaaggcctctgggaagaagatcccgtacaaggtggtggcacggcgggaaggtgatgtggcagcctgttacgccaaccccagcctggcccaagaggagctggggtggacagcagccttagggctggacaggatgtgtgaggatctctggcgctggcagaagcagaatccttcaggctttggcacgcaagcctgaggaccctcccctaccaaggaccaggaaaagcagcagctgcctgctctccagcctctggcaggaactcagggccctggagctgctggggccaagccaaggcctcccctacctcaaaccccagctgggcccgcttagcccaccaggcatgaggccaagggctccactgaccaggaggccgaggtctctaactcttatcttccacagggtccaagagttcatcaggacccccaagagtgagtgagggggcaaggctctggcacaaaacctcctcctcccaggcactcatttatattgctctgaaagagctttccaaagtatttaaaaataaaaacaagttttcttacactggg

SEQ ID NO: 70845 - DNA, 1945 bp, Homo sapiens
gggccgtcagcacttaaagggcccgcggctcgggcgtaggaggcggtgcctctgcagcaagcgtggggcgcgggaacccgagcaggactctccagtcctcagtcaccttggacaaagaagtgtggatcctcagattccatcttttccaactccaaggtgccatggcagagaaggtgctggtaacaggtggggctggctacattggcagccacacggtgctggagctgctggaggctggctacttgcctgtggtcatcgataacttccataatgccttccgtggagggggctccctgcctgagagcctgcggcgggtccaggagctgacaggccgctctgtggagtttgaggagatggacattttggaccagggagccctacagcgtctcttcaaaaagggtgggtgcaggctgggcacggtggctcacgcctgtaattccagcactttggaaggccgaggtgaggagatcacttgagcccaggtgttcaagaccagcctgctcaacacagtgaaaccccatctctacagaaaaatacaaaaattagctgggcatggtagcccatacctgtggtcccagctactcgggaggctggcatgggaggatggcttgagcctgggaggtggaggttgcggtgagctgagatggcaccactgtactccagcctggacaacagagcgagactgtcaaaaaacaaaaacaacaggtgagtgcaggcaggcaggctgagggcattgccaaggactaaaaccagtagagcaacctctggccatgtcacccctgcagtacagctttatggcggtcatccactttgcggggctcaaggccgtgggcgagtcggtgcagaagcctctggattattacagagttaacctgaccgggaccatccagcttctggagatcatgaaggcccacggggtgaagaacctggtgttcagcagctcagccactgtgtacgggaacccccagtacctgccccttgatgaggcccaccccacgggtggttgtaccaacccttacggcaagtccaagttcttcatcgaggaaatgatccgggacctgtgccaggcagacaagacttggaacgcagtgctgctgcgctatttcaaccccacaggtgcccatgcctctggctgcattggtgaggatccccagggcatacccaacaacctcatgccttatgtctcccaggtggcgatcgggcgacgggaggccctgaatgtctttggcaatgactatgacacagaggatggcacaggtgtccgggattacatccatgtcgtggatctggccaagggccacattgcagccttaaggaagctgaaagaacagtgtggctgccggatctacaacctgggcacgggcacaggctattcagtgctgcagatggtccaggctatggagaaggcctctgggaagaagatcccgtacaaggtggtggcacggcgggaaggtgatgtggcagcctgttacgccaaccccagcctggcccaagaggagctggggtggacagcagccttagggctggacaggatgtgtgaggatctctggcgctggcagaagcagaatccttcaggctttggcacgcaagcctgaggaccctcccctaccaaggaccaggaaaagcagcagctgcctgctctccagcctctggcaggaactcagggccctggagctgctggggccaagccaaggcctcccctacctcaaaccccagctgggcccgcttagcccaccaggcatgaggccaagggctccactgaccaggaggccgaggtctctaactcttatcttccacagggtccaagagttcatcaggacccccaagagtgagtgagggggcaaggctctggcacaaaacctcctcctcccaggcactcatttatattgctctgaaagagctttccaaagtatttaaaaataaaaacaagttttcttacactggg

SEQ ID NO: 70846 - DNA, 1974 bp, Homo sapiens
caggctgtactgtctggaagttacggatcgtggggcgcgggaacccgagcaggactctccagtcctcagtcaccttggacaaagaagtgtggatcctcagattccatcttttccaactccaaggtgccatggcagagaaggtgctggtaacaggtggggctggctacattggcagccacacggtgctggagctgctggaggctggctacttgcctgtggtcatcgataacttccataatgccttccgtggtgagcggggcagtggggctggggctacttgaggggatggcagaagcaaaaccctgggttccacctccaccaccgggcggggaatgtgtgtctggctagtccctgggaacacagcaccccatgtcgtgatgatgtggcctacatgtaccctaccaccctacagcgtctcttcaaaaagggtgggtgcaggctgggcacggtggctcacgcctgtaattccagcactttggaaggccgaggtgaggagatcacttgagcccaggtgttcaagaccagcctgctcaacacagtgaaaccccatctctacagaaaaatacaaaaattagctgggcatggtagcccatacctgtggtcccagctactcgggaggctggcatgggaggatggcttgagcctgggaggtggaggttgcggtgagctgagatggcaccactgtactccagcctggacaacagagcgagactgtcaaaaaacaaaaacaacaggtgagtgcaggcaggcaggctgagggcattgccaaggactaaaaccagtagagcaacctctggccatgtcacccctgcagtacagctttatggcggtcatccactttgcggggctcaaggccgtgggcgagtcggtgcagaagcctctggattattacagagttaacctgaccgggaccatccagcttctggagatcatgaaggcccacggggtgaagaacctggtgttcagcagctcagccactgtgtacgggaacccccagtacctgccccttgatgaggcccaccccacgggtggttgtaccaacccttacggcaagtccaagttcttcatcgaggaaatgatccgggacctgtgccaggcagacaagacttggaacgcagtgctgctgcgctatttcaaccccacaggtgcccatgcctctggctgcattggtgaggatccccagggcatacccaacaacctcatgccttatgtctcccaggtggcgatcgggcgacgggaggccctgaatgtctttggcaatgactatgacacagaggatggcacaggtgtccgggattacatccatgtcgtggatctggccaagggccacattgcagccttaaggaagctgaaagaacagtgtggctgccggatctacaacctgggcacgggcacaggctattcagtgctgcagatggtccaggctatggagaaggcctctgggaagaagatcccgtacaaggtggtggcacggcgggaaggtgatgtggcagcctgttacgccaaccccagcctggcccaagaggagctggggtggacagcagccttagggctggacaggatgtgtgaggatctctggcgctggcagaagcagaatccttcaggctttggcacgcaagcctgaggaccctcccctaccaaggaccaggaaaagcagcagctgcctgctctccagcctctggcaggaactcagggccctggagctgctggggccaagccaaggcctcccctacctcaaaccccagctgggcccgcttagcccaccaggcatgaggccaagggctccactgaccaggaggccgaggtctctaactcttatcttccacagggtccaagagttcatcaggacccccaagagtgagtgagggggcaaggctctggcacaaaacctcctcctcccaggcactcatttatattgctctgaaagagctttccaaagtatttaaaaataaaaacaagttttcttacactggg

SEQ ID NO: 70847 - DNA, 1447 bp, Homo sapiens
caggctgtactgtctggaagttacggatcgtggggcgcgggaacccgagcaggactctccagtcctcagtcaccttggacaaagaagtgtggatcctcagattccatcttttccaactccaaggtgccatggcagagaaggtgctggtaacaggtggggctggctacattggcagccacacggtgctggagctgctggaggctggctacttgcctgtggtcatcgataacttccataatgccttccgtggagggggctccctgcctgagagcctgcggcgggtccaggagctgacaggccgctctgtggagtttgaggagatggacattttggaccagggagccctacagcgtctcttcaaaaagtacagctttatggcggtcatccactttgcggggctcaaggccgtgggcgagtcggtgcagaagcctctggattattacagagttaacctgaccgggaccatccagcttctggagatcatgaaggcccacggggtgaagaacctggtgttcagcagctcagccactgtgtacgggaacccccagtacctgccccttgatgaggcccaccccacgggtggttgtaccaacccttacggcaagtccaagttcttcatcgaggaaatgatccgggacctgtgccaggcagacaagacttggaacgcagtgctgctgcgctatttcaaccccacaggtgcccatgcctctggctgcattggtgaggatccccagggcatacccaacaacctcatgccttatgtctcccaggtggcgatcgggcgacgggaggccctgaatgtctttggcaatgactatgacacagaggatggcacaggtgtccgggattacatccatgtcgtggatctggccaagggccacattgcagccttaaggaagctgaaagaacagtgtggctgccggatcccgtacaaggtggtggcacggcgggaaggtgatgtggcagcctgttacgccaaccccagcctggcccaagaggagctggggtggacagcagccttagggctggacaggatgtgtgaggatctctggcgctggcagaagcagaatccttcaggctttggcacgcaagcctgaggaccctcccctaccaaggaccaggaaaagcagcagctgcctgctctccagcctctggcaggaactcagggccctggagctgctggggccaagccaaggcctcccctacctcaaaccccagctgggcccgcttagcccaccaggcatgaggccaagggctccactgaccaggaggccgaggtctctaactcttatcttccacagggtccaagagttcatcaggacccccaagagtgagtgagggggcaaggctctggcacaaaacctcctcctcccaggcactcatttatattgctctgaaagagctttccaaagtatttaaaaataaaaacaagttttcttacactggg

SEQ ID NO: 70848 - DNA, 1392 bp, Homo sapiens
gggccgtcagcacttaaagggcccgcggctcgggcgtaggaggcggtgcctctgcagcaagcgtggggcgcgggaacccgagcaggactctccagtcctcagtcaccttggacaaagaagtgtggatcctcagattccatcttttccaactccaaggagggggctccctgcctgagagcctgcggcgggtccaggagctgacaggccgctctgtggagtttgaggagatggacattttggaccagggagccctacagcgtctcttcaaaaagtacagctttatggcggtcatccactttgcggggctcaaggccgtgggcgagtcggtgcagaagcctctggattattacagagttaacctgaccgggaccatccagcttctggagatcatgaaggcccacggggtgaagaacctggtgttcagcagctcagccactgtgtacgggaacccccagtacctgccccttgatgaggcccaccccacgggtggttgtaccaacccttacggcaagtccaagttcttcatcgaggaaatgatccgggacctgtgccaggcagacaaggtgcccatgcctctggctgcattggtgaggatccccagggcatacccaacaacctcatgccttatgtctcccaggtggcgatcgggcgacgggaggccctgaatgtctttggcaatgactatgacacagaggatggcacaggtgtccgggattacatccatgtcgtggatctggccaagggccacattgcagccttaaggaagctgaaagaacagtgtggctgccggatctacaacctgggcacgggcacaggctattcagtgctgcagatggtccaggctatggagaaggcctctgggaagaagatcccgtacaaggtggtggcacggcgggaaggtgatgtggcagcctgttacgccaaccccagcctggcccaagaggagctggggtggacagcagccttagggctggacaggatgtgtgaggatctctggcgctggcagaagcagaatccttcaggctttggcacgcaagcctgaggaccctcccctaccaaggaccaggaaaagcagcagctgcctgctctccagcctctggcaggaactcagggccctggagctgctggggccaagccaaggcctcccctacctcaaaccccagctgggcccgcttagcccaccaggcatgaggccaagggctccactgaccaggaggccgaggtctctaactcttatcttccacagggtccaagagttcatcaggacccccaagagtgagtgagggggcaaggctctggcacaaaacctcctcctcccaggcactcatttatattgctctgaaagagctttccaaagtatttaaaaataaaaacaagttttcttacactggg

SEQ ID NO: 70849 - DNA, 1708 bp, Homo sapiens
caggctgtactgtctggaagttacggatcgtggggcgcgggaacccgagcaggactctccagtcctcagtcaccttggacaaagaagtgtggatcctcagattccatcttttccaactccaaggtgccatggcagagaaggtgctggtaacaggtggggctggctacattggcagccacacggtgctggagctgctggaggctggctacttgcctgtggtcatcgataacttccataatgccttccgtggagggggctccctgcctgagagcctgcggcgggtccaggagctgacaggccgctctgtggagtttgaggagatggacattttggaccagggagccctacagcgtctcttcaaaaagtacagctttatggcggtcatccactttgcggggctcaaggccgtgggcgagtcggtgcagaagcctctggattattacagagttaacctgaccgggaccatccagcttctggagatcatgaaggcccacggggtgaagaacctggtgttcagcagctcagccactgtgtacgggaacccccagtacctgccccttgatgaggcccaccccacgggtggttgtaccaacccttacggcaagtccaagttcttcatcgaggaaatgatccgggacctgtgccaggcagacaagacttggaacgcagtgctgctgcgctatttcaaccccacaggtgcccatgcctctggctgcattggtgaggatccccagggcatacccaacaacctcatgccttatgtctcccaggtggcgatcgggcgacgggaggccctgaatgtctttggcaatgactatgacacagaggatggcacaggtgtccgggattacatccatgtcgtggatctggccaagggccacattgcagccttaaggaagctgaaagaacagtgtggctgccggatctacaacctgggcacgggcacaggctattcagtgctgcagatggtccaggctatggagaaggcctctgggaagaagatcccgtacaaggtggtggcacggcgggaaggtgatgtggcagcctgttacgccaaccccagcctggcccaagaggagctggggtggacagcagccttagggctggacaggatgtgtgaggatctctggcgctggcagaagcagaatccttcaggctttggcacgcaagcctgaggaccctcccctaccaaggaccaggaaaagcagcagctgcctgctctccagcctctggcaggaactcagggccctggagctgctggggccaagccaaggcctcccctacctcaaaccccagctgggcccgcttagcccaccaggcatgaggccaagggctccactgaccaggaggccgaggtctctaactcttatcttccacagggtccaagagttcatcaggacccccaagagtgagtgagggggcaaggctctggcacaaaacctcctcctcccaggcactcatttatattgctctgaaagagctttccaaagtatttaaaaataaaaacaagttttcttacactgggaacacaaacacaaacgaaccaaaacaaaaacaacagaaacaaaagaaccgcaggggcactatcaacgcgcgcggaaaaagacgagcaagaacagagacagcgggacaaaggggggtctgaggaccagagcatagtgcaacagaggggaaacacgggcgagcacaccagaagggcggcgcgcac

SEQ ID NO: 70850 - DNA, 2934 bp, Homo sapiens
gttgtccagtttaacagttatataatataatcttttatgtgagaattttgaatagcacaacagagacaagaaaacagactaacttctccttggtatgaccacatcttggcaaaaagtgaaagtcctatttaaaatgtaaaggaaatcctatttggtgaaccctgtaataggtgggggctaaaagggaaatctaggttgctggatttgtcactagggtttcctctagtaatagccagagggttccagttagtgtcacctcccagtatgaaaataaattttctttcaggctttgtttgtggagtggtaggtggagcatttttttaggtcctgatgacctggaaggtgactcataatcaccctgaaacgtatgaggaccctaaggaaacctcccctgggggagacagagggctggggttagagccattgcgttgggctcgtctggcaccttctggtgtgtgcggcacctggtgggggttcggcacggagccgcacccaacactgacccgggcccccccacccctgtcctgagcccaggcgcttcgccctgtcccacctagctctgagcagcgccccccagcaccctgaatgcgtccgcaggaccccgcgctctacccgcaggccccgcaccccctagctctgggccgcgcctcacatccctcccagagccgcaacaccccacccgcgggacgccctcgagcagccgctcgttgcgggcctgaagcgcagagcgcctattggccagagcggccgagggcgggaaaagtggccaacggctgcctcggccctcgggctgctgaggagatggcgtcgggctccaaggcctcggtgcccgcggactcattccgcaccatcagcccggacaggcgaggcgagaagtccgcctccgctgtctccggggacacggcggccgcgaccaccctgaagggcaccgcgatcccagtgcggtcggtggtggcctcccctcgcccggtgaaggggaaagcgggccgggagacggccaggctgcggctccagcgcctgcccgcggctcaggccgaggacacgggagaggcggcggcggcggcggcggaggagcccctgctgccagtgcctgaggatgaagaggaggcgcagcccctgcccccagtctgcgtgtcccgtatgagggggatgtggcgggacgagaaggtgtcgctgtattgcgacgaagtgctgcaggactgtaagtacagatggggtttctccagttggtcaggctggactcgaactcccgacctcaggcagaagatgctgatgaagttatgggtaaatacctatcagaaaaattaaagttgaaagacaaatggcttggagtctggaagactaatcccagtgtattctttgtgaaatatgaagaagcttctatcccttttgttggtatattggttgaggtaacttgtgaaccataccaagactcatcatctcgtttcaaagttactgtttctgttgctgagcccttttcttccaacattgcaaatattccaagagattggttgatgagattttggaggaactggaacacagtgtgcctcttttggaagtgtatcctgttgagggacaagatactgatatacatgttattgctttggccttggaagttgtcaggttttttatgactttctttggagagactgggatgatgaagaaagttgtgagaattatactgcacttattgaagaaagaattaatttgtggtgtgatatacaggatggaacaatacctggtcctatcgcacaacgttttaaaaaaactttggagaaatataaaaacaaacgtgtcgagctcattgagtatcagagcaatattaaagaagatccatctgcagcagaggctgttgaatgctggaaaaaatactatgagatagtcatgctctgtggattactgaaaatgtgggaagatttacgcctccgagttcatggacctttctttccaagaattctgaggcgtaggaaaggaaaaagagaatttggaaagactataacacatattgtagcaaaaatgatgactactgaaatgataaaggatttatcttcagacacacttctccaacagcatggtgatttggatttggctttggataattgttatagtggagatacagtaataatttttccaggagaatatcaagctgcaaatcttgctttgttgacagatgacatcattataaagggagttggaaagagagaggaaattatgattacttctgaaccttctcgtgacagttttgtggtgtccaaagctgacaatgtgaaactaatgcatctatctttgatacaacaagggacggttgatggtatcgtggtggtggagtctggtcacatgactctagaaaactgcatattaaaatgtgaaggaacaggagtgtgtgttcttacaggggctgctttgacaattacagacagtgaaataactggcgcccagggtgctggtgttgaactgtatcctggaagcatagctattttggaaagaaatgaaattcatcactgtaataacctcagaaccagtaacagttcaaaaagcaccttaggtggagttaatatgaaggttcttccagcacccaaattgaagatgactaataatcatatttatagcaacaaaggctatggagtaagcattcttcaaccaatggaacagttttttatcgtagcagaagaagctctcaacaaaagggcttcttcaggagataaaaaagatgataaaatgctcttcaaagtaatgcaaaatctgaatctggaaatgaataataataagatagaagcaaacgtcaagggggatatcagaatagtcacaagttaaagcgtctgaattgatgttaaagttttatatttcacaaatttgtttaatacatgattctcataccccactgaaatggtagtttcaattcaaagcttaattaaaaaatatttaaatatcatg

SEQ ID NO: 70851 - DNA, 2881 bp, Homo sapiens
gttgtccagtttaacagttatataatataatcttttatgtgagaattttgaatagcacaacagagacaagaaaacagactaacttctccttggtatgaccacatcttggcaaaaagtgaaagtcctatttaaaatgtaaaggaaatcctatttggtgaaccctgtaataggtgggggctaaaagggaaatctaggttgctggatttgtcactagggtttcctctagtaatagccagagggttccagttagtgtcacctcccagtatgaaaataaattttctttcaggctttgtttgtggagtggtaggtggagcatttttttaggtcctgatgacctggaaggtgactcataatcaccctgaaacgtatgaggaccctaaggaaacctcccctgggggagacagagggctggggttagagccattgcgttgggctcgtctggcaccttctggtgtgtgcggcacctggtgggggttcggcacggagccgcacccaacactgacccgggcccccccacccctgtcctgagcccaggcgcttcgccctgtcccacctagctctgagcagcgccccccagcaccctgaatgcgtccgcaggaccccgcgctctacccgcaggccccgcaccccctagctctgggccgcgcctcacatccctcccagagccgcaacaccccacccgcgggacgccctcgagcagccgctcgttgcgggcctgaagcgcagagcgcctattggccagagcggccgagggcgggaaaagtggccaacggctgcctcggccctcgggctgctgaggagatggcgtcgggctccaaggcctcggtgcccgcggactcattccgcaccatcagcccggacaggcgaggcgagaagtccgcctccgctgtctccggggacacggcggccgcgaccaccctgaagggcaccgcgatcccagtgcggtcggtggtggcctcccctcgcccggtgaaggggaaagcgggccgggagacggccaggctgcggctccagcgcctgcccgcggctcaggccgaggacacgggagaggcggcggcggcggcggcggaggagcccctgctgccagtgcctgaggatgaagaggaggcgcagcccctgcccccagtctgcgtgtcccgtatgagggggatgtggcgggacgagaaggtgtcgctgtattgcgacgaagtgctgcaggactgtaaggcagaagatgctgatgaagttatgggtaaatacctatcagaaaaattaaagttgaaagacaaatggcttggagtctggaagactaatcccagtgtattctttgtgaaatatgaagaagcttctatcccttttgttggtatattggttgaggtaacttgtgaaccataccaagactcatcatctcgtttcaaagttactgtttctgttgctgagcccttttcttccaacattgcaaatattccaagagattggttgatgagattttggaggaactggaacacagtgtgcctcttttggaagtgtatcctgttgagggacaagatactgatatacatgttattgctttggccttggaagttgtcaggttttttatgactttctttggagagactgggatgatgaagaaagttgtgagaattatactgcacttattgaagaaagaattaatttgtggtgtgatatacaggatggaacaatacctggtcctatcgcacaacgttttaaaaaaactttggagaaatataaaaacaaacgtgtcgagctcattgagtatcagagcaatattaaagaagatccatctgcagcagaggctgttgaatgctggaaaaaatactatgagatagtcatgctctgtggattactgaaaatgtgggaagatttacgcctccgagttcatggacctttctttccaagaattctgaggcgtaggaaaggaaaaagagaatttggaaagactataacacatattgtagcaaaaatgatgactactgaaatgataaaggatttatcttcagacacacttctccaacagcatggtgatttggatttggctttggataattgttatagtggagatacagtaataatttttccaggagaatatcaagctgcaaatcttgctttgttgacagatgacatcattataaagggagttggaaagagagaggaaattatgattacttctgaaccttctcgtgacagttttgtggtgtccaaagctgacaatgtgaaactaatgcatctatctttgatacaacaagggacggttgatggtatcgtggtggtggagtctggtcacatgactctagaaaactgcatattaaaatgtgaaggaacaggagtgtgtgttcttacaggggctgctttgacaattacagacagtgaaataactggcgcccagggtgctggtgttgaactgtatcctggaagcatagctattttggaaagaaatgaaattcatcactgtaataacctcagaaccagtaacagttcaaaaagcaccttaggtggagttaatatgaaggttcttccagcacccaaattgaagatgactaataatcatatttatagcaacaaaggctatggagtaagcattcttcaaccaatggaacagttttttatcgtagcagaagaagctctcaacaaaagggcttcttcaggagataaaaaagatgataaaatgctcttcaaagtaatgcaaaatctgaatctggaaatgaataataataagatagaagcaaacgtcaagggggatatcagaatagtcacaagttaaagcgtctgaattgatgttaaagttttatatttcacaaatttgtttaatacatgattctcataccccactgaaatggtagtttcaattcaaagcttaattaaaaaatatttaaatatcatg

SEQ ID NO: 70852 - DNA, 3107 bp, Homo sapiens
gttgtccagtttaacagttatataatataatcttttatgtgagaattttgaatagcacaacagagacaagaaaacagactaacttctccttggtatgaccacatcttggcaaaaagtgaaagtcctatttaaaatgtaaaggaaatcctatttggtgaaccctgtaataggtgggggctaaaagggaaatctaggttgctggatttgtcactagggtttcctctagtaatagccagagggttccagttagtgtcacctcccagtatgaaaataaattttctttcaggctttgtttgtggagtggtaggtggagcatttttttaggtcctgatgacctggaaggtgactcataatcaccctgaaacgtatgaggaccctaaggaaacctcccctgggggagacagagggctggggttagagccattgcgttgggctcgtctggcaccttctggtgtgtgcggcacctggtgggggttcggcacggagccgcacccaacactgacccgggcccccccacccctgtcctgagcccaggcgcttcgccctgtcccacctagctctgagcagcgccccccagcaccctgaatgcgtccgcaggaccccgcgctctacccgcaggccccgcaccccctagctctgggccgcgcctcacatccctcccagagccgcaacaccccacccgcgggacgccctcgagcagccgctcgttgcgggcctgaagcgcagagcgcctattggccagagcggccgagggcgggaaaagtggccaacggctgcctcggccctcgggctgctgaggagatggcgtcgggctccaaggcctcggtgcccgcggactcattccgcaccatcagcccggacaggcgaggcgagaagtccgcctccgctgtctccggggacacggcggccgcgaccaccctgaagggcaccgcgatcccagtgcggtcggtggtggcctcccctcgcccggtgaaggggaaagcgggccgggagacggccaggctgcggctccagcgcctgcccgcggctcaggccgaggacacgggagaggcggcggcggcggcggcggaggagcccctgctgccagtgcctgaggatgaagaggaggcgcagcccctgcccccagtctgcgtgtcccgtatgagggggatgtggcgggacgagaaggtgtcgctgtattgcgacgaagtgctgcaggactgtaaggtgagcggatccgggacaggaagactacggtcggaagctcgtcggaacctggggacaggcatctggggcttccctcttaggcggatggggatccacagggcacaacgaaaacttgcgtttcaaaaaagtaaatggagtcaacatgtatagagcgttcaccttgttagaggtgcccgcgtcctgccctagaggagttaaggttcgagtttccgacaaaattcgtcaggcagaagatgctgatgaagttatgggtaaatacctatcagaaaaattaaagttgaaagacaaatggcttggagtctggaagactaatcccagtgtattctttgtgaaatatgaagaagcttctatcccttttgttggtatattggttgaggtaacttgtgaaccataccaagactcatcatctcgtttcaaagttactgtttctgttgctgagcccttttcttccaacattgcaaatattccaagagattggttgatgagattttggaggaactggaacacagtgtgcctcttttggaagtgtatcctgttgagggacaagatactgatatacatgttattgctttggccttggaagttgtcaggttttttatgactttctttggagagactgggatgatgaagaaagttgtgagaattatactgcacttattgaagaaagaattaatttgtggtgtgatatacaggatggaacaatacctggtcctatcgcacaacgttttaaaaaaactttggagaaatataaaaacaaacgtgtcgagctcattgagtatcagagcaatattaaagaagatccatctgcagcagaggctgttgaatgctggaaaaaatactatgagatagtcatgctctgtggattactgaaaatgtgggaagatttacgcctccgagttcatggacctttctttccaagaattctgaggcgtaggaaaggaaaaagagaatttggaaagactataacacatattgtagcaaaaatgatgactactgaaatgataaaggatttatcttcagacacacttctccaacagcatggtgatttggatttggctttggataattgttatagtggagatacagtaataatttttccaggagaatatcaagctgcaaatcttgctttgttgacagatgacatcattataaagggagttggaaagagagaggaaattatgattacttctgaaccttctcgtgacagttttgtggtgtccaaagctgacaatgtgaaactaatgcatctatctttgatacaacaagggacggttgatggtatcgtggtggtggagtctggtcacatgactctagaaaactgcatattaaaatgtgaaggaacaggagtgtgtgttcttacaggggctgctttgacaattacagacagtgaaataactggcgcccagggtgctggtgttgaactgtatcctggaagcatagctattttggaaagaaatgaaattcatcactgtaataacctcagaaccagtaacagttcaaaaagcaccttaggtggagttaatatgaaggttcttccagcacccaaattgaagatgactaataatcatatttatagcaacaaaggctatggagtaagcattcttcaaccaatggaacagttttttatcgtagcagaagaagctctcaacaaaagggcttcttcaggagataaaaaagatgataaaatgctcttcaaagtaatgcaaaatctgaatctggaaatgaataataataagatagaagcaaacgtcaagggggatatcagaatagtcacaagttaaagcgtctgaattgatgttaaagttttatatttcacaaatttgtttaatacatgattctcataccccactgaaatggtagtttcaattcaaagcttaattaaaaaatatttaaatatcatg

SEQ ID NO: 70853 - DNA, 622 bp, Homo sapiens
gcagtttggtgctgtgcccacaccactctaaaattaatgattaattgaatcatttgaggtcgctcaaattaaactaatttggcattgtgtgggtgacaaccagttgaaatgttttctttttatcagctatgtggccatatttttggagagagccagagtcttctgtctcttttctacctgtaatctattccaggtgctaagaactgtgaaagtccagcttgggtaatgtagtgagaccctgtctctacaaaaagtaaaaaattagccaggtgcagtggcacacgcctgaggccccagctacttgggaggctgaggttggaggatcacttgagcctgggagtttgaggctgtagtgagctgtgattgcaccactgcacttcagcctgggcactggagggagaccgtatctaaaaaaaaaaaaaaagccaagttattccttccggcgcaattccaggttacatgggccaattcgcctattagggagccgattaccatttaatggcccgtggtttaacaccgcggaacttgccctgcggtacccacctaattggcttggaagcaacgtttggcaaccttaatggccaaggaaatttgaagcttaatttttgtactccgttttttt

SEQ ID NO: 70854 - DNA, 435 bp, Homo sapiens
ctctgttgcccgggctggagtgcaatggtttgatctcagctcactgtgacttccacctcccaggttcaagacattctcctgtctcagcctactgagtagctgggattataggcatgaacaaccatgcccagccgtgtcttctcttttacctggcaaccctactagaggtactagttgccttcagtttcaatcttttcttgattacttttgtgatgcattgaattaaatttgattagccatccttaacacagcatctagattcagctttttccactatgcaaatcaggtagtatagtcattcatactctttccatcttctaaagtattgttgatgtatttcacctgctttcttttgctctctaatctctatgtgttagagaatatgtaccttcttatttatttactgtctttttgttggaatttttggagggagtg

SEQ ID NO: 70855 - DNA, 386 bp, Homo sapiens
acttggtcatcctatccataataattcctttttctgataggaacattttcacctgcaagtaaatagaaaacttgaccaacaaggccttaaacagattggggtttgtttttccttgcacgacatggttcgtttgcacagtggttccagcaagggccaggctctgtgtgtttctgctctgccattctaagcagcaagtggttctcacggttactgaatggctgtcaaggcttgaagtcattgtgtccattgcatttgagtcaggaagaagaaaagatactgttgtgttcctattgttgtttatctagaaagcaaaagtattcctagaggatgcctagcctgtctccctgtatatcttattactgacaactggatcatacttctggcaa

SEQ ID NO: 70856 - DNA, 371 bp, Homo sapiens
gtgggtgacagtcctgaggtgtgctctgacgggatggtcatagaacactctatatgcttccttatttgaagaaaattataattaaaggagacaaaagtaactacctctttttttatacttgacttgcaggtgactatgtatctttctcttacattaaacacaaaaacctgaatgactttccagatatattgttggaagttttcaaataacggcatttgtaacaatcatgtactgttaatgactcgccattttatcttactcatttgtaacacagtggttaaaaaaacacaggctttgtctggatcagactacctggattcaaatcttgcctatgccattttttgcctgtaactgtaagtgaattacttaac

SEQ ID NO: 70857 - DNA, 372 bp, Homo sapiens
gtcaaaactaaatttcaattttatgtttccttaaatttctaataagtatctacatgtttttgggatcagccatataatttactaagctaaaattaaataaattttttaaggatagacaatggttataattctttgatgaaagtctgtatgaatctgggcaagttacttaatttgtttaacattcagcttttttatttgtaattgggtataatagtgccttctcataggatcattgtaaggatttcttttactctttctttcagaattttgaagatcaagtgtaattatagcccagattctgttgcatctgtggttattctagatctctagggttactggagtaaattattcgttatacctcttccagtcctg

SEQ ID NO: 70858 - DNA, 813 bp, Homo sapiens
tggaatgggagtgtttacccaattcctgtacccccactgtatgttggaagtaactaactgtttttttattttgtaagctcacaggtgggagagacttgccttgtctcaggttgagactctggactttggacttttgaattaatgctggaatgagttaagactttgagggactgttgggaagatataactgtattttgcagtatgagaaggacatgagatttgggagacaccagaggtggaataatatgatttggatctgcatccccaccaaaatctcatgttcaattgtaatcctaaattttggaggttgagcctggtggaagaggattggataatgggggtggtttctcatggtttaacaccatccccctgggtgctgttctcatgacagtgagtgagttattgtgagatctgattgtttaaaagtgtgtgccacctcctcccactttcctcctgctccagccatgtaagacaggcttgcctccccttcaccttttgtcatgattgtaagtgttctgaggcctccccagccatgcttcctgtacagcctgcagaactgtgagccaattaaacctcttttctctatatattacccagtctcgggtatttctttatagcagtgcaagaatagactaatacagggttcaattcagcaagaggatataacaaatataaatatatatgcactcaacactgcagcacccagatatataaagcaaatacgattagagctaaagagagagagtgaccccaatacaataatagctggagacttcaacaccacattttcagcactggacagatcttccagac

SEQ ID NO: 70859 - DNA, 193 bp, Homo sapiens
tctatcaacctggctagagcttttatattaagaaaatgtattgagttattggaatttagtgtcatgccttgtacacatccagtgtttctcattaaatctgaattgctaatctgaggtcagtattaagtccacagaaagttgtgcttgttagagaatcacagaataatgtagtttatgagagagcctactaaga

SEQ ID NO: 70860 - DNA, 216 bp, Homo sapiens
gcagtggcactgagttgagaactgttgcttgctttgcattaaataggagatcagtccctgcagcttgtgggaataaggctttaaatctctccaattttagctctgtgagatggcactggggaaacagaaatgaacggactagtgtcacaaagctcaggtgggatggacgagatcacttcaaaggtctgtaatcccacgtctataatcccagcactt

SEQ ID NO: 70861 - DNA, 439 bp, Homo sapiens
gaccggtcgagtcagacctcacgtgtagactaagaggatcaaaagaagagtacgttacctgcggcgccggttgtgcgcagaccagatgtgccgggagctgcaggaggtcagaacctaagggagacggcggaagaaaatggagcgtcagtgatcatcagactagaatgagagtgaattgggagaaaatggtgcggccccctcacccagagaaccctcccccacctgctcacacccccagcgaacaccccgggggaggcctatgaagcagcagtaaaagaaaagggaggaatataaattctcaagttggaagggacccggttaccacttcctttgctttctgaactttttgttttggtctcctgcgggcaggagtgagtctcgccatcccccttgcttgcttgcttgcttgcgttcagctaagagtcatcttctctcctct

SEQ ID NO: 70862 - DNA, 662 bp, Homo sapiens
ggaagcaacactggttggagatcggaccaccggacttggtggagcgcaagggctccctgaccctccgctcccatcacaagaaatactcgaagccggtgttggtgtattcctgatttggacatcagaaacacatgaaaagttgtcacaaatgtgtttaaacacagaatgggttgaaatgaagagcaaggctttattgaatgaggaaacagtgagctccgggattatcgaaagggtcaccggattgcctgccacaggttttggagctgtctttcctagacatccaccggattggagcaaaatgtgtgcattgacaacgtactcagaagattatgttccaccatatgattatcagccacatgcttatccctgtcaagatgattattccatagtccacagaaaatgccgttctcagttcacggatctaaatggttctaaaagatttggcatcaacacttggcatgatgagagtgggatttatgctaattcagatgtaaaacagaaactctatcccttgactagtgggcctattgtgccaatttaaaaataatgtatagaatcagcatctctgactaatgaaaaatggatgtagcagttgatgattttctatcttaataaatgcaatggaagtgttactataatagattcctttaagcagaaagtct

SEQ ID NO: 70863 - DNA, 399 bp, Homo sapiens
actgctgctactactcaggaaatcaccacaacctgagggcctggcaagaattggtggttaccacccaggtgtgcattgacaacgtactcagaagattatgttccaccatatgattatcagccacatgcttatccctgtcaagatgattattccatagtccacagaaaatgccgttctcagttcacggatctaaatggttctaaaagatttggcatcaacacttggcatgatgagagtgggatttatgctaattcagatgtaaaacagaaactctatcccttgactagtgggcctattgtgccaatttaaaaataatgtatagaatcagcatctctgactaatgaaaaatggatgtagcagttgatgattttctatcttaataaatgcaatggaagtgtt

SEQ ID NO: 70864 - DNA, 511 bp, Homo sapiens
ggaagcaacactggttggagatcggaccaccggacttggtggagcgcaagggctccctgaccctccgctcccatcacaagaaatactcgaagccggtgttggtgtattcctgatttggacatcagaaacacatgaaaagttgtcacaaatgtgtttaaacacagaatgggttgaaatgaagagcaaggctttattgaatgaggaaacagtgagctccgggattatcgaaagggtcaccggattgcctgccacaggttttggagctgtctttcctagacatccaccggattggagcaaaatgttagtagtccctaaactgctacaactgtacaaaatgtttcttgattcagaaggtttgtttgcaggggcaaaggtatgacagggtgagccaaggtcaacaaaatgccctttacatgacatcttcgacttgcctttaaccaaatgttttctcctttcacatgcacaacattaataaccgtaataataaaacagtaaatcctcaaaaaaaaaa

SEQ ID NO: 70865 - DNA, 620 bp, Homo sapiens
ggaagcaacactggttggagatcggaccaccggacttggtggagcgcaagggctccctgaccctccgctcccatcacaagaaatactcgaagccggtgttggtgtattcctggcaccgtgacagagaagcttttcccaaaggttatgatatagagggtcctgagaaagttaaaaaactgtgtaattcaacatatcggcgactgggaaccgatgaatccccaatttggacatcagaaacacatgaaaagttgtcacaaatgtgtttaaacacagaatgggttgaaatgaagagcaaggctttattgaatgaggaaacagtgagctccgggattatcgaaagggtcaccggattgcctgccacaggttttggagctgtctttcctagacatccaccggattggagcaaaatgttagtagtccctaaactgctacaactgtacaaaatgtttcttgattcagaaggtttgtttgcaggggcaaaggtatgacagggtgagccaaggtcaacaaaatgccctttacatgacatcttcgacttgcctttaaccaaatgttttctcctttcacatgcacaacattaataaccgtaataataaaacagtaaatcctcaaaaaaaaaa

SEQ ID NO: 70866 - DNA, 631 bp, Homo sapiens
ggaagcaacactggttggagatcggaccaccggacttggtggagcgcaagggctccctgaccctccgctcccatcacaagaaatactcgaagccggtgttggtgtattcctgatttggacatcagaaacacatgaaaagttgtcacaaatgtgtttaaacacagaatgggttgaaatgaagagcaaggctttattgaatgaggaaacagtgagctccgggattatcgaaagggtcaccggattgcctgccacaggttttggagctgtctttcctagacatccaccggattggagcaaaatgtgtgcattgacaacgtactcagaagattatgttccaccatatgattatcagccacatgcttatccctgtcaagatgattattccatagtccacagaaaatgccgttctcagttcacggatctaaatggttctaaaagatttggcatcaacacttggcatgatgagagtgggatttatgctaattcagatgtaaaacagaaactctatcccttgactagtgggcctattgtgccaatttaaaaataatgtatagaatcagcatctctgactaatgaaaaatggatgtagcagttgatgattttctatcttaataaatgcaatggaagtgtt

SEQ ID NO: 70867 - DNA, 682 bp, Homo sapiens
ggaagcaacactggttggagatcggaccaccggacttggtggagcgcaagggctccctgaccctccgctcccatcacaagaaatactcgaagccggtgttggtgtattcctggcaccgtgacagagaagcttttcccaaaggttatgatatagagggtcctgagaaagttaaaaaactgtgtaattcaacatatcggcgactgggaaccgatgaatccccaatttggacatcagaaacacatgaaaagttgtcacaaatgtgtttaaacacagaatgggttgaaatgaagagcaaggctttattgaatgaggaaacagtgagctccgggattatcgaaagggtcaccggattgcctgccacaggttttggagctgtctttcctagacatccaccggattggagcaaaatgcttatccctgtcaagatgattattccatagtccacagaaaatgccgttctcagttcacggatctaaatggttctaaaagatttggcatcaacacttggcatgatgagagtgggatttatgctaattcagatgtaaaacagaaactctatcccttgactagtgggcctattgtgccaatttaaaaataatgtatagaatcagcatctctgactaatgaaaaatggatgtagcagttgatgattttctatcttaataaatgcaatggaagtgtt

SEQ ID NO: 70868 - DNA, 545 bp, Homo sapiens
ggaagcaacactggttggagatcggaccaccggacttggtggagcgcaagggctccctgaccctccgctcccatcacaagaaatactcgaagccggtgttggtgtattcctgatttggacatcagaaacacatgaaaagttgtcacaaatgtgtttaaacacagaatgggttgaaatgaagagcaaggctttattgaatgaggaaacagtgagctccgggattatcgaaagggtcaccggattgcctgccacaggttttggagctgtctttcctagacatccaccggattggagcaaaatgttagtagtccctaaactgctacaactgtacaaaatgtttcttgattcagaaggtttgtttgcaggggcaaaggtatgacagggtgagccaaggtcaacaaaatgccctttacatgacatcttcgacttgcctttaaccaaatgttttctcctttcacatgcacaacattaataaccgtaataataaacccgggtgcggcaaggccccctccccctttcgggtaaatgaatgaatcacaattagg

SEQ ID NO: 70869 - DNA, 1182 bp, Homo sapiens
agccggagtcagaactgcgtctcgcgacccaggcgcgggtttccggaggacagccaacaagcgatgctgccgccgccgtttcctgattggttgtgggtggctacctcttcgttctgattggccgctagtgagcaagatgctgagcaagggtctgaagcggaaacgggaggaggaggaggagaaggaacctctggcagtcgactcctggtggctagatcctggccacacagcggtggcacaggcacccccggccgtggcctctagctccctctttgacctctcagtgctcaagctccaccacagcctgcagcagagtgagccggacctgcggcacctggtgctggtcgtgaacactctgcggcgcatccaggcgtccatggcacccgcggctgccctgccacctgtgcctagcccacctgcagcccccagtgtggctgacaacttactggcaagctcggacgctgccctttcagcctccatggccagcctcctggaggacctcagccacattgagggcctgagtcaggctccccaacccttggcagacgaggggccaccaggccgtagcatcgggggagcagcgcccagcctgggtgccttggacctgctgggcccagccactggctgtctactggacgatgggcttgagggcctgtttgaggatattgacacctctatgtatgacaatgaactttgggcaccagcctctgagggcctcaaaccaggccctgaggatgggccgggcaaggaggaagctccggagctggacgaggccgaattggactacctcatggatgtgctggtgggcacacaggcactggagcgaccgccggggccagggcgctgagccctcgtgctggaatggttgtctggtatctgaactgagcctgctggctggaccaactgtcctcgaaaagacacagctggcttccctagtacagagaacagggcttgggccactttggagagacagaatctagtcctgggcaacttcacatccgtcctcctgtctcagggctggcagggggagcctggaattaccccctagtgatggaatgacagggtctggtggggactgaattccctggccctggggtcatagcttgggctgttccttctctgatacgggaagagaccccaatcagatttttcaaattaaagccagtcctgggaaatctcaaa

SEQ ID NO: 70870 - DNA, 385 bp, Homo sapiens
agccggagtcagaactgcgtctcgcgacccaggcgcgggtttccggaggacagccaacaagcgatgctgccgccgccgtttcctgattggttgtgggtggctacctcttcgttctgattggccgctagtgagcaagatgctgagcaagggtctgaagcggaaacgggaggaggaggaggagaaggaacctctggcagtcgactcctggtggctagatcctggccacacagcggtggttcaggaacatggtggtctggccttgtaggtacatatttgacctgtcaatgtttaagctctaggaaagcatgagcttaaaagagccggaccttgggtacttgatgatgtccttaacgcttttgcggattttcagatttaaatttgaccg

SEQ ID NO: 70871 - DNA, 1369 bp, Homo sapiens
agccggagtcagaactgcgtctcgcgacccaggcgcgggtttccggaggacagccaacaagcgatgctgccgccgccgtttcctgattggttgtgggtggctacctcttcgttctgattggccgctagtgagcaagatgctgagcaagggtctgaagcggaaacgggaggaggaggaggagaaggaacctctggcagtcgactcctggtggctagatcctggccacacagcggtggcacaggcacccccggccgtggcctctagctccctctttgacctctcagtgctcaagctccaccacagcctgcagcagagtgagccggacctgcggcacctggtgctggtcgtgaacactctgcggcgcatccaggcgtccatggcacccgcggctgccctgccacctgtgcctagcccacctgcagcccccagtgtggctgacaacttactggcaagctcggacgctgccctttcagcctccatggccagcctcctggaggacctcagccacattgagggcctgagtcaggctccccaacccttggcagacgaggggccaccaggccgtagcatcgggggagcagcgcccagcctgggtgccttggacctgctgggcccagccactggctgtctactggacgatgggcttgagggcctgtttgaggatattgacacctctatgtatgacaatgaactttgggcaccagcctctgagggcctcaaaccaggccctgaggatgggccgggcaaggaggaagctccggagctggacgaggccgaattggactacctcatggatgtgctggtgggcacacaggcactggagcgaccgccggggccagggcgctgagccctcgtgctggaatggttgtctggtatctgaactgagcctgctggctggaccaactgtcctcgaaaagacacagctggcttccctagtacagagaacagggcttgggccactttggagagacagaatctagtcctgggcaacttcacatccgtcctcctgtctcagggctggcagggggagcctggaattaccccctagtgatggaatgacagggtctggtggggactgaattccctggccctggggtcatagcttgggctgttccttctctgatacgggaagagaccccaatcagatttttcaaattaaagccagtcctgggaaatctcaaaaaaaaaaaaacaaaaaaaaaaaaaaaaaaaaaaaaaaaaaaaaaaaaaaaaaaaaaaaaaaaaaaaaaaaaaaagaggggggggcgccccaaaaaacccccgcgggggggccccaaaaaacccccccctttagaaaagggggccccaaagggcggcaaaaaaaggcgcgccttaaaacacgacgaga

SEQ ID NO: 70872 - DNA, 457 bp, Homo sapiens
tgcactaatcatggggaaatggatggcacagaaaatggtgagcttgtccccctccttccctgtctggtcaccgcaccccgttcctttcctcttcctcgtttcttttttttcttaatcccataaacacagtaaagccatttcttagtacctgttttgtttcctgattattccaggattctctcactagaccctaagcctctcattctgctgtaggtcagattctctattccttctccctagcccagagccttgccagcacttgcgaaagttacggttagaacgttcccttgcctagtcacctctttgaaaaaaacactgtgatgttacatgactgcgattcaaatcagacactgtctgcttcccacatgtatctcagacaggttttatttaatgtttcttgtcagaatattgtaaattcaaaaggatgactttaaataaatgtaaacaaagacaaaaa

SEQ ID NO: 70873 - DNA, 352 bp, Homo sapiens
tttttttgagacagagtcttgctctggtcgcccaagctggagtgcagtggcgcaatctcggctcactgcaagctccgcctccccggttcacgccattctcccgcctcagcctcccaagtagctgggactacaggcgcctgccactacgcccggctaattttttgtatttttagtagagacggtttcaccgtgttagccaggatgatctcgatctcctgaccttgtgatccgcccacttcggcctcccaaggtgctgggattacaggcgtgagccactgcgcctggcaaaccatgcttgactttcaagaactctttagttatttctagaactttatctcctttagaaaaaagg

SEQ ID NO: 70874 - DNA, 351 bp, Homo sapiens
tcttataatatagtacctaaactttgtagtactctgaaaatatttgttgaattgaatgactgattgagcacctatgtgctaggcactgttgcggatgctatggacgtagccaagaacacggtctttaagaggcatgctcttatgaagtttatcttctagtgggagagacagatagtaaacaaataaacgagtcaacaaaagaatgtagggtggtgaggccgggcgcggtggttcacgcttgtaatcccagcactttgggaggccgaggcgggtggatcaccaggtcaggagatcgagaccatcctgggtaacatggtgaaaccccgtctctactaaaaatacaaaaaaaaa

SEQ ID NO: 70875 - DNA, 236 bp, Homo sapiens
ctgactccaacacaaactcaaatgccttcaagggcctagaatgggagaagtgcctgcagtaaccgggacaggacaagactaccctaaagcattcaattctaatttaaaatacagcaacaggctgggcacagcggctcacgcctgtaatcccagcactttgggatgccaaggtgggcggatcacctgaggtcaggagttcgagaccagcctggccaacatggcaaaactttgtctct

SEQ ID NO: 70876 - DNA, 86 bp, Homo sapiens
tgtacaacatcccaccacttggtattggaatcaatatgtcctgccctgcctttttacccttaggaataaatatgaaaaatggattt

SEQ ID NO: 70877 - DNA, 2414 bp, Homo sapiens
  misc_feature (1327)..(1327): n is a, c, g, or t
  misc_feature (2143)..(2148): n is a, c, g, or t
agtcttgctcccatcagcctaaattctagtataaaaagggggtgatcatacaagtcctaaagtgtagatcagcagtcactgaacctcttagagtcacaaggcatttcttctcccaaagtcatgacctttatattttgttagccttataattgactaacaaagcaacctgccaagttggtgaaggttaattattgcctcatgaaatatacattcatcgcataaaagaattaaataggaagatggccaaaaatgtaaaaaagtcgtataaatttgtctaagaagaaaaagacccaatttaagtagtctgtgacttgactcccaaattctgacctgatggatgaaagtgaagatgtttcgtatggcaaattcagtaatgctacctcagtatatagttctgtatacgtatttggaccaaagttattagataaaccaaaaatatttcatgaagcatcttctgcttcagagtccatatccagccacccagctatgaatgtatttagaaagatatttggtggaggtggaatttctaccagaggtcaagaggatttgtagggatagcctcaagaatgccagatgagtgtgtcagaaagcctgctcctacctctcgccagctgcgtgactttaggcaagtcacttaagtaccttatttcagtttcctcacctgtaaattgaacaggggttgaatggaataaaaagccctttgcaactctaaaagtcaattaacacacttactaaggtgttttaagtgaccaggaaggaaatcagaactaacctggattgttagcgaagaaaacagaagccaccaacaagcctatctgtcctttgcaattttgctccaagagcctattagcaatttgaattctgagcctctaagaaaacttatgctcaggtggcccctccaagtgttggtgccagagcactcttgccttgtatcctcacctacgccttccatgaactcatagcagtgctgtggcactgcaggggtgttttatgcattcacgttaggagcatgagcagaactgcatatgccagcaccacatgggcagcagagactccccactgccagatggatgataatggagctgcactgggaacaaccaggactgtcccagtcaacatgatacagatgaacatcctgccttaagtcactagctctctccaaagccagataaagtgggtttcttcacttacatctctctaatcttggctgccttattcaacctacagactctatgtcagtgctggattttctccccttgccctttaggtaagcagagtaggcaggaggagatttgaaagcgtgtcatacatattgccttgaaagaanggacattcaggtgtcccttcggggttctgtaacaattaggctatgtgtgctgagagagggagcggagtcatttgctgatgtgctgctacctgtaactcaaatgcctcataggaataccagcggacaaacacatagaggaaaagttgaatctttcctatattggacaatcttccttcagtcttgtttctgcatcaaaaagtctgggacacagagtgctacaggatgcctgggctaaggactgtaacagaaaaatatcaacatcagagcctggcacagtggctcacaccggtaatcccagcactttgggaggccgaggcgggtggatcacttcaggtcaggagttcgagaccatcctggccaacatggtgaaacccccatctctactaaaaatacaaaaattagccgggcacggtggcacatgcctgtaatcccagctacctgggaggctgagtcagaagaatcacttgaaaacaggaggctgaggttgcaatgagccaagattgcaccactgcactccaacctgggcaacagagcgagaccccatcttaaagaccctgtctcaaaaaagagagaaaaagaaaaagaaaaatatcaggcatcacatgaaagagtattcagctgtcgttcttgtgaaaaaggaaaaggacaaaatcaaatgcattttaactgtggtaactaattcactgacttgaagtttgctttgtttgttttctttggtgcgtagagaagaatacttcatactaactcctgatcatcttacagcagacataacaacagagtgttagagactggaataaatatgaatttggctgaaannnnnnctgaaagttgtatttcatttttttaaatgtttaacaattacactgtatcaatagtatatatacgtgtacatatatataattcttaataactgcagtgtatctagcatatatataatggtggctggtacatgtttaatagcagactctggaggaggaatcctgacatacagcatttgccagctcaatgtaaatgctcatgctccctcatggtcaatttcaatctaccactggtttagtaactaggatgcaaaatttctaaaaatgtg

SEQ ID NO: 70878 - DNA, 2140 bp, Homo sapiens
  misc_feature (1327)..(1327): n is a, c, g, or t
agtcttgctcccatcagcctaaattctagtataaaaagggggtgatcatacaagtcctaaagtgtagatcagcagtcactgaacctcttagagtcacaaggcatttcttctcccaaagtcatgacctttatattttgttagccttataattgactaacaaagcaacctgccaagttggtgaaggttaattattgcctcatgaaatatacattcatcgcataaaagaattaaataggaagatggccaaaaatgtaaaaaagtcgtataaatttgtctaagaagaaaaagacccaatttaagtagtctgtgacttgactcccaaattctgacctgatggatgaaagtgaagatgtttcgtatggcaaattcagtaatgctacctcagtatatagttctgtatacgtatttggaccaaagttattagataaaccaaaaatatttcatgaagcatcttctgcttcagagtccatatccagccacccagctatgaatgtatttagaaagatatttggtggaggtggaatttctaccagaggtcaagaggatttgtagggatagcctcaagaatgccagatgagtgtgtcagaaagcctgctcctacctctcgccagctgcgtgactttaggcaagtcacttaagtaccttatttcagtttcctcacctgtaaattgaacaggggttgaatggaataaaaagccctttgcaactctaaaagtcaattaacacacttactaaggtgttttaagtgaccaggaaggaaatcagaactaacctggattgttagcgaagaaaacagaagccaccaacaagcctatctgtcctttgcaattttgctccaagagcctattagcaatttgaattctgagcctctaagaaaacttatgctcaggtggcccctccaagtgttggtgccagagcactcttgccttgtatcctcacctacgccttccatgaactcatagcagtgctgtggcactgcaggggtgttttatgcattcacgttaggagcatgagcagaactgcatatgccagcaccacatgggcagcagagactccccactgccagatggatgataatggagctgcactgggaacaaccaggactgtcccagtcaacatgatacagatgaacatcctgccttaagtcactagctctctccaaagccagataaagtgggtttcttcacttacatctctctaatcttggctgccttattcaacctacagactctatgtcagtgctggattttctccccttgccctttaggtaagcagagtaggcaggaggagatttgaaagcgtgtcatacatattgccttgaaagaanggacattcaggtgtcccttcggggttctgtaacaattaggctatgtgtgctgagagagggagcggagtcatttgctgatgtgctgctacctgtaactcaaatgcctcataggaataccagcggacaaacacatagaggaaaagttgaatctttcctatattggacaatcttccttcagtcttgtttctgcatcaaaaagtctgggacacagagtgctacaggatgcctgggctaaggactgtaacagaaaaatatcaacatcagagcctggcacagtggctcacaccggtaatcccagcactttgggaggccgaggcgggtggatcacttcaggtcaggagttcgagaccatcctggccaacatggtgaaacccccatctctactaaaaatacaaaaattagccgggcacggtggcacatgcctgtaatcccagctacctgggaggctgagtcagaagaatcacttgaaaacaggaggctgaggttgcaatgagccaagattgcaccactgcactccaacctgggcaacagagcgagaccccatcttaaagaccctgtctcaaaaaagagagaaaaagaaaaagaaaaatatcaggcatcacatgaaagagtattcagctgtcgttcttgtgaaaaaggaaaaggacaaaatcaaatgcattttaactgtggtaactaattcactgacttgaagtttgctttgtttgttttctttggtgcgtagagaagaatacttcatactaactcctgatcatcttacagcagacataacaacagagtgttagagactggaataaatatgaatttggctga

SEQ ID NO: 70879 - DNA, 748 bp, Homo sapiens
  misc_feature (477)..(482): n is a, c, g, or t
taatttctgtatttttagtagagatggtgaaacccccatctctactaaaaatacaaaaattagccgggcacggtggcacatgcctgtaatcccagctacctgggaggctgagtcagaagaatcacttgaaaacaggaggctgaggttgcaatgagccaagattgcaccactgcactccaacctgggcaacagagcgagaccccatcttaaagaccctgtctcaaaaaagagagaaaaagaaaaagaaaaatatcaggcatcacatgaaagagtattcagctgtcgttcttgtgaaaaaggaaaaggacaaaatcaaatgcattttaactgtggtaactaattcactgacttgaagtttgctttgtttgttttctttggtgcgtagagaagaatacttcatactaactcctgatcatcttacagcagacataacaacagagtgttagagactggaataaatatgaatttggctgaaannnnnnctgaaagttgtatttcatttttttaaatgtttaacaattacactgtatcaatagtatatatacgtgtacatatatataattcttaataactgcagtgtatctagcatatatataatggtggctggtacatgtttaatagcagactctggaggaggaatcctgacatacagcatttgccagctcaatgtaaatgctcatgctccctcatggtcaatttcaatctaccactggtttagtaactaggatgcaaaatttctaaaaatgtg

SEQ ID NO: 70880 - DNA, 399 bp, Homo sapiens
caggctgctgagacttccctctagaatcctccaacatggagcctcttgcagcttacccgctaaaatgttccgggcccagagcaaagcttttatgcctttgaagtgaaggatgcaaaaggaagaactgtttctctggaaaagtataaaggcaaagtaagttgcatcatctgatttttattgttatcatttttccttgtctctgtttattcctcttaataaaatcaattttttgctgttacatggtcataagttggaatttagtcttcagagtaatggtattagtacatcactttagttattacagttctgatagtttgcttctaaataataaattccgattatctcgttttctttaaaatgctttaattttgtgctgaattgacatgtaaagttgtttgg

SEQ ID NO: 70881 - DNA, 1207 bp, Homo sapiens
caggctgctgagacttccctctagaatcctccaacatggagcctcttgcagcttacccgctaaaatgttccgggcccagagcaaaggtatttgcagttttgctgtctatagttctatgcacagtaacgctatttcttctacaactaaaattcctcaaacctaaaatcaacagcttttatgcctttgaagtgaaggatgcaaaaggaagaactgtttctctggaaaagtataaaggcaaagtttcactagttgtaaacgtggccagtgactgccaactcacagacagaaattacttagggctgaaggaactgcacaaagagtttggaccatcccacttcagcgtgttggcttttccctgcaatcagtttggagaatcggagccccgcccaagcaaggaagtagaatcttttgcaagaaaaaactacggagtaactttccccatcttccacaagattaagattctaggatctgaaggagaacctgcatttagatttcttgttgattcttcaaagaaggaaccaaggtggaatttttggaagtatcttgtcaaccctgagggtcaagttgtgaagttctggaggccagaggagcccattgaagtcatcaggcctgacatagcagctctggttagacaagtgatcataaaaaagaaagaggatctatgagaatgccattgcgtttctaatagaacagagaaatgtctccatgagggtttggtctcattttaaacattttttttttggagacagtgtctcactctgtcacccaggctggagtgcagtagtgcgttctcagctcattgcaacctctgcctttttaaacatgctattaaatgtggcaatgaaggatttttttttaatgttatcttgctattaagtggtaatgaatgttcccaggatgaggatgttacccaaagcaaaaatcaagagtagccaaagaatcaacatgaaatatattaactacttcctctgaccatactaaagaattcagaatacacagtgaccaatgtgcctcaatatcttattgttcaacttgacattttctaggactgtacttgatgaaaatgccaacacactagaccactctttggattcaagagcactgtgtatgactgaaatttctggaataactgtaaatggttatgttaatggaataaaacacaaatgttgaaaaatgtaaaatatatatacatagattcaaatcctta

SEQ ID NO: 70882 - DNA, 1121 bp, Homo sapiens
caggctgctgagacttccctctagaatcctccaacatggagcctcttgcagcttacccgctaaaatgttccgggcccagagcaaagcttttatgcctttgaagtgaaggatgcaaaaggaagaactgtttctctggaaaagtataaaggcaaagtttcactagttgtaaacgtggccagtgactgccaactcacagacagaaattacttagggctgaaggaactgcacaaagagtttggaccatcccacttcagcgtgttggcttttccctgcaatcagtttggagaatcggagccccgcccaagcaaggaagtagaatcttttgcaagaaaaaactacggagtaactttccccatcttccacaagattaagattctaggatctgaaggagaacctgcatttagatttcttgttgattcttcaaagaaggaaccaaggtggaatttttggaagtatcttgtcaaccctgagggtcaagttgtgaagttctggaggccagaggagcccattgaagtcatcaggcctgacatagcagctctggttagacaagtgatcataaaaaagaaagaggatctatgagaatgccattgcgtttctaatagaacagagaaatgtctccatgagggtttggtctcattttaaacattttttttttggagacagtgtctcactctgtcacccaggctggagtgcagtagtgcgttctcagctcattgcaacctctgcctttttaaacatgctattaaatgtggcaatgaaggatttttttttaatgttatcttgctattaagtggtaatgaatgttcccaggatgaggatgttacccaaagcaaaaatcaagagtagccaaagaatcaacatgaaatatattaactacttcctctgaccatactaaagaattcagaatacacagtgaccaatgtgcctcaatatcttattgttcaacttgacattttctaggactgtacttgatgaaaatgccaacacactagaccactctttggattcaagagcactgtgtatgactgaaatttctggaataactgtaaatggttatgttaatggaataaaacacaaatgttgaaaaatgtaaaatatatatacatagattcaaatcctta

SEQ ID NO: 70883 - DNA, 1054 bp, Homo sapiens
caggctgctgagacttccctctagaatcctccaacatggagcctcttgcagcttacccgctaaaatgttccgggcccagagcaaaggtttcactagttgtaaacgtggccagtgactgccaactcacagacagaaattacttagggctgaaggaactgcacaaagagtttggaccatcccacttcagcgtgttggcttttccctgcaatcagtttggagaatcggagccccgcccaagcaaggaagtagaatcttttgcaagaaaaaactacggagtaactttccccatcttccacaagattaagattctaggatctgaaggagaacctgcatttagatttcttgttgattcttcaaagaaggaaccaaggtggaatttttggaagtatcttgtcaaccctgagggtcaagttgtgaagttctggaggccagaggagcccattgaagtcatcaggcctgacatagcagctctggttagacaagtgatcataaaaaagaaagaggatctatgagaatgccattgcgtttctaatagaacagagaaatgtctccatgagggtttggtctcattttaaacattttttttttggagacagtgtctcactctgtcacccaggctggagtgcagtagtgcgttctcagctcattgcaacctctgcctttttaaacatgctattaaatgtggcaatgaaggatttttttttaatgttatcttgctattaagtggtaatgaatgttcccaggatgaggatgttacccaaagcaaaaatcaagagtagccaaagaatcaacatgaaatatattaactacttcctctgaccatactaaagaattcagaatacacagtgaccaatgtgcctcaatatcttattgttcaacttgacattttctaggactgtacttgatgaaaatgccaacacactagaccactctttggattcaagagcactgtgtatgactgaaatttctggaataactgtaaatggttatgttaatggaataaaacacaaatgttgaaaaatgtaaaatatatatacatagattcaaatcctta

SEQ ID NO: 70884 - DNA, 1338 bp, Homo sapiens
  misc_feature (1067)..(1072): n is a, c, g, or t
caggctgctgagacttccctctagaatcctccaacatggagcctcttgcagcttacccgctaaaatgttccgggcccagagcaaaggtatttgcagttttgctgtctatagttctatgcacagtaacgctatttcttctacaactaaaattcctcaaacctaaaatcaacagcttttatgcctttgaagtgaaggatgcaaaaggaagaactgtttctctggaaaagtataaaggcaaagtttcactagttgtaaacgtggccagtgactgccaactcacagacagaaattacttagggctgaaggaactgcacaaagagtttggaccatcccacttcagcgtgttggcttttccctgcaatcagtttggagaatcggagccccgcccaagcaaggaagtagaatcttttgcaagaaaaaactacggagtaactttccccatcttccacaagattaagattctaggatctgaaggagaacctgcatttagatttcttgttgattcttcaaagaaggaaccaaggtggaatttttggaagtatcttgtcaaccctgagggtcaagttgtgaagttctggaggccagaggagcccattgaagtcatcaggcctgacatagcagctctggttagacaagtgatcataaaaaagaaagaggatctatgagaatgccattgcgtttctaatagaacagagaaatgtctccatgagggtttggtctcattttaaacattttttttttggagacagtgtctcactcttgcactccaacctgggcaacagagcgagaccccatcttaaagaccctgtctcaaaaaagagagaaaaagaaaaagaaaaatatcaggcatcacatgaaagagtattcagctgtcgttcttgtgaaaaaggaaaaggacaaaatcaaatgcattttaactgtggtaactaattcactgacttgaagtttgctttgtttgttttctttggtgcgtagagaagaatacttcatactaactcctgatcatcttacagcagacataacaacagagtgttagagactggaataaatatgaatttggctgaaannnnnnctgaaagttgtatttcatttttttaaatgtttaacaattacactgtatcaatagtatatatacgtgtacatatatataattcttaataactgcagtgtatctagcatatatataatggtggctggtacatgtttaatagcagactctggaggaggaatcctgacatacagcatttgccagctcaatgtaaatgctcatgctccctcatggtcaatttcaatctaccactggtttagtaactaggatgcaaaatttctaaaaatgtg

SEQ ID NO: 70885 - DNA, 1179 bp, Homo sapiens
aatgcttttttaatggcagtactatttcagggccttaacccaggcatctaggttacagttttcaatagaactgtgtatgtccaaaaatatgaaaaaaacatcaatcagaggttatagtcccccccaaattgtttaggattttaactacttgcagaattttttaaaatcttttgcttcactttccggttggatttttttctttttccgggaggtttcactagttgtaaacgtggccagtgactgccaactcacagacagaaattacttagggctgaaggaactgcacaaagagtttggaccatcccacttcagcgtgttggcttttccctgcaatcagtttggagaatcggagccccgcccaagcaaggaagtagaatcttttgcaagaaaaaactacggagtaactttccccatcttccacaagattaagattctaggatctgaaggagaacctgcatttagatttcttgttgattcttcaaagaaggaaccaaggtggaatttttggaagtatcttgtcaaccctgagggtcaagttgtgaagttctggaggccagaggagcccattgaagtcatcaggcctgacatagcagctctggttagacaagtgatcataaaaaagaaagaggatctatgagaatgccattgcgtttctaatagaacagagaaatgtctccatgagggtttggtctcattttaaacattttttttttggagacagtgtctcactctgtcacccaggctggagtgcagtagtgcgttctcagctcattgcaacctctgcctttttaaacatgctattaaatgtggcaatgaaggatttttttttaatgttatcttgctattaagtggtaatgaatgttcccaggatgaggatgttacccaaagcaaaaatcaagagtagccaaagaatcaacatgaaatatattaactacttcctctgaccatactaaagaattcagaatacacagtgaccaatgtgcctcaatatcttattgttcaacttgacattttctaggactgtacttgatgaaaatgccaacacactagaccactctttggattcaagagcactgtgtatgactgaaatttctggaataactgtaaatggttatgttaatggaataaaacacaaatgttgaaaaatgtaaaatatatatacatagattcaaatcctta

SEQ ID NO: 70886 - DNA, 873 bp, Homo sapiens
  misc_feature (801)..(801): n is a, c, g, or t
  misc_feature (858)..(858): n is a, c, g, or t
  misc_feature (871)..(871): n is a, c, g, or t
caggctgctgagacttccctctagaatcctccaacatggagcctcttgcagcttacccgctaaaatgttccgggcccagagcaaaggtatttgcagttttgctgtctatagttctatgcacagtaacgctatttcttctacaactaaaattcctcaaacctaaaatcaacagcttttatgcctttgaagtgaaggatgcaaaaggaagaactgtttctctggaaaagtataaaggcaaagtttcactagttgtaaacgtggccagtgactgccaactcacagacagaaattacttagggctgaaggaactgcacaaagagtttggaccatcccacttcagcgtgttggcttttccctgcaatcagtttggagaatcggagccccgcccaagcaaggaagtagaatcttttgcaagaaaaaactacggagtaactttccccatcttccacaagattaagattctaggatctgaaggagaacctgcatttagatttcttgttgattcttcaaagaaggaaccaaggtggaatttttggaagtatcttgtcaaccctgagggtcaagttgtgaagttctggaggccagaggagcccattgaagtcatcaggcctgacatagcagctctggttagacaagtgatcataaaaaagaaaaagaattccacttgatcaacttaattccttttctttatcttccctccctcacttcccttttctcccaccctcttttccaagctggttcgctttgcaatatattactggtaatgagttgcaggataatgcagtcataacttggtttctnctaagtatttgagttcaaaactcctgtatctaaagaaatacggttggggcattaatnaagaaaatctttntt

SEQ ID NO: 70887 - DNA, 1367 bp, Homo sapiens
caggctgctgagacttccctctagaatcctccaacatggagcctcttgcagcttacccgctaaaatgttccgggcccagagcaaaggtatttgcagttttgctgtctatagttctatgcacagtaacgctatttcttctacaactaaaattcctcaaacctaaaatcaacagcttttatgcctttgaagtgaaggatgcaaaaggaagaactgtttctctggaaaagtataaaggcaaagtttcactagttgtaaacgtggccagtgactgccaactcacagacagaaattacttagggctgaaggaactgcacaaagagtttggaccatcccacttcagcgtgttggcttttccctgcaatcagtttggagaatcggagccccgcccaagcaaggaagtagaatcttttgcaagaaaaaactacggagtaactttccccatcttccacaagattaagattctaggatctgaaggagaacctgcatttagatttcttgttgattcttcaaagaaggaaccaaggtggaatttttggaagtatcttgtcaaccctgagggtcaagttgtgaagttctggaggccagaggagcccattgaagtcatcaggcctgacatagcagctctggttagacaagtgatcataaaaaagaaagaggatctatgagaatgccattgcgtttctaatagaacagagaaatgtctccatgagggtttggtctcattttaaacattttttttttggagacagtgtctcactctgtcacccaggctggagtgcagtagtgcgttctcagctcattgcaacctctgcctttttaaacatgctattaaatgtggcaatgaaggatttttttttaatgttatcttgctattaagtggtaatgaatgttcccaggatgaggatgttacccaaagcaaaaatcaagagtagccaaagaatcaacatgaaatatattaactacttcctctgaccatactaaagaattcagaatacacagtgaccaatgtgcctcaatatcttattgttcaacttgacattttctaggactgtacttgatgaaaatgccaacacactagaccactctttggattcaagagcactgtgtatgactgaaatttctggaataactgtaaatggttatgttaatggaataaaacacaaatgttgaaaaatgtaaaatatatatacatagattcaaatccttatatatgtatgcttgttttgtgtacaggattttgttttttctttttaagtacaggttcctagtgttttactataactgtcactatgtatgtaactgacatatataaatagtcatttataaatgaccgtattataacatttgaaaaagtcttcatcattttc

SEQ ID NO: 70888 - DNA, 1064 bp, Homo sapiens
caggctgctgagacttccctctagaatcctccaacatggagcctcttgcagcttacccgctaaaatgttccgggcccagagcaaaggtatttgcagttttgctgtctatagttctatgcacagtaacgctatttcttctacaactaaaattcctcaaacctaaaatcaacagcttttatgcctttgaagtgaaggatgcaaaaggaagaactgtttctctggaaaagtataaaggcaaagtttcactagttgtaaacgtggccagtgactgccaactcacagacagaaattacttagggctgaaggaactgcacaaagagtttggaccatcccacttcagcgtgttggcttttccctgcaatcagtttggagaatcggagccccgcccaagcaaggaagtagaatcttttgcaagaaaaaactacggagtaactttccccatcttccacaagattaagattctaggatctgaaggagaacctgcatttagatttcttgttgattcttcaaagaaggaaccaaggtggaatttttggaagtatcttgtcaaccctgagggtcaagttgtgaagttctggaggccagaggagcccattgaagtcatcaggcctgacatagcagctctggttagacaagtgatcataaaaaagaaagaggatctatgagaatgccattgcgtttctaatagaacagagaaatgtctccatgagggtttggtctcattttaaacattttttttttggagacagtgtctcactcttgcactccaacctgggcaacagagcgagaccccatcttaaagaccctgtctcaaaaaagagagaaaaagaaaaagaaaaatatcaggcatcacatgaaagagtattcagctgtcgttcttgtgaaaaaggaaaaggacaaaatcaaatgcattttaactgtggtaactaattcactgacttgaagtttgctttgtttgttttctttggtgcgtagagaagaatacttcatactaactcctgatcatcttacagcagacataacaacagagtgttagagactggaataaatatgaatttggctga

SEQ ID NO: 70889 - DNA, 577 bp, Homo sapiens
atttattctttaaaaacaaaaacagcatgtatcattttaacaacaataataaagtaattatttaaaaaaattatatctgcaacttagggaatcactaaagccaaacgtctgatttgtttaggttctgtgggaatcatcctttggcgcaatcacgtgcattcaagcattattacgtttaggaaatggtccaaggggtatgtgcagttcctgaaagtctttttacagcctgtatattctctttcgtatcttttaagtttcttgtttgagaccttcctctagacttctctagaatcctcttaacctctctggcttttgaggggttttgtagaaagccattgcctggcacagagaagttatccatcctggaaatgactgccagagtctaggccaaagggtgtaggtcttttccactctgcctctgcatagttaagggtgtttacatctgaacagaagatgcacttcggctgcactaaagatacaagcagtattaagggaagagtagctgttgtcttttcagcacccaggagtaaaaagtaaagattaaggtgacacgtgcactctctgtgaagaactactt

SEQ ID NO: 70890 - DNA, 560 bp, Homo sapiens
tattctttttaaatgcgtcgacgtggaggggaaggattaaagttagggattggagtattttaatgctagaagggagaagaatgattggaaggcggaaaaagtgattgctttttacctttttcttcagaaggtcatgtgaccagctctgagtaaaactgcttgagagtaattgtgcttgttgattagatgatagttttcttatcgtttccactaaataacatgcaaaacgactcccttctactgtttttctcgatgtatttcttctaataatacatgatatttttgtagtgaaagtttatgaagtcacaacttacctgtcttttacagctgagtgaacttagcaagattatgtggcttgttcagagtgacacggcttgttaaaaaaatatagccgaagactagagattggttttctgacatctagatctaggttgatttcacctcttagagattccagtcttggaagagggttggtgcaggagaggactggagattaagtatgaagaaagttaggaaggggattaaacgcccctggagatgttaaaaaaaaaaaagtcgac

SEQ ID NO: 70891 - DNA, 315 bp, Homo sapiens
ttttcagtcggacatttgatgtctgttgctgaaacatgcaagatcaatatgtgttcagcttccggcaggtttcccatagcctgcccctacaggctggggaaggcaaagaatgctgcccccagctttcacacagagagtacagaagggaagggcttttcctatcttgtttctgaaaaattcccttaaacaaaagagaaataaaggggggaggaaagtataatgatgaaaatttaacaagtatatacaaggagaagagggagaggaagacagaaacaatcagggaggaaaggggagttattttccccaaagactgct

SEQ ID NO: 70892 - DNA, 656 bp, Homo sapiens
aaaaattaggtatgtcgtaggcataaaatatatgtacatgctagtcttgtatcatttactaccataaaatacacacaaatgtattatactaaattaaaatttattaaaacttatgcatacaaatgcttatagactatatacatgataccatttgcagtaatgtaaacaataggtaaagaaatgtaaacaaacataaaagctgcagtattaaatcataattgcataaaattaactctggtacatactgtactactgtaataattttgtagccacttcctgttgctattgcaatgagctcaggtgttgtgaatattcactgaaaactccatgtgacactaatcatctctgcttgagcagttaatctcttcagtaaatagtgtatctcagtaaaaagtgatgtctcagttttcatttatttttcgtcatatttaatttacaatactgtaaacctggaataagtaataccatgagacccataggaagtgccaccagtggtgctggaagtgctcccaagaagcagagaaaactcatgacattacaagaaaaagttgaattgcttgatacgttctgttgtttgaggtctgcagctgtggtcacctgccagttcaggcagacaattgactttgtaaacagatgacataaacttatggtatcaa

SEQ ID NO: 70893 - DNA, 503 bp, Homo sapiens
  misc_feature (407)..(407): n is a, c, g, or t
tgagaattgcagcttatggccacacatcagacatactgacttaaaggggccagaccctggtgaaatgaaaagtgagttaggcatgtgagcacttgccttggcttccagaaaactaagtaatcaagagaaatactattttgatgcagtattttaaaaaaatcaaaattaatgcaaaaaaaaaaaaaacccattgcaagatgagcaaaagatcaaatttttttttagtatgtataacttgatttaattttatttatttttaaaatattttgcatatttttcttaaactacggcacttagtattccaaggaggtctcccatctaagtactaaccaggcttgaccctacttagctctttttttttttaatttaattttattattattatactttaagttttagggtacatngtcacagtgtgcaggttagttacatatgtatacatgtgccatgctggtgtgctgcacccattaactcgtcatttagcattaggtatatctcctaat

SEQ ID NO: 70894 - DNA, 648 bp, Homo sapiens
cctgtgtttaatttgtttgtagttgactgcaaggcctctgaggcacgggaattcacagctgagttcttggagaaggtccttgagccatctggatggcggacagtctggcacatgatgtgctcaaggtgctgcttgaggccacagatgtggacatttcagccttgaaggcagtggtgcagcttgctgagccatacctctgtgaatcttgagcgagtactttcaccttggagtgtgtgaaagagctcctcgagctgaaggaacatcagttgcccctgaaggagctgggtggtgtttgatgattctggagacagcacttgtaacttgtaactgagcatgtcagctaggaaggaggtatctggtcagagaaggtgttttctgaggctgcttcctggatccctagggtttgtgttcctgccattcagcctatttggcagttatttccacctgtacaaacagaccctttgtcccttacatgagaaagaaagcccacacctggattcatattaataggatatggtctaccaattaatattgtgatagaaaagagggaaaaaggtgacacttctgtggactgcatgaatgaggatattaacatctcaggcataagatttgttcagcatggtgttataaaagaaatcttaaatgtct

SEQ ID NO: 70895 - DNA, 852 bp, Homo sapiens
gcggtccgcctgccgggagggggcgcttggcggggcggcggggcggggctctcaccggtacgagctcggccgcccgtccaatcagaggcgccgcgccgtccgcgggaatttgaagtgcctgactgggtggccgggagacggagtctcggggtcgcgtgcacctgggcggccagggaggctccagtgcccgggagaaaggcaagaaaactgaggcacagagagattgtcacacagccagtaaggtttctttcaaaatgaagattcacgcagtgattgtaactgtcttgatgagccaggttgtagtttacaaagttttattccagaaggaaaaaagccacttcacctagaaattttgcaaacaaatcaacttttactctgtgagtaatccagggcctatcaagactacattttagttgactgcaaggcctctgaggcacgggaattcacagctgagttcttggagaaggtccttgagccatctggatggcggacagtctggcacatgatgtgctcaaggtgctgcttgaggccacagatgtggacatttcagccttgaaggcagtggtgcagcttgctgagccatacctctgtgaatcttgagcgagtactttcaccttggagtgtgtgaaagagctcctcgagctgaaggaacatcagttgcccctgaaggagctgggtggtgtttgatgattctggagacagcacttgtaacttgtaactgagcatgtcagctaggaaggatagccactgagcaagcctgtaaggctattggtctgcccattctggtttcttcagcaatgcacaagacctgggacctggggcacgttgccagaacgcatccaagggcacctg

SEQ ID NO: 70896 - DNA, 2352 bp, Homo sapiens
gcgccggcactcgctcagcgaccgcggcggagacacgagcggcggcggcggagcccagagggcggcgggaatgcggaaccggcgcgcgggctgaggccgcccgggatggcgcaggggcggcggcggcgggcggcctgcgcggggccctagcgagccgggctgacgctcccggccccggccccggcatcggcatcgcgggcgcatcgcggccatggccaaggagcggcgcagggcggtcctggagctgctgcagcggccggggaacgcgcgctgcgcggactgcggcgccccggatcccgactgggcctcctacactctgggcgtcttcatctgcctgagctgctcgggaatccaccggaatatcccccaggtcagcaaggtgaagtccgtccgcctggacgcctgggaggaggcccaagtggagttcatggcctcccacgggaacgacgccgcgagagccaggtttgagtccaaagtaccctccttctactaccggcccacgccctccgactgccagctccttcgagagcagtggatccgggccaagtacgagcgacaggagttcatctacccggagaagcaggagccctactcggcagggtaccgtgagggttttctctggaagcgtggccgggacaacgggcagtttttgagccggaagtttgtgctgacagaacgagagggtgctctgaagtatttcaacagaaatgatgccaaggagcccaaggccgtgatgaagatcgagcacctgaacgccaccttccagccggccaagatcggccacccccacggcctgcaggtcacctacctgaaggacaacagcacccgtaacatcttcatctaccatgaggacgggaaggagattgtggactggttcaatgcactccgagctgctcgcttccactacctgcaggtggcattcccaggggccagcgacgcagatctggtgccaaagctctccaggaactacctgaaggaaggctacatggagaagacggggcccaagcaaacggaaggcttccggaagcgctggttcaccatggatgaccgcaggctcatgtacttcaaagaccccctggacgccttcgcccgaggggaagtcttcattggcagcaaggagagtggctacacggtgctgcatgggttcccgccgtccacccagggccaccactggccacatggcatcaccatcgtcacgcccgaccgcaagtttctgtttgcctgcgagacggagtccgaccagagggagtgggtggcggccttccagaaggcggtggacaggcccatgctgccccaggagtacgcagtggaggcgcacttcaagcataaaccttagcgagtgcggctggaggaccacggacattggactcactgtggctggacggaggggacccgtggatgggggggctctggcgtcctgaggccacctggccccacctgctcctcagggcagcccggcgcggccaggtagggcccgagcttcagcttccaggatgcttctctggaacctcaaggcaggcagcccaggccctgggcctgatctctaaccccgtcatgctgctgctgaccacacccagccaacctgcccctccctgacccggggccccctttcctccagggcccagtctggctcccgagctcagacacagcccccaggagccgcccaccacggctgtgggaacttccaggcctcagcgcagagccctgcttggggccagcacggtgggcagctgccggccgctggggactgggccctgctcgcatgccgccccgccctccccccacctccacgactatttattgagcgcctgttgtgtgtcacggggctatgagggccgtggggtgtttgggtggattatccacacaggtcccggcccctgcccgggctggagttgccacagcctgtgctcctggtcctcacctggaggggccagcaggctgccgtcccaccacacgtggcctctgcgcccagcacggtgctcgccgacagtggtgtctgaacccttggggacgagggcctgggccgcggtgaggccaccagaggcaggagtggccctgggggtcccgggcactgtcgcgcttgctgcaggcggcccagccgtgtatttatttttcacctatctccttcctgtcaaggcaggccgggctccagggctccccttgcgtggggcatgtaggtgggggaggcgtctgcaggtcacctggggggcccagccctctcccagccttgcctggctgagctgtgttccaggggagccctggacaagccctcataggcagggagggggtttccgaggccaggcatccgccgccccgtgtcgcatcctggaataaaatgtggctctggcatgg

SEQ ID NO: 70897 - DNA, 3329 bp, Homo sapiens
gcgccggcactcgctcagcgaccgcggcggagacacgagcggcggcggcggagcccagagggcggcgggaatgcggaaccggcgcgcgggctgaggccgcccgggatggcgcaggggcggcggcggcgggcggcctgcgcggggccctagcgagccgggctgacgctcccggccccggccccggcatcggcatcgcgggcgcatcgcggccatggccaaggagcggcgcagggcggtcctggagctgctgcagcggccggggaacgcgcgctgcgcggactgcggcgccccggatcccgactgggcctcctacactctgggcgtcttcatctgcctgagctgctcgggaatccaccggaatatcccccaggtcagcaaggtgaagtccgtccgcctggacgcctgggaggaggcccaagtggagttcatggcctcccacgggaacgacgccgcgagagccaggtttgagtccaaagtaccctccttctactaccggcccacgccctccgactgccagctccttcgagagcagtggatccgggccaagtacgagcgacaggagttcatctacccggagaagcaggagccctactcggcagggtaccgtgagggttttctctggaagcgtggccgggacaacgggcagtttttgagccggaagtttgtgctgacagaacgagagggtgctctgaagtatttcaacagaaatgatgccaaggagcccaaggccgtgatgaagatcgagcacctgaacgccaccttccagccggccaagatcggccacccccacggcctgcaggtcacctacctgaaggacaacagcacccgtaacatcttcatctaccatgaggacgggaaggagattgtggactggttcaatgcactccgagctgctcgcttccactacctgcaggtggcattcccaggggccagcgacgcagatctggtgccaaagctctccaggaactacctgaaggaaggctacatggagaagacggggcccaagcaaacggaaggcttccggaagcgctggttcaccatggatgaccgcaggctcatgtacttcaaagaccccctggacgccttcgcccgaggggaagtcttcattggcagcaaggagagtggctacacggtgctgcatgggttcccgccgtccacccagggccaccactggccacatggcatcaccatcgtcacgcccgaccgcaagtttctgtttgcctgcgagacggagtccgaccagagggagtgggtggcggccttccagaaggcggtggacaggcccatgctgccccaggagtacgcagtggaggcgcacttcaagcataaaccttagcgagtgcggctggaggaccacggacattggactcactgtggctggacggaggggacccgtggatgggggggctctggcgtcctgaggccacctggccccacctgctcctcagggcagcccggcgcggccaggtagggcccgagcttcagcttccaggatgcttctctggaacctcaaggcaggcagcccaggccctgggcctgatctctaaccccgtcatgctgctgctgaccacacccagccaacctgcccctccctgacccggggccccctttcctccagggcccagtctggctcccgagctcagacacagcccccaggagccgcccaccacggctgtgggaacttccaggcctcagcgcagagccctgcttggggccagcacggtgggcagctgccggccgctggggactgggccctgctcgcatgccgccccgccctccccccacctccacgactatttattgagcgcctgttgtgtgtcacggggctatgagggccgtggggtgtttgggtggattatccacacaggtcccggcccctgcccgggctggagttgccacagcctgtgctcctggtcctcacctggaggggccagcaggctgccgtcccaccacacgtggcctctgcgcccagcacggtgctcgccgacagtggtgtctgaacccttggggacgagggcctgggccgcggtgaggccaccagaggcaggagtggccctgggggtcccgggcactgtcgcgcttgctgcaggcggcccagccgtgtatttatttttcacctatctccttcctgtcaaggcaggccgggctccagggctccccttgcgtggggcatgtaggtgggggaggcgtctgcaggtcacctggggggcccagccctctcccagccttgcctggctgagctgtgttccaggggagccctggacaagccctcataggcagggagggggtttccgaggccaggcatccgccgccccgtgtcgcatcctggaataaaatgtggctctggcatggaaaaaaaaaaaaaaaaaaaaaaaaaaaaaaaaaaaaaaaaaaaaaaaaaaaaaacaaaaaaaaaaaaaagcggggggcggcgcgcccaagaaagagatctctccgcaggggggagccccagatgatgcgcgcagcgccccacgtttttgtgagtcacagagagggggcgcccaccaaagaggagcgcagtatataatgagagccagagagcgggggcgcgcgtataacaacagccgcggggcagcggggcaaaccgaggcaccacgagggacacctgtgggagagacgacacctcatccgcggaggggggagccaacacaagtgggccaacaacgcacccgagggcggaaatttaaagcgcccggagggagccaagtagagaaacgtgcagaggggggataataaagaggtggtgttacaacactgggggagataattctgatggtcgggggctgtgaaagaaaagaatggtggcacgtaggggggaagaactgtgcttggggagaacgagagttttattagaagagggggggtgggtagagtgagaaaagagagtgggtggggggtgtcggggctgagtagtggactgtgtatggtgaggtctgcgcgcgttctttcgtgggtgtctcgcggtatccgcgctgcgaccgccgcgggggcgcctgagagggagtcgcgacagcaacgcccgtcgtaaaggcggggcgggtgcgcgcgccgactagacggagagggccccgccgcgcccttgacgacgtacagggccgcgggacgcaggtaggacgcgcgaagcacgatgacgaaagaggatcgagccgcctgtggcgcgcagtgagcgaacagtgtctgtgatacggccgatgatccgtggcagacagccgcgcggcggcgaggggaagtacgattgagatcactgcctggctctagtcgtgttgtgtgccggtgcgtatggagtgccgaccaccgctgcaacagcc

SEQ ID NO: 70898 - DNA, 2084 bp, Homo sapiens
gtgaacgtccggctttcccttgcagatcccgactgggcctcctacactctgggcgtcttcatctgcctgagctgctcgggaatccaccggaatatcccccaggtcagcaaggtgaagtccgtccgcctggacgcctgggaggaggcccaagtggagttcatggcctcccacgggaacgacgccgcgagagccaggtttgagtccaaagtaccctccttctactaccggcccacgccctccgactgccagctccttcgagagcagtggatccgggccaagtacgagcgacaggagttcatctacccggagaagcaggagccctactcggcagggtaccgtgagggttttctctggaagcgtggccgggacaacgggcagtttttgagccggaagtttgtgctgacagaacgagagggtgctctgaagtatttcaacagaaatgatgccaaggagcccaaggccgtgatgaagatcgagcacctgaacgccaccttccagccggccaagatcggccacccccacggcctgcaggtcacctacctgaaggacaacagcacccgtaacatcttcatctaccatgaggacgggaaggagattgtggactggttcaatgcactccgagctgctcgcttccactacctgcaggtggcattcccaggggccagcgacgcagatctggtgccaaagctctccaggaactacctgaaggaaggctacatggagaagacggggcccaagcaaacggaaggcttccggaagcgctggttcaccatggatgaccgcaggctcatgtacttcaaagaccccctggacgccttcgcccgaggggaagtcttcattggcagcaaggagagtggctacacggtgctgcatgggttcccgccgtccacccagggccaccactggccacatggcatcaccatcgtcacgcccgaccgcaagtttctgtttgcctgcgagacggagtccgaccagagggagtgggtggcggccttccagaaggcggtggacaggcccatgctgccccaggagtacgcagtggaggcgcacttcaagcataaaccttagcgagtgcggctggaggaccacggacattggactcactgtggctggacggaggggacccgtggatgggggggctctggcgtcctgaggccacctggccccacctgctcctcagggcagcccggcgcggccaggtagggcccgagcttcagcttccaggatgcttctctggaacctcaaggcaggcagcccaggccctgggcctgatctctaaccccgtcatgctgctgctgaccacacccagccaacctgcccctccctgacccggggccccctttcctccagggcccagtctggctcccgagctcagacacagcccccaggagccgcccaccacggctgtgggaacttccaggcctcagcgcagagccctgcttggggccagcacggtgggcagctgccggccgctggggactgggccctgctcgcatgccgccccgccctccccccacctccacgactatttattgagcgcctgttgtgtgtcacggggctatgagggccgtggggtgtttgggtggattatccacacaggtcccggcccctgcccgggctggagttgccacagcctgtgctcctggtcctcacctggaggggccagcaggctgccgtcccaccacacgtggcctctgcgcccagcacggtgctcgccgacagtggtgtctgaacccttggggacgagggcctgggccgcggtgaggccaccagaggcaggagtggccctgggggtcccgggcactgtcgcgcttgctgcaggcggcccagccgtgtatttatttttcacctatctccttcctgtcaaggcaggccgggctccagggctccccttgcgtggggcatgtaggtgggggaggcgtctgcaggtcacctggggggcccagccctctcccagccttgcctggctgagctgtgttccaggggagccctggacaagccctcataggcagggagggggtttccgaggccaggcatccgccgccccgtgtcgcatcctggaataaaatgtggctctggcatgg

SEQ ID NO: 70899 - DNA, 2190 bp, Homo sapiens
aattccctccgccgcggtcgctgagcgagggcggcgggaatgcggaaccggcgcgcgggctgaggccgcccgggatggcgcaggggcggcggcggcgggcggcctgcgcggggccctagcgagccgggctgacgctcccggccccggccccggcatcggcatcgcgggcgcatcgcggccatggccaaggagcggcgcagggcggtcctggagctgctgcagcggccggggaacgcgcgctgcgcggactgcggcgccccggttcatggcctcccacgggaacgacgccgcgagagccaggtttgagtccaaagtaccctccttctactaccggcccacgccctccgactgccagctccttcgagagcagtggatccgggccaagtacgagcgacaggagttcatctacccggagaagcaggagccctactcggcagggtaccgtgagggttttctctggaagcgtggccgggacaacgggcagtttttgagccggaagtttgtgctgacagaacgagagggtgctctgaagtatttcaacagaaatgatgccaaggagcccaaggccgtgatgaagatcgagcacctgaacgccaccttccagccggccaagatcggccacccccacggcctgcaggtcacctacctgaaggacaacagcacccgtaacatcttcatctaccatgaggacgggaaggagattgtggactggttcaatgcactccgagctgctcgcttccactacctgcaggtggcattcccaggggccagcgacgcagatctggtgccaaagctctccaggaactacctgaaggaaggctacatggagaagacggggcccaagcaaacggaaggcttccggaagcgctggttcaccatggatgaccgcaggctcatgtacttcaaagaccccctggacgccttcgcccgaggggaagtcttcattggcagcaaggagagtggctacacggtgctgcatgggttcccgccgtccacccagggccaccactggccacatggcatcaccatcgtcacgcccgaccgcaagtttctgtttgcctgcgagacggagtccgaccagagggagtgggtggcggccttccagaaggcggtggacaggcccatgctgccccaggagtacgcagtggaggcgcacttcaagcataaaccttagcgagtgcggctggaggaccacggacattggactcactgtggctggacggaggggacccgtggatgggggggctctggcgtcctgaggccacctggccccacctgctcctcagggcagcccggcgcggccaggtagggcccgagcttcagcttccaggatgcttctctggaacctcaaggcaggcagcccaggccctgggcctgatctctaaccccgtcatgctgctgctgaccacacccagccaacctgcccctccctgacccggggccccctttcctccagggcccagtctggctcccgagctcagacacagcccccaggagccgcccaccacggctgtgggaacttccaggcctcagcgcagagccctgcttggggccagcacggtgggcagctgccggccgctggggactgggccctgctcgcatgccgccccgccctccccccacctccacgactatttattgagcgcctgttgtgtgtcacggggctatgagggccgtggggtgtttgggtggattatccacacaggtcccggcccctgcccgggctggagttgccacagcctgtgctcctggtcctcacctggaggggccagcaggctgccgtcccaccacacgtggcctctgcgcccagcacggtgctcgccgacagtggtgtctgaacccttggggacgagggcctgggccgcggtgaggccaccagaggcaggagtggccctgggggtcccgggcactgtcgcgcttgctgcaggcggcccagccgtgtatttatttttcacctatctccttcctgtcaaggcaggccgggctccagggctccccttgcgtggggcatgtaggtgggggaggcgtctgcaggtcacctggggggcccagccctctcccagccttgcctggctgagctgtgttccaggggagccctggacaagccctcataggcagggagggggtttccgaggccaggcatccgccgccccgtgtcgcatcctggaataaaatgtggctctggcatgg

SEQ ID NO: 70900 - DNA, 1430 bp, Homo sapiens
tgaggatccccgtctctccacactgtgctctctccatcactggatcctgaaggaacggctacatggagaagactggggcccaagcaaacggaaggcttccggaagcgctggttcaccatggatgaccgcaggctcatgtacttcaaagaccccctggacgccttcgcccgaggggaagtcttcattggcagcaaggagagtggctacacggtgctgcatgggttcccgccgtccacccagggccaccactggccacatggcatcaccatcgtcacgcccgaccgcaagtttctgtttgcctgcgagacggagtccgaccagagggagtgggtggcggccttccagaaggcggtggacaggcccatgctgccccaggagtacgcagtggaggcgcacttcaagcataaaccttagcgagtgcggctggaggaccacggacattggactcactgtggctggacggaggggacccgtggatgggggggctctggcgtcctgaggccacctggccccacctgctcctcagggcagcccggcgcggccaggtagggcccgagcttcagcttccaggatgcttctctggaacctcaaggcaggcagcccaggccctgggcctgatctctaaccccgtcatgctgctgctgaccacacccagccaacctgcccctccctgacccggggccccctttcctccagggcccagtctggctcccgagctcagacacagcccccaggagccgcccaccacggctgtgggaacttccaggcctcagcgcagagccctgcttggggccagcacggtgggcagctgccggccgctggggactgggccctgctcgcatgccgccccgccctccccccacctccacgactatttattgagcgcctgttgtgtgtcacggggctatgagggccgtggggtgtttgggtggattatccacacaggtcccggcccctgcccgggctggagttgccacagcctgtgctcctggtcctcacctggaggggccagcaggctgccgtcccaccacacgtggcctctgcgcccagcacggtgctcgccgacagtggtgtctgaacccttggggacgagggcctgggccgcggtgaggccaccagaggcaggagtggccctgggggtcccgggcactgtcgcgcttgctgcaggcggcccagccgtgtatttatttttcacctatctccttcctgtcaaggcaggccgggctccagggctccccttgcgtggggcatgtaggtgggggaggcgtctgcaggtcacctggggggcccagccctctcccagccttgcctggctgagctgtgttccaggggagccctggacaagccctcataggcagggagggggtttccgaggccaggcatccgccgccccgtgtcgcatcctggaataaaatgtggctctggcatgg

SEQ ID NO: 70901 - DNA, 1075 bp, Homo sapiens
gcgccggcactcgctcagcgaccgcggcggagacacgagcggcggcggcggagcccagagggcggcgggaatgcggaaccggcgcgcgggctgaggccgcccgggatggcgcaggggcggcggcggcgggcggcctgcgcggggccctagcgagccgggctgacgctcccggccccggccccggcatcggcatcgcgggcgcatcgcggccatggccaaggagcggcgcagggcggtcctggagctgctgcagcggccggggaacgcgcgctgcgcggactgcggcgccccggatcccgactgggcctcctacactctgggcgtcttcatctgcctgagctgctcgggaatccaccggaatatcccccaggtcagcaaggtgaagtccgtccgcctggacgcctgggaggaggcccaagtggagttcatggcctcccacgggaacgacgccgcgagagccaggtttgagtccaaagtaccctccttctactaccggcccacgccctccgactgccagctccttcgagagcagtggatccgggccaagtacgagcgacaggagttcatctacccggagaagcaggagccctactcggcagggtaccgtgagggttttctctggaagcgtggccgggacaacgggcagtttttgagccggaagtttgtgctgacagaacgagagggtgctctgaagtatttcaacagaaatgatgccaaggagcccaaggccgtgatgaagatcgagcacctgaacgccaccttccagccggccaagatcggccacccccacggcctgcaggtcacctacctgaaggacaacagcacccgtaacatcttcatctaccatgaggacgggaaggagattgtggactggttcaatgcactccgagctgctcgcttccactacctgcaggtggcattcccaggggccagcgacgcagatctggtgccaaagctctccaggaactacctgaaggaaggctacatggagaagacggggcccaagaaccgaagcttccgaagcgctgtcacatgatgacgcagctcatgtactcatgaccctgatctcgccgag

SEQ ID NO: 70902 - DNA, 1028 bp, Homo sapiens
gcgccggcactcgctcagcgaccgcggcggagacacgagcggcggcggcggagcccagagggcggcgggaatgcggaaccggcgcgcgggctgaggccgcccgggatggcgcaggggcggcggcggcgggcggcctgcgcggggccctagcgagccgggctgacgctcccggccccggccccggcatcggcatcgcgggcgcatcgcggccatggccaaggagcggcgcagggcggtcctggagctgctgcagcggccggggaacgcgcgctgcgcggactgcggcgccccggatcccgactgggcctcctacactctgggcgtcttcatctgcctgagctgctcgggaatccaccggaatatcccccaggtcagcaaggtgaagtccgtccgcctggacgcctgggaggaggcccaagtggagttcatggcctcccacgggaacgacgccgcgagagccaggtttgagtccaaagtaccctccttctactaccggcccacgccctccgactgccagctccttcgagagcagtggatccgggccaagtacgagcgacaggagttcatctacccggagaagcaggagccctactcggcagggtaccgtgagggttttctctggaagcgtggccgggacaacgggcagtttttgagccggaagtttgtgctgacagaacgagagggtgctctgaagtatttcaacagaaatgatgccaaggagcccaaggccgtgatgaagatcgagcacctgaacgccaccttccagccggccaagatcggccacccccacggcctgcaggtcacctacctgaaggacaacagcacccgtaacatcttcatctaccatgaggacgggaaggtgggtgctggcgagcactcgggcccgggtggcacaggagggtgggccctcaggcccgggtggcgcaggaaggtgggtgcttggacggtacgggagggtaggcacttgagctaggcggcatgagaaggcgggaagtcgggctgggcagcgtgggaaggcgggtgcttgg

SEQ ID NO: 70903 - DNA, 2321 bp, Homo sapiens
aattccctccgccgcggtcgctgagcgagggcggcgggaatgcggaaccggcgcgcgggctgaggccgcccgggatggcgcaggggcggcggcggcgggcggcctgcgcggggccctagcgagccgggctgacgctcccggccccggccccggcatcggcatcgcgggcgcatcgcggccatggccaaggagcggcgcagggcggtcctggagctgctgcagcggccggggaacgcgcgctgcgcggactgcggcgccccggatcccgactgggcctcctacactctgggcgtcttcatctgcctgagctgctcgggaatccaccggaatatcccccaggtcagcaaggtgaagtccgtccgcctggacgcctgggaggaggcccaagtggagttcatggcctcccacgggaacgacgccgcgagagccaggtttgagtccaaagtaccctccttctactaccggcccacgccctccgactgccagctccttcgagagcagtggatccgggccaagtacgagcgacaggagttcatctacccggagaagcaggagccctactcggcagggtaccgtgagggttttctctggaagcgtggccgggacaacgggcagtttttgagccggaagtttgtgctgacagaacgagagggtgctctgaagtatttcaacagaaatgatgccaaggagcccaaggccgtgatgaagatcgagcacctgaacgccaccttccagccggccaagatcggccacccccacggcctgcaggtcacctacctgaaggacaacagcacccgtaacatcttcatctaccatgaggacgggaaggagattgtggactggttcaatgcactccgagctgctcgcttccactacctgcaggtggcattcccaggggccagcgacgcagatctggtgccaaagctctccaggaactacctgaaggaaggctacatggagaagacggggcccaagcaaacggaaggcttccggaagcgctggttcaccatggatgaccgcaggctcatgtacttcaaagaccccctggacgccttcgcccgaggggaagtcttcattggcagcaaggagagtggctacacggtgctgcatgggttcccgccgtccacccagggccaccactggccacatggcatcaccatcgtcacgcccgaccgcaagtttctgtttgcctgcgagacggagtccgaccagagggagtgggtggcggccttccagaaggcggtggacaggcccatgctgccccaggagtacgcagtggaggcgcacttcaagcataaaccttagcgagtgcggctggaggaccacggacattggactcactgtggctggacggaggggacccgtggatgggggggctctggcgtcctgaggccacctggccccacctgctcctcagggcagcccggcgcggccaggtagggcccgagcttcagcttccaggatgcttctctggaacctcaaggcaggcagcccaggccctgggcctgatctctaaccccgtcatgctgctgctgaccacacccagccaacctgcccctccctgacccggggccccctttcctccagggcccagtctggctcccgagctcagacacagcccccaggagccgcccaccacggctgtgggaacttccaggcctcagcgcagagccctgcttggggccagcacggtgggcagctgccggccgctggggactgggccctgctcgcatgccgccccgccctccccccacctccacgactatttattgagcgcctgttgtgtgtcacggggctatgagggccgtggggtgtttgggtggattatccacacaggtcccggcccctgcccgggctggagttgccacagcctgtgctcctggtcctcacctggaggggccagcaggctgccgtcccaccacacgtggcctctgcgcccagcacggtgctcgccgacagtggtgtctgaacccttggggacgagggcctgggccgcggtgaggccaccagaggcaggagtggccctgggggtcccgggcactgtcgcgcttgctgcaggcggcccagccgtgtatttatttttcacctatctccttcctgtcaaggcaggccgggctccagggctccccttgcgtggggcatgtaggtgggggaggcgtctgcaggtcacctggggggcccagccctctcccagccttgcctggctgagctgtgttccaggggagccctggacaagccctcataggcagggagggggtttccgaggccaggcatccgccgccccgtgtcgcatcctggaataaaatgtggctctggcatgg

SEQ ID NO: 70904 - DNA, 2242 bp, Homo sapiens
gcgccggcactcgctcagcgaccgcggcggagacacgagcggcggcggcggagcccagagggcggcgggaatgcggaaccggcgcgcggggcatcgcggccatggccaaggagcggcgcagggcggtcctggagctgctgcagcggccggggaacgcgcgctgcgcggactgcggcgccccggatcccgactgggcctcctacactctgggcgtcttcatctgcctgagctgctcgggaatccaccggaatatcccccaggtcagcaaggtgaagtccgtccgcctggacgcctgggaggaggcccaagtggagttcatggcctcccacgggaacgacgccgcgagagccaggtttgagtccaaagtaccctccttctactaccggcccacgccctccgactgccagctccttcgagagcagtggatccgggccaagtacgagcgacaggagttcatctacccggagaagcaggagccctactcggcagggtaccgtgagggttttctctggaagcgtggccgggacaacgggcagtttttgagccggaagtttgtgctgacagaacgagagggtgctctgaagtatttcaacagaaatgatgccaaggagcccaaggccgtgatgaagatcgagcacctgaacgccaccttccagccggccaagatcggccacccccacggcctgcaggtcacctacctgaaggacaacagcacccgtaacatcttcatctaccatgaggacgggaaggagattgtggactggttcaatgcactccgagctgctcgcttccactacctgcaggtggcattcccaggggccagcgacgcagatctggtgccaaagctctccaggaactacctgaaggaaggctacatggagaagacggggcccaagcaaacggaaggcttccggaagcgctggttcaccatggatgaccgcaggctcatgtacttcaaagaccccctggacgccttcgcccgaggggaagtcttcattggcagcaaggagagtggctacacggtgctgcatgggttcccgccgtccacccagggccaccactggccacatggcatcaccatcgtcacgcccgaccgcaagtttctgtttgcctgcgagacggagtccgaccagagggagtgggtggcggccttccagaaggcggtggacaggcccatgctgccccaggagtacgcagtggaggcgcacttcaagcataaaccttagcgagtgcggctggaggaccacggacattggactcactgtggctggacggaggggacccgtggatgggggggctctggcgtcctgaggccacctggccccacctgctcctcagggcagcccggcgcggccaggtagggcccgagcttcagcttccaggatgcttctctggaacctcaaggcaggcagcccaggccctgggcctgatctctaaccccgtcatgctgctgctgaccacacccagccaacctgcccctccctgacccggggccccctttcctccagggcccagtctggctcccgagctcagacacagcccccaggagccgcccaccacggctgtgggaacttccaggcctcagcgcagagccctgcttggggccagcacggtgggcagctgccggccgctggggactgggccctgctcgcatgccgccccgccctccccccacctccacgactatttattgagcgcctgttgtgtgtcacggggctatgagggccgtggggtgtttgggtggattatccacacaggtcccggcccctgcccgggctggagttgccacagcctgtgctcctggtcctcacctggaggggccagcaggctgccgtcccaccacacgtggcctctgcgcccagcacggtgctcgccgacagtggtgtctgaacccttggggacgagggcctgggccgcggtgaggccaccagaggcaggagtggccctgggggtcccgggcactgtcgcgcttgctgcaggcggcccagccgtgtatttatttttcacctatctccttcctgtcaaggcaggccgggctccagggctccccttgcgtggggcatgtaggtgggggaggcgtctgcaggtcacctggggggcccagccctctcccagccttgcctggctgagctgtgttccaggggagccctggacaagccctcataggcagggagggggtttccgaggccaggcatccgccgccccgtgtcgcatcctggaataaaatgtggctctggcatgg

SEQ ID NO: 70905 - DNA, 1593 bp, Homo sapiens
gcgccggcactcgctcagcgaccgcggcggagacacgagcggcggcggcggagcccagagggcggcgggaatgcggaaccggcgcgcgggctgaggccgcccgggatggcgcaggggcggcggcggcgggcggcctgcgcggggccctagcgagccgggctgacgctcccggccccggccccggcatcggcatcgcgggcgcatcgcggccatggccaaggagcggcgcagggcggtcctggagctgctgcagcggccggggaacgcgcgctgcgcggactgcggcgccccggatcccgactgggcctcctacactctgggcgtcttcatctgcctgagctgctcgggaatccaccggaatatcccccaggtcagcaaggtgaagtccgtccgcctggacgcctgggaggaggcccaagtggagttcatggcctcccacgggaacgacgccgcgagagccaggtttgagtccaaagtaccctccttctactaccggcccacgccctccgactgccagctccttcgagagcagtggatccgggccaagtacgagcgacaggagttcatctacccggagaagcaggagccctactcggcagggtaccgtgagggttttctctggaagcgtggccgggacaacgggcagtttttgagccggaagtttgtgctgacagaacgagagggtgctctgaagtatttcaacagaaatgatgccaaggagcccaaggccgtgatgaagatcgagcacctgaacgccaccttccagccggccaagatcggccacccccacggcctgcaggtcacctacctgaaggacaacagcacccgtaacatcttcatctaccatgaggacgggaaggagattgtggactggttcaatgcactccgagctgctcgcttccactacctgcaggtggcattcccaggggccagcgacgcagatctggtgccaaagctctccaggaactacctgaaggaaggctacatggagaagacggggcccaagcaaacggaaggcttccggaagcgctggttcaccatggatgaccgcaggctcatgtacttcaaagaccccctggacgccttcgcccgaggggaagtcttcattggcagcaaggagagtggctacacggtgctgcatgggttcccgccgtccacccagggccaccactggccacatggcatcaccatcgtcacgcccgaccgcaagtttctgtttgcctgcgagacggagtccgaccagagggagtgggtggcggccttccagaaggcggtggacaggcccatgctgccccaggagtacgcagtggaggcgcacttcaagcataaaccttagcgagtgcggctggaggaccacggacattggactcactgtggctggacggaggggacccgtggatgggggggctctggcgtcctgaggccacctggccccacctgctcctcagggcagcccggcgcggccaggtagggcccgagcttcagcttccaggatgcttctctggaacctcaaggcaggcagcccaggccctgggcctgatcgcgatcgttgtctcccacggaccagccgtgttcctcactacgggtcttccg

SEQ ID NO: 70906 - DNA, 392 bp, Homo sapiens
ccttccaagaacctgcccaggaagtgggtacacctgtccccacccccacagtaggagtcagaatcagggactggaagggatggggttcctggaggaagctcacagcagcagcagcctctgagtcacaactcagcccctccctggcatatccctttgtttgctgggagttgagctgtgactcacaaaggctctggtcccgggctgggcccatgtgacccagggtcctgactgccctgcccacagtcactgagaaaattctttgtgcaggctcaccttcccctcatctcccccactcttcctgatcctgcagcgtcagatcccagcctgcagtatcagacctcaaaaggagcctctggtgtcttgtgagtagtttacctgccgccccaccccca

SEQ ID NO: 70907 - DNA, 1053 bp, Homo sapiens
acagtcactgagaaaattctttgtgcaggctcaccttcccctcatctcccccactcttcctgatcctgcagcgtcagatcccagcctgcagtatcagacctcaaaaggagcctctggtgtcttccaaaagggaaggaaagagagagaaagccactggagttgggcagcgtgggaagctgtgaaagtggacaagcgtgaaagagcttccaagtagtggaaacagcagaagcaaagatgtgaacatgggaaaacctctgcagtatctgggtgactgtggggtttggctctgtttgagcaccccgggatgattggtggtggggtgtggctgaaggtgaattggaacagtgcactcagagccaggttgcaagagtgctgcatgctcctcagggattggctccggccaagtgccccagcctccttttctggagaattctgtttttgacttgggccccatgtccagttctgctctgacttgtgggtccaccttagaaaagtcaggagacacctgggaaatgaaggcactagactcttccagactcgttccatggccacccagaggccttgggtcatccacccaacatcccaacaaaccccactgtgcactggcatcatgccagggtccaggtgtcctgccaggagcagcctctgccctcccagagctgacatttcagggggatgtgtgccaaagtgagacctgtcagagatatttacaagcagccatctctcttgacatcgctgtatcccaaataaatcttctgggaagaccctcttcacctccagctctcctgatacagcaaggcagttgtgagcaagttattcataactctacacctcaatttcttggtatggaagatggggataatgagaggaccacaggatggttgtggagactgtgtgaggatatagatgccgagcccagtagcacagggtgcagccgttcaaaccaactgacatttactgagggctgctttgtcaggtccctctctacagtatactccaacacacacatacacacacatctgtaatcaataataatcctgcaacatctgaaaa

SEQ ID NO: 70908 - DNA, 1513 bp, Homo sapiens
atacttgctttgtttcttgtaactgatttctttagtacagaacctgctaaggccatcaaacctattgatcggaagtcagtccatcagatttgctctgggccggtggtaccgagtctaagcactgcggtgaaggagttagtagaaaacagtctggatgctggtgccactaatattgatctaaagctaaaggactatggagtggatctcattgaagtttcaggcaatggatgtggggtagaagaagaaaacttcgaaggcttaagtaagttaactttttctaatcctattataaaataattgggccacatgtcttagaattttgagtaacactgtcttgggaaacacaaaaacagttttttaaagccagttactagatatcatgtatatttgttgttatagcacttaagatatcttagtccttactttatactctctttcagctctgaaacatcacacatctaagattcaagagtttgccgacctacctcaggttgaaacttttggctttcggggggaagctctgagctcactttgtgcactgaggtgataaaatatttttatccattcacttgacccttagaaaaacctctctgaaaattaattggaatcattattatttacagttttctgtctcaatatctcagcttccagcttcttgaattctgttttgtctcactgccaatctaagtcctagtacttctgaaatgtgagcaataaatgaatgaaatgaagcaaatagtattgttaaaaaaattggttacccttattaaaacagtaacttctcaatttgaacataacatatagataataaatgatagttaccattggttttcattatcaatttttagggaaacatttcaccaaagcactatttaattatagcacagatactaaatttttataaataattatatgcacacacatacacagctaaattagaaaacacaattttaaattttatataattactagttattaatgggtaaaattcatttttcttttaatatctaaaatattatttatgccccgaaatatgctaataaaagttaaagattgtgtattatgcctagattcaaagtttttggcaaacttcaaatacttttgattgacatgtacattagcagttattagttgacttttactaaaacatgcacctttacgatggtgtttttgtagaaacataagtagtcaaatagtaacatttattgcagttttgtacagtatttgagtatagtgcataaataggtatgttcataaaatcaataaaaggagtatctatggaaataagcaaaatatcagcaaaaattgctattcctttgcctcatttaatttttaaaatttctttgtttccatgtgattctattatatgcctttggcatgccttgtataaaaccaaggtcacaaatgcaacttattaacggaatttgccaagaagacagccttgacattaaaaattccctcacaagaggtaatccataatccttaataaaataaaattgttacatgagccaat

SEQ ID NO: 70909 - DNA, 375 bp, Homo sapiens
cctgatgctgttgtagacccaaagaatactaacgaactgctccctaatagttaggcagaacttttaggcttacatagcatcaagtagtcttttctaggtatctaaacgctacaacccctaaagacatgaatggaatggagaagaacccagtagctccagacattggacacagtatacattcttctttgaatctgtgtgatattttgaactctgtgttgagctcttcacatcttgaattaaatgaggaaattaattgtgttgatatacctaatgctaaatgacgagttaatgggtgcagcacaccagcatggcacatgtatacatatgtaagtaacctgcaattgtgcacatgtaccctaaaatttaaagtataat

SEQ ID NO: 70910 - DNA, 418 bp, Homo sapiens
caaataaacacatacaggaggtcccgaaggcttctaagaaagaaaacatggtagacatgtaaatctaatgcctactttatctaaaactctatgacaataaaagaatcttatattttagaaaacacatactctatccagtgtactactatgtcatttaattcaccaatatgcctatattaaactatatatcaaaacacttttttaaagatattaccaaacatacataaccttgtgtctccctaccctgactttagctaatggctcactgacttaagtctcattttcaaagcaatattttctttcactcatctgttctatgcaacttatgtatctataggtgatgatagcatttgtgaaaactttttgctattcataagcaagaaaacaaccgtaattttcattcttccaatttcaagta

SEQ ID NO: 70911 - DNA, 3293 bp, Homo sapiens
gggaagcatggggcttcccaggctggtctgcgccttcttgctcgccgcctgctgctgctgtcctcgcgtcgcgggtgtgcccggagaggctgagcagcctgcgcctgagctggtggaggtggaagtgggcagcacagcccttctgaagtgcggcctctcccagtcccaaggcaacctcagccatgtcgactggttttctgtccacaaggagaagcggacgctcatcttccgtgtgcgccagggccagggccagagcgaacctggggagtacgagcagcggctcagcctccaggacagaggggctactctggccctgactcaagtcaccccccaagacgagcgcatcttcttgtgccagggcaagcgccctcggtcccaggagtaccgcatccagctccgcgtctacaaagctccggaggagccaaacatccaggtcaaccccctgggcatccctgtgaacagtaaggagcctgaggaggtcgctacctgtgtagggaggaacgggtaccccattcctcaagtcatctggtacaagaatggccggcctctgaaggaggagaagaaccgggtccacattcagtcgtcccagactgtggagtcgagtggtttgtacaccttgcagagtattctgaaggcacagctggttaaagaagacaaagatgcccagttttactgtgagctcaactaccggctgcccagtgggaaccacatgaaggagtccagggaagtcaccgtccctgttttctacccgacagaaaaagtgtggctggaagtggagcccgtgggaatgctgaaggaaggggaccgcgtggaaatcaggtgtttggctgatggcaaccctccaccacacttcagcatcagcaagcagaaccccagcaccagggaggcagaggaagagacaaccaacgacaacggggtcctggtgctggagcctgcccggaaggaacacagtgggcgctatgaatgtcaggcctggaacttggacaccatgatatcgctgctgagtgaaccacaggaactactggtgaactatgtgtctgacgtccgagtgagtcccgcagcccctgagagacaggaaggcagcagcctcaccctgacctgtgaggcagagagtagccaggacctcgagttccagtggctgagagaagagacagaccaggtgctggaaagggggcctgtgcttcagttgcatgacctgaaacgggaggcaggaggcggctatcgctgcgtggcgtctgtgcccagcatacccggcctgaaccgcacacagctggtcaagctggccatttttggccccccttggatggcattcaaggagaggaaggtgtgggtgaaagagaatatggtgttgaatctgtcttgtgaagcgtcagggcacccccggcccaccatctcctggaacgtcaacggcacggcaagtgaacaagaccaagatccacagcgagtcctgagcaccctgaatgtcctcgtgaccccggagctgttggagacaggtgttgaatgcacggcctccaacgacctgggcaaaaacaccagcatcctcttcctggagctggtcaatttaaccaccctcacaccagactccaacacaaccactggcctcagcacttccactgccagtcctcataccagagccaacagcacctccacagagagaaagctgccggagccggagagccggggcgtggtcatcgtggctgtgattgtgtgcatcctggtcctggcggtgctgggcgctgtcctctatttcctctataagaagggcaagctgccgtgcaggcgctcagggaagcaggagatcacgctgcccccgtctcgtaagaccgaacttgtagttgaagttaagtcagataagctcccagaagagatgggcctcctgcagggcagcagcggtgacaagagggctccgggagaccagggagagaaatacatcgatctgaggcattagccccgaatcacttcagctcccttccctgcctggaccattcccagctccctgctcactcttctctcagccaaagctcaaagggactagagagaagcctcctgctcccctcgcctgcacaccccctttcagagggccactgggttaggacctgaggacctcacttggccctgcaaggcccgcttttcagggaccagtccaccaccatctcctccacgttgagtgaagctcatcccaagcaaggagccccagtctcccgagcgggtaggagagtttcttgcagaacgtgttttttctttacacacattatgctgtaaatacgctcgtcctgccagcagctgagctgggtagcctctctgagctggtttcctgccccaaaggctggcattccaccatccaggtgcaccactgaagtgaggacacaccggagccaggcgcctgctcatgttgaagtgcgctgttcacacccgctccggagagcaccccagcagcatccagaagcagctgcagtgcaagcttgcatgcctgcgtgttgctgcaccaccctcctgtctgcctcttcaaagtctcctgtgacattttttctttggtcagaggccaggaactgtgtcattccttaaagatacgtgccggggccaggtgtggctcacgcctgtaatcccagcactttgggaggccgaggcggcggatcacaaagtcagacgagaccatcctggctaacacggtgaaaccctgtctctactaaaaatacaaaaaaaaattagctaggcgtagtggttggcacctatagtcccagctactcggaaggctgaagcaggagaatggtatgaatccaggaggtggagcttgcagtgagccgagaccgtgccactgcactccagcctgggcaacacagcgagactccgtctcgaggaaaaaaaaaatcgtgctcgtagcagctggctctgtttcgagtcaggtgaattagcctcaatccccgtgttcacttgctcccatagccctcttgatggatcacgtaaaactgaaaggcagcggggagcagacaaagatgaggtctacactgtccttcatggggattaaagctatggttatattagcaccaaacttctacaaaccaagctcaggacccaaccctagaagggcccaaatgagagaatggtacttagggatggcaaaacgggcctggctagagcttcgggtgtgtgtgtctgtctgtgtatgcatacatatgtgtgtatatatggttttgtcaggtgtgtaaatttgcaaattgtttcctttatatatgtatgtatatatatatatgaaaatatatatatatatgaaaaataaagcttaattgtcccag

SEQ ID NO: 70912 - DNA, 2943 bp, Homo sapiens
gggaagcatggggcttcccaggctggtctgcgccttcttgctcgccgcctgctgctgctgtcctcgcgtcgcgggtgtgcccggagaggctgagcagcctgcgcctgagctggtggaggtggaagtgggcagcacagcccttctgaagtgcggcctctcccagtcccaaggcaacctcagccatgtcgactggttttctgtccacaaggagaagcggacgctcatcttccgtgtgcgccagggccagggccagagcgaacctggggagtacgagcagcggctcagcctccaggacagaggggctactctggccctgactcaagtcaccccccaagacgagcgcatcttcttgtgccagggcaagcgccctcggtcccaggagtaccgcatccagctccgcgtctacaaagctccggaggagccaaacatccaggtcaaccccctgggcatccctgtgaacagtaaggagcctgaggaggtcgctacctgtgtagggaggaacgggtaccccattcctcaagtcatctggtacaagaatggccggcctctgaaggaggagaagaaccgggtccacattcagtcgtcccagactgtggagtcgagtggtttgtacaccttgcagagtattctgaaggcacagctggttaaagaagacaaagatgcccagttttactgtgagctcaactaccggctgcccagtgggaaccacatgaaggagtccagggaagtcaccgtccctgttttctacccgacagaaaaagtgtggctggaagtggagcccgtgggaatgctgaaggaaggggaccgcgtggaaatcaggtgtttggctgatggcaaccctccaccacacttcagcatcagcaagcagaaccccagcaccagggaggcagaggaagagacaaccaacgacaacggggtcctggtgctggagcctgcccggaaggaacacagtgggcgctatgaatgtcaggcctggaacttggacaccatgatatcgctgctgagtgaaccacaggaactactggtgaactatgtgtctgacgtccgagtgagtcccgcagcccctgagagacaggaaggcagcagcctcaccctgacctgtgaggcagagagtagccaggacctcgagttccagtggctgagagaagagacagaccaggtgctggaaagggggcctgtgcttcagttgcatgacctgaaacgggaggcaggaggcggctatcgctgcgtggcgtctgtgcccagcatacccggcctgaaccgcacacagctggtcaagctggccatttttggccccccttggatggcattcaaggagaggaaggtgtgggtgaaagagaatatggtgttgaatctgtcttgtgaagcgtcagggcacccccggcccaccatctcctggaacgtcaacggcacggcaagtgaacaagaccaagatccacagcgagtcctgagcaccctgaatgtcctcgtgaccccggagctgttggagacaggtgttgaatgcacggcctccaacgacctgggcaaaaacaccagcatcctcttcctggagctggtcaatttaaccaccctcacaccagactccaacacaaccactggcctcagcacttccactgccagtcctcataccagagccaacagcacctccacagagagaaagctgccggagccggagagccggggcgtggtcatcgtggctgtgattgtgtgcatcctggtcctggcggtgctgggcgctgtcctctatttcctctataagaagggcaagctgccgtgcaggcgctcagggaagcaggagatcacgctgcccccgtctcgtaagaccgaacttgtagttgaagttaagtcagataagctcccagaagagatgggcctcctgcagggcagcagcggtgacaagagggctccgggagaccagggagagaaatacatcgatctgaggcattagccccgaatcacttcagctcccttccctgcctggaccattcccagctccctgctcactcttctctcagccaaagctcaaagggactagagagaagcctcctgctcccctcgcctgcacaccccctttcagagggccactgggttaggacctgaggacctcacttggccctgcaaggcccgcttttcagggaccagtccaccaccatctcctccacgttgagtgaagctcatcccaagcaaggagccccagtctcccgagcgggtaggagagtttcttgcagaacgtgttttttctttacacacattatgctgtaaatacgctcgtcctgccagcagctgagctgggtagcctctctgagctggtttcctgccccaaaggctggcattccaccatccaggtgcaccactgaagtgaggacacaccggagccaggcgcctgctcatgttgaagtgcgctgttcacacccgctccggagagcaccccagcagcatccagaagcagctgcagtgcaagcttgcatgcctgcgtgttgctgcaccaccctcctgtctgcctcttcaaagtctcctgtgacattttttctttggtcagaggccaggaactgtgtcattccttaaagatacgtgccggggccaggtgtggctcacgcctgtaatcccagcactttgggaggccgaggcggcggatcacaaagtcagacgagaccatcctggctaacacggtgaaaccctgtctctactaaaaatacaaaaaaaaattagctaggcgtagtggttggcacctatagtcccagctactcggaaggctgaagcaggagaatggtatgaatccaggaggtggagcttgcagtgagccgagaccgtgccactgcactccagcctgggcaacacagcgagactccgtctcgagccggccggttgcgcgggccctcggaccctcagagaggcgagggttcgagggcacgagttcgaggccaacctggtccacatgggttg

SEQ ID NO: 70913 - DNA, 1287 bp, Homo sapiens
gggaagcatggggcttcccaggctggtctgcgccttcttgctcgccgcctgctgctgctgtcctcgcgtcgcgggtgtgcccggagaggctgagcagcctgcgcctgagctggtggaggtggaagtgggcagcacagcccttctgaagtgcggcctctcccagtcccaaggcaacctcagccatgtcgactggttttctgtccacaaggagaagcggacgctcatcttccgtgtgcgccagggccagggccagagcgaacctggggagtacgagcagcggctcagcctccaggacagaggggctactctggccctgactcaagtcaccccccaagacgagcgcatcttcttgtgccagggcaagcgccctcggtcccaggagtaccgcatccagctccgcgtctacaaagctccggaggagccaaacatccaggtcaaccccctgggcatccctgtgaacagtaaggagcctgaggaggtcgctacctgtgtagggaggaacgggtaccccattcctcaagtcatctggtacaagaatggccggcctctgaaggaggagaagaaccgggtccacattcagtcgtcccagactgtggagtcgagtggtttgtacaccttgcagagtattctgaaggcacagctggttaaagaagacaaagatgcccagttttactgtgagctcaactaccggctgcccagtgggaaccacatgaaggagtccagggaagtcaccgtccctgttttctacccgacagaaaaagtgtggctggaagtggagcccgtgggaatgctgaaggaaggggaccgcgtggaaatcaggtgtttggctgatggcaaccctccaccacacttcagcatcagcaagcagaaccccagcaccagggaggcagaggaagagacaaccaacgacaatccccgtgttcacttgctcccatagccctcttgatggatcacgtaaaactgaaaggcagcggggagcagacaaagatgaggtctacactgtccttcatggggattaaagctatggttatattagcaccaaacttctacaaaccaagctcaggacccaaccctagaagggcccaaatgagagaatggtacttagggatggcaaaacgggcctggctagagcttcgggtgtgtgtgtctgtctgtgtatgcatacatatgtgtgtatatatggttttgtcaggtgtgtaaatttgcaaattgtttcctttatatatgtatgtatatatatatatgaaaatatatatatatatgaaaaataaagcttaattgtcccag

SEQ ID NO: 70914 - DNA, 429 bp, Homo sapiens
attttctggtattgaaatgttatcactccagaattcactttattatgtagcatactttttaaagcagaaaatattaacttttctatgtgacagaatatagtcttaaatatgatagttactattttctttagttgtttgtgttatcttcagaaagataatttcaggtttcatcagttctttgttatagcaagcattttattaattcttgagcatcaatcagtgtgtcacgtcctacaactgccagtgttttgccattcggtattttgttgaaaagtcttggtgccagtaaaatatatgtttgcttatttaaatattttgtgagtcttactcaaagaaaacatacttcacctttcatctaaatccttaaaactagccatttgtactgatgtaaaaatgaaaacattgaaggaaagattgcagcatatggct

SEQ ID NO: 70915 - DNA, 579 bp, Homo sapiens
tggtaaatattttcctacctttcaagccctactaatagaatttacagctaaaaaactgaggttaaaataaatgaacaaatcttttcaaggtgacaaacccagggagtggcagtgctgatgaaaaaacagatgtgtctgactcatgtttcaagtcaggccattcaatcacttcaaacagtcttccacccactcctgctcacttatgtgctcaagaaccacccactcaggagataccacactatgccccagtgactgtcccacgggcatttaactttgcaagttcttacgccatctcactggggtcagtgtttttctttttctttttgtcttttgggatactattttttctgtcacaaatgttccacttttttccactattttactttcactatagttatttcactatttttctgcccccttagacaatccagaggcaaaaattatttgttttcccctcaatgccacagtctgattggttgaccagcaatgtgtctccaagaaatgaaagctgggttgggtgaagacaattttaacatctcaaggggttacgtcgacgcggccacgaatttagtagtagta

SEQ ID NO: 70916 - DNA, 1171 bp, Homo sapiens
tcctcagtttattttcttacccatgtttttcttgtttccttctcaggatgattttatcatctcatctttgaagtgttgttttccgaaattcatcgtattcctgaaatttcttcttagctgtcttagtgcagtttgtttcttggatttgtattctctggcatgctcttttcctctctctcatttttctgtagtatgcctgccctcctaccctgctatttctttacatctctctcatgcttaacatggatagctgtgtccagatcttctgtctgctcatccatgtgactcagagaggagggttctgggcaggggggccttgccggactgcatgagaggacatgagttttgctttctctgctctaatattttgcttaagccaagaatccttttcttagagatgttctatatgattcctgtcaggattttctagttttttttggattatagcttgttcatttcttttgtttttagtttggtttatatataatgagggaagaagatgattacattatttttgtcactttgccatcattgtttagaagtcatagaaagaatttttaaataggccaataagtcttaaacttgagtacttggcttagaagaaagtcaaaactccttcctttttgactaagtggtttgtttctggggagctcttaatttctatttttataatcattagcctataaggaaattgtgtcttccttgttctcagggtgatctgctgaccttgttcactcatgaagcatttgggtatcatacttatagtgtctgaaacataaactgtattgagctagacaaggtatagcctcctcttcaagtagcaaatactatcaaaagctataatgcagtaggagcaaggtggtccttgttccagtttttgtctcagttctgctgctgatgtaccatgatcttgggaaggtggtgtctcagtgtggagatctgacacattgttaccgtgcctcctggctggagggacttggagaacaatgcagttaagtagaatggttttaacaatacagagaaatttattcatttagataaaaatctgatttttagaactttaaaagctttgtacagtgtaaatagatttaatgtatttaacatgctttatcagcacaaataaaggattttaaaattttgtcaaaaaattaaatgttaatactatcaccat

SEQ ID NO: 70917 - DNA, 571 bp, Homo sapiens
ttcccccaggctggagatgttgagtttatctgaatttttctcgtgtcttcctgctcctccttccttgtaactctctcgcctgcagcctctgttatttcttcctctgaaggtgcacccaggcttacttatctaccctcctccctgggccatgccctgcacaccatacctcagtcatgtcatcctggattctgtttactgtcagtctttctgtttggcataggcatccctcttggctggcctgtgaggacagcccctttcctcatttcatgctcctaatggagaagccactgcaagatatttaatgtccttcacctgattttccatggccacgcaaaacctggacacaactcagccacccactgacttctttcctgcttctcatcctcaaatacccttcattgggctgttgtttcttttgaaaacatcctcccatgagggattccacagtgattccccagaggaaccacagagttgggatgaggacagtgcaagtgtgagagtgctgggtgtgagggcactgggtgtgagggcaccaggtgtgagggtgctggttgcgagggcaccaggtgtg

SEQ ID NO: 70918 - DNA, 550 bp, Homo sapiens
gtgtcgcagagtaggaaaggaggccagccagcaggggtccgacacgtggcaggaggagggcagggccagagtgctgcaaaggtagtgactgccgcggaagggaggtttgttgggatgtggagtcccgaggggagaggaagggagatttggactttaaaagaacctagaagaggatggaattgttaaaacaactggaatatttgctcatttaacaagcctttgttgaatattttctccgtggaaggcattgtgattcttttcttgattcagtggatattacttggctcctagtttgtaccagacactgtacttaggcattttgagatatccaaaaatgttcgtcctctgagaggttatactgtagttggggaacttacatagctagggcagggagtgtttgcgccgccagccatcggcagctgggactcgatgttgctggaatgtaactgttacagaggtgctaacagtgaaaaaggtacacagctacatcagatgagaaatataagttacagtcatctttgttctgccacagtgccaaatgacaattttg

SEQ ID NO: 70919 - DNA, 408 bp, Homo sapiens
gtctgtcctttcagttcttgtaattttcttaccattctgtttggaagcaatacagtagaagggagccatatacacctggaaagaccttggataaattcctcaaacaactgatctttactttcctcatctatacaatgacataagagtggtgtctggatcctccactgttattatgttcaaatgcaatggtttctgatgctaaattaaatacagcctaaagctgcctcctcacatattttaagttcagcctaaaggtttctccctaccttaacctaacgggatgtataaactgtaacctaactggatgtgtaaacagactgtaacctacacttgcaacaaacaggcaagtaacaatttgctaattgttctttgctcaattaaaccctgttaaattcaatttgtttgaag

SEQ ID NO: 70920 - DNA, 2910 bp, Homo sapiens
agcagagcggacgggcgcgcgggaggcgcgcagagctttcgggctgcaggcgctcgctgccgctggggaattgggctgtgggcgaggcggtccgggctggcctttatcgctcgctgggcccatcgtttgaaactttatcagcgagtctcgccactcgtcgcaggacgcgagcggggggcgggggcgcggcgaggcgccggcggccgtgacgaggcgctcccggagctgagcgcttctgctctgggcacgcatggcgcccgcacacggagtctgacctgatgcagacgcaagggggttaatatgaacgcccctctcggtggaatctggctctggctccctctgctcttgacctggctcacccccgaggtcaactcttcatggtggtacatgagagctacaggtggctcctccagggtgatgtgcgataatgtgccaggcctggtgagcagccagcggcagctgtgtcaccgacatccagatgtgatgcgtgccattagccagggcgtggccgagtggacagcagaatgccagcaccagttccgccagcaccgctggaattgcaacaccctggacagggatcacagcctttttggcagggtcctactccgaagtagtcgggaatctgcctttgtttatgccatctcctcagctggagttgtatttgccatcaccagggcctgtagccaaggagaagtaaaatcctgttcctgtgatccaaagaagatgggaagcgccaaggacagcaaaggcatttttgattggggtggctgcagtgataacattgactatgggatcaaatttgcccgcgcatttgtggatgcaaaggaaaggaaaggaaaggatgccagagccctgatgaatcttcacaacaacagagctggcaggaaggctgtaaagcggttcttgaaacaagagtgcaagtgccacggggtgagcggctcatgtactctcaggacatgctggctggccatggccgacttcaggaaaacgggcgattatctctggaggaagtacaatggggccatccaggtggtcatgaaccaggatggcacaggtttcactgtggctaacgagaggtttaagaagccaacgaaaaatgacctcgtgtattttgagaattctccagactactgtatcagggaccgagaggcaggctccctgggtacagcaggccgtgtgtgcaacctgacttcccggggcatggacagctgtgaagtcatgtgctgtgggagaggctacgacacctcccatgtcacccggatgaccaagtgtgggtgtaagttccactggtgctgcgccgtgcgctgtcaggactgcctggaagctctggatgtgcacacatgcaaggcccccaagaacgctgactggacaaccgctacatgaccccagcaggcgtcaccatccaccttcccttctacaaggactccattggatctgcaagaacactggacctttgggttctttctggggggatatttcctaaggcatgtggcctttatctcaacggaagccccctcttcctccctgggggccccaggatgggggggccacacgctgcacctaaagcctaccctattctatccatctcctggtgttctgcagtcatctcccctcctggcgagttctctttggaaatagcatgacaggctgttcagccgggagggtggtgggcccagaccactgtctccacccaccttgacgtttcttctttctagagcagttggccaagcagaaaaaaaagtgtctcaaaggagctttctcaatgtcttcccacaaatggtcccaattaagaaattccatacttctctcagatgggaacagtaaagaaagcagaatcaactgcccctgacttaactttaacttttgaaaagaccaagacttttgtctgatcaagtggttttacagctaccacccttaggggtaattggtaattacctggagaagaatggctttcaatacccttttaagtttaaaatgtgtatttttcaaggcatttattgccatattaaaatctgatgtaacaaggtggggacgtgtgtcctttggtactatggtgtgttgtatctttgtaagagcaaaagcctcagaaagggattgctttgcattactgtccccttgatataaaaaatctttagggaatgagagttccttctcacttagaatctgaagggaattaaaaagaagatgaatggtctggcaatattctgtaactattgggtgaatatggtggaaaataatttagtggatggaatatcagaagtatatctgtacagatcaagaaaaaaagggagaataaaattcctatctcatattatgcatgtgacccatggaatctcataactgaaagacttgaaggatgaaaattttggggatacaagattggtgaactaaaatgctgacagagaggtttccagagctaactcgtgcctggggcggccttacaataagcagatgcctgaaagaagtcggccacgtccgccgtctgctaatgcccatcacccttcaagcccagtttaaagacctgtcatatttaattgtatttatttgatgcttacaagatgatgtgatactgtagcctaaagcaaatgacacatagcattgcttataaagttggtaaccctgctatattatattgcaaacaaatcgtaacttggagactatgtttaagggactcaactgtaattatgggagcatcagtatgcaaatagtggttggcttctgccatcagccaaaagatgacattcagggaaaatggagaggctgcctgcaccgtttttttatgttaaatgaaagaaaggtgaaatagctacttctcgtcttcttgaaaaatttggttcttattctgtatatgacttccttacagtgctacattaacaggatatttcattacatgcatctggtatcaaatta

SEQ ID NO: 70921 - DNA, 2846 bp, Homo sapiens
agcagagcggacgggcgcgcgggaggcgcgcagagctttcgggctgcaggcgctcgctgccgctggggaattgggctgtgggcgaggcggtccgggctggcctttatcgctcgctgggcccatcgtttgaaactttatcagcgagtctcgccactcgtcgcaggacgcgagcggggggcgggggcgcggcgaggcgccggcggccgtgacgaggcgctcccggagctgagcgcttctgctctgggcacgcatggcgcccgcacacggagtctgacctgatgcagacgcaagggggttaatatgaacgcccctctcggtggaatctggctctggctccctctgctcttgacctggctcacccccgaggtcaactcttcatggtggtacatgagagctacaggtggctcctccagggtgatgtgcgataatgtgccaggcctggtgagcagccagcggcagctgtgtcaccgacatccagatgtgatgcgtgccattagccagggcgtggccgagtggacagcagaatgccagcaccagttccgccagcaccgctggaattgcaacaccctggacagggatcacagcctttttggcagggtcctactccgaaggcctgtagccaaggagaagtaaaatcctgttcctgtgatccaaagaagatgggaagcgccaaggacagcaaaggcatttttgattggggtggctgcagtgataacattgactatgggatcaaatttgcccgcgcatttgtggatgcaaaggaaaggaaaggaaaggatgccagagccctgatgaatcttcacaacaacagagctggcaggaaggctgtaaagcggttcttgaaacaagagtgcaagtgccacggggtgagcggctcatgtactctcaggacatgctggctggccatggccgacttcaggaaaacgggcgattatctctggaggaagtacaatggggccatccaggtggtcatgaaccaggatggcacaggtttcactgtggctaacgagaggtttaagaagccaacgaaaaatgacctcgtgtattttgagaattctccagactactgtatcagggaccgagaggcaggctccctgggtacagcaggccgtgtgtgcaacctgacttcccggggcatggacagctgtgaagtcatgtgctgtgggagaggctacgacacctcccatgtcacccggatgaccaagtgtgggtgtaagttccactggtgctgcgccgtgcgctgtcaggactgcctggaagctctggatgtgcacacatgcaaggcccccaagaacgctgactggacaaccgctacatgaccccagcaggcgtcaccatccaccttcccttctacaaggactccattggatctgcaagaacactggacctttgggttctttctggggggatatttcctaaggcatgtggcctttatctcaacggaagccccctcttcctccctgggggccccaggatgggggggccacacgctgcacctaaagcctaccctattctatccatctcctggtgttctgcagtcatctcccctcctggcgagttctctttggaaatagcatgacaggctgttcagccgggagggtggtgggcccagaccactgtctccacccaccttgacgtttcttctttctagagcagttggccaagcagaaaaaaaagtgtctcaaaggagctttctcaatgtcttcccacaaatggtcccaattaagaaattccatacttctctcagatgggaacagtaaagaaagcagaatcaactgcccctgacttaactttaacttttgaaaagaccaagacttttgtctgatcaagtggttttacagctaccacccttaggggtaattggtaattacctggagaagaatggctttcaatacccttttaagtttaaaatgtgtatttttcaaggcatttattgccatattaaaatctgatgtaacaaggtggggacgtgtgtcctttggtactatggtgtgttgtatctttgtaagagcaaaagcctcagaaagggattgctttgcattactgtccccttgatataaaaaatctttagggaatgagagttccttctcacttagaatctgaagggaattaaaaagaagatgaatggtctggcaatattctgtaactattgggtgaatatggtggaaaataatttagtggatggaatatcagaagtatatctgtacagatcaagaaaaaaagggagaataaaattcctatctcatattatgcatgtgacccatggaatctcataactgaaagacttgaaggatgaaaattttggggatacaagattggtgaactaaaatgctgacagagaggtttccagagctaactcgtgcctggggcggccttacaataagcagatgcctgaaagaagtcggccacgtccgccgtctgctaatgcccatcacccttcaagcccagtttaaagacctgtcatatttaattgtatttatttgatgcttacaagatgatgtgatactgtagcctaaagcaaatgacacatagcattgcttataaagttggtaaccctgctatattatattgcaaacaaatcgtaacttggagactatgtttaagggactcaactgtaattatgggagcatcagtatgcaaatagtggttggcttctgccatcagccaaaagatgacattcagggaaaatggagaggctgcctgcaccgtttttttatgttaaatgaaagaaaggtgaaatagctacttctcgtcttcttgaaaaatttggttcttattctgtatatgacttccttacagtgctacattaacaggatatttcattacatgcatctggtatcaaatta

SEQ ID NO: 70922 - DNA, 2051 bp, Homo sapiens
agcagagcggacgggcgcgcgggaggcgcgcagagctttcgggctgcaggcgctcgctgccgctggggaattgggctgtgggcgaggcggtccgggctggcctttatcgctcgctgggcccatcgtttgaaactttatcagcgagtctcgccactcgtcgcaggacgcgagcggggggcgggggcgcggcgaggcgccggcggccgtgacgaggcgctcccggagctgagcgcttctgctctgggcacgcatggcgcccgcacacggagtctgacctgatgcagacgcaagggggttaatatgaacgcccctctcggtggaatctggctctggctccctctgctcttgacctggctcacccccgaggtcaactcttcatggtggtacatgagagctacaggtggctcctccagggtgatgtgcgataatgtgccaggcctggtgagcagccagcggcagctgtgtcaccgacatccagatgtgatgcgtgccattagccagggcgtggccgagtggacagcagaatgccagcaccagttccgccagcaccgctggaattgcaacaccctggacagggatcacagcctttttggcagggtcctactccgaagtagtcgggaatctgcctttgtttatgccatctcctcagctggagttgtatttgccatcaccagggcctgtagccaaggagaagtaaaatcctgttcctgtgatccaaagaagatgggaagcgccaaggacagcaaaggcatttttgattgggttctctttggaaatagcatgacaggctgttcagccgggagggtggtgggcccagaccactgtctccacccaccttgacgtttcttctttctagagcagttggccaagcagaaaaaaaagtgtctcaaaggagctttctcaatgtcttcccacaaatggtcccaattaagaaattccatacttctctcagatgggaacagtaaagaaagcagaatcaactgcccctgacttaactttaacttttgaaaagaccaagacttttgtctgatcaagtggttttacagctaccacccttaggggtaattggtaattacctggagaagaatggctttcaatacccttttaagtttaaaatgtgtatttttcaaggcatttattgccatattaaaatctgatgtaacaaggtggggacgtgtgtcctttggtactatggtgtgttgtatctttgtaagagcaaaagcctcagaaagggattgctttgcattactgtccccttgatataaaaaatctttagggaatgagagttccttctcacttagaatctgaagggaattaaaaagaagatgaatggtctggcaatattctgtaactattgggtgaatatggtggaaaataatttagtggatggaatatcagaagtatatctgtacagatcaagaaaaaaagggagaataaaattcctatctcatattatgcatgtgacccatggaatctcataactgaaagacttgaaggatgaaaattttggggatacaagattggtgaactaaaatgctgacagagaggtttccagagctaactcgtgcctggggcggccttacaataagcagatgcctgaaagaagtcggccacgtccgccgtctgctaatgcccatcacccttcaagcccagtttaaagacctgtcatatttaattgtatttatttgatgcttacaagatgatgtgatactgtagcctaaagcaaatgacacatagcattgcttataaagttggtaaccctgctatattatattgcaaacaaatcgtaacttggagactatgtttaagggactcaactgtaattatgggagcatcagtatgcaaatagtggttggcttctgccatcagccaaaagatgacattcagggaaaatggagaggctgcctgcaccgtttttttatgttaaatgaaagaaaggtgaaatagctacttctcgtcttcttgaaaaatttggttcttattctgtatatgacttccttacagtgctacattaacaggatatttcattacatgcatctggtatcaaatta

SEQ ID NO: 70923 - DNA, 243 bp, Homo sapiens
cgctcccggagctgagcgcttctgctctgggcacgcatggcgcccgcacacggagtctgacctgatgcagacgcaagggggttaatatgaacgcccctctcggtggaatctggctctggctccctctgctcttgacctggctcacccccgaggtcaactcttcatggtggtaagtccacgcgcacgggcgcgggggattttggagatcggaatggggaccgcattggccacatagacccttcc

SEQ ID NO: 70924 - DNA, 336 bp, Homo sapiens
tgtaaaataaaatataaaatataactgaagtggcttatcttcttagttctgattctaaaacacagttttctcatgtattacctcacctctatacaaagtgtcaatggattaaaaaaagattccctgaatcttcttcccctgggcctttcttttttatcttatgactataagaggatgaagattcagggaatcggggaaagggaggttaggttccttaagagacactagaaattttgttgcgcttgcaaaccacaatttagagatcgctatttatgaaaaagaaagagaagtgataagtcatggaaaccttcacctgtggtgctacttgttctgtgg

SEQ ID NO: 70925 - DNA, 1099 bp, Homo sapiens
  misc_feature (29)..(29): n is a, c, g, or t
  misc_feature (69)..(69): n is a, c, g, or t
ctgcgcagtcccaggcggtgttaataaanaacccacgaagaaaaagagctttagtgtaactgcaagcanacttcttgagatggaaggattgtcatctgaggaaaaaaaatcaagattaagagaggaggaactagaatgagattcacataccgtctctcctccaagggaaggagagagtggtgatgcctgcccactccttcctgggcagaacatttgtagcatggaacattggagaatttgcagtctgctgactttctgatttaggaggttgatggggaggccttataatttgcatttctaacaagttctgaggtgatgcttcaagtatgtccaggcagaagggctgcctcacagagaattctgccataccacatgggaattgaagtcacagacatctctaaccctcaagcctgaaaccaaaagactgaaaaccaacactacagtggacaaagaacatctctgaacttgtgtggggaccagtgacacaaggacctaaggtctctctcttctcatcttggcacttcagaagtctccccaatcttgacaaagccctggagaaagggccgggcctcccgttgataagaatatcactgcagataaatggaggtttcaaattgaaagaaaggaggagggcctcctgttgataagattattgtcactgcaggtaaatggaggcttcaaatagaaatacatttcagttacagaaaaaaaaattatctttgttacacatttgagtttgcaggcctaaggttactcccgctacactatcatctgtaaccataacgcactcaacattttaagctaactataaggattgttgcttcactcaaagatcctgaggttttattcactaacatttttatttggtgactatagttgacaagaacaaagctgtggggaaccaacaaacactgcaatgcctggcattgtcacctcactagattgtgagttcctctgggacagggtccgtacattttcttagaatccctcacttagccattagcctgcacagtgcttgtacttagtaagtgctcagtaaatgtttgtggaatgaatgcatgatgaacaaaatatatactgaggactcttaaaaaaaatt

SEQ ID NO: 70926 - DNA, 250 bp, Homo sapiens
ctaattctattaatattattctaggtgactctgaagcagaactcttgagatggaaggattgtcatctgaggaaaaaaaatcaagattaagagaggaggaactagaatgagattcacataccgtctctcctccaagggaaggagagagtggtgatgcctgcccactccttcctgggcagaacatttgtagcatggaacattggagaatttgcagtctgctgactttctgatttaggaggttgatggggagg

SEQ ID NO: 70927 - DNA, 3416 bp, Homo sapiens
  misc_feature (1)..(1): n is a, c, g, or t
  misc_feature (323)..(323): n is a, c, g, or t
  misc_feature (357)..(357): n is a, c, g, or t
  misc_feature (712)..(712): n is a, c, g, or t
  misc_feature (1247)..(1247): n is a, c, g, or t
  misc_feature (1432)..(1432): n is a, c, g, or t
  misc_feature (1502)..(1502): n is a, c, g, or t
  misc_feature (1651)..(1651): n is a, c, g, or t
  misc_feature (2433)..(2433): n is a, c, g, or t
  misc_feature (3028)..(3028): n is a, c, g, or t
ntagacaggagcctcaggaaatgcagacgcctctctcccaaatcaaattttaaaagttgtcctgagttgacctgtggagggtcaggtaggaatataacaaggttgcaggaagcagctaatcacagacctattttccatcatttgtctatcactaagtcattaggtcctaactgtatgataggcactgcaagaggcgagtgaatacaaagacaaaggctggcaagggaccctcagccagggggagagaaactgatgggcatgcggttgtgacacatgcaatgagaaggctagtggaggaaaggcagaaggtgctttggatattnagagaggaagtgaccagccacggtgatggcaggnagggcttcctgggtgtgatactagagctcagagttcaaggatgagtagaaggagttagccaggtaaagaaggtagggggactggaggcagagaaaacagacagggaagagcaagacacattcagccaaatacaaatagtctggtaggatcagaggtagcatgggggctggcatggtggccctcaacagatgaggctggagaggtgggtcatgaagtgtgccctgataaggaataggattctttttttttttttttttttgaaatggagcctcactctgtcatccaggctggagtgcagtggtgcaatcttgactcactgcatctcccaggttcaagcagttctcctgtctcagcntccccagtagctgggactacaggctcacgccacctcgcccagctaatttttgtatttttagtagagatggggtttcaccacattggtcaggctggtctcgaactcctgacctcaggtgatccacgtgcctcagcatcccaaagtgctgggattacaggggtgagccaccacacctggccaggaataggattcttaccctgctggagtgtgagtgtgagggggagtactggcaggctcaggacctggtggctagagggtgtattggagagaaaccagagtgaaaaatggacaaccagccaggagagtagcagagagctccaagggaaagttgacagcctggaccaatgaaatgccaagtagggtgctgtggaggaggtaaaacgccctgattctctcatagcttggatatgaagagaggcgggcagaagatgaagagtctaggatgatccccctggctcagacatcaggctagcaagatggcaacagcatattcagaggccaggaacacagaggcatgagtctgagaccagagcgnagtgggcaaggtcactgatttccttctggttctacggtgaattatctgttggctgtgataatgcgcttccaagctgctgtactggcgggagacttagtcatgcattcatatgaggtcctgcaatgttaagagaacctccataaaaatgttagggagaagggcaggggttttggctttgcaaaacntgggtgtttccccagataattattcttactttagttctcgaaaatattgtgtgctgccattcaaaagtancaaccttttcacgggtgccaaactgtcagacattaactcaattcagagcaaaaagttgcagagaatgtagggggaaggtgcagtgagcaaagagctgtccatgctggtaggagcctaaagcacagccacaaccaagtcatttccagaantgttttattacgagcttgaatttgcacaccaacttctccaaggcagcttccctgtgagggagaagttagctagtgcctcggggtccctttaaggtttaaggcttggagtccttgactctcaggtataattcttgggatattctatgagaatgctgacagacaactttttaaggccaactttctgtcttcagccatgtgtgattctgttacatagaccagtatactactggttttagttcctgtgtcttgatggagcataataaaaatctcaaaattaaagatccattttattcaataccatggactttaaaagtgaataatgttttatcagtgcacatcatatttttcaaaatcatcaacattttcattgggtggagggagtgttcccttcaaagcatactaaacaaccaatacattgggattagaaggttcaaagtagcattcttccccggacaacctacatgctttgctgttcttatactcctgcagtatgttcatgaatactctgcagaaagttgcttttttttcttctactatgtgccgctttcctaatgaattatgtagatgaacagataacttttgagttaactttcacacttagatttattctttcccagaccatagcgggtgttttgacgtaagtcctgcagagctagaaatttaacttcaaatttgcaaaaactattttcaaccaactttggaccccacagtgttcattaaatgaattagaaattacagagttagggggtttttttattttattttaactgttgccatatctngatccattgcctaaaattcatacaaccagaaattttggtagaacttcctacactcttcaggcacttcctggcctgttgtagtttcttcaacagactgcgcagggccctgtgttaaatgtgtcaatgtttacttaatactgacatgcaaaagctcactctttctctttctttttctgctgttgtagtaaaccatatatagggaccaaaaattaattggaaatcctgaatcttgctctgtcgcccaggctggggtgtagtggtgcgatctcctctcactgcaagctccgcctcccgggttcacgccattctcctgcctcagcctcccatgtaactgggactacaggcgcccaccaccacacccggctaattttttgtacatttagtagagacggggtttcaccgtattagccaggatggtctcgaactcctgacctcgtgatccacccgcctcagcctcccagcacgcctgtgctgggattacaggcgtgagccaccatgctgcgctggcacagttttcttaaatccacattgccgaggcagtgggaggtccaagccaaataaggagcaggctttctctaatgtcattcccagtgcntttcactcccagagtctacaggtgctattccggcttatggctgttgaaatatggaacagcaaaccggctgtcattcataagaattggtgccggccagctggccaagccaactacaggaataaagacgtgccttttcactctgatacacggggccttgctctgagcagacagctgaagaatctcaggtgacaaccccagggaaatggtgtttgtggcactcaggcattcgccacgccgaagaggcaaagcaacagacataggatgtcagcgtgctgattaaggagaacagaggccgaccatgcctgctcctgggactttgggcagaggaagagaaactgaggggaaagcttagatgactacatgttataaataaactttaaataatttt

SEQ ID NO: 70928 - DNA, 682 bp, Homo sapiens
tttttgaccccggaagtccgggcgggcgccgagccgggtgcgttttgccacagagccgtaaaggcgcgcgggaacatggggctgtatgctgcagctgcaggcgtgttggccggcgtggagagccgccagggctctatcaaggggttggtgtactccagcaacttccagaacgtgaagcagctgtacgcgctggtgtgcgaaacgcagcgctactccgccgtgctggatgctgtgatcgccagcgccggcctcctccgtgcggagaagaagctgcggccgcacctggccaagtggatggcaagcatgtggtgtttggcaaagtgaaagaaggcatgaatattgtggaggccatggagcgctttgggtccaggaatggcaagaccagcaagaagatcaccattgctgactgtggacaactcgaataagtttgacttgtgttttatcttaaccaccagatcattccttctgtagctcaggagagcacccctccaccccatttgctcgcagtatcctagaatctttgtgctctcgctgcagttccctttgggttccatgttttccttgttccctcccatgcctagctggattgcagagttaagtttatgattatgaaataaaaactaaataacaattgtcaaaaaaaacaaccacccacggaaaacaacaaaaacttccccagggg

SEQ ID NO: 70929 - DNA, 1721 bp, Homo sapiens
ccgactaagacaggacccccgtgttccgtaaaggcgcgcgggaacatggggctgtatgctgcagctgcaggcgtgttggccggcgtggagagccgccagggctctatcaaggggttggtgtactccagcaacttccagaacgtgaagcagctgtacgcgctggtgtgcgaaacgcagcgctactccgccgtgctggatgctgtgatcgccagcgccggcctcctccgtgcggagaagaagctgcggccgcacctggccaaggtgctagtgtatgagttgttgttgggaaagggctttcgagggggtgggggccgatggaaggctctgttgggccggcaccaggcgaggctcaaggctgagttggctcggctcaaggttcatcggggtgtgagccggaatgaggacctgttggaagtgggatccaggcctggtccagcctcccagctgcctcgatttgtgcgtgtgaacactctcaagacctgctccgatgatgtagttgattatttcaagagacaaggtttctcctatcagggtcgggcttccagcctcgatgacttacgagccctcaaggggaagcattttctcctggaccccttgatgccggagctgctggtgtttcccgcccagacagatctgcatgaacacccactgtaccgggccggacacctcattctgcaggacagggccagctgtctcccagccatgctgctggaccccccgccaggctcccatgtcatcgatgcctgtgccgccccaggcaataagaccagtcacttggctgctcttctgaagaaccaagggaagatctttgcctttgacctggatgccaagcggctggcatccatggccacgctgctggcccgggctggcgtctcttgctgtgaactggctgaggaggacttcctggcggtctccccctcggatccacgctaccatgaggtccactacatcctgctggatccttcctgcagtggctcgggtatgccgagcagacagctggaggagcccggggcaggcacacctagcccggtgcgtctgcatgccctggcagggttccagcagcgagccctgtgccacgcactcactttcccttccctgcagcggctcgtctactccacgtgctccctctgccaggaggagaatgaagacgtggtgcgagatgcgctgcagcagaacccgggcgccttcaggctagctcccgccctgcctgcctggccccaccgaggcctgagcacgttcccgggtgccgagcactgcctccgggcctcccctgagaccacactcagcagtggcttcttcgttgctgtaattgaacgggtcgaggtgccaaggtgagtgagtgggggcgtgcttgggaggcgcaggatggcaccggcacatctaacatctacacttctctagctcagcctcacaggccaaagcatcagcaccagaacgcacacccagcccagccccaaagagaaagaagagacagcaaagagccgcagccggtgcttgcacaccgccttgcacatagcagaggctccgggctgactccttcctggtgggaaaggaagatgcctgtcctctccgtggaggaccctgggccctcaccgcaggaagcagtttgggttttgaaaggttattgggtcccttccttgggctgtgttcttgctggtgagcaaagtgttgcctgcaaaaataaaatgcagaacgtactctaaaaaaaaacacagtttttt

SEQ ID NO: 70930 - DNA, 1633 bp, Homo sapiens
  misc_feature (32)..(32): n is a, c, g, or t
gaacttacggctaggtacgaggctgggtgttngctgtatgctgcagctgcaggcgtgttggccggcgtggagagccgccagggctctatcaaggggttggtgtactccagcaacttccagaacgtgaagcagctgtacgcgctggtgtgcgaaacgcagcgctactccgccgtgctggatgctgtgatcgccagcgccggcctcctccgtgcggagaagaagctgcggccgcacctggccaaggtgctagtgtatgagttgttgttgggaaagggctttcgagggggtgggggccgatggaaggctctgttgggccggcaccaggcgaggctcaaggctgagttggctcggctcaaggttcatcggggtgtgagccggaatgaggacctgttggaagtgggatccaggcctggtccagcctcccagctgcctcgatttgtgcgtgtgaacactctcaagacctgctccgatgatgtagttgattatttcaagagacaaggtttctcctatcagggtcgggcttccagcctcgatgacttacgagccctcaaggggaagcattttctcctggaccccttgatgccggagctgctggtgtttcccgcccagacagatctgcatgaacacccactgtaccgggccggacacctcattctgcaggacagggccagctgtctcccagccatgctgctggaccccccgccaggctcccatgtcatcgatgcctgtgccgccccaggcaataagaccagtcacttggctgctcttctgaagaaccaagggaagatctttgcctttgacctggatgccaagcggctggcatccatggccacgctgctggcccgggctggcgtctcttgctgtgaactggctgaggaggacttcctggcggtctccccctcggatccacgctaccatgaggtccactacatcctgctggatccttcctgcagtggctcgggtatgccgagcagacagctggaggagcccggggcaggcacacctagcccggtgcgtctgcatgccctggcagggttccagcagcgagccctgtgccacgcactcactttcccttccctgcagcggctcgtctactccacgtgctccctctgccaggaggagaatgaagacgtggtgcgagatgcgctgcagcagaacccgggcgccttcaggctagctcccgccctgcctgcctggccccaccgaggcctgagcacgttcccgggtgccgagcactgcctccgggcctcccctgagaccacactcagcagtggcttcttcgttgctgtaattgaacgggtcgaggtgccaagctcagcctcacaggccaaagcatcagcaccagaacgcacacccagcccagccccaaagagaaagaagagacagcaaagagccgcagccggtgcttgcacaccgccttgcacatagcagaggctccgggctgactccttcctggtgggaaaggaagatgcctgtcctctccgtggaggaccctgggccctcaccgcaggaagcagtttgggttttgaaaggttattgggtcccttccttgggctgtgttcttgctggtgagcaaagtgttgcctgcaaaaataaaatgcagaacgtactctaaaaaaaaacacagtttttt

SEQ ID NO: 70931 - DNA, 1209 bp, Homo sapiens
tttttgaccccggaagtccgggcgggcgccgagccgggtgcgttttgccacagagccgtaaaggcgcgcgggaacatggggctgtatgctgcagctgcaggcgtgttggccggcgtggagagccgccagggctctatcaaggggttggtgtactccagcaacttccagaacgtgaagcagctgtacgcgctggtgtgcgaaacgcagcgctactccgccgtgctggatgctgtgatcgccagcgccggcctcctccgtgcggagaagaagctgcggccgcacctggccaaggtgctagtgtatgagttgttgttgggaaagggctttcgagggggtgggggccgatggaaggctctgttgggccggcaccaggcgaggctcaaggctgagttggctcggctcaaggttcatcggggtgtgagccggaatgaggacctgttggaagtgggatccaggcctggtccagcctcccagctgcctcgatttgtgcgtgtgaacactctcaagacctgctccgatgatgtagttgattatttcaagagacaaggtttctcctatcagggtcgggcttccagcctcgatgacttacgagccctcaaggggaagcattttctcctggaccccttgatgccggagctgctggtgtttcccgcccagacagatctgcatgaacacccactgtaccgggccggacacctcattctgcaggacagggccagctgtctcccagccatgctgctggaccccccgccaggctcccatgtcatcgatgcctgtgccgccccaggcaataagaccagtcacttggctgctcttctgaagaaccaagggaagatctttgcctttgacctggatgccaagcggctggcatccatggccacgctgctggcccgggctggcgtctcttgctgtgaactggctgaggaggacttcctggcggtctccccctcggatccacgctaccatgaggtccactacatcctgctggatccttcctgcagtggctcgggtatgccgagcagacagctggaggagcccggggcaggcacacctagcccggtgcgtctgcatgccctggcagggttccagcagcgagccctgtgccacgcactcactttcccttccttgggctgtgttcttgctggtgagcaaagtgttgcctgcaaaaataaaatgcagaacgtactctaaaaaaaaacacagtttttt

SEQ ID NO: 70932 - DNA, 1139 bp, Homo sapiens
tttttgaccccggaagtccgggcgggcgccgagccgggtgcgttttgccacagagccgtaaaggcgcgcgggaacatggggctgtatgctgcagctgcaggcgtgttggccggcgtggagagccgccagggctctatcaaggggttggtgtactccagcaacttccagaacgtgaagcagctgtacgcgctggtgtgcgaaacgcagcgctactccgccgtgctggatgctgtgatcgccagcgccggcctcctccgtgcggagaagaagctgcggccgcacctggccaaggtgctagtgtatgagttgttgttgggaaagggctttcgagggggtgggggccgatggaaggctctgttgggccggcaccaggcgaggctcaaggctgagttggctcggctcaaggttcatcggggtgtgagccggaatgaggacctgttggaagtgggatccaggcctggtccagcctcccagctgcctcgatttgtgcgtgtgaacactctcaagacctgctccgatgatgtagttgattatttcaagagacaaggtttctcctatcagggtcgggcttccagcctcgatgacttacgagccctcaaggggaagcattttctcctggaccccttgatgccggagctgctggtgtttcccgcccagacagatctgcatgaacacccactgtaccgggccggacacctcattctgcaggacagggccagctgtctcccagccatgctgctggaccccccgccaggctcccatgtcatcgatgcctgtgccgccccaggcaataagaccagtcacttggctgctcttctgaagaaccaagggtgagtgccacaggaggaggaggaggacatggggtttgattctgtgcctttcagtgggtaatgaaggctgaaaggatgactttcgcttaagtctttcttgctgcaccaaagcagttcacggtatttgccccaagctaagctttccccactgcaggtgtgagatgtggatcccttagcccttggggcagagaccccaggccagttacctctgactgtgagccctttaaacgtaggccgtttcaatattgtgtgtcctggcttaacctgcatgttctggttggctgtgacaggcccttagctgctccatgc

SEQ ID NO: 70933 - DNA, 1537 bp, Homo sapiens
ccgactaagacaggacccccgtgttccgtaaaggcgcgcgggaacatggggctgtatgctgcagctgcaggcgtgttggccggcgtggagagccgccagggctctatcaaggggttggtgtactccagcaacttccagaacgtgaagcagctgtacgcgctggtgtgcgaaacgcagcgctactccgccgtgctggatgctgtgatcgccagcgccggcctcctccgtgcggagaagaagctgcggccgcacctggccaaggttcatcggggtgtgagccggaatgaggacctgttggaagtgggatccaggcctggtccagcctcccagctgcctcgatttgtgcgtgtgaacactctcaagacctgctccgatgatgtagttgattatttcaagagacaaggtttctcctatcagggtcgggcttccagcctcgatgacttacgagccctcaaggggaagcattttctcctggaccccttgatgccggagctgctggtgtttcccgcccagacagatctgcatgaacacccactgtaccgggccggacacctcattctgcaggacagggccagctgtctcccagccatgctgctggaccccccgccaggctcccatgtcatcgatgcctgtgccgccccaggcaataagaccagtcacttggctgctcttctgaagaaccaagggaagatctttgcctttgacctggatgccaagcggctggcatccatggccacgctgctggcccgggctggcgtctcttgctgtgaactggctgaggaggacttcctggcggtctccccctcggatccacgctaccatgaggtccactacatcctgctggatccttcctgcagtggctcgggtatgccgagcagacagctggaggagcccggggcaggcacacctagcccggtgcgtctgcatgccctggcagggttccagcagcgagccctgtgccacgcactcactttcccttccctgcagcggctcgtctactccacgtgctccctctgccaggaggagaatgaagacgtggtgcgagatgcgctgcagcagaacccgggcgccttcaggctagctcccgccctgcctgcctggccccaccgaggcctgagcacgttcccgggtgccgagcactgcctccgggcctcccctgagaccacactcagcagtggcttcttcgttgctgtaattgaacgggtcgaggtgccaagctcagcctcacaggccaaagcatcagcaccagaacgcacacccagcccagccccaaagagaaagaagagacagcaaagagccgcagccggtgcttgcacaccgccttgcacatagcagaggctccgggctgactccttcctggtgggaaaggaagatgcctgtcctctccgtggaggaccctgggccctcaccgcaggaagcagtttgggttttgaaaggttattgggtcccttccttgggctgtgttcttgctggtgagcaaagtgttgcctgcaaaaataaaatgcagaacgtactctaaaaaaaaacacagtttttt

SEQ ID NO: 70934 - DNA, 1084 bp, Homo sapiens
ccgactaagacaggacccccgtgttccgtaaaggcgcgcgggaacatggggctgtatgctgcagctgcaggcgtgttggccggcgtggagagccgccagggctctatcaagggaacgtgaagcagctgtacgcgctggtgtgcgaaacgcagcgctactccgccgtgctggatgctgtgatcgccagcgccggcctcctccgtgcggagaagaagctgcggccgcacctggccaaggtgctagtgtatgagttgttgttgggaaagggctttcgagggggtgggggccgatggaaggctctgttgggccggcaccaggcgaggctcaaggctgagttggctcggctcaaggttcatcggggtgtgagccggaatgaggacctgttggaagtgggatccaggcctggtccagcctcccagctgcctcgatttgtgcgtgtgaacactctcaagacctgctccgatgatgtagttgattatttcaagagacaaggtttctcctatcagggtcgggcttccagcctcgatgacttacgagccctcaaggggaagcattttctcctggaccccttgatgccggagctgctggtgtttcccgcccagacagatctgcatgaacacccactgtaccgggccggacacctcattctgcaggacagggccagctgtctcccagccatgctgctggaccccccgccaggctcccatgtcatcgatgcctgtgccgccccaggcaataagaccagtcacttggctgctcttctgaagaaccaagggtgagtgccacaggaggaggaggaggacatggggtttgattctgtgcctttcagtgggtaatgaaggctgaaaggatgactttcgcttaagtctttcttgctgcaccaaagcagttcacggtatttgccccaagctaagctttccccactgcaggtgtgagatgtggatcccttagcccttggggcagagaccccaggccagttacctctgactgtgagccctttaaacgtaggccgtttcaatattgtgtgtcctggcttaacctgcatgttctggttggctgtgacaggcccttagctgctccatgc

SEQ ID NO: 70935 - DNA, 790 bp, Homo sapiens
ccgactaagacaggacccccgtgttccgtaaaggcgcgcgggaacatggggctgtatgctgcagctgcaggcgtgttggccggcgtggagagccgccagggctctatcaaggggttggtgtactccagcaacttccagaacgtgaagcagctgtacgcgctggtgtgcgaaacgcagcgctactccgccgtgctggatgctgtgatcgccagcgccggcctcctccgtgcggagaagaagctgcggccgcacctggccaaggttcatcggggtgtgagccggaatgaggacctgttggaagtgggatccaggcctggtccagcctcccagctgcctcgatttgtgcgtgtgaacactctcaagacctgctccgatgatgtagttgattatttcaagagacaaggtttctcctatcagggtcgggcttccagcctcgatgacttacgagccctcaaggggaagcattttctcctggaccccttgatgccggagctgctggtgtttcccgcccagacagatctgcatgaacacccactgtaccgggccggacacctcattctgcaggacagggccagctgtctcccagccatgctgctggaccccccgccaggctcccatgtcatcgatgcctgtgccgccccaggcaataagaccagtcacttggctgctcttctgaagaaccaagggagatctttgctttgactggtgccaagcggtggatcatggcagctgttgccgggtgggttctggggactggggggggtccggggcccctggttcgcctggggcc

SEQ ID NO: 70936 - DNA, 791 bp, Homo sapiens
ccgactaagacaggacccccgtgttccgtaaaggcgcgcgggaacatggggctgtatgctgcagctgcaggcgtgttggccggcgtggagagccgccagggctctatcaaggggttggtgtactccagcaacttccagaacgtgaagcagctgtacgcgctggtgtgcgaaacgcagcgctactccgccgtgctggatgctgtgatcgccagcgccggcctcctccgtgcggagaagaagctgcggccgcacctggccaaggtgaggggaggggagggacggggaagtgaaccccgacggtcagcgctttgtcatctggtctcagctctgctgccgtgcacggcgggactggagcaagtcgctcatctgaaatgagtatgagccgaccttccctgggttacgaattaagatgggatgaaaatgctttaactttgagtgttttgaaggattaaataaccgaagtacaaagtggtagtggcggagactgtaaggaagtcgggcgtggcggcgcgcacctgtggtcccagctactcgggaggctgagggaggaggatcacttgagcccaggaggtcgaagctgcagtgagctatgatctggccactgcacttcagcctgggcgacagagctagaccccattctaaaaagaaaacccaaacccacgaaagggtaatgttggcaagaagttgggtgcagaggtgtctactggtgaacatcggtggagaaagggtctaaggctgggaagcgagacgccaggttccgatcctgttctgtagttaatttctggtgtgat

SEQ ID NO: 70937 - DNA, 571 bp, Homo sapiens
gaaggagttggggggtgggggaggcggggaactttgctcctgcctactcactgctcattgcgtcctacgtagcctcccagctgcctcgatttgtgcgtgtgaacactctcaagacctgctccgatgatgtagttgattatttcaagagacaaggtttctcctatcagggtcgggcttccaggtgagagcttagagccctggctgtcctcatctagggaggtgtctggggtattgggaagagaagtggctggatagttgtgactttgctctctgggctttcttcctacctttccagcagtttatccatctccaaggtttgtcttcctgccatcccttaaacatcgaactcctaggagcctcatcctacattcttcttgatctctccgttttttctctagctttaactcctgcctcccacctggtgattctcaccacccagtgtagacttcttccctcttgcattcttacctcctcaggttcatatgaacgcaccacagatgctaacagtcgctgcatttgtcatctttcctctcagactttacacctagtacatccccagttaaatctaaca

SEQ ID NO: 70938 - DNA, 1751 bp, Homo sapiens
tttttgaccccggaagtccgggcgggcgccgagccgggtgcgttttgccacagagccgtaaaggcgcgcgggaacatggggctgtatgctgcagctgcaggcgtgttggccggcgtggagagccgccagggctctatcaaggggttggtgtactccagcaacttccagaacgtgaagcagctgtacgcgctggtgtgcgaaacgcagcgctactccgccgtgctggatgctgtgatcgccagcgccggcctcctccgtgcggagaagaagctgcggccgcacctggccaaggtgctagtgtatgagttgttgttgggaaagggctttcgagggggtgggggccgatggaaggctctgttgggccggcaccaggcgaggctcaaggctgagttggctcggctcaaggttcatcggggtgtgagccggaatgaggacctgttggaagtgggatccaggcctggtccagcctcccagctgcctcgatttgtgcgtgtgaacactctcaagacctgctccgatgatgtagttgattatttcaagagacaaggtttctcctatcagggtcgggcttccagcctcgatgacttacgagccctcaaggggaagcattttctcctggaccccttgatgccggagctgctggtgtttcccgcccagacagatctgcatgaacacccactgtaccgggccggacacctcattctgcaggacagggccagctgtctcccagccatgctgctggaccccccgccaggctcccatgtcatcgatgcctgtgccgccccaggcaataagaccagtcacttggctgctcttctgaagaaccaagggaagatctttgcctttgacctggatgccaagcggctggcatccatggccacgctgctggcccgggctggcgtctcttgctgtgaactggctgaggaggacttcctggcggtctccccctcggatccacgctaccatgaggtccactacatcctgctggatccttcctgcagtggctcgggtatgccgagcagacagctggaggagcccggggcaggcacacctagcccggtgcgtctgcatgccctggcagggttccagcagcgagccctgtgccacgcactcactttcccttccctgcagcggctcgtctactccacgtgctccctctgccaggaggagaatgaagacgtggtgcgagatgcgctgcagcagaacccgggcgccttcaggctagctcccgccctgcctgcctggccccaccgaggcctgagcacgttcccgggtgccgagcactgcctccgggcctcccctgagaccacactcagcagtggcttcttcgttgctgtaattgaacgggtcgaggtgccaaggtgagtgagtgggggcgtgcttgggaggcgcaggatggcaccggcacatctaacatctacacttctctagctcagcctcacaggccaaagcatcagcaccagaacgcacacccagcccagccccaaagagaaagaagagacagcaaagagccgcagccggtgcttgcacaccgccttgcacatagcagaggctccgggctgactccttcctggtgggaaaggaagatgcctgtcctctccgtggaggaccctgggccctcaccgcaggaagcagtttgggttttgaaaggttattgggtcccttccttgggctgtgttcttgctggtgagcaaagtgttgcctgcaaaaataaaatgcagaacgtactctaaaaaaaaacacagtttttt

SEQ ID NO: 70939 - DNA, 1681 bp, Homo sapiens
tttttgaccccggaagtccgggcgggcgccgagccgggtgcgttttgccacagagccgtaaaggcgcgcgggaacatggggctgtatgctgcagctgcaggcgtgttggccggcgtggagagccgccagggctctatcaaggggttggtgtactccagcaacttccagaacgtgaagcagctgtacgcgctggtgtgcgaaacgcagcgctactccgccgtgctggatgctgtgatcgccagcgccggcctcctccgtgcggagaagaagctgcggccgcacctggccaaggtgctagtgtatgagttgttgttgggaaagggctttcgagggggtgggggccgatggaaggctctgttgggccggcaccaggcgaggctcaaggctgagttggctcggctcaaggttcatcggggtgtgagccggaatgaggacctgttggaagtgggatccaggcctggtccagcctcccagctgcctcgatttgtgcgtgtgaacactctcaagacctgctccgatgatgtagttgattatttcaagagacaaggtttctcctatcagggtcgggcttccagcctcgatgacttacgagccctcaaggggaagcattttctcctggaccccttgatgccggagctgctggtgtttcccgcccagacagatctgcatgaacacccactgtaccgggccggacacctcattctgcaggacagggccagctgtctcccagccatgctgctggaccccccgccaggctcccatgtcatcgatgcctgtgccgccccaggcaataagaccagtcacttggctgctcttctgaagaaccaagggaagatctttgcctttgacctggatgccaagcggctggcatccatggccacgctgctggcccgggctggcgtctcttgctgtgaactggctgaggaggacttcctggcggtctccccctcggatccacgctaccatgaggtccactacatcctgctggatccttcctgcagtggctcgggtatgccgagcagacagctggaggagcccggggcaggcacacctagcccggtgcgtctgcatgccctggcagggttccagcagcgagccctgtgccacgcactcactttcccttccctgcagcggctcgtctactccacgtgctccctctgccaggaggagaatgaagacgtggtgcgagatgcgctgcagcagaacccgggcgccttcaggctagctcccgccctgcctgcctggccccaccgaggcctgagcacgttcccgggtgccgagcactgcctccgggcctcccctgagaccacactcagcagtggcttcttcgttgctgtaattgaacgggtcgaggtgccaagctcagcctcacaggccaaagcatcagcaccagaacgcacacccagcccagccccaaagagaaagaagagacagcaaagagccgcagccggtgcttgcacaccgccttgcacatagcagaggctccgggctgactccttcctggtgggaaaggaagatgcctgtcctctccgtggaggaccctgggccctcaccgcaggaagcagtttgggttttgaaaggttattgggtcccttccttgggctgtgttcttgctggtgagcaaagtgttgcctgcaaaaataaaatgcagaacgtactctaaaaaaaaacacagtttttt

SEQ ID NO: 70940 - DNA, 1649 bp, Homo sapiens
tgtgtatttcattaccgggctggggttcgcttgtaacatacgtggtccgttgctctgacacatgtagcgcgtgttggccggcgtggagagccgccagggctctatcaaggggttggtgtactccagcaacttccagaacgtgaagcagctgtacgcgctggtgtgcgaaacgcagcgctactccgccgtgctggatgctgtgatcgccagcgccggcctcctccgtgcggagaagaagctgcggccgcacctggccaaggtgctagtgtatgagttgttgttgggaaagggctttcgagggggtgggggccgatggaaggctctgttgggccggcaccaggcgaggctcaaggctgagttggctcggctcaaggttcatcggggtgtgagccggaatgaggacctgttggaagtgggatccaggcctggtccagcctcccagctgcctcgatttgtgcgtgtgaacactctcaagacctgctccgatgatgtagttgattatttcaagagacaaggtttctcctatcagggtcgggcttccagcctcgatgacttacgagccctcaaggggaagcattttctcctggaccccttgatgccggagctgctggtgtttcccgcccagacagatctgcatgaacacccactgtaccgggccggacacctcattctgcaggacagggccagctgtctcccagccatgctgctggaccccccgccaggctcccatgtcatcgatgcctgtgccgccccaggcaataagaccagtcacttggctgctcttctgaagaaccaagggaagatctttgcctttgacctggatgccaagcggctggcatccatggccacgctgctggcccgggctggcgtctcttgctgtgaactggctgaggaggacttcctggcggtctccccctcggatccacgctaccatgaggtccactacatcctgctggatccttcctgcagtggctcgggtatgccgagcagacagctggaggagcccggggcaggcacacctagcccggtgcgtctgcatgccctggcagggttccagcagcgagccctgtgccacgcactcactttcccttccctgcagcggctcgtctactccacgtgctccctctgccaggaggagaatgaagacgtggtgcgagatgcgctgcagcagaacccgggcgccttcaggctagctcccgccctgcctgcctggccccaccgaggcctgagcacgttcccgggtgccgagcactgcctccgggcctcccctgagaccacactcagcagtggcttcttcgttgctgtaattgaacgggtcgaggtgccaagctcagcctcacaggccaaagcatcagcaccagaacgcacacccagcccagccccaaagagaaagaagagacagcaaagagccgcagccggtgcttgcacaccgccttgcacatagcagaggctccgggctgactccttcctggtgggaaaggaagatgcctgtcctctccgtggaggaccctgggccctcaccgcaggaagcagtttgggttttgaaaggttattgggtcccttccttgggctgtgttcttgctggtgagcaaagtgttgcctgcaaaaataaaatgcagaacgtactctaaaaaaaaacacagtttttt

SEQ ID NO: 70941 - DNA, 1356 bp, Homo sapiens
  misc_feature (25)..(25): n is a, c, g, or t
ccgagtattgtacgaggctgggtgncgctctgttgggccggcaccaggcgaggctcaaggctgagttggctcggctcaaggttcatcggggtgtgagccggaatgaggacctgttggaagtgggatccaggcctggtccagcctcccagctgcctcgatttgtgcgtgtgaacactctcaagacctgctccgatgatgtagttgattatttcaagagacaaggtttctcctatcagggtcgggcttccagcctcgatgacttacgagccctcaaggggaagcattttctcctggaccccttgatgccggagctgctggtgtttcccgcccagacagatctgcatgaacacccactgtaccgggccggacacctcattctgcaggacagggccagctgtctcccagccatgctgctggaccccccgccaggctcccatgtcatcgatgcctgtgccgccccaggcaataagaccagtcacttggctgctcttctgaagaaccaagggaagatctttgcctttgacctggatgccaagcggctggcatccatggccacgctgctggcccgggctggcgtctcttgctgtgaactggctgaggaggacttcctggcggtctccccctcggatccacgctaccatgaggtccactacatcctgctggatccttcctgcagtggctcgggtatgccgagcagacagctggaggagcccggggcaggcacacctagcccggtgcgtctgcatgccctggcagggttccagcagcgagccctgtgccacgcactcactttcccttccctgcagcggctcgtctactccacgtgctccctctgccaggaggagaatgaagacgtggtgcgagatgcgctgcagcagaacccgggcgccttcaggctagctcccgccctgcctgcctggccccaccgaggcctgagcacgttcccgggtgccgagcactgcctccgggcctcccctgagaccacactcagcagtggcttcttcgttgctgtaattgaacgggtcgaggtgccaagctcagcctcacaggccaaagcatcagcaccagaacgcacacccagcccagccccaaagagaaagaagagacagcaaagagccgcagccggtgcttgcacaccgccttgcacatagcagaggctccgggctgactccttcctggtgggaaaggaagatgcctgtcctctccgtggaggaccctgggccctcaccgcaggaagcagtttgggttttgaaaggttattgggtcccttccttgggctgtgttcttgctggtgagcaaagtgttgcctgcaaaaataaaatgcagaacgtactctaaaaaaaaacacagtttttt

SEQ ID NO: 70942 - DNA, 1505 bp, Homo sapiens
tttttgaccccggaagtccgggcgggcgccgagccgggtgcgttttgccacagagccgtaaaggcgcgcgggaacatggggctgtatgctgcagctgcaggcgtgttggccggcgtggagagccgccagggctctatcaaggggttggtgtactccagcaacttccagaacgtgaagcagctgtacgcgctggtgtgcgaaacgcagcgctactccgccgtgctggatgctgtgatcgccagcgccggcctcctccgtgcggagaagaagctgcggccgcacctggccaaggtgctagtgtatgagttgttgttgggaaagggctttcgagggggtgggggccgatggaaggctctgttgggccggcaccaggcgaggctcaaggctgagttggctcggctcaaggttcatcggggtgtgagccggaatgaggacctgttggaagtgggatccaggcctggtccagcctcccagctgcctcgatttgtgcgtgtgaacactctcaagacctgctccgatgatgtagttgattatttcaagagacaaggtttctcctatcagggtcgggcttccagcctcgatgacttacgagccctcaaggggaagcattttctcctggaccccttgatgccggagctgctggtgtttcccgcccagacagatctgcatgaacacccactgtaccgggctggcatccatggccacgctgctggcccgggctggcgtctcttgctgtgaactggctgaggaggacttcctggcggtctccccctcggatccacgctaccatgaggtccactacatcctgctggatccttcctgcagtggctcgggtatgccgagcagacagctggaggagcccggggcaggcacacctagcccggtgcgtctgcatgccctggcagggttccagcagcgagccctgtgccacgcactcactttcccttccctgcagcggctcgtctactccacgtgctccctctgccaggaggagaatgaagacgtggtgcgagatgcgctgcagcagaacccgggcgccttcaggctagctcccgccctgcctgcctggccccaccgaggcctgagcacgttcccgggtgccgagcactgcctccgggcctcccctgagaccacactcagcagtggcttcttcgttgctgtaattgaacgggtcgaggtgccaagctcagcctcacaggccaaagcatcagcaccagaacgcacacccagcccagccccaaagagaaagaagagacagcaaagagccgcagccggtgcttgcacaccgccttgcacatagcagaggctccgggctgactccttcctggtgggaaaggaagatgcctgtcctctccgtggaggaccctgggccctcaccgcaggaagcagtttgggttttgaaaggttattgggtcccttccttgggctgtgttcttgctggtgagcaaagtgttgcctgcaaaaataaaatgcagaacgtactctaaaaaaaaacacagtttttt

SEQ ID NO: 70943 - DNA, 499 bp, Homo sapiens
tttttgaccccggaagtccgggcgggcgccgagccgggtgcgttttgccacagagccgtaaaggcgcgcgggaacatggggctgtatgctgcagctgcaggcgtgttggccggcgtggagagccgccagggctctatcaaggggttggtgtactccagcaacttccagaacgtgaagcagctgtacgcgctggtgtgcgaaacgcagcgctactccgccgtgctggatgctgtgatcgccagcgccggcctcctccgtgcggagaagaagctgcggccgcacctggccaaggtgctagtgtatgagttgttgttgggaaagggctttcgagggggtgggggccgatggaaggctctgttgggccggcaccaggcgaggctcaaggctgagttggctcggctcaaggttcatcggggtgtgagccggaatgaggacctgttggaagtgggatccaggcctggtccaggtaagctggaaggagttggggggtgggggaggc

SEQ ID NO: 70944 - DNA, 747 bp, Homo sapiens
cggacgcgtgggtcgacccacgcgtccgcttgtattttcatctgtgagaataatcgctatggaatgggaacgtctgttgagagagcggcagccagcactgattactacaagagaggcgatttcattcctgggctgagagtggatggaatggatatcctgtgcgtccgagaggcaacaaggtttgctgctgcctattgtagatctgggaaggggcccatcctgatggagctgcagacttaccgttaccacggacacagtatgagtgaccctggagtcagttaccgtacacgagaagaaattcaggaagtaagaagtaagagtgaccctattatgcttctcaaggacaggatggtgaacagcaatcttgccagtgtggaagaactaaaggaaattgatgtggaagtgaggaaggagattgaggatgctgcccagtttgccacggccgatcctgagccacctttggaagagctgggctaccacatctactccagcgacccaccttttgaagttcgtggtgccaatcagtggatcaagtttaagtcagtcagttaaggggaggagaaggagaggttataccttcagggggctaccagacagtgttctcaacttggttaaggaggaagaaaacccagtcaatgaaattcaatgaaattcttggaaacttccattaagtgtgtagattgagcaggtagtaattgcatgcagtttgtacattagtgcattaaaagatgaattattgagtgctta

SEQ ID NO: 70945 - DNA, 796 bp, Homo sapiens
tattacgactctgtcacgccgcggtgcgactgaggcgtggcgtctgctggggcacctgaaggagacttgggggcacccgcgtcgtgcctcctgggttgtgaggagtcgccgctgccgccactgcctgtgcttcatgaggaagatgctcgccgccgtctcccgcgtgctgtctggcgcttctcagaagccggcaagcagagtgctggtagcatcccgtaattttgcaaatgatgctacatttgaaattaagaaatgtgaccttcaccggctggaagaaggccctcctgtcacaacagtgctcaccagggaggatgggctcaaatactacaggatgatgcagactgtacgccgaatggagttgaaagcagatcagctgtataaacagaaaattattcgtggtttctgtcacttgtgtgatggtcaggaagcttgctgtgtgggcctggaggccggcatcaaccccacagaccatctcatcacagcctaccgggctcacggctttactttcacccggggcctttccgtccgagaaattctcgcagagcttacaggacgaaaaggaggttgtgctaaagggaaaggaggatcgatgcacatgtatgccaagaacttctacgggggcaatggcatcgtgggagcgcaggtagtcaaggacgaggattgtgtgctgctttagatttggccctggactttgtcttcaaaaactttcacagccccagacaacttttcctgaagtagtacagccatggcttcatgttgattgggatcccatccagaatagccatcaggcagatag

SEQ ID NO: 70946 - DNA, 642 bp, Homo sapiens
tattacgactctgtcacgccgcggtgcgactgaggcgtggcgtctgctggggcacctgaaggagacttgggggcacccgcgtcgtgcctcctgggttgtgaggagtcgccgctgccgccactgcctgtgcttcatgaggaagatgctcgccgccgtctcccgcgtgctgtctggcgcttctcagaagccggcaagcagagtgctggtagcatcccgtaattttgcaaatgatgctacatttgaaattaagaaatgtgaccttcaccggctggaagaaggccctcctgtcacaacagtgctcaccagggaggatgggctcaaatactacaggatgatgcagactgtacgccgaatggagttgaaagcagatcagctgtataaacagaaaattattcgtggtttctgtcacttgtgtgatggtcaggaagcttgctgtgtgggcctggaggccggcatcaaccccacagaccatctcatcacagcctaccgggctcacggctttactttcacccggggcctttccgtccgagaaattctcgcagagcttacaggtttgctgttgatttacagaaaggggaaatgagtggattaagtttttaaatatctgtcattaagatgctattatgagttaatatttgttaa

SEQ ID NO: 70947 - DNA, 458 bp, Homo sapiens
  misc_feature (411)..(411): n is a, c, g, or t
  misc_feature (413)..(413): n is a, c, g, or t
  misc_feature (417)..(417): n is a, c, g, or t
  misc_feature (421)..(421): n is a, c, g, or t
  misc_feature (430)..(430): n is a, c, g, or t
  misc_feature (436)..(436): n is a, c, g, or t
cgcttcagattacccaaatcaaccatgaaaagcctgaactagtgaaaggacaaggagaaacatgtgtttgcctggagggacaggtacttagacgactgaactggcctctgtgttctaatggttgagcctcagagtacatatttggggtgcggtttggtttgctttgtagagttggtttgttctgcacatgtgtatgttctgccatttccaggacgaaaaggaggttgtgctaaagggaaaggaggatcgatgcacatgtatgccaagaacttctacgggggcaatggcatcgtgggagcgcaggtagtcaaggacgaggattgtgtgctgctttagatttggccctggactttgtcttcaaaaactttcacagccccagacaacttttcctgaagtagtacagccatgctncntggngatngtgtcctcnagatcngcctgacctatacgtgctgccg

SEQ ID NO: 70948 - DNA, 929 bp, Homo sapiens
tattagagctaggagggcctggggtgaatcggccgagaagatgctcgccgccgtctcccgcgtgctgtctggcgcttctcagaagccggcaagcagagtgctggtagcatcccgtaattttgcaaatgatgctacatttgaaattaagaaatgtgaccttcaccggctggaagaaggccctcctgtcacaacagtgctcaccagggaggatgggctcaaatactacaggatgatgcagactgtacgccgaatggagttgaaagcagatcagctgtataaacagaaaattattcgtggtttctgtcacttgtgtgatggtcaggaagcttgctgtgtgggcctggaggccggcatcaaccccacagaccatctcatcacagcctaccgggctcacggctttactttcacccggggcctttccgtccgagaaattctcgcagagcttacaggacgaaaaggaggttgtgctaaagggaaaggaggatcgatgcacatgtatgccaagaacttctacgggggcaatggcatcgtgggagcgcagggccagatattcgaagcttacaacatggcagctttgtggaaattaccttgtattttcatctgtgagaataatcgctatggaatgggaacgtctgttgagagagcggcagccagcactgattactacaagagaggcgatttcattcctgggctgagagtggatggaatggatatcctgtgcgtccgagaggcaacaaggtttgctgctgcctattgtagatctgggaaggggccatctgatggaggctgcgacttacgttccacggccgtattagtgaccctggagtcgtacggacccgagaagaaatcggggtagagttgagtggcctattttgcttctcaggccggtgggaccgcctgccgtgggggacacggtgtgcggcttgcgg

SEQ ID NO: 70949 - DNA, 302 bp, Homo sapiens
acttttacgcaggccacttttacgcaggccacttttacgcaggccacttttacgcaagcagagtgctggtagcatcccgtaattttgcaaatgatgctacatttgaaattaaggtaagaggtgttttactttgttaataattttttcacaggtacactctgatatacagttttacctttagaatagaacattttgatgttcatgcttagtcatcattttcttctaaatgttccaggatcagaagttcagagaagcttcacgaaaactagaatttattattagcagcttgctgttgttctgtg

SEQ ID NO: 70950 - DNA, 1453 bp, Homo sapiens
ttacggctaggtacgaggctgggtggtgccgcgtcgtgcctcctgggttgtgaggagtcgccgctgccgccactgcctgtgcttcatgaggaagatgctcgccgccgtctcccgcgtgctgtctggcgcttctcagaagccggcaagcagagtgctggtagcatcccgtaattttgcaaatgatgctacatttgaaattaagaaatgtgaccttcaccggctggaagaaggccctcctgtcacaacagtgctcaccagggaggatgggctcaaatactacaggatgatgcagactgtacgccgaatggagttgaaagcagatcagctgtataaacagaaaattattcgtggtttctgtcacttgtgtgatggtcaggaagcttgctgtgtgggcctggaggccggcatcaaccccacagaccatctcatcacagcctaccgggctcacggctttactttcacccggggcctttccgtccgagaaattctcgcagagcttacaggacgaaaaggaggttgtgctaaagggaaaggaggatcgatgcacatgtatgccaagaacttctacgggggcaatggcatcgtgggagcgcaggtgcccctgggcgctgggattgctctagcctgtaagtataatggaaaagatgaggtctgcctgactttatatggcgatggtgctgctaaccagggccagatattcgaagcttacaacatggcagctttgtggaaattaccttgtattttcatctgtgagaataatcgctatggaatgggaacgtctgttgagagagcggcagccagcactgattactacaagagaggcgatttcattcctgggctgagagtggatggaatggatatcctgtgcgtccgagaggcaacaaggtttgctgctgcctattgtagatctgggaaggggcccatcctgatggagctgcagacttaccgttaccacggacacagtatgagtgaccctggagtcagttaccgtacacgagaagaaattcaggaagtaagaagtaagagtgaccctattatgcttctcaaggacaggatggtgaacagcaatcttgccagtgtggaagaactaaaggaaattgatgtggaagtgaggaaggagattgaggatgctgcccagtttgccacggccgatcctgagccacctttggaagagctgggctaccacatctactccagcgacccaccttttgaagttcgtggtgccaatcagtggatcaagtttaagtcagtcagttaaggggaggagaaggagaggttataccttcagggggctaccagacagtgttctcaacttggttaaggaggaagaaaacccagtcaatgaaattcaatgaaattcttggaaacttccattaagtgtgtagattgagcaggtagtaattgcatgcagtttgtacattagtgcattaaaagatgaattattgagtgctta

SEQ ID NO: 70951 - DNA, 4125 bp, Homo sapiens
tattacgactctgtcacgccgcggtgcgactgaggcgtggcgtctgctggggcacctgaaggagacttgggggcacccgcgtcgtgcctcctgggttgtgaggagtcgccgctgccgccactgcctgtgcttcatgaggaagatgctcgccgccgtctcccgcgtgctgtctggcgcttctcagaagccggcaagcagagtgctggtagcatcccgtaattttgcaaatgatgctacatttgaaattaagaaatgtgaccttcaccggctggaagaaggccctcctgtcacaacagtgctcaccagggaggatgggctcaaatactacaggatgatgcagactgtacgccgaatggagttgaaagcagatcagctgtataaacagaaaattattcgtggtttctgtcacttgtgtgatggtcaggaagcttgctgtgtgggcctggaggccggcatcaaccccacagaccatctcatcacagcctaccgggctcacggctttactttcacccggggcctttccgtccgagaaattctcgcagagcttacaggacgaaaaggaggttgtgctaaagggaaaggaggatcgatgcacatgtatgccaagaacttctacgggggcaatggcatcgtgggagcgcaggtgcccctgggcgctgggattgctctagcctgtaagtataatggaaaagatgaggtctgcctgactttatatggcgatggtgctgctaaccaggtaattatgtctcttaacttcccaaaaacagtcttattttcaaagtctttaatatttacagttgaatttctaaagaagtagcatattgcttattaggtgaaatagcaagtcctatggctagctcaaatttggttgacttatggccagattagagattgacctcttagcgttgtttcacaagagacttacgggggcacattcctgtgaaggagctcacctttgctctacatcagtgcttggcaaaggccctgtggtaaaggacctccccacaacctattgcaaaacaatacagacccattctcttggatgtccgggctggcagtgtcaaattcggataatagcgtctgagtcctaactcagtttctatgcttctcttgttaccgagtaatccccagtctgtggccagcactctgtgaagccctgttctagaggctgattcttaggtgctggttcactctggctatccagtgggcctgatagatttcatattgatcttttttccagtgtgttccttactgctagcatggccccaaagaaacaagtagtagttggtttgtcaccttccttagttgcaagagtatgatgcctgctacttctcctccaccacccaccccgctttccctcaccacccaaagctcggttttagaagaggaggctttctgtgctttatgaaagctttctgtgccaggcagagcagcagctgttagagatgatgaagcctggagaaagaagccaaatgaaaccccttttcgtaactacttccagggccagatattcgaagcttacaacatggcagctttgtggaaattaccttgtattttcatctgtgagaataatcgctatggaatgggaacgtctgttgagagagcggcagccagcactgattactacaagagaggcgatttcattcctgggctgagagtggatggaatggatatcctgtgcgtccgagaggcaacaaggtttgctgctgcctattgtagatctgggaaggggcccatcctgatggagctgcagacttaccgttaccacggacacagtatgagtgaccctggagtcagttaccgtacacgagaagaaattcaggaagtaagaagtaagagtgaccctattatgcttctcaaggacaggatggtgaacagcaatcttgccagtgtggaagaactaaaggaaattgatgtggaagtgaggaaggagattgaggatgctgcccagtttgccacggccgatcctgagccacctttggaagagctgggctaccacatctactccagcgacccaccttttgaagttcgtggtgccaatcagtggatcaagtttaagtcagtcagttaaggggaggagaaggagaggttataccttcagggggctaccagacagtgttctcaacttggttaaggaggaagaaaacccagtcaatgaaattcaatgaaattcttggaaacttccattaagtgtgtagattgagcaggtagtaattgcatgcagtttgtacattagtgcattaaaagatgaattattgagtgcttaaagattatttttgacttaaaatagtatactttgaacaaatactctaattatgaaaaggaagaacaattccttgtatgcctgtttcccctgcccccagccacctttttgggaggagaccattatggcggggcccctcacagcattctaccaaccatagcacccaccccgagcagcgctggtgctgcagcctgttcgcgctgaccatttctctacaagatacaatatttattatcaggcaagaggacagttccattttaaaataagacttttgtaatcattccaattttgtaatcatttcaaaggccacataacttagttttctctacttacacattcagtataaatatgaagctattttctgttcatatcaaacattaactacaaggcacattcgtatcagttttgtgtttctcaaattgaagtaccataccagttctgaggcagtgtcccagcttccatgtttgttaaataccccttgtttgtttcaccattccagcaagtgctgaagggtgtactttttttgagacagggtcgggctctgttgcccaggctggagtgcagtggtgtgatcatggctcactgcagcctccacacctcctgggctcaagcaatcctcccacctcagcctcctgcatagctgggactacaagtgaatttcctaatattccgggaggtcaaaaccaaggctcactgttttcacaatacacacagttctatgtttataaataacaggtttcaaaagaaactcaggacagtatttaaaacaagttcttaaactattaattgaacaatggcatttttaaatatgtaaacacagcggaattcgtgtatacactaacagaagctttaacaaaacatgtagcgtggtgggacactctgccacagcttagctgattggtatcaagccttgtctttggtttctgaggcctcctgagcccttctgtactgggagaccgcactccagagtctgcagaggagaccacccctggggaaacaaacacagctgtcttcagagtcagtgcttcaagccaacagagcttaaaactgcagtccctaatttaaaaacctaatgaaaataaaaacattctcctcacatatggaggtgacgctcgtgtcccagcagtagtaggacatggccttagaggtacgtacctgcagagagctggctatttcaaatgactcgggaacaagaaggcaggctgcagtttaaagaagggggtgggtccagcgtgcaggcacgcttgccatgtgcctccacccactcccagccaggcattaatggcaggagattggccagctcttctctgtcacattcctatttctgacttctgcctggctttcagtttctgccccaccttggctttttcccagcttgaacctaatagaactccagagtttggggggaggcccagccctttgttttctgctcttgaagcatattcacacataaaaagttgtattctcttatacaaactgttttgaggctcttaccgtagtcgaaggtatcttagatcttccttagtgatctcattaagaatatccgaaagtgtataaccctcttcaacaatctgaaacaaagatcagatccttaagagctgagcagctgtgtaacaacagcataagaatttctttgttgtaaatttaccttttcaattgtctttgcatcagctccttgcagccgcaaccagtctataagctctttatctgttctctgcccgtaggggcctgctgggttctctgtaatacctgtaacgattggcaatttgttatatattagtctaaccataaaactcttcaaaagtaaccagttggattaataaatgattccagaatgtaaatgtgatgtgaaaaagagatga

SEQ ID NO: 70952 - DNA, 3317 bp, Homo sapiens
tattacgactctgtcacgccgcggtgcgactgaggcgtggcgtctgctggggcacctgaaggagacttgggggcacccgcgtcgtgcctcctgggttgtgaggagtcgccgctgccgccactgcctgtgcttcatgaggaagatgctcgccgccgtctcccgcgtgctgtctggcgcttctcagaagccggcaagcagagtgctggtagcatcccgtaattttgcaaatgatgctacatttgaaattaagaaatgtgaccttcaccggctggaagaaggccctcctgtcacaacagtgctcaccagggaggatgggctcaaatactacaggatgatgcagactgtacgccgaatggagttgaaagcagatcagctgtataagaagcttgctgtgtgggcctggaggccggcatcaaccccacagaccatctcatcacagcctaccgggctcacggctttactttcacccggggcctttccgtccgagaaattctcgcagagcttacaggacgaaaaggaggttgtgctaaagggaaaggaggatcgatgcacatgtatgccaagaacttctacgggggcaatggcatcgtgggagcgcaggtgcccctgggcgctgggattgctctagcctgtaagtataatggaaaagatgaggtctgcctgactttatatggcgatggtgctgctaaccagggccagatattcgaagcttacaacatggcagctttgtggaaattaccttgtattttcatctgtgagaataatcgctatggaatgggaacgtctgttgagagagcggcagccagcactgattactacaagagaggcgatttcattcctgggctgagagtggatggaatggatatcctgtgcgtccgagaggcaacaaggtttgctgctgcctattgtagatctgggaaggggcccatcctgatggagctgcagacttaccgttaccacggacacagtatgagtgaccctggagtcagttaccgtacacgagaagaaattcaggaagtaagaagtaagagtgaccctattatgcttctcaaggacaggatggtgaacagcaatcttgccagtgtggaagaactaaaggaaattgatgtggaagtgaggaaggagattgaggatgctgcccagtttgccacggccgatcctgagccacctttggaagagctgggctaccacatctactccagcgacccaccttttgaagttcgtggtgccaatcagtggatcaagtttaagtcagtcagttaaggggaggagaaggagaggttataccttcagggggctaccagacagtgttctcaacttggttaaggaggaagaaaacccagtcaatgaaattcaatgaaattcttggaaacttccattaagtgtgtagattgagcaggtagtaattgcatgcagtttgtacattagtgcattaaaagatgaattattgagtgcttaaagattatttttgacttaaaatagtatactttgaacaaatactctaattatgaaaaggaagaacaattccttgtatgcctgtttcccctgcccccagccacctttttgggaggagaccattatggcggggcccctcacagcattctaccaaccatagcacccaccccgagcagcgctggtgctgcagcctgttcgcgctgaccatttctctacaagatacaatatttattatcaggcaagaggacagttccattttaaaataagacttttgtaatcattccaattttgtaatcatttcaaaggccacataacttagttttctctacttacacattcagtataaatatgaagctattttctgttcatatcaaacattaactacaaggcacattcgtatcagttttgtgtttctcaaattgaagtaccataccagttctgaggcagtgtcccagcttccatgtttgttaaataccccttgtttgtttcaccattccagcaagtgctgaagggtgtactttttttgagacagggtcgggctctgttgcccaggctggagtgcagtggtgtgatcatggctcactgcagcctccacacctcctgggctcaagcaatcctcccacctcagcctcctgcatagctgggactacaagtgaatttcctaatattccgggaggtcaaaaccaaggctcactgttttcacaatacacacagttctatgtttataaataacaggtttcaaaagaaactcaggacagtatttaaaacaagttcttaaactattaattgaacaatggcatttttaaatatgtaaacacagcggaattcgtgtatacactaacagaagctttaacaaaacatgtagcgtggtgggacactctgccacagcttagctgattggtatcaagccttgtctttggtttctgaggcctcctgagcccttctgtactgggagaccgcactccagagtctgcagaggagaccacccctggggaaacaaacacagctgtcttcagagtcagtgcttcaagccaacagagcttaaaactgcagtccctaatttaaaaacctaatgaaaataaaaacattctcctcacatatggaggtgacgctcgtgtcccagcagtagtaggacatggccttagaggtacgtacctgcagagagctggctatttcaaatgactcgggaacaagaaggcaggctgcagtttaaagaagggggtgggtccagcgtgcaggcacgcttgccatgtgcctccacccactcccagccaggcattaatggcaggagattggccagctcttctctgtcacattcctatttctgacttctgcctggctttcagtttctgccccaccttggctttttcccagcttgaacctaatagaactccagagtttggggggaggcccagccctttgttttctgctcttgaagcatattcacacataaaaagttgtattctcttatacaaactgttttgaggctcttaccgtagtcgaaggtatcttagatcttccttagtgatctcattaagaatatccgaaagtgtataaccctcttcaacaatctgaaacaaagatcagatccttaagagctgagcagctgtgtaacaacagcataagaatttctttgttgtaaatttaccttttcaattgtctttgcatcagctccttgcagccgcaaccagtctataagctctttatctgttctctgcccgtaggggcctgctgggttctctgtaatacctgtaacgattggcaatttgttatatattagtctaaccataaaactcttcaaaagtaaccagttggattaataaatgattccagaatgtaaatgtgatgtgaaaaagagatga

SEQ ID NO: 70953 - DNA, 3087 bp, Homo sapiens
tattacgactctgtcacgccgcggtgcgactgaggcgtggcgtctgctggggcacctgaaggagacttgggggcacccgcgtcgtgcctcctgggttgtgaggagtcgccgctgccgccactgcctgtgcttcatgaggaagatgctcgccgccgtctcccgcgtgctgtctggcgcttctcagaagccgagacatggtcttgctacgttgcccagtctggtctccatctctttcacccggggcctttccgtccgagaaattctcgcagagcttacaggacgaaaaggaggttgtgctaaagggaaaggaggatcgatgcacatgtatgccaagaacttctacgggggcaatggcatcgtgggagcgcaggtgcccctgggcgctgggattgctctagcctgtaagtataatggaaaagatgaggtctgcctgactttatatggcgatggtgctgctaaccagggccagatattcgaagcttacaacatggcagctttgtggaaattaccttgtattttcatctgtgagaataatcgctatggaatgggaacgtctgttgagagagcggcagccagcactgattactacaagagaggcgatttcattcctgggctgagagtggatggaatggatatcctgtgcgtccgagaggcaacaaggtttgctgctgcctattgtagatctgggaaggggcccatcctgatggagctgcagacttaccgttaccacggacacagtatgagtgaccctggagtcagttaccgtacacgagaagaaattcaggaagtaagaagtaagagtgaccctattatgcttctcaaggacaggatggtgaacagcaatcttgccagtgtggaagaactaaaggaaattgatgtggaagtgaggaaggagattgaggatgctgcccagtttgccacggccgatcctgagccacctttggaagagctgggctaccacatctactccagcgacccaccttttgaagttcgtggtgccaatcagtggatcaagtttaagtcagtcagttaaggggaggagaaggagaggttataccttcagggggctaccagacagtgttctcaacttggttaaggaggaagaaaacccagtcaatgaaattcaatgaaattcttggaaacttccattaagtgtgtagattgagcaggtagtaattgcatgcagtttgtacattagtgcattaaaagatgaattattgagtgcttaaagattatttttgacttaaaatagtatactttgaacaaatactctaattatgaaaaggaagaacaattccttgtatgcctgtttcccctgcccccagccacctttttgggaggagaccattatggcggggcccctcacagcattctaccaaccatagcacccaccccgagcagcgctggtgctgcagcctgttcgcgctgaccatttctctacaagatacaatatttattatcaggcaagaggacagttccattttaaaataagacttttgtaatcattccaattttgtaatcatttcaaaggccacataacttagttttctctacttacacattcagtataaatatgaagctattttctgttcatatcaaacattaactacaaggcacattcgtatcagttttgtgtttctcaaattgaagtaccataccagttctgaggcagtgtcccagcttccatgtttgttaaataccccttgtttgtttcaccattccagcaagtgctgaagggtgtactttttttgagacagggtcgggctctgttgcccaggctggagtgcagtggtgtgatcatggctcactgcagcctccacacctcctgggctcaagcaatcctcccacctcagcctcctgcatagctgggactacaagtgaatttcctaatattccgggaggtcaaaaccaaggctcactgttttcacaatacacacagttctatgtttataaataacaggtttcaaaagaaactcaggacagtatttaaaacaagttcttaaactattaattgaacaatggcatttttaaatatgtaaacacagcggaattcgtgtatacactaacagaagctttaacaaaacatgtagcgtggtgggacactctgccacagcttagctgattggtatcaagccttgtctttggtttctgaggcctcctgagcccttctgtactgggagaccgcactccagagtctgcagaggagaccacccctggggaaacaaacacagctgtcttcagagtcagtgcttcaagccaacagagcttaaaactgcagtccctaatttaaaaacctaatgaaaataaaaacattctcctcacatatggaggtgacgctcgtgtcccagcagtagtaggacatggccttagaggtacgtacctgcagagagctggctatttcaaatgactcgggaacaagaaggcaggctgcagtttaaagaagggggtgggtccagcgtgcaggcacgcttgccatgtgcctccacccactcccagccaggcattaatggcaggagattggccagctcttctctgtcacattcctatttctgacttctgcctggctttcagtttctgccccaccttggctttttcccagcttgaacctaatagaactccagagtttggggggaggcccagccctttgttttctgctcttgaagcatattcacacataaaaagttgtattctcttatacaaactgttttgaggctcttaccgtagtcgaaggtatcttagatcttccttagtgatctcattaagaatatccgaaagtgtataaccctcttcaacaatctgaaacaaagatcagatccttaagagctgagcagctgtgtaacaacagcataagaatttctttgttgtaaatttaccttttcaattgtctttgcatcagctccttgcagccgcaaccagtctataagctctttatctgttctctgcccgtaggggcctgctgggttctctgtaatacctgtaacgattggcaatttgttatatattagtctaaccataaaactcttcaaaagtaaccagttggattaataaatgattccagaatgtaaatgtgatgtgaaaaagagatga

SEQ ID NO: 70954 - DNA, 3267 bp, Homo sapiens
tattacgactctgtcacgccgcggtgcgactgaggcgtggcgtctgctggggcacctgaaggagacttgggggcacccgcgtcgtgcctcctgggttgtgaggagtcgccgctgccgccactgcctgtgcttcatgaggaagatgctcgccgccgtctcccgcgtgctgtctggcgcttctcagaagccggcaagcagagtgctggtagcatcccgtaattttgcaaatgatgctacatttgaaattaagaaatgtgaccttcaccggctggaagaaggccctcctgtcacaacagtgctcaccagggaggatgggctcaaatactacaggatgatgcagactgtacgccgaatggagttgaaagcagatcagctgtataaacagaaaattattcgtggtttctgtcacttgtgtgatggtcaggaagcttgctgtgtgggcctggaggccggcatcaaccccacagaccatctcatcacagcctaccgggctcacggctttactttcacccggggcctttccgtccgagaaattctcgcagagcttacaggacgaaaaggaggttgtgctaaagggaaaggaggatcgatgcacatgtatgccaagaacttctacgggggcaatggcatcgtgggagcgcagggccagatattcgaagcttacaacatggcagctttgtggaaattaccttgtattttcatctgtgagaataatcgctatggaatgggaacgtctgttgagagagcggcagccagcactgattactacaagagaggcgatttcattcctgggctgagagtggatggaatggatatcctgtgcgtccgagaggcaacaaggtttgctgctgcctattgtagatctgggaaggggcccatcctgatggagctgcagacttaccgttaccacggacacagtatgagtgaccctggagtcagttaccgtacacgagaagaaattcaggaagtaagaagtaagagtgaccctattatgcttctcaaggacaggatggtgaacagcaatcttgccagtgtggaagaactaaaggaaattgatgtggaagtgaggaaggagattgaggatgctgcccagtttgccacggccgatcctgagccacctttggaagagctgggctaccacatctactccagcgacccaccttttgaagttcgtggtgccaatcagtggatcaagtttaagtcagtcagttaaggggaggagaaggagaggttataccttcagggggctaccagacagtgttctcaacttggttaaggaggaagaaaacccagtcaatgaaattcaatgaaattcttggaaacttccattaagtgtgtagattgagcaggtagtaattgcatgcagtttgtacattagtgcattaaaagatgaattattgagtgcttaaagattatttttgacttaaaatagtatactttgaacaaatactctaattatgaaaaggaagaacaattccttgtatgcctgtttcccctgcccccagccacctttttgggaggagaccattatggcggggcccctcacagcattctaccaaccatagcacccaccccgagcagcgctggtgctgcagcctgttcgcgctgaccatttctctacaagatacaatatttattatcaggcaagaggacagttccattttaaaataagacttttgtaatcattccaattttgtaatcatttcaaaggccacataacttagttttctctacttacacattcagtataaatatgaagctattttctgttcatatcaaacattaactacaaggcacattcgtatcagttttgtgtttctcaaattgaagtaccataccagttctgaggcagtgtcccagcttccatgtttgttaaataccccttgtttgtttcaccattccagcaagtgctgaagggtgtactttttttgagacagggtcgggctctgttgcccaggctggagtgcagtggtgtgatcatggctcactgcagcctccacacctcctgggctcaagcaatcctcccacctcagcctcctgcatagctgggactacaagtgaatttcctaatattccgggaggtcaaaaccaaggctcactgttttcacaatacacacagttctatgtttataaataacaggtttcaaaagaaactcaggacagtatttaaaacaagttcttaaactattaattgaacaatggcatttttaaatatgtaaacacagcggaattcgtgtatacactaacagaagctttaacaaaacatgtagcgtggtgggacactctgccacagcttagctgattggtatcaagccttgtctttggtttctgaggcctcctgagcccttctgtactgggagaccgcactccagagtctgcagaggagaccacccctggggaaacaaacacagctgtcttcagagtcagtgcttcaagccaacagagcttaaaactgcagtccctaatttaaaaacctaatgaaaataaaaacattctcctcacatatggaggtgacgctcgtgtcccagcagtagtaggacatggccttagaggtacgtacctgcagagagctggctatttcaaatgactcgggaacaagaaggcaggctgcagtttaaagaagggggtgggtccagcgtgcaggcacgcttgccatgtgcctccacccactcccagccaggcattaatggcaggagattggccagctcttctctgtcacattcctatttctgacttctgcctggctttcagtttctgccccaccttggctttttcccagcttgaacctaatagaactccagagtttggggggaggcccagccctttgttttctgctcttgaagcatattcacacataaaaagttgtattctcttatacaaactgttttgaggctcttaccgtagtcgaaggtatcttagatcttccttagtgatctcattaagaatatccgaaagtgtataaccctcttcaacaatctgaaacaaagatcagatccttaagagctgagcagctgtgtaacaacagcataagaatttctttgttgtaaatttaccttttcaattgtctttgcatcagctccttgcagccgcaaccagtctataagctctttatctgttctctgcccgtaggggcctgctgggttctctgtaatacctgtaacgattggcaatttgttatatattagtctaaccataaaactcttcaaaagtaaccagttggattaataaatgattccagaatgtaaatgtgatgtgaaaaagagatga

SEQ ID NO: 70955 - DNA, 3120 bp, Homo sapiens
tgtactagtataggagaggtcctaagatgtttgtaactggccagaaaacccagaaaagtccagggtatcatctggatggaacatctgaaggaaactaagtgactagagagtaggaaaagctggaaaggttgaagcacattagtgaaaggacaaggagaaacatgtgtttgcctggagggacaggtacttagacgactgaactggcctctgtgttctaatggttgagcctcagagtacatatttggggtgcggtttggtttgctttgtagagttggtttgttctgcacatgtgtatgttctgccatttccaggacgaaaaggaggttgtgctaaagggaaaggaggatcgatgcacatgtatgccaagaacttctacgggggcaatggcatcgtgggagcgcaggtgcccctgggcgctgggattgctctagcctgtaagtataatggaaaagatgaggtctgcctgactttatatggcgatggtgctgctaaccagggccagatattcgaagcttacaacatggcagctttgtggaaattaccttgtattttcatctgtgagaataatcgctatggaatgggaacgtctgttgagagagcggcagccagcactgattactacaagagaggcgatttcattcctgggctgagagtggatggaatggatatcctgtgcgtccgagaggcaacaaggtttgctgctgcctattgtagatctgggaaggggcccatcctgatggagctgcagacttaccgttaccacggacacagtatgagtgaccctggagtcagttaccgtacacgagaagaaattcaggaagtaagaagtaagagtgaccctattatgcttctcaaggacaggatggtgaacagcaatcttgccagtgtggaagaactaaaggaaattgatgtggaagtgaggaaggagattgaggatgctgcccagtttgccacggccgatcctgagccacctttggaagagctgggctaccacatctactccagcgacccaccttttgaagttcgtggtgccaatcagtggatcaagtttaagtcagtcagttaaggggaggagaaggagaggttataccttcagggggctaccagacagtgttctcaacttggttaaggaggaagaaaacccagtcaatgaaattcaatgaaattcttggaaacttccattaagtgtgtagattgagcaggtagtaattgcatgcagtttgtacattagtgcattaaaagatgaattattgagtgcttaaagattatttttgacttaaaatagtatactttgaacaaatactctaattatgaaaaggaagaacaattccttgtatgcctgtttcccctgcccccagccacctttttgggaggagaccattatggcggggcccctcacagcattctaccaaccatagcacccaccccgagcagcgctggtgctgcagcctgttcgcgctgaccatttctctacaagatacaatatttattatcaggcaagaggacagttccattttaaaataagacttttgtaatcattccaattttgtaatcatttcaaaggccacataacttagttttctctacttacacattcagtataaatatgaagctattttctgttcatatcaaacattaactacaaggcacattcgtatcagttttgtgtttctcaaattgaagtaccataccagttctgaggcagtgtcccagcttccatgtttgttaaataccccttgtttgtttcaccattccagcaagtgctgaagggtgtactttttttgagacagggtcgggctctgttgcccaggctggagtgcagtggtgtgatcatggctcactgcagcctccacacctcctgggctcaagcaatcctcccacctcagcctcctgcatagctgggactacaagtgaatttcctaatattccgggaggtcaaaaccaaggctcactgttttcacaatacacacagttctatgtttataaataacaggtttcaaaagaaactcaggacagtatttaaaacaagttcttaaactattaattgaacaatggcatttttaaatatgtaaacacagcggaattcgtgtatacactaacagaagctttaacaaaacatgtagcgtggtgggacactctgccacagcttagctgattggtatcaagccttgtctttggtttctgaggcctcctgagcccttctgtactgggagaccgcactccagagtctgcagaggagaccacccctggggaaacaaacacagctgtcttcagagtcagtgcttcaagccaacagagcttaaaactgcagtccctaatttaaaaacctaatgaaaataaaaacattctcctcacatatggaggtgacgctcgtgtcccagcagtagtaggacatggccttagaggtacgtacctgcagagagctggctatttcaaatgactcgggaacaagaaggcaggctgcagtttaaagaagggggtgggtccagcgtgcaggcacgcttgccatgtgcctccacccactcccagccaggcattaatggcaggagattggccagctcttctctgtcacattcctatttctgacttctgcctggctttcagtttctgccccaccttggctttttcccagcttgaacctaatagaactccagagtttggggggaggcccagccctttgttttctgctcttgaagcatattcacacataaaaagttgtattctcttatacaaactgttttgaggctcttaccgtagtcgaaggtatcttagatcttccttagtgatctcattaagaatatccgaaagtgtataaccctcttcaacaatctgaaacaaagatcagatccttaagagctgagcagctgtgtaacaacagcataagaatttctttgttgtaaatttaccttttcaattgtctttgcatcagctccttgcagccgcaaccagtctataagctctttatctgttctctgcccgtaggggcctgctgggttctctgtaatacctgtaacgattggcaatttgttatatattagtctaaccataaaactcttcaaaagtaaccagttggattaataaatgattccagaatgtaaatgtgatgtgaaaaagagatga

SEQ ID NO: 70956 - DNA, 2805 bp, Homo sapiens
gctcgctgctgaccaggctctgccggctccttcggcctcgccgcaggaacttgctactaccagcaccatgccctaccaatatccagcagtgcccctgggcgctgggattgctctagcctgtaagtataatggaaaagatgaggtctgcctgactttatatggcgatggtgctgctaaccagggccagatattcgaagcttacaacatggcagctttgtggaaattaccttgtattttcatctgtgagaataatcgctatggaatgggaacgtctgttgagagagcggcagccagcactgattactacaagagaggcgatttcattcctgggctgagagtggatggaatggatatcctgtgcgtccgagaggcaacaaggtttgctgctgcctattgtagatctgggaaggggcccatcctgatggagctgcagacttaccgttaccacggacacagtatgagtgaccctggagtcagttaccgtacacgagaagaaattcaggaagtaagaagtaagagtgaccctattatgcttctcaaggacaggatggtgaacagcaatcttgccagtgtggaagaactaaaggaaattgatgtggaagtgaggaaggagattgaggatgctgcccagtttgccacggccgatcctgagccacctttggaagagctgggctaccacatctactccagcgacccaccttttgaagttcgtggtgccaatcagtggatcaagtttaagtcagtcagttaaggggaggagaaggagaggttataccttcagggggctaccagacagtgttctcaacttggttaaggaggaagaaaacccagtcaatgaaattcaatgaaattcttggaaacttccattaagtgtgtagattgagcaggtagtaattgcatgcagtttgtacattagtgcattaaaagatgaattattgagtgcttaaagattatttttgacttaaaatagtatactttgaacaaatactctaattatgaaaaggaagaacaattccttgtatgcctgtttcccctgcccccagccacctttttgggaggagaccattatggcggggcccctcacagcattctaccaaccatagcacccaccccgagcagcgctggtgctgcagcctgttcgcgctgaccatttctctacaagatacaatatttattatcaggcaagaggacagttccattttaaaataagacttttgtaatcattccaattttgtaatcatttcaaaggccacataacttagttttctctacttacacattcagtataaatatgaagctattttctgttcatatcaaacattaactacaaggcacattcgtatcagttttgtgtttctcaaattgaagtaccataccagttctgaggcagtgtcccagcttccatgtttgttaaataccccttgtttgtttcaccattccagcaagtgctgaagggtgtactttttttgagacagggtcgggctctgttgcccaggctggagtgcagtggtgtgatcatggctcactgcagcctccacacctcctgggctcaagcaatcctcccacctcagcctcctgcatagctgggactacaagtgaatttcctaatattccgggaggtcaaaaccaaggctcactgttttcacaatacacacagttctatgtttataaataacaggtttcaaaagaaactcaggacagtatttaaaacaagttcttaaactattaattgaacaatggcatttttaaatatgtaaacacagcggaattcgtgtatacactaacagaagctttaacaaaacatgtagcgtggtgggacactctgccacagcttagctgattggtatcaagccttgtctttggtttctgaggcctcctgagcccttctgtactgggagaccgcactccagagtctgcagaggagaccacccctggggaaacaaacacagctgtcttcagagtcagtgcttcaagccaacagagcttaaaactgcagtccctaatttaaaaacctaatgaaaataaaaacattctcctcacatatggaggtgacgctcgtgtcccagcagtagtaggacatggccttagaggtacgtacctgcagagagctggctatttcaaatgactcgggaacaagaaggcaggctgcagtttaaagaagggggtgggtccagcgtgcaggcacgcttgccatgtgcctccacccactcccagccaggcattaatggcaggagattggccagctcttctctgtcacattcctatttctgacttctgcctggctttcagtttctgccccaccttggctttttcccagcttgaacctaatagaactccagagtttggggggaggcccagccctttgttttctgctcttgaagcatattcacacataaaaagttgtattctcttatacaaactgttttgaggctcttaccgtagtcgaaggtatcttagatcttccttagtgatctcattaagaatatccgaaagtgtataaccctcttcaacaatctgaaacaaagatcagatccttaagagctgagcagctgtgtaacaacagcataagaatttctttgttgtaaatttaccttttcaattgtctttgcatcagctccttgcagccgcaaccagtctataagctctttatctgttctctgcccgtaggggcctgctgggttctctgtaatacctgtaacgattggcaatttgttatatattagtctaaccataaaactcttcaaaagtaaccagttggattaataaatgattccagaatgtaaatgtgatgtgaaaaagagatga

SEQ ID NO: 70957 - DNA, 4044 bp, Homo sapiens
ttcaccctccttaggcaactggtggtcccccgctctcgggaggtcaccatattgatgccgaacttagtgcggacacccgatcggcatagcgcactacagcccagaaccccgggttcaagcaattctcctgcctcagcctcccgagtagctgggaatatagttacgtgccaccatgcccaaccattttttgtatttttagtagagacggggtttcaccatcttgtccaggatggtctcgatctgtggacctcgtgatctgcccaaagtgctgggattacaggcgtgagccaccacgcccggccaggttttattttttaactcttgaatgcagaaatgttagtgcttactggttaaaatagaacatagtatttatatattactttagtgctttattgaaaatatcggaggtgggataaacagagagatagggttggaaggagagtttgtagcagcagtgtaatttctgtgtcagattctggccaggagtgaaaatgcagggcattaattagtatctcccctcatggatttctgtggttcctttctcggttgtccttaatgttaggtgcccctgggcgctgggattgctctagcctgtaagtataatggaaaagatgaggtctgcctgactttatatggcgatggtgctgctaaccaggtaattatgtctcttaacttcccaaaaacagtcttattttcaaagtctttaatatttacagttgaatttctaaagaagtagcatattgcttattaggtgaaatagcaagtcctatggctagctcaaatttggttgacttatggccagattagagattgacctcttagcgttgtttcacaagagacttacgggggcacattcctgtgaaggagctcacctttgctctacatcagtgcttggcaaaggccctgtggtaaaggacctccccacaacctattgcaaaacaatacagacccattctcttggatgtccgggctggcagtgtcaaattcggataatagcgtctgagtcctaactcagtttctatgcttctcttgttaccgagtaatccccagtctgtggccagcactctgtgaagccctgttctagaggctgattcttaggtgctggttcactctggctatccagtgggcctgatagatttcatattgatcttttttccagtgtgttccttactgctagcatggccccaaagaaacaagtagtagttggtttgtcaccttccttagttgcaagagtatgatgcctgctacttctcctccaccacccaccccgctttccctcaccacccaaagctcggttttagaagaggaggctttctgtgctttatgaaagctttctgtgccaggcagagcagcagctgttagagatgatgaagcctggagaaagaagccaaatgaaaccccttttcgtaactacttccagggccagatattcgaagcttacaacatggcagctttgtggaaattaccttgtattttcatctgtgagaataatcgctatggaatgggaacgtctgttgagagagcggcagccagcactgattactacaagagaggcgatttcattcctgggctgagagtggatggaatggatatcctgtgcgtccgagaggcaacaaggtttgctgctgcctattgtagatctgggaaggggcccatcctgatggagctgcagacttaccgttaccacggacacagtatgagtgaccctggagtcagttaccgtacacgagaagaaattcaggaagtaagaagtaagagtgaccctattatgcttctcaaggacaggatggtgaacagcaatcttgccagtgtggaagaactaaaggaaattgatgtggaagtgaggaaggagattgaggatgctgcccagtttgccacggccgatcctgagccacctttggaagagctgggctaccacatctactccagcgacccaccttttgaagttcgtggtgccaatcagtggatcaagtttaagtcagtcagttaaggggaggagaaggagaggttataccttcagggggctaccagacagtgttctcaacttggttaaggaggaagaaaacccagtcaatgaaattcaatgaaattcttggaaacttccattaagtgtgtagattgagcaggtagtaattgcatgcagtttgtacattagtgcattaaaagatgaattattgagtgcttaaagattatttttgacttaaaatagtatactttgaacaaatactctaattatgaaaaggaagaacaattccttgtatgcctgtttcccctgcccccagccacctttttgggaggagaccattatggcggggcccctcacagcattctaccaaccatagcacccaccccgagcagcgctggtgctgcagcctgttcgcgctgaccatttctctacaagatacaatatttattatcaggcaagaggacagttccattttaaaataagacttttgtaatcattccaattttgtaatcatttcaaaggccacataacttagttttctctacttacacattcagtataaatatgaagctattttctgttcatatcaaacattaactacaaggcacattcgtatcagttttgtgtttctcaaattgaagtaccataccagttctgaggcagtgtcccagcttccatgtttgttaaataccccttgtttgtttcaccattccagcaagtgctgaagggtgtactttttttgagacagggtcgggctctgttgcccaggctggagtgcagtggtgtgatcatggctcactgcagcctccacacctcctgggctcaagcaatcctcccacctcagcctcctgcatagctgggactacaagtgaatttcctaatattccgggaggtcaaaaccaaggctcactgttttcacaatacacacagttctatgtttataaataacaggtttcaaaagaaactcaggacagtatttaaaacaagttcttaaactattaattgaacaatggcatttttaaatatgtaaacacagcggaattcgtgtatacactaacagaagctttaacaaaacatgtagcgtggtgggacactctgccacagcttagctgattggtatcaagccttgtctttggtttctgaggcctcctgagcccttctgtactgggagaccgcactccagagtctgcagaggagaccacccctggggaaacaaacacagctgtcttcagagtcagtgcttcaagccaacagagcttaaaactgcagtccctaatttaaaaacctaatgaaaataaaaacattctcctcacatatggaggtgacgctcgtgtcccagcagtagtaggacatggccttagaggtacgtacctgcagagagctggctatttcaaatgactcgggaacaagaaggcaggctgcagtttaaagaagggggtgggtccagcgtgcaggcacgcttgccatgtgcctccacccactcccagccaggcattaatggcaggagattggccagctcttctctgtcacattcctatttctgacttctgcctggctttcagtttctgccccaccttggctttttcccagcttgaacctaatagaactccagagtttggggggaggcccagccctttgttttctgctcttgaagcatattcacacataaaaagttgtattctcttatacaaactgttttgaggctcttaccgtagtcgaaggtatcttagatcttccttagtgatctcattaagaatatccgaaagtgtataaccctcttcaacaatctgaaacaaagatcagatccttaagagctgagcagctgtgtaacaacagcataagaatttctttgttgtaaatttaccttttcaattgtctttgcatcagctccttgcagccgcaaccagtctataagctctttatctgttctctgcccgtaggggcctgctgggttctctgtaatacctgtaacgattggcaatttgttatatattagtctaaccataaaactcttcaaaagtaaccagttggattaataaatgattccagaatgtaaatgtgatgtgaaaaagagatga

SEQ ID NO: 70958 - DNA, 2352 bp, Homo sapiens
  misc_feature (21)..(21): n is a, c, g, or t
  misc_feature (24)..(24): n is a, c, g, or t
gtggattgggtttgagcgccnccnttaccgtacacgagaagaaattcaggaagtaagaagtaagagtgaccctattatgcttctcaaggacaggatggtgaacagcaatcttgccagtgtggaagaactaaaggaaattgatgtggaagtgaggaaggagattgaggatgctgcccagtttgccacggccgatcctgagccacctttggaagagctgggctaccacatctactccagcgacccaccttttgaagttcgtggtgccaatcagtggatcaagtttaagtcagtcagttaaggggaggagaaggagaggttataccttcagggggctaccagacagtgttctcaacttggttaaggaggaagaaaacccagtcaatgaaattcaatgaaattcttggaaacttccattaagtgtgtagattgagcaggtagtaattgcatgcagtttgtacattagtgcattaaaagatgaattattgagtgcttaaagattatttttgacttaaaatagtatactttgaacaaatactctaattatgaaaaggaagaacaattccttgtatgcctgtttcccctgcccccagccacctttttgggaggagaccattatggcggggcccctcacagcattctaccaaccatagcacccaccccgagcagcgctggtgctgcagcctgttcgcgctgaccatttctctacaagatacaatatttattatcaggcaagaggacagttccattttaaaataagacttttgtaatcattccaattttgtaatcatttcaaaggccacataacttagttttctctacttacacattcagtataaatatgaagctattttctgttcatatcaaacattaactacaaggcacattcgtatcagttttgtgtttctcaaattgaagtaccataccagttctgaggcagtgtcccagcttccatgtttgttaaataccccttgtttgtttcaccattccagcaagtgctgaagggtgtactttttttgagacagggtcgggctctgttgcccaggctggagtgcagtggtgtgatcatggctcactgcagcctccacacctcctgggctcaagcaatcctcccacctcagcctcctgcatagctgggactacaagtgaatttcctaatattccgggaggtcaaaaccaaggctcactgttttcacaatacacacagttctatgtttataaataacaggtttcaaaagaaactcaggacagtatttaaaacaagttcttaaactattaattgaacaatggcatttttaaatatgtaaacacagcggaattcgtgtatacactaacagaagctttaacaaaacatgtagcgtggtgggacactctgccacagcttagctgattggtatcaagccttgtctttggtttctgaggcctcctgagcccttctgtactgggagaccgcactccagagtctgcagaggagaccacccctggggaaacaaacacagctgtcttcagagtcagtgcttcaagccaacagagcttaaaactgcagtccctaatttaaaaacctaatgaaaataaaaacattctcctcacatatggaggtgacgctcgtgtcccagcagtagtaggacatggccttagaggtacgtacctgcagagagctggctatttcaaatgactcgggaacaagaaggcaggctgcagtttaaagaagggggtgggtccagcgtgcaggcacgcttgccatgtgcctccacccactcccagccaggcattaatggcaggagattggccagctcttctctgtcacattcctatttctgacttctgcctggctttcagtttctgccccaccttggctttttcccagcttgaacctaatagaactccagagtttggggggaggcccagccctttgttttctgctcttgaagcatattcacacataaaaagttgtattctcttatacaaactgttttgaggctcttaccgtagtcgaaggtatcttagatcttccttagtgatctcattaagaatatccgaaagtgtataaccctcttcaacaatctgaaacaaagatcagatccttaagagctgagcagctgtgtaacaacagcataagaatttctttgttgtaaatttaccttttcaattgtctttgcatcagctccttgcagccgcaaccagtctataagctctttatctgttctctgcccgtaggggcctgctgggttctctgtaatacctgtaacgattggcaatttgttatatattagtctaaccataaaactcttcaaaagtaaccagttggattaataaatgattccagaatgtaaatgtgatgtgaaaaagagatga

SEQ ID NO: 70959 - DNA, 2279 bp, Homo sapiens
  misc_feature (42)..(42): n is a, c, g, or t
tgctgaggtgactctagaggatttcggaaacgtctacttgcnagtgtggaagaactaaaggaaattgatgtggaagtgaggaaggagattgaggatgctgcccagtttgccacggccgatcctgagccacctttggaagagctgggctaccacatctactccagcgacccaccttttgaagttcgtggtgccaatcagtggatcaagtttaagtcagtcagttaaggggaggagaaggagaggttataccttcagggggctaccagacagtgttctcaacttggttaaggaggaagaaaacccagtcaatgaaattcaatgaaattcttggaaacttccattaagtgtgtagattgagcaggtagtaattgcatgcagtttgtacattagtgcattaaaagatgaattattgagtgcttaaagattatttttgacttaaaatagtatactttgaacaaatactctaattatgaaaaggaagaacaattccttgtatgcctgtttcccctgcccccagccacctttttgggaggagaccattatggcggggcccctcacagcattctaccaaccatagcacccaccccgagcagcgctggtgctgcagcctgttcgcgctgaccatttctctacaagatacaatatttattatcaggcaagaggacagttccattttaaaataagacttttgtaatcattccaattttgtaatcatttcaaaggccacataacttagttttctctacttacacattcagtataaatatgaagctattttctgttcatatcaaacattaactacaaggcacattcgtatcagttttgtgtttctcaaattgaagtaccataccagttctgaggcagtgtcccagcttccatgtttgttaaataccccttgtttgtttcaccattccagcaagtgctgaagggtgtactttttttgagacagggtcgggctctgttgcccaggctggagtgcagtggtgtgatcatggctcactgcagcctccacacctcctgggctcaagcaatcctcccacctcagcctcctgcatagctgggactacaagtgaatttcctaatattccgggaggtcaaaaccaaggctcactgttttcacaatacacacagttctatgtttataaataacaggtttcaaaagaaactcaggacagtatttaaaacaagttcttaaactattaattgaacaatggcatttttaaatatgtaaacacagcggaattcgtgtatacactaacagaagctttaacaaaacatgtagcgtggtgggacactctgccacagcttagctgattggtatcaagccttgtctttggtttctgaggcctcctgagcccttctgtactgggagaccgcactccagagtctgcagaggagaccacccctggggaaacaaacacagctgtcttcagagtcagtgcttcaagccaacagagcttaaaactgcagtccctaatttaaaaacctaatgaaaataaaaacattctcctcacatatggaggtgacgctcgtgtcccagcagtagtaggacatggccttagaggtacgtacctgcagagagctggctatttcaaatgactcgggaacaagaaggcaggctgcagtttaaagaagggggtgggtccagcgtgcaggcacgcttgccatgtgcctccacccactcccagccaggcattaatggcaggagattggccagctcttctctgtcacattcctatttctgacttctgcctggctttcagtttctgccccaccttggctttttcccagcttgaacctaatagaactccagagtttggggggaggcccagccctttgttttctgctcttgaagcatattcacacataaaaagttgtattctcttatacaaactgttttgaggctcttaccgtagtcgaaggtatcttagatcttccttagtgatctcattaagaatatccgaaagtgtataaccctcttcaacaatctgaaacaaagatcagatccttaagagctgagcagctgtgtaacaacagcataagaatttctttgttgtaaatttaccttttcaattgtctttgcatcagctccttgcagccgcaaccagtctataagctctttatctgttctctgcccgtaggggcctgctgggttctctgtaatacctgtaacgattggcaatttgttatatattagtctaaccataaaactcttcaaaagtaaccagttggattaataaatgattccagaatgtaaatgtgatgtgaaaaagagatga

SEQ ID NO: 70960 - DNA, 2248 bp, Homo sapiens
gttgatgctatgaaactgggagtaaaggaaatgaagaaggcagaagcaggaaggagattgaggatgctgcccagtttgccacggccgatcctgagccacctttggaagagctgggctaccacatctactccagcgacccaccttttgaagttcgtggtgccaatcagtggatcaagtttaagtcagtcagttaaggggaggagaaggagaggttataccttcagggggctaccagacagtgttctcaacttggttaaggaggaagaaaacccagtcaatgaaattcaatgaaattcttggaaacttccattaagtgtgtagattgagcaggtagtaattgcatgcagtttgtacattagtgcattaaaagatgaattattgagtgcttaaagattatttttgacttaaaatagtatactttgaacaaatactctaattatgaaaaggaagaacaattccttgtatgcctgtttcccctgcccccagccacctttttgggaggagaccattatggcggggcccctcacagcattctaccaaccatagcacccaccccgagcagcgctggtgctgcagcctgttcgcgctgaccatttctctacaagatacaatatttattatcaggcaagaggacagttccattttaaaataagacttttgtaatcattccaattttgtaatcatttcaaaggccacataacttagttttctctacttacacattcagtataaatatgaagctattttctgttcatatcaaacattaactacaaggcacattcgtatcagttttgtgtttctcaaattgaagtaccataccagttctgaggcagtgtcccagcttccatgtttgttaaataccccttgtttgtttcaccattccagcaagtgctgaagggtgtactttttttgagacagggtcgggctctgttgcccaggctggagtgcagtggtgtgatcatggctcactgcagcctccacacctcctgggctcaagcaatcctcccacctcagcctcctgcatagctgggactacaagtgaatttcctaatattccgggaggtcaaaaccaaggctcactgttttcacaatacacacagttctatgtttataaataacaggtttcaaaagaaactcaggacagtatttaaaacaagttcttaaactattaattgaacaatggcatttttaaatatgtaaacacagcggaattcgtgtatacactaacagaagctttaacaaaacatgtagcgtggtgggacactctgccacagcttagctgattggtatcaagccttgtctttggtttctgaggcctcctgagcccttctgtactgggagaccgcactccagagtctgcagaggagaccacccctggggaaacaaacacagctgtcttcagagtcagtgcttcaagccaacagagcttaaaactgcagtccctaatttaaaaacctaatgaaaataaaaacattctcctcacatatggaggtgacgctcgtgtcccagcagtagtaggacatggccttagaggtacgtacctgcagagagctggctatttcaaatgactcgggaacaagaaggcaggctgcagtttaaagaagggggtgggtccagcgtgcaggcacgcttgccatgtgcctccacccactcccagccaggcattaatggcaggagattggccagctcttctctgtcacattcctatttctgacttctgcctggctttcagtttctgccccaccttggctttttcccagcttgaacctaatagaactccagagtttggggggaggcccagccctttgttttctgctcttgaagcatattcacacataaaaagttgtattctcttatacaaactgttttgaggctcttaccgtagtcgaaggtatcttagatcttccttagtgatctcattaagaatatccgaaagtgtataaccctcttcaacaatctgaaacaaagatcagatccttaagagctgagcagctgtgtaacaacagcataagaatttctttgttgtaaatttaccttttcaattgtctttgcatcagctccttgcagccgcaaccagtctataagctctttatctgttctctgcccgtaggggcctgctgggttctctgtaatacctgtaacgattggcaatttgttatatattagtctaaccataaaactcttcaaaagtaaccagttggattaataaatgattccagaatgtaaatgtgatgtgaaaaagagatga

SEQ ID NO: 70961 - DNA, 2095 bp, Homo sapiens
aaacgccgcaatctgaagttcaggaaaaaattatcagttaaggggaggagaaggagaggttataccttcagggggctaccagacagtgttctcaacttggttaaggaggaagaaaacccagtcaatgaaattcaatgaaattcttggaaacttccattaagtgtgtagattgagcaggtagtaattgcatgcagtttgtacattagtgcattaaaagatgaattattgagtgcttaaagattatttttgacttaaaatagtatactttgaacaaatactctaattatgaaaaggaagaacaattccttgtatgcctgtttcccctgcccccagccacctttttgggaggagaccattatggcggggcccctcacagcattctaccaaccatagcacccaccccgagcagcgctggtgctgcagcctgttcgcgctgaccatttctctacaagatacaatatttattatcaggcaagaggacagttccattttaaaataagacttttgtaatcattccaattttgtaatcatttcaaaggccacataacttagttttctctacttacacattcagtataaatatgaagctattttctgttcatatcaaacattaactacaaggcacattcgtatcagttttgtgtttctcaaattgaagtaccataccagttctgaggcagtgtcccagcttccatgtttgttaaataccccttgtttgtttcaccattccagcaagtgctgaagggtgtactttttttgagacagggtcgggctctgttgcccaggctggagtgcagtggtgtgatcatggctcactgcagcctccacacctcctgggctcaagcaatcctcccacctcagcctcctgcatagctgggactacaagtgaatttcctaatattccgggaggtcaaaaccaaggctcactgttttcacaatacacacagttctatgtttataaataacaggtttcaaaagaaactcaggacagtatttaaaacaagttcttaaactattaattgaacaatggcatttttaaatatgtaaacacagcggaattcgtgtatacactaacagaagctttaacaaaacatgtagcgtggtgggacactctgccacagcttagctgattggtatcaagccttgtctttggtttctgaggcctcctgagcccttctgtactgggagaccgcactccagagtctgcagaggagaccacccctggggaaacaaacacagctgtcttcagagtcagtgcttcaagccaacagagcttaaaactgcagtccctaatttaaaaacctaatgaaaataaaaacattctcctcacatatggaggtgacgctcgtgtcccagcagtagtaggacatggccttagaggtacgtacctgcagagagctggctatttcaaatgactcgggaacaagaaggcaggctgcagtttaaagaagggggtgggtccagcgtgcaggcacgcttgccatgtgcctccacccactcccagccaggcattaatggcaggagattggccagctcttctctgtcacattcctatttctgacttctgcctggctttcagtttctgccccaccttggctttttcccagcttgaacctaatagaactccagagtttggggggaggcccagccctttgttttctgctcttgaagcatattcacacataaaaagttgtattctcttatacaaactgttttgaggctcttaccgtagtcgaaggtatcttagatcttccttagtgatctcattaagaatatccgaaagtgtataaccctcttcaacaatctgaaacaaagatcagatccttaagagctgagcagctgtgtaacaacagcataagaatttctttgttgtaaatttaccttttcaattgtctttgcatcagctccttgcagccgcaaccagtctataagctctttatctgttctctgcccgtaggggcctgctgggttctctgtaatacctgtaacgattggcaatttgttatatattagtctaaccataaaactcttcaaaagtaaccagttggattaataaatgattccagaatgtaaatgtgatgtgaaaaagagatga

SEQ ID NO: 70962 - DNA, 1621 bp, Homo sapiens
ggtggtacaggtccggaagtcatttggattttgtaatcattccaattttgtaatcatttcaaaggccacataacttagttttctctacttacacattcagtataaatatgaagctattttctgttcatatcaaacattaactacaaggcacattcgtatcagttttgtgtttctcaaattgaagtaccataccagttctgaggcagtgtcccagcttccatgtttgttaaataccccttgtttgtttcaccattccagcaagtgctgaagggtgtactttttttgagacagggtcgggctctgttgcccaggctggagtgcagtggtgtgatcatggctcactgcagcctccacacctcctgggctcaagcaatcctcccacctcagcctcctgcatagctgggactacaagtgaatttcctaatattccgggaggtcaaaaccaaggctcactgttttcacaatacacacagttctatgtttataaataacaggtttcaaaagaaactcaggacagtatttaaaacaagttcttaaactattaattgaacaatggcatttttaaatatgtaaacacagcggaattcgtgtatacactaacagaagctttaacaaaacatgtagcgtggtgggacactctgccacagcttagctgattggtatcaagccttgtctttggtttctgaggcctcctgagcccttctgtactgggagaccgcactccagagtctgcagaggagaccacccctggggaaacaaacacagctgtcttcagagtcagtgcttcaagccaacagagcttaaaactgcagtccctaatttaaaaacctaatgaaaataaaaacattctcctcacatatggaggtgacgctcgtgtcccagcagtagtaggacatggccttagaggtacgtacctgcagagagctggctatttcaaatgactcgggaacaagaaggcaggctgcagtttaaagaagggggtgggtccagcgtgcaggcacgcttgccatgtgcctccacccactcccagccaggcattaatggcaggagattggccagctcttctctgtcacattcctatttctgacttctgcctggctttcagtttctgccccaccttggctttttcccagcttgaacctaatagaactccagagtttggggggaggcccagccctttgttttctgctcttgaagcatattcacacataaaaagttgtattctcttatacaaactgttttgaggctcttaccgtagtcgaaggtatcttagatcttccttagtgatctcattaagaatatccgaaagtgtataaccctcttcaacaatctgaaacaaagatcagatccttaagagctgagcagctgtgtaacaacagcataagaatttctttgttgtaaatttaccttttcaattgtctttgcatcagctccttgcagccgcaaccagtctataagctctttatctgttctctgcccgtaggggcctgctgggttctctgtaatacctgtaacgattggcaatttgttatatattagtctaaccataaaactcttcaaaagtaaccagttggattaataaatgattccagaatgtaaatgtgatgtgaaaaagagatga

SEQ ID NO: 70963 - DNA, 825 bp, Homo sapiens
tattacgactctgtcacgccgcggtgcgactgaggcgtggcgtctgctggggcacctgaaggagacttgggggcacccgcgtcgtgcctcctgggttgtgaggagtcgccgctgccgccactgcctgtgcttcatgaggaagatgctcgccgccgtctcccgcgtgctgtctggcgcttctcagaagccggcaagcagagtgctggtagcatcccgtaattttgcaaatgatgctacatttgaaattaagaaatgtgaccttcaccggctggaagaaggccctcctgtcacaacagtgctcaccagggaggatgggctcaaatactacaggatgatgcagactgtacgccgaatggagttgaaagcagatcagctgtataaacagaaaattattcgtggtttctgtcacttgtgtgatggtcaggaagcttgctgtgtgggcctggaggccggcatcaaccccacagaccatctcatcacagcctaccgggctcacggctttactttcacccggggcctttccgtccgagaaattctcgcagagcttacaggacgaaaaggaggttgtgctaaagggaaaggaggatcgatgcacatgtatgccaagaacttctacgggggcaatggcatcgtgggagcgcaggtagtcaaggacgaggattgtgtgctgctttagatttggccctggactttgtcttcaaaaactttcacagccccagacaacttttcctgaagtagtacagccatgtgctgcacagtgacgctttggtcaatgtcgcatatatgatgttggacccataagattataatggagctgaaaaattc

SEQ ID NO: 70964 - DNA, 395 bp, Homo sapiens
gcgcctaactgattgaagccctcaaacaagtagtgatgggttacttaatcttccttagtgatctcattaagaatatccgaaagtgtataaccctcttcaacaatctgaaacaaagatcagatccttaagagctgagcagctgtgtaacaacagcataagaatttctttgttgtaaatttaccttttcaattgtctttgcatcagctccttgcagccgcaaccagtctataagctctttatctgttctctgcccgtaggggcctgctgggttctctgtaatacctgtaacgattggcaatttgttatatattagtctaaccataaaactcttcaaaagtaaccagttggattaataaatgattccagaatgtaaatgtgatgtgaaaaagagatga

SEQ ID NO: 70965 - DNA, 472 bp, Homo sapiens
  misc_feature (15)..(15): n is a, c, g, or t
tctagaggaccccanccaacatgaaatagtgaaaggacaaggagaaacatgtgtttgcctggagggacaggtacttagacgactgaactggcctctgtgttctaatggttgagcctcagagtacatatttggggtgcggtttggtttgctttgtagagttggtttgttctgcacatgtgtatgttctgccatttccaggacgaaaaggaggttgtgctaaagggaaaggaggatcgatgcacatgtatgccaagaacttctacgggggcaatggcatcgtgggagcgcaggtagtcaaggacgaggattgtgtgctgctttagatttggccctggactttgtcttcaaaaactttcacagccccagacaacttttcctgaagtagtacagccatgtgctgcacagtgacgctttggtcaatgtcgcatatatgatgttggacccataagattataatggagctgaaaaattc

SEQ ID NO: 70966 - DNA, 585 bp, Homo sapiens
tgtactagtataggagaggtcctaagatgtttgtaactggccagaaaacccagaaaagtccagggtatcatctggatggaacatctgaaggaaactaagtgactagagagtaggaaaagctggaaaggttgaagcacattagtgaaaggacaaggagaaacatgtgtttgcctggagggacaggtacttagacgactgaactggcctctgtgttctaatggttgagcctcagagtacatatttggggtgcggtttggtttgctttgtagagttggtttgttctgcacatgtgtatgttctgccatttccaggacgaaaaggaggttgtgctaaagggaaaggaggatcgatgcacatgtatgccaagaacttctacgggggcaatggcatcgtgggagcgcaggtagtcaaggacgaggattgtgtgctgctttagatttggccctggactttgtcttcaaaaactttcacagccccagacaacttttcctgaagtagtacagccatgtgctgcacagtgacgctttggtcaatgtcgcatatatgatgttggacccataagattataatggagctgaaaaattc

SEQ ID NO: 70967 - DNA, 154 bp, Homo sapiens
gtgagtggtaggtttgtggtggaactgtgttatttaggtactgaagtatggcttgtacttattgggctttaccctgccatatgtatcagaagagtttgaggctggtaatgtaattttcttttatttatttatttttttgagacagtctctctct

SEQ ID NO: 70968 - DNA, 302 bp, Homo sapiens
cacacccagccaattaaaaaaattttttttttactagagacatggtcttgctacgttgcccagtctggtctccatctccaggctcaagcagtcctcccacctcggcctcccaaagtgctgggattactctcactctcttaaaaccaggcaggtagggagatttatctcaggcttaaagattgccattgtctcatcaaagagtgtttggtgtgaaactttgaaatgaatatcaagattgtgtttttatttttgaataaggtttatagttttcatagttcttatttcatggaagaagattgaat

SEQ ID NO: 70969 - DNA, 1501 bp, Homo sapiens
tattacgactctgtcacgccgcggtgcgactgaggcgtggcgtctgctggggcacctgaaggagacttgggggcacccgcgtcgtgcctcctgggttgtgaggagtcgccgctgccgccactgcctgtgcttcatgaggaagatgctcgccgccgtctcccgcgtgctgtctggcgcttctcagaagccggcaagcagagtgctggtagcatcccgtaattttgcaaatgatgctacatttgaaattaagaaatgtgaccttcaccggctggaagaaggccctcctgtcacaacagtgctcaccagggaggatgggctcaaatactacaggatgatgcagactgtacgccgaatggagttgaaagcagatcagctgtataaacagaaaattattcgtggtttctgtcacttgtgtgatggtcaggaagcttgctgtgtgggcctggaggccggcatcaaccccacagaccatctcatcacagcctaccgggctcacggctttactttcacccggggcctttccgtccgagaaattctcgcagagcttacaggacgaaaaggaggttgtgctaaagggaaaggaggatcgatgcacatgtatgccaagaacttctacgggggcaatggcatcgtgggagcgcaggtgcccctgggcgctgggattgctctagcctgtaagtataatggaaaagatgaggtctgcctgactttatatggcgatggtgctgctaaccagggccagatattcgaagcttacaacatggcagctttgtggaaattaccttgtattttcatctgtgagaataatcgctatggaatgggaacgtctgttgagagagcggcagccagcactgattactacaagagaggcgatttcattcctgggctgagagtggatggaatggatatcctgtgcgtccgagaggcaacaaggtttgctgctgcctattgtagatctgggaaggggcccatcctgatggagctgcagacttaccgttaccacggacacagtatgagtgaccctggagtcagttaccgtacacgagaagaaattcaggaagtaagaagtaagagtgaccctattatgcttctcaaggacaggatggtgaacagcaatcttgccagtgtggaagaactaaaggaaattgatgtggaagtgaggaaggagattgaggatgctgcccagtttgccacggccgatcctgagccacctttggaagagctgggctaccacatctactccagcgacccaccttttgaagttcgtggtgccaatcagtggatcaagtttaagtcagtcagttaaggggaggagaaggagaggttataccttcagggggctaccagacagtgttctcaacttggttaaggaggaagaaaacccagtcaatgaaattcaatgaaattcttggaaacttccattaagtgtgtagattgagcaggtagtaattgcatgcagtttgtacattagtgcattaaaagatgaattattgagtgctta

SEQ ID NO: 70970 - DNA, 731 bp, Homo sapiens
tgaaatatgcaatcaatacttgctagaaatgagaacagatcagtcaaccaataagaaattcgtgacaactcagaagatctgataagactacactggacgcttaataaagggcctgcgtttgaggccgtggattgccggcctgttcttccagtcatcgttcctaactaactaactgcctaccggttctgttttaggggcccatcctgatggagctgcagacttaccgttaccacggacacagtatgagtgaccctggagtcagttaccgtacacgagaagaaattcaggaagtaagaagtaagagtgaccctattatgcttctcaaggacaggatggtgaacagcaatcttgccagtgtggaagaactaaaggaaattgatgtggaagtgaggaaggagattgaggatgctgcccagtttgccacggccgatcctgagccacctttggaagagctgggctaccacatctactccagcgacccaccttttgaagttcgtggtgccaatcagtggatcaagtttaagtcagtcagttaaggggaggagaaggagaggttataccttcagggggctaccagacagtgttctcaacttggttaaggaggaagaaaacccagtcaatgaaattcaatgaaattcttggaaacttccattaagtgtgtagattgagcaggtagtaattgcatgcagtttgtacattagtgcattaaaagatgaattattgagtgctta

SEQ ID NO: 70971 - DNA, 879 bp, Homo sapiens
  misc_feature (781)..(781): n is a, c, g, or t
  misc_feature (783)..(783): n is a, c, g, or t
tattacgactctgtcacgccgcggtgcgactgaggcgtggcgtctgctggggcacctgaaggagacttgggggcacccgcgtcgtgcctcctgggttgtgaggagtcgccgctgccgccactgcctgtgcttcatgaggaagatgctcgccgccgtctcccgcgtgctgtctggcgcttctcagaagccgagacatggtcttgctacgttgcccagtctggtctccatctccaggctcaagcagtcctcccacctcggcctcccaaagtgctgggattactctcactctcttaaaaccaggcaggcaagcagagtgctggtagcatcccgtaattttgcaaatgatgctacatttgaaattaagaaatgtgaccttcaccggctggaagaaggccctcctgtcacaacagtgctcaccagggaggatgggctcaaatactacaggatgatgcagactgtacgccgaatggagttgaaagcagatcagctgtataaacagaaaattattcgtggtttctgtcacttgtgtgatggtcaggaagcttgctgtgtgggcctggaggccggcatcaaccccacagaccatctcatcacagcctaccgggctcacggctttactttcacccggggcctttccgtccgagaaattctcgcagagcttacaggacgaaaaggaggttgtgctaaagggaaaggaggatcgatgcacatgtatgccaagaacttctacgggggcaatggcatcgtgggagcgcaggcccctggggctgggatggtctancngtaagttttgggggacatgaaggctggggaattatttgggaaggtgtggtaaccaggcgaattcaggtttaatgggggttgtggaaatactgtttg

SEQ ID NO: 70972 - DNA, 3360 bp, Homo sapiens
tattacgactctgtcacgccgcggtgcgactgaggcgtggcgtctgctggggcacctgaaggagacttgggggcacccgcgtcgtgcctcctgggttgtgaggagtcgccgctgccgccactgcctgtgcttcatgaggaagatgctcgccgccgtctcccgcgtgctgtctggcgcttctcagaagccggcaagcagagtgctggtagcatcccgtaattttgcaaatgatgctacatttgaaattaagaaatgtgaccttcaccggctggaagaaggccctcctgtcacaacagtgctcaccagggaggatgggctcaaatactacaggatgatgcagactgtacgccgaatggagttgaaagcagatcagctgtataaacagaaaattattcgtggtttctgtcacttgtgtgatggtcaggaagcttgctgtgtgggcctggaggccggcatcaaccccacagaccatctcatcacagcctaccgggctcacggctttactttcacccggggcctttccgtccgagaaattctcgcagagcttacaggacgaaaaggaggttgtgctaaagggaaaggaggatcgatgcacatgtatgccaagaacttctacgggggcaatggcatcgtgggagcgcaggtgcccctgggcgctgggattgctctagcctgtaagtataatggaaaagatgaggtctgcctgactttatatggcgatggtgctgctaaccagggccagatattcgaagcttacaacatggcagctttgtggaaattaccttgtattttcatctgtgagaataatcgctatggaatgggaacgtctgttgagagagcggcagccagcactgattactacaagagaggcgatttcattcctgggctgagagtggatggaatggatatcctgtgcgtccgagaggcaacaaggtttgctgctgcctattgtagatctgggaaggggcccatcctgatggagctgcagacttaccgttaccacggacacagtatgagtgaccctggagtcagttaccgtacacgagaagaaattcaggaagtaagaagtaagagtgaccctattatgcttctcaaggacaggatggtgaacagcaatcttgccagtgtggaagaactaaaggaaattgatgtggaagtgaggaaggagattgaggatgctgcccagtttgccacggccgatcctgagccacctttggaagagctgggctaccacatctactccagcgacccaccttttgaagttcgtggtgccaatcagtggatcaagtttaagtcagtcagttaaggggaggagaaggagaggttataccttcagggggctaccagacagtgttctcaacttggttaaggaggaagaaaacccagtcaatgaaattcaatgaaattcttggaaacttccattaagtgtgtagattgagcaggtagtaattgcatgcagtttgtacattagtgcattaaaagatgaattattgagtgcttaaagattatttttgacttaaaatagtatactttgaacaaatactctaattatgaaaaggaagaacaattccttgtatgcctgtttcccctgcccccagccacctttttgggaggagaccattatggcggggcccctcacagcattctaccaaccatagcacccaccccgagcagcgctggtgctgcagcctgttcgcgctgaccatttctctacaagatacaatatttattatcaggcaagaggacagttccattttaaaataagacttttgtaatcattccaattttgtaatcatttcaaaggccacataacttagttttctctacttacacattcagtataaatatgaagctattttctgttcatatcaaacattaactacaaggcacattcgtatcagttttgtgtttctcaaattgaagtaccataccagttctgaggcagtgtcccagcttccatgtttgttaaataccccttgtttgtttcaccattccagcaagtgctgaagggtgtactttttttgagacagggtcgggctctgttgcccaggctggagtgcagtggtgtgatcatggctcactgcagcctccacacctcctgggctcaagcaatcctcccacctcagcctcctgcatagctgggactacaagtgaatttcctaatattccgggaggtcaaaaccaaggctcactgttttcacaatacacacagttctatgtttataaataacaggtttcaaaagaaactcaggacagtatttaaaacaagttcttaaactattaattgaacaatggcatttttaaatatgtaaacacagcggaattcgtgtatacactaacagaagctttaacaaaacatgtagcgtggtgggacactctgccacagcttagctgattggtatcaagccttgtctttggtttctgaggcctcctgagcccttctgtactgggagaccgcactccagagtctgcagaggagaccacccctggggaaacaaacacagctgtcttcagagtcagtgcttcaagccaacagagcttaaaactgcagtccctaatttaaaaacctaatgaaaataaaaacattctcctcacatatggaggtgacgctcgtgtcccagcagtagtaggacatggccttagaggtacgtacctgcagagagctggctatttcaaatgactcgggaacaagaaggcaggctgcagtttaaagaagggggtgggtccagcgtgcaggcacgcttgccatgtgcctccacccactcccagccaggcattaatggcaggagattggccagctcttctctgtcacattcctatttctgacttctgcctggctttcagtttctgccccaccttggctttttcccagcttgaacctaatagaactccagagtttggggggaggcccagccctttgttttctgctcttgaagcatattcacacataaaaagttgtattctcttatacaaactgttttgaggctcttaccgtagtcgaaggtatcttagatcttccttagtgatctcattaagaatatccgaaagtgtataaccctcttcaacaatctgaaacaaagatcagatccttaagagctgagcagctgtgtaacaacagcataagaatttctttgttgtaaatttaccttttcaattgtctttgcatcagctccttgcagccgcaaccagtctataagctctttatctgttctctgcccgtaggggcctgctgggttctctgtaatacctgtaacgattggcaatttgttatatattagtctaaccataaaactcttcaaaagtaaccagttggattaataaatgattccagaatgtaaatgtgatgtgaaaaagagatga

SEQ ID NO: 70973 - DNA, 3474 bp, Homo sapiens
tattacgactctgtcacgccgcggtgcgactgaggcgtggcgtctgctggggcacctgaaggagacttgggggcacccgcgtcgtgcctcctgggttgtgaggagtcgccgctgccgccactgcctgtgcttcatgaggaagatgctcgccgccgtctcccgcgtgctgtctggcgcttctcagaagccgagacatggtcttgctacgttgcccagtctggtctccatctccaggctcaagcagtcctcccacctcggcctcccaaagtgctgggattactctcactctcttaaaaccaggcaggcaagcagagtgctggtagcatcccgtaattttgcaaatgatgctacatttgaaattaagaaatgtgaccttcaccggctggaagaaggccctcctgtcacaacagtgctcaccagggaggatgggctcaaatactacaggatgatgcagactgtacgccgaatggagttgaaagcagatcagctgtataaacagaaaattattcgtggtttctgtcacttgtgtgatggtcaggaagcttgctgtgtgggcctggaggccggcatcaaccccacagaccatctcatcacagcctaccgggctcacggctttactttcacccggggcctttccgtccgagaaattctcgcagagcttacaggacgaaaaggaggttgtgctaaagggaaaggaggatcgatgcacatgtatgccaagaacttctacgggggcaatggcatcgtgggagcgcaggtgcccctgggcgctgggattgctctagcctgtaagtataatggaaaagatgaggtctgcctgactttatatggcgatggtgctgctaaccagggccagatattcgaagcttacaacatggcagctttgtggaaattaccttgtattttcatctgtgagaataatcgctatggaatgggaacgtctgttgagagagcggcagccagcactgattactacaagagaggcgatttcattcctgggctgagagtggatggaatggatatcctgtgcgtccgagaggcaacaaggtttgctgctgcctattgtagatctgggaaggggcccatcctgatggagctgcagacttaccgttaccacggacacagtatgagtgaccctggagtcagttaccgtacacgagaagaaattcaggaagtaagaagtaagagtgaccctattatgcttctcaaggacaggatggtgaacagcaatcttgccagtgtggaagaactaaaggaaattgatgtggaagtgaggaaggagattgaggatgctgcccagtttgccacggccgatcctgagccacctttggaagagctgggctaccacatctactccagcgacccaccttttgaagttcgtggtgccaatcagtggatcaagtttaagtcagtcagttaaggggaggagaaggagaggttataccttcagggggctaccagacagtgttctcaacttggttaaggaggaagaaaacccagtcaatgaaattcaatgaaattcttggaaacttccattaagtgtgtagattgagcaggtagtaattgcatgcagtttgtacattagtgcattaaaagatgaattattgagtgcttaaagattatttttgacttaaaatagtatactttgaacaaatactctaattatgaaaaggaagaacaattccttgtatgcctgtttcccctgcccccagccacctttttgggaggagaccattatggcggggcccctcacagcattctaccaaccatagcacccaccccgagcagcgctggtgctgcagcctgttcgcgctgaccatttctctacaagatacaatatttattatcaggcaagaggacagttccattttaaaataagacttttgtaatcattccaattttgtaatcatttcaaaggccacataacttagttttctctacttacacattcagtataaatatgaagctattttctgttcatatcaaacattaactacaaggcacattcgtatcagttttgtgtttctcaaattgaagtaccataccagttctgaggcagtgtcccagcttccatgtttgttaaataccccttgtttgtttcaccattccagcaagtgctgaagggtgtactttttttgagacagggtcgggctctgttgcccaggctggagtgcagtggtgtgatcatggctcactgcagcctccacacctcctgggctcaagcaatcctcccacctcagcctcctgcatagctgggactacaagtgaatttcctaatattccgggaggtcaaaaccaaggctcactgttttcacaatacacacagttctatgtttataaataacaggtttcaaaagaaactcaggacagtatttaaaacaagttcttaaactattaattgaacaatggcatttttaaatatgtaaacacagcggaattcgtgtatacactaacagaagctttaacaaaacatgtagcgtggtgggacactctgccacagcttagctgattggtatcaagccttgtctttggtttctgaggcctcctgagcccttctgtactgggagaccgcactccagagtctgcagaggagaccacccctggggaaacaaacacagctgtcttcagagtcagtgcttcaagccaacagagcttaaaactgcagtccctaatttaaaaacctaatgaaaataaaaacattctcctcacatatggaggtgacgctcgtgtcccagcagtagtaggacatggccttagaggtacgtacctgcagagagctggctatttcaaatgactcgggaacaagaaggcaggctgcagtttaaagaagggggtgggtccagcgtgcaggcacgcttgccatgtgcctccacccactcccagccaggcattaatggcaggagattggccagctcttctctgtcacattcctatttctgacttctgcctggctttcagtttctgccccaccttggctttttcccagcttgaacctaatagaactccagagtttggggggaggcccagccctttgttttctgctcttgaagcatattcacacataaaaagttgtattctcttatacaaactgttttgaggctcttaccgtagtcgaaggtatcttagatcttccttagtgatctcattaagaatatccgaaagtgtataaccctcttcaacaatctgaaacaaagatcagatccttaagagctgagcagctgtgtaacaacagcataagaatttctttgttgtaaatttaccttttcaattgtctttgcatcagctccttgcagccgcaaccagtctataagctctttatctgttctctgcccgtaggggcctgctgggttctctgtaatacctgtaacgattggcaatttgttatatattagtctaaccataaaactcttcaaaagtaaccagttggattaataaatgattccagaatgtaaatgtgatgtgaaaaagagatga

SEQ ID NO: 70974 - DNA, 3312 bp, Homo sapiens
tattacgactctgtcacgccgcggtgcgactgaggcgtggcgtctgctggggcacctgaaggagacttgggggcacccgcgtcgtgcctcctgggttgtgaggagtcgccgctgccgccactgcctgtgcttcatgaggaagatgctcgccgccgtctcccgcgtgctgtctggcgcttctcagaagccggcaagcagagtgctggtagcatcccgtaattttgcaaatgatgctacatttgaaattaagaaatgtgaccttcaccggctggaagaaggccctcctgtcacaacagtgctcaccagggaggatgggctcaaatactacaggatgatgcagactgtacgccgaatggagttgaaagcagatcagctgtataaacagaaaattattcgtggtttctgtcacttgtgtgatggtcaggaagcttgctgtgtgggcctggaggccggcatcaaccccacagaccatctcatcacagcctaccgggctcacggctttactttcacccggggcctttccgtccgagaaattctcgcagagcttacaggacgaaaaggaggttgtgctaaagggaaaggaggatcgatgcacatgtatgccaagaacttctacgggggcaatggcatcgtgggagcgcaggtgcccctgggcgctgggattgctctagcctgtaagtataatggaggccagatattcgaagcttacaacatggcagctttgtggaaattaccttgtattttcatctgtgagaataatcgctatggaatgggaacgtctgttgagagagcggcagccagcactgattactacaagagaggcgatttcattcctgggctgagagtggatggaatggatatcctgtgcgtccgagaggcaacaaggtttgctgctgcctattgtagatctgggaaggggcccatcctgatggagctgcagacttaccgttaccacggacacagtatgagtgaccctggagtcagttaccgtacacgagaagaaattcaggaagtaagaagtaagagtgaccctattatgcttctcaaggacaggatggtgaacagcaatcttgccagtgtggaagaactaaaggaaattgatgtggaagtgaggaaggagattgaggatgctgcccagtttgccacggccgatcctgagccacctttggaagagctgggctaccacatctactccagcgacccaccttttgaagttcgtggtgccaatcagtggatcaagtttaagtcagtcagttaaggggaggagaaggagaggttataccttcagggggctaccagacagtgttctcaacttggttaaggaggaagaaaacccagtcaatgaaattcaatgaaattcttggaaacttccattaagtgtgtagattgagcaggtagtaattgcatgcagtttgtacattagtgcattaaaagatgaattattgagtgcttaaagattatttttgacttaaaatagtatactttgaacaaatactctaattatgaaaaggaagaacaattccttgtatgcctgtttcccctgcccccagccacctttttgggaggagaccattatggcggggcccctcacagcattctaccaaccatagcacccaccccgagcagcgctggtgctgcagcctgttcgcgctgaccatttctctacaagatacaatatttattatcaggcaagaggacagttccattttaaaataagacttttgtaatcattccaattttgtaatcatttcaaaggccacataacttagttttctctacttacacattcagtataaatatgaagctattttctgttcatatcaaacattaactacaaggcacattcgtatcagttttgtgtttctcaaattgaagtaccataccagttctgaggcagtgtcccagcttccatgtttgttaaataccccttgtttgtttcaccattccagcaagtgctgaagggtgtactttttttgagacagggtcgggctctgttgcccaggctggagtgcagtggtgtgatcatggctcactgcagcctccacacctcctgggctcaagcaatcctcccacctcagcctcctgcatagctgggactacaagtgaatttcctaatattccgggaggtcaaaaccaaggctcactgttttcacaatacacacagttctatgtttataaataacaggtttcaaaagaaactcaggacagtatttaaaacaagttcttaaactattaattgaacaatggcatttttaaatatgtaaacacagcggaattcgtgtatacactaacagaagctttaacaaaacatgtagcgtggtgggacactctgccacagcttagctgattggtatcaagccttgtctttggtttctgaggcctcctgagcccttctgtactgggagaccgcactccagagtctgcagaggagaccacccctggggaaacaaacacagctgtcttcagagtcagtgcttcaagccaacagagcttaaaactgcagtccctaatttaaaaacctaatgaaaataaaaacattctcctcacatatggaggtgacgctcgtgtcccagcagtagtaggacatggccttagaggtacgtacctgcagagagctggctatttcaaatgactcgggaacaagaaggcaggctgcagtttaaagaagggggtgggtccagcgtgcaggcacgcttgccatgtgcctccacccactcccagccaggcattaatggcaggagattggccagctcttctctgtcacattcctatttctgacttctgcctggctttcagtttctgccccaccttggctttttcccagcttgaacctaatagaactccagagtttggggggaggcccagccctttgttttctgctcttgaagcatattcacacataaaaagttgtattctcttatacaaactgttttgaggctcttaccgtagtcgaaggtatcttagatcttccttagtgatctcattaagaatatccgaaagtgtataaccctcttcaacaatctgaaacaaagatcagatccttaagagctgagcagctgtgtaacaacagcataagaatttctttgttgtaaatttaccttttcaattgtctttgcatcagctccttgcagccgcaaccagtctataagctctttatctgttctctgcccgtaggggcctgctgggttctctgtaatacctgtaacgattggcaatttgttatatattagtctaaccataaaactcttcaaaagtaaccagttggattaataaatgattccagaatgtaaatgtgatgtgaaaaagagatga

SEQ ID NO: 70975 - DNA, 1501 bp, Homo sapiens
  misc_feature (1236)..(1236): n is a, c, g, or t
tattacgactctgtcacgccgcggtgcgactgaggcgtggcgtctgctggggcacctgaaggagacttgggggcacccgcgtcgtgcctcctgggttgtgaggagtcgccgctgccgccactgcctgtgcttcatgaggaagatgctcgccgccgtctcccgcgtgctgtctggcgcttctcagaagccggcaagcagagtgctggtagcatcccgtaattttgcaaatgatgctacatttgaaattaagaaatgtgaccttcaccggctggaagaaggccctcctgtcacaacagtgctcaccagggaggatgggctcaaatactacaggatgatgcagactgtacgccgaatggagttgaaagcagatcagctgtataaacagaaaattattcgtggtttctgtcacttgtgtgatggtcaggaagcttgctgtgtgggcctggaggccggcatcaaccccacagaccatctcatcacagcctaccgggctcacggctttactttcacccggggcctttccgtccgagaaattctcgcagagcttacaggacgaaaaggaggttgtgctaaagggaaaggaggatcgatgcacatgtatgccaagaacttctacgggggcaatggcatcgtgggagcgcaggtgcccctgggcgctgggattgctctagcctgtaagtataatggaaaagatgaggtctgcctgactttatatggcgatggtgctgctaaccagggccagatattcgaagcttacaacatggcagctttgtggaaattaccttgtattttcatctgtgagaataatcgctatggaatgggaacgtctgttgagagagcggcagccagcactgattactacaagagaggcgatttcattcctgggctgagagtggatggaatggatatcctgtgcgtccgagaggcaacaaggtttgctgctgcctattgtagatctgggaaggggcccatcctgatggagctgcagacttaccgttaccacggacacagtatgagtgaccctggagtcagttaccgtacacgagaagaaattcaggaagtaagaagtaagagtgaccctattatgcttctcaaggacaggatggtgaacagcaatcttgccagtgtggaagaactaaagaatttgatgtggaagtgaggaggagatggggatgtgccagttggcagggcggtctgagacacctgggcacgaccgggctaccccatttattccgnggaaccactcttgagtctcggtggcaccaggggccaacttaaaccaccatcaggggggaaggcgggagtacaccccgcggcgacaccaaggttccatgggtcgggagaaacacgtggaaacagaatggcgaccttcggtggggcgaacatgacaggcaagcttcactatcgtaaaacagcacttggcggagagagagtcttcattcatcacggagtacttcaacacatatttcgacgtgttttcgctcgtctctcccacttctgg

SEQ ID NO: 70976 - DNA, 3301 bp, Homo sapiens
tattacgactctgtcacgccgcggtgcgactgaggcgtggcgtctgctggggcacctgaaggagacttgggggcacccgcgtcgtgcctcctgggttgtgaggagtcgccgctgccgccactgcctgtgcttcatgaggaagatgctcgccgccgtctcccgcgtgctgtctggcgcttctcagaagccggcaagcagagtgctggtagcatcccgtaattttgcaaatgatgctacatttgaaattaagaaatgtgaccttcaccggctggaagaaggccctcctgtcacaacagtgctcaccagggaggatgggctcaaatactacaggatgatgcagactgtacgccgaatggagttgaaagcagatcagctgtataaacagaaaattattcgtggtttctgtcacttgtgtgatggtcaggaagcttgctgtgtgggcctggaggccggcatcaaccccacagaccatctcatcacagcctaccgggctcacggctttactttcacccggggcctttccgtccgagaaattctcgcagagcttacagttctacgggggcaatggcatcgtgggagcgcaggtgcccctgggcgctgggattgctctagcctgtaagtataatggaaaagatgaggtctgcctgactttatatggcgatggtgctgctaaccagggccagatattcgaagcttacaacatggcagctttgtggaaattaccttgtattttcatctgtgagaataatcgctatggaatgggaacgtctgttgagagagcggcagccagcactgattactacaagagaggcgatttcattcctgggctgagagtggatggaatggatatcctgtgcgtccgagaggcaacaaggtttgctgctgcctattgtagatctgggaaggggcccatcctgatggagctgcagacttaccgttaccacggacacagtatgagtgaccctggagtcagttaccgtacacgagaagaaattcaggaagtaagaagtaagagtgaccctattatgcttctcaaggacaggatggtgaacagcaatcttgccagtgtggaagaactaaaggaaattgatgtggaagtgaggaaggagattgaggatgctgcccagtttgccacggccgatcctgagccacctttggaagagctgggctaccacatctactccagcgacccaccttttgaagttcgtggtgccaatcagtggatcaagtttaagtcagtcagttaaggggaggagaaggagaggttataccttcagggggctaccagacagtgttctcaacttggttaaggaggaagaaaacccagtcaatgaaattcaatgaaattcttggaaacttccattaagtgtgtagattgagcaggtagtaattgcatgcagtttgtacattagtgcattaaaagatgaattattgagtgcttaaagattatttttgacttaaaatagtatactttgaacaaatactctaattatgaaaaggaagaacaattccttgtatgcctgtttcccctgcccccagccacctttttgggaggagaccattatggcggggcccctcacagcattctaccaaccatagcacccaccccgagcagcgctggtgctgcagcctgttcgcgctgaccatttctctacaagatacaatatttattatcaggcaagaggacagttccattttaaaataagacttttgtaatcattccaattttgtaatcatttcaaaggccacataacttagttttctctacttacacattcagtataaatatgaagctattttctgttcatatcaaacattaactacaaggcacattcgtatcagttttgtgtttctcaaattgaagtaccataccagttctgaggcagtgtcccagcttccatgtttgttaaataccccttgtttgtttcaccattccagcaagtgctgaagggtgtactttttttgagacagggtcgggctctgttgcccaggctggagtgcagtggtgtgatcatggctcactgcagcctccacacctcctgggctcaagcaatcctcccacctcagcctcctgcatagctgggactacaagtgaatttcctaatattccgggaggtcaaaaccaaggctcactgttttcacaatacacacagttctatgtttataaataacaggtttcaaaagaaactcaggacagtatttaaaacaagttcttaaactattaattgaacaatggcatttttaaatatgtaaacacagcggaattcgtgtatacactaacagaagctttaacaaaacatgtagcgtggtgggacactctgccacagcttagctgattggtatcaagccttgtctttggtttctgaggcctcctgagcccttctgtactgggagaccgcactccagagtctgcagaggagaccacccctggggaaacaaacacagctgtcttcagagtcagtgcttcaagccaacagagcttaaaactgcagtccctaatttaaaaacctaatgaaaataaaaacattctcctcacatatggaggtgacgctcgtgtcccagcagtagtaggacatggccttagaggtacgtacctgcagagagctggctatttcaaatgactcgggaacaagaaggcaggctgcagtttaaagaagggggtgggtccagcgtgcaggcacgcttgccatgtgcctccacccactcccagccaggcattaatggcaggagattggccagctcttctctgtcacattcctatttctgacttctgcctggctttcagtttctgccccaccttggctttttcccagcttgaacctaatagaactccagagtttggggggaggcccagccctttgttttctgctcttgaagcatattcacacataaaaagttgtattctcttatacaaactgttttgaggctcttaccgtagtcgaaggtatcttagatcttccttagtgatctcattaagaatatccgaaagtgtataaccctcttcaacaatctgaaacaaagatcagatccttaagagctgagcagctgtgtaacaacagcataagaatttctttgttgtaaatttaccttttcaattgtctttgcatcagctccttgcagccgcaaccagtctataagctctttatctgttctctgcccgtaggggcctgctgggttctctgtaatacctgtaacgattggcaatttgttatatattagtctaaccataaaactcttcaaaagtaaccagttggattaataaatgattccagaatgtaaatgtgatgtgaaaaagagatga

SEQ ID NO: 70977 - DNA, 3279 bp, Homo sapiens
ttcaccctccttaggcaactggtggtcccccgctctcgggaggtcaccatattgatgccgaacttagtgcggacacccgatcggcatagcgcactacagcccagaaccccgggttcaagcaattctcctgcctcagcctcccgagtagctgggaatatagttacgtgccaccatgcccaaccattttttgtatttttagtagagacggggtttcaccatcttgtccaggatggtctcgatctgtggacctcgtgatctgcccaaagtgctgggattacaggcgtgagccaccacgcccggccaggttttattttttaactcttgaatgcagaaatgttagtgcttactggttaaaatagaacatagtatttatatattactttagtgctttattgaaaatatcggaggtgggataaacagagagatagggttggaaggagagtttgtagcagcagtgtaatttctgtgtcagattctggccaggagtgaaaatgcagggcattaattagtatctcccctcatggatttctgtggttcctttctcggttgtccttaatgttaggtgcccctgggcgctgggattgctctagcctgtaagtataatggaaaagatgaggtctgcctgactttatatggcgatggtgctgctaaccagggccagatattcgaagcttacaacatggcagctttgtggaaattaccttgtattttcatctgtgagaataatcgctatggaatgggaacgtctgttgagagagcggcagccagcactgattactacaagagaggcgatttcattcctgggctgagagtggatggaatggatatcctgtgcgtccgagaggcaacaaggtttgctgctgcctattgtagatctgggaaggggcccatcctgatggagctgcagacttaccgttaccacggacacagtatgagtgaccctggagtcagttaccgtacacgagaagaaattcaggaagtaagaagtaagagtgaccctattatgcttctcaaggacaggatggtgaacagcaatcttgccagtgtggaagaactaaaggaaattgatgtggaagtgaggaaggagattgaggatgctgcccagtttgccacggccgatcctgagccacctttggaagagctgggctaccacatctactccagcgacccaccttttgaagttcgtggtgccaatcagtggatcaagtttaagtcagtcagttaaggggaggagaaggagaggttataccttcagggggctaccagacagtgttctcaacttggttaaggaggaagaaaacccagtcaatgaaattcaatgaaattcttggaaacttccattaagtgtgtagattgagcaggtagtaattgcatgcagtttgtacattagtgcattaaaagatgaattattgagtgcttaaagattatttttgacttaaaatagtatactttgaacaaatactctaattatgaaaaggaagaacaattccttgtatgcctgtttcccctgcccccagccacctttttgggaggagaccattatggcggggcccctcacagcattctaccaaccatagcacccaccccgagcagcgctggtgctgcagcctgttcgcgctgaccatttctctacaagatacaatatttattatcaggcaagaggacagttccattttaaaataagacttttgtaatcattccaattttgtaatcatttcaaaggccacataacttagttttctctacttacacattcagtataaatatgaagctattttctgttcatatcaaacattaactacaaggcacattcgtatcagttttgtgtttctcaaattgaagtaccataccagttctgaggcagtgtcccagcttccatgtttgttaaataccccttgtttgtttcaccattccagcaagtgctgaagggtgtactttttttgagacagggtcgggctctgttgcccaggctggagtgcagtggtgtgatcatggctcactgcagcctccacacctcctgggctcaagcaatcctcccacctcagcctcctgcatagctgggactacaagtgaatttcctaatattccgggaggtcaaaaccaaggctcactgttttcacaatacacacagttctatgtttataaataacaggtttcaaaagaaactcaggacagtatttaaaacaagttcttaaactattaattgaacaatggcatttttaaatatgtaaacacagcggaattcgtgtatacactaacagaagctttaacaaaacatgtagcgtggtgggacactctgccacagcttagctgattggtatcaagccttgtctttggtttctgaggcctcctgagcccttctgtactgggagaccgcactccagagtctgcagaggagaccacccctggggaaacaaacacagctgtcttcagagtcagtgcttcaagccaacagagcttaaaactgcagtccctaatttaaaaacctaatgaaaataaaaacattctcctcacatatggaggtgacgctcgtgtcccagcagtagtaggacatggccttagaggtacgtacctgcagagagctggctatttcaaatgactcgggaacaagaaggcaggctgcagtttaaagaagggggtgggtccagcgtgcaggcacgcttgccatgtgcctccacccactcccagccaggcattaatggcaggagattggccagctcttctctgtcacattcctatttctgacttctgcctggctttcagtttctgccccaccttggctttttcccagcttgaacctaatagaactccagagtttggggggaggcccagccctttgttttctgctcttgaagcatattcacacataaaaagttgtattctcttatacaaactgttttgaggctcttaccgtagtcgaaggtatcttagatcttccttagtgatctcattaagaatatccgaaagtgtataaccctcttcaacaatctgaaacaaagatcagatccttaagagctgagcagctgtgtaacaacagcataagaatttctttgttgtaaatttaccttttcaattgtctttgcatcagctccttgcagccgcaaccagtctataagctctttatctgttctctgcccgtaggggcctgctgggttctctgtaatacctgtaacgattggcaatttgttatatattagtctaaccataaaactcttcaaaagtaaccagttggattaataaatgattccagaatgtaaatgtgatgtgaaaaagagatga

SEQ ID NO: 70978 - DNA, 2271 bp, Homo sapiens
tctagaggatctcccaaacaccgcaatcttgccagtgtggaatgaactaaaggaaattgatgtggaagtgaggaaggagattgaggatgctgcccagtttgccacggccgatcctgagccacctttggaagagctgggctaccacatctactccagcgacccaccttttgaagttcgtggtgccaatcagtggatcaagtttaagtcagtcagttaaggggaggagaaggagaggttataccttcagggggctaccagacagtgttctcaacttggttaaggaggaagaaaacccagtcaatgaaattcaatgaaattcttggaaacttccattaagtgtgtagattgagcaggtagtaattgcatgcagtttgtacattagtgcattaaaagatgaattattgagtgcttaaagattatttttgacttaaaatagtatactttgaacaaatactctaattatgaaaaggaagaacaattccttgtatgcctgtttcccctgcccccagccacctttttgggaggagaccattatggcggggcccctcacagcattctaccaaccatagcacccaccccgagcagcgctggtgctgcagcctgttcgcgctgaccatttctctacaagatacaatatttattatcaggcaagaggacagttccattttaaaataagacttttgtaatcattccaattttgtaatcatttcaaaggccacataacttagttttctctacttacacattcagtataaatatgaagctattttctgttcatatcaaacattaactacaaggcacattcgtatcagttttgtgtttctcaaattgaagtaccataccagttctgaggcagtgtcccagcttccatgtttgttaaataccccttgtttgtttcaccattccagcaagtgctgaagggtgtactttttttgagacagggtcgggctctgttgcccaggctggagtgcagtggtgtgatcatggctcactgcagcctccacacctcctgggctcaagcaatcctcccacctcagcctcctgcatagctgggactacaagtgaatttcctaatattccgggaggtcaaaaccaaggctcactgttttcacaatacacacagttctatgtttataaataacaggtttcaaaagaaactcaggacagtatttaaaacaagttcttaaactattaattgaacaatggcatttttaaatatgtaaacacagcggaattcgtgtatacactaacagaagctttaacaaaacatgtagcgtggtgggacactctgccacagcttagctgattggtatcaagccttgtctttggtttctgaggcctcctgagcccttctgtactgggagaccgcactccagagtctgcagaggagaccacccctggggaaacaaacacagctgtcttcagagtcagtgcttcaagccaacagagcttaaaactgcagtccctaatttaaaaacctaatgaaaataaaaacattctcctcacatatggaggtgacgctcgtgtcccagcagtagtaggacatggccttagaggtacgtacctgcagagagctggctatttcaaatgactcgggaacaagaaggcaggctgcagtttaaagaagggggtgggtccagcgtgcaggcacgcttgccatgtgcctccacccactcccagccaggcattaatggcaggagattggccagctcttctctgtcacattcctatttctgacttctgcctggctttcagtttctgccccaccttggctttttcccagcttgaacctaatagaactccagagtttggggggaggcccagccctttgttttctgctcttgaagcatattcacacataaaaagttgtattctcttatacaaactgttttgaggctcttaccgtagtcgaaggtatcttagatcttccttagtgatctcattaagaatatccgaaagtgtataaccctcttcaacaatctgaaacaaagatcagatccttaagagctgagcagctgtgtaacaacagcataagaatttctttgttgtaaatttaccttttcaattgtctttgcatcagctccttgcagccgcaaccagtctataagctctttatctgttctctgcccgtaggggcctgctgggttctctgtaatacctgtaacgattggcaatttgttatatattagtctaaccataaaactcttcaaaagtaaccagttggattaataaatgattccagaatgtaaatgtgatgtgaaaaagagatga

SEQ ID NO: 70979 - DNA, 2309 bp, Homo sapiens
  misc_feature (72)..(72): n is a, c, g, or t
tactggggccttatttatacatatattatatatgttattacagggctgaccctcggaagcagcaatcttgcnagtgtggaagaactaaaggaaattgatgtggaagtgaggaaggagattgaggatgctgcccagtttgccacggccgatcctgagccacctttggaagagctgggctaccacatctactccagcgacccaccttttgaagttcgtggtgccaatcagtggatcaagtttaagtcagtcagttaaggggaggagaaggagaggttataccttcagggggctaccagacagtgttctcaacttggttaaggaggaagaaaacccagtcaatgaaattcaatgaaattcttggaaacttccattaagtgtgtagattgagcaggtagtaattgcatgcagtttgtacattagtgcattaaaagatgaattattgagtgcttaaagattatttttgacttaaaatagtatactttgaacaaatactctaattatgaaaaggaagaacaattccttgtatgcctgtttcccctgcccccagccacctttttgggaggagaccattatggcggggcccctcacagcattctaccaaccatagcacccaccccgagcagcgctggtgctgcagcctgttcgcgctgaccatttctctacaagatacaatatttattatcaggcaagaggacagttccattttaaaataagacttttgtaatcattccaattttgtaatcatttcaaaggccacataacttagttttctctacttacacattcagtataaatatgaagctattttctgttcatatcaaacattaactacaaggcacattcgtatcagttttgtgtttctcaaattgaagtaccataccagttctgaggcagtgtcccagcttccatgtttgttaaataccccttgtttgtttcaccattccagcaagtgctgaagggtgtactttttttgagacagggtcgggctctgttgcccaggctggagtgcagtggtgtgatcatggctcactgcagcctccacacctcctgggctcaagcaatcctcccacctcagcctcctgcatagctgggactacaagtgaatttcctaatattccgggaggtcaaaaccaaggctcactgttttcacaatacacacagttctatgtttataaataacaggtttcaaaagaaactcaggacagtatttaaaacaagttcttaaactattaattgaacaatggcatttttaaatatgtaaacacagcggaattcgtgtatacactaacagaagctttaacaaaacatgtagcgtggtgggacactctgccacagcttagctgattggtatcaagccttgtctttggtttctgaggcctcctgagcccttctgtactgggagaccgcactccagagtctgcagaggagaccacccctggggaaacaaacacagctgtcttcagagtcagtgcttcaagccaacagagcttaaaactgcagtccctaatttaaaaacctaatgaaaataaaaacattctcctcacatatggaggtgacgctcgtgtcccagcagtagtaggacatggccttagaggtacgtacctgcagagagctggctatttcaaatgactcgggaacaagaaggcaggctgcagtttaaagaagggggtgggtccagcgtgcaggcacgcttgccatgtgcctccacccactcccagccaggcattaatggcaggagattggccagctcttctctgtcacattcctatttctgacttctgcctggctttcagtttctgccccaccttggctttttcccagcttgaacctaatagaactccagagtttggggggaggcccagccctttgttttctgctcttgaagcatattcacacataaaaagttgtattctcttatacaaactgttttgaggctcttaccgtagtcgaaggtatcttagatcttccttagtgatctcattaagaatatccgaaagtgtataaccctcttcaacaatctgaaacaaagatcagatccttaagagctgagcagctgtgtaacaacagcataagaatttctttgttgtaaatttaccttttcaattgtctttgcatcagctccttgcagccgcaaccagtctataagctctttatctgttctctgcccgtaggggcctgctgggttctctgtaatacctgtaacgattggcaatttgttatatattagtctaaccataaaactcttcaaaagtaaccagttggattaataaatgattccagaatgtaaatgtgatgtgaaaaagagatga

SEQ ID NO: 70980 - DNA, 449 bp, Homo sapiens
tattacgactctgtcacgccgcggtgcgactgaggcgtggcgtctgctggggcacctgaaggagacttgggggcacccgcgtcgtgcctcctgggttgtgaggagtcgccgctgccgccactgcctgtgcttcatgaggaagatgctcgccgccgtctcccgcgtgctgtctggcgcttctcagaagccggcaagcagagtgctggtagcatcccgtaattttgcaaatgatgctacatttgaaattaagaaatgtgaccttcaccggctggaagaaggccctcctgtcacaacagtgctcaccagggaggatgggctcaaatactacaggatgatgcagactgtacgccgaatggagttgaaagcagatcagctgtataaaggtgtggtggtgcatgcctgtaatcccagctacttgggtggctgaggcacaaggaggctcacagtgc

SEQ ID NO: 70981 - DNA, 675 bp, Homo sapiens
agtatttagtgcttgacaaagtagtgtcactcttaagatgtcaaagggaattagccattttttttattgtaataaaggcaggtgctatttttttctggtgagattgcacctggataccaggcttttgtaatagttaacattaaacatttgattcataaagttaattcactgcttaagcatgtggctcatatttaggaagctatataaaattcagtttttcatttaacatttgctcttttgcatatgaagagatatttgtatttttcaaatgttaagtaaaacaagatgtgccaatatcataggtaaataaattagggaaaatgtgggactttatggctgtttttaatttagtttcacccgatcttgattcttgaattagctatgtttatatttttagttcttttttattcaactcagatttgtcaagaaatgtaacctctaaattgtgtagtacctctccaatcataaattttcaaaaaaaaaattctactttccaaaaagtgtcttgaattctctgaaaaggcacattaaactaatatgaacatcagataccagggggaaataaatggcaaagtaataatcatgaggttttaggtcaaagactacattatatatattttttattaccttctagtagagacatcctcctgggtgcatttcagtggccttctccag

SEQ ID NO: 70982 - DNA, 564 bp, Homo sapiens
tttttttttgtagagaaggggcttgctatgttgccagggctagtcccaagctcctggacttcaaacagtcttccttcctttgcctgccaaagtgctgggattacaggtgtgaactaccttacctaaactcttctaaattagtctttttagtgtactatccacttcctgctgagactctgactgatttaagggataatcttgactctgctttatttatatcaaaaaatccacaaatgttactattttattattaatatgttaattgcagtatacttcacagctgatggagacatactagtagtattatgacaaatacaggtgaaacatactagatttgtctcaatctcacatttaaaataagttaatatttttaaaaagctctcaaggctggatggtacagagagaagaatatccctccagcagttggagaccccaagtcttctctttgccctgcccctgaccctgtttgtgtcttctctcttcattattgccaatgatcaggctggacctggtggtctgtcctacaaatctctctgccgccaatatttgataataattccaaga

SEQ ID NO: 70983 - DNA, 354 bp, Homo sapiens
  misc_feature (58)..(58): n is a, c, g, or t
tcaacatttagaagtgtgcctttgacaatggtgaagatgaaagaggacttctacatgntacataaaactaaaatctcagggagctcctctaatcaatgctctaggacaagtacccatttgatgcaatagattaatgcaaaatactttctttcaagggtaaatattatagtgggtcaaactacttcaatcccactttagaaaattaattatgtgaccagaaaattccttgctatcttaatcttgattttcaaggattattttgggattgtgataatttgtcaacgtttattcaaaagatgcagtacaaccagcatattcaagtaaatttaaattaaaaggatactataaagaaag

SEQ ID NO: 70984 - DNA, 401 bp, Homo sapiens
ggcctccatgcagcctcttcacctctcccctagcccaggacatgcttccctgacagcagctctccaaccaccattgtggcttttacttatggctccacgagtattagtacccatgatgagtggacactgcgacagtgctaaggtctccttgtagaggggacacagagtactagacagacaattacattagagggtggcaagggttacagcagtgacccaggctgcagccagcccaaaccacttcgtgagagccaacactatgcacttctcctcaactctgtggtcagtgacgtcaacttcatagatggaaaccagccatgggggcagtatttacaccacggaaatcagcaaactgcaaaccagggcttttttccccgttctgcaagttgttaaatgtttcc

SEQ ID NO: 70985 - DNA, 860 bp, Homo sapiens
aagaggtaggtatatataaaatggcttaaaagagaaagtagcaaaaataagtaattgttttgggggtgtggtaattaattggattttgctggcattcaactttgcttttccccctaataactaatcacttgggtaattttagtctttgtttagatgattcattaaagtaggtattacacgagctcaaaatggggcaagctctatgttgtcccttacagtgcatttttctacttggaagaaattagtgtaggagtcttcatgagatttgttttacatttccctgtctacctgttatgccatttttcacaatgagcaattcttggttcttgtcacataaattgtaaagattaagtcaggacttagtagttttctaccaaaagataaaattgggcaagatattaaaaatctgtgcttactatgcctcagatttgatttttgacattttgtggacattgttaagttttttaagcatcattttaaaagaaccacttagagtaatgacattttcattaacaataggaaaacatgtgaagacagtataattatctgctgatactcaataccttaaggtttttattatgtttcttcacatttttctttagagtctagatttcagcagcataaactgaaacattctgcttctgtcttagaaagtttatcatttaaatttatttttttaactcgtagaaagataatacatggggccaacagagtatttaacagtcttaatctaaatatgttggaaagatgaggatatttcttatactgtaagaattatttcccttttaatttagatatattcattattcaattaatttaaactaataaaataattttattatatgtgtgacttgataaaa

SEQ ID NO: 70986 - DNA, 415 bp, Homo sapiens
attcctgtacgcgtcgacgtctggatcttgaagcctgaacctgtttaatgtggcaggatatttaataagtatcctgctttattgctacaagagtttcagatagtttacatatatgaataaattgctgggcgtggtggctcacgcctgtaatcccagcaccttgggaggccgaggtgggcggatcacttgaggtcaggagttcgagaccagcctgaccaacgtggagaaaccccgtctctactaaaaacagaaaaaaaattagccaggcatggtggcgcatgcctgcaatcccggctactcgggaggctgaggcaggagaattgcttgaacctgggaggcggaggttgcggtgagccggaattgcgccattgcactccagcctcggcaacaaaagcaaaactccgtctcaaaaaaa

SEQ ID NO: 70987 - DNA, 809 bp, Homo sapiens
tgtacacaggcagtgagccaccacgtctggccaaaaaaaatttttttgagacatggtcctgctctgtttctaggctggagtgcaatggtatgatcacagctcactgtagcctcgacttccttgttcaagtgctcctcctgcttcaccctcctgagtagctgggactgcagatgtgcaccaccatgcctggctgattatagtatttttgaaattttcttctgcttccaatattatatctgtttccatccagttcttttcctttctttttttccccccatctgtctttgattttggaggctttcttcaaatttctgatatatgactgcctattcatatttaagggtaaagcactaaaatgctcattgaaagctctttggatggtctagatttgttgactggtagacttccctgtagggtaattgttatctacctggacttttgttggggtacctgaaatggcggtgttttggtaggtgttttttcgagtcatttactttagagaaaaatcctccaagttccttcatggaggatatgagtctagtgccagtgtactgagaacaaattcggggaagggcatatcgttaaggagggaagagacaaaaaacagaggacttggttgaaagtcagtaaaccaagcataataaggtgaagtcttgcttcctgaaacatatttcaggccagttgcagtggctgacacctgtccccagtactttgggaggccgaggagggagaatcacttgagcccagcggttcgagaccagctctggtaacatagggagacttcctctctacaaaaataaaacaagagg

SEQ ID NO: 70988 - DNA, 440 bp, Homo sapiens
ccatgttggccaggccggtctcaaactccggacctcaagtgatccacctcccttagcctcccaaagtgctaggattacaggtgtaagccaccacacccagcctcacgttttgagtttcatccagtcagaatacagacagaataagggtacccacacttttggagtatggacaaaagagagattctctagggattctcctccagtattaaatgtggttattgcccaaaagagcaacatagcactatgcataatgtcaatagatgagatttgtcttcaacaccaaagaggatttggtcctagagatcaaatgtggccccaactaccatgaatgtgtcacaagctccctttagacacactaaatgatacctggcctagaagactctgtaccttccagaatctaggatgacagacagctttcaatctcatcgactagctaaacc

SEQ ID NO: 70989 - DNA, 280 bp, Homo sapiens
tatcgtatctttatggttaaaatactataaaatggtgtgctcctatacatcccctcacaacacagcattcaacaacagcatgctggtagctcaaaaccaatcatgctgatagcatttacaccatggaaataggcaaatgccataaattaaaatttgctttattgttttaattgtctagaccagagactggcaaatctggccaaaaatttggcccaaaaagccaaatcctgtctcagagaattaagaattttttttttttttacgtttttaaaggttattt

SEQ ID NO: 70990 - DNA, 473 bp, Homo sapiens
ttaaaagaagtcaaaagttacaggaatcaaagccaaagtccctccagaagctaacatagtaataaaaccatcagtaattttaatgattgtttacatatagtgcctcctctaggtcaggcactttacttatgatctgttaattcctgtattaacctagtaattatacccaattttataagagcaaatattaaagctcaaggagagattacgtcatttgccagagttcacacagctaacaagtggaaaaacagatttgaacctgttttcctgactccaaagccagcaaagttctttcaactggagccagaaataccctaatgcccatgggtgaccagggtcccttctgggccatgtggtgtggagaatgagtttgaccaccccaaattgtcttgttcctcaagaggatttcccagaccttcaaggaataaagaaattgtaagtatttaaaatatattccttcttctaattgaaaa

SEQ ID NO: 70991 - DNA, 2334 bp, Homo sapiens
gtcctgcgctgccgcggctggtacgacaaggtggtctacaagcttcactactaccacgacggccaggccgtgcgctacttccactccagcgccaactacactgtgttacaggcgcgtgccagcgacagcgggcgctaccagtgctcgggcaccatgcgcatcccggtggagagcgcgcccatgttctccgctaaggtggctgtgacagtgcaaggtgggagagaccaggggccccgggagggaggcaaatgagcattgagaaattctgggacaggagctcggcgagaaaagaaggggcggaagttcaaatagctgccacttggagggtttctcttagactatggacgctgtctcctctcctttgccgtgaagcagcgcttgatccgccgcctgcttggaggctggtccctttccccgacgcacatcctggcttctcactctggctggggactcccacagagagggcagctctggcaggggcaggggccactgtgggactgggacgaaggagcgactccctagcgtcctgcaaggcaggcgcagcgtctcctattctaggctgcagaacccgagctgagtgtcagtcgggatgtgacatgaagcgtctggcctggtccctcttcctttcaagctttccccgtccctcgtggactcggtccccctgccccacatttcagaaggctccccttccccctccacgtggacacacggcctcctcccctccccccttggtctgtgggtctgcaaggagccctcgcgggaagcaggaaggagcggggtcgcggagcggtggacaagccggcgccgttgctccccgccctctccgtagagctgttccgggcgccggtgctgagggtgatgggtccgcgggaggcccgcggcgcggcgctgggtggggtggtgctgcgctgcgacacgcgcctgcacccgcagaagcgcgacacgccgctgcagttcgcgttttacaagtacagccgcgcggtgcgccgcttcgactggggcgccgagtacacagtcccggagcccgaggtcgaggagctcgaatcgtactggtgcgaggcggctaccgccacccgcagtgtccggaaacgcagtccgtggctgcagctcccggggccgggttctcccctggacccggcctccaccaccgccccagctccatgggccgcagccttggctcctggtaataggccgctttccttcagaaagcccccggtgtccagatcggtcccgttggtcacctccgtccggaacaccacctccaccgggctgcagttcccggcgagcggcgccccgactgcggggccacccgcctgcgctccgccgacgcccttggaacaatcggctggagccctgaaacccgacgtggaccttctgctccgagaaatgcagctgctcaaaggccttctgagccgggtggtcctggaattaaaggagccacaggccctccgggagctcaggggaacgcccgagacccccacctctcactttgctgtgagcccgggaaccccagagaccactcctgtggagagctgagggggcggctaccgtcccctctgcaggctcattcctccttggtctcctgcttcccctcacgcgaatttctttcaaagccatctgtttgcatccttgtgttttgctgtggtttttaaaggagcgcccacgaagtgtagtggctgacgatttcaacctcacacagcagtttgtaaccgcaagcattctctttgaattctcacagaattcagcaagaagtagaaacctgttatttactacattgtgatttaactttggatgtgaatttagtcacccttagcccttcagataagcctagccagtacatatttcagcacaggcagtttttttggtatttaagtacattgaggtaactgagcacttgagaatattttagggtcaaagtgtaattattcataatgaatttactctgttgatattaaaaagacgttcagtcctattactgatgagtttacatcttcaaataaatcctgggttctatttagttttggcgagagaaagttgtttgtgtgggcctcccattccctggttaaaagggtcagagtctttgggaggctgaggcggggggggggggggaatcacctgaggtcaggagtccgagaccagcctggccaacatcgcgaaaccccgtctctactgaaaatacaaaaattagctgggcatggtggcaggcgcctgtaatcccagctacttgggaggctgaggcaggagaattgcttgaacctggaaggcggaggttgcagtaagccgagatcgtgccattgcactccagcctgggcaacaagagtgaaactccatctc

SEQ ID NO: 70992 - DNA, 1246 bp, Homo sapiens
gccgcgcgtgactgggcgtaatgcattcacaggttctcccctggacccggcctccaccaccgccccagctccatgggccgcagccttggctcctggtaataggccgctttccttcagaaagcccccggtgtccagatcggtcccgttggtcacctccgtccggaacaccacctccaccgggctgcagttcccggcgagcggcgccccgactgcggggccacccgcctgcgctccgccgacgcccttggaacaatcggctggagccctgaaacccgacgtggaccttctgctccgagaaatgcagctgctcaaaggccttctgagccgggtggtcctggaattaaaggagccacaggccctccgggagctcaggggaacgcccgagacccccacctctcactttgctgtgagcccgggaaccccagagaccactcctgtggagagctgagggggcggctaccgtcccctctgcaggctcattcctccttggtctcctgcttcccctcacgcgaatttctttcaaagccatctgtttgcatccttgtgttttgctgtggtttttaaaggagcgcccacgaagtgtagtggctgacgatttcaacctcacacagcagtttgtaaccgcaagcattctctttgaattctcacagaattcagcaagaagtagaaacctgttatttactacattgtgatttaactttggatgtgaatttagtcacccttagcccttcagataagcctagccagtacatatttcagcacaggcagtttttttggtatttaagtacattgaggtaactgagcacttgagaatattttagggtcaaagtgtaattattcataatgaatttactctgttgatattaaaaagacgttcagtcctattactgatgagtttacatcttcaaataaatcctgggttctatttagttttggcgagagaaagttgtttgtgtgggcctcccattccctggttaaaagggtcagagtctttgggaggctgaggcggggggggggggggaatcacctgaggtcaggagtccgagaccagcctggccaacatcgcgaaaccccgtctctactgaaaatacaaaaattagctgggcatggtggcaggcgcctgtaatcccagctacttgggaggctgaggcaggagaattgcttgaacctggaaggcggaggttgcagtaagccgagatcgtgccattgcactccagcctgggcaacaagagtgaaactccatctc

SEQ ID NO: 70993 - DNA, 1972 bp, Homo sapiens
gtcctgcgctgccgcggctggtacgacaaggtggtctacaagcttcactactaccacgacggccaggccgtgcgctacttccactccagcgccaactacactgtgttacaggcgcgtgccagcgacagcgggcgctaccagtgctcgggcaccatgcgcatcccggtggagagcgcgcccatgttctccgctaaggtggctgtgacagtgcaaggtgggagagaccaggggccccgggagggaggcaaatgagcattgagaaattctgggacaggagctcggcgagaaaagaaggggcggaagttcaaatagctgccacttggagggtttctcttagactatggacgctgtctcctctcctttgccgtgaagcagcgcttgatccgccgcctgcttggaggctggtccctttccccgacgcacatcctggcttctcactctggctggggactcccacagagagggcagctctggcaggggcaggggccactgtgggactgggacgaaggagcgactccctagcgtcctgcaaggcaggcgcagcgtctcctattctaggctgcagaacccgagctgagtgtcagtcgggatgtgacatgaagcgtctggcctggtccctcttcctttcaagctttccccgtccctcgtggactcggtccccctgccccacatttcagaaggctccccttccccctccacgtggacacacggcctcctcccctccccccttggtctgtgggtctgcaaggagccctcgcgggaagcaggaaggagcggggtcgcggagcggtggacaagccggcgccgttgctccccgccctctccgtagagctgttccgggcgccggtgctgagggtgatgggtccgcgggaggcccgcggcgcggcgctgggtggggtggtgctgcgctgcgacacgcgcctgcacccgcagaagcgcgacacgccgctgcagttcgcgttttacaagtacagccgcgcggtgcgccgcttcgactggggcgccgagtacacagtcccggagcccgaggtcgaggagctcgaatcgtactggtgcgaggcggctaccgccacccgcagtgtccggaaacgcagtccgtggctgcagctcccggggccgggttctcccctggacccggcctccaccaccgccccagctccatgggccgcagccttggctcctggtaataggccgctttccttcagaaagcccccggtgtccagatcggtcccgttggtcacctccgtccggaacaccacctccaccgggctgcagttcccggcgagcggcgccccgactgcggggccacccgcctgcgctccgccgacgcccttggaacaatcggctggagccctgaaacccgacgtggaccttctgctccgagaaatgcagctgctcaaaggccttctgagccgggtggtcctggaattaaaggagccacaggccctccgggagctcaggggaacgcccgagacccccacctctcactttgctgtgagcccgggaaccccagagaccactcctgtggagagctgagggggcggctaccgtcccctctgcaggctcattcctccttggtctcctgcttcccctcacgcgaatttctttcaaagccatctgtttgcatccttgtgttttgctgtggtttttaaaggagcgcccacgaagtgtagtggctgacgatttcaacctcacacagcagtttgtaaccgcaagcattctctttgaattctcacagaattcagcaagaagtagaaacctgttatttactacattgtgatttaactttggatgtgaatttagtcacccttagcccttcagataagcctagccagtacatatttcagcacaggcagtttttttggtatttaagtacattgaggtaactgagcacttgagaatattttagggtcaaagtgtaattattcataatgaatttactctgttgatattaaaaagacgttcagtccta

SEQ ID NO: 70994 - DNA, 1719 bp, Homo sapiens
gtcctgcgctgccgcggctggtacgacaaggtggtctacaagcttcactactaccacgacggccaggccgtgcgctacttccactccagcgccaactacactgtgttacaggcgcgtgccagcgacagcgggcgctaccagtgctcgggcaccatgcgcatcccggtggagagcgcgcccatgttctccgctaaggtggctgtgacagtgcaagagctgttccgggcgccggtgctgagggtgatgggtccgcgggaggcccgcggcgcggcgctgggtggggtggtgctgcgctgcgacacgcgcctgcacccgcagaagcgcgacacgccgctgcagttcgcgttttacaagtacagccgcgcggtgcgccgcttcgactggggcgccgagtacacagtcccggagcccgaggtcgaggagctcgaatcgtactggtgcgaggcggctaccgccacccgcagtgtccggaaacgcagtccgtggctgcagctcccggggccgggttctcccctggacccggcctccaccaccgccccagctccatgggccgcagccttggctcctggtaataggccgctttccttcagaaagcccccggtgtccagatcggtcccgttggtcacctccgtccggaacaccacctccaccgggctgcagttcccggcgagcggcgccccgactgcggggccacccgcctgcgctccgccgacgcccttggaacaatcggctggagccctgaaacccgacgtggaccttctgctccgagaaatgcagctgctcaaaggccttctgagccgggtggtcctggaattaaaggagccacaggccctccgggagctcaggggaacgcccgagacccccacctctcactttgctgtgagcccgggaaccccagagaccactcctgtggagagctgagggggcggctaccgtcccctctgcaggctcattcctccttggtctcctgcttcccctcacgcgaatttctttcaaagccatctgtttgcatccttgtgttttgctgtggtttttaaaggagcgcccacgaagtgtagtggctgacgatttcaacctcacacagcagtttgtaaccgcaagcattctctttgaattctcacagaattcagcaagaagtagaaacctgttatttactacattgtgatttaactttggatgtgaatttagtcacccttagcccttcagataagcctagccagtacatatttcagcacaggcagtttttttggtatttaagtacattgaggtaactgagcacttgagaatattttagggtcaaagtgtaattattcataatgaatttactctgttgatattaaaaagacgttcagtcctattactgatgagtttacatcttcaaataaatcctgggttctatttagttttggcgagagaaagttgtttgtgtgggcctcccattccctggttaaaagggtcagagtctttgggaggctgaggcggggggggggggggaatcacctgaggtcaggagtccgagaccagcctggccaacatcgcgaaaccccgtctctactgaaaatacaaaaattagctgggcatggtggcaggcgcctgtaatcccagctacttgggaggctgaggcaggagaattgcttgaacctggaaggcggaggttgcagtaagccgagatcgtgccattgcactccagcctgggcaacaagagtgaaactccatctc

SEQ ID NO: 70995 - DNA, 515 bp, Homo sapiens
tcaggtcactcgataaatgggctgaagtaacatacccagatgaggaatgtgttgcctccaaaatccagttaggcccactaggcattgtgcctctttcttggttgtaggaggggccaaatgcagcaacttatccttcaccttaggaggaatgtctcaacagtctctctttttccatttttctgccttcttatcttctagcggtattggcagctgattaggttgtgcccatccagattaaggttaggtctgcctttcccagcccactaactcaaatcctttggcaaccctcacagacatacccaggatcagtactttgtatccttcaatccaatcaagttgacactcagtattaatcatcacaccgccttcatacctttgttcacattgttccttcttataaaaatcacacaggagcatgcatacatacaggtgagagctttctgaatctttccagcccttcaaaacccaatactagttacatctattttgagactctttctgaccactccaatgtt

SEQ ID NO: 70996 - DNA, 391 bp, Homo sapiens
gacaggaccatgggagtctgctgtatgctgatttttactgtggctgactcagtactcagatccaagaccaattgccctggctgcaacttccagtacaatgttgaatataagtggcaatagtggacatcttgggaatgtcagcgtcctggtgaccccgacctctggcggatgtccttggtgttcacagggcagcaatgtgtgcttgggtacattgttgtagaaggacaacatggaaatacaacttgccagtgaacatgtttaatcctctcctatgttgtggtagtttttcaaataatttgtccatctcccctggcttatgactttttctcttactgatgcatagaggtctcttatgtaatctagttataaaagttgctgatatctccaccaa

SEQ ID NO: 70997 - DNA, 262 bp, Homo sapiens
cccaagctaagctaccacctttgcagagaccactccctcaatgtggagtgacagttcctcttcatcagcccacatctaacttctcttcaaaaatctgtctcaagatattcccttgcacaggagcccatacttcactaattatttcattacctcttgtcttacctccttcactctgtgtttttctgaatatttttgtgatcatattaacttgtacttttcttcacatagtttgcacatattatgcatgatattcccccatcct

SEQ ID NO: 70998 - DNA, 198 bp, Homo sapiens
acttgtttcatacagtgggtgagttaagaatggtgacaaaattgagaacactttgcctgaaaagcctaaaatatttaatttgcagaggaaagtttcccaacctcagtattagaactaaaaattaagtatactctgtgactcacctgggcgtggtggctcacgcctgtaaaaatacccgcactttgggaggctgaggca

SEQ ID NO: 70999 - DNA, 459 bp, Homo sapiens
tatttgtatattttaaattgcatgtacacgcatcctcatgtatccttctgaataacttaccatagaatatacacagttttgtacacttttttttacttggttttagattattattcaaaaattttacacagaaacatttacaaaacctaccccctacccccacacagaaatcatagatctaagttataattttaaactatgtggatttgtgtgtgagcatgataatatgttcacttgtatactttaagtataggaaattttaagggaaaaattacttgtttgaattatgatcatgatttcctgggttgctttaaatgatatggtttctgtcctgatcatatagtgaatctaggctcagtggtctaaaaatgatatttctttcatcactgtaatttgctttgcataatgcttatgcattcattctcataaatgcaagccattttattgcatattaaaaat

SEQ ID NO: 71000 - DNA, 787 bp, Homo sapiens
  misc_feature (761)..(761): n is a, c, g, or t
  misc_feature (787)..(787): n is a, c, g, or t
aaacaggcctggagaggctctgcgacccgcttaggaccacagaactcgagaattacgtgtaccagggacggcaggaatgctacgcgtttaatgggacacagcgcttcctggagagatacatctacaaccgggaggagttcgtgcgcttcgacagcgacgtgggggagttccgggcggtgacggagctggggcggcctgatgcggagtactggaacagccagaaggacatcctggaggagaagcgggcagtgccggacaggatatgcagacacaactacgagctggacgaggccgtgaccctgcagcgccgagtccagcctaaggtgaacgtttccccctccaagaaggggcccctgcagcaccacaacctgcttgtctgccacgtgacagatttctacccaggcagcattcaagtccgatggttcctgaatggacaggaggaaacagctggggtcgtgtccaccaacctgatccgtaatggagactggaccttccagatcctggtgatgctggaaatgaccccccagcagggagacgtctacatctgccaagtggagcacaccagcctggacagtcctgtcaccgtggagtggaaggcacagtctgattctgcccggagtaagacattgacgggagctgggggcttcgtgctggggctcatcatctgtggagtgggcatcttcatgcacaggaggagcaagaaagttcacgaggatctgattaacaaggtttctgacctaacgaaagacctatgtgcttanaacagcatttgtgggtttgtaacacn

SEQ ID NO: 71001 - DNA, 491 bp, Homo sapiens
  misc_feature (180)..(180): n is a, c, g, or t
  misc_feature (183)..(183): n is a, c, g, or t
ggtcgaccgatggctcacgcctgtagtcccagcactttgggaggccaaggtgggcggatcaccaggtcaggagatagagacccgcctggccagcaggcgaaaccctgtctctgctgagaatacaaaaaattagccgggcgtggtggcgggtgtctgtgatcccagctacatctgtggagnggncatcttcatgcacaggaggagcaagaaagttcaacgaggatctgcataaacggttcctgacctcaccgaaaagactaatgtgccttagaacaagcatttgctgtgttttgttagcacctggttccaggacagaccctcagcttcccaagaggatactgctgccaagaagttgctctgaagtcagtttctatcgttctgctctttgattcaaagcactgtttctctcactgggcctccaaccatgttcccttcttcttagcaccacaaataatcaaaacccaactcatatcaatacctccaactcatat

SEQ ID NO: 71002 - DNA, 1544 bp, Homo sapiens
cttgggttcatggtctctaatatttcaaacaggagctccctttagcgagtccttcttttcctgactgcagctcttttcattttgccatccttttccagctccatgatggttctgcaggtttctgcggccccccggacagtggctctgacggcgttactgatggtgctgctcacatctgtggtccagggcagggccactccagagaattacgtgtaccagggacggcaggaatgctacgcgtttaatgggacacagcgcttcctggagagatacatctacaaccgggaggagttcgtgcgcttcgacagcgacgtgggggagttccgggcggtgacggagctggggcggcctgatgcggagtactggaacagccagaaggacatcctggaggagaagcgggcagtgccggacaggatatgcagacacaactacgagctggacgaggccgtgaccctgcagcgccgagtccagcctaaggtgaacgtttccccctccaagaaggggcccctgcagcaccacaacctgcttgtctgccacgtgacagatttctacccaggcagcattcaagtccgatggttcctgaatggacaggaggaaacagctggggtcgtgtccaccaacctgatccgtaatggagactggaccttccagatcctggtgatgctggaaatgaccccccagcagggagacgtctacatctgccaagtggagcacaccagcctggacagtcctgtcaccgtggagtggaaggcacagtctgattctgcccggagtaagacattgacgggagctgggggcttcgtgctggggctcatcatctgtggagtgggcatcttcatgcacaggaggagcaagaaagttcaacgaggatctgcataaacagggttcctgacctcaccgaaaagactaatgtgccttagaacaagcatttgctgtgttttgttagcacctggttccaggacagaccctcagcttcccaagaggatactgctgccaagaagttgctctgaagtcagtttctatcgttctgctctttgattcaaagcactgtttctctcactgggcctccaaccatgttcccttcttcttagcaccacaaataatcaaaacccaacataagtgtttgctttcctttaaaaatatgcatcaaatcgtctctcattacttttctctgagggttttagtaaacagtaggagttaataaagaagttcattttggtttacacgtaggaaagaagagaagcatgaaagtggagatatgttaactattgtataatgtggcctgttatacatgacactcttctgaattgactgtatttcagtgagctgcccccaaatcaagtttagtgccctcatccatttatgtctcagaccgctattcttaactattcaatggtgagcagactgcaaatctgcctgataggacccatattcccacagcactaattcaacatatatcttactgagagcatgttttatcattaccattaagaagttaaatgaacatcagaatttaaaatcataaatataatctaatacacttt

SEQ ID NO: 71003 - DNA, 1494 bp, Homo sapiens
tgcagcacctatttccaattgtgtatggcctcgagtaccaggtctcgcctccatgatggttctgcaggtttctgcggccccccggacagtggctctgacggcgttactgatggtgctgctcacatctgtggtccagggcagggccactccagagaattacgtgtaccagggacggcaggaatgctacgcgtttaatgggacacagcgcttcctggagagatacatctacaaccgggaggagttcgtgcgcttcgacagcgacgtgggggagttccgggcggtgacggagctggggcggcctgatgcggagtactggaacagccagaaggacatcctggaggagaagcgggcagtgccggacaggatatgcagacacaactacgagctggacgaggccgtgaccctgcagcgccgagtccagcctaaggtgaacgtttccccctccaagaaggggcccctgcagcaccacaacctgcttgtctgccacgtgacagatttctacccaggcagcattcaagtccgatggttcctgaatggacaggaggaaacagctggggtcgtgtccaccaacctgatccgtaatggagactggaccttccagatcctggtgatgctggaaatgaccccccagcagggagacgtctacatctgccaagtggagcacaccagcctggacagtcctgtcaccgtggagtggaaggcacagtctgattctgcccggagtaagacattgacgggagctgggggcttcgtgctggggctcatcatctgtggagtgggcatcttcatgcacaggaggagcaagaaagttcaacgaggatctgcataaacagggttcctgacctcaccgaaaagactaatgtgccttagaacaagcatttgctgtgttttgttagcacctggttccaggacagaccctcagcttcccaagaggatactgctgccaagaagttgctctgaagtcagtttctatcgttctgctctttgattcaaagcactgtttctctcactgggcctccaaccatgttcccttcttcttagcaccacaaataatcaaaacccaacataagtgtttgctttcctttaaaaatatgcatcaaatcgtctctcattacttttctctgagggttttagtaaacagtaggagttaataaagaagttcattttggtttacacgtaggaaagaagagaagcatgaaagtggagatatgttaactattgtataatgtggcctgttatacatgacactcttctgaattgactgtatttcagtgagctgcccccaaatcaagtttagtgccctcatccatttatgtctcagaccgctattcttaactattcaatggtgagcagactgcaaatctgcctgataggacccatattcccacagcactaattcaacatatatcttactgagagcatgttttatcattaccattaagaagttaaatgaacatcagaatttaaaatcataaatataatctaatacacttt

SEQ ID NO: 71004 - DNA, 1390 bp, Homo sapiens
aaacaggcctggagaggctctgcgacccgcttaggaccacagaactcgagaattacgtgtaccagggacggcaggaatgctacgcgtttaatgggacacagcgcttcctggagagatacatctacaaccgggaggagttcgtgcgcttcgacagcgacgtgggggagttccgggcggtgacggagctggggcggcctgatgcggagtactggaacagccagaaggacatcctggaggagaagcgggcagtgccggacaggatatgcagacacaactacgagctggacgaggccgtgaccctgcagcgccgagtccagcctaaggtgaacgtttccccctccaagaaggggcccctgcagcaccacaacctgcttgtctgccacgtgacagatttctacccaggcagcattcaagtccgatggttcctgaatggacaggaggaaacagctggggtcgtgtccaccaacctgatccgtaatggagactggaccttccagatcctggtgatgctggaaatgaccccccagcagggagacgtctacatctgccaagtggagcacaccagcctggacagtcctgtcaccgtggagtggaaggcacagtctgattctgcccggagtaagacattgacgggagctgggggcttcgtgctggggctcatcatctgtggagtgggcatcttcatgcacaggaggagcaagaaagttcaacgaggatctgcataaacagggttcctgacctcaccgaaaagactaatgtgccttagaacaagcatttgctgtgttttgttagcacctggttccaggacagaccctcagcttcccaagaggatactgctgccaagaagttgctctgaagtcagtttctatcgttctgctctttgattcaaagcactgtttctctcactgggcctccaaccatgttcccttcttcttagcaccacaaataatcaaaacccaacataagtgtttgctttcctttaaaaatatgcatcaaatcgtctctcattacttttctctgagggttttagtaaacagtaggagttaataaagaagttcattttggtttacacgtaggaaagaagagaagcatgaaagtggagatatgttaactattgtataatgtggcctgttatacatgacactcttctgaattgactgtatttcagtgagctgcccccaaatcaagtttagtgccctcatccatttatgtctcagaccgctattcttaactattcaatggtgagcagactgcaaatctgcctgataggacccatattcccacagcactaattcaacatatatcttactgagagcatgttttatcattaccattaagaagttaaatgaacatcagaatttaaaatcataaatataatctaatacacttt

SEQ ID NO: 71005 - DNA, 1252 bp, Homo sapiens
ctccagactgcctcatcaggccgccccagttccgggcggtgacggagctggggcggcctgatgcggagtactggaacagccagaaggacatcctggaggagaagcgggcagtgccggacaggatatgcagacacaactacgagctggacgaggccgtgaccctgcagcgccgagtccagcctaaggtgaacgtttccccctccaagaaggggcccctgcagcaccacaacctgcttgtctgccacgtgacagatttctacccaggcagcattcaagtccgatggttcctgaatggacaggaggaaacagctggggtcgtgtccaccaacctgatccgtaatggagactggaccttccagatcctggtgatgctggaaatgaccccccagcagggagacgtctacatctgccaagtggagcacaccagcctggacagtcctgtcaccgtggagtggaaggcacagtctgattctgcccggagtaagacattgacgggagctgggggcttcgtgctggggctcatcatctgtggagtgggcatcttcatgcacaggaggagcaagaaagttcaacgaggatctgcataaacagggttcctgacctcaccgaaaagactaatgtgccttagaacaagcatttgctgtgttttgttagcacctggttccaggacagaccctcagcttcccaagaggatactgctgccaagaagttgctctgaagtcagtttctatcgttctgctctttgattcaaagcactgtttctctcactgggcctccaaccatgttcccttcttcttagcaccacaaataatcaaaacccaacataagtgtttgctttcctttaaaaatatgcatcaaatcgtctctcattacttttctctgagggttttagtaaacagtaggagttaataaagaagttcattttggtttacacgtaggaaagaagagaagcatgaaagtggagatatgttaactattgtataatgtggcctgttatacatgacactcttctgaattgactgtatttcagtgagctgcccccaaatcaagtttagtgccctcatccatttatgtctcagaccgctattcttaactattcaatggtgagcagactgcaaatctgcctgataggacccatattcccacagcactaattcaacatatatcttactgagagcatgttttatcattaccattaagaagttaaatgaacatcagaatttaaaatcataaatataatctaatacacttt

SEQ ID NO: 71006 - DNA, 1235 bp, Homo sapiens
tgtgctctcgacggactcccccttttgaggttgtggggtgctgatgcggagtactggaacagccagaaggacatcctggaggagaagcgggcagtgccggacaggatatgcagacacaactacgagctggacgaggccgtgaccctgcagcgccgagtccagcctaaggtgaacgtttccccctccaagaaggggcccctgcagcaccacaacctgcttgtctgccacgtgacagatttctacccaggcagcattcaagtccgatggttcctgaatggacaggaggaaacagctggggtcgtgtccaccaacctgatccgtaatggagactggaccttccagatcctggtgatgctggaaatgaccccccagcagggagacgtctacatctgccaagtggagcacaccagcctggacagtcctgtcaccgtggagtggaaggcacagtctgattctgcccggagtaagacattgacgggagctgggggcttcgtgctggggctcatcatctgtggagtgggcatcttcatgcacaggaggagcaagaaagttcaacgaggatctgcataaacagggttcctgacctcaccgaaaagactaatgtgccttagaacaagcatttgctgtgttttgttagcacctggttccaggacagaccctcagcttcccaagaggatactgctgccaagaagttgctctgaagtcagtttctatcgttctgctctttgattcaaagcactgtttctctcactgggcctccaaccatgttcccttcttcttagcaccacaaataatcaaaacccaacataagtgtttgctttcctttaaaaatatgcatcaaatcgtctctcattacttttctctgagggttttagtaaacagtaggagttaataaagaagttcattttggtttacacgtaggaaagaagagaagcatgaaagtggagatatgttaactattgtataatgtggcctgttatacatgacactcttctgaattgactgtatttcagtgagctgcccccaaatcaagtttagtgccctcatccatttatgtctcagaccgctattcttaactattcaatggtgagcagactgcaaatctgcctgataggacccatattcccacagcactaattcaacatatatcttactgagagcatgttttatcattaccattaagaagttaaatgaacatcagaatttaaaatcataaatataatctaatacacttt

SEQ ID NO: 71007 - DNA, 1458 bp, Homo sapiens
aacttgaggacccttcggactgcaggaattcttcacgagctccctttagcgagtccttcttttcctgactgcagctcttttcattttgccatccttttccagctccatgatggttctgcaggtttctgcggccccccggacagtggctctgacggcgttactgatggtgctgctcacatctgtggtccagggcagggccactccagagaattacgtgtaccagggacggcaggaatgctacgcgtttaatgggacacagcgcttcctggagagatacatctacaaccgggaggagttcgtgcgcttcgacagcgacgtgggggagttccgggcggtgacggagctggggcggcctgatgcggagtactggaacagccagaaggacatcctggaggagaagcgggcagtgccggacaggatatgcagacacaactacgagctggacgaggccgtgaccctgcagcgccgaggcagcattcaagtccgatggttcctgaatggacaggaggaaacagctggggtcgtgtccaccaacctgatccgtaatggagactggaccttccagatcctggtgatgctggaaatgaccccccagcagggagacgtctacatctgccaagtggagcacaccagcctggacagtcctgtcaccgtggagtggaaggcacagtctgattctgcccggagtaagacattgacgggagctgggggcttcgtgctggggctcatcatctgtggagtgggcatcttcatgcacaggaggagcaagaaagttcaacgaggatctgcataaacagggttcctgacctcaccgaaaagactaatgtgccttagaacaagcatttgctgtgttttgttagcacctggttccaggacagaccctcagcttcccaagaggatactgctgccaagaagttgctctgaagtcagtttctatcgttctgctctttgattcaaagcactgtttctctcactgggcctccaaccatgttcccttcttcttagcaccacaaataatcaaaacccaacataagtgtttgctttcctttaaaaatatgcatcaaatcgtctctcattacttttctctgagggttttagtaaacagtaggagttaataaagaagttcattttggtttacacgtaggaaagaagagaagcatgaaagtggagatatgttaactattgtataatgtggcctgttatacatgacactcttctgaattgactgtatttcagtgagctgcccccaaatcaagtttagtgccctcatccatttatgtctcagaccgctattcttaactattcaatggtgagcagactgcaaatctgcctgataggacccatattcccacagcactaattcaacatatatcttactgagagcatgttttatcattaccattaagaagttaaatgaacatcagaatttaaaatcataaatataatctaatacacttt

SEQ ID NO: 71008 - DNA, 1483 bp, Homo sapiens
cttgggttcatggtctctaatatttcaaacaggagctccctttagcgagtccttcttttcctgactgcagctcttttcattttgccatccttttccagctccatgatggttctgcaggtttctgcggccccccggacagtggctctgacggcgttactgatggtgctgctcacatctgtggtccagggcagggccactccagagaattacgtgtaccagggacggcaggaatgctacgcgtttaatgggacacagcgcttcctggagagatacatctacaaccgggaggagttcgtgcgcttcgacagcgacgtgggggagttccgggcggtgacggagctggggcggcctgatgcggagtactggaacagccagaaggacatcctggaggagaagcgggcagtgccggacaggatatgcagacacaactacgagctggacgaggccgtgaccctgcagcgccgagtccagcctaaggtgaacgtttccccctccaagaaggggcccctgcagcaccacaacctgcttgtctgccacgtgacagatttctacccaggcagcattcaagtccgatggttcctgaatggacaggaggaaacagctggggtcgtgtccaccaacctgatccgtaatggagactggaccttccagatcctggtgatgctggaaatgaccccccagcagggaaggcacagtctgattctgcccggagtaagacattgacgggagctgggggcttcgtgctggggctcatcatctgtggagtgggcatcttcatgcacaggaggagcaagaaagttcaacgaggatctgcataaacagggttcctgacctcaccgaaaagactaatgtgccttagaacaagcatttgctgtgttttgttagcacctggttccaggacagaccctcagcttcccaagaggatactgctgccaagaagttgctctgaagtcagtttctatcgttctgctctttgattcaaagcactgtttctctcactgggcctccaaccatgttcccttcttcttagcaccacaaataatcaaaacccaacataagtgtttgctttcctttaaaaatatgcatcaaatcgtctctcattacttttctctgagggttttagtaaacagtaggagttaataaagaagttcattttggtttacacgtaggaaagaagagaagcatgaaagtggagatatgttaactattgtataatgtggcctgttatacatgacactcttctgaattgactgtatttcagtgagctgcccccaaatcaagtttagtgccctcatccatttatgtctcagaccgctattcttaactattcaatggtgagcagactgcaaatctgcctgataggacccatattcccacagcactaattcaacatatatcttactgagagcatgttttatcattaccattaagaagttaaatgaacatcagaatttaaaatcataaatataatctaatacacttt

SEQ ID NO: 71009 - DNA, 1396 bp, Homo sapiens
cttgggttcatggtctctaatatttcaaacaggagctccctttagcgagtccttcttttcctgactgcagctcttttcattttgccatccttttccagctccatgatggttctgcaggtttctgcggccccccggacagtggctctgacggcgttactgatggtgctgctcacatctgtggtccagggcagggccactccagagaattacgtgtaccagggacggcaggaatgctacgcgtttaatgggacacagcgcttcctggagagatacatctacaaccgggaggagttcgtgcgcttcgacagcgacgtgggggagttccgggcggtgacggagctggggcggcctgatgcggagtactggaacagccagaaggacatcctggaggagaagcgggcagtgccggacaggatatgcagacacaactacgagctggacgaggccgtgaccctgcagcgccgagtccagcctaaggtgaacgtttccccctccaagaaggggcccctgcagcaccacaacctgcttgtctgccacgtgacagatttctacccaggcagcattcaagtccgatggttcctgaatggacaggaggaaacagctggggtcgtgtccaccaacctgatccgtaatggagactggaccttccagatcctggtgatgctggaaatgaccccccagcagggagacgtctacatctgccaagtggagcacaccagcctggacagtcctgtcaccgtggagtggaaggcacagtctgattctgcccggagtaagacatttgctgtgttttgttagcacctggttccaggacagaccctcagcttcccaagaggatactgctgccaagaagttgctctgaagtcagtttctatcgttctgctctttgattcaaagcactgtttctctcactgggcctccaaccatgttcccttcttcttagcaccacaaataatcaaaacccaacataagtgtttgctttcctttaaaaatatgcatcaaatcgtctctcattacttttctctgagggttttagtaaacagtaggagttaataaagaagttcattttggtttacacgtaggaaagaagagaagcatgaaagtggagatatgttaactattgtataatgtggcctgttatacatgacactcttctgaattgactgtatttcagtgagctgcccccaaatcaagtttagtgccctcatccatttatgtctcagaccgctattcttaactattcaatggtgagcagactgcaaatctgcctgataggacccatattcccacagcactaattcaacatatatcttactgagagcatgttttatcattaccattaagaagttaaatgaacatcagaatttaaaatcataaatataatctaatacacttt

SEQ ID NO: 71010 - DNA, 1077 bp, Homo sapiens
cttgggttcatggtctctaatatttcaaacaggagctccctttagcgagtccttcttttcctgactgcagctcttttcattttgccatccttttccagctccatgatggttctgcaggtttctgcggccccccggacagtggctctgacggcgttactgatggtgctgctcacatctgtggtccagggcagggccactccagagaattacgtgtaccagggacggcaggaatgctacgcgtttaatgggacacagcgcttcctggagagatacatctacaaccgggaggagttcgtgcgcttcgacagcgacgtgggggagttccgggcggtgacggagctggggcggcctgatgcggagtactggaacagccagaaggacatcctggaggagaagcgggcagtgccggacaggatatgcagacacaactacgagctggacgaggccgtgaccctgcagcgccgagtccagcctaaggtgaacgtttccccctccaagaaggggcccctgcagcaccacaacctgcttgtctgccacgtgacagatttctacccaggcagcattcaagtccgatggttcctgaatggacaggaggaaacagctggggtcgtgtccaccaacctgatccgtaatggagactggaccttccagatcctggtgatgctggaaatgaccccccagcagggagacgtctacatctgccaagtggagcacaccagcctggacagtcctgtcaccgtggagtggaatgcacaggaggagcaagaaagttcaacgaggatctgcataaacggttcctgacctcaccgaaaagactaatgtgccttagaacaagcatttgctgtgttttgttagcacctggttccaggacagaccctcagcttcccaagaggatactgctgccaagaagttgctctgaagtcagtttctatcgttctgctctttgattcaaagcactgtttctctcactgggcctccaaccatgttcccttcttcttagcaccacaaataatcaaaacccaacataagtgtttgctttcctttaaaaaaaaagtcgacgcggccgcgaatttagta

SEQ ID NO: 71011 - DNA, 879 bp, Homo sapiens
  misc_feature (767)..(767): n is a, c, g, or t
cttgggttcatggtctctaatatttcaaacaggagctccctttagcgagtccttcttttcctgactgcagctcttttcattttgccatccttttccagctccatgatggttctgcaggtttctgcggccccccggacagtggctctgacggcgttactgatggtgctgctcacatctgtggtccagggcagggccactccagagaattacgtgtaccagggacggcaggaatgctacgcgtttaatgggacacagcgcttcctggagagatacatctacaaccgggaggagttcgtgcgcttcgacagcgacgtgggggagttccgggcggtgacggagctggggcggcctgatgcggagtactggaacagccagaaggacatcctggaggagaagcgggcagtgccggacaggatatgcagacacaactacgagctggacgaggccgtgaccctgcagcgccgagtccagcctaaggtgaacgtttccccctccaagaaggggcccctgcagcaccacaacctgcttgtctgccacgtgacagatttctacccaggcagcattcaagtccgatggttcctgaatggacaggaggaaacagctggggtcgtgtccaccaacctgatccgtaatggagactggaccttccagatcctggtgatgctggaaatgaccccccagcagggagacgtctacatctgccaagtggagcacaccagcctggacagtctggcacggggggggggaaggccggctgattcgcccgnggtattgaccggacgtggggccaagctggggccatcatctgggaggggctctcatgcccgggatgagaagtcacgaggttgctaaccggtgcgcccccgaagggcttgacgc

SEQ ID NO: 71012 - DNA, 837 bp, Homo sapiens
  misc_feature (764)..(764): n is a, c, g, or t
  misc_feature (769)..(769): n is a, c, g, or t
  misc_feature (792)..(792): n is a, c, g, or t
  misc_feature (812)..(812): n is a, c, g, or t
cttgggttcatggtctctaatatttcaaacaggagctccctttagcgagtccttcttttcctgactgcagctcttttcattttgccatccttttccagctccatgatggttctgcaggtttctgcggccccccggacagtggctctgacggcgttactgatggtgctgctcacatctgtggtccagggcagggccactccagagaattacgtgtaccagggacggcaggaatgctacgcgtttaatgggacacagcgcttcctggagagatacatctacaaccgggaggagttcgtgcgcttcgacagcgacgtgggggagttccgggcggtgacggagctggggcggcctgatgcggagtactggaacagccagaaggacatcctggaggagaagcgggcagtgccggacaggatatgcagacacaactacgagctggacgaggccgtgaccctgcagcgccgagtccagcctaaggtgaacgtttccccctccaagaaggggcccctgcagcaccacaacctgcttgtctgccacgtgacagatttctacccaggcagcattcaagtccgatggttcctgaatggacaggaggaaacagctggggtcgtgtccaccaacctgatccgtaatggagactggaccttccagatcctggtgatgctggaaatgaccccccagcagggacgaagcccccagctcccgtcaatgtcttactccgggcagaatcagactgtgccttccactccacggtgacaggactntccangctggtgtgctccacttggcagntgtagacatctccctgctgnggggtcatttccagcatcgggtacc

SEQ ID NO: 71013 - DNA, 665 bp, Homo sapiens
  misc_feature (592)..(592): n is a, c, g, or t
  misc_feature (597)..(597): n is a, c, g, or t
  misc_feature (620)..(620): n is a, c, g, or t
  misc_feature (640)..(640): n is a, c, g, or t
cttgggttcatggtctctaatatttcaaacaggagctccctttagcgagtccttcttttcctgactgcagctcttttcattttgccatccttttccagctccatgatggttctgcaggtttctgcggccccccggacagtggctctgacggcgttactgatggtgctgctcacatctgtggtccagggcagggccactccagagaattacgtgtaccagggacggcaggaatgctacgcgtttaatgggacacagcgcttcctggagagatacatctacaaccgggaggagttcgtgcgcttcgacagcgacgtgggggagttccgggcggtgacggagctggggcggcctgatgcggagtactggaacagccagaaggacatcctggaggagaagcgggcagtgccggacaggatatgcagacacaactacgagctggacgaggccgtgaccctgcagcgccgagtccagcctagggtgaatgttgcccactccacagatgatgagccccagcacgaagcccccagctcccgtcaatgtcttactccgggcagaatcagactgtgccttccactccacggtgacaggactntccangctggtgtgctccacttggcagntgtagacatctccctgctgnggggtcatttccagcatcgggtacc

SEQ ID NO: 71014 - DNA, 655 bp, Homo sapiens
  misc_feature (582)..(582): n is a, c, g, or t
  misc_feature (587)..(587): n is a, c, g, or t
  misc_feature (610)..(610): n is a, c, g, or t
  misc_feature (630)..(630): n is a, c, g, or t
tttgctgctctattgccaaactactcatatccccctgtgtactgtgaaacttggtgaaattcctcagggatttggagacatcaaagcactccatgatggttctgcaggtttctgcggccccccggacagtggctctgacggcgttactgatggtgctgctcacatctgtggtccagggcagggccactccagagaattacgtgtaccagggacggcaggaatgctacgcgtttaatgggacacagcgcttcctggagagatacatctacaaccgggaggagttcgtgcgcttcgacagcgacgtgggggagttccgggcggtgacggagctggggcggcctgatgcggagtactggaacagccagaaggacatcctggaggagaagcgggcagtgccggacaggatatgcagacacaactacgagctggacgaggccgtgaccctgcagcgccgagtccagcctagggtgaatgttgcccactccacagatgatgagccccagcacgaagcccccagctcccgtcaatgtcttactccgggcagaatcagactgtgccttccactccacggtgacaggactntccangctggtgtgctccacttggcagntgtagacatctccctgctgnggggtcatttccagcatcgggtacc

SEQ ID NO: 71015 - DNA, 519 bp, Homo sapiens
  misc_feature (180)..(180): n is a, c, g, or t
  misc_feature (183)..(183): n is a, c, g, or t
ggtcgaccgatggctcacgcctgtagtcccagcactttgggaggccaaggtgggcggatcaccaggtcaggagatagagacccgcctggccagcaggcgaaaccctgtctctgctgagaatacaaaaaattagccgggcgtggtggcgggtgtctgtgatcccagctacatctgtggagnggncatcttcatgcacaggaggagcaagaaagttcaacgaggatctgcataaacggttcctgacctcaccgaaaagactaatgtgccttagaacaagcatttgctgtgttttgttagcacctggttccaggacagaccctcagcttcccaagaggatactgctgccaagaagttgctctgaagtcagtttctatcgttctgctctttgattcaaagcactgtttctctcactgggcctccaaccatgttcccttcttcttagcaccacaaataatcaaaacccaacataagtgtttgctttcctttaaaaaaaaagtcgacgcggccgcgaatttagta

SEQ ID NO: 71016 - DNA, 738 bp, Homo sapiens
ttgctcgtctctttgcggaatggtgatttcatgcgcaggcggagtcactccagttcaccgagttatcagcataacgcggttcctgacctcaccgaaaagactaatgtgccttagaacaagcatttgctgtgttttgttagcacctggttccaggacagaccctcagcttcccaagaggatactgctgccaagaagttgctctgaagtcagtttctatcgttctgctctttgattcaaagcactgtttctctcactgggcctccaaccatgttcccttcttcttagcaccacaaataatcaaaacccaacataagtgtttgctttcctttaaaaatatgcatcaaatcgtctctcattacttttctctgagggttttagtaaacagtaggagttaataaagaagttcattttggtttacacgtaggaaagaagagaagcatgaaagtggagatatgttaactattgtataatgtggcctgttatacatgacactcttctgaattgactgtatttcagtgagctgcccccaaatcaagtttagtgccctcatccatttatgtctcagaccgctattcttaactattcaatggtgagcagactgcaaatctgcctgataggacccatattcccacagcactaattcaacatatatcttactgagagcatgttttatcattaccattaagaagttaaatgaacatcagaatttaaaatcataaatataatctaatacacttt

SEQ ID NO: 71017 - DNA, 1733 bp, Homo sapiens
gcccctcactccacccccatcctagctttggtatgggggagagggcacagggccagacaaacctgtgagactttggctccatctctgcaaaagggcgctctgtgagtcagcctgctcccctccaggcttgctcctcccccacccagctctcgtttccaatgcacgtacagcccgtacacaccgtgtgctgggacaccccacagtcagccgcatggctcccctgtgccccagcccctggctccctctgttgatcccggcccctgctccaggcctcactgtgcaactgctgctgtcactgctgcttctgatgcctgtccatccccagaggttgccccggatgcaggaggattcccccttgggaggaggctcttctggggaagatgacccactgggcgaggaggatctgcccagtgaagaggattcacccagagaggaggatccacccggagaggaggatctacctggagaggaggatctacctggagaggaggatctacctgaagttaagcctaaatcagaagaagagggctccctgaagttagaggatctacctactgttgaggctcctggagatcctcaagaaccccagaataatgcccacagggacaaagaaggggatgaccagagtcattggcgctatggaggcgacccgccctggccccgggtgtccccagcctgcgcgggccgcttccagtccccggtggatatccgcccccagctcgccgccttctgcccggccctgcgccccctggaactcctgggcttccagctcccgccgctcccagaactgcgcctgcgcaacaatggccacagtgtgcaactgaccctgcctcctgggctagagatggctctgggtcccgggcgggagtaccgggctctgcagctgcatctgcactggggggctgcaggtcgtccgggctcggagcacactgtggaaggccaccgtttccctgccgagatccacgtggttcacctcagcaccgcctttgccagagttgacgaggccttggggcgcccgggaggcctggccgtgttggccgcctttctggaggagggcccggaagaaaacagtgcctatgagcagttgctgtctcgcttggaagaaatcgctgaggaaggctcagagactcaggtcccaggactggacatatctgcactcctgccctctgacttcagccgctacttccaatatgaggggtctctgactacaccgccctgtgcccagggtgtcatctggactgtgtttaaccagacagtgatgctgagtgctaagcagctccacaccctctctgacaccctgtggggacctggtgactctcggctacagctgaacttccgagcgacgcagcctttgaatgggcgagtgattgaggcctccttccctgctggagtggacagcagtcctcgggctgctgagccagtccagctgaattcctgcctggctgctggtgacatcctagccctggtttttggcctcctttttgctgtcaccagcgtcgcgttccttgtgcagatgagaaggcagcacagaaggggaaccaaagggggtgtgagctaccgcccagcagaggtagccgagactggagcctagaggctggatcttggagaatgtgagaagccagccagaggcatctgagggggagccggtaactgtcctgtcctgctcattatgccacttccttttaactgccaagaaattttttaaaataaatatttataataaaaaaaaaaat

SEQ ID NO: 71018 - DNA, 878 bp, Homo sapiens
gcccctcactccacccccatcctagctttggtatgggggagagggcacagggccagacaaacctgtgagactttggctccatctctgcaaaagggcgctctgtgagtcagcctgctcccctccaggcttgctcctcccccacccagctctcgtttccaatgcacgtacagcccgtacacaccgtgtgctgggacaccccacagtcagccgcatggctcccctgtgccccagcccctggctccctctgttgatcccggcccctgctccaggcctcactgtgcaactgctgctgtcactgctgcttctgatgcctgtccatccccagaggttgccccggatgcaggaggattcccccttgggaggaggctcttctggggaagatgacccactgggcgaggaggatctgcccagtgaagaggattcacccagagaggaggatccacccggagaggaggatctacctggagaggaggatctacctggagaggaggatctacctgaagttaagcctaaatcagaagaagagggctccctgaagttagaggatctacctactgttgaggctcctggagatcctcaagaaccccagaataatgcccacagggacaaagaaggggatgaccagagtcattgacgctagggaggccaggccgccctgggccagggactccacaatgacctccgccgagcccacctccagctctgcaggcggctgcagcgccaccaccaccatcttctcgtcctcgatgatcaggttgcggagcttgcgctgccgcgggttgtagttctctacccggtcgtggatctccatgtgcctccgcaggtgggcctgtcgggtaaacttgtagccacactcggtgcactcaaacttcctcacc

SEQ ID NO: 71019 - DNA, 1640 bp, Homo sapiens
gcccctcactccacccccatcctagctttggtatgggggagagggcacagggccagacaaacctgtgagactttggctccatctctgcaaaagggcgctctgtgagtcagcctgctcccctccaggcttgctcctcccccacccagctctcgtttccaatgcacgtacagcccgtacacaccgtgtgctgggacaccccacagtcagccgcatggctcccctgtgccccagcccctggctccctctgttgatcccggcccctgctccaggcctcactgtgcaactgctgctgtcactgctgcttctgatgcctgtccatccccagaggttgccccggatgcaggaggattcccccttgggaggaggctcttctggggaagatgacccactgggcgaggaggatctgcccagtgaagaggattcacccagagaggaggatccacccggagaggaggatctacctggagaggaggatctacctggagaggaggatctacctgaagttaagcctaaatcagaagaagagggctccctgaagttagaggatctacctactgttgaggctcctggagatcctcaagaaccccagaataatgcccacagggacaaagaaggggatgaccagagtcattggcgctatggaggcgacccgccctggccccgggtgtccccagcctgcgcgggccgcttccagtccccggtggatatccgcccccagctcgccgccttctgcccggccctgcgccccctggaactcctgggcttccagctcccgccgctcccagaactgcgcctgcgcaacaatggccacagtgtgcaactgaccctgcctcctgggctagagatggctctgggtcccgggcgggagtaccgggctctgcagctgcatctgcactggggggctgcaggtcgtccgggctcggagcacactgtggaaggccaccgtttccctgccgaggagggcccggaagaaaacagtgcctatgagcagttgctgtctcgcttggaagaaatcgctgaggaaggctcagagactcaggtcccaggactggacatatctgcactcctgccctctgacttcagccgctacttccaatatgaggggtctctgactacaccgccctgtgcccagggtgtcatctggactgtgtttaaccagacagtgatgctgagtgctaagcagctccacaccctctctgacaccctgtggggacctggtgactctcggctacagctgaacttccgagcgacgcagcctttgaatgggcgagtgattgaggcctccttccctgctggagtggacagcagtcctcgggctgctgagccagtccagctgaattcctgcctggctgctggtgacatcctagccctggtttttggcctcctttttgctgtcaccagcgtcgcgttccttgtgcagatgagaaggcagcacagaaggggaaccaaagggggtgtgagctaccgcccagcagaggtagccgagactggagcctagaggctggatcttggagaatgtgagaagccagccagaggcatctgagggggagccggtaactgtcctgtcctgctcattatgccacttccttttaactgccaagaaattttttaaaataaatatttataataaaaaaaaaaat

SEQ ID NO: 71020 - DNA, 613 bp, Homo sapiens
tgggattataggcgtgagccacagcgcctggcctgaagcagccactcacttttacagaccctaagacaatgattgcaagctggtaggattgctgtttggcccacccagctgcggtgttgagtttgggtgcggtctcctgtgctttgcacctggcccgcttaaggcatttgttacccgtaatgctcctgtaaggcatctgcgtttgtgacatcgttttggtcgccaggaagggattggggctctaagcttgagcggttcatccttttcatttatacaggggatgaccagagtcattggcgctatggaggtgagacacccacccgctgcacagacccaatctgggaacccagctctgtggatctcccctacagccgtccctgaacactggtcccgggcgtcccacccgccgcccaccgtcccaccccctcaccttttctacccgggttccctaagttcctgacctaggcgtcagacttcctcactatactctcccaccccaggcgacccgccctggccccgggtgtccccagcctgcgcgggccgcttccagtccccggtggatatccgcccccagctcgccgccttctgcccggccctgcgccccctggaactc

SEQ ID NO: 71021 - DNA, 662 bp, Homo sapiens
acagtggctacaggtgccaatcggctgtagtaggtgtggaggcagtggctgggagtggctcgcagcaagggcgagctctctggacaactccatgggtgacagaagcctggacacgggagaccttggggagccttatccaaggaggtgcttgaggctcccccttgaggaagacctctccattggtgggggaatttggagccaaagaaagctccttatgttgtcaaaatgtcccttttttaaccttaggatattgtgacccctgaaggtattaatgatattctagagcatttgaaagacaacagccaactagctggttaagcgcagctcagtttttccccagtgtgtgtgggtggctgagcacacattcattaattcagtgattcattcagccaacatctgcggaacccctgctggcttctggagtcagattgcggggatctgaatcgggcttgccacttactagtctatgacctcgagcaaatgacgtgattcctctaatacccagtttccccatctgtaatatgaaatgtgaatactaagtatccgcctcattgggttttaggagaatcaaatgcatgtcaagtgtttaacatggtgcctggcacagattaaacatccaagaagtgtgagttatgattaaaggctgtgaaatgtacaaagag

SEQ ID NO: 71022 - DNA, 439 bp, Homo sapiens
cttgaggcagtaagataaactcttgaggaaagagggctgtgggtatatttgtgtctcctgagtgcctggcaaacagccttgtacagggtaagtgcccggtatacaaataaaaattaagaaatgtatgtgtgggtcctccctgtttgagaagaatgcttactttttcaaacagattattcaccatggactttctttaaataggattttaaaatataattcaatttgccacatttgaattcacacataatttttcagtaacacagcaaatacataatgttagaaatatctgggatatgtctctggctatggaaaggacgagcagattgaagattagaagatcagaaggaggggaaaaaagcaagagattaagtttatgctttggtttaccttaacattgcttttccgttacttgtctatacagttcttttttctttccttt

SEQ ID NO: 71023 - DNA, 2060 bp, Homo sapiens
cttggctggaacctgagacggattcgctcccaaatgatgctccagtggctggagcaactcaagttcatcattgtcctgagagagaggagcagcgcggttctcggccgggacagcagaacgccaggggaccctcacctgggcgcgccggggcacgggctttgattgtcctggggtcgcggagacccgcgcgcctgccctgcacgccgggcggcaacctttgcagtcgcgttggctgctgcgatcggccggcgggtccctgccgaaggctcggctgcttctgtccacctcttacacttcttcatttatcggtggatcatttcgagagtccgtcttgtaaatgtttggcactttgctactttattgcttctttctggcgacagttccagcactcgccgagaccggcggagaaaggcagctgagcccggagaagagcgaaatatggggacccgggctaaaagcagacgtcgtccttcccgcccgctatttctatattcaggcagtggatacatcagggaataaattcacatcttctccaggcgaaaaggtcttccaggtgaaagtctcagcaccagaggagcaattcactagagttggagtccaggttttagaccgaaaagatgggtccttcatagtaagatacagaatgtatgcaagctacaaaaatctgaaggtggaaattaaattccaagggcaacatgtggccaaatccccatatattttaaaagggccggtttaccatgagaactgtgactgtcctctgcaagatagtgcagcctggctacgggagatgaactgccctgaaaccattgctcagattcagagagatctggcacatttccctgctgtggatccagaaaagattgcagtagaaatcccaaaaagatttggacagaggcagagcctatgtcactacaccttaaaggataacaaggtttatatcaagactcatggtgaacatgtaggttttagaattttcatggatgccatactactttctttgactagaaaggtgaagatgccagatgtggagctctttgttaatttgggagactggcctttggaaaaaaagaaatccaattcaaacatccatccgatcttttcctggtgtggctccacagattccaaggatatcgtgatgcctacgtacgatttgactgattctgttctggaaaccatgggccgggtaagtctggatatgatgtccgtgcaagctaacacgggtcctccctgggaaagcaaaaattccactgccgtctggagagggcgagacagccgcaaagagagactcgagctggttaaactcagtagaaaacacccagaactcatagacgctgctttcaccaactttttcttctttaaacacgatgaaaacctgtatggtcccattgtgaaacatatttcattttttgatttcttcaagcataagtatcaaataaatatcgatggcactgtagcagcttatcgcctgccatatttgctagttggtgacagtgttgtgctgaagcaggattccatctactatgaacatttttacaatgagctgcagccctggaaacactacattccagttaagagcaacctgagcgatctgctagaaaaacttaaatgggcgaaagatcacgatgaagaggccaaaaagatagcaaaagcaggacaagaatttgcaagaaataatctcatgggcgatgacatattctgttattatttcaaacttttccaggaatatgccaatttacaagtgagtgagccccaaatccgagagggcatgaaaagggtagaaccacagactgaggacgacctcttcccttgtacttgccataggaaaaagaccaaagatgaactctgatatgcaaaataacttctattagaataatggtgctctgaagactcttcttaactaaaaagaagaatttttttaagtattaattccatggacaatataaaatctgtgtgattgtttgcagtatgaagacacatttctacttatgcagtattctcatgactgtactttaaagtacatttttagaattttataataaaaccacctttattttaaagga

SEQ ID NO: 71024 - DNA, 825 bp, Homo sapiens
  misc_feature (251)..(251): n is a, c, g, or t
cctcacccctcccgcccactgcacccccccgctctctctccctctcactctccgcggtgccccgtccgggcctcctctcgcgcgcacgacgttcctcccgcccgcctacaagcgggcccacttccctcccgcttccgaagagccgataatccccttcccggctccgctatggatactgcgctcctgctgaaaccccccaaatttttttctcggcccctggcatttatccccgcgcacacccacctattttncggcccacgcccctcctgcaaaccgttttaggcaaactattgatttccccccttaccaaagccatgttttttttcccaggtcaaggattcggtccggggaccagccaaacccacgggtggagtaaacgcctccctataggggcacaggcccaaagatagccaaagcaggccaaactttgcaaagaaaaatctcatgggggatgacatatttggtataatttcacacttttccaggaatatgccaatttacaagtgagtgagccccaaatccgagagggcatgaaaagggtagaaccacagactgaggacgacctcttcccttgtacttgccataggaaaaagaccaaagatgaactctgatatgcaaaataacttctattagaataatggtgctctgaagactcttcttaactaaaaagaagaatttttttaagtattaattccatggacaatataaaatctgtgtgattgtttgcagtatgaagacacatttctacttatgcagtattctcatgactgtactttaaagtacatttttagaattttataataaaaccacctttattttaaagga

SEQ ID NO: 71025 - DNA, 726 bp, Homo sapiens
ttaaaaccaatgataaaacaagaattgccaaatcgaaaggttccccctcaccaatccgtgatttggtatcagaacacttctcactttggctctaagtgagactggcagcttccttgctccactcctgctcagttatttatcttcatctacgtgattgagaggaggtacccagccagtttcttccactgagtagtagaagttaggggccagaatgatagcttcgtttattttttgctcattgtctatcctagtctttcaccactactgttcataacatgaggcctttacagtagtacagcccatggatgtttgggttccttatcagtaggctatgaaacacaatgtgattttacccttagctgactctgggcctctggaaatagtcccaagccctaaaagcctctagcagcagcttggctccctctcatctttacaggaaaataattaacgaatgtaagtcttcttcacttgtgtaagacttcttgatagctctaaatattttgcttcttaattgcagaccaaagatgaactctgatatgcaaaataacttctattagaataatggtgctctgaagactcttcttaactaaaaagaagaatttttttaagtattaattccatggacaatataaaatctgtgtgattgtttgcagtatgaagacacatttctacttatgcagtattctcatgactgtactttaaagtacatttttagaattttataat

SEQ ID NO: 71026 - DNA, 790 bp, Homo sapiens
tagctaggacgagctgggttgttcaaccttgtcaacccgtcggcgcggcctctggtgcagcggcggcggctcctgttcctgccgcagctctctccctttcttacctccccaccagatcccggagatcgcccgccatggctttacttactgcggccgcccggctcttgggaaccaagaatgcatcttgtcttgttcttgcagcccggcatgccagtgcttcctccacgaatttgaaagacatattggctgacctgatacctaaggagcaggccagaattaagactttcaggcagcaacatggcaagacggtggtgggccaaatcactgtggacatgatgtatggtggcatgagaggcatgaagggattggtctatgaaacatcagttcttgatcctgatgagggcatccgtttccgaggctttagtatccctgaatgccagaaactgctacccaaggctaagggtggggaagaacccctgcctgagggcttattttggctgctggtaactggacatatcccaacagaggaacaggtatcttggctctcaaaagagtgggcaaagagggcagctctgccttcccatgtggtcaccatgctggacaactttcccaccaatctacaccccatgtctcagctcagtgcagctgttacagccctcaacagtgaaagtaactttgcccgagcatatgcacagggtatcagccgaaccaagtactgggagatgataagaagaccatggtctatcgaaagtactgtttgagcaaactaccgaacccaagaaggcaggtg

SEQ ID NO: 71027 - DNA, 746 bp, Homo sapiens
ggccagtgggcggggcctccttgaggaccccgggctgggcgccgccgccggttcgtctactctttccttcagccgcctccttttcaaccttgtcaacccgtcggcgcggcctctggtgcagcggcggcggctcctgttcctgccgcagctctctccctttcttacctccccaccagatcccggagatcgcccgccatggctttacttactgcggccgcccggctcttgggaaccaagaatgcatcttgtcttgttcttgcagcccggcatgccagtgcttcctccacggtaaggtttggaaaagaagactaagaataagaatcattgcggccagcctgaccttggggcagaggatttggcaaccacctggcctcttattatcctgagtatttcctggaagtgtttgttactattgttattgttatagctgctattattattatattactatttaacaaataatttactcagtggtatagtgagatgggaatatcaatacatttgcctaattcttttaaatgttttaagtagtgtaaaatatacataacataaaatttaccattttaatcatttttaagtatatggtttagtggcagtagatatgtttacattattgtgcaaccatccatctccagaacttttgtctgcccaaaccgagaaactgttcccattaaacattaactcctcattccttcttccccctgcctaattcttttaccctcatttgtgcagagtagttgaccaga

SEQ ID NO: 71028 - DNA, 656 bp, Homo sapiens
atcttaccacatttgagggctacagcccacctctatcaataatagctgactcactagaggagttcttgtaaggggtggcaacaaatgagctcttagtgattgtgggggaaaaacctcttcgtgattgtgataacgccacctccaccctatagagaatactggctgtcagacattgtgagccaggcccttgtctttggaagtagccctctccatctctccccatgaaggagctgacctattgagtgagatgactgcctgattctcctgagagctgctgttccagtaaggtgactctacaggtggcatgcatccagaagccaaaagcccaactgtcacacctccaggattaggggagaatctgggaggtagaagttcagggatgattcagaggtttgtaatctacctgtctcatcaatgaacataacctgaatgtactgttcagagccattcagcagctttctttggcagccacggggtagaggaaatgaaatgtagcctttgatgttacagtcctcaagcacctcctgtctagagtcatttgctctgctggtggccatcagggttagttaaatttgtttcctctccctgagatgcctcccttcttggtcaagaagcccttaaaaagaaaactggtatcttttccttgatgcctgtta

SEQ ID NO: 71029 - DNA, 2947 bp, Homo sapiens
  misc_feature (10)..(13): n is a, c, g, or t
  misc_feature (15)..(15): n is a, c, g, or t
  misc_feature (49)..(49): n is a, c, g, or t
cgagagaaannnnanaaaacttataggctaggtacgaggcctgggtgtngttcaaccttgtcaacccgtcggcgcggcctctggtgcagcggcggcggctcctgttcctgccgcagctctctccctttcttacctccccaccagatcccggagatcgcccgccatggctttacttactgcggccgcccggctcttgggaaccaagaatgcatcttgtcttgttcttgcagcccggcatgccagtgcttcctccacgaatttgaaagacatattggctgacctgatacctaaggagcaggccagaattaagactttcaggcagcaacatggcaagacggtggtgggccaaatcactgtggacatgatgtatggtggcatgagaggcatgaagggattggtctatgaaacatcagttcttgatcctgatgagggcatccgtttccgaggctttagtatccctgaatgccagaaactgctacccaaggctaagggtggggaagaacccctgcctgagggcttattttggctgctggtaactggacatatcccaacagaggaacaggtatcttggctctcaaaagagtgggcaaagagggcagctctgccttcccatgtggtcaccatgctggacaactttcccaccaatctacaccccatgtctcagctcagtgcagctgttacagccctcaacagtgaaagtaactttgcccgagcatatgcacagggtatcagccgaaccaagtactgggagttgatttatgaagactctatggatctaatcgcaaagctaccttgtgttgcagcaaagatctaccgaaatctctacagagaaggcagcggtattggggccattgactctaacctggactggtctcacaatttcaccaacatgttaggctatactgatcatcagttcactgagctcacgcgcctgtacctcaccatccacagtgaccatgagggtggcaatgtaagtgcccataccagccatttggtgggcagtgccctttccgacccttacctgtcctttgcagcagccatgaacgggctggcagggcctctccatggactggcaaatcaggaagtgcttgtctggctaacacagctgcagaaggaagttggcaaagatgtgtcagatgagaagttacgagactacatctggaacacactcaactcaggacgggttgttccaggctatggccatgcagtactaaggaagactgatccgcgatatacctgtcagcgagagtttgctctgaaacacctgcctaatgaccccatgtttaagttggttgctcagctgtacaagattgtgcccaatgtcctcttagagcagggtaaagccaagaatccttggcccaatgtagatgctcacagtggggtgctgctccagtattatggcatgacggagatgaattactacacggtcctgtttggggtgtcacgagcattgggtgtactggcacagctcatctggagccgagccttaggcttccctctagaaaggcccaagtccatgagcacagagggtctgatgaagtttgtggactctaagtcagggtaaaactggagactgggtgaaagtgactaccagaaagtgaggaagcctaaataaaaagtatacttttgtttcagggggcctttaaagacttaagattaaattatatctgaggcactgataatatgtttgaggttaaaatataaattaagactttaaaagatgaaaaatggtcccttcttccctaatcagctcccttcccctgcctggtatgagttgcccatcatacgcatggtcctggaggatgaccaggactaatgcatgtggtatgagtaggtttggccccctcactatctctagagtgagaatctggctcctgtttccatgggtcaaagccggttgcagagaatctgtagtcactttggagctttagcttctctgccaagccctcaataagccagcaaaccaggactctgccccttctgtttccataggaatcatgttggatagtcagctgtaccaagccccttggccctctcccatgcacacaaacacctcctagcaagacctgttggttagctggacatgctttggcaatttttttatactaccaagtgaccataaaggcatggcatttgttgtgactggcacccaatgtttgattttttttttaaaactatccaattaaaattaaggtctgggagtgttctgtttcccattactttaatactcacctcctcccagactttctacacctgttgcacctcaggcagaggatgttctggacctccccctcttggtccctactagagacctctcaacagatctgtgggcccagtcattgggttttatcagtgcttaatgtgaactaagttttttacttccacagaatacaagccactaccttctgacctccccaccccccaccaacccccatcttttaatatgctgtggggcatagaactccggaatgaccagcatgatattttcagagtcttgtccccggggtattagcacctctttttgaacagggaattgattcaagattggacatggtctcctctgattatcaggtactggggctgagggcattaaaaatagtaagcctccctcctcgtcccctgcctcaagaaattgcctccttatttatcaacatctttttcctccctttccctgagagctcacagtacaatgtttcagaagccccatttgcacaggttttcagcaactcagaatgctctacttctttttctttgagaaaggattaagatacactcctgctgtgcccccatctttcctccaaactcctgcctgtgtttgtgtggatacccagtcccagaaccacactgttgagttggacacactgtaaacccctgggtaactgtcaagtcatgatggagacttcaggttgttctgtataaaatgcaaaataaatgtttttattaacaa

SEQ ID NO: 71030 - DNA, 3248 bp, Homo sapiens
tagctaggacgagctgggttgttcaaccttgtcaacccgtcggcgcggcctctggtgcagcggcggcggctcctgttcctgccgcagctctctccctttcttacctccccaccagatcccggagatcgcccgccatggctttacttactgcggccgcccggctcttgggaaccaaggtgagcagcgaggggagggagcacgccgtcccagggtggggctgaggcgaccgcagccctccggcgccggggtctccctcccacacccgtgcgcaccctgcggccttaaagggccctgcgcttggctggccgccagccctgcgtgaagctacaggaccatgtgccgcgcttcccttctggctcctgggggtgaagtgcacgccgcccgccctcggcccgcagtccagaacgcgtgaggaggccgaccctgctgtcaccccgcatgtctgaaatgaaaggggaagggatgcgtggccctgaaatagcaaggagccgagacaggaacctctgaatgcatcttgtcttgttcttgcagcccggcatgccagtgcttcctccacgaatttgaaagacatattggctgacctgatacctaaggagcaggccagaattaagactttcaggcagcaacatggcaagacggtggtgggccaaatcactgtggacatgatgtatggtggcatgagaggcatgaagggattggtctatgaaacatcagttcttgatcctgatgagggcatccgtttccgaggctttagtatccctgaatgccagaaactgctacccaaggctaagggtggggaagaacccctgcctgagggcttattttggctgctggtaactggacatatcccaacagaggaacaggtatcttggctctcaaaagagtgggcaaagagggcagctctgccttcccatgtggtcaccatgctggacaactttcccaccaatctacaccccatgtctcagctcagtgcagctgttacagccctcaacagtgaaagtaactttgcccgagcatatgcacagggtatcagccgaaccaagtactgggagttgatttatgaagactctatggatctaatcgcaaagctaccttgtgttgcagcaaagatctaccgaaatctctacagagaaggcagcggtattggggccattgactctaacctggactggtctcacaatttcaccaacatgttaggctatactgatcatcagttcactgagctcacgcgcctgtacctcaccatccacagtgaccatgagggtggcaatgtaagtgcccataccagccatttggtgggcagtgccctttccgacccttacctgtcctttgcagcagccatgaacgggctggcagggcctctccatggactggcaaatcaggaagtgcttgtctggctaacacagctgcagaaggaagttggcaaagatgtgtcagatgagaagttacgagactacatctggaacacactcaactcaggacgggttgttccaggctatggccatgcagtactaaggaagactgatccgcgatatacctgtcagcgagagtttgctctgaaacacctgcctaatgaccccatgtttaagttggttgctcagctgtacaagattgtgcccaatgtcctcttagagcagggtaaagccaagaatccttggcccaatgtagatgctcacagtggggtgctgctccagtattatggcatgacggagatgaattactacacggtcctgtttggggtgtcacgagcattgggtgtactggcacagctcatctggagccgagccttaggcttccctctagaaaggcccaagtccatgagcacagagggtctgatgaagtttgtggactctaagtcagggtaaaactggagactgggtgaaagtgactaccagaaagtgaggaagcctaaataaaaagtatacttttgtttcagggggcctttaaagacttaagattaaattatatctgaggcactgataatatgtttgaggttaaaatataaattaagactttaaaagatgaaaaatggtcccttcttccctaatcagctcccttcccctgcctggtatgagttgcccatcatacgcatggtcctggaggatgaccaggactaatgcatgtggtatgagtaggtttggccccctcactatctctagagtgagaatctggctcctgtttccatgggtcaaagccggttgcagagaatctgtagtcactttggagctttagcttctctgccaagccctcaataagccagcaaaccaggactctgccccttctgtttccataggaatcatgttggatagtcagctgtaccaagccccttggccctctcccatgcacacaaacacctcctagcaagacctgttggttagctggacatgctttggcaatttttttatactaccaagtgaccataaaggcatggcatttgttgtgactggcacccaatgtttgattttttttttaaaactatccaattaaaattaaggtctgggagtgttctgtttcccattactttaatactcacctcctcccagactttctacacctgttgcacctcaggcagaggatgttctggacctccccctcttggtccctactagagacctctcaacagatctgtgggcccagtcattgggttttatcagtgcttaatgtgaactaagttttttacttccacagaatacaagccactaccttctgacctccccaccccccaccaacccccatcttttaatatgctgtggggcatagaactccggaatgaccagcatgatattttcagagtcttgtccccggggtattagcacctctttttgaacagggaattgattcaagattggacatggtctcctctgattatcaggtactggggctgagggcattaaaaatagtaagcctccctcctcgtcccctgcctcaagaaattgcctccttatttatcaacatctttttcctccctttccctgagagctcacagtacaatgtttcagaagccccatttgcacaggttttcagcaactcagaatgctctacttctttttctttgagaaaggattaagatacactcctgctgtgcccccatctttcctccaaactcctgcctgtgtttgtgtggatacccagtcccagaaccacactgttgagttggacacactgtaaacccctgggtaactgtcaagtcatgatggagacttcaggttgttctgtataaaatgcaaaataaatgtttttattaacaa

SEQ ID NO: 71031 - DNA, 3150 bp, Homo sapiens
tagctaggacgagctgggttgttcaaccttgtcaacccgtcggcgcggcctctggtgcagcggcggcggctcctgttcctgccgcagctctctccctttcttacctccccaccagatcccggagatcgcccgccatggctttacttactgcggccgcccggctcttgggaaccaaggtgagcagcgaggggagggagcacgccgtcccagggtggggctgaggcgaccgcagccctccggcgccggggtctccctcccacacccgtgcgcaccctgcggccttaaagggccctgcgcttggctggccgccagccctgcgtgaagctacaggaccatgtgccgcgcttcccttctggctcctgggggtgaagtgcacgccgcccgccctcggcccgcagtccagaacgcaatgcatcttgtcttgttcttgcagcccggcatgccagtgcttcctccacgaatttgaaagacatattggctgacctgatacctaaggagcaggccagaattaagactttcaggcagcaacatggcaagacggtggtgggccaaatcactgtggacatgatgtatggtggcatgagaggcatgaagggattggtctatgaaacatcagttcttgatcctgatgagggcatccgtttccgaggctttagtatccctgaatgccagaaactgctacccaaggctaagggtggggaagaacccctgcctgagggcttattttggctgctggtaactggacatatcccaacagaggaacaggtatcttggctctcaaaagagtgggcaaagagggcagctctgccttcccatgtggtcaccatgctggacaactttcccaccaatctacaccccatgtctcagctcagtgcagctgttacagccctcaacagtgaaagtaactttgcccgagcatatgcacagggtatcagccgaaccaagtactgggagttgatttatgaagactctatggatctaatcgcaaagctaccttgtgttgcagcaaagatctaccgaaatctctacagagaaggcagcggtattggggccattgactctaacctggactggtctcacaatttcaccaacatgttaggctatactgatcatcagttcactgagctcacgcgcctgtacctcaccatccacagtgaccatgagggtggcaatgtaagtgcccataccagccatttggtgggcagtgccctttccgacccttacctgtcctttgcagcagccatgaacgggctggcagggcctctccatggactggcaaatcaggaagtgcttgtctggctaacacagctgcagaaggaagttggcaaagatgtgtcagatgagaagttacgagactacatctggaacacactcaactcaggacgggttgttccaggctatggccatgcagtactaaggaagactgatccgcgatatacctgtcagcgagagtttgctctgaaacacctgcctaatgaccccatgtttaagttggttgctcagctgtacaagattgtgcccaatgtcctcttagagcagggtaaagccaagaatccttggcccaatgtagatgctcacagtggggtgctgctccagtattatggcatgacggagatgaattactacacggtcctgtttggggtgtcacgagcattgggtgtactggcacagctcatctggagccgagccttaggcttccctctagaaaggcccaagtccatgagcacagagggtctgatgaagtttgtggactctaagtcagggtaaaactggagactgggtgaaagtgactaccagaaagtgaggaagcctaaataaaaagtatacttttgtttcagggggcctttaaagacttaagattaaattatatctgaggcactgataatatgtttgaggttaaaatataaattaagactttaaaagatgaaaaatggtcccttcttccctaatcagctcccttcccctgcctggtatgagttgcccatcatacgcatggtcctggaggatgaccaggactaatgcatgtggtatgagtaggtttggccccctcactatctctagagtgagaatctggctcctgtttccatgggtcaaagccggttgcagagaatctgtagtcactttggagctttagcttctctgccaagccctcaataagccagcaaaccaggactctgccccttctgtttccataggaatcatgttggatagtcagctgtaccaagccccttggccctctcccatgcacacaaacacctcctagcaagacctgttggttagctggacatgctttggcaatttttttatactaccaagtgaccataaaggcatggcatttgttgtgactggcacccaatgtttgattttttttttaaaactatccaattaaaattaaggtctgggagtgttctgtttcccattactttaatactcacctcctcccagactttctacacctgttgcacctcaggcagaggatgttctggacctccccctcttggtccctactagagacctctcaacagatctgtgggcccagtcattgggttttatcagtgcttaatgtgaactaagttttttacttccacagaatacaagccactaccttctgacctccccaccccccaccaacccccatcttttaatatgctgtggggcatagaactccggaatgaccagcatgatattttcagagtcttgtccccggggtattagcacctctttttgaacagggaattgattcaagattggacatggtctcctctgattatcaggtactggggctgagggcattaaaaatagtaagcctccctcctcgtcccctgcctcaagaaattgcctccttatttatcaacatctttttcctccctttccctgagagctcacagtacaatgtttcagaagccccatttgcacaggttttcagcaactcagaatgctctacttctttttctttgagaaaggattaagatacactcctgctgtgcccccatctttcctccaaactcctgcctgtgtttgtgtggatacccagtcccagaaccacactgttgagttggacacactgtaaacccctgggtaactgtcaagtcatgatggagacttcaggttgttctgtataaaatgcaaaataaatgtttttattaacaa

SEQ ID NO: 71032 - DNA, 3331 bp, Homo sapiens
tagctaggacgagctgggttgttcaaccttgtcaacccgtcggcgcggcctctggtgcagcggcggcggctcctgttcctgccgcagctctctccctttcttacctccccaccagatcccggagatcgcccgccatggctttacttactgcggccgcccggctcttgggaaccaaggtgagcagcgaggggagggagcacgccgtcccagggtggggctgaggcgaccgcagccctccggcgccggggtctccctcccacacccgtgcgcaccctgcggccttaaagggccctgcgcttggctggccgccagccctgcgtgaagctacaggaccatgtgccgcgcttcccttctggctcctgggggtgaagtgcacgccgcccgccctcggcccgcagtccagaacgcgtgaggaggccgaccctgctgtcaccccgcatgtctgaaatgaaaggggaagggatgcgtggccctgaaatagcaaggagccgagacaggaacctctggcacccagtggcaagtactagctgagcatttgggagatgcttgtcttacttggctgttgcttctcctgctgctggggaaaaggaatgcatcttgtcttgttcttgcagcccggcatgccagtgcttcctccacgaatttgaaagacatattggctgacctgatacctaaggagcaggccagaattaagactttcaggcagcaacatggcaagacggtggtgggccaaatcactgtggacatgatgtatggtggcatgagaggcatgaagggattggtctatgaaacatcagttcttgatcctgatgagggcatccgtttccgaggctttagtatccctgaatgccagaaactgctacccaaggctaagggtggggaagaacccctgcctgagggcttattttggctgctggtaactggacatatcccaacagaggaacaggtatcttggctctcaaaagagtgggcaaagagggcagctctgccttcccatgtggtcaccatgctggacaactttcccaccaatctacaccccatgtctcagctcagtgcagctgttacagccctcaacagtgaaagtaactttgcccgagcatatgcacagggtatcagccgaaccaagtactgggagttgatttatgaagactctatggatctaatcgcaaagctaccttgtgttgcagcaaagatctaccgaaatctctacagagaaggcagcggtattggggccattgactctaacctggactggtctcacaatttcaccaacatgttaggctatactgatcatcagttcactgagctcacgcgcctgtacctcaccatccacagtgaccatgagggtggcaatgtaagtgcccataccagccatttggtgggcagtgccctttccgacccttacctgtcctttgcagcagccatgaacgggctggcagggcctctccatggactggcaaatcaggaagtgcttgtctggctaacacagctgcagaaggaagttggcaaagatgtgtcagatgagaagttacgagactacatctggaacacactcaactcaggacgggttgttccaggctatggccatgcagtactaaggaagactgatccgcgatatacctgtcagcgagagtttgctctgaaacacctgcctaatgaccccatgtttaagttggttgctcagctgtacaagattgtgcccaatgtcctcttagagcagggtaaagccaagaatccttggcccaatgtagatgctcacagtggggtgctgctccagtattatggcatgacggagatgaattactacacggtcctgtttggggtgtcacgagcattgggtgtactggcacagctcatctggagccgagccttaggcttccctctagaaaggcccaagtccatgagcacagagggtctgatgaagtttgtggactctaagtcagggtaaaactggagactgggtgaaagtgactaccagaaagtgaggaagcctaaataaaaagtatacttttgtttcagggggcctttaaagacttaagattaaattatatctgaggcactgataatatgtttgaggttaaaatataaattaagactttaaaagatgaaaaatggtcccttcttccctaatcagctcccttcccctgcctggtatgagttgcccatcatacgcatggtcctggaggatgaccaggactaatgcatgtggtatgagtaggtttggccccctcactatctctagagtgagaatctggctcctgtttccatgggtcaaagccggttgcagagaatctgtagtcactttggagctttagcttctctgccaagccctcaataagccagcaaaccaggactctgccccttctgtttccataggaatcatgttggatagtcagctgtaccaagccccttggccctctcccatgcacacaaacacctcctagcaagacctgttggttagctggacatgctttggcaatttttttatactaccaagtgaccataaaggcatggcatttgttgtgactggcacccaatgtttgattttttttttaaaactatccaattaaaattaaggtctgggagtgttctgtttcccattactttaatactcacctcctcccagactttctacacctgttgcacctcaggcagaggatgttctggacctccccctcttggtccctactagagacctctcaacagatctgtgggcccagtcattgggttttatcagtgcttaatgtgaactaagttttttacttccacagaatacaagccactaccttctgacctccccaccccccaccaacccccatcttttaatatgctgtggggcatagaactccggaatgaccagcatgatattttcagagtcttgtccccggggtattagcacctctttttgaacagggaattgattcaagattggacatggtctcctctgattatcaggtactggggctgagggcattaaaaatagtaagcctccctcctcgtcccctgcctcaagaaattgcctccttatttatcaacatctttttcctccctttccctgagagctcacagtacaatgtttcagaagccccatttgcacaggttttcagcaactcagaatgctctacttctttttctttgagaaaggattaagatacactcctgctgtgcccccatctttcctccaaactcctgcctgtgtttgtgtggatacccagtcccagaaccacactgttgagttggacacactgtaaacccctgggtaactgtcaagtcatgatggagacttcaggttgttctgtataaaatgcaaaataaatgtttttattaacaa

SEQ ID NO: 71033 - DNA, 3081 bp, Homo sapiens
tagctaggacgagctgggttgttcaaccttgtcaacccgtcggcgcggcctctggtgcagcggcggcggctcctgttcctgccgcagctctctccctttcttacctccccaccagatcccggagatcgcccgccatggctttacttactgcggccgcccggctcttgggaaccaaggagctgacctattgagtgagatgactgcctgattctcctgagagctgctgttccagtaaggtgactctacaggtggcatgcatccagaagccaaaagcccaactgtcacacctccaggattaggggagaatctgggaggtagaagttcagggatgattcagagaatgcatcttgtcttgttcttgcagcccggcatgccagtgcttcctccacgaatttgaaagacatattggctgacctgatacctaaggagcaggccagaattaagactttcaggcagcaacatggcaagacggtggtgggccaaatcactgtggacatgatgtatggtggcatgagaggcatgaagggattggtctatgaaacatcagttcttgatcctgatgagggcatccgtttccgaggctttagtatccctgaatgccagaaactgctacccaaggctaagggtggggaagaacccctgcctgagggcttattttggctgctggtaactggacatatcccaacagaggaacaggtatcttggctctcaaaagagtgggcaaagagggcagctctgccttcccatgtggtcaccatgctggacaactttcccaccaatctacaccccatgtctcagctcagtgcagctgttacagccctcaacagtgaaagtaactttgcccgagcatatgcacagggtatcagccgaaccaagtactgggagttgatttatgaagactctatggatctaatcgcaaagctaccttgtgttgcagcaaagatctaccgaaatctctacagagaaggcagcggtattggggccattgactctaacctggactggtctcacaatttcaccaacatgttaggctatactgatcatcagttcactgagctcacgcgcctgtacctcaccatccacagtgaccatgagggtggcaatgtaagtgcccataccagccatttggtgggcagtgccctttccgacccttacctgtcctttgcagcagccatgaacgggctggcagggcctctccatggactggcaaatcaggaagtgcttgtctggctaacacagctgcagaaggaagttggcaaagatgtgtcagatgagaagttacgagactacatctggaacacactcaactcaggacgggttgttccaggctatggccatgcagtactaaggaagactgatccgcgatatacctgtcagcgagagtttgctctgaaacacctgcctaatgaccccatgtttaagttggttgctcagctgtacaagattgtgcccaatgtcctcttagagcagggtaaagccaagaatccttggcccaatgtagatgctcacagtggggtgctgctccagtattatggcatgacggagatgaattactacacggtcctgtttggggtgtcacgagcattgggtgtactggcacagctcatctggagccgagccttaggcttccctctagaaaggcccaagtccatgagcacagagggtctgatgaagtttgtggactctaagtcagggtaaaactggagactgggtgaaagtgactaccagaaagtgaggaagcctaaataaaaagtatacttttgtttcagggggcctttaaagacttaagattaaattatatctgaggcactgataatatgtttgaggttaaaatataaattaagactttaaaagatgaaaaatggtcccttcttccctaatcagctcccttcccctgcctggtatgagttgcccatcatacgcatggtcctggaggatgaccaggactaatgcatgtggtatgagtaggtttggccccctcactatctctagagtgagaatctggctcctgtttccatgggtcaaagccggttgcagagaatctgtagtcactttggagctttagcttctctgccaagccctcaataagccagcaaaccaggactctgccccttctgtttccataggaatcatgttggatagtcagctgtaccaagccccttggccctctcccatgcacacaaacacctcctagcaagacctgttggttagctggacatgctttggcaatttttttatactaccaagtgaccataaaggcatggcatttgttgtgactggcacccaatgtttgattttttttttaaaactatccaattaaaattaaggtctgggagtgttctgtttcccattactttaatactcacctcctcccagactttctacacctgttgcacctcaggcagaggatgttctggacctccccctcttggtccctactagagacctctcaacagatctgtgggcccagtcattgggttttatcagtgcttaatgtgaactaagttttttacttccacagaatacaagccactaccttctgacctccccaccccccaccaacccccatcttttaatatgctgtggggcatagaactccggaatgaccagcatgatattttcagagtcttgtccccggggtattagcacctctttttgaacagggaattgattcaagattggacatggtctcctctgattatcaggtactggggctgagggcattaaaaatagtaagcctccctcctcgtcccctgcctcaagaaattgcctccttatttatcaacatctttttcctccctttccctgagagctcacagtacaatgtttcagaagccccatttgcacaggttttcagcaactcagaatgctctacttctttttctttgagaaaggattaagatacactcctgctgtgcccccatctttcctccaaactcctgcctgtgtttgtgtggatacccagtcccagaaccacactgttgagttggacacactgtaaacccctgggtaactgtcaagtcatgatggagacttcaggttgttctgtataaaatgcaaaataaatgtttttattaacaa

SEQ ID NO: 71034 - DNA, 3855 bp, Homo sapiens
  misc_feature (10)..(13): n is a, c, g, or t
  misc_feature (15)..(15): n is a, c, g, or t
  misc_feature (49)..(49): n is a, c, g, or t
cgagagaaannnnanaaaacttataggctaggtacgaggcctgggtgtngttcaaccttgtcaacccgtcggcgcggcctctggtgcagcggcggcggctcctgttcctgccgcagctctctccctttcttacctccccaccagatcccggagatcgcccgccatggctttacttactgcggccgcccggctcttgggaaccaagaatgcatcttgtcttgttcttgcagcccggcatgccagtgcttcctccacgaatttgaaagacatattggctgacctgatacctaaggagcaggccagaattaagactttcaggcagcaacatggcaagacggtggtgggccaaatcactgtggacatgatgtatggtggcatgagaggcatgaagggattggtctatgaaacatcagttcttgatcctgatgagggcatccgtttccgaggctttagtatccctgaatgccagaaactgctacccaaggctaagggtggggaagaacccctgcctgagggcttattttggctgctggtaactggacatatcccaacagaggaacaggtatcttggctctcaaaagagtgggcaaagagggcagctctgccttcccatgtggtcaccatgctggacaactttcccaccaatctacaccccatgtctcagctcagtgcagctgttacagccctcaacagtgaaagtaactttgcccgagcatatgcacagggtatcagccgaaccaagtactgggagttgatttatgaagactctatggatctaatcgcaaagctaccttgtgttgcagcaaagatctaccgaaatctctacagagaaggcagcggtattggggccattgactctaacctggactggtctcacaatttcaccaacatgttaggctatactgatcatcagttcactgagctcacgcgcctgtacctcaccatccacagtgaccatgagggtggcaatgtaagtgcccataccagccatttggtgggcagtgccctttccgacccttacctgtcctttgcagcagccatgaacgggctggcagggcctctccatggactggcaaatcaggaagtgcttgtctggctaacacagctgcagaaggaagttggcaaagatgtgtcagatgagaagttacgagactacatctggaacacactcaactcaggacgggttgttccaggctatggccatgcagtactaaggaagactgatccgcgatatacctgtcagcgagagtttgctctgaaacacctgcctaatgaccccatgtttaagttggttgctcagctgtacaagattgtgcccaatgtcctcttagagcagggtaaagccaagaatccttggcccaatgtagatgctcacagtggggtgctgctccagtattatggcatgacggagatgaattactacacggtcctgtttggggtgtcacgagcattgggtgtactggcacagctcatctggagccgagccttaggcttccctctagaaaggcccaagtccatgagcacagagggtctgatgaagtttgtggactctaagtcagggtaaaactggagactgggtgaaagtgactaccagaaagtgaggaagcctaaataaaaagtatacttttgtttcagggggcctttaaagacttaagattaaattatatctgaggcactgataatatgtttgaggttaaaatataaattaagactttaaaagatgaaaaatggtcccttcttccctaatcagctcccttcccctgcctggtatgagttgcccatcatacgcatggtcctggaggatgaccaggactaatgcatgtggtatgagtaggtttggccccctcactatctctagagtgagaatctggctcctgtttccatgggtcaaagccggttgcagagaatctgtagtcactttggagctttagcttctctgccaagccctcaataagccagcaaaccaggactctgccccttctgtttccataggaatcatgttggatagtcagctgtaccaagccccttggccctctcccatgcacacaaacacctcctagcaagacctgttggttagctggacatgctttggcaatttttttatactaccaagtgaccataaaggcatggcatttgttgtgactggcacccaatgtttgattttttttttaaaactatccaattaaaattaaggtctgggagtgttctgtttcccattactttaatactcacctcctcccagactttctacacctgttgcacctcaggcagaggatgttctggacctccccctcttggtccctactagagacctctcaacagatctgtgggcccagtcattgggttttatcagtgcttaatgtgaactaagttttttacttccacagaatacaagccactaccttctgacctccccaccccccaccaacccccatcttttaatatgctgtggggcatagaactccggaatgaccagcatgatattttcagagtcttgtccccggggtattagcacctctttttgaacagggaattgattcaagattggacatggtctcctctgattatcaggtactggggctgagggcattaaaaatagtaagcctccctcctcgtcccctgcctcaagaaattgcctccttatttatcaacatctttttcctccctttccctgagagctcacagtacaatgtttcagaagccccatttgcacaggttttcagcaactcagaatgctctacttctttttctttgagaaaggattaagatacactcctgctgtgcccccatctttcctccaaactcctgcctgtgtttgtgtggatacccagtcccagaaccacactgttgagttggacacactgtaaacccctgggtaactgtcaagtcatgatggagacttcaggttgttctgtataaaatgcaaaataaatgtttttattaacaaaaaaaaaaaaaaaaaaaaaaaaaaaaaaaaaaaaaaaaaaagagagggggcgcgccgcgcccacaagagatcccccccgagggggcgcccccacaccgcgcgcccccccgcacttgggagcccaagggggcgccccctaagggggcactccttatttatatcaccgccacgcggaccgcgcgcgcgagcgccgcgggtttaaaccaagcagctgaaagagggagagaacaaccgcggcaccccgctgagaggaacaacctctctggacaagaggagaccctatcactctcggaggggggggcacaacaaataggcgggacaaacccacacctaaaagaaatatatacaacaaccaccacaaaggggacaaatataacaacacttctccagcgggcagtcaaacgaggtgtgaatcaaaaccaaacccggcacaaactcccacgcacagctcaacaacaaacatctcagcgcacaaccacgagagcacacacagctcactcagcaaaccacatattatcaaccccggggggcgggcccagcaacgaacaaacaacgagccaagggcaacatacacacacggcacacacgccaaccccgcgacaccgccaccacaacaagccgccacccacccaccccagcgtctgagcgtggagcgtagggacggggcgggtgaaggagagagagacggcgacacgccggggggcgcccgcctagcataatacggccgccaccgaccaaaagcaaccagacagaacagggcaacgaacagacaaatgagaccgagacaagacacacaaagacacacagccagaagccagggagaagacgggcgtacggagcggaggagcgccaaggaacagcaggccagacacaaatgcggaagaacaacgggagcctgaaaacacacg

SEQ ID NO: 71035 - DNA, 3048 bp, Homo sapiens
  misc_feature (10)..(13): n is a, c, g, or t
  misc_feature (15)..(15): n is a, c, g, or t
  misc_feature (49)..(49): n is a, c, g, or t
cgagagaaannnnanaaaacttataggctaggtacgaggcctgggtgtngttcaaccttgtcaacccgtcggcgcggcctctggtgcagcggcggcggctcctgttcctgccgcagctctctccctttcttacctccccaccagatcccggagatcgcccgccatggctttacttactgcggccgcccggctcttgggaaccaagaatgcatcttgtcttgttcttgcagcccggcatgccagtgcttcctccacgaatttgaaagacatattggctgacctgatacctaaggagcaggccagaattaagactttcaggcagcaacatggcaagacggtggtgggccaaatcactgtggacatgatgtatggtggcatgagaggcatgaagggattggtctatgaaacatcagttcttgatcctgatgagggcatccgtttccgaggctttagtatccctgaatgccagaaactgctacccaaggctaagggtggggaagaacccctgcctgagggcttattttggctgctggtaactggacatatcccaacagaggaacaggtatcttggctctcaaaagagtgggcaaagagggcagctctgccttcccatgtggtcaccatgctggacaactttcccaccaatctacaccccatgtctcagctcagtgcagctgttacagccctcaacagtgaaagtaactttgcccgagcatatgcacagggtatcagccgaaccaagtactgggagttgatttatgaagactctatggatctaatcgcaaagctaccttgtgttgcagcaaagatctaccgaaatctctacagagaaggcagcggtattggggccattgactctaacctggactggtctcacaatttcaccaacatgttaggctatactgatcatcagttcactgagctcacgcgcctgtacctcaccatccacagtgaccatgagggtggcaatgtaagtgcccataccagccatttggtgggcagtgccctttccgacccttacctgtcctttgcagcagccatgaacgggctggcagggcctctccatggactggcaaatcaggaagtgcttgtctggctaacacagctgcagaaggaagttggcaaagatgtgtcagatgagaagttacgagactacatctggaacacactcaactcaggacgggttgttccaggctatggccatgcagtactaaggaagactgatccgcgatatacctgtcagcgagagtttgctctgaaacacctgcctaatgaccccatgtttaagttggttgctcagctgtacaagattgtgcccaatgtcctcttagagcagggtaaagccaagaatccttggcccaatgtagatgctcacagtggggtgctgctccagtattatggcatgacggagatgaattactacacggtcctgtttggggtgtcacgagcattgggtgtactggcacagctcatctggagccgagccttaggcttccctctagaaaggcccaagtccatgagcacagagggtctgatgaagtttgtggactctaagtcagggtaaaactggagactgggtgaaagtgactaccagaaagtgaggaagcctaaataaaaagtatacttttgtttcagggggcctttaaagacttaagattaaattatatctgaggcactgataatatgtttgaggttaaaatataaattaagactttaaaagatgaaaaatggtcccttcttccctaatcagctcccttcccctgcctggtatgagttgcccatcatacgcatggtcctggaggatgaccaggactaatgcatgtggtatgagtaggtttggccccctcactatctctagagtgagaatctggctcctgtttccatgggtcaaagccggttgcagagaatctgtagtcactttggagctttagcttctctgccaagccctcaataagccagcaaaccaggactctgccccttctgtttccataggaatcatgttggatagtcagctgtaccaagccccttggccctctcccatgcacacaaacacctcctagcaagacctgttggttagctggacatgctttggcaatttttttatactaccaagtgaccataaaggcatggcatttgttgtgactggcacccaatgtttgattttttttttaaaactatccaattaaaattaaggtctgggagtgttctgtttcccattactttaatactcacctcctcccagactttctacacctgttgcacctcaggcagaggatgttctggacctccccctcttggtccctactagagacctctcaacagatctgtgggcccagtcattgggttttatcagtgcttaatgtgaactaagttttttacttccacagaatacaagccactaccttctgacctccccaccccccaccaacccccatcttttaatatgctgtggggcatagaactccggaatgaccagcatgatattttcagagtcttgtccccggggtattagcacctctttttgaacagggaattgattcaagattggacatggtctcctctgattatcaggtactggggctgagggcattaaaaatagtaagcctccctcctcgtcccctgcctcaagaaattgcctccttatttatcaacatctttttcctccctttccctgagagctcacagtacaatgtttcagaagccccatttgcacaggttttcagcaactcagaatgctctacttctttttctttgagaaaggattaagatacactcctgctgtgcccccatctttcctccaaactcctgcctgtgtttgtgtggatacccagtcccagaaccacactgttgagttggacacactgtaaacccctgggtaactgtcaagtcatgatggagacttcaggttgttctgtataaaatgcaaaataaatgtttttattaacaaaaactctcactggccgtggtttacaacgttgtgactgggaaacctggggttaccaagttaatcgctgcagattccctttcgcagtggagtataggggcggc

SEQ ID NO: 71036 - DNA, 2936 bp, Homo sapiens
  misc_feature (10)..(13): n is a, c, g, or t
  misc_feature (15)..(15): n is a, c, g, or t
  misc_feature (49)..(49): n is a, c, g, or t
cgagagaaannnnanaaaacttataggctaggtacgaggcctgggtgtngttcaaccttgtcaacccgtcggcgcggcctctggtgcagcggcggcggctcctgttcctgccgcagctctctccctttcttacctccccaccagatcccggagatcgcccgccatggctttacttactgcggccgcccggctcttgggaaccaagaatgcatcttgtcttgttcttgcagcccggcatgccagtgcttcctccacgaatttgaaagacatattggctgacctgatacctaaggagcaggccagaattaagactttcaggcagcaacatggcaagacggtggtgggccaaatcactgtggacatgatgtatggtggcatgagaggcatgaagggattggtctatgaaacatcagttcttgatcctgatgagggcatccgtttccgaggctttagtatccctgaatgccagaaactgctacccaaggctaagggtggggaagaacccctgcctgagggcttattttggctgctggtaactggacatatcccaacagaggaacaggtatcttggctctcaaaagagtgggcaaagagggcagctctgccttcccatgtggtcaccatgctggacaactttcccaccaatctacaccccatgtctcagctcagtgcagctgttacagccctcaacagtgaaagtaactttgcccgagcatatgcacagggtatcagccgaaccaagtactgggagttgatttatgaagactctatggatctaatcgcaaagctaccttgtgttgcagcaaagatctaccgaaatctctacagagaaggcagcggtattggggccattgactctaacctggactggtctcacaatttcaccaacatgttaggctatactgatcatcagttcactgagctcacgcgcctgtacctcaccatccacagtgaccatgagggtggcaatgtaagtgcccataccagccatttggtgggcagtgccctttccgacccttacctgtcctttgcagcagccatgaacgggctggcagggcctctccatggactggcaaatcaggaagtgcttgtctggctaacacagctgcagaaggaagttggcaaagatgtgtcagatgagaagttacgagactacatctggaacacactcaactcaggacgggttgttccaggctatggccatgcagtactaaggaagactgatccgcgatatacctgtcagcgagagtttgctctgaaacacctgcctaatgaccccatgtttaagttggttgctcagctgtacaagattgtgcccaatgtcctcttagagcagggtaaagccaagaatccttggcccaatgtagatgctcacagtggggtgctgctccagtattatggcatgacggagatgaattactacacggtcctgtttggggtgtcacgagcattgggtgtactggcacagctcatctggagccgagccttaggcttccctctagaaaggcccaagtccatgagcacagagggtctgatgaagtttgtggactctaagtcagggtaaaactggagactgggtgaaagtgactaccagaaagtgaggaagcctaaataaaaagtatacttttgtttcagggggcctttaaagacttaagattaaattatatctgaggcactgataatatgtttgaggttaaaatataaattaagactttaaaagatgaaaaatggtcccttcttccctaatcagctcccttcccctgcctggtatgagttgcccatcatacgcatggtcctggaggatgaccaggactaatgcatgtggtatgagtaggtttggccccctcactatctctagagtgagaatctggctcctgtttccatgggtcaaagccggttgcagagaatctgtagtcactttggagctttagcttctctgccaagccctcaataagccagcaaaccaggactctgccccttctgtttccataggaatcatgttggatagtcagctgtaccaagccccttggccctctcccatgcacacaaacacctcctagcaagacctgttggttagctggacatgctttggcaatttttttatactaccaagtgaccataaaggcatggcatttgttgtgactggcacccaatgtttgattttttttttaaaactatccaattaaaattaaggtctgggagtgttctgtttcccattactttaatactcacctcctcccagactttctacacctgttgcacctcaggcagaggatgttctggacctccccctcttggtccctactagagacctctcaacagatctgtgggcccagtcattgggttttatcagtgcttaatgtgaactaagttttttacttccacagaatacaagccactaccttctgacctccccaccccccaccaacccccatcttttaatatgctgtggggcatagaactccggaatgaccagcatgatattttcagagtcttgtccccggggtattagcacctctttttgaacagggaattgattcaagattggacatggtctcctctgattatcaggtactggggctgagggcattaaaaatagtaagcctccctcctcgtcccctgcctcaagaaattgcctccttatttatcaacatctttttcctccctttccctgagagctcacagtacaatgtttcagaagccccatttgcacaggttttcagcaactcagaatgctctacttctttttctttgagaaaggattaagatacactcctgctgtgcccccatctttcctccaaactcctgcctgtgtttgtgtggatacccagtcccagaaccacactgttgagttggacacactgtaaacccctgggtaactgtcaagtcatgatggagacttcagttacatctagagatcaataatcctccctcct

SEQ ID NO: 71037 - DNA, 3433 bp, Homo sapiens
tagctaggacgagctgggttgttcaaccttgtcaacccgtcggcgcggcctctggtgcagcggcggcggctcctgttcctgccgcagctctctccctttcttacctccccaccagatcccggagatcgcccgccatggctttacttactgcggccgcccggctcttgggaaccaaggtgagcagcgaggggagggagcacgccgtcccagggtggggctgaggcgaccgcagccctccggcgccggggtctccctcccacacccgtgcgcaccctgcggccttaaagggccctgcgcttggctggccgccagccctgcgtgaagctacaggaccatgtgccgcgcttcccttctggctcctgggggtgaagtgcacgccgcccgccctcggcccgcagtccagaacgcgtgaggaggccgaccctgctgtcaccccgcatgtctgaaatgaaaggggaagggatgcgtggccctgaaatagcaaggagccgagacaggaacctctggcacccagtggcaagtactagctgagcatttgggagatgcttgtcttacttggctgttgcttctcctgctgctggggaaaaggaatgcatcttgtcttgttcttgcagcccggcatgccagtgcttcctccacggtaaggtttggaaaagaagactaagaataagaatcattgcggccagcctgaccttggggcagaggatttggcaaccacctggcctcttattatcctgagtataatttgaaagacatattggctgacctgatacctaaggagcaggccagaattaagactttcaggcagcaacatggcaagacggtggtgggccaaatcactgtggacatgatgtatggtggcatgagaggcatgaagggattggtctatgaaacatcagttcttgatcctgatgagggcatccgtttccgaggctttagtatccctgaatgccagaaactgctacccaaggctaagggtggggaagaacccctgcctgagggcttattttggctgctggtaactggacatatcccaacagaggaacaggtatcttggctctcaaaagagtgggcaaagagggcagctctgccttcccatgtggtcaccatgctggacaactttcccaccaatctacaccccatgtctcagctcagtgcagctgttacagccctcaacagtgaaagtaactttgcccgagcatatgcacagggtatcagccgaaccaagtactgggagttgatttatgaagactctatggatctaatcgcaaagctaccttgtgttgcagcaaagatctaccgaaatctctacagagaaggcagcggtattggggccattgactctaacctggactggtctcacaatttcaccaacatgttaggctatactgatcatcagttcactgagctcacgcgcctgtacctcaccatccacagtgaccatgagggtggcaatgtaagtgcccataccagccatttggtgggcagtgccctttccgacccttacctgtcctttgcagcagccatgaacgggctggcagggcctctccatggactggcaaatcaggaagtgcttgtctggctaacacagctgcagaaggaagttggcaaagatgtgtcagatgagaagttacgagactacatctggaacacactcaactcaggacgggttgttccaggctatggccatgcagtactaaggaagactgatccgcgatatacctgtcagcgagagtttgctctgaaacacctgcctaatgaccccatgtttaagttggttgctcagctgtacaagattgtgcccaatgtcctcttagagcagggtaaagccaagaatccttggcccaatgtagatgctcacagtggggtgctgctccagtattatggcatgacggagatgaattactacacggtcctgtttggggtgtcacgagcattgggtgtactggcacagctcatctggagccgagccttaggcttccctctagaaaggcccaagtccatgagcacagagggtctgatgaagtttgtggactctaagtcagggtaaaactggagactgggtgaaagtgactaccagaaagtgaggaagcctaaataaaaagtatacttttgtttcagggggcctttaaagacttaagattaaattatatctgaggcactgataatatgtttgaggttaaaatataaattaagactttaaaagatgaaaaatggtcccttcttccctaatcagctcccttcccctgcctggtatgagttgcccatcatacgcatggtcctggaggatgaccaggactaatgcatgtggtatgagtaggtttggccccctcactatctctagagtgagaatctggctcctgtttccatgggtcaaagccggttgcagagaatctgtagtcactttggagctttagcttctctgccaagccctcaataagccagcaaaccaggactctgccccttctgtttccataggaatcatgttggatagtcagctgtaccaagccccttggccctctcccatgcacacaaacacctcctagcaagacctgttggttagctggacatgctttggcaatttttttatactaccaagtgaccataaaggcatggcatttgttgtgactggcacccaatgtttgattttttttttaaaactatccaattaaaattaaggtctgggagtgttctgtttcccattactttaatactcacctcctcccagactttctacacctgttgcacctcaggcagaggatgttctggacctccccctcttggtccctactagagacctctcaacagatctgtgggcccagtcattgggttttatcagtgcttaatgtgaactaagttttttacttccacagaatacaagccactaccttctgacctccccaccccccaccaacccccatcttttaatatgctgtggggcatagaactccggaatgaccagcatgatattttcagagtcttgtccccggggtattagcacctctttttgaacagggaattgattcaagattggacatggtctcctctgattatcaggtactggggctgagggcattaaaaatagtaagcctccctcctcgtcccctgcctcaagaaattgcctccttatttatcaacatctttttcctccctttccctgagagctcacagtacaatgtttcagaagccccatttgcacaggttttcagcaactcagaatgctctacttctttttctttgagaaaggattaagatacactcctgctgtgcccccatctttcctccaaactcctgcctgtgtttgtgtggatacccagtcccagaaccacactgttgagttggacacactgtaaacccctgggtaactgtcaagtcatgatggagacttcaggttgttctgtataaaatgcaaaataaatgtttttattaacaa

SEQ ID NO: 71038 - DNA, 2899 bp, Homo sapiens
  misc_feature (10)..(13): n is a, c, g, or t
  misc_feature (15)..(15): n is a, c, g, or t
  misc_feature (49)..(49): n is a, c, g, or t
cgagagaaannnnanaaaacttataggctaggtacgaggcctgggtgtngttcaaccttgtcaacccgtcggcgcggcctctggtgcagcggcggcggctcctgttcctgccgcagctctctccctttcttacctccccaccagatcccggagatcgcccgccatggctttacttactgcggccgcccggctcttgggaaccaagaatgcatcttgtcttgttcttgcagcccggcatgccagtgcttcctccacgaatttgaaagacatattggctgacctgatacctaaggagcaggccagaattaagactttcaggcagcaacatggcaagacggtggtgggccaaatcactgtggacatgatgtatggtggcatgagaggcatgaagggattggtctatgaaacatcagttcttgatcctgatgagggcatccgtttccgaggctttagtatccctgaatgccagaaactgctacccaaggctaagggtggggaagaacccctgcctgagggcttattttggctgctggtaactggacatatcccaacagaggaacaggtatcttggctctcaaaagagtgggcaaagagggcagctctgccttcccatgtggtcaccatgctggacaactttcccaccaatctacaccccatgtctcagctcagtgcagctgttacagccctcaacagtgaaagtaactttgcccgagcatatgcacagggtatcagccgaaccaagtactgggagttgatttatgaagactctatggatctaatcgcaaagctaccttgtgttgcagcaaagatctaccgaaatctctacagagaaggcagcggtattggggccattgactctaacctggactggtctcacaatttcaccaacatgttaggctatactgatcatcagttcactgagctcacgcgcctgtacctcaccatccacagtgaccatgagggtggcaatgtaagtgcccataccagccatttggtgggcagtgccctttccgacccttacctgtcctttgcagcagccatgaacgggctggcagggcctctccatggactggcaaatcaggaagtgcttgtctggctaacacagctgcagaaggaagttggcaaagatgtgtcagatgagaagttacgagactacatctggaacacactcaactcaggacgggttgttccaggctatggccatgcagtactaaggaagactgatccgcgatatacctgtcagcgagagtttgctctgaaacacctgcctaatgaccccatgtttaagttggttgctcagctgtacaagattgtgcccaatgtcctcttagagcagggtaaagccaagaatccttggcccaatgtagatgctcacagtggggtgctgctccagtattatggcatgacggagatgaattactacacggtcctgtttggggtgtcacgagcattgggtgtactggcacagctcatctggagccgagccttaggcttccctctagaaaggcccaagtccatgagcacagagggtctgatgaagtttgtggactctaagtcagggtaaaactggagactgggtgaaagtgactaccagaaagtgaggaagcctaaataaaaagtatacttttgtttcagggggcctttaaagacttaagattaaattatatctgaggcactgataatatgtttgaggttaaaatataaattaagactttaaaagatgaagttgcccatcatacgcatggtcctggaggatgaccaggactaatgcatgtggtatgagtaggtttggccccctcactatctctagagtgagaatctggctcctgtttccatgggtcaaagccggttgcagagaatctgtagtcactttggagctttagcttctctgccaagccctcaataagccagcaaaccaggactctgccccttctgtttccataggaatcatgttggatagtcagctgtaccaagccccttggccctctcccatgcacacaaacacctcctagcaagacctgttggttagctggacatgctttggcaatttttttatactaccaagtgaccataaaggcatggcatttgttgtgactggcacccaatgtttgattttttttttaaaactatccaattaaaattaaggtctgggagtgttctgtttcccattactttaatactcacctcctcccagactttctacacctgttgcacctcaggcagaggatgttctggacctccccctcttggtccctactagagacctctcaacagatctgtgggcccagtcattgggttttatcagtgcttaatgtgaactaagttttttacttccacagaatacaagccactaccttctgacctccccaccccccaccaacccccatcttttaatatgctgtggggcatagaactccggaatgaccagcatgatattttcagagtcttgtccccggggtattagcacctctttttgaacagggaattgattcaagattggacatggtctcctctgattatcaggtactggggctgagggcattaaaaatagtaagcctccctcctcgtcccctgcctcaagaaattgcctccttatttatcaacatctttttcctccctttccctgagagctcacagtacaatgtttcagaagccccatttgcacaggttttcagcaactcagaatgctctacttctttttctttgagaaaggattaagatacactcctgctgtgcccccatctttcctccaaactcctgcctgtgtttgtgtggatacccagtcccagaaccacactgttgagttggacacactgtaaacccctgggtaactgtcaagtcatgatggagacttcaggttgttctgtataaaatgcaaaataaatgtttttattaacaa

SEQ ID NO: 71039 - DNA, 2646 bp, Homo sapiens
cctaggtggaggccgcgcgttaatcggccgaggcggtggtcgggccatatcactgtggacatgatgtatggtggcatgagaggcatgaagggattggtctatgaaacatcagttcttgatcctgatgagggcatccgtttccgaggctttagtatccctgaatgccagaaactgctacccaaggctaagggtggggaagaacccctgcctgagggcttattttggctgctggtaactggacatatcccaacagaggaacaggtatcttggctctcaaaagagtgggcaaagagggcagctctgccttcccatgtggtcaccatgctggacaactttcccaccaatctacaccccatgtctcagctcagtgcagctgttacagccctcaacagtgaaagtaactttgcccgagcatatgcacagggtatcagccgaaccaagtactgggagttgatttatgaagactctatggatctaatcgcaaagctaccttgtgttgcagcaaagatctaccgaaatctctacagagaaggcagcggtattggggccattgactctaacctggactggtctcacaatttcaccaacatgttaggctatactgatcatcagttcactgagctcacgcgcctgtacctcaccatccacagtgaccatgagggtggcaatgtaagtgcccataccagccatttggtgggcagtgccctttccgacccttacctgtcctttgcagcagccatgaacgggctggcagggcctctccatggactggcaaatcaggaagtgcttgtctggctaacacagctgcagaaggaagttggcaaagatgtgtcagatgagaagttacgagactacatctggaacacactcaactcaggacgggttgttccaggctatggccatgcagtactaaggaagactgatccgcgatatacctgtcagcgagagtttgctctgaaacacctgcctaatgaccccatgtttaagttggttgctcagctgtacaagattgtgcccaatgtcctcttagagcagggtaaagccaagaatccttggcccaatgtagatgctcacagtggggtgctgctccagtattatggcatgacggagatgaattactacacggtcctgtttggggtgtcacgagcattgggtgtactggcacagctcatctggagccgagccttaggcttccctctagaaaggcccaagtccatgagcacagagggtctgatgaagtttgtggactctaagtcagggtaaaactggagactgggtgaaagtgactaccagaaagtgaggaagcctaaataaaaagtatacttttgtttcagggggcctttaaagacttaagattaaattatatctgaggcactgataatatgtttgaggttaaaatataaattaagactttaaaagatgaaaaatggtcccttcttccctaatcagctcccttcccctgcctggtatgagttgcccatcatacgcatggtcctggaggatgaccaggactaatgcatgtggtatgagtaggtttggccccctcactatctctagagtgagaatctggctcctgtttccatgggtcaaagccggttgcagagaatctgtagtcactttggagctttagcttctctgccaagccctcaataagccagcaaaccaggactctgccccttctgtttccataggaatcatgttggatagtcagctgtaccaagccccttggccctctcccatgcacacaaacacctcctagcaagacctgttggttagctggacatgctttggcaatttttttatactaccaagtgaccataaaggcatggcatttgttgtgactggcacccaatgtttgattttttttttaaaactatccaattaaaattaaggtctgggagtgttctgtttcccattactttaatactcacctcctcccagactttctacacctgttgcacctcaggcagaggatgttctggacctccccctcttggtccctactagagacctctcaacagatctgtgggcccagtcattgggttttatcagtgcttaatgtgaactaagttttttacttccacagaatacaagccactaccttctgacctccccaccccccaccaacccccatcttttaatatgctgtggggcatagaactccggaatgaccagcatgatattttcagagtcttgtccccggggtattagcacctctttttgaacagggaattgattcaagattggacatggtctcctctgattatcaggtactggggctgagggcattaaaaatagtaagcctccctcctcgtcccctgcctcaagaaattgcctccttatttatcaacatctttttcctccctttccctgagagctcacagtacaatgtttcagaagccccatttgcacaggttttcagcaactcagaatgctctacttctttttctttgagaaaggattaagatacactcctgctgtgcccccatctttcctccaaactcctgcctgtgtttgtgtggatacccagtcccagaaccacactgttgagttggacacactgtaaacccctgggtaactgtcaagtcatgatggagacttcaggttgttctgtataaaatgcaaaataaatgtttttattaacaa

SEQ ID NO: 71040 - DNA, 3169 bp, Homo sapiens
tagctaggacgagctgggttgttcaaccttgtcaacccgtcggcgcggcctctggtgcagcggcggcggctcctgttcctgccgcagctctctccctttcttacctccccaccagatcccggagatcgcccgccatggctttacttactgcggccgcccggctcttgggaaccaagaatgcatcttgtcttgttcttgcagcccggcatgccagtgcttcctccacgaatttgaaagacatattggctgacctgatacctaaggagcaggccagaattaagactttcaggcagcaacatggcaagacggtggtgggccaaatcactgtggacatgatgtatggtggcatgagaggcatgaagggattggtctatgaaacatcagttcttgatcctgatgagggcatccgtttccgaggctttagtatccctgaatgccagaaactgctacccaaggctaagggtggggaagaacccctgcctgagggcttattttggctgctggtaactggacatatcccaacagaggaacaggtaaagcagaaggatattattagctcttctcattccccttcttcattgcctttctctaatctcagacacttaatgctgatccggcatttatagagatgcgtagtgaagggaaggaatcagcagagttctgctgtataaatggattgggttgacctctcttgggttttctttactcagatgttgctgtccttttttatttttctccttccttgtccttgctggtgttctgagcactgtctctttttccacaggtatcttggctctcaaaagagtgggcaaagagggcagctctgccttcccatgtggtcaccatgctggacaactttcccaccaatctacaccccatgtctcagctcagtgcagctgttacagccctcaacagtgaaagtaactttgcccgagcatatgcacagggtatcagccgaaccaagtactgggagttgatttatgaagactctatggatctaatcgcaaagctaccttgtgttgcagcaaagatctaccgaaatctctacagagaaggcagcggtattggggccattgactctaacctggactggtctcacaatttcaccaacatgttaggctatactgatcatcagttcactgagctcacgcgcctgtacctcaccatccacagtgaccatgagggtggcaatgtaagtgcccataccagccatttggtgggcagtgccctttccgacccttacctgtcctttgcagcagccatgaacgggctggcagggcctctccatggactggcaaatcaggaagtgcttgtctggctaacacagctgcagaaggaagttggcaaagatgtgtcagatgagaagttacgagactacatctggaacacactcaactcaggacgggttgttccaggctatggccatgcagtactaaggaagactgatccgcgatatacctgtcagcgagagtttgctctgaaacacctgcctaatgaccccatgtttaagttggttgctcagctgtacaagattgtgcccaatgtcctcttagagcagggtaaagccaagaatccttggcccaatgtagatgctcacagtggggtgctgctccagtattatggcatgacggagatgaattactacacggtcctgtttggggtgtcacgagcattgggtgtactggcacagctcatctggagccgagccttaggcttccctctagaaaggcccaagtccatgagcacagagggtctgatgaagtttgtggactctaagtcagggtaaaactggagactgggtgaaagtgactaccagaaagtgaggaagcctaaataaaaagtatacttttgtttcagggggcctttaaagacttaagattaaattatatctgaggcactgataatatgtttgaggttaaaatataaattaagactttaaaagatgaaaaatggtcccttcttccctaatcagctcccttcccctgcctggtatgagttgcccatcatacgcatggtcctggaggatgaccaggactaatgcatgtggtatgagtaggtttggccccctcactatctctagagtgagaatctggctcctgtttccatgggtcaaagccggttgcagagaatctgtagtcactttggagctttagcttctctgccaagccctcaataagccagcaaaccaggactctgccccttctgtttccataggaatcatgttggatagtcagctgtaccaagccccttggccctctcccatgcacacaaacacctcctagcaagacctgttggttagctggacatgctttggcaatttttttatactaccaagtgaccataaaggcatggcatttgttgtgactggcacccaatgtttgattttttttttaaaactatccaattaaaattaaggtctgggagtgttctgtttcccattactttaatactcacctcctcccagactttctacacctgttgcacctcaggcagaggatgttctggacctccccctcttggtccctactagagacctctcaacagatctgtgggcccagtcattgggttttatcagtgcttaatgtgaactaagttttttacttccacagaatacaagccactaccttctgacctccccaccccccaccaacccccatcttttaatatgctgtggggcatagaactccggaatgaccagcatgatattttcagagtcttgtccccggggtattagcacctctttttgaacagggaattgattcaagattggacatggtctcctctgattatcaggtactggggctgagggcattaaaaatagtaagcctccctcctcgtcccctgcctcaagaaattgcctccttatttatcaacatctttttcctccctttccctgagagctcacagtacaatgtttcagaagccccatttgcacaggttttcagcaactcagaatgctctacttctttttctttgagaaaggattaagatacactcctgctgtgcccccatctttcctccaaactcctgcctgtgtttgtgtggatacccagtcccagaaccacactgttgagttggacacactgtaaacccctgggtaactgtcaagtcatgatggagacttcaggttgttctgtataaaatgcaaaataaatgtttttattaacaa

SEQ ID NO: 71041 - DNA, 2221 bp, Homo sapiens
gcctcgtgccgattcggcacgagggttgatttatgaagactctatggatctaatcgcaaagctaccttgtgttgcagcaaagatctaccgaaatctctacagagaaggcagcggtattggggccattgactctaacctggactggtctcacaatttcaccaacatgttaggctatactgatcatcagttcactgagctcacgcgcctgtacctcaccatccacagtgaccatgagggtggcaatgtaagtgcccataccagccatttggtgggcagtgccctttccgacccttacctgtcctttgcagcagccatgaacgggctggcagggcctctccatggactggcaaatcaggaagtgcttgtctggctaacacagctgcagaaggaagttggcaaagatgtgtcagatgagaagttacgagactacatctggaacacactcaactcaggacgggttgttccaggctatggccatgcagtactaaggaagactgatccgcgatatacctgtcagcgagagtttgctctgaaacacctgcctaatgaccccatgtttaagttggttgctcagctgtacaagattgtgcccaatgtcctcttagagcagggtaaagccaagaatccttggcccaatgtagatgctcacagtggggtgctgctccagtattatggcatgacggagatgaattactacacggtcctgtttggggtgtcacgagcattgggtgtactggcacagctcatctggagccgagccttaggcttccctctagaaaggcccaagtccatgagcacagagggtctgatgaagtttgtggactctaagtcagggtaaaactggagactgggtgaaagtgactaccagaaagtgaggaagcctaaataaaaagtatacttttgtttcagggggcctttaaagacttaagattaaattatatctgaggcactgataatatgtttgaggttaaaatataaattaagactttaaaagatgaaaaatggtcccttcttccctaatcagctcccttcccctgcctggtatgagttgcccatcatacgcatggtcctggaggatgaccaggactaatgcatgtggtatgagtaggtttggccccctcactatctctagagtgagaatctggctcctgtttccatgggtcaaagccggttgcagagaatctgtagtcactttggagctttagcttctctgccaagccctcaataagccagcaaaccaggactctgccccttctgtttccataggaatcatgttggatagtcagctgtaccaagccccttggccctctcccatgcacacaaacacctcctagcaagacctgttggttagctggacatgctttggcaatttttttatactaccaagtgaccataaaggcatggcatttgttgtgactggcacccaatgtttgattttttttttaaaactatccaattaaaattaaggtctgggagtgttctgtttcccattactttaatactcacctcctcccagactttctacacctgttgcacctcaggcagaggatgttctggacctccccctcttggtccctactagagacctctcaacagatctgtgggcccagtcattgggttttatcagtgcttaatgtgaactaagttttttacttccacagaatacaagccactaccttctgacctccccaccccccaccaacccccatcttttaatatgctgtggggcatagaactccggaatgaccagcatgatattttcagagtcttgtccccggggtattagcacctctttttgaacagggaattgattcaagattggacatggtctcctctgattatcaggtactggggctgagggcattaaaaatagtaagcctccctcctcgtcccctgcctcaagaaattgcctccttatttatcaacatctttttcctccctttccctgagagctcacagtacaatgtttcagaagccccatttgcacaggttttcagcaactcagaatgctctacttctttttctttgagaaaggattaagatacactcctgctgtgcccccatctttcctccaaactcctgcctgtgtttgtgtggatacccagtcccagaaccacactgttgagttggacacactgtaaacccctgggtaactgtcaagtcatgatggagacttcaggttgttctgtataaaatgcaaaataaatgtttttattaacaa

SEQ ID NO: 71042 - DNA, 2893 bp, Homo sapiens
  misc_feature (10)..(13): n is a, c, g, or t
  misc_feature (15)..(15): n is a, c, g, or t
  misc_feature (49)..(49): n is a, c, g, or t
cgagagaaannnnanaaaacttataggctaggtacgaggcctgggtgtngttcaaccttgtcaacccgtcggcgcggcctctggtgcagcggcggcggctcctgttcctgccgcagctctctccctttcttacctccccaccagatcccggagatcgcccgccatggctttacttactgcggccgcccggctcttgggaaccaagaatgcatcttgtcttgttcttgcagcccggcatgccagtgcttcctccacgaatttgaaagacatattggctgacctgatacctaaggagcaggccagaattaagactttcaggcagcaacatggcaagacggtggtgggccaaatcactgtggacatgatgtatggtggcatgagaggcatgaagggattggtctatgaaacatcagttcttgatcctgatgagggcatccgtttccgaggctttagtatccctgaatgccagaaactgctacccaaggctaagggtggggaagaacccctgcctgagggcttattttggctgctggtaactggacatatcccaacagaggaacaggtatcttggctctcaaaagagtgggcaaagagggcagctctgccttcccatgtggtcaccatgctggacaactttcccaccaatctacaccccatgtctcagctcagtgcagctgttacagccctcaacagtgaaagtaactttgcccgagcatatgcacagggtatcagccgaaccaagtactgggagttgatttatgaagactctatggatctaatcgcaaagctaccttgtgttgcagcaaagatctaccgaaatctctacagagaaggcagcggtattggggccattgactctaacctggactggtctcacaatttcaccaacatgttaggctatactgatcatcagttcactgagctcacgcgcctgtacctcaccatccacagtgaccatgagggtggcaatgtaagtgcccataccagccatttggtgggcagtgccctttccgacccttacctgtcctttgcagcagccatgaacgggctggcagggcctctccatggactggcaaatcaggaagtgcttgtctggctaacacagctgcagaaggaagttggcaaagatgtgtcagatgagaagttacgagactacatctggaacacactcaactcaggacgggttgttccaggctatggccatgcagtactaaggaagactgatccgcgatatacctgtcagcgagagtttgctctgaaacacctgcctaatgaccccatgtttaagttggttgctcagctgtacaagattgtgcccaatgtcctcttagagcagggtaaagccaagaatccttggcccaatgtagatgctcacagtggggtgctgctccagtattatggcatgacggagatgaattactacacggtcctgtttggggtgtcacgagcattgggtgtactggcacagctcatctggagccgagccttaggcttccctctagaaaggcccaagtccatgagcacagagggtctgatgaagtttgtggactctaagtcagggtaaaactggagactgggtgaaagtgactaccagaaagtgaggaagcctaaataaaaagtatacttttgtttcagggggcctttaaagacttaagattaaattatatctgaggcactgataatatgtttgaggttaaaatataaattaagactttaaaagatgaaaaatggtcccttcttccctaatcagctcccttcccctgcctggtatgagttgcccatcatacgcatggtcctggaggatgaccaggactaatgcatgtggtatgagtaggtttggccccctcactatctctagagtgagaatctggctcctgtttccatgggtcaaagccggttgcagagaatctgtagtcactttggagctttagcttctctgccaagccctcaataagccagcaaaccaggactctgccccttctgtttccataggaatcatgttggatagtcagctgtaccaagccccttggccctctcccatgcacacaaacacctcctagcaagacctgttggttagctggacatgctttggcaatttttttatactaccaagtgaccataaaggcatggcatttgttgtgactggcacccaatgtttgattttttttttaaaactatccaattaaaattaaggtctgggagtgttctgtttcccattactttaatactcacctcctcccagactttctacacctgttgcacctcaggcagaggatgttctggacctccccctcttggtccctactagagacctctcaacagatctgtgggcccagtcattgggttttatcagtgcttaatgtgaactaagttttttacttccacagaatacaagccactaccttctgacctccccaccccccaccaacccccatcttttaatatgctgtggggcatagaactccggaatgaccagcatgatattttcagagtcttgtccccggggtattagcacctctttttgaacagggaattgattcaagattggacatggtctcctctgattatcaggtactggggctgagggcattaatcaacatctttttcctccctttccctgagagctcacagtacaatgtttcagaagccccatttgcacaggttttcagcaactcagaatgctctacttctttttctttgagaaaggattaagatacactcctgctgtgcccccatctttcctccaaactcctgcctgtgtttgtgtggatacccagtcccagaaccacactgttgagttggacacactgtaaacccctgggtaactgtcaagtcatgatggagacttcaggttgttctgtataaaatgcaaaataaatgtttttattaacaa

SEQ ID NO: 71043 - DNA, 2634 bp, Homo sapiens
  misc_feature (10)..(13): n is a, c, g, or t
  misc_feature (15)..(15): n is a, c, g, or t
  misc_feature (49)..(49): n is a, c, g, or t
cgagagaaannnnanaaaacttataggctaggtacgaggcctgggtgtngttcaaccttgtcaacccgtcggcgcggcctctggtgcagcggcggcggctcctgttcctgccgcagctctctccctttcttacctccccaccagatcccggagatcgcccgccatggctttacttactgcggccgcccggctcttgggaaccaagaatgcatcttgtcttgttcttgcagcccggcatgccagtgcttcctccacgaatttgaaagacatattggctgacctgatacctaaggagcaggccagaattaagactttcaggcagcaacatggcaagacggtggtgggccaaatcactgtggacatgatgtatggtggcatgagaggcatgaagggattggtctatgaaacatcagttcttgatcctgatgagggcatccgtttccgaggctttagtatccctgaatgccagaaactgctacccaaggctaagggtggggaagaacccctgcctgagggcttattttggctgctggtaactggacatatcccaacagaggaacaggtatcttggctctcaaaagagtgggcaaagagggcagctctgccttcccatgtggtcaccatgctggacaactttcccaccaatctacaccccatgtctcagctcagtgcagctgttacagccctcaacagtgaaagtaactttgcccgagcatatgcacagggtatcagccgaaccaagtactgggagttgatttatgaagactctatggatctaatcgcaaagctaccttgtgttgcagcaaagatctaccgaaatctctacagagaaggcagcggtattggggccattgactctaacctggactggtctcacaatttcaccaacatgttaggctatactgatcatcagttcactgagctcacgcgcctgtacctcaccatccacagtgaccatgagggtggcaatgtaagtgcccataccagccatttggtgggcagtgccctttccgacccttacctgtcctttgcagcagccatgaacgggctggcagggcctctccatggactggcaaatcaggaagtgcttgtctggctaacacagctgcagaaggaagttggcaaagatgtgtcagatgagaagttacgagactacatctggaacacactcaactcaggacgggttgttccaggctatggccatgcagtactaaggaagactgatccgcgatatacctgtcagcgagagtttgctctgaaacacctgcctaatgaccccatgtttaagttggttgctcagctgtacaagattgtgcccaatgtcctcttagagcagggtaaagccaagaatccttggcccaatgtagatgctcacagtggggtgctgctccagtattatggcatgacggagatgaattactacacggtcctgtttggggtgtcacgagcattgggtgtactggcacagctcatctggagccgagccttaggcttccctctagaaaggcccaagtccatgagcacagagggtctgatgaagtttgtggactctaagtcagggtaaaactggagactgggtgaaagtgactaccagaaagtgaggaagcctaaataaaaagtatacttttgtttcagggggcctttaaagacttaagattaaattatatctgaggcactgataatatgtttgaggttaaaatataaattaagactttaaaagatgaaaaatggtcccttcttccctaatcagctcccttcccctgcctggtatgagttgcccatcatacgcatggtcctggaggatgaccaggactaatgcatgtggtatgagtaggtttggccccctcactatctctagagtgagaatctggctcctgtttccatgggtcaaagccggttgcagagaatctgtagtcactttggagctttagcttctctgccaagccctcaataagccagcaaaccaggactctgccccttctgtttccataggaatcatgttggatagtcagctgtaccaagccccttggccctctcccatgcacacaaacacctcctagcaagacctgttggttagctggacatgctttggcaatttttttatactaccaagtgaccataaaggcatggcatttgttgtgactggcacccaatgtttgattttttttttaaaactatccaattaaaattaaggtctgggagtgttctgtttcccattactttaatactcacctcctcccagactttctacacctgttgcacctcaggcagaggatgttctggacctccccctcttggtccctactagagacctctcaacagatctgtgggcccagtcattgggttttatcagtgcttaatgtgaactaagttttttacttccacagaatacaagggcatactcggactcccaccccacaaacccatctttattatgtgggcgcttaactcggaagaccgctaattcaaagtgtcccgggttacactctttgcccggatgtcagagggaggtcccgaacagacggggggtaaaaaggccccggccgtcaaatgcttataatttccctcggaacaatcacccgggtcacaagcttttgaaaacgcgcccaccgtgtcactggctgtttaacagta

SEQ ID NO: 71044 - DNA, 2217 bp, Homo sapiens
  misc_feature (10)..(13): n is a, c, g, or t
  misc_feature (15)..(15): n is a, c, g, or t
  misc_feature (49)..(49): n is a, c, g, or t
cgagagaaannnnanaaaacttataggctaggtacgaggcctgggtgtngttcaaccttgtcaacccgtcggcgcggcctctggtgcagcggcggcggctcctgttcctgccgcagctctctccctttcttacctccccaccagatcccggagatcgcccgccatggctttacttactgcggccgcccggctcttgggaaccaagaatgcatcttgtcttgttcttgcagcccggcatgccagtgcttcctccacgaatttgaaagacatattggctgacctgatacctaaggagcaggccagaattaagactttcaggcagcaacatggcaagacggtggtgggccaaatcactgtggacatgatgtatggtggcatgagaggcatgaagggattggtctatgaaacatcagttcttgatcctgatgagggcatccgtttccgaggctttagtatccctgaatgccagaaactgctacccaaggctaagggtggggaagaacccctgcctgagggcttattttggctgctggtaactggacatatcccaacagaggaacaggtatcttggctctcaaaagagtgggcaaagagggcagctctgccttcccatgtggtcaccatgctggacaactttcccaccaatctacaccccatgtctcagctcagtgcagctgttacagccctcaacagtgaaagtaactttgcccgagcatatgcacagggtatcagccgaaccaagtactgggagttgatttatgaagactctatggatctaatcgcaaagctaccttgtgttgcagcaaagatctaccgaaatctctacagagaaggcagcggtattggggccattgactctaacctggactggtctcacaatttcaccaacatgttaggctatactgatcatcagttcactgagctcacgcgcctgtacctcaccatccacagtgaccatgagggtggcaatgtaagtgcccataccagccatttggtgggcagtgccctttccgacccttacctgtcctttgcagcagccatgaacgggctggcagggcctctccatggactggcaaatcaggaagtgcttgtctggctaacacagctgcagaaggaagttggcaaagatgtgtcagatgagaagttacgagactacatctggaacacactcaactcaggacgggttgttccaggctatggccatgcagtactaaggaagactgatccgcgatatacctgtcagcgagagtttgctctgaaacacctgcctaatgaccccatgtttaagttggttgctcagctgtacaagattgtgcccaatgtcctcttagagcagggtaaagccaagaatccttggcccaatgtagatgctcacagtggggtgctgctccagtattatggcatgacggagatgaattactacacggtcctgtttggggtgtcacgagcattgggtgtactggcacagctcatctggagccgagccttaggcttccctctagaaaggcccaagtccatgagcacagagggtctgatgaagtttgtggactctaagtcagggtaaaactggagactgggtgaaagtgactaccagaaagtgaggaagcctaaataaaaagtatacttttgtttcagggggcctttaaagacttaagattaaattatatctgaggcactgataatatgtttgaggttaaaatataaattaagactttaaaagatgaaaaatggtcccttcttccctaatcagctcccttcccctgcctggtatgggggtattagcacctctttttgaacagggaattgattcaagattggacatggtctcctctgattatcaggtactggggctgagggcattaaaaatagtaagcctccctcctcgtcccctgcctcaagaaattgcctccttatttatcaacatctttttcctccctttccctgagagctcacagtacaatgtttcagaagccccatttgcacaggttttcagcaactcagaatgctctacttctttttctttgagaaaggattaagatacactcctgctgtgcccccatctttcctccaaactcctgcctgtgtttgtgtggatacccagtcccagaaccacactgttgagttggacacactgtaaacccctgggtaactgtcaagtcatgatggagacttcaggttgttctgtataaaatgcaaaataaatgtttttattaacaa

SEQ ID NO: 71045 - DNA, 1634 bp, Homo sapiens
  misc_feature (10)..(13): n is a, c, g, or t
  misc_feature (15)..(15): n is a, c, g, or t
  misc_feature (49)..(49): n is a, c, g, or t
cgagagaaannnnanaaaacttataggctaggtacgaggcctgggtgtngttcaaccttgtcaacccgtcggcgcggcctctggtgcagcggcggcggctcctgttcctgccgcagctctctccctttcttacctccccaccagatcccggagatcgcccgccatggctttacttactgcggccgcccggctcttgggaaccaagaatgcatcttgtcttgttcttgcagcccggcatgccagtgcttcctccacgaatttgaaagacatattggctgacctgatacctaaggagcaggccagaattaagactttcaggcagcaacatggcaagacggtggtgggccaaatcactgtggacatgatgtatggtggcatgagaggcatgaagggattggtctatgaaacatcagttcttgatcctgatgagggcatccgtttccgaggctttagtatccctgaatgccagaaactgctacccaaggctaagggtggggaagaacccctgcctgagggcttattttggctgctggtaactggacatatcccaacagaggaacaggtatcttggctctcaaaagagtgggcaaagagggcagctctgccttcccatgtggtcaccatgctggacaactttcccaccaatctacaccccatgtctcagctcagtgcagctgttacagccctcaacagtgaaagtaactttgcccgagcatatgcacagggtatcagccgaaccaagtactgggagttgatttatgaagactctatggatctaatcgcaaagctaccttgtgttgcagcaaagatctaccgaaatctctacagagaaggcagcggtattggggccattgactctaacctggactggtctcacaatttcaccaacatgttaggctatactgatcatcagttcactgagctcacgcgcctgtacctcaccatccacagtgaccatgagggtggcaatgtaagtgcccataccagccatttggtgggcagtgccctttccgacccttacctgtcctttgcagcagccatgaacgggctggcagggcctctccatggactggcaaatcaggaagtgcttgtctggctaacacagctgcagaaggaagttggcaaagatgtgtcagatgagaagttacgagactacatctggaacacactcaactcaggacgggttgttccaggctatggccatgcagtactaaggaagactgatccgcgatatacctgtcagcgagagtttgctctgaaacacctgcctaatgaccccatgtttaagttggttgctcagctgtacaagattgtgcccaatgtcctcttagagcagggtaaagccaagaatccttggcccaatgtagatgctcacagtggggtgctgctccagtattatggcatgacggagatgaattactacacggtcctgtttggggtgtcacgagcattgggtgtactggcacagctcatctggagccgagccttaggcttccctctagaaaggcccaagtccatgagcacagagggtctgatgaagtttgtggactctaagtcagggtaaaactggagactgggtgaaagtgactaccagaaagtgaggaagcctaaataaaaagtatacttttgtttca

SEQ ID NO: 71046 - DNA, 1088 bp, Homo sapiens
aagtggatagtccaagtgtggggctgactgggaaagagtatattaaaatgggtaaatgggtttaccacaatcatatatttgggactctgcctcatgagtactgtgcaatgcctcaggttgccaccggcaggttgaatcatgttggatagtcagctgtaccaagccccttggccctctcccatgcacacaaacacctcctagcaagacctgttggttagctggacatgctttggcaatttttttatactaccaagtgaccataaaggcatggcatttgttgtgactggcacccaatgtttgattttttttttaaaactatccaattaaaattaaggtctgggagtgttctgtttcccattactttaatactcacctcctcccagactttctacacctgttgcacctcaggcagaggatgttctggacctccccctcttggtccctactagagacctctcaacagatctgtgggcccagtcattgggttttatcagtgcttaatgtgaactaagttttttacttccacagaatacaagccactaccttctgacctccccaccccccaccaacccccatcttttaatatgctgtggggcatagaactccggaatgaccagcatgatattttcagagtcttgtccccggggtattagcacctctttttgaacagggaattgattcaagattggacatggtctcctctgattatcaggtactggggctgagggcattaaaaatagtaagcctccctcctcgtcccctgcctcaagaaattgcctccttatttatcaacatctttttcctccctttccctgagagctcacagtacaatgtttcagaagccccatttgcacaggttttcagcaactcagaatgctctacttctttttctttgagaaaggattaagatacactcctgctgtgcccccatctttcctccaaactcctgcctgtgtttgtgtggatacccagtcccagaaccacactgttgagttggacacactgtaaacccctgggtaactgtcaagtcatgatggagacttcaggttgttctgtataaaatgcaaaataaatgtttttattaacaa

SEQ ID NO: 71047 - DNA, 1266 bp, Homo sapiens
  misc_feature (10)..(13): n is a, c, g, or t
  misc_feature (15)..(15): n is a, c, g, or t
  misc_feature (49)..(49): n is a, c, g, or t
  misc_feature (1185)..(1185): n is a, c, g, or t
  misc_feature (1193)..(1193): n is a, c, g, or t
  misc_feature (1200)..(1200): n is a, c, g, or t
  misc_feature (1203)..(1203): n is a, c, g, or t
  misc_feature (1208)..(1208): n is a, c, g, or t
cgagagaaannnnanaaaacttataggctaggtacgaggcctgggtgtngttcaaccttgtcaacccgtcggcgcggcctctggtgcagcggcggcggctcctgttcctgccgcagctctctccctttcttacctccccaccagatcccggagatcgcccgccatggctttacttactgcggccgcccggctcttgggaaccaagaatgcatcttgtcttgttcttgcagcccggcatgccagtgcttcctccacgaatttgaaagacatattggctgacctgatacctaaggagcaggccagaattaagactttcaggcagcaacatggcaagacggtggtgggccaaatcactgtggacatgatgtatggtggcatgagaggcatgaagggattggtctatgaaacatcagttcttgatcctgatgagggcatccgtttccgaggctttagtatccctgaatgccagaaactgctacccaaggctaagggtggggaagaacccctgcctgagggcttattttggctgctggtaactggacatatcccaacagaggaacaggtatcttggctctcaaaagagtgggcaaagagggcagctctgccttcccatgtggtcaccatgctggacaactttcccaccaatctacaccccatgtctcagctcagtgcagctgttacagccctcaacagtgaaagtaactttgcccgagcatatgcacagggtatcagccgaaccaagtactgggagttgatttatgaagactctatggatctaatcgcaaagctaccttgtgttgcagcaaagatctaccgaaatctctacagagaaggcagcggtattggggccattgactctaacctggactggtctcacaatttcaccaacatgttaggctatactgatcatcagttcactgagctcacgcgcctgtacctcaccatccacagtgaccatgagggtggcaatgtaagtgcccataccagccatttggtgggcagtgccctttccgacccttacctgtcctttgcagcagccatgaacgggctggcagggcctctccatggactggcaaatcaggaagtgcttgtctggctaacacagctgcagaaggaagttggcaaagatgtgtcagatgagaagttacgagactacatctggaacacactcaactcaggacggtngtccaggnatggcangcnactanagaagatgtccggaaaaaccgtagggaaagttgtcgaacctggtatgacccggtgagg

SEQ ID NO: 71048 - DNA, 528 bp, Homo sapiens
tataaggatcccttctctgataccacaccatggggcatagaactccggaatgaccagcatgatattttcagagtcttgtccccggggtattagcacctctttttgaacagggaattgattcaagattggacatggtctcctctgattatcaggtactggggctgagggcattaaaaatagtaagcctccctcctcgtcccctgcctcaagaaattgcctccttatttatcaacatctttttcctccctttccctgagagctcacagtacaatgtttcagaagccccatttgcacaggttttcagcaactcagaatgctctacttctttttctttgagaaaggattaagatacactcctgctgtgcccccatctttcctccaaactcctgcctgtgtttgtgtggatacccagtcccagaaccacactgttgagttggacacactgtaaacccctgggtaactgtcaagtcatgatggagacttcaggttgttctgtataaaatgcaaaataaatgtttttattaacaa

SEQ ID NO: 71049 - DNA, 976 bp, Homo sapiens
  misc_feature (10)..(13): n is a, c, g, or t
  misc_feature (15)..(15): n is a, c, g, or t
  misc_feature (49)..(49): n is a, c, g, or t
cgagagaaannnnanaaaacttataggctaggtacgaggcctgggtgtngttcaaccttgtcaacccgtcggcgcggcctctggtgcagcggcggcggctcctgttcctgccgcagctctctccctttcttacctccccaccagatcccggagatcgcccgccatggctttacttactgcggccgcccggctcttgggaaccaagaatgcatcttgtcttgttcttgcagcccggcatgccagtgcttcctccacgaatttgaaagacatattggctgacctgatacctaaggagcaggccagaattaagactttcaggcagcaacatggcaagacggtggtgggccaaatcactgtggacatgatgtatggtggcatgagaggcatgaagggattggtctatgaaacatcagttcttgatcctgatgagggcatccgtttccgaggctttagtatccctgaatgccagaaactgctacccaaggctaagggtggggaagaacccctgcctgagggcttattttggctgctggtaactggacatatcccaacagaggaacaggtatcttggctctcaaaagagtgggcaaagagggcagctctgccttcccatgtggtcaccatgctggacaactttcccaccaatctacaccccatgtctcagctcagtgcagctgttacagccctcaacagtgaaagtaactttgcccgagcatatgcacagggtatcagccgaaccaagtactgggagttgatttatgaagactctatggatctaatcgcaaagctaccttgtgttgcagcaaagatctaccgaaatctctacagagaaggcagcggtattggggccattgactctaacctggactggtctcacaatttcaccaacatgttaggctatactgatcatcagttcactgagctcacgcgcctgtacctcaccatccacaggtgaggtacaggcgcgtgacctcag

SEQ ID NO: 71050 - DNA, 592 bp, Homo sapiens
tctagaggatcccagtggccatacaggagagaagcaggtttcccacaaaggatgaggaaaaaaatagtcagtgtgaattagacatgctaggtcatagaaatgggaggctacagttggaagaccacagccccagtacctgataatcagggggtattagcacctctttttgaacagggaattgattcaagattggacatggtctcctctgattatcaggtactggggctgagggcattaaaaatagtaagcctccctcctcgtcccctgcctcaagaaattgcctccttatttatcaacatctttttcctccctttccctgagagctcacagtacaatgtttcagaagccccatttgcacaggttttcagcaactcagaatgctctacttctttttctttgagaaaggattaagatacactcctgctgtgcccccatctttcctccaaactcctgcctgtgtttgtgtggatacccagtcccagaaccacactgttgagttggacacactgtaaacccctgggtaactgtcaagtcatgatggagacttcaggttgttctgtataaaatgcaaaataaatgtttttattaacaa

SEQ ID NO: 71051 - DNA, 630 bp, Homo sapiens
tagctaggacgagctgggttgttcaaccttgtcaacccgtcggcgcggcctctggtgcagcggcggcggctcctgttcctgccgcagctctctccctttcttacctccccaccagatcccggagatcgcccgccatggctttacttactgcggccgcccggctcttgggaaccaagaatgcatcttgtcttgttcttgcagcccggcatgccagtgcttcctccacgaatttgaaagacatattggctgacctgatacctaaggagcaggccagaattaagactttcaggcagcaacatggcaagacggtggtgggccaaatcactgtggacatgatgtatggtggcatgagaggcatgaagggattggtctatgaaacatcagttcttgatcctgatgagggcatccgtttccgaggctttagtatccctgaatgccagaaactgctacccaaggctaagggtggggaagaacccctgcctgagggcttattttggctgctggtaactggacatatcccaacagaggaacaggtatcttggctctcaaaagagtgggcaaagagggcagctctgccttcccatgtggtcactcttttgagagccaaaaaaaacctcgtgccgaattctt

SEQ ID NO: 71052 - DNA, 1207 bp, Homo sapiens
tagctaggacgagctgggttgttcaaccttgtcaacccgtcggcgcggcctctggtgcagcggcggcggctcctgttcctgccgcagctctctccctttcttacctccccaccagatcccggagatcgcccgccatggctttacttactgcggccgcccggctcttgggaaccaagaatgcatcttgtcttgttcttgcagcccggcatgccagtgcttcctccacgaatttgaaagacatattggctgacctgatacctaaggagcaggccagaattaagactttcaggcagcaacatggcaagacggtggtgggccaaatcactgtggacatgatgtatggtggcatgagaggcatgaagggattggtctatgaaacatcagttcttgatcctgatgagggcatccgtttccgaggctttagtatccctgaatgccagaaactgctacccaaggctaagggtggggaagaacccctgcctgagggcttattttggctgctggtaactggacatatcccaacagaggaacaggtaaagcagaaggatattattagctcttctcattccccttcttcattgcctttctctaatctcagacacttaatgctgatccggcatttatagagatgcgtagtgaagggaaggaatcagcagagttctgctgtataaatggattgggttgacctctcttgggttttctttactcagatgttgctgtccttttttatttttctccttccttgtccttgctggtgttctgagcactgtctctttttccacaggtatcttggctctcaaaagagtgggcaaagagggcagctctgccttcccatgtggtcaccatgctggacaactttcccaccaatctacaccccatgtctcagctcagtgcagctgttacagccctcaacagtgaaagtaactttgcccgagcatatgcacagggtatcagccgaaccaagtactgggaggtaggaaatttgggtggggtgatcggtgtgtgatggggattcaaaggacttgagtgtgaagggagggaaaaaatacagaatctttagaaaaattacctctgagttaatcagaaactaacttaacagattttcattggaggcttgttttttgtcagttgttggaattacaaagctaagtagagcatggtttctatcaccaggactgtttgtttggttaggctgacacacgtgcag

SEQ ID NO: 71053 - DNA, 848 bp, Homo sapiens
tagctaggacgagctgggttgttcaaccttgtcaacccgtcggcgcggcctctggtgcagcggcggcggctcctgttcctgccgcagctctctccctttcttacctccccaccagatcccggagatcgcccgccatggctttacttactgcggccgcccggctcttgggaaccaaggagctgacctattgagtgagatgactgcctgattctcctgagagctgctgttccagtaaggtgactctacaggtggcatgcatccagaagccaaaagcccaactgtcacacctccaggattaggggagaatctgggaggtagaagttcagggatgattcagagaatgcatcttgtcttgttcttgcagcccggcatgccagtgcttcctccacggtaaggtttggaaaagaagactaagaataagaatcattgcggccagcctgaccttggggcagaggatttggcaaccacctggcctcttattatcctgagtatttcctggaagtgtttgttactattgttattgttatagctgctattattattatattactatttaacaaataatttactcagtggtatagtgagatgggaatatcaatacatttgcctaattcttttaaatgttttaagtagtgtaaaatatacataacataaaatttaccattttaatcatttttaagtatatggtttagtggcagtagatatgtttacattattgtgcaaccatccatctccagaacttttgtctgcccaaaccgagaaactgttcccattaaacattaactcctcattccttcttccccctgcctaattcttttaccctcatttgtgcagagtagttgaccaga

SEQ ID NO: 71054 - DNA, 605 bp, Homo sapiens
tagctaggacgagctgggttgttcaaccttgtcaacccgtcggcgcggcctctggtgcagcggcggcggctcctgttcctgccgcagctctctccctttcttacctccccaccagatcccggagatcgcccgccatggctttacttactgcggccgcccggctcttgggaaccaaggagctgacctattgagtgagatgactgcctgattctcctgagagctgctgttccagtaaggtgactctacaggtggcatgcatccagaagccaaaagcccaactgtcacacctccaggattaggggagaatctgggaggtagaagttcagggatgattcagaggtttgtaatctacctgtctcatcaatgaacataacctgaatgtactgttcagagccattcagcagctttctttggcagccacggggtagaggaaatgaaatgtagcctttgatgttacagtcctcaagcacctcctgtctagagtcatttgctctgctggtggccatcagggttagttaaatttgtttcctctccctgagatgcctcccttcttggtcaagaagcccttaaaaagaaaactggtatcttttccttgatgcctgtta

SEQ ID NO: 71055 - DNA, 2805 bp, Homo sapiens
tagctaggacgagctgggttgttcaaccttgtcaacccgtcggcgcggcctctggtgcagcggcggcggctcctgttcctgccgcagctctctccctttcttacctccccaccaaatttgaaagacatattggctgacctgatacctaaggagcaggccagaattaagactttcaggcagcaacatggcaagacggtggtgggccaaatcactgtggacatgatgtatggtggcatgagaggcatgaagggattggtctatgaaacatcagttcttgatcctgatgagggcatccgtttccgaggctttagtatccctgaatgccagaaactgctacccaaggctaagggtggggaagaacccctgcctgagggcttattttggctgctggtaactggacatatcccaacagaggaacaggtatcttggctctcaaaagagtgggcaaagagggcagctctgccttcccatgtggtcaccatgctggacaactttcccaccaatctacaccccatgtctcagctcagtgcagctgttacagccctcaacagtgaaagtaactttgcccgagcatatgcacagggtatcagccgaaccaagtactgggagttgatttatgaagactctatggatctaatcgcaaagctaccttgtgttgcagcaaagatctaccgaaatctctacagagaaggcagcggtattggggccattgactctaacctggactggtctcacaatttcaccaacatgttaggctatactgatcatcagttcactgagctcacgcgcctgtacctcaccatccacagtgaccatgagggtggcaatgtaagtgcccataccagccatttggtgggcagtgccctttccgacccttacctgtcctttgcagcagccatgaacgggctggcagggcctctccatggactggcaaatcaggaagtgcttgtctggctaacacagctgcagaaggaagttggcaaagatgtgtcagatgagaagttacgagactacatctggaacacactcaactcaggacgggttgttccaggctatggccatgcagtactaaggaagactgatccgcgatatacctgtcagcgagagtttgctctgaaacacctgcctaatgaccccatgtttaagttggttgctcagctgtacaagattgtgcccaatgtcctcttagagcagggtaaagccaagaatccttggcccaatgtagatgctcacagtggggtgctgctccagtattatggcatgacggagatgaattactacacggtcctgtttggggtgtcacgagcattgggtgtactggcacagctcatctggagccgagccttaggcttccctctagaaaggcccaagtccatgagcacagagggtctgatgaagtttgtggactctaagtcagggtaaaactggagactgggtgaaagtgactaccagaaagtgaggaagcctaaataaaaagtatacttttgtttcagggggcctttaaagacttaagattaaattatatctgaggcactgataatatgtttgaggttaaaatataaattaagactttaaaagatgaaaaatggtcccttcttccctaatcagctcccttcccctgcctggtatgagttgcccatcatacgcatggtcctggaggatgaccaggactaatgcatgtggtatgagtaggtttggccccctcactatctctagagtgagaatctggctcctgtttccatgggtcaaagccggttgcagagaatctgtagtcactttggagctttagcttctctgccaagccctcaataagccagcaaaccaggactctgccccttctgtttccataggaatcatgttggatagtcagctgtaccaagccccttggccctctcccatgcacacaaacacctcctagcaagacctgttggttagctggacatgctttggcaatttttttatactaccaagtgaccataaaggcatggcatttgttgtgactggcacccaatgtttgattttttttttaaaactatccaattaaaattaaggtctgggagtgttctgtttcccattactttaatactcacctcctcccagactttctacacctgttgcacctcaggcagaggatgttctggacctccccctcttggtccctactagagacctctcaacagatctgtgggcccagtcattgggttttatcagtgcttaatgtgaactaagttttttacttccacagaatacaagccactaccttctgacctccccaccccccaccaacccccatcttttaatatgctgtggggcatagaactccggaatgaccagcatgatattttcagagtcttgtccccggggtattagcacctctttttgaacagggaattgattcaagattggacatggtctcctctgattatcaggtactggggctgagggcattaaaaatagtaagcctccctcctcgtcccctgcctcaagaaattgcctccttatttatcaacatctttttcctccctttccctgagagctcacagtacaatgtttcagaagccccatttgcacaggttttcagcaactcagaatgctctacttctttttctttgagaaaggattaagatacactcctgctgtgcccccatctttcctccaaactcctgcctgtgtttgtgtggatacccagtcccagaaccacactgttgagttggacacactgtaaacccctgggtaactgtcaagtcatgatggagacttcaggttgttctgtataaaatgcaaaataaatgtttttattaacaa

SEQ ID NO: 71056 - DNA, 2655 bp, Homo sapiens
  misc_feature (38)..(38): n is a, c, g, or t
cgtctgcagtatcctaggctaggtacgaggctgggtgncgagacggtggtgggccaaatcactgtggacatgatgtatggtggcatgagaggcatgaagggattggtctatgaaacatcagttcttgatcctgatgagggcatccgtttccgaggctttagtatccctgaatgccagaaactgctacccaaggctaagggtggggaagaacccctgcctgagggcttattttggctgctggtaactggacatatcccaacagaggaacaggtatcttggctctcaaaagagtgggcaaagagggcagctctgccttcccatgtggtcaccatgctggacaactttcccaccaatctacaccccatgtctcagctcagtgcagctgttacagccctcaacagtgaaagtaactttgcccgagcatatgcacagggtatcagccgaaccaagtactgggagttgatttatgaagactctatggatctaatcgcaaagctaccttgtgttgcagcaaagatctaccgaaatctctacagagaaggcagcggtattggggccattgactctaacctggactggtctcacaatttcaccaacatgttaggctatactgatcatcagttcactgagctcacgcgcctgtacctcaccatccacagtgaccatgagggtggcaatgtaagtgcccataccagccatttggtgggcagtgccctttccgacccttacctgtcctttgcagcagccatgaacgggctggcagggcctctccatggactggcaaatcaggaagtgcttgtctggctaacacagctgcagaaggaagttggcaaagatgtgtcagatgagaagttacgagactacatctggaacacactcaactcaggacgggttgttccaggctatggccatgcagtactaaggaagactgatccgcgatatacctgtcagcgagagtttgctctgaaacacctgcctaatgaccccatgtttaagttggttgctcagctgtacaagattgtgcccaatgtcctcttagagcagggtaaagccaagaatccttggcccaatgtagatgctcacagtggggtgctgctccagtattatggcatgacggagatgaattactacacggtcctgtttggggtgtcacgagcattgggtgtactggcacagctcatctggagccgagccttaggcttccctctagaaaggcccaagtccatgagcacagagggtctgatgaagtttgtggactctaagtcagggtaaaactggagactgggtgaaagtgactaccagaaagtgaggaagcctaaataaaaagtatacttttgtttcagggggcctttaaagacttaagattaaattatatctgaggcactgataatatgtttgaggttaaaatataaattaagactttaaaagatgaaaaatggtcccttcttccctaatcagctcccttcccctgcctggtatgagttgcccatcatacgcatggtcctggaggatgaccaggactaatgcatgtggtatgagtaggtttggccccctcactatctctagagtgagaatctggctcctgtttccatgggtcaaagccggttgcagagaatctgtagtcactttggagctttagcttctctgccaagccctcaataagccagcaaaccaggactctgccccttctgtttccataggaatcatgttggatagtcagctgtaccaagccccttggccctctcccatgcacacaaacacctcctagcaagacctgttggttagctggacatgctttggcaatttttttatactaccaagtgaccataaaggcatggcatttgttgtgactggcacccaatgtttgattttttttttaaaactatccaattaaaattaaggtctgggagtgttctgtttcccattactttaatactcacctcctcccagactttctacacctgttgcacctcaggcagaggatgttctggacctccccctcttggtccctactagagacctctcaacagatctgtgggcccagtcattgggttttatcagtgcttaatgtgaactaagttttttacttccacagaatacaagccactaccttctgacctccccaccccccaccaacccccatcttttaatatgctgtggggcatagaactccggaatgaccagcatgatattttcagagtcttgtccccggggtattagcacctctttttgaacagggaattgattcaagattggacatggtctcctctgattatcaggtactggggctgagggcattaaaaatagtaagcctccctcctcgtcccctgcctcaagaaattgcctccttatttatcaacatctttttcctccctttccctgagagctcacagtacaatgtttcagaagccccatttgcacaggttttcagcaactcagaatgctctacttctttttctttgagaaaggattaagatacactcctgctgtgcccccatctttcctccaaactcctgcctgtgtttgtgtggatacccagtcccagaaccacactgttgagttggacacactgtaaacccctgggtaactgtcaagtcatgatggagacttcaggttgttctgtataaaatgcaaaataaatgtttttattaacaa

SEQ ID NO: 71057 - DNA, 3533 bp, Homo sapiens
tagctaggacgagctgggttgttcaaccttgtcaacccgtcggcgcggcctctggtgcagcggcggcggctcctgttcctgccgcagctctctccctttcttacctccccaccagatcccggagatcgcccgccatggctttacttactgcggccgcccggctcttgggaaccaaggtgagcagcgaggggagggagcacgccgtcccagggtggggctgaggcgaccgcagccctccggcgccggggtctccctcccacacccgtgcgcaccctgcggccttaaagggccctgcgcttggctggccgccagccctgcgtgaagctacaggaccatgtgccgcgcttcccttctggctcctgggggtgaagtgcacgccgcccgccctcggcccgcagtccagaacgcgtgaggaggccgaccctgctgtcaccccgcatgtctgaaatgaaaggggaagggatgcgtggccctgaaatagcaaggagccgagacaggaacctctggcacccagtggcaagtactagctgagcatttgggagatgcttgtcttacttggctgttgcttctcctgctgctggggaaaaggaatgcatcttgtcttgttcttgcagcccggcatgccagtgcttcctccacggtaaggtttggaaaagaagactaagaataagaatcattgcggccagcctgaccttggggcagaggatttggcaaccacctggcctcttattatcctgagtataatttgaaagacatattggctgacctgatacctaaggagcaggccagaattaagactttcaggcagcaacatggcaagacggtggtgggccaaatcactgtggacatggcctgttgcagtggctcatgcctgtaatcccagcactttgggaggctgaggcgggtggctcatctgaggtcaggagttcgagaccagcctggccaacatgatgtatggtggcatgagaggcatgaagggattggtctatgaaacatcagttcttgatcctgatgagggcatccgtttccgaggctttagtatccctgaatgccagaaactgctacccaaggctaagggtggggaagaacccctgcctgagggcttattttggctgctggtaactggacatatcccaacagaggaacaggtatcttggctctcaaaagagtgggcaaagagggcagctctgccttcccatgtggtcaccatgctggacaactttcccaccaatctacaccccatgtctcagctcagtgcagctgttacagccctcaacagtgaaagtaactttgcccgagcatatgcacagggtatcagccgaaccaagtactgggagttgatttatgaagactctatggatctaatcgcaaagctaccttgtgttgcagcaaagatctaccgaaatctctacagagaaggcagcggtattggggccattgactctaacctggactggtctcacaatttcaccaacatgttaggctatactgatcatcagttcactgagctcacgcgcctgtacctcaccatccacagtgaccatgagggtggcaatgtaagtgcccataccagccatttggtgggcagtgccctttccgacccttacctgtcctttgcagcagccatgaacgggctggcagggcctctccatggactggcaaatcaggaagtgcttgtctggctaacacagctgcagaaggaagttggcaaagatgtgtcagatgagaagttacgagactacatctggaacacactcaactcaggacgggttgttccaggctatggccatgcagtactaaggaagactgatccgcgatatacctgtcagcgagagtttgctctgaaacacctgcctaatgaccccatgtttaagttggttgctcagctgtacaagattgtgcccaatgtcctcttagagcagggtaaagccaagaatccttggcccaatgtagatgctcacagtggggtgctgctccagtattatggcatgacggagatgaattactacacggtcctgtttggggtgtcacgagcattgggtgtactggcacagctcatctggagccgagccttaggcttccctctagaaaggcccaagtccatgagcacagagggtctgatgaagtttgtggactctaagtcagggtaaaactggagactgggtgaaagtgactaccagaaagtgaggaagcctaaataaaaagtatacttttgtttcagggggcctttaaagacttaagattaaattatatctgaggcactgataatatgtttgaggttaaaatataaattaagactttaaaagatgaaaaatggtcccttcttccctaatcagctcccttcccctgcctggtatgagttgcccatcatacgcatggtcctggaggatgaccaggactaatgcatgtggtatgagtaggtttggccccctcactatctctagagtgagaatctggctcctgtttccatgggtcaaagccggttgcagagaatctgtagtcactttggagctttagcttctctgccaagccctcaataagccagcaaaccaggactctgccccttctgtttccataggaatcatgttggatagtcagctgtaccaagccccttggccctctcccatgcacacaaacacctcctagcaagacctgttggttagctggacatgctttggcaatttttttatactaccaagtgaccataaaggcatggcatttgttgtgactggcacccaatgtttgattttttttttaaaactatccaattaaaattaaggtctgggagtgttctgtttcccattactttaatactcacctcctcccagactttctacacctgttgcacctcaggcagaggatgttctggacctccccctcttggtccctactagagacctctcaacagatctgtgggcccagtcattgggttttatcagtgcttaatgtgaactaagttttttacttccacagaatacaagccactaccttctgacctccccaccccccaccaacccccatcttttaatatgctgtggggcatagaactccggaatgaccagcatgatattttcagagtcttgtccccggggtattagcacctctttttgaacagggaattgattcaagattggacatggtctcctctgattatcaggtactggggctgagggcattaaaaatagtaagcctccctcctcgtcccctgcctcaagaaattgcctccttatttatcaacatctttttcctccctttccctgagagctcacagtacaatgtttcagaagccccatttgcacaggttttcagcaactcagaatgctctacttctttttctttgagaaaggattaagatacactcctgctgtgcccccatctttcctccaaactcctgcctgtgtttgtgtggatacccagtcccagaaccacactgttgagttggacacactgtaaacccctgggtaactgtcaagtcatgatggagacttcaggttgttctgtataaaatgcaaaataaatgtttttattaacaa

SEQ ID NO: 71058 - DNA, 2852 bp, Homo sapiens
tagctaggacgagctgggttgttcaaccttgtcaacccgtcggcgcggcctctggtgcagcggcggcggctcctgttcctgccgcagctctctccctttcttacctccccaccagatcccggagatcgcccgccatggctttacttactgcggccgcccggctcttgggaaccaagaatgcatcttgtcttgttcttgcagcccggcatgccagtgcttcctccacgaatttgaaagacatattggctgacctgatacctaaggagcaggccagaattaagactttcaggcagcaacatggcaagacggtggtgggccaaatcactgtggacatgggcatccgtttccgaggctttagtatccctgaatgccagaaactgctacccaaggctaagggtggggaagaacccctgcctgagggcttattttggctgctggtaactggacatatcccaacagaggaacaggtatcttggctctcaaaagagtgggcaaagagggcagctctgccttcccatgtggtcaccatgctggacaactttcccaccaatctacaccccatgtctcagctcagtgcagctgttacagccctcaacagtgaaagtaactttgcccgagcatatgcacagggtatcagccgaaccaagtactgggagttgatttatgaagactctatggatctaatcgcaaagctaccttgtgttgcagcaaagatctaccgaaatctctacagagaaggcagcggtattggggccattgactctaacctggactggtctcacaatttcaccaacatgttaggctatactgatcatcagttcactgagctcacgcgcctgtacctcaccatccacagtgaccatgagggtggcaatgtaagtgcccataccagccatttggtgggcagtgccctttccgacccttacctgtcctttgcagcagccatgaacgggctggcagggcctctccatggactggcaaatcaggaagtgcttgtctggctaacacagctgcagaaggaagttggcaaagatgtgtcagatgagaagttacgagactacatctggaacacactcaactcaggacgggttgttccaggctatggccatgcagtactaaggaagactgatccgcgatatacctgtcagcgagagtttgctctgaaacacctgcctaatgaccccatgtttaagttggttgctcagctgtacaagattgtgcccaatgtcctcttagagcagggtaaagccaagaatccttggcccaatgtagatgctcacagtggggtgctgctccagtattatggcatgacggagatgaattactacacggtcctgtttggggtgtcacgagcattgggtgtactggcacagctcatctggagccgagccttaggcttccctctagaaaggcccaagtccatgagcacagagggtctgatgaagtttgtggactctaagtcagggtaaaactggagactgggtgaaagtgactaccagaaagtgaggaagcctaaataaaaagtatacttttgtttcagggggcctttaaagacttaagattaaattatatctgaggcactgataatatgtttgaggttaaaatataaattaagactttaaaagatgaaaaatggtcccttcttccctaatcagctcccttcccctgcctggtatgagttgcccatcatacgcatggtcctggaggatgaccaggactaatgcatgtggtatgagtaggtttggccccctcactatctctagagtgagaatctggctcctgtttccatgggtcaaagccggttgcagagaatctgtagtcactttggagctttagcttctctgccaagccctcaataagccagcaaaccaggactctgccccttctgtttccataggaatcatgttggatagtcagctgtaccaagccccttggccctctcccatgcacacaaacacctcctagcaagacctgttggttagctggacatgctttggcaatttttttatactaccaagtgaccataaaggcatggcatttgttgtgactggcacccaatgtttgattttttttttaaaactatccaattaaaattaaggtctgggagtgttctgtttcccattactttaatactcacctcctcccagactttctacacctgttgcacctcaggcagaggatgttctggacctccccctcttggtccctactagagacctctcaacagatctgtgggcccagtcattgggttttatcagtgcttaatgtgaactaagttttttacttccacagaatacaagccactaccttctgacctccccaccccccaccaacccccatcttttaatatgctgtggggcatagaactccggaatgaccagcatgatattttcagagtcttgtccccggggtattagcacctctttttgaacagggaattgattcaagattggacatggtctcctctgattatcaggtactggggctgagggcattaaaaatagtaagcctccctcctcgtcccctgcctcaagaaattgcctccttatttatcaacatctttttcctccctttccctgagagctcacagtacaatgtttcagaagccccatttgcacaggttttcagcaactcagaatgctctacttctttttctttgagaaaggattaagatacactcctgctgtgcccccatctttcctccaaactcctgcctgtgtttgtgtggatacccagtcccagaaccacactgttgagttggacacactgtaaacccctgggtaactgtcaagtcatgatggagacttcaggttgttctgtataaaatgcaaaataaatgtttttattaacaa

SEQ ID NO: 71059 - DNA, 2993 bp, Homo sapiens
tagctaggacgagctgggttgttcaaccttgtcaacccgtcggcgcggcctctggtgcagcggcggcggctcctgttcctgccgcagctctctccctttcttacctccccaccagatcccggagatcgcccgccatggctttacttactgcggccgcccggctcttgggaaccaagaatgcatcttgtcttgttcttgcagcccggcatgccagtgcttcctccacgaatttgaaagacatattggctgacctgatacctaaggagcaggccagaattaagactttcaggcagcaacatggcaagacggtggtgggccaaatcactgtggacatgatgtatgtggcatgagaggcatgagggggattgcctcgtatgataagcatcgaggtttcttgaatcctgtagttgcagtgtgtcaatccagattgtccggaggtcgtaataggtatcgccatgtaatgccagtaagagcaggctgatcccaaggcgtaccggatgcggagaactcaacgcgcgcgtgttcgctgagggggcatatattcattgagcaatgcatgggtaagcgtgagaacataatgcgcgatctagaggaacaaggtatcgttggcgtcatcagtaagaggtgagcagataggatcggcagctctgccttcccatgtggtcaccatgctggacaactttcccaccaatctacaccccatgtctcagctcagtgcagctgttacagccctcaacagtgaaagtaactttgcccgagcatatgcacagggtatcagccgaaccaagtactgggagttgatttatgaagactctatggatctaatcgcaaagctaccttgtgttgcagcaaagatctaccgaaatctctacagagaaggcagcggtattggggccattgactctaacctggactggtctcacaatttcaccaacatgttaggctatactgatcatcagttcactgagctcacgcgcctgtacctcaccatccacagtgaccatgagggtggcaatgtaagtgcccataccagccatttggtgggcagtgccctttccgacccttacctgtcctttgcagcagccatgaacgggctggcagggcctctccatggactggcaaatcaggaagtgcttgtctggctaacacagctgcagaaggaagttggcaaagatgtgtcagatgagaagttacgagactacatctggaacacactcaactcaggacgggttgttccaggctatggccatgcagtactaaggaagactgatccgcgatatacctgtcagcgagagtttgctctgaaacacctgcctaatgaccccatgtttaagttggttgctcagctgtacaagattgtgcccaatgtcctcttagagcagggtaaagccaagaatccttggcccaatgtagatgctcacagtggggtgctgctccagtattatggcatgacggagatgaattactacacggtcctgtttggggtgtcacgagcattgggtgtactggcacagctcatctggagccgagccttaggcttccctctagaaaggcccaagtccatgagcacagagggtctgatgaagtttgtggactctaagtcagggtaaaactggagactgggtgaaagtgactaccagaaagtgaggaagcctaaataaaaagtatacttttgtttcagggggcctttaaagacttaagattaaattatatctgaggcactgataatatgtttgaggttaaaatataaattaagactttaaaagatgaaaaatggtcccttcttccctaatcagctcccttcccctgcctggtatgagttgcccatcatacgcatggtcctggaggatgaccaggactaatgcatgtggtatgagtaggtttggccccctcactatctctagagtgagaatctggctcctgtttccatgggtcaaagccggttgcagagaatctgtagtcactttggagctttagcttctctgccaagccctcaataagccagcaaaccaggactctgccccttctgtttccataggaatcatgttggatagtcagctgtaccaagccccttggccctctcccatgcacacaaacacctcctagcaagacctgttggttagctggacatgctttggcaatttttttatactaccaagtgaccataaaggcatggcatttgttgtgactggcacccaatgtttgattttttttttaaaactatccaattaaaattaaggtctgggagtgttctgtttcccattactttaatactcacctcctcccagactttctacacctgttgcacctcaggcagaggatgttctggacctccccctcttggtccctactagagacctctcaacagatctgtgggcccagtcattgggttttatcagtgcttaatgtgaactaagttttttacttccacagaatacaagccactaccttctgacctccccaccccccaccaacccccatcttttaatatgctgtggggcatagaactccggaatgaccagcatgatattttcagagtcttgtccccggggtattagcacctctttttgaacagggaattgattcaagattggacatggtctcctctgattatcaggtactggggctgagggcattaaaaatagtaagcctccctcctcgtcccctgcctcaagaaattgcctccttatttatcaacatctttttcctccctttccctgagagctcacagtacaatgtttcagaagccccatttgcacaggttttcagcaactcagaatgctctacttctttttctttgagaaaggattaagatacactcctgctgtgcccccatctttcctccaaactcctgcctgtgtttgtgtggatacccagtcccagaaccacactgttgagttggacacactgtaaacccctgggtaactgtcaagtcatgatggagacttcaggttgttctgtataaaatgcaaaataaatgtttttattaacaa

SEQ ID NO: 71060 - DNA, 2005 bp, Homo sapiens
gaccctgtcaaagctacccgctagctgattctacactgtcctgggtgcccccacatgcctgcccttacctggatggtgacctcggctgagctggtgcgtggaggctctgcccaggtcctggactttgtcgaagaatcaggaagtgcttgtctggctaacacagctgcagaaggaagttggcaaagatgtgtcagatgagaagttacgagactacatctggaacacactcaactcaggacgggttgttccaggctatggccatgcagtactaaggaagactgatccgcgatatacctgtcagcgagagtttgctctgaaacacctgcctaatgaccccatgtttaagttggttgctcagctgtacaagattgtgcccaatgtcctcttagagcagggtaaagccaagaatccttggcccaatgtagatgctcacagtggggtgctgctccagtattatggcatgacggagatgaattactacacggtcctgtttggggtgtcacgagcattgggtgtactggcacagctcatctggagccgagccttaggcttccctctagaaaggcccaagtccatgagcacagagggtctgatgaagtttgtggactctaagtcagggtaaaactggagactgggtgaaagtgactaccagaaagtgaggaagcctaaataaaaagtatacttttgtttcagggggcctttaaagacttaagattaaattatatctgaggcactgataatatgtttgaggttaaaatataaattaagactttaaaagatgaaaaatggtcccttcttccctaatcagctcccttcccctgcctggtatgagttgcccatcatacgcatggtcctggaggatgaccaggactaatgcatgtggtatgagtaggtttggccccctcactatctctagagtgagaatctggctcctgtttccatgggtcaaagccggttgcagagaatctgtagtcactttggagctttagcttctctgccaagccctcaataagccagcaaaccaggactctgccccttctgtttccataggaatcatgttggatagtcagctgtaccaagccccttggccctctcccatgcacacaaacacctcctagcaagacctgttggttagctggacatgctttggcaatttttttatactaccaagtgaccataaaggcatggcatttgttgtgactggcacccaatgtttgattttttttttaaaactatccaattaaaattaaggtctgggagtgttctgtttcccattactttaatactcacctcctcccagactttctacacctgttgcacctcaggcagaggatgttctggacctccccctcttggtccctactagagacctctcaacagatctgtgggcccagtcattgggttttatcagtgcttaatgtgaactaagttttttacttccacagaatacaagccactaccttctgacctccccaccccccaccaacccccatcttttaatatgctgtggggcatagaactccggaatgaccagcatgatattttcagagtcttgtccccggggtattagcacctctttttgaacagggaattgattcaagattggacatggtctcctctgattatcaggtactggggctgagggcattaaaaatagtaagcctccctcctcgtcccctgcctcaagaaattgcctccttatttatcaacatctttttcctccctttccctgagagctcacagtacaatgtttcagaagccccatttgcacaggttttcagcaactcagaatgctctacttctttttctttgagaaaggattaagatacactcctgctgtgcccccatctttcctccaaactcctgcctgtgtttgtgtggatacccagtcccagaaccacactgttgagttggacacactgtaaacccctgggtaactgtcaagtcatgatggagacttcaggttgttctgtataaaatgcaaaataaatgtttttattaacaa

SEQ ID NO: 71061 - DNA, 2471 bp, Homo sapiens
  misc_feature (10)..(13): n is a, c, g, or t
  misc_feature (15)..(15): n is a, c, g, or t
  misc_feature (49)..(49): n is a, c, g, or t
cgagagaaannnnanaaaacttataggctaggtacgaggcctgggtgtngttcaaccttgtcaacccgtcggcgcggcctctggtgcagcggcggcggctcctgttcctgccgcagctctctccctttcttacctccccaccagatcccggagatcgcccgccatggctttacttactgcggccgcccggctcttgggaaccaagaatgcatcttgtcttgttcttgcagcccggcatgccagtgcttcctccacgaatttgaaagacatattggctgacctgatacctaaggagcaggccagaattaagactttcaggcagcaacatggcaagacggtggtgggccaaatcactgtggacatgatgtatggtggcatgagaggcatgaagggattggtctatgaaacatcagttcttgatcctgatgagggcatccgtttccgaggctttagtatccctgaatgccagaaactgctacccaaggctaagggtggggaagaacccctgcctgagggcttattttggctgctggtaactggacatatcccaacagaggaacaggtatcttggctctcaaaagagtgggcaaagagggcagctctgccttcccatgtggtcaccatgctggacaactttcccaccaatctacaccccatgtctcagctcagtgcagctgttacagccctcaacagtgaaagtaactttgcccgagcatatgcacagggtatcagccgaaccaagtactgggagttgatttatgaagactctatggatctaatcgcaaagctaccttgtgttgcagcaaagatctaccgaaatctctacagagaaggcagcggtattggggccattgactctaacctggactggtctcacaatttcaccaacatgttaggctatactgatcatcagttcactgagctcacgcgcctgtacctcaccatccacagtgaccatgagggtggcaatgtaagtgcccataccagccatttggtgggcagtgccctttccgacccttacctgtcctttgcagcagccatgaacgggctggcagggcctctccatggactggcaaatcaggaagtgcttgtctggctaacacagctgcagaaggaagttggcaaagatgtgtcagatgagaagttacgagactacatctggaacacactcaactcaggacgggttgttccaggctatggccatgcagtactaaggaagactgatccgcgatatacctgtcagcgagagtttgctctgaaacacctgcctaatgaccccatgtttaagttggttgctcagctgtacaagattgtgcccaatgtcctcttagagcagggtaaagccaagaatccttggcccaatgtagatgctcacagtggggtgctgctccagtattatggcatgacggagatgaattactacacggtcctgtttggggtgtcacgagcattgggtgtactggcacagctcatctggagccgagccttaggcttccctctagaaaggcccaagtccatgagcacagagggtctgatgaagtttgtggactctaagtcagggtaaaactggagactgggtgaaagtgactaccagaaagtgaggaagcctaaataaaaagtatacttttgtttcagggggcctttaaagacttaagattaaattatatctgaggcactgataatatgtttgaggttaaaatataaattaagactttaaaagatgaaaaatggtcccttcttccctaatcagctcccttcccctgcctggtatgagttgcccatcatacgcatggtcctggaggatgaccaggactaatgcatgtggtatgagtaggtttggccccctcactatctctagagtgagaatctggctcctgtttccatgggtcaaagccggttgcagagaatctgtagtcactttggagctttagcttctctgccaagccctcaataagccagcaaaccaggactctgccccttctgtttccataggaatcatgttggatagtcagctgtaccaagccccttggccctctcccatgcacacaaacacctcctagcaagacctgttggttagctggacatgctttggcaatttttttatactaccaagtgaccataaaggcatggcatttgttgtgactggcacccaatgtttgattttttttttaaaactatccaattaaaattaaggtctgggagtgttctgtttcccattactttaatactcacctcctcccagactttctacacctgttgcacctcaggcagaggatgttctggacctccccctcttggtccctactagagacctctcaacagatctgtagaggaggatgttctggacctccccctcttggtccctactagagacctctcaacagatctgtgggcccagtcattggttttatcagtgcttagatcacattaagcaccctcggccgaatttaaacccagcctcgtaccagcta

SEQ ID NO: 71062 - DNA, 2020 bp, Homo sapiens
  misc_feature (10)..(13): n is a, c, g, or t
  misc_feature (15)..(15): n is a, c, g, or t
  misc_feature (49)..(49): n is a, c, g, or t
cgagagaaannnnanaaaacttataggctaggtacgaggcctgggtgtngttcaaccttgtcaacccgtcggcgcggcctctggtgcagcggcggcggctcctgttcctgccgcagctctctccctttcttacctccccaccagatcccggagatcgcccgccatggctttacttactgcggccgcccggctcttgggaaccaagaatgcatcttgtcttgttcttgcagcccggcatgccagtgcttcctccacgaatttgaaagacatattggctgacctgatacctaaggagcaggccagaattaagactttcaggcagcaacatggcaagacggtggtgggccaaatcactgtggacatgatgtatggtggcatgagaggcatgaagggattggtctatgaaacatcagttcttgatcctgatgagggcatccgtttccgaggctttagtatccctgaatgccagaaactgctacccaaggctaagggtggggaagaacccctgcctgagggcttattttggctgctggtaactggacatatcccaacagaggaacaggtatcttggctctcaaaagagtgggcaaagagggcagctctgccttcccatgtggtcaccatgctggacaactttcccaccaatctacaccccatgtctcagctcagtgcagctgttacagccctcaacagtgaaagtaactttgcccgagcatatgcacagggtatcagccgaaccaagtactgggagttgatttatgaagactctatggatctaatcgcaaagctaccttgtgttgcagcaaagatctaccgaaatctctacagagaaggcagcggtattggggccattgactctaacctggactggtctcacaatttcaccaacatgttaggctatactgatcatcagttcactgagctcacgcgcctgtacctcaccatccacagtgaccatgagggtggcaatgtaagtgcccataccagccatttggtgggcagtgccctttccgacccttacctgtcctttgcagcagccatgaacgggctggcagggcctctccatggactggcaaatcaggaagtgcttgtctggctaacacagctgcagaaggaagttggcaaagatgtgtcagatgagaagttacgagactacatctggaacacactcaactcaggacgggttgttccaggctatggccatgcagtactaaggaagactgatccgcgatatacctgtcagcgagagtttgctctgaaacacctgcctaatgaccccatgtttaagttggttgctcagctgtacaagattgtgcccaatgtcctcttagagcagggtaaagccaagaatccttggcccaatgtagatgctcacagtggggtgctgctccagtattatggcatgacggagatgaattactacacggtcctgtttggggtgtcacgagcattgggtgtactggcacagctcatctggagccgagccttaggcttccctctagaaaggcccaagtccatgagcacagagggtctgatgaagtttgtggactctaagtcagggtaaaactggagactgggtgaaagtgactaccagaaagtgaggaagcctaaataaaaagtatacttttgtttcagggggcctttaaagacttaagattaaattatatctgaggcactgataatatgtttgaggttaaaatataaattaagactttaaaagatgaaaaatggtcccttcttccctaatcagctcccttcccctgcctggtatgagttgcccatcatacgcatggtcctggaggatgaccaggactaatgcatgtggtatgagtaggtttggccccctcactatctctagagtgagaatctggctcctgtttccatgggtcaaagccggttgcagagaatctgtagtcactttggagctttagcttctctgccaagccctcaataagccagcaaaccaggacagcagcaccaccaggacagcagcaccaccaggacagcagcaccaccagga

SEQ ID NO: 71063 - DNA, 1281 bp, Homo sapiens
  misc_feature (10)..(13): n is a, c, g, or t
  misc_feature (15)..(15): n is a, c, g, or t
  misc_feature (49)..(49): n is a, c, g, or t
cgagagaaannnnanaaaacttataggctaggtacgaggcctgggtgtngttcaaccttgtcaacccgtcggcgcggcctctggtgcagcggcggcggctcctgttcctgccgcagctctctccctttcttacctccccaccagatcccggagatcgcccgccatggctttacttactgcggccgcccggctcttgggaaccaagaatgcatcttgtcttgttcttgcagcccggcatgccagtgcttcctccacgaatttgaaagacatattggctgacctgatacctaaggagcaggccagaattaagactttcaggcagcaacatggcaagacggtggtgggccaaatcactgtggacatgatgtatggtggcatgagaggcatgaagggattggtctatgaaacatcagttcttgatcctgatgagggcatccgtttccgaggctttagtatccctgaatgccagaaactgctacccaaggctaagggtggggaagaacccctgcctgagggcttattttggctgctggtaactggacatatcccaacagaggaacaggtatcttggctctcaaaagagtgggcaaagagggcagctctgccttcccatgtggtcaccatgctggacaactttcccaccaatctacaccccatgtctcagctcagtgcagctgttacagccctcaacagtgaaagtaactttgcccgagcatatgcacagggtatcagccgaaccaagtactgggagttgatttatgaagactctatggatctaatcgcaaagctaccttgtgttgcagcaaagatctaccgaaatctctacagagaaggcagcggtattggggccattgactctaacctggactggtctcacaatttcaccaacatgttaggctatactgatcatcagttcactgagctcacgcgcctgtacctcaccatccacagtgaccatgagggtggcaatgtaagtgcccataccagccatttggtgggcagtgccctttccgacccttacctgtcctttgcagcagccatgaacgggctggcagggcctctccatggactggcaaatcaggaagtggttgtcttggtaaaaacagtgcagaaggcaggttgggcaaggatgtgtccgattgagaaagttagaagattaattctgggagaaaattcaatcaggaggggttggcccagggttagggcatggagacttaaggggaaggggtcgggaaataacgtgaaggaagttggctggaaaactggttatgacccgtttag

SEQ ID NO: 71064 - DNA, 913 bp, Homo sapiens
  misc_feature (10)..(13): n is a, c, g, or t
  misc_feature (15)..(15): n is a, c, g, or t
  misc_feature (49)..(49): n is a, c, g, or t
cgagagaaannnnanaaaacttataggctaggtacgaggcctgggtgtngttcaaccttgtcaacccgtcggcgcggcctctggtgcagcggcggcggctcctgttcctgccgcagctctctccctttcttacctccccaccagatcccggagatcgcccgccatggctttacttactgcggccgcccggctcttgggaaccaagaatgcatcttgtcttgttcttgcagcccggcatgccagtgcttcctccacgaatttgaaagacatattggctgacctgatacctaaggagcaggccagaattaagactttcaggcagcaacatggcaagacggtggtgggccaaatcactgtggacatgatgtatggtggcatgagaggcatgaagggattggtctatgaaacatcagttcttgatcctgatgagggcatccgtttccgaggctttagtatccctgaatgccagaaactgctacccaaggctaagggtggggaagaacccctgcctgagggcttattttggctgctggtaactggacatatcccaacagaggaacaggtatcttggctctcaaaagagtgggcaaagagggcagctctgccttcccatgtggtcaccatgctggacaactttcccaccaatctacaccccatgtctcagctcagtgcagctgttacagccctcaacagtgaaagtaactttgcccgagcatatgcacagggtatcagccgaaccaagtactgggagttgatttatgaagactctatggatctaatcgcaaagctaccttgtgttgcagcaaagatctaccgaaatctctacagagaaggcagcggtattggggccattgactctaacctggactggtctcaataccgctgccttctctgtagagatttcggtagatct

SEQ ID NO: 71065 - DNA, 985 bp, Homo sapiens
  misc_feature (10)..(13): n is a, c, g, or t
  misc_feature (15)..(15): n is a, c, g, or t
  misc_feature (49)..(49): n is a, c, g, or t
cgagagaaannnnanaaaacttataggctaggtacgaggcctgggtgtngttcaaccttgtcaacccgtcggcgcggcctctggtgcagcggcggcggctcctgttcctgccgcagctctctccctttcttacctccccaccagatcccggagatcgcccgccatggctttacttactgcggccgcccggctcttgggaaccaagaatgcatcttgtcttgttcttgcagcccggcatgccagtgcttcctccacgaatttgaaagacatattggctgacctgatacctaaggagcaggccagaattaagactttcaggcagcaacatggcaagacggtggtgggccaaatcactgtggacatgatgtatggtggcatgagaggcatgaagggattggtctatgaaacatcagttcttgatcctgatgagggcatccgtttccgaggctttagtatccctgaatgccagaaactgctacccaaggctaagggtggggaagaacccctgcctgagggcttattttggctgctggtaactggacatatcccaacagaggaacaggtatcttggctctcaaaagagtgggcaaagagggcagctctgccttcccatgtggtcaccatgctggacaactttcccaccaatctacaccccatgtctcagctcagtgcagctgttacagccctcaacagtgaaagtaactttgcccgagcatatgcacagggtatcagccgaaccaagtactgggaggtaggaaatttgggtggggtgatcggtgtgtgatggggattcaaaggacttgagtgtgaagggagggaaaaaatacagaatctttagaaaaattacctctgagttaatcagaaactaacttaacagattttcattggaggcttgttttttgtcagttgttggaattacaaagctaagtagagcatggtttctatcaccaggactgtttgtttggttaggctgacacacgtgcag

SEQ ID NO: 71066 - DNA, 685 bp, Homo sapiens
tagctaggacgagctgggttgttcaaccttgtcaacccgtcggcgcggcctctggtgcagcggcggcggctcctgttcctgccgcagctctctccctttcttacctccccaccagatcccggagatcgcccgccatggctttacttactgcggccgcccggctcttgggaaccaagaatgcatcttgtcttgttcttgcagcccggcatgccagtgcttcctccacggtaaggtttggaaaagaagactaagaataagaatcattgcggccagcctgaccttggggcagaggatttggcaaccacctggcctcttattatcctgagtatttcctggaagtgtttgttactattgttattgttatagctgctattattattatattactatttaacaaataatttactcagtggtatagtgagatgggaatatcaatacatttgcctaattcttttaaatgttttaagtagtgtaaaatatacataacataaaatttaccattttaatcatttttaagtatatggtttagtggcagtagatatgtttacattattgtgcaaccatccatctccagaacttttgtctgcccaaaccgagaaactgttcccattaaacattaactcctcattccttcttccccctgcctaattcttttaccctcatttgtgcagagtagttgaccaga

SEQ ID NO: 71067 - DNA, 600 bp, Homo sapiens
tagctaggacgagctgggttgttcaaccttgtcaacccgtcggcgcggcctctggtgcagcggcggcggctcctgttcctgccgcagctctctccctttcttacctccccaccagatcccggagatcgcccgccatggctttacttactgcggccgcccggctcttgggaaccaaggtgagcagcgaggggagggagcacgccgtcccagggtggggctgaggcgaccgcagccctccggcgccggggtctccctcccacacccgtgcgcaccctgcggccttaaagggccctgcgcttggctggccgccagccctgcgtgaagctacaggaccatgtgccgcgcttcccttctggctcctgggggtgaagtgcacgccgcccgccctcggcccgcagtccagaacgcgtgaggaggccgaccctgctgtcaccccgcatgtctgaaatgaaaggggaagggatgcgtggccctgaaatagcaaggagccgagacaggaacctctggtagagactagagatgtggtgttccactggagttacagtcagtttggtggagggagcgggagtgaagatatgtgctcactctggagcagtggct

SEQ ID NO: 71068 - DNA, 779 bp, Homo sapiens
aagtgctgggattactttgggagccaccgtgcccggccatcaatagcattttaaaggaccaataaacagcctcctataaattaaacctcttcctgtggaagcatgctctactactaaagggaaggtccttgggctccgatttgtcctttgcattgagaacggtgtggggatcaatgtgtgtgtatgtgatttatcgagttggctttgcttttttagtttttcttaaaaaaaatccttccttcccatgttactaatttatgtttttgagaagttgagtctcaaagcgtaaacaataaacctccattcataaggcagatgttgtaagcttgatggtggttgtgaaagtgatttagttttgacctcttttcgtcctacaacttcaatatcaaactgctcaggaaagcccagggggaaggtaggggcagaggaggagacaattcggaatgaatgaatagattttttgttgtttttgcttgtttaatatagaagtcccccttgttccttgggagatcatggcctttgaatatgtacacaacctttgaattgttcctactaaattatagcaagggactttggcacccaaggaattctgactttctgggattataatagtaaattcccagccatactctggactttattttgctaaccataattgagcaaatgtaaattactgctatattaatgttttaaagcactgggatagtctaattctaacttgtagttaattatgtttgccaattatttgtttgaaataaatttgtgtctgaacagctatt

SEQ ID NO: 71069 - DNA, 217 bp, Homo sapiens
ccgcgatgtgcgcttcgagtccatccggctccctggctgcccgcgcggcgtgaaccccgtggtctcctacgccgtggctctcagctgtcaatgtgcactctgccgccgcagcaccactgactgcgggggtcccaaggaccaccccttgacctgtgatgacccccgcttccaggactcctcttcctcaaaggcccctccccccagccttccaagtcca

SEQ ID NO: 71070 - DNA, 344 bp, Homo sapiens
gagaagatcaatcaaaggttttctgccaaagcccctacaggtccacattttcccaaattacactggctgaaaggaagatgggagatgctaagaaagaaatgatgaggccagcgtggtggaggcggggatggggggtggctttacatctaatggaagaggaggagggacagaggctggacagggtgtgggacttctctttgtggagggtcttggctcttgttcaaaggagcggctgagccctttagaggcccctgctgggagttcagcccactctctgtaactcctgccgaataatgaggctgatcctgggacccacaagtccaagccaggaatgctacaaactc

SEQ ID NO: 71071 - DNA, 14809 bp, Homo sapiens
  misc_feature (13200)..(13200): n is a, c, g, or t
cgcccgggcaggtggcggcagagctgaagtgagcggagccaccaggaggccatgtcgggtgaggacgctgaggtccgggcagtctctgaagatgtctccaatggaagcagtggctcgcccagccctggggacacactgccctggaaccttgggaaaacgcagcggagccggcgcagcgggggtggcgctgggagcaacgggagtgtcctggacccagctgagcgggcggtcattcgcatcgcagatgagcgggatcgtgtgcagaagaaaaccttcaccaagtgggtcaacaagcacctcatcaaggcccagaggcacatcagtgacctgtatgaagacctccgcgatggccacaacctcatctccctgctggaggtcctctcgggggacagcctgccccgggagaaggggaggatgcgtttccacaagctgcagaatgtccagattgccctggactacctccggcaccgccaggtgaagctggtgaacatcagggatgatgacatcgctgacggcaaccccaagctgacccttggcctcatctggacaatcattctgcacttccagatctcagatatccaggtgagtgggcagtcggaggacatgacggccaaggagaagctgctgctgtggtcgcagcgaatggtggaggggtaccagggcctgcgatgcgacaacttcacctccagctggagagacggccgcctcttcaatgccatcatccaccggcacaagcccctgctcatcgacatgaacaaggtgtaccggcagaccaacctggagaacctggaccaggccttctctgtggcggagcgggacctgggagtgacgcggctcctggaccctgaggacgtggatgtccctcagcccgacgagaagtccatcatcacctacgtctcgtcgctgtatgacgccatgccccgcgtgccggacgtgcaggatggggtgagggccaacgagctgcagctgcgctggcaggagtaccgggagctggtgctgctgctgcttcagtggatgcgacaccacacggccgcctttgaggaacgcaggttcccctccagcttcgaggagattgagatcctgtggtctcagttcctgaagtttaaggagatggagctaccagccaaggaggccgacaagaacaggtccaagggcatctaccaatccctggagggagcggtgcaagcaggccagctcaaggtgccccctggctaccacccgctggatgtggagaaggagtggggcaagctgcacgtggccatcctggagcgggagaagcagctccgcagcgagtttgagaggctggagtgtcttcagcgcatcgtgaccaagctgcagatggaggcggggctgtgtgaggagcagctgaaccaggccgacgccctgctgcagtcggatgtccggctgctggctgcaggcaaagtgccacagcgggcgggggaggtggaacgggacttggacaaggcggatagcatgatccggctgctcttcaacgacgtgcagaccctcaaggatggacggcacccgcagggcgagcagatgtaccgcagggtgtaccgtctgcacgagcgcctggtagccatccgcaccgagtacaacctacggctgaaggcaggcgtggcggcccctgcaacccaggtggcccaggtgactctgcagagtgtgcagaggcgccccgagctggaggactccactctgcgctacctgcaggacctgctggcctgggtggaggagaaccagcaccgtgtggatggcgctgagtggggtgtggacctgcccagcgtggaggcgcagctgggcagccaccgaggcctgcaccagtccatcgaagaattccgggccaagatcgagcgggcacggagtgacgagggccagctctcccccgccacccggggtgcctaccgtgactgcctgggtcggctggacctgcagtacgccaagctgctgaactcctccaaggcccgcctcaggtccctggagagcttgcacagctttgtggcagccgccactaaggagctaatgtggctgaatgagaaggaggaggaggaggtgggcttcgactggagcgaccgcaacaccaacatgaccgccaagaaggagagctactcggcgctgatgcgggagctggagctgaaggagaagaagatcaaggagctccaaaatgctggggaccggctgctgcgggaggaccacccggcccggcccacggtggagtccttccaggcggccctgcagacgcagtggagctggatgctacagctgtgctgctgtatcgaggcacacctgaaggagaacgctgcctactttcagttcttctcagatgtgcgggaggccgaggggcagttgcagaagctgcaggaggcactgcgtaggaaatacagttgtgatcgctccgccaccgtcacccggctggaggacctgctgcaggatgcccaggacgagaaggaacagctgaacgagtacaagggccacctctcaggcctggccaagcgggccaaggccgtcgtgcagctgaagccccgccacccagcccaccccatgcggggccgcctgcccctgctggccgtgtgcgactataagcaggtggaggtgactgtgcacaagggtgacgagtgccagctggtgggccctgcacagccgtcccactggaaggtgctcagcagctccggcagcgaggccgccgtgccctccgtgtgcttcctggtgcccccgcccaaccaggaggcccaggaggccgtcaccaggctggaggcccagcaccaggccctggtcacgctgtggcaccagttgcacgtggacatgaagagccttctggcctggcagagccttcgccgcgacgtgcagctcatccgctcgtggtccctggccacgttccgcaccctgaagccagaggagcagcgccaagccctgcacagcctggagctgcactaccaggccttcctgcgggacagccaggacgcgggcggcttcggacccgaggaccggctgatggctgagcgcgagtacggctcctgcagccaccactaccagcagctgctgcagagcctggaacagggtgcacaggaagagtctcgctgccagcgctgcatctccgagctcaaagacatccggctgcagctggaggcctgtgagacgcgcaccgtgcaccgcctgcggctgccgctggacaaagagccggcacgggagtgtgcccagcgcatcgccgagcagcagaaggcacaggcagaggtggaggggctgggcaagggggtcgcccggctctctgccgaggccgagaaggtcttggccctaccagagccatcgcctgcggcccccacgctgcgctcggagctggagctgacgctgggcaagctggagcaggtccgcagcctgtctgccatctacctggagaagctcaagaccatcagcctggtgatccgcggcacgcagggggccgaggaggtgctcagggcccacgaggagcagctcaaggaggcccaggccgtgccggccaccctcccggagctcgaggccaccaaggcctctctgaagaagctgcgggcccaggccgaggcacagcagcccacgttcgacgccctgcgggatgagctgcggggggcacaggaggtgggggagcgactgcagcagcggcacggggagcgggacttggaggtggagcgctggcgggagcgggtcgcccaggtgcttgagcgctggcaggctgtgctggcccagaccgacttgcggcagcgcgagctcgagcaactgggccgccagctgcgttactaccgcgagagtgcagaccccttgggcgcctggctgcaggacgccaggcggcggcaggagcagatccaggccatgccgctggccgacagccaggctgtgcgggagcagctgcggcaggagcaggccctgctggaggagatcgagcgccacggcgagaaggtcgaggagtgccagaggtttgcgaaacagtacatcaacgccatcaaggactatgaactccagctggtgacgtacaaggcgcagcttgagccggtggcctccccggccaagaagcccaaggtccagtcgggatcagagagtgtcatccaggagtacgtggacctgcgtacgcactacagcgagctgaccacactgacgagccagtacatcaagttcatcagcgagactctgcggcgcatggaggaggaggagaggctggctgagcagcagcgggcagaggagcgcgagcggctggccgaggtggaggccgcgctggagaagcagcggcagctggccgaggcgcacgcccaggcaaaggcacaggcggagcgggaggcgaaggagctgcagcagcgcatgcaggaggaggtggtgcggcgggaggaggcggcggtggacgcgcagcagcagaagcgcagcattcaggaggagctgcagcagctgcggcagagctcggaggcggagatccaggccaaggcccggcaggcagaggcggctgagcgcagccggctgcgcatcgaggaggagatccgcgtggtgcgcctgcagttggaggccaccgagcgccagcgtggcggggctgagggggagctgcaggcactgcgtgcacgggcggaggaggctgaggcacaaaagcgacaggcgcaggaggaggccgagcgcttgcggaggcaggtgcaggacgagagccagcgtaagcggcaggcggaggtggagctggcctcgcgcgtgaaggccgagaccgaggcggcgcgcgagaagcagcgggccctgcaggccctggaggagctgcggctgcaggcggaggaggcggagcggcgcctgcggcaggccgaggtggagcgagcgcggcaggtacaggtggccctggagacggcgcagcgcagtgcagaggcggagctgcagagcaaacgcgcctccttcgccgagaagacggcacagctggagcgctccctgcaggaggaacacgtggctgtggcacagctgcgggaggaggctgagcggcgggcacagcagcaggccgaggccgagcgggcgcgcgaggaggcagagcgggagctggagcgctggcagctcaaggccaacgaggcgctacggctgcggctgcaggcggaggaggtggcgcagcagaagagcctggcgcaggccgaggctgagaagcagaaggaggaggcggagcgcgaggcgcggcggcgcggcaaggcggaggagcaggccgtccggcagcgggagctggctgaacaagagctggagaagcagcggcagctggcggaaggcaccgcgcagcagcgcctggccgcggagcaggagttgatccggctgcgggccgagacggagcagggggagcagcagcggcagctgctggaggaggagctggcccggctgcagcgtgaggcggctgcagccacgcagaaacggcaggagctggaagccgagctggccaaggtgcgggccgagatggaggtgctgctggccagcaaggcgagggctgaggaggagtcgcgctccaccagcgagaagtccaagcagaggctggaggccgaggccggccggttccgcgagctggccgaggaggccgcccgcctgcgtgccctggcggaagaggccaagcggcagcggcagctggccgaggaagacgcggcgcggcagcgggccgaggcggagcgggtgcttgcggagaagctggccgccatcggcgaggccacgcggctcaagacggaggcggagatcgcgctcaaggagaaggaggcggagaacgagcgcctgcggcggctggcggaggacgaggccttccagcggcggcggctggaggagcaggccgcgcaacacaaggctgacatcgaggagcgcctggcccagctgcgcaaggcatcggacagcgagctggagcggcagaaggggctggtggaggacacgctgaggcagcggcggcaggtggaggaagagatcctggcgctgaaggcgagcttcgagaaggcggccgctggcaaggcggagctggagctggagctgggacgcatccgcagcaacgcggaggacacgctgcgcagcaaggagcaggccgagctggaggccgcgaggcagcggcagctggcggcggaggaggagcggcggcgccgtgaggctgaggagcgcgtgcagaagagcctggcggccgaggaggaggccgcacggcagcggaaggcggcgctggaggaagtcgagcggctgaaagccaacgtggaggaggcgcggcgcctgcgggagcgagcggagcaggagtcggcgcggcagctgcagctggcccaggaggccgcccagaagcggctgcaggcggaagagaaggcacacgccttcgcggtgcagcagaaggagcaggagctacagcagacgctgcagcaggagcagagcgtgctggaccagctgcgcggcgaggcggaggcggcccggcgggcggctgaggaggcggaggaggcccgggtgcaggcggagcgtgaggcggcgcaggcccggcggcaggtggaagaggccgagcggctgaagcagtcggcagaggagcaggcacaggcccgggctcaggcacaggcggctgcagagaagctgcgcaaggaggccgagcaagaggcggcgcggcgggcacaggcggagcaggcggccctgcggcagaagcaggcagctgacgcggagatggagaagcataagaaattcgccgagcagacgctgcggcagaaggcgcaggtggagcaggagctgacaacactgcggctgcagctggaggagaccgaccaccagaagaacctgctggacgaggagctgcagcggctgaaggcggaggccacggaggccgcacgccagcgcagccaggtggaggaggagctcttctcggtgcgcgtgcagatggaggagctgagcaagctcaaggcacgcatcgaggctgagaaccgcgcactcatcttgcgtgacaaggacaatacgcagcgcttcctgcaggaggaggctgagaagatgaagcaggtggcggaggaggccgcgcggctgagtgtggcggcccaagaggctgcgcgactgcggcagctggcagaggaggacctggcacagcagcgggccttggcagagaagatgctcaaggagaagatgcaggcggtgcaggaggccacgcgactcaaggctgaggcggaactgctgcagcagcagaaggagcttgcgcaggagcaggcgcggcggctgcaggaggacaaggagcagatggcgcagcagctggcggaggagacgcagggcttccagcggacgctggaggccgagcggcagcggcagctggagatgagcgctgaggctgagcgcctcaagctgcgtgtggccgagatgagccgagcccaggcccgcgctgaggaggacgcccagcgcttccggaagcaggcggaggagatcggtgagaagctgcaccgcacggagctcgccacccaggagaaggtgaccctggtgcagacactggagatccagcgacagcagagtgaccatgatgccgagcgcctgcgggaggccatcgctgagctggagcgtgagaaggagaagctccaacaggaggccaaactgctgcagctcaagtctgaggagatgcagacggtgcagcaggagcagctgctgcaggagacgcaggccctgcagcaaagcttcctctctgaaaaggacagcctgctacagcgggagcgcttcatcgagcaggagaaggccaagctggagcagctcttccaggacgaggtggccaaggcacagcagctgcgtgaggagcagcagcggcagcagcagcagatggagcaggaacggcagcggctggtggccagcatggaggaggcgcggcggcggcagcatgaggccgaggagggcgtgcggcgcaagcaggaggagctgcagcagctggagcagcagcggcggcagcaggaggagctgctggctgaggagaaccagaggctgcgtgagcagctgcagctcctggaggagcagcaccgggccgcgctggcgcactcagaggaggtcactgcctcgcaggtggctgccacaaagaccctgcccaatggccgggatgcacttgatggccccgcggcagaggcagagccggagcacagcttcgatggcctgcggcggaaggtgtcagctcagaggctgcaggaggccggcatcctgagtgcggaggagctgcagcggttggcgcagggccacaccacggtggacgagctcgcacggcgggaagacgtgcgccactacctgcagggccgcagcagtatcgcagggctgttgctgaaggccaccaatgagaagctgagtgtttacgccgccctgcagaggcagctgctgagtcccggcacggccctcatcctgctggaggcgcaggcggcctcaggcttcctgctggaccctgtgcggaaccggcggctgaccgtcaacgaggctgtgaaggagggtgtggtgggccccgagctgcaccacaagctgctgtcggccgagcgcgccgtcactggctacaaggacccctacactggccagcagatctctctcttccaagccatgcagaagggcctcatcgtccgggagcacggcatccgcctgctggaggcccagatcgccacgggcggcgttatcgaccccgtgcacagccaccgcgtgcccgtggacgtggcctaccggcgcggctacttcgacgaggagatgaaccgcgtcctggcggaccccagcgacgacaccaagggcttctttgaccccaacacgcacgagaacctcacgtacctgcagctactggagcgctgcgtggaggaccccgagacgggcctgtgccttctgccactcacggataaggctgccgagggcggggagctggtctacactgactccgaggcccgggacgtctttgagaaggccaccgtgtctgcgccgttcggcaagttccagggcaagacggtgaccatttgggagatcatcaactcggaatacttcacggcagagcagcggcgggacctgctgcggcagttccgcacgggccggatcacagtggagaagatcatcaagatcatcatcacggtggtggaggagcaggagcagaagggccggctttgctttgagggcctgcgcagcctggtgccagccgccgagctgctggagagcagggtcatcgaccgcgagctctaccagcagctgcagcgaggtgagcgctctgtgcgagacgtagccgaggtggacactgtgcggcgggctctccggggtgccaacgtcatcgcgggtgtatggctggaggaggcggggcagaagctgagtatctacaatgccctgaagaaagacctgctgccatccgacatggccgtggccctgttggaagcccaggccggcaccgggcacatcatcgaccccgccaccagcgcccggctgaccgtggacgaggcagtgcgtgctggcctggtgggccccgagtttcatgagaagctgctatcagccgagaaggctgtgacagggtacagggacccctacacagggcagagcgtctccctgttccaggccctgaagaagggcctcattccccgggagcagggcctgcgcctgttggacgcccagctgtccacgggcggcatcgtggaccccagcaagagccaccgcgtgcccctggatgtcgcctgcgcccgaggctgcctggatgaggagaccagcagggccctgtcggcaccaagggccgacgccaaggcctacagtgaccccagcacaggggagccggccacctacggcgagctccagcagcggtgccggcccgaccagctgaccgggctgagcctgctgccgctctcagaaaaggctgctcgggcccggcaggaggagctctactcagagctgcaggcccgtgagacctttgaaaagaccccggttgaggtccccgtgggtggcttcaagggcaggacggtgacggtgtgggagctcatcagctctgagtacttcactgcggagcagcggcaggagctgttgcgtcagttccgcacgggcaaggtcaccgtggagaaggtcatcaagattctcattaccatcgtggaggaggtggagaccctgcggcaggagaggctgtccttcagcggcctccgtgcccctgtgccagccagcgagctcctggcttccggggtcctcagcagagcccagtttgagcagctcaaggacggcaagacgacggtcaaggacctttcggagctgggctccgtgcggacgctgctgcagggcagtggctgcctcgccggcatctacctggaggacaccaaggagaaggtgtccatctacgaggccatgcgccggggcctgctgagagccacaacggctgcgctcctgctggaggcgcaggcggccactggcttcctggtggaccccgtgcggaaccagcgcctgtatgtccacgaggccgtgaaggcgggcgtggtgggccccgagcttcacgagcagctgctgtctgccgagaaggccgtcaccggctacagagacccctactcgggcagcaccatctccctcttccaggccatgcagaagggcctggttctccggcagcacggcatccgcctgctggaggcccagatcgccacgggcggcatcatcgaccccgtgcacagccaccgcgtgcctgtggacgtggcctaccagcgcggctacttcagtgaggagatgaaccgcgtcctggcggaccccagcgacgacaccaagggcttctttgaccccaacacgcatgagaacctcacgtacaggcagctgctggagcggtgcgtggaggaccccgagacgggcttgcgccttctgccactgaaaggggcggagaaggctgaggtggtggagaccacgcaggtgtacactgaggaggagacaagaagggcatttgaagagacacagatcgacattcccggcggcggcagccacggcggctccaccatgtccctgtgggaggtgatgcagtcggacctgatccccgaggagcagcgggcccagctgatggctgacttccaggccggccgggtgaccaaggaacgcatgatcatcatcatcatcgagatcattgagaagacagagatcatccgccagcagggtctggcctcctatgactacgtgcgccgccgcctcacggctgaggacctgttcgaggctcggatcatctctctcgagacctacaacctgctccgggagggcaccaggagcctccgtgaggctctcgaggcggagtccgcctggtgctacctctatggcacgggctccgtggctggtgtctacctgcccggttccaggcagacactgagcatctaccaggctctcaagaaagggctgctgagtgccgaggtggcccgcctgctgctggaggcacaggcagccacaggcttcctgctggacccggtgaagggggagcggctgactgtggatgaggctgtgcggaagggcctcgtggggcccgagctgcacgaccgcctgctctcggctgagcgggcggtcaccggctaccgtgacccctacaccgagcagaccatctcgctcttccaggccatgaagaaggagctgatccctactgaggaggccctgcggctgctggatgcccagctggccaccggcggcatcgtggacccccgcctgggcttccaccttcccctggaggtggcttaccagcgtggctacctcaacaaggacacgcacgaccagctgtcagagcccagcgaggtgcgcagctacgtggacccgtccaccgacgagcgcctcagctacacgcagctgctcaggcggtgccgtcgtgacgacggcaccggccagctgctcctgccactgtcggacgcccgcaagctgaccttccgtggcctgcggaagcagatcaccatggaggagctggtgcgctcgcaggtcatggacgaggccacggcgctgcagctgcgggagggcctgacctccatcgaggaggtcaccaagaacttgcagaagttcctggaaggcaccagctgcatcgctggtgtcttcgtggacgccaccaaggaacggctctcggtgtaccaggccatgaagaaaggcatcatccgccccggcacagcctttgagctcctggaggcgcaggcggccaccggttacgtcatcgaccccatcaagggactgaagctgacggtggaggaggctgtgcgtatgggcattgtgggccccgagttcaaggacaagctgctgtcggccgagcgcgccgtcactgggtacaaggacccctactctgggaagctcatctccctcttccaggccatgaagaagggcctgatcctgaaggaccatggcatccgcctgctggaggcccagatcgccacgggcggcatcatcgaccctgaggagagccaccggctgcccgtggaggtggcctacaagcgcggcctcttcgatgaggagatgaacgagatcctgaccgacccctcggacgacaccaagggcttctttgaccctaacacggaggagaacctcacctacctgcagctgatggagcgttgtatcactgacccccagacgggcctgtgtctcttgccgctgaaggagaagaagcgggagcggaagacgtcctccaagtcctccgtgcgcaagcgccgagtggtcatcgtggaccccgagacgggcaaggagatgtcagtgtacgaggcctaccgcaagggcctgattgaccaccagacgtacctggagctgtccgagcaggagtgcgagtgggaggagatcaccatctcctcctcggacggcgtggtcaagtccatgatcatcgaccgccgctccgggcgccagtacgacatcgatgatgccatcgccaagaacctcatcgaccgctcggcactggaccagtaccgcgccggcacgctctccatcaccgagttcgccgacatgctctcgggcaacgccggtggtttccgctcccgttcctcctcggtgggatcctcctcctcctaccccatcagccccgccgtctccaggacccagctggcctcctggtcagaccccactgaggagacgggccccgtggctggcatcctggacacggagacgctggagaaggtgtccatcaccgaggccatgcaccggaacctggtggataacatcacggggcagcggctgctggaggcgcaggcctgcaccgggggcatcatcgaccccagcaccggtgagcgcttccctgtcaccgacgccgtcaacaagggcctggtggacaagatcatggtggaccgcatcaacctggcccagaaggccttntgcggcttcgaggacccacgcaccaagaccaagatgtcggccgcccaggccctgaagaagggctggctctactacgaggccggccagcgcttcctggaggtgcagtacctgaccggcggcttgatcgagcccgacacgccgggccgcgtgcccctggacgaggccctgcagcgcggcacggtggacgcccgcaccgcacagaagctgcgtgacgtgggcgcctactccaagtacctcacctgccctaagaccaagctcaagatctcctataaggacgcgctggaccgcagcatggtggaggagggcacggggctgcggctgctggaggctgccgcgcagtccaccaagggctactacagcccctacagcgtcagcggctccggctctaccgctggctcccgcaccggctcgcgcaccggctcccgggccggctcccgccgcggcagctttgacgccaccggctccggcttctccatgaccttctcttcatcctcctactcctcctcgggctacggccgccgctacgcctcggggtcctcggcctccctggggggccctgagtctgccgtggcctgaggctgcctgcgcccaccccgctctgcatgcggcccagcccggctcccaccgaggcgcgggggccgttttcaacgcttaaaggtgtcttcctcccaagtggtgcctaaagtttaaccaaaaagaccagactaatatattaatatatatctgctgtccagacagcctgtatcttgggggacagggctggcccagccctgctggccgcctcaccccctcgggtctcctcactcccttctacctgccactcacacagccaggtgccttggagggtcccaagctgggccccagcccaccctcctgtcttcccagggtagcccgcctgccagtcctagctgcacagggcagctgggcccaaccctgtctgtagagggccctggtgtttctagcactggcctgcacggtgggccttgctggggacggggggccccagtcagcctctctcccagtctacccagagaagccccttccccatgggaagacgaggccctcgggcccagcccccacagtgctgtctgatctgtgctttccagctcaccccccacactcactcctgagacccctggcctccggcgtcagcctccagcctctgttcccctagtaagtgccttccatgtcggcctctaaccccaggccccgaggacccagacccagtggggaggcggacgttccagccggcatggctgggaactgcagacctgtcctcctggtgggtccaggggcccctccagcttgtggagccccacactggggtgccgcctgcccgtctctctcccatggagccccagccccctttgggcccagggacaccagccaggctctgtgctgaccctcctgttgcacccagccctggtctcagcagcgaccacccctgcctccaccctctgagctttgcatgttccactaaccccgggcgggtggcaggtggaggtgtcaggctgctggcgcctctgcaagggcagaacactaacctgaccgtgggcggggccttgcggtatccgcccccaataaaagcaattccaaccttaaaaaaaaa

SEQ ID NO: 71072 - DNA, 363 bp, Homo sapiens
aaacccttcaaaaaaaaaaaaacaagaaataaaacgtgttcaaatagcaagagataaaatcaaattgtctctgtttgcagaaaacgtgattctatatctagaaaaccacattgtcacagcccaaaaactccttaagctgataagcaagttcagcaaagtctgaggatacaaaatcaatgtgcaaaaatcacaagcattcttatacaccagcaatagacaatattcttcaattcctatacaccaataatagacaagagagccaaatcatgaatgaactcccattcacaattgttacaaagagaataaaatacctaggaatacagctaatgatgggtgtgaagaacctcttcaaggagaactaca

SEQ ID NO: 71073 - DNA, 790 bp, Homo sapiens
tttgtagtgactttcaaaactgtagaatattatcgagagacatttaaaagtcatttctaaaatatttgtaagcttttagttcatgcaattgctttaaattagagttattaaaaaaccagcataaaagccatctttgatttctcagacccttggtctccctcagttcttcaaaatacatcaaactgtggtctgtcaatcagacagtgataagaaattactcaggcaatgggtttcagtcaccagcaggcaaatggcagctgagatttttgttccctgctgccaaggaatttactaactcttttatgttttgaataaaggggaaccctcaaccctgtctaccctatggaaaatccaaattgaatgttactacagccatatttatttccctctgataacagtctaaatatgcttgtataaataatggctattattagatgctaaaatgctatcatgttgtttgtccccattgtaaactaaggggattttttaaaacccttatttcttttgttttgagtctgcttgtgaatctgattgtttttgattttcttgatttaagtgttgtccttcatttcaatgacataaacatatacagtcctcagaaaaacaagcaattttcttctttccctcactcatattaaaaatttatgccaacataaatatcaaacaaaaggatcattgttaaaggtatggcattgtgttcaaatgcagaagatcctgtatgtaattataatacaatttaatgtgcaatcaaatgacatctagatttttaggatactccaagccaatattg

SEQ ID NO: 71074 - DNA, 330 bp, Homo sapiens
ctctgtggcttgtagtggtctgttttttgtttgtttgttttgtttttttctggaaatacagtgaaagcttttgatgaaatttaggccttcatgttaagacatttctattctgttatatctttaattatatttttcttattcttttgtctatctcaggggcagcagttaactgttggatcttcataactatcatcttctctctaacctttttaatgctgtagtactttttcatgacatcttgtttaccttttctcaaaattattctcttctagtgatttggttttgctgcattgactgttgttgcatttattagttatgctgttttattta

SEQ ID NO: 71075 - DNA, 1158 bp, Homo sapiens
ttaaaaaaaaatccaaaacaatattgttagaacagtgcaacaaatatttacaagtcaatagtcttttctttgtagaatattacatttatggtttcaataaatgatttagcagttaaagctgagatgaagtgtggttctcatattcaatcttgaaaaactaaaccatctttaaaaagtagaacgtccatgtgaactcatgcctgaagccatgtttgaacgctagataaaattgccctgggacagaactgtagttcacctttatgaaatcaattttaaacttgttattgtgagccacaataaatacagttcacattgcaaactatcacacactcatacaaatgttactaaaaaaaacttaccaagttatatcctctctacatgcaatgcattctggtattttctctttcatttgctttttttaaaaagatctcacaatccactaatgagtcacaacctgtggtttgtaaagtagtgttagaatgaacccattggccacatcagaaatatctaaggattttctttccaacctaaaatcttttccttctctgttaattaagagatcttaacaaatgggaaattctgagtaagttcctgaatttttctttcatttgatcatggccttctagtgtttactaaagtggtttttcttttcactgccatccttgggtatttttgtatgctgggttgtattacgggtgaagggttgatggggttgtaggcctgagaggatcatttttattacagactctatccttgactataatatgatagcgttacatggagtttagtgactcatgagctcatgtctgactcgtaaggggtcctttgttaattcagatgacattggtcttatccgttatcaagaatccatgagtttggctgggtgcggtggttcatgcctgtaatcctagcactttgggaggccgaggcgggtggatcacaaagtcaggagttcaagaccagcctgaccaacatggtgaaaccccgtctctactaaaaatacaaaaattagccaggagtggtggcacgcacctataatcccagctactcaggaggttgaggcaggagattcgcttgaacccgggaagcagaggttgcagtgagccgagatcgcgccactgggcgccagcctgggcaacagagcgagactccgtctca

SEQ ID NO: 71076 - DNA, 1004 bp, Homo sapiens
attttgagatcttgcctgctcttaatagggagtttgtgacacttagattttcaagtgttcattttatacctttcccaaatctggttgcagtgtatttagtcaagcattgaagacctaacatatggcatgttttgcaaggcacagggaaagaaaaatgaactgagaacagtgagaccttgtggaagttcccagggtgggacgttgaaaccctgggtcctgggccttcctgaatcacagcctcggtgggaggattttatgaaaggtacagtgcagttgcatcatcttacacagttgtacaggactgggaccaaaaaaggtgccatgtaaatagtgcatgcaattgtgttcagtgttcgttcagtgaggacagccccactgagctacctgtgtactcaggtggtctcggttccctttgcgttctaatggtttgagtttcttgctgtattgagagtgattctagtgtttagagactttttcaaacatcacggtctccagatgtgaagccaactacctcatttattgtatggttgaacaaacagatttgttctgatgttggaaggaaaactagctgcttttgatttgttaaaagatggtacatgagtgtttgtgatatgtaaatactaatgtgaaagattgtataccatgtacttaatgtctgacttagtggaatttcaaaggcaactttgactaagcaaatttgataaagaattggtttaagaataagatgcaactatacttagtgactttggctcacagtttcatcatccataaaatattagaagataaaattaaattatatttgcaagagacacaagactattaaggagggctagaagttatccaacagtggagtgatttagatgacaaggagttattaatcatatttgccatttcctgtcactggaatgggtaaccttgcttggcttgaatctccagttctgggaaagaacagtgctgtgcttgagagcagtttagtagaccagactgaaataaacgctctttct

SEQ ID NO: 71077 - DNA, 981 bp, Homo sapiens
  misc_feature (101)..(102): n is a, c, g, or t
agagatggggtttcaccatgttatccagggtggtctcaaactcctgggctcaagcgactcacccactcagcctctcaaagagctaggattacaggcgtgannaatcgtgcccagcctcttcccattgcttttttgtttgtttgtttgtctttgttttttgagatcgcgccactgtactccagcctgggtgatagagcaagactctgtctcaaaaaaagaaagaaaaaaaaaaaaacaaaaaacaacatacccatctaacaaacctgcacatgtattccctgaatctaaaagttaaaattagaaagcagcagatcccggtacaagaacacatggaacaagtggagtgaatgtatgctgtttgcttaacattcagtgatattgcaatcttcccatttcctagaagagaagaaacatgcatgcaggcagtcctcactttataaaagtctttggtaactaaatttggtgttggttacccctgagtcatgcatatcaagaacatgattttatctcagttaccacagtgagaactaccctgcttctggttatacagacacgatcctgaatacagataatattgattcccttagctccctccacaaatgttctagggcagtgaactttacttacaataccatctaaaaattgttgatccttgttgatgagtgactcatacatataatcccaactgcttaggaggctgagacaggacaatcactggagtccaggagtttgaggtggagtgagctatgattgtaccactgctttccagccagggtgataaagcaagagacactatcaaaagaaaaaaaaagattgttgacccatttcctttaagcgggtcatgtcaaaatcttctaaaccaaagtcaggtgtggtgctgcaagcctgtaatctgggctattcaggaggcatgagtagagggcttgcttgagaccaggaattcgagcccagggcaacatagcaaaaacttgtctcaaaaaa

SEQ ID NO: 71078 - DNA, 940 bp, Homo sapiens
  misc_feature (101)..(102): n is a, c, g, or t
agagatggggtttcaccatgttatccagggtggtctcaaactcctgggctcaagcgactcacccactcagcctctcaaagagctaggattacaggcgtgannaatcgtgcccagcctcttcccattgcttttttgtttgtttgtttgtctttgttttttgagatcgcgccactgtactccagcctgggtgatagagcaagactctgtctcaaaaaaagaaagaaaaaaaaaaaaacaaaaaacaacatacccatctaacaaacctgcacatgtattccctgaatctaaaagttaaaattagaaagcagcagatcccggtacaagaacacatggaacaagtggagtgaatgtatgctgtttgcttaacattcagtgatattgcaatcttcccatttcctagaagagaagaaacatgcatgcaggcagtcctcactttataaaagtctttggtaactaaatttggtgttggttacccctgagtcatgcatatcaagaacatgattttatctcagttaccacagtgagaactaccctgcttctggttatacagacacgatcctgaatacagataatattgattcccttagctccctccacaaatgttctagggcagtgaactttacttacaataccatctaaaaattgttgatccttgttgatgagtgactcatacatataatcccaactgcttaggaggctgagacaggacaatcactggagtccaggagtttgaggtggagtgagctatgattgtaccactgctttccagccagggtgataaagcaagagacactatcaaaagaaaaaaaaagattgttgacccatttcctttaagcgggtcatgtcaaaatcttctaaaccaaagtcaggtgtgtagagggcttgcttgagaccaggaattcgagcccagggcaacatagcaaaaacttgtctcaaaaaa

SEQ ID NO: 71079 - DNA, 555 bp, Homo sapiens
tggtggctcacatctgtaatcccagcactttgggaggccgaggcaggtggatatcttgaagtcaggagttcgagaccaacctggccaacagggtgaaacccaatctctactaaaaatacaaaaattagctgggtgtggtggcgcaagctacttgggaggctgaggcaggagaatcgcttgaaccagggaggcggaggctgcagtgagctgagatcgcgccactgtactccagcctgggtgatagagcaagactctgtctcaaaaaaagaaagaaaaaaaaaaaaacaaaaaacaacatacccatctaacaaacctgcacatgtattccctgaatctaaaagttaaaattagaaagcagcagatcccggtacaagaacacatggaacaagtggagtgaatgtatgctgtttgcttaacattcagtgatattgcaatcttcccatttcctagaagagaagaaacatgcatgcaggcagtcctcactttataaaagtctttggtaactaaatttggtgttggttacccctgagtcatgcatatcaagaacatgatttt

SEQ ID NO: 71080 - DNA, 438 bp, Homo sapiens
ccaccacacatcatatccagcatattaaaatgcagttttactcacgttacacgtgtgttttgtgtatgaaacatttttcacaaatctttttttatacttttaaacttttgcctttaaaattatctggctaagaataactcaattaagtcataaatgacaattaatatgtcaattatgtctggcaatatggtgtctactcaggaattctggaaaggggcaaatctattttatgaattattttcaaatataatattttatgaatagcaaatttaacaatgacaaataagaaatatgacatagatatttaatctagcaaatatttattttgattttgtggggttttttctttctctcttttttttttttttttttttttttttttttgagacagggtcttattctgtcacccaggctggagtgcagtggcacaatcacagc

SEQ ID NO: 71081 - DNA, 1445 bp, Homo sapiens
  misc_feature (8)..(8): n is a, c, g, or t
  misc_feature (278)..(278): n is a, c, g, or t
taagtatntattgatcattcttgggtgtttctcgcagagggggatttggcagggtcacaggacaatagtggagggaaggtcagcaaataaacaagtgaacagaggtctctggttttcctaggcagaggaccctgtggccttccgcagtgtttgtgtccctgggtacttgagattagggagtggtgatgactcttaatgagcatgctgccttcaagcatctgtttaacaaagcacatcttgcaccacccttaatccatttaaccctgagtggacacagnacatgtttcagagagcacggggttgggggtaaggttatagattaacagcatcccaaggcagaagaatttttcttagtacagaacaaagtggagtctcctgtgtctacttctttctacacagacacagcaacaatctgatttctctatcttttccccacatttcccccttttctattcgacaaaaccgccatcgtcatcatgacccgttctcagtgagctgttgggtacacctcccagacggggcggctgccgggcggaggggctcctcacttctcagactgggcagctgccgggcggaggggctcctcacttctcagacggggcggccgggcagagacgctcctcacctcccagacggggtcgcggccgggcagaggcgctcctcacatcccagatggggcggcggggcagaggcgctccccacatctcagacgatgggcggctgggcagagacgctcctcacttcctagacgggatggcggccgggaagaggcgctcctcacttcccagactgggcagctgggcagaggggctcctcacatcccagacgatgggcggccaggcagagacgctcctcacttcccagaaggggtggcggccgggcagaggctgcaatctcggcactttgggaggccaaggcaggcggctgggaggtggaggttgtagcgagccgagatcacgccactgcactccagcctgggcaacattgagcattgagtgaacgagactccctctgcaatcccggcacctcgggaggccgaggctggcagatcactcgcggttaggagctggagaccagcccggccaacacagcgaaaccccgtctccaccaaaaaaatagaaaaaccagtcaggcgtggcggcgcgcgcctgcaatcccaggcacttggcaggctgaggcaggagaatcaggcagggaggttgcagtgagccgagatggcgggagtacagtccagcttcggcttggcatcagagggagactagggaaaggggagaggggagaggttagtattttcaaaaatcatcatatagtacgtggttacacaactctgaatatactaaaacacattgaattgtatactttaaaggagtgaactatatctcaatatataaggggtgagttatagctcaataaagctgttaacaacaaaacaaaaatgccatacc

SEQ ID NO: 71082 - DNA, 596 bp, Homo sapiens
aaaatgatacttgacaatataaagacagtgaacaattacagcactacaaggctagattaataggagaaagtgggcctgtagagcagcaagaagaaatttggtcagccataaagaagaactattatcagaatgggttatcagaaaacttgttcaggctcacttggaagagaaatataaaaaggagatgaacactcatctgcttgagagtacttttgtttcctttcttacctgaaaggagggctacgaaccaggaaacttttctatgacacttatagccttttgatttacctcagactcacaggactgagactttttatttcatgtgtactttgaagtccacagatgaaagcgttgattgtttttaaagagagaaaatgccaccattttatatcttggtgtgtggtatttctagcatgtcagctgaattattatcttgccaaaggcaagaagagcctattgttccctcagatagaattaaaataagaaaaagggtagactaatagccctactcagtttctttagtcctttggacattttcatctgattacagcttcaagaaataaaaccattatcttgaaaactggaggatcaaaaaa

SEQ ID NO: 71083 - DNA, 432 bp, Homo sapiens
ttgagatggagtcttgctctgttccccaggctacagtgcagtggcgcaatctcggcttactgcaatcttcgcctcctgggttcaagcgactccagcctcccacatagccaggattacaggcgccaccaccgcacctggtatttttagtagaattggggtttcaccatcatggccaggttggcctcgaactcctgacctcatgatccacccacctcggcctcccaaagtgctgggattacaggtgtgagccactgcacctagcctaatcttgccatttttgacaatcaattagcctttctaaggctcagtttcctcatctataaaattatgatactaccacctgactgaaagggcatttgtaaaattagaaataatgtaggtaataaacctaatgcagtggctgatataggagatgcttaataaatagtatct

SEQ ID NO: 71084 - DNA, 330 bp, Homo sapiens
aaatatggaagagacattaagagataatgaagctagaatgagaagctccaattaatagcttctaataatgagaagctattaatagctccaaagcgagataagacagagagtaggagagaaattaaaccatggagtttttcagatttgaaaaattcagaataaaacattttacaaatttcagagtaggagaaataaaacaagtccacatgtgggcacatgacaatattttttttaatttttaatttattttatttaatttatttatttttatttttattttttttttgagacagggtctcgctctgttgcccaggctggagtacagttgta

SEQ ID NO: 71085 - DNA, 418 bp, Homo sapiens
taacagggtagggcatggttacatgtttaggtcaacttcctttgtcgtggttgattggtttgtcctcaccaaaactcatgctgaggcctgagtccccagtttgattgtgttggtaggtggtgcctttaagaggtgattaggtcattgagatggattaaaggctttctcatgaggctcagttagttctggaatggattcgctcttgcaggaatggatgaattctcacaagagtgggttgttatgaagtgaggatgcttcttgtgttctgttctctttgccctcctcagttcaccatctgctttccaccatgagttgaagcagcatgaggccctcatcagatgggctccctgatcttggactcctcagcctttggactcataagccaaaataaatctgttttctttataaaaaacccagt

SEQ ID NO: 71086 - DNA, 509 bp, Homo sapiens
cggccgcggggcccgggcaccgggcgcggcctgctggtgaccccgcgccgcgtcgtgtccgggttgtgtcctgcaggccgaagcggcagccgaagccgtcctcggatgagggttactgggactgtagcgtctgcaccttccggaacagcgccgaggccttcaagtgcatgatgtgcgatgtgcggaagggcacctccacccggtgagtcccgggcctgcccctcgcgccgccggccggcggggtggcgaccagaggacgcccttgcggctgccgccccctcccatgacactggcggacccggcgggaggaggcagacggaggtggctgtggcgataggaactgggtcacattgatcgcaacccaggcgatggtttgcggtgaggggtaattgaagaggctgtaacgttttttgctgccaagagagaataaattatttaagggaggcattagctactgcgatttaattcgtatcgctgggtgtaatgcccctctccccattctgggtata

SEQ ID NO: 71087 - DNA, 685 bp, Homo sapiens
caagggggcaacgggggaacagcgcggagaggcggcgccggcgcccgaggcagccgcggccaccgcggccacccccgcaccgcccgccggctaactcgccgcgggtgctgggccgcgctggccgcgtttgaagtctccggcgcggctgctggttggccggcgagggtcacgtgcgcccaggcaggagtttccccgacagctggaggctgcgtgggatccggcggcggctcccgagcgcggcggtgcggccttccccgccccctccctccctcctcccccgcccgcttccgcccggcttattatcctccttattgacaaacagagcggtcgcggcggcgactctcggcgtgcggtgatagccaagccatgggagacaagaagagccccaccaggtaacagcgcccgggccccggggcccggactgtgcgggcggcagggccctcgtgcagggcttcgggtggccgcctcgctagccgcccgggcaccggggcgagcacgggggcagcgccgctggtgtgcgagtgctgccgcttgagggggccggcgccggccgccccacaatggagccgcgatggcggcggcgaccggagcggccgcccgggtgtcagagcggctgtggcggcggcgactgcggccgcgctcgcgccctgcctcttcctgactcccttccccctcagccggagcg

SEQ ID NO: 71088 - DNA, 558 bp, Homo sapiens
cggccgcggggcccgggcaccgggcgcggcctgctggtgaccccgcgccgcgtcgtgtccgggttgtgtcctgcaggccgaagcggcagccgaagccgtcctcggatgagggttactgggactgtagcgtctgcaccttccggaacagcgccgaggccttcaagtgcatgatgtgcgatgtgcggaagggcacctccacccgggacagcaaggaaggggggaagctggtgtcctactccacagccagtcttggggttagaggaaccctgagaaatagagtaggtggtggcagctcagaagagaagaaacaggctgaatacctggcacctggaagaagaaggaatatagtacacaggggagttggcccaggacagagaagtgggcctagtttaaaagaggcttgaggcccacatgggggcccctgacattttttttttttaccagtacatctaagctcttgtagatccaatttttagtggtggaaacattacttgaggaggactcagagaagcattgtcatttggattgaaactgaagaggctctgggcaactcaccag

SEQ ID NO: 71089 - DNA, 4294 bp, Homo sapiens
ccactaaagtgcaagaattacattgcactgtttctccactttttattttctcttaggcttttgtttctatttcaaacatactttcttggttttctaatggagtatatagtttagtcatttcacagactctggcctcctctcctgaaatccttttggatggggaaagggaaggtggggagggtccgacagtggcggtagagaggagactccggctggcgaccggggactggtggagtgcggtgatagccaagccatgggagacaagaagagccccaccaggccgaagcggcagccgaagccgtcctcggatgagggttactgggactgtagcgtctgcaccttccggaacagcgccgaggccttcaagtgcatgatgtgcgatgtgcggaagggcacctccacccggaaacctcgacctgtctcccagttggttgcacagcaggttactcagcagtttgtgcctcctacacagtcaaagaaagagaaaaaagataaagtagaaaaagaaaaaagtgaaaaggaaacaactagcaaaaagaatagccataagaaaaccaggccaagattgaaaaatgtggatcggagtagtgctcagcatttggaagttactgttggagatctgacagtcattattacagactttaaggagaaaacaaagtcaccgcctgcatctagtgctgcttctgcagatcaacacagtcaaagcggctctagctctgataacacagagagaggaatgtccaggtcatcttcacccagaggagaagcctcatcattgaatggagaatctcattaaagtttattttctccaatttcttagtcacttctgtcctaccatgcaaatacacagattatgccaagaggtaccacattttcatgacagatacattcatgcacaatccataatttgagttttacataaaatagaaatttgttagaatttgttagattttattgcaatgatgcctaccaaacatttccagacttaacattttggtctctgcagttaagtgccatgaaaatgtggttgaattattcattatgcagtgttattggtaagtgtattttcacttttagtttagtgaattctaacacataattcttgaattctctactattggcatgtaacgaatttaaattttttataacatagtgcaagctgcctaaatatgtattatttgagaattgtgaaacagatagttatatgtatacaagtcaaagaacaacttaactattgctgcaacaggtttttcttaatggttatcctcttaaatacacctgctggtacttggtgtggttaaataggaaaattgttattaaataaagaatttgtatgaacctttgccaatgtttttgacacgttttactaattattgttcctgaattatgtttctggttttatctattttttgaggtttttttgtttgcttatttttcaaaacattcatttattgtaatgtttactagcggactagtaaacaataaaacattgattatttagctttataattcaggtttagtgctattgtcattgaacactggtattttctgtatcatataaaacattaaaattcaaataattataagcatttggcaaaaacaagagaaaagaaacttgccatattttacaagctgcaattttagaaaagctttaacttaatgatagttttatcattgttttcttgtcccaaacttatccagggccatagaagtatgaatctaattaaaacagaaatgggaattattgcacagaaatgggaaataactaattttaaatcagtcaaattggcttcttattaaatacaataattcttatgaaaatcatagtaccctattttcagacacagctgccagtttaacacatttctcagtatcctgaaaggaaaaaagtatagccccacttatactatgtaaaattaccaataaaatatttttatgactacagattttgcatttttgtttacaactatttaaagagttttatgttgtatttagaatttcaacctagaaaccacacagtacttaaattctcctggggtctcctgctttctcttaaccatttgcttaatatatatctacctaaaggagacttctgaattgtaaatgaacttaaaaatagaatgtggatgcaaaatatcacataagacatcatgataacatttgaagaaaaaataaaactgtagaccctaacagttgtgatatttggtggtttcatgtggtaatgtaattttctgtttaattacagtactttttacaggcacagtggtactgtcttttttgtaagatgctagttgtgaaatacaattaattgcatacagtaaaagtctgtgattaaaacatttatatacctcattctttagtgttgttaaatgaaaaattaaaatttgtgtttattataagatactttcaatggaataccagctaaccagatatgttcctttaaaacatgaatttttttgtcttattctgtttttaacatgtttcaaatgttttatacatttttggagatagtaaaaatttaaaaatgtaatagggaaaatatttaatttttaagtcaaaaactatgctttaaaggaattacatcttatgatcaaataactttcaggatgtattttaaatgagctgcaagagagaaaaatctgacaggagatgggattttacctgaatggagcatactcatatttctacataggtgggaagatactcatctttctacatagacgggaacacggtgtagcatggagattaagcgtgctaactgacacctcatgtttgaatcctgttgtagaatggaaatgagcttaaattacccaagcttactttccatctataaaacagggctaataatggtaatcacatctaatttatagggtttttgggaggattaagtcaatccgtgtaaaattcttaattatctgacacatactggtcactcagtaaatgtgagcttttaccattgttataggtaaaatcccattacaaaaatacaaaaatattttttgtaacagttattttcctgccctcttggatgacctaaagtaatagtgttttatagatttcactaaattttcagtgtaatatcagatgttttctctggatgcagaaagaccatctttccataattaaagaacctgggtggggtgtgcactatgagattggagaaatgaattaagttgacttgaaattattttacttttattaatcacaggtatctcaacctgcctttgtttcaccctacttcaagtacacttccacaccaggggaaacagacccaaattccataaacagaactgacgttaaaatatgcgaaagattcagaacctaggtttagggtacatgtttttctctgtttcatgaacttacagtgtggtttgagcactgggttcttttagccaaattccatacaaaaagaatttggatgttttccagcatttattaccttactttgctataagtaagagtgaagataggccgggtgtgatggctcatgccagtaatcccagcactttgggctgaagcaggcagatattttgagcccaggaccagcctgggcaacatggtgaaagctcatctctatgaaaaaatttgaatatacatatatatatatatgtatatttaaaaagtgaatataatttgaggcacagaagaatattcttaaaaccttttgtattatacaatagaaataaaggttttatttttattaaatgctttcctaaaatgatagtggataatagacaaagtgaaaacatttaaaaaggaagagaaacttcagcctttctaagttgatagcatgtttattaacttttagataaagatccttatagactgaaagaatgtagcctctgcattaatggtaaatggtctagaagttttcgtttccactgaggcttccgccactcgcttttttaaacttcctgctatggtttggatatggtttgtcctcaccaaaactcatgctgaggcctgagtccccagtttgattgtgttggtaggtggtgcctttaagaggtgattaggtcattgagatggattaaaggctttctcatgaggctcagttagttctggaatggattcgctcttgcaggaatggatgaattctcacaagagtgggttgttatgaagtgaggatgcttcttgtgttctgttctctttgccctcctcagttcaccatctgctttccaccatgagttgaagcagcatgaggccctcatcagatgggctccctgatcttggactcctcagcctttggactcataagccaaaataaatctgttttctttataaaaaacccagt

SEQ ID NO: 71090 - DNA, 4407 bp, Homo sapiens
caagggggcaacgggggaacagcgcggagaggcggcgccggcgcccgaggcagccgcggccaccgcggccacccccgcaccgcccgccggctaactcgccgcgggtgctgggccgcgctggccgcgtttgaagtctccggcgcggctgctggttggccggcgagggtcacgtgcgcccaggcaggagtttccccgacagctggaggctgcgtgggatccggcggcggctcccgagcgcggcggtgcggccttccccgccccctccctccctcctcccccgcccgcttccgcccggcttattatcctccttattgacaaacagagcggtcgcggcggcgactctcggcgtgcggtgatagccaagccatgggagacaagaagagccccaccaggccgaagcggcagccgaagccgtcctcggatgagggttactgggactgtagcgtctgcaccttccggaacagcgccgaggccttcaagtgcatgatgtgcgatgtgcggaagggcacctccacccggaaacctcgacctgtctcccagttggttgcacagcaggttactcagcagtttgtgcctcctacacagtcaaagaaagagaaaaaagataaagtagaaaaagaaaaaagtgaaaaggaaacaactagcaaaaagaatagccataagaaaaccaggccaagattgaaaaatgtggatcggagtagtgctcagcatttggaagttactgttggagatctgacagtcattattacagactttaaggagaaaacaaagtcaccgcctgcatctagtgctgcttctgcagatcaacacagtcaaagcggctctagctctgataacacagagagaggaatgtccaggtcatcttcacccagaggagaagcctcatcattgaatggagaatctcattaaagtttattttctccaatttcttagtcacttctgtcctaccatgcaaatacacagattatgccaagaggtaccacattttcatgacagatacattcatgcacaatccataatttgagttttacataaaatagaaatttgttagaatttgttagattttattgcaatgatgcctaccaaacatttccagacttaacattttggtctctgcagttaagtgccatgaaaatgtggttgaattattcattatgcagtgttattggtaagtgtattttcacttttagtttagtgaattctaacacataattcttgaattctctactattggcatgtaacgaatttaaattttttataacatagtgcaagctgcctaaatatgtattatttgagaattgtgaaacagatagttatatgtatacaagtcaaagaacaacttaactattgctgcaacaggtttttcttaatggttatcctcttaaatacacctgctggtacttggtgtggttaaataggaaaattgttattaaataaagaatttgtatgaacctttgccaatgtttttgacacgttttactaattattgttcctgaattatgtttctggttttatctattttttgaggtttttttgtttgcttatttttcaaaacattcatttattgtaatgtttactagcggactagtaaacaataaaacattgattatttagctttataattcaggtttagtgctattgtcattgaacactggtattttctgtatcatataaaacattaaaattcaaataattataagcatttggcaaaaacaagagaaaagaaacttgccatattttacaagctgcaattttagaaaagctttaacttaatgatagttttatcattgttttcttgtcccaaacttatccagggccatagaagtatgaatctaattaaaacagaaatgggaattattgcacagaaatgggaaataactaattttaaatcagtcaaattggcttcttattaaatacaataattcttatgaaaatcatagtaccctattttcagacacagctgccagtttaacacatttctcagtatcctgaaaggaaaaaagtatagccccacttatactatgtaaaattaccaataaaatatttttatgactacagattttgcatttttgtttacaactatttaaagagttttatgttgtatttagaatttcaacctagaaaccacacagtacttaaattctcctggggtctcctgctttctcttaaccatttgcttaatatatatctacctaaaggagacttctgaattgtaaatgaacttaaaaatagaatgtggatgcaaaatatcacataagacatcatgataacatttgaagaaaaaataaaactgtagaccctaacagttgtgatatttggtggtttcatgtggtaatgtaattttctgtttaattacagtactttttacaggcacagtggtactgtcttttttgtaagatgctagttgtgaaatacaattaattgcatacagtaaaagtctgtgattaaaacatttatatacctcattctttagtgttgttaaatgaaaaattaaaatttgtgtttattataagatactttcaatggaataccagctaaccagatatgttcctttaaaacatgaatttttttgtcttattctgtttttaacatgtttcaaatgttttatacatttttggagatagtaaaaatttaaaaatgtaatagggaaaatatttaatttttaagtcaaaaactatgctttaaaggaattacatcttatgatcaaataactttcaggatgtattttaaatgagctgcaagagagaaaaatctgacaggagatgggattttacctgaatggagcatactcatatttctacataggtgggaagatactcatctttctacatagacgggaacacggtgtagcatggagattaagcgtgctaactgacacctcatgtttgaatcctgttgtagaatggaaatgagcttaaattacccaagcttactttccatctataaaacagggctaataatggtaatcacatctaatttatagggtttttgggaggattaagtcaatccgtgtaaaattcttaattatctgacacatactggtcactcagtaaatgtgagcttttaccattgttataggtaaaatcccattacaaaaatacaaaaatattttttgtaacagttattttcctgccctcttggatgacctaaagtaatagtgttttatagatttcactaaattttcagtgtaatatcagatgttttctctggatgcagaaagaccatctttccataattaaagaacctgggtggggtgtgcactatgagattggagaaatgaattaagttgacttgaaattattttacttttattaatcacaggtatctcaacctgcctttgtttcaccctacttcaagtacacttccacaccaggggaaacagacccaaattccataaacagaactgacgttaaaatatgcgaaagattcagaacctaggtttagggtacatgtttttctctgtttcatgaacttacagtgtggtttgagcactgggttcttttagccaaattccatacaaaaagaatttggatgttttccagcatttattaccttactttgctataagtaagagtgaagataggccgggtgtgatggctcatgccagtaatcccagcactttgggctgaagcaggcagatattttgagcccaggaccagcctgggcaacatggtgaaagctcatctctatgaaaaaatttgaatatacatatatatatatatgtatatttaaaaagtgaatataatttgaggcacagaagaatattcttaaaaccttttgtattatacaatagaaataaaggttttatttttattaaatgctttcctaaaatgatagtggataatagacaaagtgaaaacatttaaaaaggaagagaaacttcagcctttctaagttgatagcatgtttattaacttttagataaagatccttatagactgaaagaatgtagcctctgcattaatggtaaatggtctagaagttttcgtttccactgaggcttccgccactcgcttttttaaacttcctgctatggtttggatatggtttgtcctcaccaaaactcatgctgaggcctgagtccccagtttgattgtgttggtaggtggtgcctttaagaggtgattaggtcattgagatggattaaaggctttctcatgaggctcagttagttctggaatggattcgctcttgcaggaatggatgaattctcacaagagtgggttgttatgaagtgaggatgcttcttgtgttctgttctctttgccctcctcagttcaccatctgctttccaccatgagttgaagcagcatgaggccctcatcagatgggctccctgatcttggactcctcagcctttggactcataagccaaaataaatctgttttctttataaaaaacccagt

SEQ ID NO: 71091 - DNA, 4627 bp, Homo sapiens
ccactaaagtgcaagaattacattgcactgtttctccactttttattttctcttaggcttttgtttctatttcaaacatactttcttggttttctaatggagtatatagtttagtcatttcacagactctggcctcctctcctgaaatccttttggatggggaaagggaaggtggggagggtccgacagtggcggtagagaggagactccggctggcgaccggggactggtggagtgcggtgatagccaagccatgggagacaagaagagccccaccaggccgaagcggcagccgaagccgtcctcggatgagggttactgggactgtagcgtctgcaccttccggaacagcgccgaggccttcaagtgcatgatgtgcgatgtgcggaagggcacctccacccgagaagaaaaagctggatcacttaccagtaactggagttctcctattgggtaatctccacagatccacattgtttgaagttattgtgagtgcctcgaggaccaaggaaccgttgaaatttccaatttcaggaagttccagtggatgcccatcaggaagattctcatgctgaacagaagggcaagagaggtggatctgtgagggaaaagacccaataggataactcaagttactgagataacaggaagagagcctggttaccatttggtggaacaatcctgctggctcaagcctctgcctagaaatttgggtcattctcttttttggacagtctggaaacctcgacctgtctcccagttggttgcacagcaggttactcagcagtttgtgcctcctacacagtcaaagaaagagaaaaaagataaagtagaaaaagaaaaaagtgaaaaggaaacaactagcaaaaagaatagccataagaaaaccaggccaagattgaaaaatgtggatcggagtagtgctcagcatttggaagttactgttggagatctgacagtcattattacagactttaaggagaaaacaaagtcaccgcctgcatctagtgctgcttctgcagatcaacacagtcaaagcggctctagctctgataacacagagagaggaatgtccaggtcatcttcacccagaggagaagcctcatcattgaatggagaatctcattaaagtttattttctccaatttcttagtcacttctgtcctaccatgcaaatacacagattatgccaagaggtaccacattttcatgacagatacattcatgcacaatccataatttgagttttacataaaatagaaatttgttagaatttgttagattttattgcaatgatgcctaccaaacatttccagacttaacattttggtctctgcagttaagtgccatgaaaatgtggttgaattattcattatgcagtgttattggtaagtgtattttcacttttagtttagtgaattctaacacataattcttgaattctctactattggcatgtaacgaatttaaattttttataacatagtgcaagctgcctaaatatgtattatttgagaattgtgaaacagatagttatatgtatacaagtcaaagaacaacttaactattgctgcaacaggtttttcttaatggttatcctcttaaatacacctgctggtacttggtgtggttaaataggaaaattgttattaaataaagaatttgtatgaacctttgccaatgtttttgacacgttttactaattattgttcctgaattatgtttctggttttatctattttttgaggtttttttgtttgcttatttttcaaaacattcatttattgtaatgtttactagcggactagtaaacaataaaacattgattatttagctttataattcaggtttagtgctattgtcattgaacactggtattttctgtatcatataaaacattaaaattcaaataattataagcatttggcaaaaacaagagaaaagaaacttgccatattttacaagctgcaattttagaaaagctttaacttaatgatagttttatcattgttttcttgtcccaaacttatccagggccatagaagtatgaatctaattaaaacagaaatgggaattattgcacagaaatgggaaataactaattttaaatcagtcaaattggcttcttattaaatacaataattcttatgaaaatcatagtaccctattttcagacacagctgccagtttaacacatttctcagtatcctgaaaggaaaaaagtatagccccacttatactatgtaaaattaccaataaaatatttttatgactacagattttgcatttttgtttacaactatttaaagagttttatgttgtatttagaatttcaacctagaaaccacacagtacttaaattctcctggggtctcctgctttctcttaaccatttgcttaatatatatctacctaaaggagacttctgaattgtaaatgaacttaaaaatagaatgtggatgcaaaatatcacataagacatcatgataacatttgaagaaaaaataaaactgtagaccctaacagttgtgatatttggtggtttcatgtggtaatgtaattttctgtttaattacagtactttttacaggcacagtggtactgtcttttttgtaagatgctagttgtgaaatacaattaattgcatacagtaaaagtctgtgattaaaacatttatatacctcattctttagtgttgttaaatgaaaaattaaaatttgtgtttattataagatactttcaatggaataccagctaaccagatatgttcctttaaaacatgaatttttttgtcttattctgtttttaacatgtttcaaatgttttatacatttttggagatagtaaaaatttaaaaatgtaatagggaaaatatttaatttttaagtcaaaaactatgctttaaaggaattacatcttatgatcaaataactttcaggatgtattttaaatgagctgcaagagagaaaaatctgacaggagatgggattttacctgaatggagcatactcatatttctacataggtgggaagatactcatctttctacatagacgggaacacggtgtagcatggagattaagcgtgctaactgacacctcatgtttgaatcctgttgtagaatggaaatgagcttaaattacccaagcttactttccatctataaaacagggctaataatggtaatcacatctaatttatagggtttttgggaggattaagtcaatccgtgtaaaattcttaattatctgacacatactggtcactcagtaaatgtgagcttttaccattgttataggtaaaatcccattacaaaaatacaaaaatattttttgtaacagttattttcctgccctcttggatgacctaaagtaatagtgttttatagatttcactaaattttcagtgtaatatcagatgttttctctggatgcagaaagaccatctttccataattaaagaacctgggtggggtgtgcactatgagattggagaaatgaattaagttgacttgaaattattttacttttattaatcacaggtatctcaacctgcctttgtttcaccctacttcaagtacacttccacaccaggggaaacagacccaaattccataaacagaactgacgttaaaatatgcgaaagattcagaacctaggtttagggtacatgtttttctctgtttcatgaacttacagtgtggtttgagcactgggttcttttagccaaattccatacaaaaagaatttggatgttttccagcatttattaccttactttgctataagtaagagtgaagataggccgggtgtgatggctcatgccagtaatcccagcactttgggctgaagcaggcagatattttgagcccaggaccagcctgggcaacatggtgaaagctcatctctatgaaaaaatttgaatatacatatatatatatatgtatatttaaaaagtgaatataatttgaggcacagaagaatattcttaaaaccttttgtattatacaatagaaataaaggttttatttttattaaatgctttcctaaaatgatagtggataatagacaaagtgaaaacatttaaaaaggaagagaaacttcagcctttctaagttgatagcatgtttattaacttttagataaagatccttatagactgaaagaatgtagcctctgcattaatggtaaatggtctagaagttttcgtttccactgaggcttccgccactcgcttttttaaacttcctgctatggtttggatatggtttgtcctcaccaaaactcatgctgaggcctgagtccccagtttgattgtgttggtaggtggtgcctttaagaggtgattaggtcattgagatggattaaaggctttctcatgaggctcagttagttctggaatggattcgctcttgcaggaatggatgaattctcacaagagtgggttgttatgaagtgaggatgcttcttgtgttctgttctctttgccctcctcagttcaccatctgctttccaccatgagttgaagcagcatgaggccctcatcagatgggctccctgatcttggactcctcagcctttggactcataagccaaaataaatctgttttctttataaaaaacccagt

SEQ ID NO: 71092 - DNA, 4479 bp, Homo sapiens
caagggggcaacgggggaacagcgcggagaggcggcgccggcgcccgaggcagccgcggccaccgcggccacccccgcaccgcccgccggctaactcgccgcgggtgctgggccgcgctggccgcgtttgaagtctccggcgcggctgctggttggccggcgagggtcacgtgcgcccaggcaggagtttccccgacagctggaggctgcgtgggatccggcggcggctcccgagcgcggcggtgcggccttccccgccccctccctccctcctcccccgcccgcttccgcccggcttattatcctccttattgacaaacagagcggtcgcggcggcgactctcggcgtgcggtgatagccaagccatgggagacaagaagagccccaccaggccgaagcggcagccgaagccgtcctcggatgagggttactgggactgtagcgtctgcaccttccggaacagcgccgaggccttcaagtgcatgatgtgcgatgtgcggaagggcacctccacccgatccacattgtttgaagttattgtgagtgcctcgaggaccaaggaaccgttgaaatttccaatttcaggaaggaaacctcgacctgtctcccagttggttgcacagcaggttactcagcagtttgtgcctcctacacagtcaaagaaagagaaaaaagataaagtagaaaaagaaaaaagtgaaaaggaaacaactagcaaaaagaatagccataagaaaaccaggccaagattgaaaaatgtggatcggagtagtgctcagcatttggaagttactgttggagatctgacagtcattattacagactttaaggagaaaacaaagtcaccgcctgcatctagtgctgcttctgcagatcaacacagtcaaagcggctctagctctgataacacagagagaggaatgtccaggtcatcttcacccagaggagaagcctcatcattgaatggagaatctcattaaagtttattttctccaatttcttagtcacttctgtcctaccatgcaaatacacagattatgccaagaggtaccacattttcatgacagatacattcatgcacaatccataatttgagttttacataaaatagaaatttgttagaatttgttagattttattgcaatgatgcctaccaaacatttccagacttaacattttggtctctgcagttaagtgccatgaaaatgtggttgaattattcattatgcagtgttattggtaagtgtattttcacttttagtttagtgaattctaacacataattcttgaattctctactattggcatgtaacgaatttaaattttttataacatagtgcaagctgcctaaatatgtattatttgagaattgtgaaacagatagttatatgtatacaagtcaaagaacaacttaactattgctgcaacaggtttttcttaatggttatcctcttaaatacacctgctggtacttggtgtggttaaataggaaaattgttattaaataaagaatttgtatgaacctttgccaatgtttttgacacgttttactaattattgttcctgaattatgtttctggttttatctattttttgaggtttttttgtttgcttatttttcaaaacattcatttattgtaatgtttactagcggactagtaaacaataaaacattgattatttagctttataattcaggtttagtgctattgtcattgaacactggtattttctgtatcatataaaacattaaaattcaaataattataagcatttggcaaaaacaagagaaaagaaacttgccatattttacaagctgcaattttagaaaagctttaacttaatgatagttttatcattgttttcttgtcccaaacttatccagggccatagaagtatgaatctaattaaaacagaaatgggaattattgcacagaaatgggaaataactaattttaaatcagtcaaattggcttcttattaaatacaataattcttatgaaaatcatagtaccctattttcagacacagctgccagtttaacacatttctcagtatcctgaaaggaaaaaagtatagccccacttatactatgtaaaattaccaataaaatatttttatgactacagattttgcatttttgtttacaactatttaaagagttttatgttgtatttagaatttcaacctagaaaccacacagtacttaaattctcctggggtctcctgctttctcttaaccatttgcttaatatatatctacctaaaggagacttctgaattgtaaatgaacttaaaaatagaatgtggatgcaaaatatcacataagacatcatgataacatttgaagaaaaaataaaactgtagaccctaacagttgtgatatttggtggtttcatgtggtaatgtaattttctgtttaattacagtactttttacaggcacagtggtactgtcttttttgtaagatgctagttgtgaaatacaattaattgcatacagtaaaagtctgtgattaaaacatttatatacctcattctttagtgttgttaaatgaaaaattaaaatttgtgtttattataagatactttcaatggaataccagctaaccagatatgttcctttaaaacatgaatttttttgtcttattctgtttttaacatgtttcaaatgttttatacatttttggagatagtaaaaatttaaaaatgtaatagggaaaatatttaatttttaagtcaaaaactatgctttaaaggaattacatcttatgatcaaataactttcaggatgtattttaaatgagctgcaagagagaaaaatctgacaggagatgggattttacctgaatggagcatactcatatttctacataggtgggaagatactcatctttctacatagacgggaacacggtgtagcatggagattaagcgtgctaactgacacctcatgtttgaatcctgttgtagaatggaaatgagcttaaattacccaagcttactttccatctataaaacagggctaataatggtaatcacatctaatttatagggtttttgggaggattaagtcaatccgtgtaaaattcttaattatctgacacatactggtcactcagtaaatgtgagcttttaccattgttataggtaaaatcccattacaaaaatacaaaaatattttttgtaacagttattttcctgccctcttggatgacctaaagtaatagtgttttatagatttcactaaattttcagtgtaatatcagatgttttctctggatgcagaaagaccatctttccataattaaagaacctgggtggggtgtgcactatgagattggagaaatgaattaagttgacttgaaattattttacttttattaatcacaggtatctcaacctgcctttgtttcaccctacttcaagtacacttccacaccaggggaaacagacccaaattccataaacagaactgacgttaaaatatgcgaaagattcagaacctaggtttagggtacatgtttttctctgtttcatgaacttacagtgtggtttgagcactgggttcttttagccaaattccatacaaaaagaatttggatgttttccagcatttattaccttactttgctataagtaagagtgaagataggccgggtgtgatggctcatgccagtaatcccagcactttgggctgaagcaggcagatattttgagcccaggaccagcctgggcaacatggtgaaagctcatctctatgaaaaaatttgaatatacatatatatatatatgtatatttaaaaagtgaatataatttgaggcacagaagaatattcttaaaaccttttgtattatacaatagaaataaaggttttatttttattaaatgctttcctaaaatgatagtggataatagacaaagtgaaaacatttaaaaaggaagagaaacttcagcctttctaagttgatagcatgtttattaacttttagataaagatccttatagactgaaagaatgtagcctctgcattaatggtaaatggtctagaagttttcgtttccactgaggcttccgccactcgcttttttaaacttcctgctatggtttggatatggtttgtcctcaccaaaactcatgctgaggcctgagtccccagtttgattgtgttggtaggtggtgcctttaagaggtgattaggtcattgagatggattaaaggctttctcatgaggctcagttagttctggaatggattcgctcttgcaggaatggatgaattctcacaagagtgggttgttatgaagtgaggatgcttcttgtgttctgttctctttgccctcctcagttcaccatctgctttccaccatgagttgaagcagcatgaggccctcatcagatgggctccctgatcttggactcctcagcctttggactcataagccaaaataaatctgttttctttataaaaaacccagt

SEQ ID NO: 71093 - DNA, 4091 bp, Homo sapiens
cggccgcggggcccgggcaccgggcgcggcctgctggtgaccccgcgccgcgtcgtgtccgggttgtgtcctgcaggccgaagcggcagccgaagccgtcctcggatgagggttactgggactgtagcgtctgcaccttccggaacagcgccgaggccttcaagtgcatgatgtgcgatgtgcggaagggcacctccacccggaaacctcgacctgtctcccagttggttgcacagcaggttactcagcagtttgtgcctcctacacagtcaaagaaagagaaaaaagataaagtagaaaaagaaaaaagtgaaaaggaaacaactagcaaaaagaatagccataagaaaaccaggccaagattgaaaaatgtggatcggagtagtgctcagcatttggaagttactgttggagatctgacagtcattattacagactttaaggagaaaacaaagtcaccgcctgcatctagtgctgcttctgcagatcaacacagtcaaagcggctctagctctgataacacagagagaggaatgtccaggtcatcttcacccagaggagaagcctcatcattgaatggagaatctcattaaagtttattttctccaatttcttagtcacttctgtcctaccatgcaaatacacagattatgccaagaggtaccacattttcatgacagatacattcatgcacaatccataatttgagttttacataaaatagaaatttgttagaatttgttagattttattgcaatgatgcctaccaaacatttccagacttaacattttggtctctgcagttaagtgccatgaaaatgtggttgaattattcattatgcagtgttattggtaagtgtattttcacttttagtttagtgaattctaacacataattcttgaattctctactattggcatgtaacgaatttaaattttttataacatagtgcaagctgcctaaatatgtattatttgagaattgtgaaacagatagttatatgtatacaagtcaaagaacaacttaactattgctgcaacaggtttttcttaatggttatcctcttaaatacacctgctggtacttggtgtggttaaataggaaaattgttattaaataaagaatttgtatgaacctttgccaatgtttttgacacgttttactaattattgttcctgaattatgtttctggttttatctattttttgaggtttttttgtttgcttatttttcaaaacattcatttattgtaatgtttactagcggactagtaaacaataaaacattgattatttagctttataattcaggtttagtgctattgtcattgaacactggtattttctgtatcatataaaacattaaaattcaaataattataagcatttggcaaaaacaagagaaaagaaacttgccatattttacaagctgcaattttagaaaagctttaacttaatgatagttttatcattgttttcttgtcccaaacttatccagggccatagaagtatgaatctaattaaaacagaaatgggaattattgcacagaaatgggaaataactaattttaaatcagtcaaattggcttcttattaaatacaataattcttatgaaaatcatagtaccctattttcagacacagctgccagtttaacacatttctcagtatcctgaaaggaaaaaagtatagccccacttatactatgtaaaattaccaataaaatatttttatgactacagattttgcatttttgtttacaactatttaaagagttttatgttgtatttagaatttcaacctagaaaccacacagtacttaaattctcctggggtctcctgctttctcttaaccatttgcttaatatatatctacctaaaggagacttctgaattgtaaatgaacttaaaaatagaatgtggatgcaaaatatcacataagacatcatgataacatttgaagaaaaaataaaactgtagaccctaacagttgtgatatttggtggtttcatgtggtaatgtaattttctgtttaattacagtactttttacaggcacagtggtactgtcttttttgtaagatgctagttgtgaaatacaattaattgcatacagtaaaagtctgtgattaaaacatttatatacctcattctttagtgttgttaaatgaaaaattaaaatttgtgtttattataagatactttcaatggaataccagctaaccagatatgttcctttaaaacatgaatttttttgtcttattctgtttttaacatgtttcaaatgttttatacatttttggagatagtaaaaatttaaaaatgtaatagggaaaatatttaatttttaagtcaaaaactatgctttaaaggaattacatcttatgatcaaataactttcaggatgtattttaaatgagctgcaagagagaaaaatctgacaggagatgggattttacctgaatggagcatactcatatttctacataggtgggaagatactcatctttctacatagacgggaacacggtgtagcatggagattaagcgtgctaactgacacctcatgtttgaatcctgttgtagaatggaaatgagcttaaattacccaagcttactttccatctataaaacagggctaataatggtaatcacatctaatttatagggtttttgggaggattaagtcaatccgtgtaaaattcttaattatctgacacatactggtcactcagtaaatgtgagcttttaccattgttataggtaaaatcccattacaaaaatacaaaaatattttttgtaacagttattttcctgccctcttggatgacctaaagtaatagtgttttatagatttcactaaattttcagtgtaatatcagatgttttctctggatgcagaaagaccatctttccataattaaagaacctgggtggggtgtgcactatgagattggagaaatgaattaagttgacttgaaattattttacttttattaatcacaggtatctcaacctgcctttgtttcaccctacttcaagtacacttccacaccaggggaaacagacccaaattccataaacagaactgacgttaaaatatgcgaaagattcagaacctaggtttagggtacatgtttttctctgtttcatgaacttacagtgtggtttgagcactgggttcttttagccaaattccatacaaaaagaatttggatgttttccagcatttattaccttactttgctataagtaagagtgaagataggccgggtgtgatggctcatgccagtaatcccagcactttgggctgaagcaggcagatattttgagcccaggaccagcctgggcaacatggtgaaagctcatctctatgaaaaaatttgaatatacatatatatatatatgtatatttaaaaagtgaatataatttgaggcacagaagaatattcttaaaaccttttgtattatacaatagaaataaaggttttatttttattaaatgctttcctaaaatgatagtggataatagacaaagtgaaaacatttaaaaaggaagagaaacttcagcctttctaagttgatagcatgtttattaacttttagataaagatccttatagactgaaagaatgtagcctctgcattaatggtaaatggtctagaagttttcgtttccactgaggcttccgccactcgcttttttaaacttcctgctatggtttggatatggtttgtcctcaccaaaactcatgctgaggcctgagtccccagtttgattgtgttggtaggtggtgcctttaagaggtgattaggtcattgagatggattaaaggctttctcatgaggctcagttagttctggaatggattcgctcttgcaggaatggatgaattctcacaagagtgggttgttatgaagtgaggatgcttcttgtgttctgttctctttgccctcctcagttcaccatctgctttccaccatgagttgaagcagcatgaggccctcatcagatgggctccctgatcttggactcctcagcctttggactcataagccaaaataaatctgttttctttataaaaaacccagt

SEQ ID NO: 71094 - DNA, 4579 bp, Homo sapiens
caagggggcaacgggggaacagcgcggagaggcggcgccggcgcccgaggcagccgcggccaccgcggccacccccgcaccgcccgccggctaactcgccgcgggtgctgggccgcgctggccgcgtttgaagtctccggcgcggctgctggttggccggcgagggtcacgtgcgcccaggcaggagtttccccgacagctggaggctgcgtgggatccggcggcggctcccgagcgcggcggtgcggccttccccgccccctccctccctcctcccccgcccgcttccgcccggcttattatcctccttattgacaaacagagcggtcgcggcggcgactctcggcgtgcggtgatagccaagccatgggagacaagaagagccccaccaggccgaagcggcagccgaagccgtcctcggatgagggttactgggactgtagcgtctgcaccttccggaacagcgccgaggccttcaagtgcatgatgtgcgatgtgcggaagggcacctccacccgatccacattgtttgaagttattgtgagtgcctcgaggaccaaggaaccgttgaaatttccaatttcaggaagttccagtggatgcccatcaggaagattctcatgctgaacagaagggcaagagaggtggatctgtgagggaaaagacccaataggataactcaagttactggaaacctcgacctgtctcccagttggttgcacagcaggttactcagcagtttgtgcctcctacacagtcaaagaaagagaaaaaagataaagtagaaaaagaaaaaagtgaaaaggaaacaactagcaaaaagaatagccataagaaaaccaggccaagattgaaaaatgtggatcggagtagtgctcagcatttggaagttactgttggagatctgacagtcattattacagactttaaggagaaaacaaagtcaccgcctgcatctagtgctgcttctgcagatcaacacagtcaaagcggctctagctctgataacacagagagaggaatgtccaggtcatcttcacccagaggagaagcctcatcattgaatggagaatctcattaaagtttattttctccaatttcttagtcacttctgtcctaccatgcaaatacacagattatgccaagaggtaccacattttcatgacagatacattcatgcacaatccataatttgagttttacataaaatagaaatttgttagaatttgttagattttattgcaatgatgcctaccaaacatttccagacttaacattttggtctctgcagttaagtgccatgaaaatgtggttgaattattcattatgcagtgttattggtaagtgtattttcacttttagtttagtgaattctaacacataattcttgaattctctactattggcatgtaacgaatttaaattttttataacatagtgcaagctgcctaaatatgtattatttgagaattgtgaaacagatagttatatgtatacaagtcaaagaacaacttaactattgctgcaacaggtttttcttaatggttatcctcttaaatacacctgctggtacttggtgtggttaaataggaaaattgttattaaataaagaatttgtatgaacctttgccaatgtttttgacacgttttactaattattgttcctgaattatgtttctggttttatctattttttgaggtttttttgtttgcttatttttcaaaacattcatttattgtaatgtttactagcggactagtaaacaataaaacattgattatttagctttataattcaggtttagtgctattgtcattgaacactggtattttctgtatcatataaaacattaaaattcaaataattataagcatttggcaaaaacaagagaaaagaaacttgccatattttacaagctgcaattttagaaaagctttaacttaatgatagttttatcattgttttcttgtcccaaacttatccagggccatagaagtatgaatctaattaaaacagaaatgggaattattgcacagaaatgggaaataactaattttaaatcagtcaaattggcttcttattaaatacaataattcttatgaaaatcatagtaccctattttcagacacagctgccagtttaacacatttctcagtatcctgaaaggaaaaaagtatagccccacttatactatgtaaaattaccaataaaatatttttatgactacagattttgcatttttgtttacaactatttaaagagttttatgttgtatttagaatttcaacctagaaaccacacagtacttaaattctcctggggtctcctgctttctcttaaccatttgcttaatatatatctacctaaaggagacttctgaattgtaaatgaacttaaaaatagaatgtggatgcaaaatatcacataagacatcatgataacatttgaagaaaaaataaaactgtagaccctaacagttgtgatatttggtggtttcatgtggtaatgtaattttctgtttaattacagtactttttacaggcacagtggtactgtcttttttgtaagatgctagttgtgaaatacaattaattgcatacagtaaaagtctgtgattaaaacatttatatacctcattctttagtgttgttaaatgaaaaattaaaatttgtgtttattataagatactttcaatggaataccagctaaccagatatgttcctttaaaacatgaatttttttgtcttattctgtttttaacatgtttcaaatgttttatacatttttggagatagtaaaaatttaaaaatgtaatagggaaaatatttaatttttaagtcaaaaactatgctttaaaggaattacatcttatgatcaaataactttcaggatgtattttaaatgagctgcaagagagaaaaatctgacaggagatgggattttacctgaatggagcatactcatatttctacataggtgggaagatactcatctttctacatagacgggaacacggtgtagcatggagattaagcgtgctaactgacacctcatgtttgaatcctgttgtagaatggaaatgagcttaaattacccaagcttactttccatctataaaacagggctaataatggtaatcacatctaatttatagggtttttgggaggattaagtcaatccgtgtaaaattcttaattatctgacacatactggtcactcagtaaatgtgagcttttaccattgttataggtaaaatcccattacaaaaatacaaaaatattttttgtaacagttattttcctgccctcttggatgacctaaagtaatagtgttttatagatttcactaaattttcagtgtaatatcagatgttttctctggatgcagaaagaccatctttccataattaaagaacctgggtggggtgtgcactatgagattggagaaatgaattaagttgacttgaaattattttacttttattaatcacaggtatctcaacctgcctttgtttcaccctacttcaagtacacttccacaccaggggaaacagacccaaattccataaacagaactgacgttaaaatatgcgaaagattcagaacctaggtttagggtacatgtttttctctgtttcatgaacttacagtgtggtttgagcactgggttcttttagccaaattccatacaaaaagaatttggatgttttccagcatttattaccttactttgctataagtaagagtgaagataggccgggtgtgatggctcatgccagtaatcccagcactttgggctgaagcaggcagatattttgagcccaggaccagcctgggcaacatggtgaaagctcatctctatgaaaaaatttgaatatacatatatatatatatgtatatttaaaaagtgaatataatttgaggcacagaagaatattcttaaaaccttttgtattatacaatagaaataaaggttttatttttattaaatgctttcctaaaatgatagtggataatagacaaagtgaaaacatttaaaaaggaagagaaacttcagcctttctaagttgatagcatgtttattaacttttagataaagatccttatagactgaaagaatgtagcctctgcattaatggtaaatggtctagaagttttcgtttccactgaggcttccgccactcgcttttttaaacttcctgctatggtttggatatggtttgtcctcaccaaaactcatgctgaggcctgagtccccagtttgattgtgttggtaggtggtgcctttaagaggtgattaggtcattgagatggattaaaggctttctcatgaggctcagttagttctggaatggattcgctcttgcaggaatggatgaattctcacaagagtgggttgttatgaagtgaggatgcttcttgtgttctgttctctttgccctcctcagttcaccatctgctttccaccatgagttgaagcagcatgaggccctcatcagatgggctccctgatcttggactcctcagcctttggactcataagccaaaataaatctgttttctttataaaaaacccagt

SEQ ID NO: 71095 - DNA, 4278 bp, Homo sapiens
gtgagaagtttccactgacattatatttagcaaattgtttccatatttactttgatacgtgtatatatagttatctagtgaatttatgctttcttctgtagttctacgtgtgataataatctcaaataaaatgaaataatcttcttattctgatagagaagaaaaagctggatcacttaccagtaactggagttctcctattgggtaatctccacagatccacattgtttgaagttattgtgagtgcctcgaggaccaaggaaccgttgaaatttccaatttcaggaagttccagtggatgcccatcaggaagattctcatgctgaacagaagggcaagagaggtggatctgtgagggaaaagacccaataggataactcaagttactggaaacctcgacctgtctcccagttggttgcacagcaggttactcagcagtttgtgcctcctacacagtcaaagaaagagaaaaaagataaagtagaaaaagaaaaaagtgaaaaggaaacaactagcaaaaagaatagccataagaaaaccaggccaagattgaaaaatgtggatcggagtagtgctcagcatttggaagttactgttggagatctgacagtcattattacagactttaaggagaaaacaaagtcaccgcctgcatctagtgctgcttctgcagatcaacacagtcaaagcggctctagctctgataacacagagagaggaatgtccaggtcatcttcacccagaggagaagcctcatcattgaatggagaatctcattaaagtttattttctccaatttcttagtcacttctgtcctaccatgcaaatacacagattatgccaagaggtaccacattttcatgacagatacattcatgcacaatccataatttgagttttacataaaatagaaatttgttagaatttgttagattttattgcaatgatgcctaccaaacatttccagacttaacattttggtctctgcagttaagtgccatgaaaatgtggttgaattattcattatgcagtgttattggtaagtgtattttcacttttagtttagtgaattctaacacataattcttgaattctctactattggcatgtaacgaatttaaattttttataacatagtgcaagctgcctaaatatgtattatttgagaattgtgaaacagatagttatatgtatacaagtcaaagaacaacttaactattgctgcaacaggtttttcttaatggttatcctcttaaatacacctgctggtacttggtgtggttaaataggaaaattgttattaaataaagaatttgtatgaacctttgccaatgtttttgacacgttttactaattattgttcctgaattatgtttctggttttatctattttttgaggtttttttgtttgcttatttttcaaaacattcatttattgtaatgtttactagcggactagtaaacaataaaacattgattatttagctttataattcaggtttagtgctattgtcattgaacactggtattttctgtatcatataaaacattaaaattcaaataattataagcatttggcaaaaacaagagaaaagaaacttgccatattttacaagctgcaattttagaaaagctttaacttaatgatagttttatcattgttttcttgtcccaaacttatccagggccatagaagtatgaatctaattaaaacagaaatgggaattattgcacagaaatgggaaataactaattttaaatcagtcaaattggcttcttattaaatacaataattcttatgaaaatcatagtaccctattttcagacacagctgccagtttaacacatttctcagtatcctgaaaggaaaaaagtatagccccacttatactatgtaaaattaccaataaaatatttttatgactacagattttgcatttttgtttacaactatttaaagagttttatgttgtatttagaatttcaacctagaaaccacacagtacttaaattctcctggggtctcctgctttctcttaaccatttgcttaatatatatctacctaaaggagacttctgaattgtaaatgaacttaaaaatagaatgtggatgcaaaatatcacataagacatcatgataacatttgaagaaaaaataaaactgtagaccctaacagttgtgatatttggtggtttcatgtggtaatgtaattttctgtttaattacagtactttttacaggcacagtggtactgtcttttttgtaagatgctagttgtgaaatacaattaattgcatacagtaaaagtctgtgattaaaacatttatatacctcattctttagtgttgttaaatgaaaaattaaaatttgtgtttattataagatactttcaatggaataccagctaaccagatatgttcctttaaaacatgaatttttttgtcttattctgtttttaacatgtttcaaatgttttatacatttttggagatagtaaaaatttaaaaatgtaatagggaaaatatttaatttttaagtcaaaaactatgctttaaaggaattacatcttatgatcaaataactttcaggatgtattttaaatgagctgcaagagagaaaaatctgacaggagatgggattttacctgaatggagcatactcatatttctacataggtgggaagatactcatctttctacatagacgggaacacggtgtagcatggagattaagcgtgctaactgacacctcatgtttgaatcctgttgtagaatggaaatgagcttaaattacccaagcttactttccatctataaaacagggctaataatggtaatcacatctaatttatagggtttttgggaggattaagtcaatccgtgtaaaattcttaattatctgacacatactggtcactcagtaaatgtgagcttttaccattgttataggtaaaatcccattacaaaaatacaaaaatattttttgtaacagttattttcctgccctcttggatgacctaaagtaatagtgttttatagatttcactaaattttcagtgtaatatcagatgttttctctggatgcagaaagaccatctttccataattaaagaacctgggtggggtgtgcactatgagattggagaaatgaattaagttgacttgaaattattttacttttattaatcacaggtatctcaacctgcctttgtttcaccctacttcaagtacacttccacaccaggggaaacagacccaaattccataaacagaactgacgttaaaatatgcgaaagattcagaacctaggtttagggtacatgtttttctctgtttcatgaacttacagtgtggtttgagcactgggttcttttagccaaattccatacaaaaagaatttggatgttttccagcatttattaccttactttgctataagtaagagtgaagataggccgggtgtgatggctcatgccagtaatcccagcactttgggctgaagcaggcagatattttgagcccaggaccagcctgggcaacatggtgaaagctcatctctatgaaaaaatttgaatatacatatatatatatatgtatatttaaaaagtgaatataatttgaggcacagaagaatattcttaaaaccttttgtattatacaatagaaataaaggttttatttttattaaatgctttcctaaaatgatagtggataatagacaaagtgaaaacatttaaaaaggaagagaaacttcagcctttctaagttgatagcatgtttattaacttttagataaagatccttatagactgaaagaatgtagcctctgcattaatggtaaatggtctagaagttttcgtttccactgaggcttccgccactcgcttttttaaacttcctgctatggtttggatatggtttgtcctcaccaaaactcatgctgaggcctgagtccccagtttgattgtgttggtaggtggtgcctttaagaggtgattaggtcattgagatggattaaaggctttctcatgaggctcagttagttctggaatggattcgctcttgcaggaatggatgaattctcacaagagtgggttgttatgaagtgaggatgcttcttgtgttctgttctctttgccctcctcagttcaccatctgctttccaccatgagttgaagcagcatgaggccctcatcagatgggctccctgatcttggactcctcagcctttggactcataagccaaaataaatctgttttctttataaaaaacccagt

SEQ ID NO: 71096 - DNA, 4298 bp, Homo sapiens
agtaatggtactatttcatttcatcctagtgagaaaggtgtgtggattttttggtggtaaattggagtcccatgtatgtgtgatcctcccaacagagtgaatttaaatatctaaagattactgagaaaggataaagttgaataaatcatagtgaacaatgtttatgtcactttttaaagttttaacacttgtaattgagtaaatcctgaaacaaagtatattattatgtttgatggatttaaactattggtcaaattctgttccatgtgtacatagtgtttctttcttactctgtaacccttttgccagagataacaggaagagagcctggttaccatttggtggaacaatcctgctggctcaagcctctgcctagaaatttgggtcattctcttttttggacagtctggaaacctcgacctgtctcccagttggttgcacagcaggttactcagcagtttgtgcctcctacacagtcaaagaaagagaaaaaagataaagtagaaaaagaaaaaagtgaaaaggaaacaactagcaaaaagaatagccataagaaaaccaggccaagattgaaaaatgtggatcggagtagtgctcagcatttggaagttactgttggagatctgacagtcattattacagactttaaggagaaaacaaagtcaccgcctgcatctagtgctgcttctgcagatcaacacagtcaaagcggctctagctctgataacacagagagaggaatgtccaggtcatcttcacccagaggagaagcctcatcattgaatggagaatctcattaaagtttattttctccaatttcttagtcacttctgtcctaccatgcaaatacacagattatgccaagaggtaccacattttcatgacagatacattcatgcacaatccataatttgagttttacataaaatagaaatttgttagaatttgttagattttattgcaatgatgcctaccaaacatttccagacttaacattttggtctctgcagttaagtgccatgaaaatgtggttgaattattcattatgcagtgttattggtaagtgtattttcacttttagtttagtgaattctaacacataattcttgaattctctactattggcatgtaacgaatttaaattttttataacatagtgcaagctgcctaaatatgtattatttgagaattgtgaaacagatagttatatgtatacaagtcaaagaacaacttaactattgctgcaacaggtttttcttaatggttatcctcttaaatacacctgctggtacttggtgtggttaaataggaaaattgttattaaataaagaatttgtatgaacctttgccaatgtttttgacacgttttactaattattgttcctgaattatgtttctggttttatctattttttgaggtttttttgtttgcttatttttcaaaacattcatttattgtaatgtttactagcggactagtaaacaataaaacattgattatttagctttataattcaggtttagtgctattgtcattgaacactggtattttctgtatcatataaaacattaaaattcaaataattataagcatttggcaaaaacaagagaaaagaaacttgccatattttacaagctgcaattttagaaaagctttaacttaatgatagttttatcattgttttcttgtcccaaacttatccagggccatagaagtatgaatctaattaaaacagaaatgggaattattgcacagaaatgggaaataactaattttaaatcagtcaaattggcttcttattaaatacaataattcttatgaaaatcatagtaccctattttcagacacagctgccagtttaacacatttctcagtatcctgaaaggaaaaaagtatagccccacttatactatgtaaaattaccaataaaatatttttatgactacagattttgcatttttgtttacaactatttaaagagttttatgttgtatttagaatttcaacctagaaaccacacagtacttaaattctcctggggtctcctgctttctcttaaccatttgcttaatatatatctacctaaaggagacttctgaattgtaaatgaacttaaaaatagaatgtggatgcaaaatatcacataagacatcatgataacatttgaagaaaaaataaaactgtagaccctaacagttgtgatatttggtggtttcatgtggtaatgtaattttctgtttaattacagtactttttacaggcacagtggtactgtcttttttgtaagatgctagttgtgaaatacaattaattgcatacagtaaaagtctgtgattaaaacatttatatacctcattctttagtgttgttaaatgaaaaattaaaatttgtgtttattataagatactttcaatggaataccagctaaccagatatgttcctttaaaacatgaatttttttgtcttattctgtttttaacatgtttcaaatgttttatacatttttggagatagtaaaaatttaaaaatgtaatagggaaaatatttaatttttaagtcaaaaactatgctttaaaggaattacatcttatgatcaaataactttcaggatgtattttaaatgagctgcaagagagaaaaatctgacaggagatgggattttacctgaatggagcatactcatatttctacataggtgggaagatactcatctttctacatagacgggaacacggtgtagcatggagattaagcgtgctaactgacacctcatgtttgaatcctgttgtagaatggaaatgagcttaaattacccaagcttactttccatctataaaacagggctaataatggtaatcacatctaatttatagggtttttgggaggattaagtcaatccgtgtaaaattcttaattatctgacacatactggtcactcagtaaatgtgagcttttaccattgttataggtaaaatcccattacaaaaatacaaaaatattttttgtaacagttattttcctgccctcttggatgacctaaagtaatagtgttttatagatttcactaaattttcagtgtaatatcagatgttttctctggatgcagaaagaccatctttccataattaaagaacctgggtggggtgtgcactatgagattggagaaatgaattaagttgacttgaaattattttacttttattaatcacaggtatctcaacctgcctttgtttcaccctacttcaagtacacttccacaccaggggaaacagacccaaattccataaacagaactgacgttaaaatatgcgaaagattcagaacctaggtttagggtacatgtttttctctgtttcatgaacttacagtgtggtttgagcactgggttcttttagccaaattccatacaaaaagaatttggatgttttccagcatttattaccttactttgctataagtaagagtgaagataggccgggtgtgatggctcatgccagtaatcccagcactttgggctgaagcaggcagatattttgagcccaggaccagcctgggcaacatggtgaaagctcatctctatgaaaaaatttgaatatacatatatatatatatgtatatttaaaaagtgaatataatttgaggcacagaagaatattcttaaaaccttttgtattatacaatagaaataaaggttttatttttattaaatgctttcctaaaatgatagtggataatagacaaagtgaaaacatttaaaaaggaagagaaacttcagcctttctaagttgatagcatgtttattaacttttagataaagatccttatagactgaaagaatgtagcctctgcattaatggtaaatggtctagaagttttcgtttccactgaggcttccgccactcgcttttttaaacttcctgctatggtttggatatggtttgtcctcaccaaaactcatgctgaggcctgagtccccagtttgattgtgttggtaggtggtgcctttaagaggtgattaggtcattgagatggattaaaggctttctcatgaggctcagttagttctggaatggattcgctcttgcaggaatggatgaattctcacaagagtgggttgttatgaagtgaggatgcttcttgtgttctgttctctttgccctcctcagttcaccatctgctttccaccatgagttgaagcagcatgaggccctcatcagatgggctccctgatcttggactcctcagcctttggactcataagccaaaataaatctgttttctttataaaaaacccagt

SEQ ID NO: 71097 - DNA, 4191 bp, Homo sapiens
cggccgcggggcccgggcaccgggcgcggcctgctggtgaccccgcgccgcgtcgtgtccgggttgtgtcctgcaggccgaagcggcagccgaagccgtcctcggatgagggttactgggactgtagcgtctgcaccttccggaacagcgccgaggccttcaagtgcatgatgtgcgatgtgcggaagggcacctccacccgagataacaggaagagagcctggttaccatttggtggaacaatcctgctggctcaagcctctgcctagaaatttgggtcattctcttttttggacagtctggaaacctcgacctgtctcccagttggttgcacagcaggttactcagcagtttgtgcctcctacacagtcaaagaaagagaaaaaagataaagtagaaaaagaaaaaagtgaaaaggaaacaactagcaaaaagaatagccataagaaaaccaggccaagattgaaaaatgtggatcggagtagtgctcagcatttggaagttactgttggagatctgacagtcattattacagactttaaggagaaaacaaagtcaccgcctgcatctagtgctgcttctgcagatcaacacagtcaaagcggctctagctctgataacacagagagaggaatgtccaggtcatcttcacccagaggagaagcctcatcattgaatggagaatctcattaaagtttattttctccaatttcttagtcacttctgtcctaccatgcaaatacacagattatgccaagaggtaccacattttcatgacagatacattcatgcacaatccataatttgagttttacataaaatagaaatttgttagaatttgttagattttattgcaatgatgcctaccaaacatttccagacttaacattttggtctctgcagttaagtgccatgaaaatgtggttgaattattcattatgcagtgttattggtaagtgtattttcacttttagtttagtgaattctaacacataattcttgaattctctactattggcatgtaacgaatttaaattttttataacatagtgcaagctgcctaaatatgtattatttgagaattgtgaaacagatagttatatgtatacaagtcaaagaacaacttaactattgctgcaacaggtttttcttaatggttatcctcttaaatacacctgctggtacttggtgtggttaaataggaaaattgttattaaataaagaatttgtatgaacctttgccaatgtttttgacacgttttactaattattgttcctgaattatgtttctggttttatctattttttgaggtttttttgtttgcttatttttcaaaacattcatttattgtaatgtttactagcggactagtaaacaataaaacattgattatttagctttataattcaggtttagtgctattgtcattgaacactggtattttctgtatcatataaaacattaaaattcaaataattataagcatttggcaaaaacaagagaaaagaaacttgccatattttacaagctgcaattttagaaaagctttaacttaatgatagttttatcattgttttcttgtcccaaacttatccagggccatagaagtatgaatctaattaaaacagaaatgggaattattgcacagaaatgggaaataactaattttaaatcagtcaaattggcttcttattaaatacaataattcttatgaaaatcatagtaccctattttcagacacagctgccagtttaacacatttctcagtatcctgaaaggaaaaaagtatagccccacttatactatgtaaaattaccaataaaatatttttatgactacagattttgcatttttgtttacaactatttaaagagttttatgttgtatttagaatttcaacctagaaaccacacagtacttaaattctcctggggtctcctgctttctcttaaccatttgcttaatatatatctacctaaaggagacttctgaattgtaaatgaacttaaaaatagaatgtggatgcaaaatatcacataagacatcatgataacatttgaagaaaaaataaaactgtagaccctaacagttgtgatatttggtggtttcatgtggtaatgtaattttctgtttaattacagtactttttacaggcacagtggtactgtcttttttgtaagatgctagttgtgaaatacaattaattgcatacagtaaaagtctgtgattaaaacatttatatacctcattctttagtgttgttaaatgaaaaattaaaatttgtgtttattataagatactttcaatggaataccagctaaccagatatgttcctttaaaacatgaatttttttgtcttattctgtttttaacatgtttcaaatgttttatacatttttggagatagtaaaaatttaaaaatgtaatagggaaaatatttaatttttaagtcaaaaactatgctttaaaggaattacatcttatgatcaaataactttcaggatgtattttaaatgagctgcaagagagaaaaatctgacaggagatgggattttacctgaatggagcatactcatatttctacataggtgggaagatactcatctttctacatagacgggaacacggtgtagcatggagattaagcgtgctaactgacacctcatgtttgaatcctgttgtagaatggaaatgagcttaaattacccaagcttactttccatctataaaacagggctaataatggtaatcacatctaatttatagggtttttgggaggattaagtcaatccgtgtaaaattcttaattatctgacacatactggtcactcagtaaatgtgagcttttaccattgttataggtaaaatcccattacaaaaatacaaaaatattttttgtaacagttattttcctgccctcttggatgacctaaagtaatagtgttttatagatttcactaaattttcagtgtaatatcagatgttttctctggatgcagaaagaccatctttccataattaaagaacctgggtggggtgtgcactatgagattggagaaatgaattaagttgacttgaaattattttacttttattaatcacaggtatctcaacctgcctttgtttcaccctacttcaagtacacttccacaccaggggaaacagacccaaattccataaacagaactgacgttaaaatatgcgaaagattcagaacctaggtttagggtacatgtttttctctgtttcatgaacttacagtgtggtttgagcactgggttcttttagccaaattccatacaaaaagaatttggatgttttccagcatttattaccttactttgctataagtaagagtgaagataggccgggtgtgatggctcatgccagtaatcccagcactttgggctgaagcaggcagatattttgagcccaggaccagcctgggcaacatggtgaaagctcatctctatgaaaaaatttgaatatacatatatatatatatgtatatttaaaaagtgaatataatttgaggcacagaagaatattcttaaaaccttttgtattatacaatagaaataaaggttttatttttattaaatgctttcctaaaatgatagtggataatagacaaagtgaaaacatttaaaaaggaagagaaacttcagcctttctaagttgatagcatgtttattaacttttagataaagatccttatagactgaaagaatgtagcctctgcattaatggtaaatggtctagaagttttcgtttccactgaggcttccgccactcgcttttttaaacttcctgctatggtttggatatggtttgtcctcaccaaaactcatgctgaggcctgagtccccagtttgattgtgttggtaggtggtgcctttaagaggtgattaggtcattgagatggattaaaggctttctcatgaggctcagttagttctggaatggattcgctcttgcaggaatggatgaattctcacaagagtgggttgttatgaagtgaggatgcttcttgtgttctgttctctttgccctcctcagttcaccatctgctttccaccatgagttgaagcagcatgaggccctcatcagatgggctccctgatcttggactcctcagcctttggactcataagccaaaataaatctgttttctttataaaaaacccagt

SEQ ID NO: 71098 - DNA, 1343 bp, Homo sapiens
ccactaaagtgcaagaattacattgcactgtttctccactttttattttctcttaggcttttgtttctatttcaaacatactttcttggttttctaatggagtatatagtttagtcatttcacagactctggcctcctctcctgaaatccttttggatggggaaagggaaggtggggagggtccgacagtggcggtagagaggagactccggctggcgaccggggactggtggagtgcggtgatagccaagccatgggagacaagaagagccccaccaggccgaagcggcagccgaagccgtcctcggatgagggttactgggactgtagcgtctgcaccttccggaacagcgccgaggccttcaagtgcatgatgtgcgatgtgcggaagggcacctccacccggaaacctcgacctgtctcccagttggttgcacagcaggttactcagcagtttgtgcctcctacacagtcaaagaaagagaaaaaagataaagtagaaaaagaaaaaagtgaaaaggaaacaactagcaaaaagaatagccataagaaaaccaggccaagattgaaaaatgtggatcggagtagtgctcagcatttggaagttactgttggagatctgacagtcattattacagactttaaggagaaaacaaagtcaccgcctgcatctagtgctgcttctgcagatcaacacagtcaaagcggctctagctctgataacacagagagaggaatgtccaggtcatcttcacccagaggagaagcctcatcattgaatggagaatctcattaaagtttattttctccaatttcttagtcacttctgtcctaccatgcaaatacacagattatgccaagaggtaccacattttcatgacagatacattcatgcacaatccataatttgagttttacataaaatagaaatttgttagaatttgttagattttattgcaatgatgcctaccaaacatttccagacttaacattttggtctctgcagttaagtgccatgaaaatgtggttgaattattcattatgcagtgttattggtaagtgtattttcacttttagtttagtgaattctaacacataattcttgaattctctactattggcatgtaacgaatttaaattttttataacatagtgcaagctgcctaaatatgtattatttgagaattgtgaaacagatagttatatgtatacaagtcaaagaacaacttaactattgctgcaacaggtttttcttaatggttatcctcttaaatacacctgctggtacttggtgtggttaaataggaaaattgttattaaataaagaatttgtatgaaccttt

SEQ ID NO: 71099 - DNA, 3875 bp, Homo sapiens
atgttatgaagatattacaagggtggtatcaatggaggtggaaacctcgacctgtctcccagttggttgcacagcaggttactcagcagtttgtgcctcctacacagtcaaagaaagagaaaaaagataaagtagaaaaagaaaaaagtgaaaaggaaacaactagcaaaaagaatagccataagaaaaccaggccaagattgaaaaatgtggatcggagtagtgctcagcatttggaagttactgttggagatctgacagtcattattacagactttaaggagaaaacaaagtcaccgcctgcatctagtgctgcttctgcagatcaacacagtcaaagcggctctagctctgataacacagagagaggaatgtccaggtcatcttcacccagaggagaagcctcatcattgaatggagaatctcattaaagtttattttctccaatttcttagtcacttctgtcctaccatgcaaatacacagattatgccaagaggtaccacattttcatgacagatacattcatgcacaatccataatttgagttttacataatttccagacttaacattttggtctctgcagttaagtgccatgaaaatgtggttgaattattcattatgcagtgttattggtaagtgtattttcacttttagtttagtgaattctaacacataattcttgaattctctactattggcatgtaacgaatttaaattttttataacatagtgcaagctgcctaaatatgtattatttgagaattgtgaaacagatagttatatgtatacaagtcaaagaacaacttaactattgctgcaacaggtttttcttaatggttatcctcttaaatacacctgctggtacttggtgtggttaaataggaaaattgttattaaataaagaatttgtatgaacctttgccaatgtttttgacacgttttactaattattgttcctgaattatgtttctggttttatctattttttgaggtttttttgtttgcttatttttcaaaacattcatttattgtaatgtttactagcggactagtaaacaataaaacattgattatttagctttataattcaggtttagtgctattgtcattgaacactggtattttctgtatcatataaaacattaaaattcaaataattataagcatttggcaaaaacaagagaaaagaaacttgccatattttacaagctgcaattttagaaaagctttaacttaatgatagttttatcattgttttcttgtcccaaacttatccagggccatagaagtatgaatctaattaaaacagaaatgggaattattgcacagaaatgggaaataactaattttaaatcagtcaaattggcttcttattaaatacaataattcttatgaaaatcatagtaccctattttcagacacagctgccagtttaacacatttctcagtatcctgaaaggaaaaaagtatagccccacttatactatgtaaaattaccaataaaatatttttatgactacagattttgcatttttgtttacaactatttaaagagttttatgttgtatttagaatttcaacctagaaaccacacagtacttaaattctcctggggtctcctgctttctcttaaccatttgcttaatatatatctacctaaaggagacttctgaattgtaaatgaacttaaaaatagaatgtggatgcaaaatatcacataagacatcatgataacatttgaagaaaaaataaaactgtagaccctaacagttgtgatatttggtggtttcatgtggtaatgtaattttctgtttaattacagtactttttacaggcacagtggtactgtcttttttgtaagatgctagttgtgaaatacaattaattgcatacagtaaaagtctgtgattaaaacatttatatacctcattctttagtgttgttaaatgaaaaattaaaatttgtgtttattataagatactttcaatggaataccagctaaccagatatgttcctttaaaacatgaatttttttgtcttattctgtttttaacatgtttcaaatgttttatacatttttggagatagtaaaaatttaaaaatgtaatagggaaaatatttaatttttaagtcaaaaactatgctttaaaggaattacatcttatgatcaaataactttcaggatgtattttaaatgagctgcaagagagaaaaatctgacaggagatgggattttacctgaatggagcatactcatatttctacataggtgggaagatactcatctttctacatagacgggaacacggtgtagcatggagattaagcgtgctaactgacacctcatgtttgaatcctgttgtagaatggaaatgagcttaaattacccaagcttactttccatctataaaacagggctaataatggtaatcacatctaatttatagggtttttgggaggattaagtcaatccgtgtaaaattcttaattatctgacacatactggtcactcagtaaatgtgagcttttaccattgttataggtaaaatcccattacaaaaatacaaaaatattttttgtaacagttattttcctgccctcttggatgacctaaagtaatagtgttttatagatttcactaaattttcagtgtaatatcagatgttttctctggatgcagaaagaccatctttccataattaaagaacctgggtggggtgtgcactatgagattggagaaatgaattaagttgacttgaaattattttacttttattaatcacaggtatctcaacctgcctttgtttcaccctacttcaagtacacttccacaccaggggaaacagacccaaattccataaacagaactgacgttaaaatatgcgaaagattcagaacctaggtttagggtacatgtttttctctgtttcatgaacttacagtgtggtttgagcactgggttcttttagccaaattccatacaaaaagaatttggatgttttccagcatttattaccttactttgctataagtaagagtgaagataggccgggtgtgatggctcatgccagtaatcccagcactttgggctgaagcaggcagatattttgagcccaggaccagcctgggcaacatggtgaaagctcatctctatgaaaaaatttgaatatacatatatatatatatgtatatttaaaaagtgaatataatttgaggcacagaagaatattcttaaaaccttttgtattatacaatagaaataaaggttttatttttattaaatgctttcctaaaatgatagtggataatagacaaagtgaaaacatttaaaaaggaagagaaacttcagcctttctaagttgatagcatgtttattaacttttagataaagatccttatagactgaaagaatgtagcctctgcattaatggtaaatggtctagaagttttcgtttccactgaggcttccgccactcgcttttttaaacttcctgctatggtttggatatggtttgtcctcaccaaaactcatgctgaggcctgagtccccagtttgattgtgttggtaggtggtgcctttaagaggtgattaggtcattgagatggattaaaggctttctcatgaggctcagttagttctggaatggattcgctcttgcaggaatggatgaattctcacaagagtgggttgttatgaagtgaggatgcttcttgtgttctgttctctttgccctcctcagttcaccatctgctttccaccatgagttgaagcagcatgaggccctcatcagatgggctccctgatcttggactcctcagcctttggactcataagccaaaataaatctgttttctttataaaaaacccagt

SEQ ID NO: 71100 - DNA, 1021 bp, Homo sapiens
caagggggcaacgggggaacagcgcggagaggcggcgccggcgcccgaggcagccgcggccaccgcggccacccccgcaccgcccgccggctaactcgccgcgggtgctgggccgcgctggccgcgtttgaagtctccggcgcggctgctggttggccggcgagggtcacgtgcgcccaggcaggagtttccccgacagctggaggctgcgtgggatccggcggcggctcccgagcgcggcggtgcggccttccccgccccctccctccctcctcccccgcccgcttccgcccggcttattatcctccttattgacaaacagagcggtcgcggcggcgactctcggcgtgcggtgatagccaagccatgggagacaagaagagccccaccaggccgaagcggcagccgaagccgtcctcggatgagggttactgggactgtagcgtctgcaccttccggaacagcgccgaggccttcaagtgcatgatgtgcgatgtgcggaagggcacctccacccgatccacattgtttgaagttattgtgagtgcctcgaggaccaaggaaccgttgaaatttccaatttcaggaagttccagtggatgcccatcaggaagattctcatgctgaacagaagggcaagagaggtggatctgtgagggaaaagacccaataggataactcaagttactggtaagtaatctagttttcacaaacctgagattttttttccccccaaattttgtcccttgagaaggagtttgtttaattgaaaagaaaggaagttacttgggatagcttctttttgtacatttgatatggattatggaaattattgtgtggacagtaaatactgagctattaatgggtgtatgagtaaaaagtatgacattaattttaaagtatcttatttacgtaatagctgcttctaaaaaattatacatttagttggccgggcttgctgactcacacttgtaatcccagtacttttggaggccaaggcgggtggatcacctgaggtcgg

SEQ ID NO: 71101 - DNA, 1993 bp, Homo sapiens
cctgcctaactgggaacacaaggcacacatatattggaaagatcatgttgcacaaaacaggtgttcaataaataatttttgaataaatgtgaacactgaatagcaaataaatgttatagatcgtaatagttgtagaagattggttgggattgtagggactggatgtggggcaatggctgtgggtctagagtatattcattgtgcagtggacacacacctaatctgtcctcaaggacagaaccatgtggaggaataggaaaacaagagaagcaggcaagaagcggaggcagtgagtacagcagctaagaaatgttacattgggttcatccagagcaagaaaagctgagagctgtccgtgagggaaggccacacaggcaagaggagtgggacaggggagtaaaggagtgggctacaacaggccctgcagatgtggaagccagacccacagaggcacttagaaagtgaggatcctggatgaattattttagggagaaagtgtaggtttagatcagctggcagatgtgtttgtgggctacagccaagtttttcaggactaagaaggagaaaaataagtagaacttcttgggacaggagatctagggtactccagaaccagggaaatgagaaacaagaggggaattttaagaaagagagggaagatcatctatgaggttggagatgaaaggtgttggagatggtgaggcacaagtcaaaagactcactcgaagggcaggaactctgcttatttgtccatattcccagagtttgtcatgaggtctggcccacgtggcagttcactcggccactatgtatcactgtggctgccatggtggatggaggctggacaggacctgtggtgatcggcagtctttctggaggactcaccagggaggggtctcagggtgggcatctcctttcaccttcctgtgcatgtcacttgcactgttcttcttccctccctgaacagcacacacactgcatccttagtttcaggggtctgaaaacaaatgctacgaccaccttgctttggtggcttttctgaacaggcattgtgagaagagatgttctggccaggtgaaagtggactttatttttaggtaggtttttcagtttagaaaggtttcctttgcttatcccttgaggacttctgtgctgctgcttctcctccatcttgctagttaacagaacaggggcagaagtgacaccaatgctctcggccatgcctgccttgggaagcactaccgggccccactgtttagaatcttagatggaaatgtacacaaggcattgacacacgcctgcgggagtgacccagtgcttccctcccatgggactcagggtcagcgtgggaaggcagctggcagggacaggagccccgcccgcaaggtggactgagcctcacttccacacaaaaccagagtcccatctgccccagagcgctcgctctcctccccttccttccgctcaatgcagcctgacacgcctttgaccagaactgcaacatttcaaacacaaacccagatctgttgggaaatcctaattaaaaacgttgcattcccaggtggcacaatcacatcctgcctaaaacttctggcccacatcccaccacccagatgttgaaaagaaacctttctctgcttaacaccaaaacctgcacttcaaggtttctttaggggacaaagaaaaaaaaagtacacacatgcagagttcagcctacatgttcattgaggaaaaagagcgtggcttattcatctttcaatcttttgattgttggcattatgattatgattatgattaattactctgacctgacaggaattgaagaagagactatatgctggtgctctgaaatgatctacccaactctgtcatctgtaacaaccagtgataactctcttgtcttgtaaaaagggtttgtacataacttgtacatggtttcattttgtatttttcgcagattaaaaatttatgtatttgtgttctaaaaaaaaaa

SEQ ID NO: 71102 - DNA, 167 bp, Homo sapiens
ggcggtgagaatccagggagaggagcggaaacagaagaggggcagaagaccggggcacttgtgggttgcagagcccctcagccatgttgggagccaagccacactggctaccaggtcccctacacagtcccgggctgcccttggttctggtgcttctggccctgggg

SEQ ID NO: 71103 - DNA, 746 bp, Homo sapiens
atcccagcacttgagaaggccgaggtgggtcgattgcttgaggccaggagttcaagaccaacctggccaacatggcaaaatcttatctctactaaaaatgcaaaaattatctgggcgtggtgggacacacctgtaatcccagctacctgggagcctgaggcatgagaatcgcttgaacccgggaggcggaggttacagtgagccgagattgtgccattgcactccagcctgggcaataagcgcaaaaatccatctcaaaataatataataataattcactggaaattgtatatcaaaaaaggcaagagtcatcaaaatattctttttgactctttctgtaggatttaggagccctaaactccccaggagcttcactctttccaattttttttttacagaaaatctacagccaagtcattctgggaataaagtgagataaactttacagtttaaatctgaattcaggactgtgtttgaatatttcagtttaccagagaagaatggaacttagagcttaaaaacaagaagaagatatgaaaatatgacatcaagctgggctgcagctaaagcagtgcctcagagggaaattcataggcttcaatacgtatattagaagggaagaggctaggtggagtagctcacacctgtagtttcaacaccttgggaggccaaggcgggaggactgcttgagcccaggagtttgagaccagcctgggcaacatggcaagaccccatctcttatataa

SEQ ID NO: 71104 - DNA, 387 bp, Homo sapiens
atacatgggtgggaggttcattcagcacccaccagtcagaaaatctacagccaagtcattctgggaataaagtgagataaactttacagtttaaatctgaattcaggactgtgtttgaatatttcagtttaccagagaagaatggaacttagagcttaaaaacaagaagaagatatgaaaatatgacatcaagctgggctgcagctaaagcagtgcctcagagggaaattcataggcttcaatacgtatattagaagggaagaggctaggtggagtagctcacacctgtagtttcaacaccttgggaggccaaggcgggaggactgcttgagcccaggagtttgagaccagcctgggcaacatggcaagaccccatctcttatataa

SEQ ID NO: 71105 - DNA, 348 bp, Homo sapiens
gcggtggtgcgatcactgctcactgcagccttaacctcctgggcccaagcgatcttcccacctcagcctcctgagtagctgggaccataggcacaggccaacatgcctggctaattttttttacttttgtagagatggggccttgttgtgttccccgggctggtcttgaattcctgggatcaagtgatcctcctgcctcaggctcacaaagcgctgggattacaggtgtgagccactgtgcccggccgcaaatcaaaatttttgagtcctatcattggctcccccaggcccataggacaaagtcctaacccctagtcaggacactcagtgtcctctgctctctcctgg

SEQ ID NO: 71106 - DNA, 370 bp, Homo sapiens
tgatctgtagcctactttgtctgatatagccactccaacttccctttgattaacatcagcaaggtacctcttttttctagcctttgtcttttaaaaaaaaaaaaaggccaggtgcggtggctcacacctgtaatcccagcgctttgggaggccaaggcggatggatcacgaggtcaggagttcgagaccagcctgaccaacatggtgaaaccctgtctctactaaaaatacaaaaattagccaggcatggtggcgggtgcctgtaatcccagctacttgggaggctgaggcagagaattgcttgaacttgggaggcagaagttgcagtgagccaagattgcgccactgtactccagtgtgggcgacagag

SEQ ID NO: 71107 - DNA, 579 bp, Homo sapiens
gtcagttatgaccaagaaaagcccatcaaaccactgcttcagcatccaagttgaagtttagtcattttggctgctgcctttaaatctttctctagcatgaatgcagtccaaggaatataaaaactctagttgttaggaaaccatggctactttcatatccttggaacaacaggtctccacaattaagttccaaaattgcagttatttttactgacatataaaatctattaaccagtattaattctgtaattttttaacaataccgattcttgcattttgattttttaaaaattaatttaatagcttggttttatgttctcaaaatttattaatgtctattttatgatgtctatttttatattatattatttaaaatttgtttagtgtttgttttaagaactccaagagatttcttagaattctctacagattttgtgtagctgcctatttgtagattttaaatttggctgttactaagcccattaaacattattagatactctgtcctattgggattattattaatattaccttaattgtgagttcttaggtgtaaagaattggcaatactacttgcag

SEQ ID NO: 71108 - DNA, 305 bp, Homo sapiens
tgcttgtttcttttaaaaggattttttaaattgagattattagattggcgtttgtgagcctccacacaaatatagcatgcaattttcaaattaaataattttctctatgttttgcaagttttaattctgaaaagtctgtgtgcacataccattctgataaaatgagggataatattttaataatttgggcagtaaaaattgttcatatctataaaagagaaatagagtagatagttatgagtaattaatatgaattatagcacaagtataagggatacatacatcctaatcatactttgagtgga

SEQ ID NO: 71109 - DNA, 346 bp, Homo sapiens
tgctcttcccctcagccaacccctaaggaagaagctgctcccataggcttttctccttgccccagcccacagtggctgacagctgtcaccctgggcttccattatgacttttatgaaacctagcacttgccctcatgggcccttctccctatgaacaaaaactaatccttattaaaatttttgtttaagtgtttatatcatgccgggccgggtgtggtggtacgcatctgtagtcccagctactcaggaggttcagcccagaagttcaagtccagcctgggtaacatgacaagacctccatctcaaaacaattaaataaataaatgttgtattaaaaagcaaaata

SEQ ID NO: 71110 - DNA, 521 bp, Homo sapiens
attataaactaaaaaatattgacaaatatcagcaattacatcgaaagaagaaggtggttgtcaaaaataaaaaccattgttatgttttataaatgttattgaagtccacaggaaatacattaatttggtgggtgtaaaattggaagaattttgaaaaatgtatgcagtggtgtaaccacaaacacaatcaggatatttccatccctccagagttgccttatgttcctcctcccaatctgtttcctgtcaactaattatctgctgtctgtcactgtaatattgcctgttctaggaaattagatgagtggaattttctattatgtggtcttttgagtctgacttctttcaataattatactgactttgagatttatccatattgttgcatgtatcagtaattcattcattttcattgctaagtggtattgtatgaatacagtttatttatccgttcatcagttgatggacgtttgggttcattccaatttttaactattataaataaagttgctataaacaat

SEQ ID NO: 71111 - DNA, 2683 bp, Homo sapiens
  misc_feature (680)..(680): n is a, c, g, or t
caaggagatttctaatggagagatgtcatagtcatggtcagcagcccaagtatgcagactcctgtccaatagatgttacaagggcaacaggaaaagcaaaatcatcctttgggagaaggaaatcaagataattttcaaatgcatgtcttaaaacccagaaataccattcagaagttccgagtatacatatatgagtttgtaagatatagttatttccgttttacataggaaatatttgagatagaattaggagttccctctgaggagtcagtttaaatgatacttacaatcatgcaattaataatatcctgatgattagataccaggtttgggttcctattacaatagaagtacatcccaccaaaactgcacttgtctgaagtcggtgcatagaaaacagcttttaaggaattcactaattaattccctctgctgaaggctaattgttgaaaagatactcctttatcagttgtggtgagactctgtcccttcctggctagttctacttgtaactgacctgagctctttcacagagtgagtcaacatgaagtgagggaaatgaaaaggggcactggaataagagtctcctgactaaaatactgtttctgtaacccactggctaaatgaccctattcactgataaaatcattccagggcaggggctagcttgagcctcaggngtgcccattctaggattcagatgctttttggtatatagttgacttatggagaggccctacaaaccgtctggaagacaatgtgtcctaagagaagtgagagagagtctggaataaaagcttggtcaaataaccttgctccagtgatgagtaaggaataataacacagagggcagtatctcaaagaggggctttcccaaaatcactgcaaaaccttggagtcacagggcagtgactccatgtagccaagattgtagcccagaaatgaaatcaatgaattctcagttcagcggaacagttttggtgtgccaggtgtctggagagcagaacatatcttaggcacctgtgaaccattggcaagcagagctctggtggacgtgagacccagtgaggttctggatcctggctcttctccttggatgtgttgctttaggagttattttcctgttagcctaagtcatttgtttttcttaggaaacttttcactcattagaagttaagctttctaaatgatgttcacacattcttttgcagagctatttatatttcttgaattattgctgagcttgcaaattacattgaggattttcttatataaataaaacagcatcaaattagagtttaaaaaaaaattagtttctgtttctttagttcatctgccagctggtatttagagcccatccgttggtcttggtgctgtgaagtgcaatgatatagccttccatttatggagttacttacttcttttgggctgcagtcatggagataagcttgccacgagtcagcttacaacttataaaaaataattaggcacttttacattctgtcttctaactctccacttcagagtggcccttcagagtttgattcttgaggctattctttattgatgggtgacatgcctttccctgaataatagcaatcctagctaacaattagtgcttgacatttgaagtgctttaaatcctttgaaaacccccaaagatttaagtattattattattgcctccattctatagctggagagactcagttacaggggcagggtacatcatctgtgcacagccacaccgttgacacttggcaccagaattccaagttgctcttaatcactctgtagttctgcctccaaatagtgagagaagagagccactgggtggaaagccaagtttgcaagcagagagactggactgtgagtcacaatgggagcaagtggttaggacagcaaaagcagtggctcatgagatgtgagcatatgtggttgactgattgatgaatgtgggagctctgagtacataacactattaagtggatgactccttgaaaactggacataggacatgcaaggcattattgattcgtatcaattagtgggtctgtttctataaagtgacaagcatgaattcattttctttgtcttattaattcttgctcccctccaatgacttggaaagaaattcagatgacttctaatatttatcagagatgaaactattgattcatacctttaaggatgatacgttcagaatgctaatttcaagaagaaataacagttgcaaagttgttttatctcaatgttttactagaaggaagacctacgtaagtttgtcccaagactaaggcaaatctagaggactgatgccacaggctggccaggtaccactggcatgagggactgagaaacttgggatggaatgcactgtattggaagagggttaaagaatggtaggtcaggaaggaaggggtgggatgtctatcactcatttagatggtcctcaagtcctgtttctgctatgagtctgaaagtaaagagtataatgaaagataagatcgaaaatgaataaatctaggacattgagagcacaaggtgtcaggagcttggcatggaacttagggctttacaatctgggcacagaaatgtgagagtgagggccttagcagccatggtggtacctttacaggcattaatcagcacaaaactgagcagatgagagttaaaaaaaaaa

SEQ ID NO: 71112 - DNA, 294 bp, Homo sapiens
agaaatgtgaggagtaaaaaatctgccctttaaagaatatcaattcattacttcaaatagtatcgagatacttgggcaggtagtggttttctgtgtgtatttttgtttgaaatgcttacccgtaacatctgggagcaggaatactatgcctctgaaacttttgaactctcacagaagcttgtttgctggctgggagaagctagcggttacacttattaatgaatagattgttttaagggatatagtattcttcgtttaagaaaaatttaacttgcaccttttgaccttacattg

SEQ ID NO: 71113 - DNA, 393 bp, Homo sapiens
gttctaaggaacccacctaatcataccatggataaaggctggggaaggaaaggtgagttacagttctgtgcacatcaaggacatgattccatgtattcttgctcatttggacacccttggagttaatagatacgcaattcagaaagtcacaggccacatctcagaattgtatatttaagaggacccctagcaactccctagaccagtgctactcaaatgagattttctgacttgtccatgaactgttttctactagcccataacaagctaataagcacagcaattgcgaataagcattgatacacttacgctgaaatttgccagaataacattatgtctgttgaagctaataaaaacttggggcttgtgttttgtatgcctccttttgaattc

SEQ ID NO: 71114 - DNA, 225 bp, Homo sapiens
gataaggtatactactgttcataaagccagtctattccaggggtaggtgtttgctgtccagagcttctgcgtcaccactgagttctgtaggtaacttagggatggggtatggttccctatccttgtatctaggacagacagtccctttgagggggtggcctccatgttctctgcccatccctgtatccaggggctgtacatggccgcagcctggccagtcccttg

SEQ ID NO: 71115 - DNA, 337 bp, Homo sapiens
gtagagatggggtttctccatgttgcccaggctggtcttgaactcctcggctcaagcagtccacctgcctcagcctccccaaagtgctgggattataggtgtgagccaccgtaccggcctggatctttcttaacatcaattgcaatcaagtgtcctaagtaactcagaattctgtaccaggagcagggttttgcaaatgacagaccctaatatctggaatttgctgtgttgaggtgggtgtaaggtggggtctcccttcctgactcggggtgagcaacacctctcaagtggtgcaaggtagccaaagcctctcctgttgagcccagtgagtcagacc

SEQ ID NO: 71116 - DNA, 729 bp, Homo sapiens
gaggaagagaggaaggaagaagaaaaagactgcaagctttcctgccaatttgggattttcaaatatttaattctaaattccagattttaaggaagatttttcaagaaactgcaagtttttgacttgaaggaaagaaagaggaaggctggtagaagcagttagagcaatgtgtttgaaattatgtccatgaaatcacagggatctctgaaatatctttaggaaacttgaaatttatgaggtctgaatggacttgtttaaaattggctctgactcctcacttctgagtttcatcctatccgagggatgagattaaggcagaggcaaaagtttcacacaaagtttctgcaacctaacgtttaatagtccgggtctacagggaagaacaatgacacagcttgagcgttacttcctccttcgtgtcattgtgatatttgacaactctaaaaaataaaaaaaaaaaacttagagcacaataatccttgcctatgtacttcacaggaatattgtgaggtgtttataaaattataaaatttgatgaaattcttacaattattaattattttattttcatgtttagaaataatcacaccccaatagtttcctaggataatacagtccatgcaaagtagggtcatagagaaataaaagcatgccctcagcttttaatgaacttaaatgtagcacatatggcttaatctcttagacttagataagggagttcaattcaaa

SEQ ID NO: 71117 - DNA, 358 bp, Homo sapiens
aatgacagcagtgatagcttggatagtgggatatatacataaccgaagttctcatttatttaatattttcagctttccctcaaacatgaaaaaataaacaccaaaagcctttcactgtgtgttaataaaaaacctcattaggggatttatcttttatctccccactccttcccacttcccttttgtcttttaaattttatttttagtttttacttatgttttcttttcctttctttctttcttttttcttttgagatggagtcttgctctgtcgcacagtggcgcgatctctgctcactgcaatgtccgcctcccagattcaagcggttttcctgccccagcctcccaagtagctggg

SEQ ID NO: 71118 - DNA, 284 bp, Homo sapiens
agcaaagaaaaaaatgggacaaatacaaggcaaaaggcaagatggtagaattgaaaggaaatcacatcattaccttaaatgcaaattgtctaaacattccaattcaaaggcaatataaaaaagcaagacctaactatatgttgcttcaagaaacaatctttaaatatggatataggaaaaaacatctattggcaacaaagtcacagttgctgctaatattactgctgtgttttgttgcctgcattcaaaatagaaacactgaatttcattcagaggttagtgaa

SEQ ID NO: 71119 - DNA, 474 bp, Homo sapiens
gaagagggcaatataacagcaatgcagctctggcattaagtgctgagagaggctccctgctgacagacagcaaggaaataaagaccacagtcccactgccacaagaaactgatttctgcaaacaacatggaacagcttagatgaaatttctccccagataataacccaggtgagccaatacattaattttggccatgtaaaacctacagaagaggaaccagtgaaatttactctgatttctgtcctacagaacttaatgtgaatggctttaagccactacatttatagtattttgttacagcagtgacagaaaactagtgtaacatataaacacaaagaagggaaataatgatatctgtataaataattaaaatataaaaattgaccaagatggccaactagacacagccaggaagagcatctaccactgtgagaaaataccttcaataaaccagcacactctgtgcagatctt

SEQ ID NO: 71120 - DNA, 501 bp, Homo sapiens
  misc_feature (493)..(499): n is a, c, g, or t
  misc_feature (501)..(501): n is a, c, g, or t
gcctacaaggccctgtctgatttgctcccctttctctccctaacccaccacccctgcgtctccctgcaggcagtcaccttcttaggcccgggaaaatgccggtctcctactcttcatggcctttgtacctgacttggccaggaatgatctctgttcctctctttcactaagttagttcttcttcaccctcacttcctctaaagtaactccttatagggaagcctttcttggctggcaacacacacacacacacacacacacacatacacacacgactgaatcagatcggattgctctttgatagctcttttcataattgtaatcaagcaattaattgggtaatgcgttgttgttgttttctttctctcttgccagaatgtattcatgttgacccataagacattatcatttttataagtccccaaaagttgaatattggaaattttatttccacccaattcaacttaataaattctgtgtttaccttgctcannnnnnnan

SEQ ID NO: 71121 - DNA, 1683 bp, Homo sapiens
cttgcattgattcattgaattcctgaagcgaagctacaccagcacatgggtggctttgaaaggggcctcccagagcctggggctccagaggaattcactccccaaacctttgttgagcagctactgtatgccacgctttgtgctagaggacaggactgatgccacccctgcccccaggcactgacagggtagcagagggaagacacatgagctgctttttaattttttttagaattaatagagacggggtctcactctgtcactatgttgcccaggctagttttgaactcctggccgcaagcagtcctcctacctcagcttcccaaaatgctgggattacaggtgtgagccaccgtgcttagccatgaattgattttaaaaccttaaatgaggggccaggtgttgtctttccgtttgcctgagtgacgcgggtcttctccaggacatccggccacagatctgcccacggaggaggactttgaggccctggtttctgccgccgttaaggctgataacacctgcggctttgccaagtgcacagccggcgtcacaaccctgggccagttctgccagctctgcagccgccgctactgcctcagccaccacctgcccgagatccatggctgcggtgagagggctcgcgcccatgcccggcagagaatcagccgggaaggggtcctctatgccggcagcgggaccaagaacggatccctggacccagccaagagggcccagctgcagaggaggctggataagaagctgagtgagctcagcaaccagaggaccagccggaggaaggagagggggacgtgaccggccgcatccttgcacgccccgcggagctctctccatggtagcccagggcgctggcagaccatgctccgcctccaccagggccacagaggagcggaggggcctatgggggaggagcggagggccctgttggggaaggttgggtttttggaccccagggataagcttttccgatgtcacaatgtggaggaaagcacctgggggacaacagtgctcgtgcaggtggggcttgggaaatgcacgtcccttcccctcactccccgccaaaacccacatcccagcctctggatcctggggaaggttccagtccctggagaatacccagggcctcaaacttgaagtcactcctccaatgtctgggacttgccagctcagcccgttaggatgagggtgctgagaggaaacaggaaacaagactgcgaatggcgctcaggcagggagcagggagtggcgtttggcttgcacgttcccatgtggccagatgctggggccactttccttctgtctgctggtgactgcagtgttccccctcctcctcaccacggggctcctgtgagtctggggggcacctctttctggcctgtgcacctctctctggcttataaaggtgcctggcctgtgccagcccctccttgttgcgcctcaccgtggggaccaggtgagccggctctcccacgtggttgtcccgggaaagctgccccacagcctcagcatcttcagcacttaccgatccagagcctcccggccttctccggtgtcctgtaccaactcttctatttaagagaacctcagatgatgtacctgagcctcagggttttgtttcagagggatataaattatttaaaaattaaatgaaaacgttgcacactg

SEQ ID NO: 71122 - DNA, 2382 bp, Homo sapiens
  misc_feature (3)..(3): n is a, c, g, or t
  misc_feature (8)..(9): n is a, c, g, or t
  misc_feature (11)..(12): n is a, c, g, or t
  misc_feature (1122)..(1122): n is a, c, g, or t
ggnggaanngnnggctgcgggctgtttgagctggaggaggaggacgaacagtcgaaagggaaccctggcgaagtccgcctcgtcagtttgcacatccaggctctggtggacgctggtgttccagcccgtgacattgctgtggtctcgccatacaacctccaggtggacctgctcagacagagccttgtgcacaggcaccctgagcttgaaatcaagtctgtcgatggcttccaaggccgagagaaggaggccgtgatactgtccttcgtcagatccaacaggaaaggtgaagttggttttcttgctgaggaccggaggatcaacgtggctgtcacccgtgcccgacgccacgtggcggtcatctgtgactcccgtactgtcaacaaccatgcatttttgaagaccctggtggagtatttcacacagcatggggaagtacgcacggcctttgagtatcttgacgatattgtcccagaaaactattcccatgagaactcccagggttccagccacgctgccaccaagccccagggacctgctgcgtccaccaggaccggaagccagcggcaggagggaggccaggaggctgcagcacctgccagacagggccggaagaagccggctgggaagtctctggcctctgaagctccatctcagcccagcctcaacggaggcagcccagagggagtggagagccaagatggcgtggaccacttccgggccatgatagtggagttcatggccagcaagaagatgcagttggagtttcctccttccctcaattcccacgacaggctgcgggtccaccaaatagccgaggagcacgggctgaggcacgacagttctggggaagggaagaggaggttcatcactgtgagcaagagggccccgcgaccccgagcagccctgggacccccagcagggaccggtggcccagcccctctccagccagtgccccctacccctgcgcagacagagcagcctcccagggagcagcgtggcccagaccagcctgatctgaggacgctgcacctggagagactgcagagggtcaggagcgcgcaggggcagcccgccagcaaggagcagcaggcctcagggcagcagaaacttccagaaaanaaaaagaaaaaagccaaaggacatccggccacagatctgcccacggaggaggactttgaggccctggtttctgccgccgttaaggctgataacacctgcggctttgccaagtgcacagccggcgtcacaaccctgggccagttctgccagctctgcagccgccgctactgcctcagccaccacctgcccgagatccatggctgcggtgagagggctcgcgcccatgcccggcagagaatcagccgggaaggggtcctctatgccggcagcgggaccaagaacggatccctggacccagccaagagggcccagctgcagaggaggctggataagaagctgagtgagctcagcaaccagaggaccagccggaggaaggagagggggacgtgaccggccgcatccttgcacgccccgcggagctctctccatggtagcccagggcgctggcagaccatgctccgcctccaccagggccacagaggagcggaggggcctatgggggaggagcggagggccctgttggggaaggttgggtttttggaccccagggataagcttttccgatgtcacaatgtggaggaaagcacctgggggacaacagtgctcgtgcaggtggggcttgggaaatgcacgtcccttcccctcactccccgccaaaacccacatcccagcctctggatcctggggaaggttccagtccctggagaatacccagggcctcaaacttgaagtcactcctccaatgtctgggacttgccagctcagcccgttaggatgagggtgctgagaggaaacaggaaacaagactgcgaatggcgctcaggcagggagcagggagtggcgtttggcttgcacgttcccatgtggccagatgctggggccactttccttctgtctgctggtgactgcagtgttccccctcctcctcaccacggggctcctgtgagtctggggggcacctctttctggcctgtgcacctctctctggcttataaaggtgcctggcctgtgccagcccctccttgttgcgcctcaccgtggggaccaggtgagccggctctcccacgtggttgtcccgggaaagctgccccacagcctcagcatcttcagcacttaccgatccagagcctcccggccttctccggtgtcctgtaccaactcttctatttaagagaacctcagatgatgtacctgagcctcagggttttgtttcagagggatataaattatttaaaaattaaatgaaaacgttgcacactg

SEQ ID NO: 71123 - DNA, 647 bp, Homo sapiens
aaaacccaaccttccccaacagggccctccgctcctcccccataggcccacatcccagcctctggatcctggggaaggttccagtccctggagaatacccagggcctcaaacttgaagtcactcctccaatgtctgggacttgccagctcagcccgttaggatgagggtgctgagaggaaacaggaaacaagactgcgaatggcgctcaggcagggagcagggagtggcgtttggcttgcacgttcccatgtggccagatgctggggccactttccttctgtctgctggtgactgcagtgttccccctcctcctcaccacggggctcctgtgagtctggggggcacctctttctggcctgtgcacctctctctggcttataaaggtgcctggcctgtgccagcccctccttgttgcgcctcaccgtggggaccaggtgagccggctctcccacgtggttgtcccgggaaagctgccccacagcctcagcatcttcagcacttaccgatccagagcctcccggccttctccggtgtcctgtaccaactcttctatttaagagaacctcagatgatgtacctgagcctcagggttttgtttcagagggatataaattatttaaaaattaaatgaaaacgttgcacactg

SEQ ID NO: 71124 - DNA, 258 bp, Homo sapiens
ttttttttttaccctttaacagttcctacctccccaccaccacccccactaccctttccagtctctggtaaccatccttctactctctatgtccatgagctcaattcttttgatttttagattctataaataagtgagaacatgcaatgtttgtctttctgggtggcactcttaataatttagatgcctctaagatattggacacacaaatgaagcaaatgaaatggaaaatacttttaagaggcagattttcttgta

SEQ ID NO: 71125 - DNA, 3350 bp, Homo sapiens
  misc_feature (1003)..(1003): n is a, c, g, or t
  misc_feature (1025)..(1025): n is a, c, g, or t
  misc_feature (1107)..(1107): n is a, c, g, or t
  misc_feature (1170)..(1170): n is a, c, g, or t
  misc_feature (2083)..(2083): n is a, c, g, or t
  misc_feature (2695)..(2695): n is a, c, g, or t
gtgccactgctcaaggtctccatggctgagcctgggggctcttacaacaggctccatgcccaaggtggcagttgtggaaccatcagagagggcacagagctcatggtttatggtgtaggggctgggagcttggagggggttgtgtggggggctggactcaggcggccagaggcctgggaacatcatcctgggcacgccgtacctgtcacgcagtctgagtcatgctgccagggcaggtatccagctcccagcctgggagtgccaagagccaaatccacggcagattaggggtgatagtcacggtcccacgtcctctatctgtcagcaatccagtggtgatctaggataaaagcctgagagtcctatacacgcggtcatcccacaacacacttcataggccatggaaggacacacagcccccttccctccctcccaggtaccatgatagctgctagcgtgcgactgaaggcagggtccctggcccctgctgaagcactactgctggccagcaggctcacgcaccttggcctgttgcttctaggggttgcctgtgctattcagccaatagtgctgctggcccagctgagctccgcctagagagctcacttccctttcctgccacggagtctccctcttctgcttttcccagcaggaagggcccagcctcacctatgtaacctgcagccccccgccaaccagttaaggctcccctcttagacttagaagtctatggccaatggcatccggctacctgccctccctgccttccccagggttcctcagaggaccctgggctttctgatggcccagaggggcctctggcattcactccagccagccatcccttatagctccaccattttggttcaatcagtgttccttctctatcaggtctggtggctgttggatggggctctccaagcaagaggtggccctgggccagtgcgttggaagacatggggaccacagaagagggaagcccgagggagctggcattggtctnaactgtgggtggatgggtggantgcctgggttccatgagacaggccagcgtgtgtggggtagggagggccgccgcagtccccaggcactacctatgaagctccngcttctccctccatctccctcccctttcccttccagcccctcttttccaggaaccttgccacncccacacctacgccctcccctccccggccctccacagctgctgcagcgcacccatactctgcacttgcctcaccagctctggcttttctctaacccgttttctctctgctttctctccaactgccagctgatcgggtcaggcaagtccatcccgtcctgagagccccaggccccacttcgacctctaaacacatccctcctcttctcagagacctccctttccaagcctgcctgggcgggtgtcctgtgacttgacagtggctcccccagccccaaagccagcccccttcttctgtgacttagtctgttgtagtggtgagctgacacgtccaggtgtgaccgttgctgaaaacttgtgccccctctgtggtatgcccctgccctgttctataaatagctataaattctctctctcacacacacacacacacacacacacacacacacacatatatacatatatatacgtggccaactgcctcacctctagcactgggaatcagtcccgtgctgtgcttgtggaatcttgtagcccagcaagaggaagctgtctcctgacatcgcccctccaaagtgcaccacctccagtgagcttccgggacatgcgcggcctgtggacagccagcccccgccatccctcccgcccttctggccaagcatggcggtgctgtgcaggcagctgtgtggcctgacagtctctaccagtcctgctgtcccttggctgagaaacccatttctggatgacagagaatgtgtcctctgctggctgtgttctctatggagctcaggggatggaaaaggccaagccatttttagggtgctgttgggagcagtgaaaaggtcacacccttttcaagggacacttttcctggaaagtccctggagcttagctggctcttaccctgtgaagccngctctggccactaggggacagggccctgaactcagcctggagggaacctgcggggcagccggcactctggagggacagacaggccacccggtgcagacaggagagggaggcagggggacagaacggaagacacctggggtggatggaagtcagtgcccttgggcactggtatctgtcttccctgccacagctagatcaggcttctcaaccagttggctgtcagggccagagtgtactccgtaggcgccatggcagtccccatgaaatccaccaggtgtcaccaggcagcatacaggtaacaggcctggaaggtccccaacagcccagctggacatgctgagacactctggggctcctcattcagtgggacaaactgcaggacccagtgagggaaatgggaacataccaggccgagcagtatggctaaatccatttattccaaaatcaaaagcaaaaaacaaaaaacaaaaaacaggagtcccatcaccaggcagccatgaccccatccccgcctgcttcctcgctcctatgctagcaataaataagtttcccagccgcgaataattataagaacctcttcctcatatgccagctgcaacctccgctaggtangatacagaatgttacacagctacagtatgtacacgggggaaggggggccacccccagcagcctgtgccctggcctggtctacagttaactccactgtcccgcctcagctgcctctctgagtaagaagatgggagcccccctgagggaaaagttgctttggtgagagtaagaaggccgtcagacctcctccaaacaaaccaactccaccaacctctggctcttaaataacaaacatcatcatccagaaatgtaaggactcagccttggtcaaggtggtaaagggtctgtttgtctccctccattagacaagggtcttgtcttgctaccctaatggtaaagggctgactggggaggggttgtagggacatggtgggggtgaagactccagacccacttctccaggcttatgctgacaggggcctgcttttatttatttttatttttatcccatgactttttttaaatcctgtaactaatttttcataactttttaaaataacttttcataaaactttttttttactttttttccacaacttttttttgccacttttccacagtatttttttatcctgtaactttttcatcccacaactttaatttctgttaacttttttagtttgtgttcttttaataaacacacttacatagttac

SEQ ID NO: 71126 - DNA, 457 bp, Homo sapiens
gaatctctcttaacagtaaaatctatgtaaattttcctgaactctagcttggacttcctggtcgatagcacactgcatgtgtaaacccttaattatgacttcatttattggctgatggcatttttattttcagtctagtatgtagtgcctcttagcataaccagtcttgaaggagattctaataacaccttgtctgaagtcatggaagaaattttggagtgttagaatggaaaggatcctggaaatcattttctaagttcaactttcttcctttggggaaacagacctagagaagttacttgaccaagagtaataagggggtccagcaggattagaatacagaaccctatcaaggaaaatataatatttaaatggccgattctatttcattgtaaacaatggcattcaaggcataaaaatatcactctcacgaatttacacatttattctttacaga

SEQ ID NO: 71127 - DNA, 288 bp, Homo sapiens
ctaactgctagttttcctaggcgaactaaatgtgaattagggattccatattcttttagtcttcttttttaacgaaggtagaaatacattcacaaattcagggcgatctgtatttgtgtgtaaattgaaaacatttcaaaccagacagagcaggttagtagtgtgtttttaagctgaacagcatggtatggaatgttgtgagcaacggtaaagacttttagaaggtgtgtcttgactttatgcagaattagggtgataggcagactccaaactttgctcattaataat

SEQ ID NO: 71128 - DNA, 813 bp, Homo sapiens
tcaacatccatttttatccttgacctgtttttgcctttcccagtttaaaacaggaaaatttcaagtattggtagataattataaagaagttacatgttactttacagggaggtcagtgagttctaactccaaaattcaacatatgcataaaactcatagcatccacattccttttcgagaaaatccttaagaaggttcaatctatacataactcctcacttttttctgcagccttggaacagattcctatttctttggttaagtaccagatataaaccttcgatttacaaggttgagtcataccaaaaagtgtttactttaactctaggtcagtttcataaatgtatggtagggcaagaagctagaactaaaatgtttatgttggtacaaagttatattgatggattcatgttaaaaagtttaaatgcatgtgtgatacaattccctgtaacaataccccagcacagaataatctgtgaaaggcactattctaagcaacttttaacatatattatttcatttcaaattcacaaatacggtggctcatgcctgtaatcccagcactttggcaggctgaggtgggcggatcacctgagttcaggagttcaagaccagcctggccaacatggtgaaaccccccgtctctactaataatacaaaaattagccaggcgtggtggcaggtgcctgtggtcccagctactcgggaggctgaggcaggcgaaccacttgaacctgggaggcagaggttgcagtgagccgagacctcaccactgcactccagcctgggcaataagagtgagactctggctca

SEQ ID NO: 71129 - DNA, 714 bp, Homo sapiens
gagctagagtaaacctataactcccaatgccttgtaagtttagccagaaacaactaaaatactcagaacttttgttgaagcccacaacagtataatagggagacctgggaaagcaaagggagcctagcagttgtatgtcacagtgagaagtgtcagggacagggcacaaattgcacccagggcagccactagaagaatcagtgaattaacatgtgtaaagtacccagaaatatccagaggtgatatgtgtcagaaagcattattttgtaaaagtgaaggaaacacagtgggaatgatggctccttttgcaatggccagtaagaaacctggggagctcaaagcttgagatcagccctgtaagccagatgagagtcatagaattagagaaggtatggcttcaccggaagtgccatattttgaaggagccattcaattcagtagcaacagaggaaggagttcttgagcgagaacatccaccttctatagaaatcctctgtgaagttatctggtccagggaaattcaactcaattacatatgaaaaactaaaaagcaataaataacaaagctttagagagacattctaaagaaaaacaataaaaaaaaaataacaataaaacccataaagctatagaccaaagtctcatagatttagatgcaaaatcctaaaatcgaaaaaaaacatctagccatatccataaactatatcatcacca

SEQ ID NO: 71130 - DNA, 4250 bp, Homo sapiens
tctggtacggccccgggagttaagggatcaccactgggagatcagatcttctagctggctctctgctgccacagctccgccgaagggagggggtggaagaggaggactaaactcagagctgagaggagaggcaggtgtgtgcaggtgcatcacctggatcatgaggtcacccctctgctggctcctcccacttctcatcttggcctcagtggcccaaggccagccaacaagacgaccaagacccgggactgggcccgggcgcagacccaggcccaggcccaggcccacacccagctttcctcagcctgatgaaccagcagagccaacagacctgcctcctcccctccctccaggccctccatctatcttccctgactgtccccgcgaatgctactgcccccctgatttcccatctgccctctactgtgatagccgcaacctgcgaaaggtccctgtcatcccgccccgcatccattacctctatctccagaacaacttcatcactgagctcccggtggagtccttccagaatgccacaggcctgcgatggattaacctggacaacaaccgaatccgcaagatagaccagagggtgctggagaaactgcccggcctggtgttcctctacatggagaagaaccagttggaagaggtcccctcggccctgccccggaacctggagcagctgaggctgagccagaaccacatctccagaatcccgcctggtgtcttcagcaagctggagaacctgctgctcctggatctccagcacaacaggctgagcgacggcgtcttcaagcccgacaccttccatggcctcaagaacctcatgcagctcaacctggcccacaacatcctgagaaagatgccgcccagggtccccaccgccattcaccagctctacctggacagtaacaagattgagaccatccctaacggatacttcaagagctttcccaatcttgccttcattcggcttaactacaacaagctgacagacaggggactccccaagaactcctttaatatctccaacctgcttgtgctccacctgtcccacaacaggatcagcagtgtgcccgccatcaacaacaggctggaacacctgtacctcaacaacaatagcatcgagaaaatcaacggaacccagatttgccccaacgacctagtggcgttccatgacttctcctcggacctggagaacgtgccacacctgcgctacctgcggctggatggaaactacttgaagccgcccatcccgctggacctcatgatgtgcttccgcctcctgcagtccgtggtcatctaggccctactccgccaccggatctgctctgaccgcacttgaaggctggggcccaggcacctgtgccggccattcgttttctctctctccctttctttctcccagctttgcctcccttatcccaccctcgaggcagggaaaagccatctattcttctgcagcctcaggagcgagacttcaaggactcagtttggttccacccagttgaaagacacccagtgcacacccaaactcctggccttctgtggtttccctttgctccagaaacacagatgtgtctaaagacttggtgtccccttctctctcctcccccacccgccactcctgggtacatctgggccgtggactatctgatcttggtcctggccgagcaaacagcccggaggtaaggttcagaaagtccccctggggactcctccatcttcggcagctctggctcaaagaggccgagaaacccagttctcctgggccaaggatcccttctggcaaagctgctgctccgccgcttggttccccggcaccagacatcgccctggccctgctggcccgggtatcgggaaggaggagcgagggaatgacggaggtagggtgcagggtcagggctcccgcaggggcctgcatctggccagcaggacacagggatgcgcagggcgcccccttctgttccagggtgaacatagcacacgccctcctggctgggcctcaggaggaacagccaaggagaagaatggcccaaggaactaggaagcagccatgggagaggggaagggttcaagcccgggatgggcccgcgtgacgtcgatgggtcctgcggcccccttgcccaacctcgggtttagggaggagggttcacagtgtttttgtgggggcgggggaaggaagaggcagcagccccgcccccgccatctgttctccatcagtgtgcgcggcccagccatttccaccctcgggaggcggctcctgagaaacagggaggaaggggcggagcacctggacgtctcccagaagcccctccacgtttgaaaatgcgcctcctcctcggagacagacgcatcggtgccacctagtggctggtgggagtaacagctggtcccagtcttgcgcctggccctcttcctggggtgattttcctcggtggaggaggcccgtggggtcccaacacggaagagcatgggccgtgtgcatggtgtcgctctcctctagggtctagcgggcacaaacgtccccaggctgggctcattcccatcgtgagtgagcccaggtgaggacatagtcggctcccgtttgttgtaggcccttcccaggtgccttctcagctccctcatctgtaaaccgaggaggtggataagatgctcccggccgggcgcggtggctcacgcctgtaatcccagcactttgggaggccgaggcgggcagattattgcctgagctcaggagttcgaaaccaccctgggcaacatggtgaaacccccgtctctactaaaatacaaaaaaattagccaggcatagtggcgcgcgcctataatcccagctactgggaggctgaggcgggagaatcgcttgagccggggaggcggaggttgcagtgaggcgagattgtgccactgcactccagcttgggcgacagagtgagactccgtctcaaaaaagaaaaaaaaaagatgctcctctgaggtccctccggcgctcatgttccgagtctgcagctccacactttaaatcatactcgaatgcaggacaagtcctaaatatttgccccttcccttgcagtaatttattttctgtatggactgtccctcccccagaggcttccccaccctccattgcctggcccaggtgagcagcttggcaggtctccaagtggaacccggtccagacagggctgcctcgacttcacctttccccctaacttcctccaagggatgctgccccttctcagccccctgcgtgtgtatattggtgggaggcatagaggatggatgttctagaaatgagtaagacacagtgcccacccccaagttaggatgaaaaaagttccagaggtttttaagaaattggattaagctgggtccctaacttcaagaaattcccattatgctccttctcacctttcttttttgctaattatggaaaatagggcccatttcatcatagcctccttcccccgtgctccactacaatcgccgcattctttctagctgcagctggtttcttcaaggctcctgcttaaagtccacacgttattatggccgaaagcaacctggtgcttcggcctggataagagccccttctgcatcttattcacagcttgcagcctcagcccctttgatgaggccctcaggggagaggtcattaccttgatcctgcaaacccagactcgttgagcagcaacgcaatcaccatcatcccactgcccaatctagaatatgtctgctctcctttgctctctgcagctgtaagccagaggggattcaaggtaaataggctttacaggctcccctcctccaaacacacacagaatgggctggtttctttcaagtttaaaaaaagcccccttctccatgcacaagttcattccctccatgctgtcgtcatcgacatatacaggtgtgtacgtaggtgtatgtgtgtactctgcacgtatatctcttctgtcttgaagaccctgttaactttgtgaaataacttccacatttcaacacacttcacagtacaggaaataaagtaatatgaaaaacaaaaaaaaaaaaaaaaaaaaaattgacgccgcgccaacaaatttccgttttcctactcgtttcgggccaggggttattttatgagctctccgatgttgccacgtggcgtgtgaaccgagagaaagaagatggagagatcaccctccagacgtcgtcgcctggaagaggccccaaaattgccatataagaacccaacacgggactgt

SEQ ID NO: 71131 - DNA, 3984 bp, Homo sapiens
tctggtacggccccgggagttaagggatcaccactgggagatcagatcttctagctggctctctgctgccacagctccgccgaagggagggggtggaagaggaggactaaactcagagctgagaggagaggcaggtgtgtgcaggtgcatcacctggatcatgaggtcacccctctgctggctcctcccacttctcatcttggcctcagtggcccaaggccagccaacaagacgaccaagacccgggactgggcccgggcgcagacccaggcccaggcccaggcccacacccagctttcctcagcctgatgaaccagcagagccaacagacctgcctcctcccctccctccaggccctccatctatcttccctgactgtccccgcgaatgctactgcccccctgatttcccatctgccctctactgtgatagccgcaacctgcgaaaggtccctgtcatcccgccccgcatccattacctctatctccagaacaacttcatcactgagctcccggtggagtccttccagaatgccacaggcctgcgatggattaacctggacaacaaccgaatccgcaagatagaccagagggtgctggagaaactgcccggcctggtgttcctctacatggagaagaaccagttggaagaggtcccctcggccctgccccggaacctggagcagctgaggctgagccagaaccacatctccagaatcccgcctggtgtcttcagcaagctggagaacctgctgctcctggatctccagcacaacaggctgagcgacggcgtcttcaagcccgacaccttccatggcctcaagaacctcatgcagctcaacctggcccacaacatcctgagaaagatgccgcccagggtccccaccgccattcaccagctctacctggacagtaacaagattgagaccatccctaacggatacttcaagagctttcccaatcttgccttcattcggcttaactacaacaagctgacagacaggggactccccaagaactcctttaatatctccaacctgcttgtgctccacctgtcccacaacaggatcagcagtgtgcccgccatcaacaacaggctggaacacctgtacctcaacaacaatagcatcgagaaaatcaacggaacccagatttgccccaacgacctagtggcgttccatgacttctcctcggacctggagaacgtgccacacctgcgctacctgcggctggatggaaactacttgaagccgcccatcccgctggacctcatgatgtgcttccgcctcctgcagtccgtggtcatctaggccctactccgccaccggatctgctctgaccgcacttgaaggctggggcccaggcacctgtgccggccattcgttttctctctctccctttctttctcccagctttgcctcccttatcccaccctcgaggcagggaaaagccatctattcttctgcagcctcaggagcgagacttcaaggactcagtttggttccacccagttgaaagacacccagtgcacacccaaactcctggccttctgtggtttccctttgctccagaaacacagatgtgtctaaagacttggtgtccccttctctctcctcccccacccgccactcctgggtacatctgggccgtggactatctgatcttggtcctggccgagcaaacagcccggaggtaaggttcagaaagtccccctggggactcctccatcttcggcagctctggctcaaagaggccgagaaacccagttctcctgggccaaggatcccttctggcaaagctgctgctccgccgcttggttccccggcaccagacatcgccctggccctgctggcccgggtatcgggaaggaggagcgagggaatgacggaggtagggtgcagggtcagggctcccgcaggggcctgcatctggccagcaggacacagggatgcgcagggcgcccccttctgttccagggtgaacatagcacacgccctcctggctgggcctcaggaggaacagccaaggagaagaatggcccaaggaactaggaagcagccatgggagaggggaagggttcaagcccgggatgggcccgcgtgacgtcgatgggtcctgcggcccccttgcccaacctcgggtttagggaggagggttcacagtgtttttgtgggggcgggggaaggaagaggcagcagccccgcccccgccatctgttctccatcagtgtgcgcggcccagccatttccaccctcgggaggcggctcctgagaaacagggaggaaggggcggagcacctggacgtctcccagaagcccctccacgtttgaaaatgcgcctcctcctcggagacagacgcatcggtgccacctagtggctggtgggagtaacagctggtcccagtcttgcgcctggccctcttcctggggtgattttcctcggtggaggaggcccgtggggtcccaacacggaagagcatgggccgtgtgcatggtgtcgctctcctctagggtctagcgggcacaaacgtccccaggctgggctcattcccatcgtgagtgagcccaggtgaggacatagtcggctcccgtttgttgtaggcccttcccaggtgccttctcagctccctcatctgtaaaccgaggaggtggataagatgctcccggccgggcgcggtggctcacgcctgtaatcccagcactttgggaggccgaggcgggcagattattgcctgagctcaggagttcgaaaccaccctgggcaacatggtgaaacccccgtctctactaaaatacaaaaaaattagccaggcatagtggcgcgcgcctataatcccagctactgggaggctgaggcgggagaatcgcttgagccggggaggcggaggttgcagtgaggcgagattgtgccactgcactccagcttgggcgacagagtgagactccgtctcaaaaaagaaaaaaaaaagatgctcctctgaggtccctccggcgctcatgttccgagtctgcagctccacactttaaatcatactcgaatgcaggacaagtcctaaatatttgccccttcccttgcagtaatttattttctgtatggactgtccctcccccagaggcttccccaccctccattgcctggcccaggtgagcagcttggcaggtctccaagtggaacccggtccagacagggctgcctcgacttcacctttccccctaacttcctccaagggatgctgccccttctcagccccctgcgtgtgtatattggtgggaggcatagaggatggatgttctagaaatgagtaagacacagtgcccacccccaagttaggatgaaaaaagttccagaggtttttaagaaattggattaagctgggtccctaacttcaagaaattcccattatgctccttctcacctttcttttttgctaattatggaaaatagggcccatttcatcatagcctccttcccccgtgctccactacaatcgccgcattctttctagctgcagctggtttcttcaaggctcctgcttaaagtccacacgttattatggccgaaagcaacctggtgcttcggcctggataagagccccttctgcatcttattcacagcttgcagcctcagcccctttgatgaggccctcaggggagaggtcattaccttgatcctgcaaacccagactcgttgagcagcaacgcaatcaccatcatcccactgcccaatctagaatatgtctgctctcctttgctctctgcagctgtaagccagaggggattcaaggtaaataggctttacaggctcccctcctccaaacacacacagaatgggctggtttctttcaagtttaaaaaaagcccccttctccatgcacaagttcattccctccatgctgtcgtcatcgacatatacaggtgtgtacgtaggtgtatgtgtgtactctgcacgatgaggtgatctgtgcacgatgagtgatcttcgtccg

SEQ ID NO: 71132 - DNA, 3955 bp, Homo sapiens
cgtggtggaatcgtcgtggtggttaatccaacagacctgcctcctcccctccctccaggccctccatctatcttccctgactgtccccgcgaatgctactgcccccctgatttcccatctgccctctactgtgatagccgcaacctgcgaaaggtccctgtcatcccgccccgcatccattacctctatctccagaacaacttcatcactgagctcccggtggagtccttccagaatgccacaggcctgcgatggattaacctggacaacaaccgaatccgcaagatagaccagagggtgctggagaaactgcccggcctggtgttcctctacatggagaagaaccagttggaagaggtcccctcggccctgccccggaacctggagcagctgaggctgagccagaaccacatctccagaatcccgcctggtgtcttcagcaagctggagaacctgctgctcctggatctccagcacaacaggctgagcgacggcgtcttcaagcccgacaccttccatggcctcaagaacctcatgcagctcaacctggcccacaacatcctgagaaagatgccgcccagggtccccaccgccattcaccagctctacctggacagtaacaagattgagaccatccctaacggatacttcaagagctttcccaatcttgccttcattcggcttaactacaacaagctgacagacaggggactccccaagaactcctttaatatctccaacctgcttgtgctccacctgtcccacaacaggatcagcagtgtgcccgccatcaacaacaggctggaacacctgtacctcaacaacaatagcatcgagaaaatcaacggaacccagatttgccccaacgacctagtggcgttccatgacttctcctcggacctggagaacgtgccacacctgcgctacctgcggctggatggaaactacttgaagccgcccatcccgctggacctcatgatgtgcttccgcctcctgcagtccgtggtcatctaggccctactccgccaccggatctgctctgaccgcacttgaaggctggggcccaggcacctgtgccggccattcgttttctctctctccctttctttctcccagctttgcctcccttatcccaccctcgaggcagggaaaagccatctattcttctgcagcctcaggagcgagacttcaaggactcagtttggttccacccagttgaaagacacccagtgcacacccaaactcctggccttctgtggtttccctttgctccagaaacacagatgtgtctaaagacttggtgtccccttctctctcctcccccacccgccactcctgggtacatctgggccgtggactatctgatcttggtcctggccgagcaaacagcccggaggtaaggttcagaaagtccccctggggactcctccatcttcggcagctctggctcaaagaggccgagaaacccagttctcctgggccaaggatcccttctggcaaagctgctgctccgccgcttggttccccggcaccagacatcgccctggccctgctggcccgggtatcgggaaggaggagcgagggaatgacggaggtagggtgcagggtcagggctcccgcaggggcctgcatctggccagcaggacacagggatgcgcagggcgcccccttctgttccagggtgaacatagcacacgccctcctggctgggcctcaggaggaacagccaaggagaagaatggcccaaggaactaggaagcagccatgggagaggggaagggttcaagcccgggatgggcccgcgtgacgtcgatgggtcctgcggcccccttgcccaacctcgggtttagggaggagggttcacagtgtttttgtgggggcgggggaaggaagaggcagcagccccgcccccgccatctgttctccatcagtgtgcgcggcccagccatttccaccctcgggaggcggctcctgagaaacagggaggaaggggcggagcacctggacgtctcccagaagcccctccacgtttgaaaatgcgcctcctcctcggagacagacgcatcggtgccacctagtggctggtgggagtaacagctggtcccagtcttgcgcctggccctcttcctggggtgattttcctcggtggaggaggcccgtggggtcccaacacggaagagcatgggccgtgtgcatggtgtcgctctcctctagggtctagcgggcacaaacgtccccaggctgggctcattcccatcgtgagtgagcccaggtgaggacatagtcggctcccgtttgttgtaggcccttcccaggtgccttctcagctccctcatctgtaaaccgaggaggtggataagatgctcccggccgggcgcggtggctcacgcctgtaatcccagcactttgggaggccgaggcgggcagattattgcctgagctcaggagttcgaaaccaccctgggcaacatggtgaaacccccgtctctactaaaatacaaaaaaattagccaggcatagtggcgcgcgcctataatcccagctactgggaggctgaggcgggagaatcgcttgagccggggaggcggaggttgcagtgaggcgagattgtgccactgcactccagcttgggcgacagagtgagactccgtctcaaaaaagaaaaaaaaaagatgctcctctgaggtccctccggcgctcatgttccgagtctgcagctccacactttaaatcatactcgaatgcaggacaagtcctaaatatttgccccttcccttgcagtaatttattttctgtatggactgtccctcccccagaggcttccccaccctccattgcctggcccaggtgagcagcttggcaggtctccaagtggaacccggtccagacagggctgcctcgacttcacctttccccctaacttcctccaagggatgctgccccttctcagccccctgcgtgtgtatattggtgggaggcatagaggatggatgttctagaaatgagtaagacacagtgcccacccccaagttaggatgaaaaaagttccagaggtttttaagaaattggattaagctgggtccctaacttcaagaaattcccattatgctccttctcacctttcttttttgctaattatggaaaatagggcccatttcatcatagcctccttcccccgtgctccactacaatcgccgcattctttctagctgcagctggtttcttcaaggctcctgcttaaagtccacacgttattatggccgaaagcaacctggtgcttcggcctggataagagccccttctgcatcttattcacagcttgcagcctcagcccctttgatgaggccctcaggggagaggtcattaccttgatcctgcaaacccagactcgttgagcagcaacgcaatcaccatcatcccactgcccaatctagaatatgtctgctctcctttgctctctgcagctgtaagccagaggggattcaaggtaaataggctttacaggctcccctcctccaaacacacacagaatgggctggtttctttcaagtttaaaaaaagcccccttctccatgcacaagttcattccctccatgctgtcgtcatcgacatatacaggtgtgtacgtaggtgtatgtgtgtactctgcacgtatatctcttctgtcttgaagaccctgttaactttgtgaaataacttccacatttcaacacacttcacagtacaggaaataaagtaatatgaaaaacaaaaaaaaaaaaaaaaaaaaaattgacgccgcgccaacaaatttccgttttcctactcgtttcgggccaggggttattttatgagctctccgatgttgccacgtggcgtgtgaaccgagagaaagaagatggagagatcaccctccagacgtcgtcgcctggaagaggccccaaaattgccatataagaacccaacacgggactgt

SEQ ID NO: 71133 - DNA, 2971 bp, Homo sapiens
  misc_feature (12)..(12): n is a, c, g, or t
  misc_feature (31)..(31): n is a, c, g, or t
  misc_feature (58)..(58): n is a, c, g, or t
  misc_feature (67)..(67): n is a, c, g, or t
  misc_feature (134)..(134): n is a, c, g, or t
  misc_feature (147)..(147): n is a, c, g, or t
tcatactgaagncacagctgaactgtgacanagcctatcaatactgagttacagctgnctgtgacanagcctatcagcctgtcatactggaagaaggtgggataagccgacttgctgagtcttccagcatccantacatatcatagntcgaattcggcacgagggaaaagccatctattcttctgcagcctcaggagcgagacttcaaggactcagtttggttccacccagttgaaagacacccagtgcacacccaaactcctggccttctgtggtttccctttgctccagaaacacagatgtgtctaaagacttggtgtccccttctctctcctcccccacccgccactcctgggtacatctgggccgtggactatctgatcttggtcctggccgagcaaacagcccggaggtaaggttcagaaagtccccctggggactcctccatcttcggcagctctggctcaaagaggccgagaaacccagttctcctgggccaaggatcccttctggcaaagctgctgctccgccgcttggttccccggcaccagacatcgccctggccctgctggcccgggtatcgggaaggaggagcgagggaatgacggaggtagggtgcagggtcagggctcccgcaggggcctgcatctggccagcaggacacagggatgcgcagggcgcccccttctgttccagggtgaacatagcacacgccctcctggctgggcctcaggaggaacagccaaggagaagaatggcccaaggaactaggaagcagccatgggagaggggaagggttcaagcccgggatgggcccgcgtgacgtcgatgggtcctgcggcccccttgcccaacctcgggtttagggaggagggttcacagtgtttttgtgggggcgggggaaggaagaggcagcagccccgcccccgccatctgttctccatcagtgtgcgcggcccagccatttccaccctcgggaggcggctcctgagaaacagggaggaaggggcggagcacctggacgtctcccagaagcccctccacgtttgaaaatgcgcctcctcctcggagacagacgcatcggtgccacctagtggctggtgggagtaacagctggtcccagtcttgcgcctggccctcttcctggggtgattttcctcggtggaggaggcccgtggggtcccaacacggaagagcatgggccgtgtgcatggtgtcgctctcctctagggtctagcgggcacaaacgtccccaggctgggctcattcccatcgtgagtgagcccaggtgaggacatagtcggctcccgtttgttgtaggcccttcccaggtgccttctcagctccctcatctgtaaaccgaggaggtggataagatgctcccggccgggcgcggtggctcacgcctgtaatcccagcactttgggaggccgaggcgggcagattattgcctgagctcaggagttcgaaaccaccctgggcaacatggtgaaacccccgtctctactaaaatacaaaaaaattagccaggcatagtggcgcgcgcctataatcccagctactgggaggctgaggcgggagaatcgcttgagccggggaggcggaggttgcagtgaggcgagattgtgccactgcactccagcttgggcgacagagtgagactccgtctcaaaaaagaaaaaaaaaagatgctcctctgaggtccctccggcgctcatgttccgagtctgcagctccacactttaaatcatactcgaatgcaggacaagtcctaaatatttgccccttcccttgcagtaatttattttctgtatggactgtccctcccccagaggcttccccaccctccattgcctggcccaggtgagcagcttggcaggtctccaagtggaacccggtccagacagggctgcctcgacttcacctttccccctaacttcctccaagggatgctgccccttctcagccccctgcgtgtgtatattggtgggaggcatagaggatggatgttctagaaatgagtaagacacagtgcccacccccaagttaggatgaaaaaagttccagaggtttttaagaaattggattaagctgggtccctaacttcaagaaattcccattatgctccttctcacctttcttttttgctaattatggaaaatagggcccatttcatcatagcctccttcccccgtgctccactacaatcgccgcattctttctagctgcagctggtttcttcaaggctcctgcttaaagtccacacgttattatggccgaaagcaacctggtgcttcggcctggataagagccccttctgcatcttattcacagcttgcagcctcagcccctttgatgaggccctcaggggagaggtcattaccttgatcctgcaaacccagactcgttgagcagcaacgcaatcaccatcatcccactgcccaatctagaatatgtctgctctcctttgctctctgcagctgtaagccagaggggattcaaggtaaataggctttacaggctcccctcctccaaacacacacagaatgggctggtttctttcaagtttaaaaaaagcccccttctccatgcacaagttcattccctccatgctgtcgtcatcgacatatacaggtgtgtacgtaggtgtatgtgtgtactctgcacgtatatctcttctgtcttgaagaccctgttaactttgtgaaataacttccacatttcaacacacttcacagtacaggaaataaagtaatatgaaaaacaaaaaaaaaaaaaaaaaaaaaattgacgccgcgccaacaaatttccgttttcctactcgtttcgggccaggggttattttatgagctctccgatgttgccacgtggcgtgtgaaccgagagaaagaagatggagagatcaccctccagacgtcgtcgcctggaagaggccccaaaattgccatataagaacccaacacgggactgt

SEQ ID NO: 71134 - DNA, 959 bp, Homo sapiens
ccggcagttgagatagacggttctcacttgcaagatccgatgaaaaaagttccagaggtttttaagaaattggattaagctgggtccctaacttcaagaaattcccattatgctccttctcacctttcttttttgctaattatggaaaatagggcccatttcatcatagcctccttcccccgtgctccactacaatcgccgcattctttctagctgcagctggtttcttcaaggctcctgcttaaagtccacacgttattatggccgaaagcaacctggtgcttcggcctggataagagccccttctgcatcttattcacagcttgcagcctcagcccctttgatgaggccctcaggggagaggtcattaccttgatcctgcaaacccagactcgttgagcagcaacgcaatcaccatcatcccactgcccaatctagaatatgtctgctctcctttgctctctgcagctgtaagccagaggggattcaaggtaaataggctttacaggctcccctcctccaaacacacacagaatgggctggtttctttcaagtttaaaaaaagcccccttctccatgcacaagttcattccctccatgctgtcgtcatcgacatatacaggtgtgtacgtaggtgtatgtgtgtactctgcacgtatatctcttctgtcttgaagaccctgttaactttgtgaaataacttccacatttcaacacacttcacagtacaggaaataaagtaatatgaaaaacaaaaaaaaaaaaaaaaaaaaaattgacgccgcgccaacaaatttccgttttcctactcgtttcgggccaggggttattttatgagctctccgatgttgccacgtggcgtgtgaaccgagagaaagaagatggagagatcaccctccagacgtcgtcgcctggaagaggccccaaaattgccatataagaacccaacacgggactgt

SEQ ID NO: 71135 - DNA, 8154 bp, Homo sapiens
ggggcggagccagcgcggatcgggtcccggacgcccgagcgccccgcccccgcgcgggcgatgcccagcggcgcggcgggctgcggggcccggcggggcgcgcagaggagcgggccgcggcgctgaggcggcggagcgtggccccgccatgggcttcctgcaccagctgcagctgctgctctggaagaacgtgacgctcaaacgccggagcccgtgggtcctggccttcgagatcttcatccccctggtgctgttctttatcctgctggggctgcgacagaagaagcccaccatctccgtgaaggaagtctccttctacacagcggcgcccctgacgtctgccggcatcctgcctgtcatgcaatcgctgtgcccggacggccagcgagacgagttcggcttcctgcagtacgccaactccacggtcacgcagctgcttgagcgcctggaccgcgtggtggaggaaggcaacctgtttgacccagcgcggcccagcctgggctcagagctcgaggccctacgccagcatctggaggccctcagtgcgggcccgggcacctcggggagccacctggacagatccacagtgtcttccttctctctggactcggtggccagaaacccgcaggagctctggcgtttcctgacgcaaaacttgtcgctgcccaatagcacggcccaagcactcttggccgcccgtgtggacccgcccgaggtctaccacctgctctttggtccctcatctgccctggattcacagtctggcctccacaagggtcaggagccctggagccgcctagggggcaatcccctgttccggatggaggagctgctgctggctcctgccctcctggagcagctcacctgcacgccgggctcgggggagctgggccggatcctcactgtgcctgagagtcagaagggagccctgcagggctaccgggatgctgtctgcagtgggcaggctgctgcgcgtgccaggcgcttctctgggctgtctgctgagctccggaaccagctggacgtggccaaggtctcccagcagctgggcctggatgcccccaacggctcggactcctcgccacaggcgccacccccacggaggctgcaggcgcttctgggggacctgctggatgcccagaaggttctgcaggatgtggatgtcctgtcggccctggccctgctactgccccagggtgcctgcactggccggacccccggacccccagccagtggtgcgggtggggcggccaatggcactggggcaggggcagtcatgggccccaacgccaccgctgaggagggcgcaccctctgctgcagcactggccaccccggacacgctgcagggccagtgctcagccttcgtacagctctgggccggcctgcagcccatcttgtgtggcaacaaccgcaccattgaacccgaggcgctgcggcggggcaacatgagctccctgggcttcacgagcaaggagcagcggaacctgggcctcctcgtgcacctcatgaccagcaaccccaaaatcctgtacgcgcctgcgggctctgaggtcgaccgcgtcatcctcaaggccaacgagacttttgcttttgtgggcaacgtgactcactatgcccaggtctggctcaacatctcggcggagatccgcagcttcctggagcagggcaggctgcagcaacacctgcgctggctgcagcagtatgtagcagagctgcggctgcaccccgaggcactgaacctgtcactggatgagctgccgccggccctgagacaggacaacttctcgctgcccagtggcatggccctcctgcagcagctggataccattgacaacgcggcctgcggctggatccagttcatgtccaaggtgagcgtggacatcttcaagggcttccccgacgaggagagcattgtcaactacaccctcaaccaggcctaccaggacaacgtcactgtttttgccagtgtgatcttccagacccggaaggacggctcgctcccgcctcacgtgcactacaagatccgccagaactccagcttcaccgagaaaaccaacgagatccgccgcgcctactggcggcctgggcccaatactggcggccgcttctacttcctctacggcttcgtctggatccaggacatgatggagcgcgccatcatcgacacttttgtggggcacgacgtggtggagccaggcagctacgtgcagatgttcccctacccctgctacacacgcgatgacttcctgtttgtcattgagcacatgatgccgctgtgcatggtgatctcctgggtctactccgtggccatgaccatccagcacatcgtggcggagaaggagcaccggctcaaggaggtgatgaagaccatgggcctgaacaacgcggtgcactgggtggcctggttcatcaccggctttgtgcagctgtccatctccgtgacagcactcaccgccatcctgaagtacggccaggtgcttatgcacagccacgtggtcatcatctggctcttcctggcagtctacgcggtggccaccatcatgttctgcttcctggtgtctgtgctgtactccaaggccaagctggcctcggcctgcggtggcatcatctacttcctgagctacgtgccctacatgtacgtggcgatccgagaggaggtggcgcatgataagatcacggccttcgagaagtgcatcgcgtccctcatgtccacgacggcctttggtctgggctctaagtacttcgcgctgtatgaggtggccggcgtgggcatccagtggcacaccttcagccagtccccggtggagggggacgacttcaacttgctcctggctgtcaccatgctgatggtggacgccgtggtctatggcatcctcacgtggtacattgaggctgtgcacccaggcatgtacgggctgccccggccctggtacttcccactgcagaagtcctactggctgggcagtgggcggacagaagcctgggagtggagctggccgtgggcacgcaccccccgcctcagtgtcatggaggaggaccaggcctgtgccatggagagccggcgctttgaggagacccgtggcatggaggaggagcccacccacctgcctctggttgtctgcgtggacaaactcaccaaggtctacaaggacgacaagaagctggccctgaacaagctgagcctgaacctctacgagaaccaggtggtctccttcttgggccacaacggggcgggcaagaccaccaccatgtccatcctgaccggcctgttccctccaacgtcgggttccgccaccatctacgggcacgacatccgcacggagatggatgagatccgcaagaacctgggcatgtgcccgcagcacaatgtgctctttgaccggctcacggtggaggaacacctctggttctactcacggctcaagagcatggctcaggaggagatccgcagagagatggacaagatgatcgaggacctggagctctccaacaaacggcactcactggtgcagacattgtcgggtggcatgaagcgcaagctgtccgtggccatcgccttcgtgggcggctctcgcgccatcatcctggacgagcccacggcgggcgtggacccctacgcgcgccgcgccatctgggacctcatcctgaagtacaagccaggccgcaccatccttctgtccacccaccacatggatgaggctgacctgcttggggaccgcattgccatcatctcccatgggaagctcaagtgctgcggctccccgctcttcctcaagggcacctatggcgacgggtaccgcctcacgctggtcaagcggcccgccgagccggggggcccccaagagccagggctggcatccagccccccaggtcgggccccgctgagcagctgctccgagctccaggtgtcccagttcatccgcaagcatgtggcctcctgcctgctggtctcagacacaagcacggagctctcctacatcctgcccagcgaggccgccaagaagggggctttcgagcgcctcttccagcacctggagcgcagcctggatgcactgcacctcagcagcttcgggctgatggacacgaccctggaggaagtgttcctcaaggtgtcggaggaggatcagtcgctggagaacagtgaggccgatgtgaaggagtccaggaaggatgtgctccctggggcggagggcccggcgtctggggagggtcacgctggcaatctggcccggtgctcggagctgacccagtcgcaggcatcgctgcagtcggcgtcatctgtgggctctgcccgtggcgacgagggagctggctacaccgacgtctatggcgactaccgccccctctttgataacccacaggacccagacaatgtcagcctgcaagaggtggaggcagaggccctgtcgagggtcggccagggcagccgcaagctggacggcgggtggctgaaggtgcgccagttccacgggctgctggtcaaacgcttccactgcgcccgccgcaactccaaggcactcttctcccagatcttgctgccagccttcttcgtctgcgtggccatgaccgtggccctgtccgtcccggagattggtgatctgcccccgctggtcctgtcaccttcccagtaccacaactacacccagccccgtggcaatttcatcccctacgccaacgaggagcgccgcgagtaccggctgcggctatcgcccgacgccagcccccagcagctcgtgagcacgttccggctgccgtcgggggtgggtgccacctgcgtgctcaagtctcccgccaacggctcgctggggcccacgttgaacctgagcagcggggagtcgcgcctgctggcggctcggttcttcgacagcatgtgtctggagtccttcacacaggggctgccactgtccaatttcgtgccacccccaccctcgcccgccccatctgactcgccagcgtccccggatgaggacctgcaggcctggaacgtctccctgccgcccaccgctgggccagaaatgtggacgtcggcaccctccctgccgcgcctggtacgggagcccgtccgctgcacctgctctgcgcagggcaccggcttctcctgccccagcagtgtgggcgggcacccgccccagatgcgggtggtcacaggcgacatcctgaccgacatcaccggccacaatgtctctgagtacctgctcttcacctccgaccgcttccgactgcaccggtatggggccatcacctttggaaacgtcctgaagtccatcccagcctcatttggcaccagggccccacccatggtgcggaagatcgcggtgcgcagggctgcccaggttttctacaacaacaagggctatcacagcatgcccacctacctcaacagcctcaacaacgccatcctgcgtgccaacctgcccaagagcaagggcaacccggcggcttacggcatcaccgtcaccaaccaccccatgaataagaccagcgccagcctctccctggattacctgctgcagggcacggatgtcgtcatcgccatcttcatcatcgtggccatgtccttcgtgccggccagcttcgttgtcttcctcgtggccgagaagtccaccaaggccaagcatctgcagtttgtcagcggctgcaaccccatcatctactggctggcgaactacgtgtgggacatgctcaactacctggtccccgctacctgctgtgtcatcatcctgtttgtgttcgacctgccggcctacacgtcgcccaccaacttccctgccgtcctctccctcttcctgctctatgggtggtccatcacgcccatcatgtacccggcctccttctggttcgaggtccccagctccgcctacgtgttcctcattgtcatcaatctcttcatcggcatcaccgccaccgtggccaccttcctgctacagctcttcgagcacgacaaggacctgaaggttgtcaacagttacctgaaaagctgcttcctcattttccccaactacaacctgggccacgggctcatggagatggcctacaacgagtacatcaacgagtactacgccaagattggccagtttgacaagatgaagtccccgttcgagtgggacattgtcacccgcggactggtggccatggcggttgagggcgtcgtgggcttcctcctgaccatcatgtgccagtacaacttcctgcggcggccacagcgcatgcctgtgtctaccaagcctgtggaggatgatgtggacgtggccagtgagcggcagcgagtgctccggggagacgccgacaatgacatggtcaagattgagaacctgaccaaggtctacaagtcccggaagattggccgtatcctggccgttgaccgcctgtgcctgggtgtgcgtcctggcgagtgcttcgggctcctgggcgtcaacggtgcgggcaagaccagcaccttcaagatgctgaccggcgacgagagcacgacggggggcgaggccttcgtcaatggacacagcgtgctgaaggagctgctccaggtgcagcagagcctcggctactgcccgcagtgtgacgcgctgttcgacgagctcacggcccgggagcacctgcagctgtacacgcggctgcgtgggatctcctggaaggacgaggcccgggtggtgaagtgggctctggagaagctggagctgaccaagtacgcagacaagccggctggcacctacagcggcggcaacaagcggaagctctccacggccatcgccctcattgggtacccagccttcatcttcctggacgagcccaccacaggcatggaccccaaggcccggcgcttcctctggaacctcatcctcgacctcatcaagacagggcgttcagtggtgctgacatcacacagcatggaggagtgcgaggcgctgtgcacgcggctggccatcatggtgaacggtcgcctgcggtgcctgggcagcatccagcacctgaagaaccggtttggagatggctacatgatcacggtgcggaccaagagcagccagagtgtgaaggacgtggtgcggttcttcaaccgcaacttcccggaagccatgctcaaggagcggcaccacacaaaggtgcagtaccagctcaagtcggagcacatctcgctggcccaggtgttcagcaagatggagcaggtgtctggcgtgctgggcatcgaggactactcggtcagccagaccacactggacaatgtgttcgtgaactttgccaagaagcagagtgacaacctggagcagcaggagacggagccgccatccgcactgcagtcccctctcggctgcttgctcagcctgctccggccccggtctgcccccacggagctccgggcacttgtggcagacgagcccgaggacctggacacggaggacgagggcctcatcagcttcgaggaggagcgggcccagctgtccttcaacacggacacgctctgctgaccacccagagctgggccagggaggacacgctccactgaccacccagagctgggccagggactcaacaatggggacagaagtcccccagtgcctgccagggcctggagtggaggttcaggaccaaggggcttctggtcctccagcccctgtactcggccatgccctgcggtcactgcggttgccgcccctaattgtgccaaaggctgacccggcccgggctgcgtacacccttgccctgctttgccttaaagcctcggggtctgcccggcccctcgcccctgcctggcactgctcaccgcccaaggcgacgccggctggaccaggcactgctggcctttctcctgcccggcctcggaaccagcttttctctcttacgatgaaggctgatgccgagagcgggctgtgggcggagctgggtcagtcccgtatttattttgctttgagaagaggctcctctggccctgctctcctgcagggaggtggctgtcccgcgggaagccatcagcttgggccagctggcaggtggcaggaatggagaagctgaccctgctggccaggcaaggggccagaccccccccaacccccagctgccatcgctctcccacccagcttggccccctgcccgcccacctccctgggagccgggcctgtacatagcgcacagatgtttgttttaaataaataaacaaaatgtc

SEQ ID NO: 71136 - DNA, 8127 bp, Homo sapiens
aaggctggtaccggtctgggatttaaggatctgatgcccagcggcgcggcgggctgcggggcccggcggggcgcgcagaggagcgggccgcggcgctgaggcggcggagcgtggccccgccatgggcttcctgcaccagctgcagctgctgctctggaagaacgtgacgctcaaacgccggagcccgtgggtcctggccttcgagatcttcatccccctggtgctgttctttatcctgctggggctgcgacagaagaagcccaccatctccgtgaaggaagtctccttctacacagcggcgcccctgacgtctgccggcatcctgcctgtcatgcaatcgctgtgcccggacggccagcgagacgagttcggcttcctgcagtacgccaactccacggtcacgcagctgcttgagcgcctggaccgcgtggtggaggaaggcaacctgtttgacccagcgcggcccagcctgggctcagagctcgaggccctacgccagcatctggaggccctcagtgcgggcccgggcacctcggggagccacctggacagatccacagtgtcttccttctctctggactcggtggccagaaacccgcaggagctctggcgtttcctgacgcaaaacttgtcgctgcccaatagcacggcccaagcactcttggccgcccgtgtggacccgcccgaggtctaccacctgctctttggtccctcatctgccctggattcacagtctggcctccacaagggtcaggagccctggagccgcctagggggcaatcccctgttccggatggaggagctgctgctggctcctgccctcctggagcagctcacctgcacgccgggctcgggggagctgggccggatcctcactgtgcctgagagtcagaagggagccctgcagggctaccgggatgctgtctgcagtgggcaggctgctgcgcgtgccaggcgcttctctgggctgtctgctgagctccggaaccagctggacgtggccaaggtctcccagcagctgggcctggatgcccccaacggctcggactcctcgccacaggcgccacccccacggaggctgcaggcgcttctgggggacctgctggatgcccagaaggttctgcaggatgtggatgtcctgtcggccctggccctgctactgccccagggtgcctgcactggccggacccccggacccccagccagtggtgcgggtggggcggccaatggcactggggcaggggcagtcatgggccccaacgccaccgctgaggagggcgcaccctctgctgcagcactggccaccccggacacgctgcagggccagtgctcagccttcgtacagctctgggccggcctgcagcccatcttgtgtggcaacaaccgcaccattgaacccgaggcgctgcggcggggcaacatgagctccctgggcttcacgagcaaggagcagcggaacctgggcctcctcgtgcacctcatgaccagcaaccccaaaatcctgtacgcgcctgcgggctctgaggtcgaccgcgtcatcctcaaggccaacgagacttttgcttttgtgggcaacgtgactcactatgcccaggtctggctcaacatctcggcggagatccgcagcttcctggagcagggcaggctgcagcaacacctgcgctggctgcagcagtatgtagcagagctgcggctgcaccccgaggcactgaacctgtcactggatgagctgccgccggccctgagacaggacaacttctcgctgcccagtggcatggccctcctgcagcagctggataccattgacaacgcggcctgcggctggatccagttcatgtccaaggtgagcgtggacatcttcaagggcttccccgacgaggagagcattgtcaactacaccctcaaccaggcctaccaggacaacgtcactgtttttgccagtgtgatcttccagacccggaaggacggctcgctcccgcctcacgtgcactacaagatccgccagaactccagcttcaccgagaaaaccaacgagatccgccgcgcctactggcggcctgggcccaatactggcggccgcttctacttcctctacggcttcgtctggatccaggacatgatggagcgcgccatcatcgacacttttgtggggcacgacgtggtggagccaggcagctacgtgcagatgttcccctacccctgctacacacgcgatgacttcctgtttgtcattgagcacatgatgccgctgtgcatggtgatctcctgggtctactccgtggccatgaccatccagcacatcgtggcggagaaggagcaccggctcaaggaggtgatgaagaccatgggcctgaacaacgcggtgcactgggtggcctggttcatcaccggctttgtgcagctgtccatctccgtgacagcactcaccgccatcctgaagtacggccaggtgcttatgcacagccacgtggtcatcatctggctcttcctggcagtctacgcggtggccaccatcatgttctgcttcctggtgtctgtgctgtactccaaggccaagctggcctcggcctgcggtggcatcatctacttcctgagctacgtgccctacatgtacgtggcgatccgagaggaggtggcgcatgataagatcacggccttcgagaagtgcatcgcgtccctcatgtccacgacggcctttggtctgggctctaagtacttcgcgctgtatgaggtggccggcgtgggcatccagtggcacaccttcagccagtccccggtggagggggacgacttcaacttgctcctggctgtcaccatgctgatggtggacgccgtggtctatggcatcctcacgtggtacattgaggctgtgcacccaggcatgtacgggctgccccggccctggtacttcccactgcagaagtcctactggctgggcagtgggcggacagaagcctgggagtggagctggccgtgggcacgcaccccccgcctcagtgtcatggaggaggaccaggcctgtgccatggagagccggcgctttgaggagacccgtggcatggaggaggagcccacccacctgcctctggttgtctgcgtggacaaactcaccaaggtctacaaggacgacaagaagctggccctgaacaagctgagcctgaacctctacgagaaccaggtggtctccttcttgggccacaacggggcgggcaagaccaccaccatgtccatcctgaccggcctgttccctccaacgtcgggttccgccaccatctacgggcacgacatccgcacggagatggatgagatccgcaagaacctgggcatgtgcccgcagcacaatgtgctctttgaccggctcacggtggaggaacacctctggttctactcacggctcaagagcatggctcaggaggagatccgcagagagatggacaagatgatcgaggacctggagctctccaacaaacggcactcactggtgcagacattgtcgggtggcatgaagcgcaagctgtccgtggccatcgccttcgtgggcggctctcgcgccatcatcctggacgagcccacggcgggcgtggacccctacgcgcgccgcgccatctgggacctcatcctgaagtacaagccaggccgcaccatccttctgtccacccaccacatggatgaggctgacctgcttggggaccgcattgccatcatctcccatgggaagctcaagtgctgcggctccccgctcttcctcaagggcacctatggcgacgggtaccgcctcacgctggtcaagcggcccgccgagccggggggcccccaagagccagggctggcatccagccccccaggtcgggccccgctgagcagctgctccgagctccaggtgtcccagttcatccgcaagcatgtggcctcctgcctgctggtctcagacacaagcacggagctctcctacatcctgcccagcgaggccgccaagaagggggctttcgagcgcctcttccagcacctggagcgcagcctggatgcactgcacctcagcagcttcgggctgatggacacgaccctggaggaagtgttcctcaaggtgtcggaggaggatcagtcgctggagaacagtgaggccgatgtgaaggagtccaggaaggatgtgctccctggggcggagggcccggcgtctggggagggtcacgctggcaatctggcccggtgctcggagctgacccagtcgcaggcatcgctgcagtcggcgtcatctgtgggctctgcccgtggcgacgagggagctggctacaccgacgtctatggcgactaccgccccctctttgataacccacaggacccagacaatgtcagcctgcaagaggtggaggcagaggccctgtcgagggtcggccagggcagccgcaagctggacggcgggtggctgaaggtgcgccagttccacgggctgctggtcaaacgcttccactgcgcccgccgcaactccaaggcactcttctcccagatcttgctgccagccttcttcgtctgcgtggccatgaccgtggccctgtccgtcccggagattggtgatctgcccccgctggtcctgtcaccttcccagtaccacaactacacccagccccgtggcaatttcatcccctacgccaacgaggagcgccgcgagtaccggctgcggctatcgcccgacgccagcccccagcagctcgtgagcacgttccggctgccgtcgggggtgggtgccacctgcgtgctcaagtctcccgccaacggctcgctggggcccacgttgaacctgagcagcggggagtcgcgcctgctggcggctcggttcttcgacagcatgtgtctggagtccttcacacaggggctgccactgtccaatttcgtgccacccccaccctcgcccgccccatctgactcgccagcgtccccggatgaggacctgcaggcctggaacgtctccctgccgcccaccgctgggccagaaatgtggacgtcggcaccctccctgccgcgcctggtacgggagcccgtccgctgcacctgctctgcgcagggcaccggcttctcctgccccagcagtgtgggcgggcacccgccccagatgcgggtggtcacaggcgacatcctgaccgacatcaccggccacaatgtctctgagtacctgctcttcacctccgaccgcttccgactgcaccggtatggggccatcacctttggaaacgtcctgaagtccatcccagcctcatttggcaccagggccccacccatggtgcggaagatcgcggtgcgcagggctgcccaggttttctacaacaacaagggctatcacagcatgcccacctacctcaacagcctcaacaacgccatcctgcgtgccaacctgcccaagagcaagggcaacccggcggcttacggcatcaccgtcaccaaccaccccatgaataagaccagcgccagcctctccctggattacctgctgcagggcacggatgtcgtcatcgccatcttcatcatcgtggccatgtccttcgtgccggccagcttcgttgtcttcctcgtggccgagaagtccaccaaggccaagcatctgcagtttgtcagcggctgcaaccccatcatctactggctggcgaactacgtgtgggacatgctcaactacctggtccccgctacctgctgtgtcatcatcctgtttgtgttcgacctgccggcctacacgtcgcccaccaacttccctgccgtcctctccctcttcctgctctatgggtggtccatcacgcccatcatgtacccggcctccttctggttcgaggtccccagctccgcctacgtgttcctcattgtcatcaatctcttcatcggcatcaccgccaccgtggccaccttcctgctacagctcttcgagcacgacaaggacctgaaggttgtcaacagttacctgaaaagctgcttcctcattttccccaactacaacctgggccacgggctcatggagatggcctacaacgagtacatcaacgagtactacgccaagattggccagtttgacaagatgaagtccccgttcgagtgggacattgtcacccgcggactggtggccatggcggttgagggcgtcgtgggcttcctcctgaccatcatgtgccagtacaacttcctgcggcggccacagcgcatgcctgtgtctaccaagcctgtggaggatgatgtggacgtggccagtgagcggcagcgagtgctccggggagacgccgacaatgacatggtcaagattgagaacctgaccaaggtctacaagtcccggaagattggccgtatcctggccgttgaccgcctgtgcctgggtgtgcgtcctggcgagtgcttcgggctcctgggcgtcaacggtgcgggcaagaccagcaccttcaagatgctgaccggcgacgagagcacgacggggggcgaggccttcgtcaatggacacagcgtgctgaaggagctgctccaggtgcagcagagcctcggctactgcccgcagtgtgacgcgctgttcgacgagctcacggcccgggagcacctgcagctgtacacgcggctgcgtgggatctcctggaaggacgaggcccgggtggtgaagtgggctctggagaagctggagctgaccaagtacgcagacaagccggctggcacctacagcggcggcaacaagcggaagctctccacggccatcgccctcattgggtacccagccttcatcttcctggacgagcccaccacaggcatggaccccaaggcccggcgcttcctctggaacctcatcctcgacctcatcaagacagggcgttcagtggtgctgacatcacacagcatggaggagtgcgaggcgctgtgcacgcggctggccatcatggtgaacggtcgcctgcggtgcctgggcagcatccagcacctgaagaaccggtttggagatggctacatgatcacggtgcggaccaagagcagccagagtgtgaaggacgtggtgcggttcttcaaccgcaacttcccggaagccatgctcaaggagcggcaccacacaaaggtgcagtaccagctcaagtcggagcacatctcgctggcccaggtgttcagcaagatggagcaggtgtctggcgtgctgggcatcgaggactactcggtcagccagaccacactggacaatgtgttcgtgaactttgccaagaagcagagtgacaacctggagcagcaggagacggagccgccatccgcactgcagtcccctctcggctgcttgctcagcctgctccggccccggtctgcccccacggagctccgggcacttgtggcagacgagcccgaggacctggacacggaggacgagggcctcatcagcttcgaggaggagcgggcccagctgtccttcaacacggacacgctctgctgaccacccagagctgggccagggaggacacgctccactgaccacccagagctgggccagggactcaacaatggggacagaagtcccccagtgcctgccagggcctggagtggaggttcaggaccaaggggcttctggtcctccagcccctgtactcggccatgccctgcggtcactgcggttgccgcccctaattgtgccaaaggctgacccggcccgggctgcgtacacccttgccctgctttgccttaaagcctcggggtctgcccggcccctcgcccctgcctggcactgctcaccgcccaaggcgacgccggctggaccaggcactgctggcctttctcctgcccggcctcggaaccagcttttctctcttacgatgaaggctgatgccgagagcgggctgtgggcggagctgggtcagtcccgtatttattttgctttgagaagaggctcctctggccctgctctcctgcagggaggtggctgtcccgcgggaagccatcagcttgggccagctggcaggtggcaggaatggagaagctgaccctgctggccaggcaaggggccagaccccccccaacccccagctgccatcgctctcccacccagcttggccccctgcccgcccacctccctgggagccgggcctgtacatagcgcacagatgtttgttttaaataaataaacaaaatgtc

SEQ ID NO: 71137 - DNA, 8319 bp, Homo sapiens
ggggcggagccagcgcggatcgggtcccggacgcccgagcgccccgcccccgcgcgggcgatgcccagcggcgcggcgggctgcggggcccggcggggcgcgcagaggagcgggccgcggcgctgaggcggcggagcgtggccccgccatgggcttcctgcaccagctgcagctgctgctctggaagaacgtgacgctcaaacgccggagcccgtgggtcctggccttcgagatcttcatccccctggtgctgttctttatcctgctggggctgcgacagaagaagcccaccatctccgtgaaggaagtctccttctacacagcggcgcccctgacgtctgccggcatcctgcctgtcatgcaatcgctgtgcccggacggccagcgagacgagttcggcttcctgcagtacgccaactccacggtcacgcagctgcttgagcgcctggaccgcgtggtggaggaaggcaacctgtttgacccagcgcggcccagcctgggctcagagctcgaggccctacgccagcatctggaggccctcagtgcgggcccgggcacctcggggagccacctggacagatccacagtgtcttccttctctctggactcggtggccagaaacccgcaggagctctggcgtttcctgacgcaaaacttgtcgctgcccaatagcacggcccaagcactcttggccgcccgtgtggacccgcccgaggtctaccacctgctctttggtccctcatctgccctggattcacagtctggcctccacaagggtcaggagccctggagccgcctagggggcaatcccctgttccggatggaggagctgctgctggctcctgccctcctggagcagctcacctgcacgccgggctcgggggagctgggccggatcctcactgtgcctgagagtcagaagggagccctgcagggctaccgggatgctgtctgcagtgggcaggctgctgcgcgtgccaggcgcttctctgggctgtctgctgagctccggaaccagctggacgtggccaaggtctcccagcagctgggcctggatgcccccaacggctcggactcctcgccacaggcgccacccccacggaggctgcaggcgcttctgggggacctgctggatgcccagaaggttctgcaggatgtggatgtcctgtcggccctggccctgctactgccccagggtgcctgcactggccggacccccggacccccagccagtggtgcgggtggggcggccaatggcactggggcaggggcagtcatgggccccaacgccaccgctgaggagggcgcaccctctgctgcagcactggccaccccggacacgctgcagggccagtgctcagccttcgtacagctctgggccggcctgcagcccatcttgtgtggcaacaaccgcaccattgaacccgaggcgctgcggcggggcaacatgagctccctgggcttcacgagcaaggagcagcggaacctgggcctcctcgtgcacctcatgaccagcaaccccaaaatcctgtacgcgcctgcgggctctgaggtcgaccgcgtcatcctcaaggccaacgagacttttgcttttgtgggcaacgtgactcactatgcccaggtctggctcaacatctcggcggagatccgcagcttcctggagcagggcaggctgcagcaacacctgcgctggctgcagcagtatgtagcagagctgcggctgcaccccgaggcactgaacctgtcactggatgagctgccgccggccctgagacaggacaacttctcgctgcccagtggcatggccctcctgcagcagctggataccattgacaacgcggcctgcggctggatccagttcatgtccaaggtgagcgtggacatcttcaagggcttccccgacgaggagagcattgtcaactacaccctcaaccaggcctaccaggacaacgtcactgtttttgccagtgtgatcttccagacccggaaggacggctcgctcccgcctcacgtgcactacaagatccgccagaactccagcttcaccgagaaaaccaacgagatccgccgcgcctactggcggcctgggcccaatactggcggccgcttctacttcctctacggcttcgtctggatccaggacatgatggagcgcgccatcatcgacacttttgtggggcacgacgtggtggagccaggcagctacgtgcagatgttcccctacccctgctacacacgcgatgagtgagtgctgggcgcccggggctggggctggggctggggctgagtggcgcctgagcgcggcctccccgcagcttcctgtttgtcattgagcacatgatgccgctgtgcatggtgatctcctgggtctactccgtggccatgaccatccagcacatcgtggcggagaaggagcaccggctcaaggaggtgcgcgggccgggactctccctggaggcgcgggctggcagggaggggcggcgtcctccctggggcctgccccaagcccctggcccacccgcaggtgatgaagaccatgggcctgaacaacgcggtgcactgggtggcctggttcatcaccggctttgtgcagctgtccatctccgtgacagcactcaccgccatcctgaagtacggccaggtgcttatgcacagccacgtggtcatcatctggctcttcctggcagtctacgcggtggccaccatcatgttctgcttcctggtgtctgtgctgtactccaaggccaagctggcctcggcctgcggtggcatcatctacttcctgagctacgtgccctacatgtacgtggcgatccgagaggaggtggcgcatgataagatcacggccttcgagaagtgcatcgcgtccctcatgtccacgacggcctttggtctgggctctaagtacttcgcgctgtatgaggtggccggcgtgggcatccagtggcacaccttcagccagtccccggtggagggggacgacttcaacttgctcctggctgtcaccatgctgatggtggacgccgtggtctatggcatcctcacgtggtacattgaggctgtgcacccaggcatgtacgggctgccccggccctggtacttcccactgcagaagtcctactggctgggcagtgggcggacagaagcctgggagtggagctggccgtgggcacgcaccccccgcctcagtgtcatggaggaggaccaggcctgtgccatggagagccggcgctttgaggagacccgtggcatggaggaggagcccacccacctgcctctggttgtctgcgtggacaaactcaccaaggtctacaaggacgacaagaagctggccctgaacaagctgagcctgaacctctacgagaaccaggtggtctccttcttgggccacaacggggcgggcaagaccaccaccatgtccatcctgaccggcctgttccctccaacgtcgggttccgccaccatctacgggcacgacatccgcacggagatggatgagatccgcaagaacctgggcatgtgcccgcagcacaatgtgctctttgaccggctcacggtggaggaacacctctggttctactcacggctcaagagcatggctcaggaggagatccgcagagagatggacaagatgatcgaggacctggagctctccaacaaacggcactcactggtgcagacattgtcgggtggcatgaagcgcaagctgtccgtggccatcgccttcgtgggcggctctcgcgccatcatcctggacgagcccacggcgggcgtggacccctacgcgcgccgcgccatctgggacctcatcctgaagtacaagccaggccgcaccatccttctgtccacccaccacatggatgaggctgacctgcttggggaccgcattgccatcatctcccatgggaagctcaagtgctgcggctccccgctcttcctcaagggcacctatggcgacgggtaccgcctcacgctggtcaagcggcccgccgagccggggggcccccaagagccagggctggcatccagccccccaggtcgggccccgctgagcagctgctccgagctccaggtgtcccagttcatccgcaagcatgtggcctcctgcctgctggtctcagacacaagcacggagctctcctacatcctgcccagcgaggccgccaagaagggggctttcgagcgcctcttccagcacctggagcgcagcctggatgcactgcacctcagcagcttcgggctgatggacacgaccctggaggaagtgttcctcaaggtgtcggaggaggatcagtcgctggagaacagtgaggccgatgtgaaggagtccaggaaggatgtgctccctggggcggagggcccggcgtctggggagggtcacgctggcaatctggcccggtgctcggagctgacccagtcgcaggcatcgctgcagtcggcgtcatctgtgggctctgcccgtggcgacgagggagctggctacaccgacgtctatggcgactaccgccccctctttgataacccacaggacccagacaatgtcagcctgcaagaggtggaggcagaggccctgtcgagggtcggccagggcagccgcaagctggacggcgggtggctgaaggtgcgccagttccacgggctgctggtcaaacgcttccactgcgcccgccgcaactccaaggcactcttctcccagatcttgctgccagccttcttcgtctgcgtggccatgaccgtggccctgtccgtcccggagattggtgatctgcccccgctggtcctgtcaccttcccagtaccacaactacacccagccccgtggcaatttcatcccctacgccaacgaggagcgccgcgagtaccggctgcggctatcgcccgacgccagcccccagcagctcgtgagcacgttccggctgccgtcgggggtgggtgccacctgcgtgctcaagtctcccgccaacggctcgctggggcccacgttgaacctgagcagcggggagtcgcgcctgctggcggctcggttcttcgacagcatgtgtctggagtccttcacacaggggctgccactgtccaatttcgtgccacccccaccctcgcccgccccatctgactcgccagcgtccccggatgaggacctgcaggcctggaacgtctccctgccgcccaccgctgggccagaaatgtggacgtcggcaccctccctgccgcgcctggtacgggagcccgtccgctgcacctgctctgcgcagggcaccggcttctcctgccccagcagtgtgggcgggcacccgccccagatgcgggtggtcacaggcgacatcctgaccgacatcaccggccacaatgtctctgagtacctgctcttcacctccgaccgcttccgactgcaccggtatggggccatcacctttggaaacgtcctgaagtccatcccagcctcatttggcaccagggccccacccatggtgcggaagatcgcggtgcgcagggctgcccaggttttctacaacaacaagggctatcacagcatgcccacctacctcaacagcctcaacaacgccatcctgcgtgccaacctgcccaagagcaagggcaacccggcggcttacggcatcaccgtcaccaaccaccccatgaataagaccagcgccagcctctccctggattacctgctgcagggcacggatgtcgtcatcgccatcttcatcatcgtggccatgtccttcgtgccggccagcttcgttgtcttcctcgtggccgagaagtccaccaaggccaagcatctgcagtttgtcagcggctgcaaccccatcatctactggctggcgaactacgtgtgggacatgctcaactacctggtccccgctacctgctgtgtcatcatcctgtttgtgttcgacctgccggcctacacgtcgcccaccaacttccctgccgtcctctccctcttcctgctctatgggtggtccatcacgcccatcatgtacccggcctccttctggttcgaggtccccagctccgcctacgtgttcctcattgtcatcaatctcttcatcggcatcaccgccaccgtggccaccttcctgctacagctcttcgagcacgacaaggacctgaaggttgtcaacagttacctgaaaagctgcttcctcattttccccaactacaacctgggccacgggctcatggagatggcctacaacgagtacatcaacgagtactacgccaagattggccagtttgacaagatgaagtccccgttcgagtgggacattgtcacccgcggactggtggccatggcggttgagggcgtcgtgggcttcctcctgaccatcatgtgccagtacaacttcctgcggcggccacagcgcatgcctgtgtctaccaagcctgtggaggatgatgtggacgtggccagtgagcggcagcgagtgctccggggagacgccgacaatgacatggtcaagattgagaacctgaccaaggtctacaagtcccggaagattggccgtatcctggccgttgaccgcctgtgcctgggtgtgcgtcctggcgagtgcttcgggctcctgggcgtcaacggtgcgggcaagaccagcaccttcaagatgctgaccggcgacgagagcacgacggggggcgaggccttcgtcaatggacacagcgtgctgaaggagctgctccaggtgcagcagagcctcggctactgcccgcagtgtgacgcgctgttcgacgagctcacggcccgggagcacctgcagctgtacacgcggctgcgtgggatctcctggaaggacgaggcccgggtggtgaagtgggctctggagaagctggagctgaccaagtacgcagacaagccggctggcacctacagcggcggcaacaagcggaagctctccacggccatcgccctcattgggtacccagccttcatcttcctggacgagcccaccacaggcatggaccccaaggcccggcgcttcctctggaacctcatcctcgacctcatcaagacagggcgttcagtggtgctgacatcacacagcatggaggagtgcgaggcgctgtgcacgcggctggccatcatggtgaacggtcgcctgcggtgcctgggcagcatccagcacctgaagaaccggtttggagatggctacatgatcacggtgcggaccaagagcagccagagtgtgaaggacgtggtgcggttcttcaaccgcaacttcccggaagccatgctcaaggagcggcaccacacaaaggtgcagtaccagctcaagtcggagcacatctcgctggcccaggtgttcagcaagatggagcaggtgtctggcgtgctgggcatcgaggactactcggtcagccagaccacactggacaatgtgttcgtgaactttgccaagaagcagagtgacaacctggagcagcaggagacggagccgccatccgcactgcagtcccctctcggctgcttgctcagcctgctccggccccggtctgcccccacggagctccgggcacttgtggcagacgagcccgaggacctggacacggaggacgagggcctcatcagcttcgaggaggagcgggcccagctgtccttcaacacggacacgctctgctgaccacccagagctgggccagggaggacacgctccactgaccacccagagctgggccagggactcaacaatggggacagaagtcccccagtgcctgccagggcctggagtggaggttcaggaccaaggggcttctggtcctccagcccctgtactcggccatgccctgcggtcactgcggttgccgcccctaattgtgccaaaggctgacccggcccgggctgcgtacacccttgccctgctttgccttaaagcctcggggtctgcccggcccctcgcccctgcctggcactgctcaccgcccaaggcgacgccggctggaccaggcactgctggcctttctcctgcccggcctcggaaccagcttttctctcttacgatgaaggctgatgccgagagcgggctgtgggcggagctgggtcagtcccgtatttattttgctttgagaagaggctcctctggccctgctctcctgcagggaggtggctgtcccgcgggaagccatcagcttgggccagctggcaggtggcaggaatggagaagctgaccctgctggccaggcaaggggccagaccccccccaacccccagctgccatcgctctcccacccagcttggccccctgcccgcccacctccctgggagccgggcctgtacatagcgcacagatgtttgttttaaataaataaacaaaatgtc

SEQ ID NO: 71138 - DNA, 8229 bp, Homo sapiens
ggggcggagccagcgcggatcgggtcccggacgcccgagcgccccgcccccgcgcgggcgatgcccagcggcgcggcgggctgcggggcccggcggggcgcgcagaggagcgggccgcggcgctgaggcggcggagcgtggccccgccatgggcttcctgcaccagctgcagctgctgctctggaagaacgtgacgctcaaacgccggagcccgtgggtcctggccttcgagatcttcatccccctggtgctgttctttatcctgctggggctgcgacagaagaagcccaccatctccgtgaaggaagtctccttctacacagcggcgcccctgacgtctgccggcatcctgcctgtcatgcaatcgctgtgcccggacggccagcgagacgagttcggcttcctgcagtacgccaactccacggtcacgcagctgcttgagcgcctggaccgcgtggtggaggaaggcaacctgtttgacccagcgcggcccagcctgggctcagagctcgaggccctacgccagcatctggaggccctcagtgcgggcccgggcacctcggggagccacctggacagatccacagtgtcttccttctctctggactcggtggccagaaacccgcaggagctctggcgtttcctgacgcaaaacttgtcgctgcccaatagcacggcccaagcactcttggccgcccgtgtggacccgcccgaggtctaccacctgctctttggtccctcatctgccctggattcacagtctggcctccacaagggtcaggagccctggagccgcctagggggcaatcccctgttccggatggaggagctgctgctggctcctgccctcctggagcagctcacctgcacgccgggctcgggggagctgggccggatcctcactgtgcctgagagtcagaagggagccctgcagggctaccgggatgctgtctgcagtgggcaggctgctgcgcgtgccaggcgcttctctgggctgtctgctgagctccggaaccagctggacgtggccaaggtctcccagcagctgggcctggatgcccccaacggctcggactcctcgccacaggcgccacccccacggaggctgcaggcgcttctgggggacctgctggatgcccagaaggttctgcaggatgtggatgtcctgtcggccctggccctgctactgccccagggtgcctgcactggccggacccccggacccccagccagtggtgcgggtggggcggccaatggcactggggcaggggcagtcatgggccccaacgccaccgctgaggagggcgcaccctctgctgcagcactggccaccccggacacgctgcagggccagtgctcagccttcgtacagctctgggccggcctgcagcccatcttgtgtggcaacaaccgcaccattgaacccgaggcgctgcggcggggcaacatgagctccctgggcttcacgagcaaggagcagcggaacctgggcctcctcgtgcacctcatgaccagcaaccccaaaatcctgtacgcgcctgcgggctctgaggtcgaccgcgtcatcctcaaggccaacgagacttttgcttttgtgggcaacgtgactcactatgcccaggtctggctcaacatctcggcggagatccgcagcttcctggagcagggcaggctgcagcaacacctgcgctggctgcagcagtatgtagcagagctgcggctgcaccccgaggcactgaacctgtcactggatgagctgccgccggccctgagacaggacaacttctcgctgcccagtggcatggccctcctgcagcagctggataccattgacaacgcggcctgcggctggatccagttcatgtccaaggtgagcgtggacatcttcaagggcttccccgacgaggagagcattgtcaactacaccctcaaccaggcctaccaggacaacgtcactgtttttgccagtgtgatcttccagacccggaaggacggctcgctcccgcctcacgtgcactacaagatccgccagaactccagcttcaccgagaaaaccaacgagatccgccgcgcctactggcggcctgggcccaatactggcggccgcttctacttcctctacggcttcgtctggatccaggacatgatggagcgcgccatcatcgacacttttgtggggcacgacgtggtggagccaggcagctacgtgcagatgttcccctacccctgctacacacgcgatgacacatgatgccgctgtgcatggtgatctcctgggtctactccgtggccatgaccatccagcacatcgtggcggagaaggagcaccggctcaaggaggtgcgcgggccgggactctccctggaggcgcgggctggcagggaggggcggcgtcctccctggggcctgccccaagcccctggcccacccgcaggtgatgaagaccatgggcctgaacaacgcggtgcactgggtggcctggttcatcaccggctttgtgcagctgtccatctccgtgacagcactcaccgccatcctgaagtacggccaggtgcttatgcacagccacgtggtcatcatctggctcttcctggcagtctacgcggtggccaccatcatgttctgcttcctggtgtctgtgctgtactccaaggccaagctggcctcggcctgcggtggcatcatctacttcctgagctacgtgccctacatgtacgtggcgatccgagaggaggtggcgcatgataagatcacggccttcgagaagtgcatcgcgtccctcatgtccacgacggcctttggtctgggctctaagtacttcgcgctgtatgaggtggccggcgtgggcatccagtggcacaccttcagccagtccccggtggagggggacgacttcaacttgctcctggctgtcaccatgctgatggtggacgccgtggtctatggcatcctcacgtggtacattgaggctgtgcacccaggcatgtacgggctgccccggccctggtacttcccactgcagaagtcctactggctgggcagtgggcggacagaagcctgggagtggagctggccgtgggcacgcaccccccgcctcagtgtcatggaggaggaccaggcctgtgccatggagagccggcgctttgaggagacccgtggcatggaggaggagcccacccacctgcctctggttgtctgcgtggacaaactcaccaaggtctacaaggacgacaagaagctggccctgaacaagctgagcctgaacctctacgagaaccaggtggtctccttcttgggccacaacggggcgggcaagaccaccaccatgtccatcctgaccggcctgttccctccaacgtcgggttccgccaccatctacgggcacgacatccgcacggagatggatgagatccgcaagaacctgggcatgtgcccgcagcacaatgtgctctttgaccggctcacggtggaggaacacctctggttctactcacggctcaagagcatggctcaggaggagatccgcagagagatggacaagatgatcgaggacctggagctctccaacaaacggcactcactggtgcagacattgtcgggtggcatgaagcgcaagctgtccgtggccatcgccttcgtgggcggctctcgcgccatcatcctggacgagcccacggcgggcgtggacccctacgcgcgccgcgccatctgggacctcatcctgaagtacaagccaggccgcaccatccttctgtccacccaccacatggatgaggctgacctgcttggggaccgcattgccatcatctcccatgggaagctcaagtgctgcggctccccgctcttcctcaagggcacctatggcgacgggtaccgcctcacgctggtcaagcggcccgccgagccggggggcccccaagagccagggctggcatccagccccccaggtcgggccccgctgagcagctgctccgagctccaggtgtcccagttcatccgcaagcatgtggcctcctgcctgctggtctcagacacaagcacggagctctcctacatcctgcccagcgaggccgccaagaagggggctttcgagcgcctcttccagcacctggagcgcagcctggatgcactgcacctcagcagcttcgggctgatggacacgaccctggaggaagtgttcctcaaggtgtcggaggaggatcagtcgctggagaacagtgaggccgatgtgaaggagtccaggaaggatgtgctccctggggcggagggcccggcgtctggggagggtcacgctggcaatctggcccggtgctcggagctgacccagtcgcaggcatcgctgcagtcggcgtcatctgtgggctctgcccgtggcgacgagggagctggctacaccgacgtctatggcgactaccgccccctctttgataacccacaggacccagacaatgtcagcctgcaagaggtggaggcagaggccctgtcgagggtcggccagggcagccgcaagctggacggcgggtggctgaaggtgcgccagttccacgggctgctggtcaaacgcttccactgcgcccgccgcaactccaaggcactcttctcccagatcttgctgccagccttcttcgtctgcgtggccatgaccgtggccctgtccgtcccggagattggtgatctgcccccgctggtcctgtcaccttcccagtaccacaactacacccagccccgtggcaatttcatcccctacgccaacgaggagcgccgcgagtaccggctgcggctatcgcccgacgccagcccccagcagctcgtgagcacgttccggctgccgtcgggggtgggtgccacctgcgtgctcaagtctcccgccaacggctcgctggggcccacgttgaacctgagcagcggggagtcgcgcctgctggcggctcggttcttcgacagcatgtgtctggagtccttcacacaggggctgccactgtccaatttcgtgccacccccaccctcgcccgccccatctgactcgccagcgtccccggatgaggacctgcaggcctggaacgtctccctgccgcccaccgctgggccagaaatgtggacgtcggcaccctccctgccgcgcctggtacgggagcccgtccgctgcacctgctctgcgcagggcaccggcttctcctgccccagcagtgtgggcgggcacccgccccagatgcgggtggtcacaggcgacatcctgaccgacatcaccggccacaatgtctctgagtacctgctcttcacctccgaccgcttccgactgcaccggtatggggccatcacctttggaaacgtcctgaagtccatcccagcctcatttggcaccagggccccacccatggtgcggaagatcgcggtgcgcagggctgcccaggttttctacaacaacaagggctatcacagcatgcccacctacctcaacagcctcaacaacgccatcctgcgtgccaacctgcccaagagcaagggcaacccggcggcttacggcatcaccgtcaccaaccaccccatgaataagaccagcgccagcctctccctggattacctgctgcagggcacggatgtcgtcatcgccatcttcatcatcgtggccatgtccttcgtgccggccagcttcgttgtcttcctcgtggccgagaagtccaccaaggccaagcatctgcagtttgtcagcggctgcaaccccatcatctactggctggcgaactacgtgtgggacatgctcaactacctggtccccgctacctgctgtgtcatcatcctgtttgtgttcgacctgccggcctacacgtcgcccaccaacttccctgccgtcctctccctcttcctgctctatgggtggtccatcacgcccatcatgtacccggcctccttctggttcgaggtccccagctccgcctacgtgttcctcattgtcatcaatctcttcatcggcatcaccgccaccgtggccaccttcctgctacagctcttcgagcacgacaaggacctgaaggttgtcaacagttacctgaaaagctgcttcctcattttccccaactacaacctgggccacgggctcatggagatggcctacaacgagtacatcaacgagtactacgccaagattggccagtttgacaagatgaagtccccgttcgagtgggacattgtcacccgcggactggtggccatggcggttgagggcgtcgtgggcttcctcctgaccatcatgtgccagtacaacttcctgcggcggccacagcgcatgcctgtgtctaccaagcctgtggaggatgatgtggacgtggccagtgagcggcagcgagtgctccggggagacgccgacaatgacatggtcaagattgagaacctgaccaaggtctacaagtcccggaagattggccgtatcctggccgttgaccgcctgtgcctgggtgtgcgtcctggcgagtgcttcgggctcctgggcgtcaacggtgcgggcaagaccagcaccttcaagatgctgaccggcgacgagagcacgacggggggcgaggccttcgtcaatggacacagcgtgctgaaggagctgctccaggtgcagcagagcctcggctactgcccgcagtgtgacgcgctgttcgacgagctcacggcccgggagcacctgcagctgtacacgcggctgcgtgggatctcctggaaggacgaggcccgggtggtgaagtgggctctggagaagctggagctgaccaagtacgcagacaagccggctggcacctacagcggcggcaacaagcggaagctctccacggccatcgccctcattgggtacccagccttcatcttcctggacgagcccaccacaggcatggaccccaaggcccggcgcttcctctggaacctcatcctcgacctcatcaagacagggcgttcagtggtgctgacatcacacagcatggaggagtgcgaggcgctgtgcacgcggctggccatcatggtgaacggtcgcctgcggtgcctgggcagcatccagcacctgaagaaccggtttggagatggctacatgatcacggtgcggaccaagagcagccagagtgtgaaggacgtggtgcggttcttcaaccgcaacttcccggaagccatgctcaaggagcggcaccacacaaaggtgcagtaccagctcaagtcggagcacatctcgctggcccaggtgttcagcaagatggagcaggtgtctggcgtgctgggcatcgaggactactcggtcagccagaccacactggacaatgtgttcgtgaactttgccaagaagcagagtgacaacctggagcagcaggagacggagccgccatccgcactgcagtcccctctcggctgcttgctcagcctgctccggccccggtctgcccccacggagctccgggcacttgtggcagacgagcccgaggacctggacacggaggacgagggcctcatcagcttcgaggaggagcgggcccagctgtccttcaacacggacacgctctgctgaccacccagagctgggccagggaggacacgctccactgaccacccagagctgggccagggactcaacaatggggacagaagtcccccagtgcctgccagggcctggagtggaggttcaggaccaaggggcttctggtcctccagcccctgtactcggccatgccctgcggtcactgcggttgccgcccctaattgtgccaaaggctgacccggcccgggctgcgtacacccttgccctgctttgccttaaagcctcggggtctgcccggcccctcgcccctgcctggcactgctcaccgcccaaggcgacgccggctggaccaggcactgctggcctttctcctgcccggcctcggaaccagcttttctctcttacgatgaaggctgatgccgagagcgggctgtgggcggagctgggtcagtcccgtatttattttgctttgagaagaggctcctctggccctgctctcctgcagggaggtggctgtcccgcgggaagccatcagcttgggccagctggcaggtggcaggaatggagaagctgaccctgctggccaggcaaggggccagaccccccccaacccccagctgccatcgctctcccacccagcttggccccctgcccgcccacctccctgggagccgggcctgtacatagcgcacagatgtttgttttaaataaataaacaaaatgtc

SEQ ID NO: 71139 - DNA, 8229 bp, Homo sapiens
ggggcggagccagcgcggatcgggtcccggacgcccgagcgccccgcccccgcgcgggcgatgcccagcggcgcggcgggctgcggggcccggcggggcgcgcagaggagcgggccgcggcgctgaggcggcggagcgtggccccgccatgggcttcctgcaccagctgcagctgctgctctggaagaacgtgacgctcaaacgccggagcccgtgggtcctggccttcgagatcttcatccccctggtgctgttctttatcctgctggggctgcgacagaagaagcccaccatctccgtgaaggaagtctccttctacacagcggcgcccctgacgtctgccggcatcctgcctgtcatgcaatcgctgtgcccggacggccagcgagacgagttcggcttcctgcagtacgccaactccacgtgagtgcccacccgcccctcggagcacccacccctccccagcccatccagtgagtgacatccgccatggtgcagggtcacgcagctgcttgagcgcctggaccgcgtggtggaggaaggcaacctgtttgacccagcgcggcccagcctgggctcagagctcgaggccctacgccagcatctggaggccctcagtgcgggcccgggcacctcggggagccacctggacagatccacagtgtcttccttctctctggactcggtggccagaaacccgcaggagctctggcgtttcctgacgcaaaacttgtcgctgcccaatagcacggcccaagcactcttggccgcccgtgtggacccgcccgaggtctaccacctgctctttggtccctcatctgccctggattcacagtctggcctccacaagggtcaggagccctggagccgcctagggggcaatcccctgttccggatggaggagctgctgctggctcctgccctcctggagcagctcacctgcacgccgggctcgggggagctgggccggatcctcactgtgcctgagagtcagaagggagccctgcagggctaccgggatgctgtctgcagtgggcaggctgctgcgcgtgccaggcgcttctctgggctgtctgctgagctccggaaccagctggacgtggccaaggtctcccagcagctgggcctggatgcccccaacggctcggactcctcgccacaggcgccacccccacggaggctgcaggcgcttctgggggacctgctggatgcccagaaggttctgcaggatgtggatgtcctgtcggccctggccctgctactgccccagggtgcctgcactggccggacccccggacccccagccagtggtgcgggtggggcggccaatggcactggggcaggggcagtcatgggccccaacgccaccgctgaggagggcgcaccctctgctgcagcactggccaccccggacacgctgcagggccagtgctcagccttcgtacagctctgggccggcctgcagcccatcttgtgtggcaacaaccgcaccattgaacccgaggcgctgcggcggggcaacatgagctccctgggcttcacgagcaaggagcagcggaacctgggcctcctcgtgcacctcatgaccagcaaccccaaaatcctgtacgcgcctgcgggctctgaggtcgaccgcgtcatcctcaaggccaacgagacttttgcttttgtgggcaacgtgactcactatgcccaggtctggctcaacatctcggcggagatccgcagcttcctggagcagggcaggctgcagcaacacctgcgctggctgcagcagtatgtagcagagctgcggctgcaccccgaggcactgaacctgtcactggatgagctgccgccggccctgagacaggacaacttctcgctgcccagtggcatggccctcctgcagcagctggataccattgacaacgcggcctgcggctggatccagttcatgtccaaggtgagcgtggacatcttcaagggcttccccgacgaggagagcattgtcaactacaccctcaaccaggcctaccaggacaacgtcactgtttttgccagtgtgatcttccagacccggaaggacggctcgctcccgcctcacgtgcactacaagatccgccagaactccagcttcaccgagaaaaccaacgagatccgccgcgcctactggcggcctgggcccaatactggcggccgcttctacttcctctacggcttcgtctggatccaggacatgatggagcgcgccatcatcgacacttttgtggggcacgacgtggtggagccaggcagctacgtgcagatgttcccctacccctgctacacacgcgatgacttcctgtttgtcattgagcacatgatgccgctgtgcatggtgatctcctgggtctactccgtggccatgaccatccagcacatcgtggcggagaaggagcaccggctcaaggaggtgatgaagaccatgggcctgaacaacgcggtgcactgggtggcctggttcatcaccggctttgtgcagctgtccatctccgtgacagcactcaccgccatcctgaagtacggccaggtgcttatgcacagccacgtggtcatcatctggctcttcctggcagtctacgcggtggccaccatcatgttctgcttcctggtgtctgtgctgtactccaaggccaagctggcctcggcctgcggtggcatcatctacttcctgagctacgtgccctacatgtacgtggcgatccgagaggaggtggcgcatgataagatcacggccttcgagaagtgcatcgcgtccctcatgtccacgacggcctttggtctgggctctaagtacttcgcgctgtatgaggtggccggcgtgggcatccagtggcacaccttcagccagtccccggtggagggggacgacttcaacttgctcctggctgtcaccatgctgatggtggacgccgtggtctatggcatcctcacgtggtacattgaggctgtgcacccaggcatgtacgggctgccccggccctggtacttcccactgcagaagtcctactggctgggcagtgggcggacagaagcctgggagtggagctggccgtgggcacgcaccccccgcctcagtgtcatggaggaggaccaggcctgtgccatggagagccggcgctttgaggagacccgtggcatggaggaggagcccacccacctgcctctggttgtctgcgtggacaaactcaccaaggtctacaaggacgacaagaagctggccctgaacaagctgagcctgaacctctacgagaaccaggtggtctccttcttgggccacaacggggcgggcaagaccaccaccatgtccatcctgaccggcctgttccctccaacgtcgggttccgccaccatctacgggcacgacatccgcacggagatggatgagatccgcaagaacctgggcatgtgcccgcagcacaatgtgctctttgaccggctcacggtggaggaacacctctggttctactcacggctcaagagcatggctcaggaggagatccgcagagagatggacaagatgatcgaggacctggagctctccaacaaacggcactcactggtgcagacattgtcgggtggcatgaagcgcaagctgtccgtggccatcgccttcgtgggcggctctcgcgccatcatcctggacgagcccacggcgggcgtggacccctacgcgcgccgcgccatctgggacctcatcctgaagtacaagccaggccgcaccatccttctgtccacccaccacatggatgaggctgacctgcttggggaccgcattgccatcatctcccatgggaagctcaagtgctgcggctccccgctcttcctcaagggcacctatggcgacgggtaccgcctcacgctggtcaagcggcccgccgagccggggggcccccaagagccagggctggcatccagccccccaggtcgggccccgctgagcagctgctccgagctccaggtgtcccagttcatccgcaagcatgtggcctcctgcctgctggtctcagacacaagcacggagctctcctacatcctgcccagcgaggccgccaagaagggggctttcgagcgcctcttccagcacctggagcgcagcctggatgcactgcacctcagcagcttcgggctgatggacacgaccctggaggaagtgttcctcaaggtgtcggaggaggatcagtcgctggagaacagtgaggccgatgtgaaggagtccaggaaggatgtgctccctggggcggagggcccggcgtctggggagggtcacgctggcaatctggcccggtgctcggagctgacccagtcgcaggcatcgctgcagtcggcgtcatctgtgggctctgcccgtggcgacgagggagctggctacaccgacgtctatggcgactaccgccccctctttgataacccacaggacccagacaatgtcagcctgcaagaggtggaggcagaggccctgtcgagggtcggccagggcagccgcaagctggacggcgggtggctgaaggtgcgccagttccacgggctgctggtcaaacgcttccactgcgcccgccgcaactccaaggcactcttctcccagatcttgctgccagccttcttcgtctgcgtggccatgaccgtggccctgtccgtcccggagattggtgatctgcccccgctggtcctgtcaccttcccagtaccacaactacacccagccccgtggcaatttcatcccctacgccaacgaggagcgccgcgagtaccggctgcggctatcgcccgacgccagcccccagcagctcgtgagcacgttccggctgccgtcgggggtgggtgccacctgcgtgctcaagtctcccgccaacggctcgctggggcccacgttgaacctgagcagcggggagtcgcgcctgctggcggctcggttcttcgacagcatgtgtctggagtccttcacacaggggctgccactgtccaatttcgtgccacccccaccctcgcccgccccatctgactcgccagcgtccccggatgaggacctgcaggcctggaacgtctccctgccgcccaccgctgggccagaaatgtggacgtcggcaccctccctgccgcgcctggtacgggagcccgtccgctgcacctgctctgcgcagggcaccggcttctcctgccccagcagtgtgggcgggcacccgccccagatgcgggtggtcacaggcgacatcctgaccgacatcaccggccacaatgtctctgagtacctgctcttcacctccgaccgcttccgactgcaccggtatggggccatcacctttggaaacgtcctgaagtccatcccagcctcatttggcaccagggccccacccatggtgcggaagatcgcggtgcgcagggctgcccaggttttctacaacaacaagggctatcacagcatgcccacctacctcaacagcctcaacaacgccatcctgcgtgccaacctgcccaagagcaagggcaacccggcggcttacggcatcaccgtcaccaaccaccccatgaataagaccagcgccagcctctccctggattacctgctgcagggcacggatgtcgtcatcgccatcttcatcatcgtggccatgtccttcgtgccggccagcttcgttgtcttcctcgtggccgagaagtccaccaaggccaagcatctgcagtttgtcagcggctgcaaccccatcatctactggctggcgaactacgtgtgggacatgctcaactacctggtccccgctacctgctgtgtcatcatcctgtttgtgttcgacctgccggcctacacgtcgcccaccaacttccctgccgtcctctccctcttcctgctctatgggtggtccatcacgcccatcatgtacccggcctccttctggttcgaggtccccagctccgcctacgtgttcctcattgtcatcaatctcttcatcggcatcaccgccaccgtggccaccttcctgctacagctcttcgagcacgacaaggacctgaaggttgtcaacagttacctgaaaagctgcttcctcattttccccaactacaacctgggccacgggctcatggagatggcctacaacgagtacatcaacgagtactacgccaagattggccagtttgacaagatgaagtccccgttcgagtgggacattgtcacccgcggactggtggccatggcggttgagggcgtcgtgggcttcctcctgaccatcatgtgccagtacaacttcctgcggcggccacagcgcatgcctgtgtctaccaagcctgtggaggatgatgtggacgtggccagtgagcggcagcgagtgctccggggagacgccgacaatgacatggtcaagattgagaacctgaccaaggtctacaagtcccggaagattggccgtatcctggccgttgaccgcctgtgcctgggtgtgcgtcctggcgagtgcttcgggctcctgggcgtcaacggtgcgggcaagaccagcaccttcaagatgctgaccggcgacgagagcacgacggggggcgaggccttcgtcaatggacacagcgtgctgaaggagctgctccaggtgcagcagagcctcggctactgcccgcagtgtgacgcgctgttcgacgagctcacggcccgggagcacctgcagctgtacacgcggctgcgtgggatctcctggaaggacgaggcccgggtggtgaagtgggctctggagaagctggagctgaccaagtacgcagacaagccggctggcacctacagcggcggcaacaagcggaagctctccacggccatcgccctcattgggtacccagccttcatcttcctggacgagcccaccacaggcatggaccccaaggcccggcgcttcctctggaacctcatcctcgacctcatcaagacagggcgttcagtggtgctgacatcacacagcatggaggagtgcgaggcgctgtgcacgcggctggccatcatggtgaacggtcgcctgcggtgcctgggcagcatccagcacctgaagaaccggtttggagatggctacatgatcacggtgcggaccaagagcagccagagtgtgaaggacgtggtgcggttcttcaaccgcaacttcccggaagccatgctcaaggagcggcaccacacaaaggtgcagtaccagctcaagtcggagcacatctcgctggcccaggtgttcagcaagatggagcaggtgtctggcgtgctgggcatcgaggactactcggtcagccagaccacactggacaatgtgttcgtgaactttgccaagaagcagagtgacaacctggagcagcaggagacggagccgccatccgcactgcagtcccctctcggctgcttgctcagcctgctccggccccggtctgcccccacggagctccgggcacttgtggcagacgagcccgaggacctggacacggaggacgagggcctcatcagcttcgaggaggagcgggcccagctgtccttcaacacggacacgctctgctgaccacccagagctgggccagggaggacacgctccactgaccacccagagctgggccagggactcaacaatggggacagaagtcccccagtgcctgccagggcctggagtggaggttcaggaccaaggggcttctggtcctccagcccctgtactcggccatgccctgcggtcactgcggttgccgcccctaattgtgccaaaggctgacccggcccgggctgcgtacacccttgccctgctttgccttaaagcctcggggtctgcccggcccctcgcccctgcctggcactgctcaccgcccaaggcgacgccggctggaccaggcactgctggcctttctcctgcccggcctcggaaccagcttttctctcttacgatgaaggctgatgccgagagcgggctgtgggcggagctgggtcagtcccgtatttattttgctttgagaagaggctcctctggccctgctctcctgcagggaggtggctgtcccgcgggaagccatcagcttgggccagctggcaggtggcaggaatggagaagctgaccctgctggccaggcaaggggccagaccccccccaacccccagctgccatcgctctcccacccagcttggccccctgcccgcccacctccctgggagccgggcctgtacatagcgcacagatgtttgttttaaataaataaacaaaatgtc

SEQ ID NO: 71140 - DNA, 6834 bp, Homo sapiens
ccggcctcgctggatacagttcagcccaagtgagcgtgacatcttcaaggcttccccgacgaggagagcattgtcaactacaccctcaaccaggcctaccaggacaacgtcactgtttttgccagtgtgatcttccagacccggaaggacggctcgctcccgcctcacgtgcactacaagatccgccagaactccagtgtggagagagctgtacgcgcctgcgggctctgaggtcgaccgcgtcatcctcaaggccaacgagacttttgcttttgtgggcaacgtgactcactatgcccaggtctggctcaacatctcggcggagatccgcagcttcctggagcagggcaggctgcagcaacacctgcgctggctgcagcagtatgtagcagagctgcggctgcaccccgaggcactgaacctgtcactggatgagctgccgccggccctgagacaggacaacttctcgctgcccagtggcatggccctcctgcagcagctggataccattgacaacgcggcctgcggctggatccagttcatgtccaaggtgagcgtggacatcttcaagggcttccccgacgaggagagcattgtcaactacaccctcaaccaggcctaccaggacaacgtcactgtttttgccagtgtgatcttccagacccggaaggacggctcgctcccgcctcacgtgcactacaagatccgccagaactccagcttcaccgagaaaaccaacgagatccgccgcgcctactggcggcctgggcccaatactggcggccgcttctacttcctctacggcttcgtctggatccaggacatgatggagcgcgccatcatcgacacttttgtggggcacgacgtggtggagccaggcagctacgtgcagatgttcccctacccctgctacacacgcgatgacttcctgtttgtcattgagcacatgatgccgctgtgcatggtgatctcctgggtctactccgtggccatgaccatccagcacatcgtggcggagaaggagcaccggctcaaggaggtgatgaagaccatgggcctgaacaacgcggtgcactgggtggcctggttcatcaccggctttgtgcagctgtccatctccgtgacagcactcaccgccatcctgaagtacggccaggtgcttatgcacagccacgtggtcatcatctggctcttcctggcagtctacgcggtggccaccatcatgttctgcttcctggtgtctgtgctgtactccaaggccaagctggcctcggcctgcggtggcatcatctacttcctgagctacgtgccctacatgtacgtggcgatccgagaggaggtggcgcatgataagatcacggccttcgagaagtgcatcgcgtccctcatgtccacgacggcctttggtctgggctctaagtacttcgcgctgtatgaggtggccggcgtgggcatccagtggcacaccttcagccagtccccggtggagggggacgacttcaacttgctcctggctgtcaccatgctgatggtggacgccgtggtctatggcatcctcacgtggtacattgaggctgtgcacccaggcatgtacgggctgccccggccctggtacttcccactgcagaagtcctactggctgggcagtgggcggacagaagcctgggagtggagctggccgtgggcacgcaccccccgcctcagtgtcatggaggaggaccaggcctgtgccatggagagccggcgctttgaggagacccgtggcatggaggaggagcccacccacctgcctctggttgtctgcgtggacaaactcaccaaggtctacaaggacgacaagaagctggccctgaacaagctgagcctgaacctctacgagaaccaggtggtctccttcttgggccacaacggggcgggcaagaccaccaccatgtccatcctgaccggcctgttccctccaacgtcgggttccgccaccatctacgggcacgacatccgcacggagatggatgagatccgcaagaacctgggcatgtgcccgcagcacaatgtgctctttgaccggctcacggtggaggaacacctctggttctactcacggctcaagagcatggctcaggaggagatccgcagagagatggacaagatgatcgaggacctggagctctccaacaaacggcactcactggtgcagacattgtcgggtggcatgaagcgcaagctgtccgtggccatcgccttcgtgggcggctctcgcgccatcatcctggacgagcccacggcgggcgtggacccctacgcgcgccgcgccatctgggacctcatcctgaagtacaagccaggccgcaccatccttctgtccacccaccacatggatgaggctgacctgcttggggaccgcattgccatcatctcccatgggaagctcaagtgctgcggctccccgctcttcctcaagggcacctatggcgacgggtaccgcctcacgctggtcaagcggcccgccgagccggggggcccccaagagccagggctggcatccagccccccaggtcgggccccgctgagcagctgctccgagctccaggtgtcccagttcatccgcaagcatgtggcctcctgcctgctggtctcagacacaagcacggagctctcctacatcctgcccagcgaggccgccaagaagggggctttcgagcgcctcttccagcacctggagcgcagcctggatgcactgcacctcagcagcttcgggctgatggacacgaccctggaggaagtgttcctcaaggtgtcggaggaggatcagtcgctggagaacagtgaggccgatgtgaaggagtccaggaaggatgtgctccctggggcggagggcccggcgtctggggagggtcacgctggcaatctggcccggtgctcggagctgacccagtcgcaggcatcgctgcagtcggcgtcatctgtgggctctgcccgtggcgacgagggagctggctacaccgacgtctatggcgactaccgccccctctttgataacccacaggacccagacaatgtcagcctgcaagaggtggaggcagaggccctgtcgagggtcggccagggcagccgcaagctggacggcgggtggctgaaggtgcgccagttccacgggctgctggtcaaacgcttccactgcgcccgccgcaactccaaggcactcttctcccagatcttgctgccagccttcttcgtctgcgtggccatgaccgtggccctgtccgtcccggagattggtgatctgcccccgctggtcctgtcaccttcccagtaccacaactacacccagccccgtggcaatttcatcccctacgccaacgaggagcgccgcgagtaccggctgcggctatcgcccgacgccagcccccagcagctcgtgagcacgttccggctgccgtcgggggtgggtgccacctgcgtgctcaagtctcccgccaacggctcgctggggcccacgttgaacctgagcagcggggagtcgcgcctgctggcggctcggttcttcgacagcatgtgtctggagtccttcacacaggggctgccactgtccaatttcgtgccacccccaccctcgcccgccccatctgactcgccagcgtccccggatgaggacctgcaggcctggaacgtctccctgccgcccaccgctgggccagaaatgtggacgtcggcaccctccctgccgcgcctggtacgggagcccgtccgctgcacctgctctgcgcagggcaccggcttctcctgccccagcagtgtgggcgggcacccgccccagatgcgggtggtcacaggcgacatcctgaccgacatcaccggccacaatgtctctgagtacctgctcttcacctccgaccgcttccgactgcaccggtatggggccatcacctttggaaacgtcctgaagtccatcccagcctcatttggcaccagggccccacccatggtgcggaagatcgcggtgcgcagggctgcccaggttttctacaacaacaagggctatcacagcatgcccacctacctcaacagcctcaacaacgccatcctgcgtgccaacctgcccaagagcaagggcaacccggcggcttacggcatcaccgtcaccaaccaccccatgaataagaccagcgccagcctctccctggattacctgctgcagggcacggatgtcgtcatcgccatcttcatcatcgtggccatgtccttcgtgccggccagcttcgttgtcttcctcgtggccgagaagtccaccaaggccaagcatctgcagtttgtcagcggctgcaaccccatcatctactggctggcgaactacgtgtgggacatgctcaactacctggtccccgctacctgctgtgtcatcatcctgtttgtgttcgacctgccggcctacacgtcgcccaccaacttccctgccgtcctctccctcttcctgctctatgggtggtccatcacgcccatcatgtacccggcctccttctggttcgaggtccccagctccgcctacgtgttcctcattgtcatcaatctcttcatcggcatcaccgccaccgtggccaccttcctgctacagctcttcgagcacgacaaggacctgaaggttgtcaacagttacctgaaaagctgcttcctcattttccccaactacaacctgggccacgggctcatggagatggcctacaacgagtacatcaacgagtactacgccaagattggccagtttgacaagatgaagtccccgttcgagtgggacattgtcacccgcggactggtggccatggcggttgagggcgtcgtgggcttcctcctgaccatcatgtgccagtacaacttcctgcggcggccacagcgcatgcctgtgtctaccaagcctgtggaggatgatgtggacgtggccagtgagcggcagcgagtgctccggggagacgccgacaatgacatggtcaagattgagaacctgaccaaggtctacaagtcccggaagattggccgtatcctggccgttgaccgcctgtgcctgggtgtgcgtcctggcgagtgcttcgggctcctgggcgtcaacggtgcgggcaagaccagcaccttcaagatgctgaccggcgacgagagcacgacggggggcgaggccttcgtcaatggacacagcgtgctgaaggagctgctccaggtgcagcagagcctcggctactgcccgcagtgtgacgcgctgttcgacgagctcacggcccgggagcacctgcagctgtacacgcggctgcgtgggatctcctggaaggacgaggcccgggtggtgaagtgggctctggagaagctggagctgaccaagtacgcagacaagccggctggcacctacagcggcggcaacaagcggaagctctccacggccatcgccctcattgggtacccagccttcatcttcctggacgagcccaccacaggcatggaccccaaggcccggcgcttcctctggaacctcatcctcgacctcatcaagacagggcgttcagtggtgctgacatcacacagcatggaggagtgcgaggcgctgtgcacgcggctggccatcatggtgaacggtcgcctgcggtgcctgggcagcatccagcacctgaagaaccggtttggagatggctacatgatcacggtgcggaccaagagcagccagagtgtgaaggacgtggtgcggttcttcaaccgcaacttcccggaagccatgctcaaggagcggcaccacacaaaggtgcagtaccagctcaagtcggagcacatctcgctggcccaggtgttcagcaagatggagcaggtgtctggcgtgctgggcatcgaggactactcggtcagccagaccacactggacaatgtgttcgtgaactttgccaagaagcagagtgacaacctggagcagcaggagacggagccgccatccgcactgcagtcccctctcggctgcttgctcagcctgctccggccccggtctgcccccacggagctccgggcacttgtggcagacgagcccgaggacctggacacggaggacgagggcctcatcagcttcgaggaggagcgggcccagctgtccttcaacacggacacgctctgctgaccacccagagctgggccagggaggacacgctccactgaccacccagagctgggccagggactcaacaatggggacagaagtcccccagtgcctgccagggcctggagtggaggttcaggaccaaggggcttctggtcctccagcccctgtactcggccatgccctgcggtcactgcggttgccgcccctaattgtgccaaaggctgacccggcccgggctgcgtacacccttgccctgctttgccttaaagcctcggggtctgcccggcccctcgcccctgcctggcactgctcaccgcccaaggcgacgccggctggaccaggcactgctggcctttctcctgcccggcctcggaaccagcttttctctcttacgatgaaggctgatgccgagagcgggctgtgggcggagctgggtcagtcccgtatttattttgctttgagaagaggctcctctggccctgctctcctgcagggaggtggctgtcccgcgggaagccatcagcttgggccagctggcaggtggcaggaatggagaagctgaccctgctggccaggcaaggggccagaccccccccaacccccagctgccatcgctctcccacccagcttggccccctgcccgcccacctccctgggagccgggcctgtacatagcgcacagatgtttgttttaaataaataaacaaaatgtc

SEQ ID NO: 71141 - DNA, 6638 bp, Homo sapiens
ccccaagtcggtgggggtccgtccagaaactccatgcccctgcctcaccccctgcaggccaacgagacttttgcttttgtgggcaacgtgactcactatgcccaggtctggctcaacatctcggcggagatccgcagcttcctggagcagggcaggctgcagcaacacctgcgctggctgcagcagtatgtagcagagctgcggctgcaccccgaggcactgaacctgtcactggatgagctgccgccggccctgagacaggacaacttctcgctgcccagtggcatggccctcctgcagcagctggataccattgacaacgcggcctgcggctggatccagttcatgtccaaggtgagcgtggacatcttcaagggcttccccgacgaggagagcattgtcaactacaccctcaaccaggcctaccaggacaacgtcactgtttttgccagtgtgatcttccagacccggaaggacggctcgctcccgcctcacgtgcactacaagatccgccagaactccagcttcaccgagaaaaccaacgagatccgccgcgcctactggcggcctgggcccaatactggcggccgcttctacttcctctacggcttcgtctggatccaggacatgatggagcgcgccatcatcgacacttttgtggggcacgacgtggtggagccaggcagctacgtgcagatgttcccctacccctgctacacacgcgatgacttcctgtttgtcattgagcacatgatgccgctgtgcatggtgatctcctgggtctactccgtggccatgaccatccagcacatcgtggcggagaaggagcaccggctcaaggaggtgatgaagaccatgggcctgaacaacgcggtgcactgggtggcctggttcatcaccggctttgtgcagctgtccatctccgtgacagcactcaccgccatcctgaagtacggccaggtgcttatgcacagccacgtggtcatcatctggctcttcctggcagtctacgcggtggccaccatcatgttctgcttcctggtgtctgtgctgtactccaaggccaagctggcctcggcctgcggtggcatcatctacttcctgagctacgtgccctacatgtacgtggcgatccgagaggaggtggcgcatgataagatcacggccttcgagaagtgcatcgcgtccctcatgtccacgacggcctttggtctgggctctaagtacttcgcgctgtatgaggtggccggcgtgggcatccagtggcacaccttcagccagtccccggtggagggggacgacttcaacttgctcctggctgtcaccatgctgatggtggacgccgtggtctatggcatcctcacgtggtacattgaggctgtgcacccaggcatgtacgggctgccccggccctggtacttcccactgcagaagtcctactggctgggcagtgggcggacagaagcctgggagtggagctggccgtgggcacgcaccccccgcctcagtgtcatggaggaggaccaggcctgtgccatggagagccggcgctttgaggagacccgtggcatggaggaggagcccacccacctgcctctggttgtctgcgtggacaaactcaccaaggtctacaaggacgacaagaagctggccctgaacaagctgagcctgaacctctacgagaaccaggtggtctccttcttgggccacaacggggcgggcaagaccaccaccatgtccatcctgaccggcctgttccctccaacgtcgggttccgccaccatctacgggcacgacatccgcacggagatggatgagatccgcaagaacctgggcatgtgcccgcagcacaatgtgctctttgaccggctcacggtggaggaacacctctggttctactcacggctcaagagcatggctcaggaggagatccgcagagagatggacaagatgatcgaggacctggagctctccaacaaacggcactcactggtgcagacattgtcgggtggcatgaagcgcaagctgtccgtggccatcgccttcgtgggcggctctcgcgccatcatcctggacgagcccacggcgggcgtggacccctacgcgcgccgcgccatctgggacctcatcctgaagtacaagccaggccgcaccatccttctgtccacccaccacatggatgaggctgacctgcttggggaccgcattgccatcatctcccatgggaagctcaagtgctgcggctccccgctcttcctcaagggcacctatggcgacgggtaccgcctcacgctggtcaagcggcccgccgagccggggggcccccaagagccagggctggcatccagccccccaggtcgggccccgctgagcagctgctccgagctccaggtgtcccagttcatccgcaagcatgtggcctcctgcctgctggtctcagacacaagcacggagctctcctacatcctgcccagcgaggccgccaagaagggggctttcgagcgcctcttccagcacctggagcgcagcctggatgcactgcacctcagcagcttcgggctgatggacacgaccctggaggaagtgttcctcaaggtgtcggaggaggatcagtcgctggagaacagtgaggccgatgtgaaggagtccaggaaggatgtgctccctggggcggagggcccggcgtctggggagggtcacgctggcaatctggcccggtgctcggagctgacccagtcgcaggcatcgctgcagtcggcgtcatctgtgggctctgcccgtggcgacgagggagctggctacaccgacgtctatggcgactaccgccccctctttgataacccacaggacccagacaatgtcagcctgcaagaggtggaggcagaggccctgtcgagggtcggccagggcagccgcaagctggacggcgggtggctgaaggtgcgccagttccacgggctgctggtcaaacgcttccactgcgcccgccgcaactccaaggcactcttctcccagatcttgctgccagccttcttcgtctgcgtggccatgaccgtggccctgtccgtcccggagattggtgatctgcccccgctggtcctgtcaccttcccagtaccacaactacacccagccccgtggcaatttcatcccctacgccaacgaggagcgccgcgagtaccggctgcggctatcgcccgacgccagcccccagcagctcgtgagcacgttccggctgccgtcgggggtgggtgccacctgcgtgctcaagtctcccgccaacggctcgctggggcccacgttgaacctgagcagcggggagtcgcgcctgctggcggctcggttcttcgacagcatgtgtctggagtccttcacacaggggctgccactgtccaatttcgtgccacccccaccctcgcccgccccatctgactcgccagcgtccccggatgaggacctgcaggcctggaacgtctccctgccgcccaccgctgggccagaaatgtggacgtcggcaccctccctgccgcgcctggtacgggagcccgtccgctgcacctgctctgcgcagggcaccggcttctcctgccccagcagtgtgggcgggcacccgccccagatgcgggtggtcacaggcgacatcctgaccgacatcaccggccacaatgtctctgagtacctgctcttcacctccgaccgcttccgactgcaccggtatggggccatcacctttggaaacgtcctgaagtccatcccagcctcatttggcaccagggccccacccatggtgcggaagatcgcggtgcgcagggctgcccaggttttctacaacaacaagggctatcacagcatgcccacctacctcaacagcctcaacaacgccatcctgcgtgccaacctgcccaagagcaagggcaacccggcggcttacggcatcaccgtcaccaaccaccccatgaataagaccagcgccagcctctccctggattacctgctgcagggcacggatgtcgtcatcgccatcttcatcatcgtggccatgtccttcgtgccggccagcttcgttgtcttcctcgtggccgagaagtccaccaaggccaagcatctgcagtttgtcagcggctgcaaccccatcatctactggctggcgaactacgtgtgggacatgctcaactacctggtccccgctacctgctgtgtcatcatcctgtttgtgttcgacctgccggcctacacgtcgcccaccaacttccctgccgtcctctccctcttcctgctctatgggtggtccatcacgcccatcatgtacccggcctccttctggttcgaggtccccagctccgcctacgtgttcctcattgtcatcaatctcttcatcggcatcaccgccaccgtggccaccttcctgctacagctcttcgagcacgacaaggacctgaaggttgtcaacagttacctgaaaagctgcttcctcattttccccaactacaacctgggccacgggctcatggagatggcctacaacgagtacatcaacgagtactacgccaagattggccagtttgacaagatgaagtccccgttcgagtgggacattgtcacccgcggactggtggccatggcggttgagggcgtcgtgggcttcctcctgaccatcatgtgccagtacaacttcctgcggcggccacagcgcatgcctgtgtctaccaagcctgtggaggatgatgtggacgtggccagtgagcggcagcgagtgctccggggagacgccgacaatgacatggtcaagattgagaacctgaccaaggtctacaagtcccggaagattggccgtatcctggccgttgaccgcctgtgcctgggtgtgcgtcctggcgagtgcttcgggctcctgggcgtcaacggtgcgggcaagaccagcaccttcaagatgctgaccggcgacgagagcacgacggggggcgaggccttcgtcaatggacacagcgtgctgaaggagctgctccaggtgcagcagagcctcggctactgcccgcagtgtgacgcgctgttcgacgagctcacggcccgggagcacctgcagctgtacacgcggctgcgtgggatctcctggaaggacgaggcccgggtggtgaagtgggctctggagaagctggagctgaccaagtacgcagacaagccggctggcacctacagcggcggcaacaagcggaagctctccacggccatcgccctcattgggtacccagccttcatcttcctggacgagcccaccacaggcatggaccccaaggcccggcgcttcctctggaacctcatcctcgacctcatcaagacagggcgttcagtggtgctgacatcacacagcatggaggagtgcgaggcgctgtgcacgcggctggccatcatggtgaacggtcgcctgcggtgcctgggcagcatccagcacctgaagaaccggtttggagatggctacatgatcacggtgcggaccaagagcagccagagtgtgaaggacgtggtgcggttcttcaaccgcaacttcccggaagccatgctcaaggagcggcaccacacaaaggtgcagtaccagctcaagtcggagcacatctcgctggcccaggtgttcagcaagatggagcaggtgtctggcgtgctgggcatcgaggactactcggtcagccagaccacactggacaatgtgttcgtgaactttgccaagaagcagagtgacaacctggagcagcaggagacggagccgccatccgcactgcagtcccctctcggctgcttgctcagcctgctccggccccggtctgcccccacggagctccgggcacttgtggcagacgagcccgaggacctggacacggaggacgagggcctcatcagcttcgaggaggagcgggcccagctgtccttcaacacggacacgctctgctgaccacccagagctgggccagggaggacacgctccactgaccacccagagctgggccagggactcaacaatggggacagaagtcccccagtgcctgccagggcctggagtggaggttcaggaccaaggggcttctggtcctccagcccctgtactcggccatgccctgcggtcactgcggttgccgcccctaattgtgccaaaggctgacccggcccgggctgcgtacacccttgccctgctttgccttaaagcctcggggtctgcccggcccctcgcccctgcctggcactgctcaccgcccaaggcgacgccggctggaccaggcactgctggcctttctcctgcccggcctcggaaccagcttttctctcttacgatgaaggctgatgccgagagcgggctgtgggcggagctgggtcagtcccgtatttattttgctttgagaagaggctcctctggccctgctctcctgcagggaggtggctgtcccgcgggaagccatcagcttgggccagctggcaggtggcaggaatggagaagctgaccctgctggccaggcaaggggccagaccccccccaacccccagctgccatcgctctcccacccagcttggccccctgcccgcccacctccctgggagccgggcctgtacatagcgcacagatgtttgttttaaataaataaacaaaatgtc

SEQ ID NO: 71142 - DNA, 7831 bp, Homo sapiens
ggggcggagccagcgcggatcgggtcccggacgcccgagcgccccgcccccgcgcgggcgatgcccagcggcgcggcgggctgcggggcccggcggggcgcgcagaggagcgggccgcggcgctgaggcggcggagcgtggccccgccatgggcttcctgcaccagctgcagctgctgctctggaagaacgtgacgctcaaacgccggagcccgtgggtcctggccttcgagatcttcatccccctggtgctgttctttatcctgctggggctgcgacagaagaagcccaccatctccgtgaaggaagtctccttctacacagcggcgcccctgacgtctgccggcatcctgcctgtcatgcaatcgctgtgcccggacggccagcgagacgagttcggcttcctgcagtacgccaactccacggtcacgcagctgcttgagcgcctggaccgcgtggtggaggaaggcaacctgtttgacccagcgcggcccagcctgggctcagagctcgaggccctacgccagcatctggaggccctcagtgcgggcccgggcacctcggggagccacctggacagatccacagtgtcttccttctctctggactcggtggccagaaacccgcaggagctctggcgtttcctgacgcaaaacttgtcgctgcccaatagcacggcccaagcactcttggccgcccgtgtggacccgcccgaggtctaccacctgctctttggtccctcatctgccctggattcacagtctggcctccacaagggtcaggagccctggagccgcctagggggcaatcccctgttccggatggaggagctgctgctggctcctgccctcctggagcagctcacctgcacgccgggctcgggggagctgggccggatcctcactgtgcctgagagtcagaagggagccctgcagggctaccgggatgctgtctgcagtgggcaggctgctgcgcgtgccaggcgcttctctgggctgtctgctgagctccggaaccagctggacgtggccaaggtctcccagcagctgggcctggatgcccccaacggctcggactcctcgccacaggcgccacccccacggaggctgcaggcgcttctgggggacctgctggatgcccagaaggttctgcaggatgtggatgtcctgtcggccctggccctgctactgccccagggtgcctgcactggccggacccccggacccccagccagtggtgcgggtggggcggccaatggcactggggcaggggcagtcatgggccccaacgccaccgctgaggagggcgcaccctctgctgcagcactggccaccccggacacgctgcagggccagtgctcagccttcgtacagctctgggccggcctgcagcccatcttgtgtggcaacaaccgcaccattgaacccgaggcgctgcggcggggcaacatgagctccctgggcttcacgagcaaggagcagcggaacctgggcctcctcgtgcacctcatgaccagcaaccccaaaatcctgtacgcgcctgcgggctctgaggtcgaccgcgtcatcctcaaggccaacgagacttttgcttttgtgggcaacgtgactcactatgcccaggtctggctcaacatctcggcggagatccgcagcttcctggagcagggcaggctgcagcaacacctgcgctggctgcagcagtatgtagcagagctgcggctgcaccccgaggcactgaacctgtcactggatgagctgccgccggccctgagacaggacaacttctcgctgcccagtggcatggccctcctgcagcagctggataccattgacaacgcggcctgcggctggatccagttcatgtccaaggtgagcgtggacatcttcaagggcttccccgacgaggagagcattgtcaactacaccctcaaccaggcctaccaggacaacgtcactgtttttgccagtgtgatcttccagacccggaaggacggctcgctcccgcctcacgtgcactacaagatccgccagaactccagcttcaccgagaaaaccaacgagatccgccgcgcctactggcggcctgggcccaatactggcggccgcttctacttcctctacggcttcgtctggatccaggacatgatggagcgcgccatcatcgacacttttgtggggcacgacgtggtggagccaggcagctacgtgcagatgttcccctacccctgctacacacgcgatgacttcctgtttgtcattgagcacatgatgccgctgtgcatggtgatctcctgggtctactccgtggccatgaccatccagcacatcgtggcggagaaggagcaccggctcaaggaggtgatgaagaccatgggcctgaacaacgcggtgcactgggtggcctggttcatcaccggctttgtgcagctgtccatctccgtgacagcactcaccgccatcctgaagtacggccaggtgcttatgcacagccacgtggtcatcatctggctcttcctggcagtctacgcggtggccaccatcatgttctgcttcctggtgtctgtgctgtactccaaggccaagctggcctcggcctgcggtggcatcatctacttcctgagctacgtgccctacatgtacgtggcgatccgagaggaggtggcgcatgataagatcacggccttcgagaagtgcatcgcgtccctcatgtccacgacggcctttggtctgggctctaagtacttcgcgctgtatgaggtggccggcgtgggcatccagtggcacaccttcagccagtccccggtggagggggacgacttcaacttgctcctggctgtcaccatgctgatggtggacgccgtggtctatggcatcctcacgtggtacattgaggctgtgcacccaggcatgtacgggctgccccggccctggtacttcccactgcagaagtcctactggctgggcagtgggcggacagaagcctgggagtggagctggccgtgggcacgcaccccccgcctcagtgtcatggaggaggaccaggcctgtgccatggagagccggcgctttgaggagacccgtggcatggaggaggagcccacccacctgcctctggttgtctgcgtggacaaactcaccaaggtctacaaggacgacaagaagctggccctgaacaagctgagcctgaacctctacgagaaccaggtggtctccttcttgggccacaacggggcgggcaagaccaccaccatgtccatcctgaccggcctgttccctccaacgtcgggttccgccaccatctacgggcacgacatccgcacggagatggatgagatccgcaagaacctgggcatgtgcccgcagcacaatgtgctctttgaccggctcacggtggaggaacacctctggttctactcacggctcaagagcatggctcaggaggagatccgcagagagatggacaagatgatcgaggacctggagctctccaacaaacggcactcactggtgcagacattgtcgggtggcatgaagcgcaagctgtccgtggccatcgccttcgtgggcggctctcgcgccatcatcctggacgagcccacggcgggcgtggacccctacgcgcgccgcgccatctgggacctcatcctgaagtacaagccaggccgcaccatccttctgtccacccaccacatggatgaggctgacctgcttggggaccgcattgccatcatctcccatgggaagctcaagtgctgcggctccccgctcttcctcaagggcacctatggcgacgggtaccgcctcacgctggtcaagcggcccgccgagccggggggcccccaagagccagggctggcatccagccccccaggtcgggccccgctgagcagctgctccgagctccaggtgtcccagttcatccgcaagcatgtggcctcctgcctgctggtctcagacacaagcacggagctctcctacatcctgcccagcgaggccgccaagaagggggctttcgagcgcctcttccagcacctggagcgcagcctggatgcactgcacctcagcagcttcgggctgatggacacgaccctggaggaagtgttcctcaaggtgtcggaggaggatcagtcgctggagaacagtgaggccgatgtgaaggagtccaggaaggatgtgctccctggggcggagggcccggcgtctggggagggtcacgctggcaatctggcccggtgctcggagctgacccagtcgcaggcatcgctgcagtcggcgtcatctgtgggctctgcccgtggcgacgagggagctggctacaccgacgtctatggcgactaccgccccctctttgataacccacaggacccagacaatgtcagcctgcaagaggtggaggcagaggccctgtcgagggtcggccagggcagccgcaagctggacggcgggtggctgaaggtgcgccagttccacgggctgctggtcaaacgcttccactgcgcccgccgcaactccaaggcactcttctcccagatcttgctgccagccttcttcgtctgcgtggccatgaccgtggccctgtccgtcccggagattggtgatctgcccccgctggtcctgtcaccttcccagtaccacaactacacccagccccgtggcaatttcatcccctacgccaacgaggagcgccgcgagtaccggctgcggctatcgcccgacgccagcccccagcagctcgtgagcacgttccggctgccgtcgggggtgggtgccacctgcgtgctcaagtctcccgccaacggctcgctggggcccacgttgaacctgagcagcggggagtcgcgcctgctggcggctcggttcttcgacagcatgtgtctggagtccttcacacaggggctgccactgtccaatttcgtgccacccccaccctcgcccgccccatctgactcgccagcgtccccggatgaggacctgcaggcctggaacgtctccctgccgcccaccgctgggccagaaatgtggacgtcggcaccctccctgccgcgcctggtacgggagcccgtccgctgcacctgctctgcgcagggcaccggcttctcctgccccagcagtgtgggcgggcacccgccccagatgcgggtggtcacaggcgacatcctgaccgacatcaccggccacaatgtctctgagtacctgctcttcacctccgaccgcttccgactgcaccggtatggggccatcacctttggaaacgtcctgaagtccatcccagcctcatttggcaccagggccccacccatggtgcggaagatcgcggtgcgcagggctgcccaggttttctacaacaacaagggctatcacagcatgcccacctacctcaacagcctcaacaacgccatcctgcgtgccaacctgcccaagagcaagggcaacccggcggcttacggcatcaccgtcaccaaccaccccatgaataagaccagcgccagcctctccctggattacctgctgcagggcacggatgtcgtcatcgccatcttcatcatcgtggccatgtccttcgtgccggccagcttcgttgtcttcctcgtggccgagaagtccaccaaggccaagcatctgcagtttgtcagcggctgcaaccccatcatctactggctggcgaactacgtgtgggacatgctcaactacctggtccccgctacctgctgtgtcatcatcctgtttgtgttcgacctgccggcctacacgtcgcccaccaacttccctgccgtcctctccctcttcctgctctatgggtggtccatcacgcccatcatgtacccggcctccttctggttcgaggtccccagctccgcctacgtgttcctcattgtcatcaatctcttcatcggcatcaccgccaccgtggccaccttcctgctacagctcttcgagcacgacaaggacctgaaggttgtcaacagttacctgaaaagctgcttcctcattttccccaactacaacctgggccacgggctcatggagatggcctacaacgagtacatcaacgagtactacgccaagattggccagtttgacaagatgaagtccccgttcgagtgggacattgtcacccgcggactggtggccatggcggttgagggcgtcgtgggcttcctcctgaccatcatgtgccagtacaacttcctgcggcggccacagcgcatgcctgtgtctaccaagcctgtggaggatgatgtggacgtggccagtgagcggcagcgagtgctccggggagacgccgacaatgacatggtcaagattgagaacctgaccaaggtctacaagtcccggaagattggccgtatcctggccgttgaccgcctgtgcctgggtgtgcgtcctggcgagtgcttcgggctcctgggcgtcaacggtgcgggcaagaccagcaccttcaagatgctgaccggcgacgagagcacgacggggggcgaggccttcgtcaatggacacagcgtgctgaaggagctgctccaggtgcagcagagcctcggctactgcccgcagtgtgacgcgctgttcgacgagctcacggcccgggagcacctgcagctgtacacgcggctgcgtgggatctcctggaaggacgaggcccgggtggtgaagtgggctctggagaagctggagctgaccaagtacgcagacaagccggctggcacctacagcggcggcaacaagcggaagctctccacggccatcgccctcattgggtacccagccttcatcttcctggacgagcccaccacaggcatggaccccaaggcccggcgcttcctctggaacctcatcctcgacctcatcaagacagggcgttcagtggtgctgacatcacacagcatggaggagtgcgaggcgctgtgcacgcggctggccatcatggtgaacggtcgcctgcggtgcctgggcagcatccagcacctgaagaaccggtttggagatggctacatgatcacggtgcggaccaagagcagccagagtgtgaaggacgtggtgcggttcttcaaccgcaacttcccggaagccatgctcaaggagcggcaccacacaaaggtgcagtaccagctcaagtcggagcacatctcgctggcccaggtgttcagcaagatggagcaggtgtctggcgtgctgggcatcgaggactactcggtcagccagaccacactggacaatgtgttcgtgaactttgccaagaagcagagtgacaacctggagcagcaggagacggagccgccatccgcactgcagtcccctctcggctgcttgctcagcctgctccggccccggtctgcccccacggagctccgggcacttgtggcagacgagcccgaggacctggacacggaggacgagggcctcatcagcttcgaggaggagcgggcccagctgtccttcaacacggacacgctctgctgaccacccagagctgggccagggaggacacgctccactgaccacccagagctgggccagggactcaacaatggggacagaagtcccccagtgcctgccagggcctggagtggaggttcaggaccaaggggcttctggtcctccagcccctgtactcggccatgccctgcggtcactgcggttgccgcccctaattgtgccaaaggctgacccggcccgggctgcgtacacccttgccctgctttgccttaaagcctcggggtctgcccggcccctcgcccctgcctggcactgctcaccgcccaaggcgacgccggctggaccaggcactgctggcctttctcctgcccgggactcgcctttagggtaccgagc

SEQ ID NO: 71143 - DNA, 7756 bp, Homo sapiens
ggggcggagccagcgcggatcgggtcccggacgcccgagcgccccgcccccgcgcgggcgatgcccagcggcgcggcgggctgcggggcccggcggggcgcgcagaggagcgggccgcggcgctgaggcggcggagcgtggccccgccatgggcttcctgcaccagctgcagctgctgctctggaagaacgtgacgctcaaacgccggagcccgtgggtcctggccttcgagatcttcatccccctggtgctgttctttatcctgctggggctgcgacagaagaagcccaccatctccgtgaaggaagtctccttctacacagcggcgcccctgacgtctgccggcatcctgcctgtcatgcaatcgctgtgcccggacggccagcgagacgagttcggcttcctgcagtacgccaactccacggtcacgcagctgcttgagcgcctggaccgcgtggtggaggaaggcaacctgtttgacccagcgcggcccagcctgggctcagagctcgaggccctacgccagcatctggaggccctcagtgcgggcccgggcacctcggggagccacctggacagatccacagtgtcttccttctctctggactcggtggccagaaacccgcaggagctctggcgtttcctgacgcaaaacttgtcgctgcccaatagcacggcccaagcactcttggccgcccgtgtggacccgcccgaggtctaccacctgctctttggtccctcatctgccctggattcacagtctggcctccacaagggtcaggagccctggagccgcctagggggcaatcccctgttccggatggaggagctgctgctggctcctgccctcctggagcagctcacctgcacgccgggctcgggggagctgggccggatcctcactgtgcctgagagtcagaagggagccctgcagggctaccgggatgctgtctgcagtgggcaggctgctgcgcgtgccaggcgcttctctgggctgtctgctgagctccggaaccagctggacgtggccaaggtctcccagcagctgggcctggatgcccccaacggctcggactcctcgccacaggcgccacccccacggaggctgcaggcgcttctgggggacctgctggatgcccagaaggttctgcaggatgtggatgtcctgtcggccctggccctgctactgccccagggtgcctgcactggccggacccccggacccccagccagtggtgcgggtggggcggccaatggcactggggcaggggcagtcatgggccccaacgccaccgctgaggagggcgcaccctctgctgcagcactggccaccccggacacgctgcagggccagtgctcagccttcgtacagctctgggccggcctgcagcccatcttgtgtggcaacaaccgcaccattgaacccgaggcgctgcggcggggcaacatgagctccctgggcttcacgagcaaggagcagcggaacctgggcctcctcgtgcacctcatgaccagcaaccccaaaatcctgtacgcgcctgcgggctctgaggtcgaccgcgtcatcctcaaggccaacgagacttttgcttttgtgggcaacgtgactcactatgcccaggtctggctcaacatctcggcggagatccgcagcttcctggagcagggcaggctgcagcaacacctgcgctggctgcagcagtatgtagcagagctgcggctgcaccccgaggcactgaacctgtcactggatgagctgccgccggccctgagacaggacaacttctcgctgcccagtggcatggccctcctgcagcagctggataccattgacaacgcggcctgcggctggatccagttcatgtccaaggtgagcgtggacatcttcaagggcttccccgacgaggagagcattgtcaactacaccctcaaccaggcctaccaggacaacgtcactgtttttgccagtgtgatcttccagacccggaaggacggctcgctcccgcctcacgtgcactacaagatccgccagaactccagcttcaccgagaaaaccaacgagatccgccgcgcctactggcggcctgggcccaatactggcggccgcttctacttcctctacggcttcgtctggatccaggacatgatggagcgcgccatcatcgacacttttgtggggcacgacgtggtggagccaggcagctacgtgcagatgttcccctacccctgctacacacgcgatgacttcctgtttgtcattgagcacatgatgccgctgtgcatggtgatctcctgggtctactccgtggccatgaccatccagcacatcgtggcggagaaggagcaccggctcaaggaggtgatgaagaccatgggcctgaacaacgcggtgcactgggtggcctggttcatcaccggctttgtgcagctgtccatctccgtgacagcactcaccgccatcctgaagtacggccaggtgcttatgcacagccacgtggtcatcatctggctcttcctggcagtctacgcggtggccaccatcatgttctgcttcctggtgtctgtgctgtactccaaggccaagctggcctcggcctgcggtggcatcatctacttcctgagctacgtgccctacatgtacgtggcgatccgagaggaggtggcgcatgataagatcacggccttcgagaagtgcatcgcgtccctcatgtccacgacggcctttggtctgggctctaagtacttcgcgctgtatgaggtggccggcgtgggcatccagtggcacaccttcagccagtccccggtggagggggacgacttcaacttgctcctggctgtcaccatgctgatggtggacgccgtggtctatggcatcctcacgtggtacattgaggctgtgcacccaggcatgtacgggctgccccggccctggtacttcccactgcagaagtcctactggctgggcagtgggcggacagaagcctgggagtggagctggccgtgggcacgcaccccccgcctcagtgtcatggaggaggaccaggcctgtgccatggagagccggcgctttgaggagacccgtggcatggaggaggagcccacccacctgcctctggttgtctgcgtggacaaactcaccaaggtctacaaggacgacaagaagctggccctgaacaagctgagcctgaacctctacgagaaccaggtggtctccttcttgggccacaacggggcgggcaagaccaccaccatgtccatcctgaccggcctgttccctccaacgtcgggttccgccaccatctacgggcacgacatccgcacggagatggatgagatccgcaagaacctgggcatgtgcccgcagcacaatgtgctctttgaccggctcacggtggaggaacacctctggttctactcacggctcaagagcatggctcaggaggagatccgcagagagatggacaagatgatcgaggacctggagctctccaacaaacggcactcactggtgcagacattgtcgggtggcatgaagcgcaagctgtccgtggccatcgccttcgtgggcggctctcgcgccatcatcctggacgagcccacggcgggcgtggacccctacgcgcgccgcgccatctgggacctcatcctgaagtacaagccaggccgcaccatccttctgtccacccaccacatggatgaggctgacctgcttggggaccgcattgccatcatctcccatgggaagctcaagtgctgcggctccccgctcttcctcaagggcacctatggcgacgggtaccgcctcacgctggtcaagcggcccgccgagccggggggcccccaagagccagggctggcatccagccccccaggtcgggccccgctgagcagctgctccgagctccaggtgtcccagttcatccgcaagcatgtggcctcctgcctgctggtctcagacacaagcacggagctctcctacatcctgcccagcgaggccgccaagaagggggctttcgagcgcctcttccagcacctggagcgcagcctggatgcactgcacctcagcagcttcgggctgatggacacgaccctggaggaagtgttcctcaaggtgtcggaggaggatcagtcgctggagaacagtgaggccgatgtgaaggagtccaggaaggatgtgctccctggggcggagggcccggcgtctggggagggtcacgctggcaatctggcccggtgctcggagctgacccagtcgcaggcatcgctgcagtcggcgtcatctgtgggctctgcccgtggcgacgagggagctggctacaccgacgtctatggcgactaccgccccctctttgataacccacaggacccagacaatgtcagcctgcaagaggtggaggcagaggccctgtcgagggtcggccagggcagccgcaagctggacggcgggtggctgaaggtgcgccagttccacgggctgctggtcaaacgcttccactgcgcccgccgcaactccaaggcactcttctcccagatcttgctgccagccttcttcgtctgcgtggccatgaccgtggccctgtccgtcccggagattggtgatctgcccccgctggtcctgtcaccttcccagtaccacaactacacccagccccgtggcaatttcatcccctacgccaacgaggagcgccgcgagtaccggctgcggctatcgcccgacgccagcccccagcagctcgtgagcacgttccggctgccgtcgggggtgggtgccacctgcgtgctcaagtctcccgccaacggctcgctggggcccacgttgaacctgagcagcggggagtcgcgcctgctggcggctcggttcttcgacagcatgtgtctggagtccttcacacaggggctgccactgtccaatttcgtgccacccccaccctcgcccgccccatctgactcgccagcgtccccggatgaggacctgcaggcctggaacgtctccctgccgcccaccgctgggccagaaatgtggacgtcggcaccctccctgccgcgcctggtacgggagcccgtccgctgcacctgctctgcgcagggcaccggcttctcctgccccagcagtgtgggcgggcacccgccccagatgcgggtggtcacaggcgacatcctgaccgacatcaccggccacaatgtctctgagtacctgctcttcacctccgaccgcttccgactgcaccggtatggggccatcacctttggaaacgtcctgaagtccatcccagcctcatttggcaccagggccccacccatggtgcggaagatcgcggtgcgcagggctgcccaggttttctacaacaacaagggctatcacagcatgcccacctacctcaacagcctcaacaacgccatcctgcgtgccaacctgcccaagagcaagggcaacccggcggcttacggcatcaccgtcaccaaccaccccatgaataagaccagcgccagcctctccctggattacctgctgcagggcacggatgtcgtcatcgccatcttcatcatcgtggccatgtccttcgtgccggccagcttcgttgtcttcctcgtggccgagaagtccaccaaggccaagcatctgcagtttgtcagcggctgcaaccccatcatctactggctggcgaactacgtgtgggacatgctcaactacctggtccccgctacctgctgtgtcatcatcctgtttgtgttcgacctgccggcctacacgtcgcccaccaacttccctgccgtcctctccctcttcctgctctatgggtggtccatcacgcccatcatgtacccggcctccttctggttcgaggtccccagctccgcctacgtgttcctcattgtcatcaatctcttcatcggcatcaccgccaccgtggccaccttcctgctacagctcttcgagcacgacaaggacctgaaggttgtcaacagttacctgaaaagctgcttcctcattttccccaactacaacctgggccacgggctcatggagatggcctacaacgagtacatcaacgagtactacgccaagattggccagtttgacaagatgaagtccccgttcgagtgggacattgtcacccgcggactggtggccatggcggttgagggcgtcgtgggcttcctcctgaccatcatgtgccagtacaacttcctgcggcggccacagcgcatgcctgtgtctaccaagcctgtggaggatgatgtggacgtggccagtgagcggcagcgagtgctccggggagacgccgacaatgacatggtcaagattgagaacctgaccaaggtctacaagtcccggaagattggccgtatcctggccgttgaccgcctgtgcctgggtgtgcgtcctggcgagtgcttcgggctcctgggcgtcaacggtgcgggcaagaccagcaccttcaagatgctgaccggcgacgagagcacgacggggggcgaggccttcgtcaatggacacagcgtgctgaaggagctgctccaggtgcagcagagcctcggctactgcccgcagtgtgacgcgctgttcgacgagctcacggcccgggagcacctgcagctgtacacgcggctgcgtgggatctcctggaaggacgaggcccgggtggtgaagtgggctctggagaagctggagctgaccaagtacgcagacaagccggctggcacctacagcggcggcaacaagcggaagctctccacggccatcgccctcattgggtacccagccttcatcttcctggacgagcccaccacaggcatggaccccaaggcccggcgcttcctctggaacctcatcctcgacctcatcaagacagggcgttcagtggtgctgacatcacacagcatggaggagtgcgaggcgctgtgcacgcggctggccatcatggtgaacggtcgcctgcggtgcctgggcagcatccagcacctgaagaaccggtttggagatggctacatgatcacggtgcggaccaagagcagccagagtgtgaaggacgtggtgcggttcttcaaccgcaacttcccggaagccatgctcaaggagcggcaccacacaaaggtgcagtaccagctcaagtcggagcacatctcgctggcccaggtgttcagcaagatggagcaggtgtctggcgtgctgggcatcgaggactactcggtcagccagaccacactggacaatgtgttcgtgaactttgccaagaagcagagtgacaacctggagcagcaggagacggagccgccatccgcactgcagtcccctctcggctgcttgctcagcctgctccggccccggtctgcccccacggagctccgggcacttgtggcagacgagcccgaggacctggacacggaggacgagggcctcatcagcttcgaggaggagcgggcccagctgtccttcaacacggacacgctctgctgaccacccagagctgggccagggaggacacgctccactgaccacccagagctgggccagggactcaacaatggggacagaagtcccccagtgcctgccagggcctggagtggaggttcaggaccaaggggcttctggtcctccagcccctgtactcggccatgccctgcggtcactgcggttgccgcccctaattgtgccaaaggctgacccggcccgggctgcgtacacccttgccctgctttgccttaaagcctcggggtctgcccgactcgcctttatagatcgtcttagagtact

SEQ ID NO: 71144 - DNA, 7897 bp, Homo sapiens
ggggcggagccagcgcggatcgggtcccggacgcccgagcgccccgcccccgcgcgggcgatgcccagcggcgcggcgggctgcggggcccggcggggcgcgcagaggagcgggccgcggcgctgaggcggcggagcgtggccccgccatgggcttcctgcaccagctgcagctgctgctctggaagaacgtgacgctcaaacgccggagcccgtgggtcctggccttcgagatcttcatccccctggtgctgttctttatcctgctggggctgcgacagaagaagcccaccatctccgtgaaggaagtctccttctacacagcggcgcccctgacgtctgccggcatcctgcctgtcatgcaatcgctgtgcccggacggccagcgagacgagttcggcttcctgcagtacgccaactccacggtcacgcagctgcttgagcgcctggaccgcgtggtggaggaaggcaacctgtttgacccagcgcggcccagcctgggctcagagctcgaggccctacgccagcatctggaggccctcagtgcgggcccgggcacctcggggagccacctggacagatccacagtgtcttccttctctctggactcggtggccagaaacccgcaggagctctggcgtttcctgacgcaaaacttgtcgctgcccaatagcacggcccaagcactcttggccgcccgtgtggacccgcccgaggtctaccacctgctctttggtccctcatctgccctggattcacagtctggcctccacaagggtcaggagccctggagccgcctagggggcaatcccctgttccggatggaggagctgctgctggctcctgccctcctggagcagctcacctgcacgccgggctcgggggagctgggccggatcctcactgtgcctgagagtcagaagggagccctgcagggctaccgggatgctgtctgcagtgggcaggctgctgcgcgtgccaggcgcttctctgggctgtctgctgagctccggaaccagctggacgtggccaaggtctcccagcagctgggcctggatgcccccaacggctcggactcctcgccacaggcgccacccccacggaggctgcaggcgcttctgggggacctgctggatgcccagaaggttctgcaggatgtggatgtcctgtcggccctggccctgctactgccccagggtgcctgcactggccggacccccggacccccagccagtggtgcgggtggggcggccaatggcactggggcaggggcagtcatgggccccaacgccaccgctgaggagggcgcaccctctgctgcagcactggccaccccggacacgctgcagggccagtgctcagccttcgtacagctctgggccggcctgcagcccatcttgtgtggcaacaaccgcaccattgaacccgaggcgctgcggcggggcaacatgagctccctgggcttcacgagcaaggagcagcggaacctgggcctcctcgtgcacctcatgaccagcaaccccaaaatcctgtacgcgcctgcgggctctgaggtcgaccgcgtcatcctcaaggccaacgagacttttgcttttgtgggcaacgtgactcactatgcccaggtctggctcaacatctcggcggagatccgcagcttcctggagcagggcaggctgcagcaacacctgcgctggctgcagcagtatgtagcagagctgcggctgcaccccgaggcactgaacctgtcactggatgagctgccgccggccctgagacaggacaacttctcgctgcccagtggcatggccctcctgcagcagctggataccattgacaacgcggcctgcggctggatccagttcatgtccaaggtgagcgtggacatcttcaagggcttccccgacgaggagagcattgtcaactacaccctcaaccaggcctaccaggacaacgtcactgtttttgccagtgtgatcttccagacccggaaggacggctcgctcccgcctcacgtgcactacaagatccgccagaactccagcttcaccgagaaaaccaacgagatccgccgcgcctactggcggcctgggcccaatactggcggccgcttctacttcctctacggcttcgtctggatccaggacatgatggagcgcgccatcatcgacacttttgtggggcacgacgtggtggagccaggcagctacgtgcagatgttcccctacccctgctacacacgcgatgacttcctgtttgtcattgagcacatgatgccgctgtgcatggtgatctcctgggtctactccgtggccatgaccatccagcacatcgtggcggagaaggagcaccggctcaaggaggtgatgaagaccatgggcctgaacaacgcggtgcactgggtggcctggttcatcaccggctttgtgcagctgtccatctccgtgacagcactcaccgccatcctgaagtacggccaggtgcttatgcacagccacgtggtcatcatctggctcttcctggcagtctacgcggtggccaccatcatgttctgcttcctggtgtctgtgctgtactccaaggccaagctggcctcggcctgcggtggcatcatctacttcctgagctacgtgccctacatgtacgtggcgatccgagaggaggtggcgcatgataagatcacggccttcgagaagtgcatcgcgtccctcatgtccacgacggcctttggtctgggctctaagtacttcgcgctgtatgaggtggccggcgtgggcatccagtggcacaccttcagccagtccccggtggagggggacgacttcaacttgctcctggctgtcaccatgctgatggtggacgccgtggtctatggcatcctcacgtggtacattgaggctgtgcacccaggcatgtacgggctgccccggccctggtacttcccactgcagaagtcctactggctgggcagtgggcggacagaagcctgggagtggagctggccgtgggcacgcaccccccgcctcagtgtcatggaggaggaccaggcctgtgccatggagagccggcgctttgaggagacccgtggcatggaggaggagcccacccacctgcctctggttgtctgcgtggacaaactcaccaaggtctacaaggacgacaagaagctggccctgaacaagctgagcctgaacctctacgagaaccaggtggtctccttcttgggccacaacggggcgggcaagaccaccaccatgtccatcctgaccggcctgttccctccaacgtcgggttccgccaccatctacgggcacgacatccgcacggagatggatgagatccgcaagaacctgggcatgtgcccgcagcacaatgtgctctttgaccggctcacggtggaggaacacctctggttctactcacggctcaagagcatggctcaggaggagatccgcagagagatggacaagatgatcgaggacctggagctctccaacaaacggcactcactggtgcagacattgtcgggtggcatgaagcgcaagctgtccgtggccatcgccttcgtgggcggctctcgcgccatcatcctggacgagcccacggcgggcgtggacccctacgcgcgccgcgccatctgggacctcatcctgaagtacaagccaggccgcaccatccttctgtccacccaccacatggatgaggctgacctgcttggggaccgcattgccatcatctcccatgggaagctcaagtgctgcggctccccgctcttcctcaagggcacctatggcgacgggtaccgcctcacgctggtcaagcggcccgccgagccggggggcccccaagagccagggctggcatccagccccccaggtcgggccccgctgagcagctgctccgagctccaggtgtcccagttcatccgcaagcatgtggcctcctgcctgctggtctcagacacaagcacggagctctcctacatcctgcccagcgaggccgccaagaagggggctttcgagcgcctcttccagcacctggagcgcagcctggatgcactgcacctcagcagcttcgggctgatggacacgaccctggaggaagtgttcctcaaggtgtcggaggaggatcagtcgctggagaacagtgaggccgatgtgaaggagtccaggaaggatgtgctccctggggcggagggcccggcgtctggggagggtcacgctggcaatctggcccggtgctcggagctgacccagtcgcaggcatcgctgcagtcggcgtcatctgtgggctctgcccgtggcgacgagggagctggctacaccgacgtctatggcgactaccgccccctctttgataacccacaggacccagacaatgtcagcctgcaagaggtggaggcagaggccctgtcgagggtcggccagggcagccgcaagctggacggcgggtggctgaaggtgcgccagttccacgggctgctggtcaaacgcttccactgcgcccgccgcaactccaaggcactcttctcccagatcttgctgccagccttcttcgtctgcgtggccatgaccgtggccctgtccgtcccggagattggtgatctgcccccgctggtcctgtcaccttcccagtaccacaactacacccagccccgtggcaatttcatcccctacgccaacgaggagcgccgcgagtaccggctgcggctatcgcccgacgccagcccccagcagctcgtgagcacgttccggctgccgtcgggggtgggtgccacctgcgtgctcaagtctcccgccaacggctcgctggggcccacgttgaacctgagcagcggggagtcgcgcctgctggcggctcggttcttcgacagcatgtgtctggagtccttcacacaggggctgccactgtccaatttcgtgccacccccaccctcgcccgccccatctgactcgccagcgtccccggatgaggacctgcaggcctggaacgtctccctgccgcccaccgctgggccagaaatgtggacgtcggcaccctccctgccgcgcctggtacgggagcccgtccgctgcacctgctctgcgcagggcaccggcttctcctgccccagcagtgtgggcgggcacccgccccagatgcgggtggtcacaggcgacatcctgaccgacatcaccggccacaatgtctctgagtacctgctcttcacctccgaccgcttccgactgcaccggtatggggccatcacctttggaaacgtcctgaagtccatcccagcctcatttggcaccagggccccacccatggtgcggaagatcgcggtgcgcagggctgcccaggttttctacaacaacaagggctatcacagcatgcccacctacctcaacagcctcaacaacgccatcctgcgtgccaacctgcccaagagcaagggcaacccggcggcttacggcatcaccgtcaccaaccaccccatgaataagaccagcgccagcctctccctggattacctgctgcagggcacggatgtcgtcatcgccatcttcatcatcgtggccatgtccttcgtgccggccagcttcgttgtcttcctcgtggccgagaagtccaccaaggccaagcatctgcagtttgtcagcggctgcaaccccatcatctactggctggcgaactacgtgtgggacatgctcaactacctggtccccgctacctgctgtgtcatcatcctgtttgtgttcgacctgccggcctacacgtcgcccaccaacttccctgccgtcctctccctcttcctgctctatgggtggtccatcacgcccatcatgtacccggcctccttctggttcgaggtccccagctccgcctacgtgttcctcattgtcatcaatctcttcatcggcatcaccgccaccgtggccaccttcctgctacagctcttcgagcacgacaaggacctgaaggttgtcaacagttacctgaaaagctgcttcctcattttccccaactacaacctgggccacgggctcatggagatggcctacaacgagtacatcaacgagtactacgccaagattggccagtttgacaagatgaagtccccgttcgagtgggacattgtcacccgcggactggtggccatggcggttgagggcgtcgtgggcttcctcctgaccatcatgtgccagtacaacttcctgcggcggccacagcgcatgcctgtgtctaccaagcctgtggaggatgatgtggacgtggccagtgagcggcagcgagtgctccggggagacgccgacaatgacatggtcaagattgagaacctgaccaaggtctacaagtcccggaagattggccgtatcctggccgttgaccgcctgtgcctgggtgtgcgtcctggcgagtgcttcgggctcctgggcgtcaacggtgcgggcaagaccagcaccttcaagatgctgaccggcgacgagagcacgacggggggcgaggccttcgtcaatggacacagcgtgctgaaggagctgctccaggtgcagcagagcctcggctactgcccgcagtgtgacgcgctgttcgacgagctcacggcccgggagcacctgcagctgtacacgcggctgcgtgggatctcctggaaggacgaggcccgggtggtgaagtgggctctggagaagctggagctgaccaagtacgcagacaagccggctggcacctacagcggcggcaacaagcggaagctctccacggccatcgccctcattgggtacccagccttcatcttcctggacgagcccaccacaggcatggaccccaaggcccggcgcttcctctggaacctcatcctcgacctcatcaagacagggcgttcagtggtgctgacatcacacagcatggaggagtgcgaggcgctgtgcacgcggctggccatcatggtgaacggtcgcctgcggtgcctgggcagcatccagcacctgaagaaccggtttggagatggctacatgatcacggtgcggaccaagagcagccagagtgtgaaggacgtggtgcggttcttcaaccgcaacttcccggaagccatgctcaaggagcggcaccacacaaaggtgcagtaccagctcaagtcggagcacatctcgctggcccaggtgttcagcaagatggagcaggtgtctggcgtgctgggcatcgaggactactcggtcagccagaccacactggacaatgtgttcgtgaactttgccaagaagcagagtgacaacctggagcagcaggagacggagccgccatccgcactgcagtcccctctcggctgcttgctcagcctgctccggccccggtctgcccccacggagctccgggcacttgtggcagacgagcccgaggacctggacacggaggacgagggcctcatcagcttcgaggaggagcgggcccagctgtccttcaacacggacacgctctgctgaccacccagagctgggccagggaggacacgctccactgaccacccagagctgggccagggactcaacaatggggacagaagtcccccagtgcctgccagggcctggagtggaggttcaggaccaaggggcttctggtcctccagcccctgtactcggccatgccctgcggtcactgcggttgccgccctgctcaccgcccaaggcgacgccggctggaccaggcactgctggcctttctcctgcccggcctcggaaccagcttttctctcttacgatgaaggctgatgccgagagcgggctgtgggcggagctgggtcagtcccgtatttattttgctttgagaagaggctcctttggccccctgcccgcccacctccctgggagccgggcctgtacatagcgcacagatgtttgttttaaataaataaacaaaatgtc

SEQ ID NO: 71145 - DNA, 7955 bp, Homo sapiens
ggggcggagccagcgcggatcgggtcccggacgcccgagcgccccgcccccgcgcgggcgatgcccagcggcgcggcgggctgcggggcccggcggggcgcgcagaggagcgggccgcggcgctgaggcggcggagcgtggccccgccatgggcttcctgcaccagctgcagctgctgctctggaagaacgtgacgctcaaacgccggagcccgtgggtcctggccttcgagatcttcatccccctggtgctgttctttatcctgctggggctgcgacagaagaagcccaccatctccgtgaaggaagtctccttctacacagcggcgcccctgacgtctgccggcatcctgcctgtcatgcaatcgctgtgcccggacggccagcgagacgagttcggcttcctgcagtacgccaactccacggtcacgcagctgcttgagcgcctggaccgcgtggtggaggaaggcaacctgtttgacccagcgcggcccagcctgggctcagagctcgaggccctacgccagcatctggaggccctcagtgcgggcccgggcacctcggggagccacctggacagatccacagtgtcttccttctctctggactcggtggccagaaacccgcaggagctctggcgtttcctgacgcaaaacttgtcgctgcccaatagcacggcccaagcactcttggccgcccgtgtggacccgcccgaggtctaccacctgctctttggtccctcatctgccctggattcacagtctggcctccacaagggtcaggagccctggagccgcctagggggcaatcccctgttccggatggaggagctgctgctggctcctgccctcctggagcagctcacctgcacgccgggctcgggggagctgggccggatcctcactgtgcctgagagtcagaagggagccctgcagggctaccgggatgctgtctgcagtgggcaggctgctgcgcgtgccaggcgcttctctgggctgtctgctgagctccggaaccagctggacgtggccaaggtctcccagcagctgggcctggatgcccccaacggctcggactcctcgccacaggcgccacccccacggaggctgcaggcgcttctgggggacctgctggatgcccagaaggttctgcaggatgtggatgtcctgtcggccctggccctgctactgccccagggtgcctgcactggccggacccccggacccccagccagtggtgcgggtggggcggccaatggcactggggcaggggcagtcatgggccccaacgccaccgctgaggagggcgcaccctctgctgcagcactggccaccccggacacgctgcagggccagtgctcagccttcgtacagctctgggccggcctgcagcccatcttgtgtggcaacaaccgcaccattgaacccgaggcgctgcggcggggcaacatgagctccctgggcttcacgagcaaggagcagcggaacctgggcctcctcgtgcacctcatgaccagcaaccccaaaatcctgtacgcgcctgcgggctctgaggtcgaccgcgtcatcctcaaggccaacgagacttttgcttttgtgggcaacgtgactcactatgcccaggtctggctcaacatctcggcggagatccgcagcttcctggagcagggcaggctgcagcaacacctgcgctggctgcagcagtatgtagcagagctgcggctgcaccccgaggcactgaacctgtcactggatgagctgccgccggccctgagacaggacaacttctcgctgcccagtggcatggccctcctgcagcagctggataccattgacaacgcggcctgcggctggatccagttcatgtccaaggtgagcgtggacatcttcaagggcttccccgacgaggagagcattgtcaactacaccctcaaccaggcctaccaggacaacgtcactgtttttgccagtgtgatcttccagacccggaaggacggctcgctcccgcctcacgtgcactacaagatccgccagaactccagcttcaccgagaaaaccaacgagatccgccgcgcctactggcggcctgggcccaatactggcggccgcttctacttcctctacggcttcgtctggatccaggacatgatggagcgcgccatcatcgacacttttgtggggcacgacgtggtggagccaggcagctacgtgcagatgttcccctacccctgctacacacgcgatgacttcctgtttgtcattgagcacatgatgccgctgtgcatggtgatctcctgggtctactccgtggccatgaccatccagcacatcgtggcggagaaggagcaccggctcaaggaggtgatgaagaccatgggcctgaacaacgcggtgcactgggtggcctggttcatcaccggctttgtgcagctgtccatctccgtgacagcactcaccgccatcctgaagtacggccaggtgcttatgcacagccacgtggtcatcatctggctcttcctggcagtctacgcggtggccaccatcatgttctgcttcctggtgtctgtgctgtactccaaggccaagctggcctcggcctgcggtggcatcatctacttcctgagctacgtgccctacatgtacgtggcgatccgagaggaggtggcgcatgataagatcacggccttcgagaagtgcatcgcgtccctcatgtccacgacggcctttggtctgggctctaagtacttcgcgctgtatgaggtggccggcgtgggcatccagtggcacaccttcagccagtccccggtggagggggacgacttcaacttgctcctggctgtcaccatgctgatggtggacgccgtggtctatggcatcctcacgtggtacattgaggctgtgcacccaggcatgtacgggctgccccggccctggtacttcccactgcagaagtcctactggctgggcagtgggcggacagaagcctgggagtggagctggccgtgggcacgcaccccccgcctcagtgtcatggaggaggaccaggcctgtgccatggagagccggcgctttgaggagacccgtggcatggaggaggagcccacccacctgcctctggttgtctgcgtggacaaactcaccaaggtctacaaggacgacaagaagctggccctgaacaagctgagcctgaacctctacgagaaccaggtggtctccttcttgggccacaacggggcgggcaagaccaccaccatgtccatcctgaccggcctgttccctccaacgtcgggttccgccaccatctacgggcacgacatccgcacggagatggatgagatccgcaagaacctgggcatgtgcccgcagcacaatgtgctctttgaccggctcacggtggaggaacacctctggttctactcacggctcaagagcatggctcaggaggagatccgcagagagatggacaagatgatcgaggacctggagctctccaacaaacggcactcactggtgcagacattgtcgggtggcatgaagcgcaagctgtccgtggccatcgccttcgtgggcggctctcgcgccatcatcctggacgagcccacggcgggcgtggacccctacgcgcgccgcgccatctgggacctcatcctgaagtacaagccaggccgcaccatccttctgtccacccaccacatggatgaggctgacctgcttggggaccgcattgccatcatctcccatgggaagctcaagtgctgcggctccccgctcttcctcaagggcacctatggcgacgggtaccgcctcacgctggtcaagcggcccgccgagccggggggcccccaagagccagggctggcatccagccccccaggtcgggccccgctgagcagctgctccgagctccaggtgtcccagttcatccgcaagcatgtggcctcctgcctgctggtctcagacacaagcacggagctctcctacatcctgcccagcgaggccgccaagaagggggctttcgagcgcctcttccagcacctggagcgcagcctggatgcactgcacctcagcagcttcgggctgatggacacgaccctggaggaagtgttcctcaaggtgtcggaggaggatcagtcgctggagaacagtgaggccgatgtgaaggagtccaggaaggatgtgctccctggggcggagggcccggcgtctggggagggtcacgctggcaatctggcccggtgctcggagctgacccagtcgcaggcatcgctgcagtcggcgtcatctgtgggctctgcccgtggcgacgagggagctggctacaccgacgtctatggcgactaccgccccctctttgataacccacaggacccagacaatgtcagcctgcaagaggtggaggcagaggccctgtcgagggtcggccagggcagccgcaagctggacggcgggtggctgaaggtgcgccagttccacgggctgctggtcaaacgcttccactgcgcccgccgcaactccaaggcactcttctcccagatcttgctgccagccttcttcgtctgcgtggccatgaccgtggccctgtccgtcccggagattggtgatctgcccccgctggtcctgtcaccttcccagtaccacaactacacccagccccgtggcaatttcatcccctacgccaacgaggagcgccgcgagtaccggctgcggctatcgcccgacgccagcccccagcagctcgtgagcacgttccggctgccgtcgggggtgggtgccacctgcgtgctcaagtctcccgccaacggctcgctggggcccacgttgaacctgagcagcggggagtcgcgcctgctggcggctcggttcttcgacagcatgtgtctggagtccttcacacaggggctgccactgtccaatttcgtgccacccccaccctcgcccgccccatctgactcgccagcgtccccggatgaggacctgcaggcctggaacgtctccctgccgcccaccgctgggccagaaatgtggacgtcggcaccctccctgccgcgcctggtacgggagcccgtccgctgcacctgctctgcgcagggcaccggcttctcctgccccagcagtgtgggcgggcacccgccccagatgcgggtggtcacaggcgacatcctgaccgacatcaccggccacaatgtctctgagtacctgctcttcacctccgaccgcttccgactgcaccggtatggggccatcacctttggaaacgtcctgaagtccatcccagcctcatttggcaccagggccccacccatggtgcggaagatcgcggtgcgcagggctgcccaggttttctacaacaacaagggctatcacagcatgcccacctacctcaacagcctcaacaacgccatcctgcgtgccaacctgcccaagagcaagggcaacccggcggcttacggcatcaccgtcaccaaccaccccatgaataagaccagcgccagcctctccctggattacctgctgcagggcacggatgtcgtcatcgccatcttcatcatcgtggccatgtccttcgtgccggccagcttcgttgtcttcctcgtggccgagaagtccaccaaggccaagcatctgcagtttgtcagcggctgcaaccccatcatctactggctggcgaactacgtgtgggacatgctcaactacctggtccccgctacctgctgtgtcatcatcctgtttgtgttcgacctgccggcctacacgtcgcccaccaacttccctgccgtcctctccctcttcctgctctatgggtggtccatcacgcccatcatgtacccggcctccttctggttcgaggtccccagctccgcctacgtgttcctcattgtcatcaatctcttcatcggcatcaccgccaccgtggccaccttcctgctacagctcttcgagcacgacaaggacctgaaggttgtcaacagttacctgaaaagctgcttcctcattttccccaactacaacctgggccacgggctcatggagatggcctacaacgagtacatcaacgagtactacgccaagattggccagtttgacaagatgaagtccccgttcgagtgggacattgtcacccgcggactggtggccatggcggttgagggcgtcgtgggcttcctcctgaccatcatgtgccagtacaacttcctgcggcggccacagcgcatgcctgtgtctaccaagcctgtggaggatgatgtggacgtggccagtgagcggcagcgagtgctccggggagacgccgacaatgacatggtcacgtgctgaaggagctgctccaggtgcagcagagcctcggctactgcccgcagtgtgacgcgctgttcgacgagctcacggcccgggagcacctgcagctgtacacgcggctgcgtgggatctcctggaaggacgaggcccgggtggtgaagtgggctctggagaagctggagctgaccaagtacgcagacaagccggctggcacctacagcggcggcaacaagcggaagctctccacggccatcgccctcattgggtacccagccttcatcttcctggacgagcccaccacaggcatggaccccaaggcccggcgcttcctctggaacctcatcctcgacctcatcaagacagggcgttcagtggtgctgacatcacacagcatggaggagtgcgaggcgctgtgcacgcggctggccatcatggtgaacggtcgcctgcggtgcctgggcagcatccagcacctgaagaaccggtttggagatggctacatgatcacggtgcggaccaagagcagccagagtgtgaaggacgtggtgcggttcttcaaccgcaacttcccggaagccatgctcaaggagcggcaccacacaaaggtgcagtaccagctcaagtcggagcacatctcgctggcccaggtgttcagcaagatggagcaggtgtctggcgtgctgggcatcgaggactactcggtcagccagaccacactggacaatgtgttcgtgaactttgccaagaagcagagtgacaacctggagcagcaggagacggagccgccatccgcactgcagtcccctctcggctgcttgctcagcctgctccggccccggtctgcccccacggagctccgggcacttgtggcagacgagcccgaggacctggacacggaggacgagggcctcatcagcttcgaggaggagcgggcccagctgtccttcaacacggacacgctctgctgaccacccagagctgggccagggaggacacgctccactgaccacccagagctgggccagggactcaacaatggggacagaagtcccccagtgcctgccagggcctggagtggaggttcaggaccaaggggcttctggtcctccagcccctgtactcggccatgccctgcggtcactgcggttgccgcccctaattgtgccaaaggctgacccggcccgggctgcgtacacccttgccctgctttgccttaaagcctcggggtctgcccggcccctcgcccctgcctggcactgctcaccgcccaaggcgacgccggctggaccaggcactgctggcctttctcctgcccggcctcggaaccagcttttctctcttacgatgaaggctgatgccgagagcgggctgtgggcggagctgggtcagtcccgtatttattttgctttgagaagaggctcctctggccctgctctcctgcagggaggtggctgtcccgcgggaagccatcagcttgggccagctggcaggtggcaggaatggagaagctgaccctgctggccaggcaaggggccagaccccccccaacccccagctgccatcgctctcccacccagcttggccccctgcccgcccacctccctgggagccgggcctgtacatagcgcacagatgtttgttttaaataaataaacaaaatgtc

SEQ ID NO: 71146 - DNA, 6527 bp, Homo sapiens
  misc_feature (6366)..(6366): n is a, c, g, or t
  misc_feature (6463)..(6463): n is a, c, g, or t
  misc_feature (6513)..(6513): n is a, c, g, or t
ggggcggagccagcgcggatcgggtcccggacgcccgagcgccccgcccccgcgcgggcgatgcccagcggcgcggcgggctgcggggcccggcggggcgcgcagaggagcgggccgcggcgctgaggcggcggagcgtggccccgccatgggcttcctgcaccagctgcagctgctgctctggaagaacgtgacgctcaaacgccggagcccgtgggtcctggccttcgagatcttcatccccctggtgctgttctttatcctgctggggctgcgacagaagaagcccaccatctccgtgaaggaagtctccttctacacagcggcgcccctgacgtctgccggcatcctgcctgtcatgcaatcgctgtgcccggacggccagcgagacgagttcggcttcctgcagtacgccaactccacggtcacgcagctgcttgagcgcctggaccgcgtggtggaggaaggcaacctgtttgacccagcgcggcccagcctgggctcagagctcgaggccctacgccagcatctggaggccctcagtgcgggcccgggcacctcggggagccacctggacagatccacagtgtcttccttctctctggactcggtggccagaaacccgcaggagctctggcgtttcctgacgcaaaacttgtcgctgcccaatagcacggcccaagcactcttggccgcccgtgtggacccgcccgaggtctaccacctgctctttggtccctcatctgccctggattcacagtctggcctccacaagggtcaggagccctggagccgcctagggggcaatcccctgttccggatggaggagctgctgctggctcctgccctcctggagcagctcacctgcacgccgggctcgggggagctgggccggatcctcactgtgcctgagagtcagaagggagccctgcagggctaccgggatgctgtctgcagtgggcaggctgctgcgcgtgccaggcgcttctctgggctgtctgctgagctccggaaccagctggacgtggccaaggtctcccagcagctgggcctggatgcccccaacggctcggactcctcgccacaggcgccacccccacggaggctgcaggcgcttctgggggacctgctggatgcccagaaggttctgcaggatgtggatgtcctgtcggccctggccctgctactgccccagggtgcctgcactggccggacccccggacccccagccagtggtgcgggtggggcggccaatggcactggggcaggggcagtcatgggccccaacgccaccgctgaggagggcgcaccctctgctgcagcactggccaccccggacacgctgcagggccagtgctcagccttcgtacagctctgggccggcctgcagcccatcttgtgtggcaacaaccgcaccattgaacccgaggcgctgcggcggggcaacatgagctccctgggcttcacgagcaaggagcagcggaacctgggcctcctcgtgcacctcatgaccagcaaccccaaaatcctgtacgcgcctgcgggctctgaggtcgaccgcgtcatcctcaaggccaacgagacttttgcttttgtgggcaacgtgactcactatgcccaggtctggctcaacatctcggcggagatccgcagcttcctggagcagggcaggctgcagcaacacctgcgctggctgcagcagtatgtagcagagctgcggctgcaccccgaggcactgaacctgtcactggatgagctgccgccggccctgagacaggacaacttctcgctgcccagtggcatggccctcctgcagcagctggataccattgacaacgcggcctgcggctggatccagttcatgtccaaggtgagcgtggacatcttcaagggcttccccgacgaggagagcattgtcaactacaccctcaaccaggcctaccaggacaacgtcactgtttttgccagtgtgatcttccagacccggaaggacggctcgctcccgcctcacgtgcactacaagatccgccagaactccagcttcaccgagaaaaccaacgagatccgccgcgcctactggcggcctgggcccaatactggcggccgcttctacttcctctacggcttcgtctggatccaggacatgatggagcgcgccatcatcgacacttttgtggggcacgacgtggtggagccaggcagctacgtgcagatgttcccctacccctgctacacacgcgatgacttcctgtttgtcattgagcacatgatgccgctgtgcatggtgatctcctgggtctactccgtggccatgaccatccagcacatcgtggcggagaaggagcaccggctcaaggaggtgatgaagaccatgggcctgaacaacgcggtgcactgggtggcctggttcatcaccggctttgtgcagctgtccatctccgtgacagcactcaccgccatcctgaagtacggccaggtgcttatgcacagccacgtggtcatcatctggctcttcctggcagtctacgcggtggccaccatcatgttctgcttcctggtgtctgtgctgtactccaaggccaagctggcctcggcctgcggtggcatcatctacttcctgagctacgtgccctacatgtacgtggcgatccgagaggaggtggcgcatgataagatcacggccttcgagaagtgcatcgcgtccctcatgtccacgacggcctttggtctgggctctaagtacttcgcgctgtatgaggtggccggcgtgggcatccagtggcacaccttcagccagtccccggtggagggggacgacttcaacttgctcctggctgtcaccatgctgatggtggacgccgtggtctatggcatcctcacgtggtacattgaggctgtgcacccaggcatgtacgggctgccccggccctggtacttcccactgcagaagtcctactggctgggcagtgggcggacagaagcctgggagtggagctggccgtgggcacgcaccccccgcctcagtgtcatggaggaggaccaggcctgtgccatggagagccggcgctttgaggagacccgtggcatggaggaggagcccacccacctgcctctggttgtctgcgtggacaaactcaccaaggtctacaaggacgacaagaagctggccctgaacaagctgagcctgaacctctacgagaaccaggtggtctccttcttgggccacaacggggcgggcaagaccaccaccatgtccatcctgaccggcctgttccctccaacgtcgggttccgccaccatctacgggcacgacatccgcacggagatggatgagatccgcaagaacctgggcatgtgcccgcagcacaatgtgctctttgaccggctcacggtggaggaacacctctggttctactcacggctcaagagcatggctcaggaggagatccgcagagagatggacaagatgatcgaggacctggagctctccaacaaacggcactcactggtgcagacattgtcgggtggcatgaagcgcaagctgtccgtggccatcgccttcgtgggcggctctcgcgccatcatcctggacgagcccacggcgggcgtggacccctacgcgcgccgcgccatctgggacctcatcctgaagtacaagccaggccgcaccatccttctgtccacccaccacatggatgaggctgacctgcttggggaccgcattgccatcatctcccatgggaagctcaagtgctgcggctccccgctcttcctcaagggcacctatggcgacgggtaccgcctcacgctggtcaagcggcccgccgagccggggggcccccaagagccagggctggcatccagccccccaggtcgggccccgctgagcagctgctccgagctccaggtgtcccagttcatccgcaagcatgtggcctcctgcctgctggtctcagacacaagcacggagctctcctacatcctgcccagcgaggccgccaagaagggggctttcgagcgcctcttccagcacctggagcgcagcctggatgcactgcacctcagcagcttcgggctgatggacacgaccctggaggaagtgttcctcaaggtgtcggaggaggatcagtcgctggagaacagtgaggccgatgtgaaggagtccaggaaggatgtgctccctggggcggagggcccggcgtctggggagggtcacgctggcaatctggcccggtgctcggagctgacccagtcgcaggcatcgctgcagtcggcgtcatctgtgggctctgcccgtggcgacgagggagctggctacaccgacgtctatggcgactaccgccccctctttgataacccacaggacccagacaatgtcagcctgcaagaggtggaggcagaggccctgtcgagggtcggccagggcagccgcaagctggacggcgggtggctgaaggtgcgccagttccacgggctgctggtcaaacgcttccactgcgcccgccgcaactccaaggcactcttctcccagatcttgctgccagccttcttcgtctgcgtggccatgaccgtggccctgtccgtcccggagattggtgatctgcccccgctggtcctgtcaccttcccagtaccacaactacacccagccccgtggcaatttcatcccctacgccaacgaggagcgccgcgagtaccggctgcggctatcgcccgacgccagcccccagcagctcgtgagcacgttccggctgccgtcgggggtgggtgccacctgcgtgctcaagtctcccgccaacggctcgctggggcccacgttgaacctgagcagcggggagtcgcgcctgctggcggctcggttcttcgacagcatgtgtctggagtccttcacacaggggctgccactgtccaatttcgtgccacccccaccctcgcccgccccatctgactcgccagcgtccccggatgaggacctgcaggcctggaacgtctccctgccgcccaccgctgggccagaaatgtggacgtcggcaccctccctgccgcgcctggtacgggagcccgtccgctgcacctgctctgcgcagggcaccggcttctcctgccccagcagtgtgggcgggcacccgccccagatgcgggtggtcacaggcgacatcctgaccgacatcaccggccacaatgtctctgagtacctgctcttcacctccgaccgcttccgactgcaccggtatggggccatcacctttggaaacgtcctgaagtccatcccagcctcatttggcaccagggccccacccatggtgcggaagatcgcggtgcgcagggctgcccaggttttctacaacaacaagggctatcacagcatgcccacctacctcaacagcctcaacaacgccatcctgcgtgccaacctgcccaagagcaagggcaacccggcggcttacggcatcaccgtcaccaaccaccccatgaataagaccagcgccagcctctccctggattacctgctgcagggcacggatgtcgtcatcgccatcttcatcatcgtggccatgtccttcgtgccggccagcttcgttgtcttcctcgtggccgagaagtccaccaaggccaagcatctgcagtttgtcagcggctgcaaccccatcatctactggctggcgaactacgtgtgggacatgctcaactacctggtccccgctacctgctgtgtcatcatcctgtttgtgttcgacctgccggcctacacgtcgcccaccaacttccctgccgtcctctccctcttcctgctctatgggtggtccatcacgcccatcatgtacccggcctccttctggttcgaggtccccagctccgcctacgtgttcctcattgtcatcaatctcttcatcggcatcaccgccaccgtggccaccttcctgctacagctcttcgagcacgacaaggacctgaaggttgtcaacagttacctgaaaagctgcttcctcattttccccaactacaacctgggccacgggctcatggagatggcctacaacgagtacatcaacgagtactacgccaagattggccagtttgacaagatgaagtccccgttcgagtgggacattgtcacccgcggactggtggccatggcggttgagggcgtcgtgggcttcctcctgaccatcatgtgccagtacaacttcctgcggcggccacagcgcatgcctgtgtctaccaagcctgtggaggatgatgtggacgtggccagtgagcggcagcgagtgctccggggagacgccgacaatgacatggtcaagattgagaacctgaccaaggtgggctctgggcatgtagggtggggcctgggtgggtaggccanggccagggggggtggggccccagcagtggaggtggagcctgggtgggcagggccctgagctctgggggtggggcctgcatggggtggggctgtgggnacgtggcccctgggctctggaggtggggagggtctgggtggggtgggcanagggcagggtgggg

SEQ ID NO: 71147 - DNA, 6450 bp, Homo sapiens
  misc_feature (6366)..(6366): n is a, c, g, or t
ggggcggagccagcgcggatcgggtcccggacgcccgagcgccccgcccccgcgcgggcgatgcccagcggcgcggcgggctgcggggcccggcggggcgcgcagaggagcgggccgcggcgctgaggcggcggagcgtggccccgccatgggcttcctgcaccagctgcagctgctgctctggaagaacgtgacgctcaaacgccggagcccgtgggtcctggccttcgagatcttcatccccctggtgctgttctttatcctgctggggctgcgacagaagaagcccaccatctccgtgaaggaagtctccttctacacagcggcgcccctgacgtctgccggcatcctgcctgtcatgcaatcgctgtgcccggacggccagcgagacgagttcggcttcctgcagtacgccaactccacggtcacgcagctgcttgagcgcctggaccgcgtggtggaggaaggcaacctgtttgacccagcgcggcccagcctgggctcagagctcgaggccctacgccagcatctggaggccctcagtgcgggcccgggcacctcggggagccacctggacagatccacagtgtcttccttctctctggactcggtggccagaaacccgcaggagctctggcgtttcctgacgcaaaacttgtcgctgcccaatagcacggcccaagcactcttggccgcccgtgtggacccgcccgaggtctaccacctgctctttggtccctcatctgccctggattcacagtctggcctccacaagggtcaggagccctggagccgcctagggggcaatcccctgttccggatggaggagctgctgctggctcctgccctcctggagcagctcacctgcacgccgggctcgggggagctgggccggatcctcactgtgcctgagagtcagaagggagccctgcagggctaccgggatgctgtctgcagtgggcaggctgctgcgcgtgccaggcgcttctctgggctgtctgctgagctccggaaccagctggacgtggccaaggtctcccagcagctgggcctggatgcccccaacggctcggactcctcgccacaggcgccacccccacggaggctgcaggcgcttctgggggacctgctggatgcccagaaggttctgcaggatgtggatgtcctgtcggccctggccctgctactgccccagggtgcctgcactggccggacccccggacccccagccagtggtgcgggtggggcggccaatggcactggggcaggggcagtcatgggccccaacgccaccgctgaggagggcgcaccctctgctgcagcactggccaccccggacacgctgcagggccagtgctcagccttcgtacagctctgggccggcctgcagcccatcttgtgtggcaacaaccgcaccattgaacccgaggcgctgcggcggggcaacatgagctccctgggcttcacgagcaaggagcagcggaacctgggcctcctcgtgcacctcatgaccagcaaccccaaaatcctgtacgcgcctgcgggctctgaggtcgaccgcgtcatcctcaaggccaacgagacttttgcttttgtgggcaacgtgactcactatgcccaggtctggctcaacatctcggcggagatccgcagcttcctggagcagggcaggctgcagcaacacctgcgctggctgcagcagtatgtagcagagctgcggctgcaccccgaggcactgaacctgtcactggatgagctgccgccggccctgagacaggacaacttctcgctgcccagtggcatggccctcctgcagcagctggataccattgacaacgcggcctgcggctggatccagttcatgtccaaggtgagcgtggacatcttcaagggcttccccgacgaggagagcattgtcaactacaccctcaaccaggcctaccaggacaacgtcactgtttttgccagtgtgatcttccagacccggaaggacggctcgctcccgcctcacgtgcactacaagatccgccagaactccagcttcaccgagaaaaccaacgagatccgccgcgcctactggcggcctgggcccaatactggcggccgcttctacttcctctacggcttcgtctggatccaggacatgatggagcgcgccatcatcgacacttttgtggggcacgacgtggtggagccaggcagctacgtgcagatgttcccctacccctgctacacacgcgatgacttcctgtttgtcattgagcacatgatgccgctgtgcatggtgatctcctgggtctactccgtggccatgaccatccagcacatcgtggcggagaaggagcaccggctcaaggaggtgatgaagaccatgggcctgaacaacgcggtgcactgggtggcctggttcatcaccggctttgtgcagctgtccatctccgtgacagcactcaccgccatcctgaagtacggccaggtgcttatgcacagccacgtggtcatcatctggctcttcctggcagtctacgcggtggccaccatcatgttctgcttcctggtgtctgtgctgtactccaaggccaagctggcctcggcctgcggtggcatcatctacttcctgagctacgtgccctacatgtacgtggcgatccgagaggaggtggcgcatgataagatcacggccttcgagaagtgcatcgcgtccctcatgtccacgacggcctttggtctgggctctaagtacttcgcgctgtatgaggtggccggcgtgggcatccagtggcacaccttcagccagtccccggtggagggggacgacttcaacttgctcctggctgtcaccatgctgatggtggacgccgtggtctatggcatcctcacgtggtacattgaggctgtgcacccaggcatgtacgggctgccccggccctggtacttcccactgcagaagtcctactggctgggcagtgggcggacagaagcctgggagtggagctggccgtgggcacgcaccccccgcctcagtgtcatggaggaggaccaggcctgtgccatggagagccggcgctttgaggagacccgtggcatggaggaggagcccacccacctgcctctggttgtctgcgtggacaaactcaccaaggtctacaaggacgacaagaagctggccctgaacaagctgagcctgaacctctacgagaaccaggtggtctccttcttgggccacaacggggcgggcaagaccaccaccatgtccatcctgaccggcctgttccctccaacgtcgggttccgccaccatctacgggcacgacatccgcacggagatggatgagatccgcaagaacctgggcatgtgcccgcagcacaatgtgctctttgaccggctcacggtggaggaacacctctggttctactcacggctcaagagcatggctcaggaggagatccgcagagagatggacaagatgatcgaggacctggagctctccaacaaacggcactcactggtgcagacattgtcgggtggcatgaagcgcaagctgtccgtggccatcgccttcgtgggcggctctcgcgccatcatcctggacgagcccacggcgggcgtggacccctacgcgcgccgcgccatctgggacctcatcctgaagtacaagccaggccgcaccatccttctgtccacccaccacatggatgaggctgacctgcttggggaccgcattgccatcatctcccatgggaagctcaagtgctgcggctccccgctcttcctcaagggcacctatggcgacgggtaccgcctcacgctggtcaagcggcccgccgagccggggggcccccaagagccagggctggcatccagccccccaggtcgggccccgctgagcagctgctccgagctccaggtgtcccagttcatccgcaagcatgtggcctcctgcctgctggtctcagacacaagcacggagctctcctacatcctgcccagcgaggccgccaagaagggggctttcgagcgcctcttccagcacctggagcgcagcctggatgcactgcacctcagcagcttcgggctgatggacacgaccctggaggaagtgttcctcaaggtgtcggaggaggatcagtcgctggagaacagtgaggccgatgtgaaggagtccaggaaggatgtgctccctggggcggagggcccggcgtctggggagggtcacgctggcaatctggcccggtgctcggagctgacccagtcgcaggcatcgctgcagtcggcgtcatctgtgggctctgcccgtggcgacgagggagctggctacaccgacgtctatggcgactaccgccccctctttgataacccacaggacccagacaatgtcagcctgcaagaggtggaggcagaggccctgtcgagggtcggccagggcagccgcaagctggacggcgggtggctgaaggtgcgccagttccacgggctgctggtcaaacgcttccactgcgcccgccgcaactccaaggcactcttctcccagatcttgctgccagccttcttcgtctgcgtggccatgaccgtggccctgtccgtcccggagattggtgatctgcccccgctggtcctgtcaccttcccagtaccacaactacacccagccccgtggcaatttcatcccctacgccaacgaggagcgccgcgagtaccggctgcggctatcgcccgacgccagcccccagcagctcgtgagcacgttccggctgccgtcgggggtgggtgccacctgcgtgctcaagtctcccgccaacggctcgctggggcccacgttgaacctgagcagcggggagtcgcgcctgctggcggctcggttcttcgacagcatgtgtctggagtccttcacacaggggctgccactgtccaatttcgtgccacccccaccctcgcccgccccatctgactcgccagcgtccccggatgaggacctgcaggcctggaacgtctccctgccgcccaccgctgggccagaaatgtggacgtcggcaccctccctgccgcgcctggtacgggagcccgtccgctgcacctgctctgcgcagggcaccggcttctcctgccccagcagtgtgggcgggcacccgccccagatgcgggtggtcacaggcgacatcctgaccgacatcaccggccacaatgtctctgagtacctgctcttcacctccgaccgcttccgactgcaccggtatggggccatcacctttggaaacgtcctgaagtccatcccagcctcatttggcaccagggccccacccatggtgcggaagatcgcggtgcgcagggctgcccaggttttctacaacaacaagggctatcacagcatgcccacctacctcaacagcctcaacaacgccatcctgcgtgccaacctgcccaagagcaagggcaacccggcggcttacggcatcaccgtcaccaaccaccccatgaataagaccagcgccagcctctccctggattacctgctgcagggcacggatgtcgtcatcgccatcttcatcatcgtggccatgtccttcgtgccggccagcttcgttgtcttcctcgtggccgagaagtccaccaaggccaagcatctgcagtttgtcagcggctgcaaccccatcatctactggctggcgaactacgtgtgggacatgctcaactacctggtccccgctacctgctgtgtcatcatcctgtttgtgttcgacctgccggcctacacgtcgcccaccaacttccctgccgtcctctccctcttcctgctctatgggtggtccatcacgcccatcatgtacccggcctccttctggttcgaggtccccagctccgcctacgtgttcctcattgtcatcaatctcttcatcggcatcaccgccaccgtggccaccttcctgctacagctcttcgagcacgacaaggacctgaaggttgtcaacagttacctgaaaagctgcttcctcattttccccaactacaacctgggccacgggctcatggagatggcctacaacgagtacatcaacgagtactacgccaagattggccagtttgacaagatgaagtccccgttcgagtgggacattgtcacccgcggactggtggccatggcggttgagggcgtcgtgggcttcctcctgaccatcatgtgccagtacaacttcctgcggcggccacagcgcatgcctgtgtctaccaagcctgtggaggatgatgtggacgtggccagtgagcggcagcgagtgctccggggagacgccgacaatgacatggtcaagattgagaacctgaccaaggtgggctctgggcatgtagggtggggcctgggtgggtaggccanggccaggggtgtttatccttataattttttattattacttatcgtctcaagaccataatattatgagttatttatagagtaaac

SEQ ID NO: 71148 - DNA, 813 bp, Homo sapiens
tagagtctctacagatcttaaaggcgagcccgaggacctggacacggaggacgagggcctcatcagcttcgaggaggagcgggcccagctgtccttcaacacggacacgctctgctgaccacccagagctgggccagggaggacacgctccactgaccacccagagctgggccagggactcaacaatggggacagaagtcccccagtgcctgccagggcctggagtggaggttcaggaccaaggggcttctggtcctccagcccctgtactcggccatgccctgcggtcactgcggttgccgcccctaattgtgccaaaggctgacccggcccgggctgcgtacacccttgccctgctttgccttaaagcctcggggtctgcccggcccctcgcccctgcctggcactgctcaccgcccaaggcgacgccggctggaccaggcactgctggcctttctcctgcccggcctcggaaccagcttttctctcttacgatgaaggctgatgccgagagcgggctgtgggcggagctgggtcagtcccgtatttattttgctttgagaagaggctcctctggccctgctctcctgcagggaggtggctgtcccgcgggaagccatcagcttgggccagctggcaggtggcaggaatggagaagctgaccctgctggccaggcaaggggccagaccccccccaacccccagctgccatcgctctcccacccagcttggccccctgcccgcccacctccctgggagccgggcctgtacatagcgcacagatgtttgttttaaataaataaacaaaatgtc

SEQ ID NO: 71149 - DNA, 5782 bp, Homo sapiens
ggggcggagccagcgcggatcgggtcccggacgcccgagcgccccgcccccgcgcgggcgatgcccagcggcgcggcgggctgcggggcccggcggggcgcgcagaggagcgggccgcggcgctgaggcggcggagcgtggccccgccatgggcttcctgcaccagctgcagctgctgctctggaagaacgtgacgctcaaacgccggagcccgtgggtcctggccttcgagatcttcatccccctggtgctgttctttatcctgctggggctgcgacagaagaagcccaccatctccgtgaaggaagtctccttctacacagcggcgcccctgacgtctgccggcatcctgcctgtcatgcaatcgctgtgcccggacggccagcgagacgagttcggcttcctgcagtacgccaactccacggtcacgcagctgcttgagcgcctggaccgcgtggtggaggaaggcaacctgtttgacccagcgcggcccagcctgggctcagagctcgaggccctacgccagcatctggaggccctcagtgcgggcccgggcacctcggggagccacctggacagatccacagtgtcttccttctctctggactcggtggccagaaacccgcaggagctctggcgtttcctgacgcaaaacttgtcgctgcccaatagcacggcccaagcactcttggccgcccgtgtggacccgcccgaggtctaccacctgctctttggtccctcatctgccctggattcacagtctggcctccacaagggtcaggagccctggagccgcctagggggcaatcccctgttccggatggaggagctgctgctggctcctgccctcctggagcagctcacctgcacgccgggctcgggggagctgggccggatcctcactgtgcctgagagtcagaagggagccctgcagggctaccgggatgctgtctgcagtgggcaggctgctgcgcgtgccaggcgcttctctgggctgtctgctgagctccggaaccagctggacgtggccaaggtctcccagcagctgggcctggatgcccccaacggctcggactcctcgccacaggcgccacccccacggaggctgcaggcgcttctgggggacctgctggatgcccagaaggttctgcaggatgtggatgtcctgtcggccctggccctgctactgccccagggtgcctgcactggccggacccccggacccccagccagtggtgcgggtggggcggccaatggcactggggcaggggcagtcatgggccccaacgccaccgctgaggagggcgcaccctctgctgcagcactggccaccccggacacgctgcagggccagtgctcagccttcgtacagctctgggccggcctgcagcccatcttgtgtggcaacaaccgcaccattgaacccgaggcgctgcggcggggcaacatgagctccctgggcttcacgagcaaggagcagcggaacctgggcctcctcgtgcacctcatgaccagcaaccccaaaatcctgtacgcgcctgcgggctctgaggtcgaccgcgtcatcctcaaggccaacgagacttttgcttttgtgggcaacgtgactcactatgcccaggtctggctcaacatctcggcggagatccgcagcttcctggagcagggcaggctgcagcaacacctgcgctggctgcagcagtatgtagcagagctgcggctgcaccccgaggcactgaacctgtcactggatgagctgccgccggccctgagacaggacaacttctcgctgcccagtggcatggccctcctgcagcagctggataccattgacaacgcggcctgcggctggatccagttcatgtccaaggtgagcgtggacatcttcaagggcttccccgacgaggagagcattgtcaactacaccctcaaccaggcctaccaggacaacgtcactgtttttgccagtgtgatcttccagacccggaaggacggctcgctcccgcctcacgtgcactacaagatccgccagaactccagcttcaccgagaaaaccaacgagatccgccgcgcctactggcggcctgggcccaatactggcggccgcttctacttcctctacggcttcgtctggatccaggacatgatggagcgcgccatcatcgacacttttgtggggcacgacgtggtggagccaggcagctacgtgcagatgttcccctacccctgctacacacgcgatgacttcctgtttgtcattgagcacatgatgccgctgtgcatggtgatctcctgggtctactccgtggccatgaccatccagcacatcgtggcggagaaggagcaccggctcaaggaggtgatgaagaccatgggcctgaacaacgcggtgcactgggtggcctggttcatcaccggctttgtgcagctgtccatctccgtgacagcactcaccgccatcctgaagtacggccaggtgcttatgcacagccacgtggtcatcatctggctcttcctggcagtctacgcggtggccaccatcatgttctgcttcctggtgtctgtgctgtactccaaggccaagctggcctcggcctgcggtggcatcatctacttcctgagctacgtgccctacatgtacgtggcgatccgagaggaggtggcgcatgataagatcacggccttcgagaagtgcatcgcgtccctcatgtccacgacggcctttggtctgggctctaagtacttcgcgctgtatgaggtggccggcgtgggcatccagtggcacaccttcagccagtccccggtggagggggacgacttcaacttgctcctggctgtcaccatgctgatggtggacgccgtggtctatggcatcctcacgtggtacattgaggctgtgcacccaggcatgtacgggctgccccggccctggtacttcccactgcagaagtcctactggctgggcagtgggcggacagaagcctgggagtggagctggccgtgggcacgcaccccccgcctcagtgtcatggaggaggaccaggcctgtgccatggagagccggcgctttgaggagacccgtggcatggaggaggagcccacccacctgcctctggttgtctgcgtggacaaactcaccaaggtctacaaggacgacaagaagctggccctgaacaagctgagcctgaacctctacgagaaccaggtggtctccttcttgggccacaacggggcgggcaagaccaccaccatgtccatcctgaccggcctgttccctccaacgtcgggttccgccaccatctacgggcacgacatccgcacggagatggatgagatccgcaagaacctgggcatgtgcccgcagcacaatgtgctctttgaccggctcacggtggaggaacacctctggttctactcacggctcaagagcatggctcaggaggagatccgcagagagatggacaagatgatcgaggacctggagctctccaacaaacggcactcactggtgcagacattgtcgggtggcatgaagcgcaagctgtccgtggccatcgccttcgtgggcggctctcgcgccatcatcctggacgagcccacggcgggcgtggacccctacgcgcgccgcgccatctgggacctcatcctgaagtacaagccaggccgcaccatccttctgtccacccaccacatggatgaggctgacctgcttggggaccgcattgccatcatctcccatgggaagctcaagtgctgcggctccccgctcttcctcaagggcacctatggcgacgggtaccgcctcacgctggtcaagcggcccgccgagccggggggcccccaagagccagggctggcatccagccccccaggtcgggccccgctgagcagctgctccgagctccaggtgtcccagttcatccgcaagcatgtggcctcctgcctgctggtctcagacacaagcacggagctctcctacatcctgcccagcgaggccgccaagaagggggctttcgagcgcctcttccagcacctggagcgcagcctggatgcactgcacctcagcagcttcgggctgatggacacgaccctggaggaagtgttcctcaaggtgtcggaggaggatcagtcgctggagaacagtgaggccgatgtgaaggagtccaggaaggatgtgctccctggggcggagggcccggcgtctggggagggtcacgctggcaatctggcccggtgctcggagctgacccagtcgcaggcatcgctgcagtcggcgtcatctgtgggctctgcccgtggcgacgagggagctggctacaccgacgtctatggcgactaccgccccctctttgataacccacaggacccagacaatgtcagcctgcaagaggtggaggcagaggccctgtcgagggtcggccagggcagccgcaagctggacggcgggtggctgaaggtgcgccagttccacgggctgctggtcaaacgcttccactgcgcccgccgcaactccaaggcactcttctcccagatcttgctgccagccttcttcgtctgcgtggccatgaccgtggccctgtccgtcccggagattggtgatctgcccccgctggtcctgtcaccttcccagtaccacaactacacccagccccgtggcaatttcatcccctacgccaacgaggagcgccgcgagtaccggctgcggctatcgcccgacgccagcccccagcagctcgtgagcacgttccggctgccgtcgggggtgggtgccacctgcgtgctcaagtctcccgccaacggctcgctggggcccacgttgaacctgagcagcggggagtcgcgcctgctggcggctcggttcttcgacagcatgtgtctggagtccttcacacaggggctgccactgtccaatttcgtgccacccccaccctcgcccgccccatctgactcgccagcgtccccggatgaggacctgcaggcctggaacgtctccctgccgcccaccgctgggccagaaatgtggacgtcggcaccctccctgccgcgcctggtacgggagcccgtccgctgcacctgctctgcgcagggcaccggcttctcctgccccagcagtgtgggcgggcacccgccccagatgcgggtggtcacaggcgacatcctgaccgacatcaccggccacaatgtctctgagtacctgctcttcacctccgaccgcttccgactgcaccggtatggggccatcacctttggaaacgtcctgaagtccatcccagcctcatttggcaccagggccccacccatggtgcggaagatcgcggtgcgcagggctgcccaggttttctacaacaacaagggctatcacagcatgcccacctacctcaacagcctcaacaacgccatcctgcgtgccaacctgcccaagagcaagggcaacccggcggcttacggcatcaccgtcaccaaccaccccatgaataagaccagcgccagcctctccctggattacctgctgcagggcacggatgtcgtcatcgccatcttcatcatcgtggccatgtccttcgtgccggccagcttcgttgtcttcctcgtggccgagaagtccaccaaggccaagcatctgcagtttgtcagcggctgcaaccccatcatctactggctggcgaactacgtgtgggacatgctcaactacctggtccccgctacctgctgtgtcatcatcctgtttgtgttcgacctgccggcctacacgtcgcccggacgcgtgggcgacgcgtgggtc

SEQ ID NO: 71150 - DNA, 800 bp, Homo sapiens
  misc_feature (16)..(17): n is a, c, g, or t
  misc_feature (36)..(36): n is a, c, g, or t
  misc_feature (43)..(43): n is a, c, g, or t
ggagatctttaaaggnnagtcgggtactggacacgngtaacgngggctcatcagcttcgaggaggagcggcccagctgtccttcaacacggacacgctctgctgaccacccagagctgggccagggaggacacgctccactgaccacccagagctgggccagggactcaacaatggggacagaagtcccccagtgcctgccagggcctggagtggaggttcaggaccaaggggcttctggtcctccagcccctgtactcggccatgccctgcggtcactgcggttgccgcccctaattgtgccaaaggctgacccggcccgggctgcgtacacccttgccctgctttgccttaaagcctcggggtctgcccggcccctcgcccctgcctggcactgctcaccgcccaaggcgacgccggctggaccaggcactgctggcctttctcctgcccggcctcggaaccagcttttctctcttacgatgaaggctgatgccgagagcgggctgtgggcggagctgggtcagtcccgtatttattttgctttgagaagaggctcctctggccctgctctcctgcagggaggtggctgtcccgcgggaagccatcagcttgggccagctggcaggtggcaggaatggagaagctgaccctgctggccaggcaaggggccagaccccccccaacccccagctgccatcgctctcccacccagcttggccccctgcccgcccacctccctgggagccgggcctgtacatagcgcacagatgtttgttttaaataaataaacaaaatgtc

SEQ ID NO: 71151 - DNA, 149 bp, Homo sapiens
cacgggtggctccctgggtgggcacgtggcccacgtggtggatggtcaccccaggccctaggtcagcctcccctcccctccccgacccccaggcatgtacgggctgccccggccctggtacttcccactgcagaagtcctactggctgg

SEQ ID NO: 71152 - DNA, 730 bp, Homo sapiens
aggcctggagagacgtaactgcatggtccagacttgctagagtctttgaggggcacagagcaagggtggggcagaggggaccagagccggggaacaggggaccgatgtagactcagtggcccccagactcggcagacggaggcccgggagagcccagacacagagggagctcgtggggagaccctgcgtccaggcccagcctgcaggagggccggggcgggccagcacaagtgtcctcagccccagcagggggtggcacaggatgccccataagcctgacctcccctgtgcacaggcccagctgtccttcaacacggacacgctctgctgaccacccagagctgggccagggaggacacgctccactgaccacccagagctgggccagggactcaacaatggggacagaagtcccccagtgcctgccagggcctggagtggaggttcaggaccaaggggcttctggtcctccagcccctgtactcggccatgccctgcggtcactgcggttgccgcccctaattgtgccaaaggctgacccggcccgggctgcgtacacccttgccctgctttgccttaaagcctcggggtctgcccggcccctcgcccctgcctggcactgctcaccgcccaaggcgacgccggctggaccaggcactgctggcctttctcctgcccggcctcggaaccagcttttctctcttacgatgaaggctgatgccgagagcgg

SEQ ID NO: 71153 - DNA, 2714 bp, Homo sapiens
  misc_feature (1378)..(1378): n is a, c, g, or t
  misc_feature (1380)..(1380): n is a, c, g, or t
  misc_feature (1382)..(1382): n is a, c, g, or t
gagacagggttcgcgttgtcacccaagctgaggtgcagtggcgcaaacacagctgactgcagcttcgactttccaagctcaagcaatcctccttcctcagcgcccccaacaagtagctgggaccacaggcctacaccaacacacccagctaatttttgtattttttgtagagatggggtttcaccctgttggccaggctgatctcaaactcctgagctcaagcaatccacttgccttggtctcccgaagttctgggatgagccattgtgtgcggcatgagccattgtgcacggccggtccgttgctaaatgtattctaaaatacaaattctagaaaaggtagcagtggggagatagtctaaaaattttacatttgtcaatttcttaatctgtcagcctctagcaagactctaagtttcttattaactgttatttccccagaacatcaattatgcctggtatttgataagcactcaataaatatgtgataaacagatgaatttaaaaatccctgccagatgtgacattgtattactggaatcaaaaactagtggtgctgtctcatgacagaatgcagtaaagctgcatacaaagggacctgtcaaaggaaccatcactaggtcatttttgaagtgaatacttcatgtgaaaaaccataggctgtagtgaagacaatccttggttcagtttttgacattctcagttgtaaaaggaattttgatttgtttcattataacgtaaaggcttatacaaagcaccatacggagctgagctaggataaaaatatacatacagatagtagaaggatataaaccctaaaatccattaggaaagcaagaatgtccactctcactattctattcaacactgcactggaggttctagttacagcaattaggcaagaaaaaataaaaggcatatagattgcaaaggaagaattaaaaccacctctgctcacagatgacatgctcttgtatatagaaattatttaaaatctactaaacaactattagatccaataaactaattgagcaaagtgtcagaacatatccctgtcattaagtaacatatgactgaataaaattcagtttttggattaatctcatttaacctaaaaatgagattaagaaaacaatttcgtttaaaaaaaatcaaaaagaataaaatatttaggaataagtttatcccccaaaatacaagaattatacactgaaaactacagaaaaccgtagaaagaaagaaaagaagacctcgataaatgggaaaagactcccatgttcctatatcagaagacttaaaactgctctaatattgcagtatgagctgatcgtgaggacgcagagaaaaacacagcctagaagcatagcaagaaatctgtntntntaggtttttattgccttggtaatcaacactcagggtgtctgatcaccatgtaaagtgaacagcattatagtcctgcagctcacactgtccaatgacttttctgagcaatttttacacctttggttcattacttatcaaaaaaggaaatggggttaatgtcacaggatttgttcctagtaaatttatattggttcttaataatcattacttttcagttttttatactcgattagatttacctcctgttaatatatagaagtacttacaaagaccaaggaattctagtatgcacaggttagtgatcttataaaataagacgccttactagtaaaaccatgtcagttgatacatgtaataaactatcaaagcatattaaaatattctgtactctcattccaaaaatataggacggttctattgtgttttatacacctgggggccaggcacagtggcttatgcctgtaatgcaagcactttgggaggcagaggaggtaggatggcttgagcccaggagttcgagaccaacccgggcaacatagtaagacctcatctctactaaagataaaaaaataaaataagcttagccaggcatggtagcacacgcctgtagtcccagttacttgggagacagaggcaggaggatggcttgagcctaggaggttgaggctacagtgagccctgatcctgccactacactgcaacctgggtgacagagcgataccctacctgtcttaatgaaaaacaaaaacaaaccaaaaacaacctggggagatgtcaatcaagccaaaatagaaatgcaaactaaaaacaaacaacaacaacaaaacactggtgttcacattttgtattgcttatcctgactcagaaatcaataatcaaacagaacccaaaagaagagatagaagaattaaatcctaccagctcatataaatccttccagctcatatttactatcgctattgtgtggggaaggcacagcagggcaaatggacctatcactcagaacgcttgtcaagacttcggaaattaatttctttccatgtgacatagcaaattccccaatattaataaaaggctccatcaataaaacagaaaatgttaagtgtttcagtgagtttgggtgataaatgtcagaatatgaacaacaattctgataccctaacacttcttgagaaaattatctcatacaaaaaatcccaaatttaacaacagagatctcaggaagtacttctctcacttaatgagccttggcagcatttcaaattaaacactctattgtgcgaggagctaattatgttaagattaaactcaaagaatgatagggacatttac

SEQ ID NO: 71154 - DNA, 318 bp, Homo sapiens
aaattttcgttatgactattcaggtatttttacataaatataattaatattacttaaataatgtaaagatgttgaaaatgataaatcagtagagctttcatttatttgaaactatcacaacatatgtgtggttaaaataaaacattatctggagactttataattttatttctacatttgtggttgtgcaacgtaaatattaacaataatttcaaagtaaaattttgcaatttcagaaaagatctataaagacatttgaagtcgtaaggctacattgatgttagctatgctttgtgacaaaactatgccaactatacc

SEQ ID NO: 71155 - DNA, 381 bp, Homo sapiens
aatatttttatcaacttttcaaaatgaaagataatatatcaaatcccgaagtctgttccctcacctaattgtgaaattcatttctgatatgatccattaacaaggtacaaaatggatagtcaagtattttaagaagcaggggagaaaagaaacccaggttggtattacatgttagatatgcatccaattttcagtacaactgactatgaatactagaattcatcaacttgaagtaatccaactggtacagtaaagcaaaaactgatttctccttttatgtcctcctgctcagaagaaaccttctgtccatttttggaatagtcaggttatgtgttacaaaagagtttctgggcaggagagccatgaacatgaccaatgggg

SEQ ID NO: 71156 - DNA, 1460 bp, Homo sapiens
gtaggatcctcaaacaccgaatgctgggttttttgtttgcttgttttcatctttgtgctgtagatcttgctgctcactgttcccaaataccctttcctgcacttctgtttgttacatatgataatgccattatactggaactttgcacaatgctgagttttgtagccacaaaaatattagagtgttcattgggtagataaataccattagattgatctagacttacttttttccattgtagaaattatgtatatcacatctctaatgggggtgtttttcaaagttatttgaacatttccagtggtagggagctcctgctttacaaggcaaccattatatttttcaaaaactcttaagtcttacaaagttatctcataagaacagccctaatttcttctttccaccactttgtaaacagtaatatactttaaaatgtgtaacatttagcaacttgtagctctgcatgcagtaaaattcaacattttctgaattaatttttactgtgttatgctgacttcatgtattttattttcatgggctggtttaaaaatacgagaatggaaagatgaaagaaaagattagtacatgcaaactatagaagtttaggtagcaacccagtcctgagtttcccatttcatcttcttttattttaaattctcaatgtatttccatttgcaaagttaactcttttactaaactgtcatgagacatttgtgtaattcagactccagtactgattatagtatcttttaaccaaatacatttcactaaaaattagacttgtaaaagtgttaaaaaaataaggcttggccagatggggtggttcacgcctgtaatctcagcactttggaaggctgaggcgggcagatcccctgagtttgggagtttgagaccagcctgaccaacatggagaaaccccatctctactgaaaatacaaaattacccgggtgtggtggcgcatgcctgtaatctcagctactcgggaggctgaggcaaaagaattgcttgaatctgggaggcggaggttgtggtgagccaagatcgtgccattgcactccagcctgggcaacaagagcgaaactccgtctcaaaaaattaaataaataaggcttatgtgcagttattctcaatgagctaaaaagcttcctgaggctagaaattcttgtcatttttggctgggagcagtggcttacacctgtagtttcagcattttgggaggtcgaggcgggcagatcacctgaggtcagggatttgagaccagcctggccaacatggtgaaaccccgtctctactaaaaaatacaaaaattagccgggcatggccgtgggcgcctgtaatcccagctactcgggaagctgaggcaggagaatcgcttgaacccgggaggtggcagttgcagtgagccgagatcacaccactgcactccattctggcaacacagccagactctgtctcaaaa

SEQ ID NO: 71157 - DNA, 1428 bp, Homo sapiens
gtaggatcctcaaacaccgaatgctgggttttttgtttgcttgttttcatctttgtgctgtagatcttgctgctcactgttcccaaataccctttcctgcacttctgtttgttacatatgataatgccattatactggaactttgcacaatgctgagttttgtagccacaaaaatattagagtgttcattgggtagataaataccattagattgatctagacttacttttttccattgtagaaattatgtatatcacatctctaatgggggtgtttttcaaagttatttgaacatttccagtggtagggagctcctgctttacaaggcaaccattatatttttcaaaaactcttaagtcttacaaagttatctcataagaacagccctaatttcttctttccaccactttgtaaacagtaatatactttaaaatgtgtaacatttagcaacttgtagctctgcatgcagtaaaattcaacattttctgaattaatttttactgtgttatgctgacttcatgtattttattttcatgggctggtttaaaaatacgagaatggaaagatgaaagaaaagattagtacatgcaaactatagaagtttaggtagcaacccagtcctgagtttcccatttcatcttcttttattttaaattctcaatgtatttccatttgcaaagttaactcttttactaaactgtcatgagacatttgtgtaattcagactccagtactgattatagtatcttttaaccaaatacatttcactaaaaattagacttgtaaaagttgctgggattacaggtgtgacccacagcgccatccagatttttaatgtattgtctataatgaccctttttaagcaagtcaataaagataaaactattttagtagatgcaggttttcttcactagcctacgtgtgctactaaaaatgttttggtataagttagtgtagtatcactgacttaagcaagttggtgcatgtttatatgtcttctgtttttataaaagacttgctaatttttctgttgtcttttcttagtctcttcatagtcagaaaaaaatattgggtattttattagcttagccttgaggagagttctgcagtaaaactgccggtttccaaaaaagagggagaaaataataagaattactgactcacacttttattttatttagcaagtaaaaaataacctgttgagctagaacttatttatagtaggccctagcagaccacagctacaactaggaattaccagtcatccaaaatacaatcaagaaccattaaaaacttacattaataaccttgtacgtaccacttccacatctctatgctagaagtaaaatatctggtcttatttttctgttgcatgcaaaaaaaaaataatttatcttaagccaatatctagctatctgatagtttaat

SEQ ID NO: 71158 - DNA, 680 bp, Homo sapiens
actcccgacctcaggtgatccgcccgccttggcctcccaaagtgctgggattacaggtgtgacccacagcgccatccagatttttaatgtattgtctataatgaccctttttaagcaagtcaataaagataaaactattttagtagatgcaggttttcttcactagcctacgtgtgctactaaaaatgttttggtataagttagtgtagtatcactgacttaagcaagttggtgcatgtttatatgtcttctgtttttataaaagacttgctaatttttctgttgtcttttcttagtctcttcatagtcagaaaaaaatattgggtattttattagcttagccttgaggagagttctgcagtaaaactgccggtttccaaaaaagagggagaaaataataagaattactgactcacacttttattttatttagcaagtaaaaaataacctgttgagctagaacttatttatagtaggccctagcagaccacagctacaactaggaattaccagtcatccaaaatacaatcaagaaccattaaaaacttacattaataaccttgtacgtaccacttccacatctctatgctagaagtaaaatatctggtcttatttttctgttgcatgcaaaaaaaaaataatttatcttaagccaatatctagctatctgatagtttaat

SEQ ID NO: 71159 - DNA, 3351 bp, Homo sapiens
ctgcacgtgacgcttgcggaggaaggggagagagaggcgcgcgggaggtcgtctagggaatcgaggtgccggctgctccttcctcacaatttgcccagacaggcggtgggtgggaatgcctcacttcagtttgaagagggtccggatccaaaggggttaaaacgagcgacccccgatccccgaccacacttcccgcctccctaaaacgcacaccccgctagccatgggcagccgcgaccacctgttcaaagtgctggtggtgggggacgccgcagtgggcaagacgtcgctggtgcagcgatattcccaggacagcttcagcaaacactacaagtccacggtgggagtggattttgctctgaaggttctccagtggtctgactacgagatagtgcggcttcagctgtgggatattgcagggcaggagcgcttcacctctatgacacgattgtattatcgggatgcctctgcctgtgttattatgtttgacgttaccaatgccactaccttcagcaacagccagaggtggaaacaggacctagacagcaagctcacactacccaatggagagccggtgccctgcctgctcttggccaacaagtgtgatctgtccccttgggcagtgagccgggaccagattgaccggttcagtaaagagaacggtttcacaggttggacagaaacatcagtcaaggagaacaaaaatattaatgaggctatgagagtcctcattgaaaagatgatgagaaattccacagaagatatcatgtctttgtccacccaaggggactacatcaatctacaaaccaagtcctccagctggtcctgctgctagtagtgtttggcttattttccatcccagttctgggaggtcttttaagtctcttccctttggttgcccacctgaccattttattaagtacatttgaattgtctcctgactactgtccagtaaggaggcccattgtcacttagaaaagacacctggaacccatgtgcatttctgcatctcctggattagcctttcacatgttgctgactcacattagtgccagttagtgccttcggtgtaagatcttctcatcagccctcaatttgtgatccggaattttgtgagaaggattagaaatcagcacctgcgttttagagatcataattctcacctacttctgagcttatttttccatttgatattcattgatatcatgacttccaattgagaggaaaatgagatcaaatgtcatttcccaaatttcttgtaggccgttgtttcagattctttctgtcttggaatgtaaacatctgattctggaatgcagaaggaggggtctgggcatctgtggatttttggctactagaagtgtcccagaagtcactgtatttttgaaacttctaacgtcataattaagtttctcttgtcttggcatcaagaatagtcaagttttttggccgggcatggtggctcatgcctgtaatcccagcacttggggaggccaaggcaggcggatcacatgaggccaggaattcgagaccaacctggtcagcatggcaaaaccccgtctctactaaaagtacaaaaattagccaggcgtgatggcacgtgtctgtaatcccagctactctggagactgaggtgggagaatcgcttgagactgggaggcagaggttgcagtgaaccgagatcatgccaccgcacttcagcctgggtgacagagaaggactccgtctcaaaaaaaaaagaaaaaagaatagtcatttttaaactacctatctcatgcaatgaaagcattttcttccacaaagagcttaatcctcatgataggattgcctagtgtctcccatttgcaggtttctgggttgatgtcttaatgcataatactgcaagtgacatcagctggctgtgatgcttcgaaataggtctgctcctcacagctttgggaatctgaatggaagaagaaaagagagaagttaacaacctccactggggcaactttgtgaacacgtaggcacttagtcataggaaacatattatgtgcaggtcctagcctggggtaggaaagtagatagacagaaaatcattaggtaatttaagtactaaattgggcagggctttttagtatcaaatcactactagaccgtttaatttgttaaattatctctaggatggtgatttataacctacccaaagttatcgatattcttactaaactctgaggcctgaagttctgtgatagaccttaaataagtgtcctaagtcagtggttcccaaatctggctggtcgggaatacctgggaagtttgttaaaattttttaaaaatgttttaagatttttgggtcctgagccaggcgtggtggctcacacctgtaatcccagcactttgggaggctgaggcaggtggatcgcctgaggtcaggagttcaagatcaacctggccaacatactgaaaccccgtctctactaaaaataagaaaaattagctgggcgtggtggcgggcacctgtaatcccagctacttgggaggctgaggcaggagaatcacttgaacctgggagttagaggttgcagtgagctgagatcacaccattgcgcttcagcctgggcaacaagagtgaaactccatctccaaaaaaaaaaaacaaaaagaaaaagattttggggtcccgacctcaaacctactgaatcagaatttctagggatgaagcctaggaatgtgttgttgttttcagagcttccctggtgattgtgataagcctggtttggaaaccattgctggagaactttgtaaagatacagagacccagaccttttgtatttacatttaaatacaaatacaaatcctgggtttctatatgttctgttagcttttcaggtgattctgctacacagacgttgaaaaccactgccctaagaaagagatcagaggccacatatcagagagaaaagggaccaaaccttcggtggtttgttgtgtgtcgttttaatgccaattattttaacttgcacagtcttctgaaaccttgtattaatagttctcttttgtattaccattttcaggtagggttttgatcactatgattctgaagataatagtgaaatagtgaatttcattgatatgaagagataattgattttcattcattggtttgaacacctgcaaaatcacaaataaatgagaactaagtcttgtaaaaaaaaaaaaaaaaagaaaaaaaaaaataaaaaaaacaaaaacaacaaaaataaggagaaacaagcaaacacggagaggtccatacagaggagggcccgcgggaacaaaagagggtatagacagggagcccacggggtatccgagcgagaagcctcacaa

SEQ ID NO: 71160 - DNA, 3217 bp, Homo sapiens
ctgcacgtgacgcttgcggaggaaggggagagagaggcgcgcgggaggtcgtctagggaatcgaggtgccggctgctccttcctcacaatttgcccagacaggcggtgggtgggaatgcctcacttcagtttgaagagggtccggatccaaaggggttaaaacgagcgacccccgatccccgaccacacttcccgcctccctaaaacgcacaccccgctagccatgggcagccgcgaccacctgttcaaagtgctggtggtgggggacgccgcagtgggcaagacgtcgctggtgcagcgatattcccaggacagcttcagcaaacactacaagtccacggtgggagtggattttgctctgaaggttctccagtggtctgactacgagatagtgcggcttcagctgtgggatattgcagggcaggagcgcttcacctctatgacacgattgtattatcgggatgcctctgcctgtgttattatgtttgacgttaccaatgccactaccttcagcaacagccagaggtggaaacaggacctagacagcaagctcacactacccaatggagagccggtgccctgcctgctcttggccaacaagtgtgatctgtccccttgggcagtgagccgggaccagattgaccggttcagtaaagagaacggtttcacaggttggacagaaacatcagtcaaggagaacaaaaatattaatgaggctatgagagtcctcattgaaaagatgatgagaaattccacagaagatatcatgtctttgtccacccaaggggactacatcaatctacaaaccaagtcctccagctggtcctgctgctagtagtgtttggcttattttccatcccagttctgggaggtcttttaagtctcttccctttggttgcccacctgaccattttattaagtacatttgaattgtctcctgactactgtccagtaaggaggcccattgtcacttagaaaagacacctggaacccatgtgcatttctgcatctcctggattagcctttcacatgttgctgactcacattagtgccagttagtgccttcggtgtaagatcttctcatcagccctcaatttgtgatccggaattttgtgagaaggattagaaatcagcacctgcgttttagagatcataattctcacctacttctgagcttatttttccatttgatattcattgatatcatgacttccaattgagaggaaaatgagatcaaatgtcatttcccaaatttcttgtaggccgttgtttcagattctttctgtcttggaatgtaaacatctgattctggaatgcagaaggaggggtctgggcatctgtggatttttggctactagaagtgtcccagaagtcactgtatttttgaaacttctaacgtcataattaagtttctcttgtcttggcatcaagaatagtcaagttttttggccgggcatggtggctcatgcctgtaatcccagcacttggggaggccaaggcaggcggatcacatgaggccaggaattcgagaccaacctggtcagcatggcaaaaccccgtctctactaaaagtacaaaaattagccaggcgtgatggcacgtgtctgtaatcccagctactctggagactgaggtgggagaatcgcttgagactgggaggcagaggttgcagtgaaccgagatcatgccaccgcacttcagcctgggtgacagagaaggactccgtctcaaaaaaaaaagaaaaaagaatagtcatttttaaactacctatctcatgcaatgaaagcattttcttccacaaagagcttaatcctcatgataggattgcctagtgtctcccatttgcaggtttctgggttgatgtcttaatgcataatactgcaagtgacatcagctggctgtgatgcttcgaaataggtctgctcctcacagctttgggaatctgaatggaagaagaaaagagagaagttaacaacctccactggggcaactttgtgaacacgtaggcacttagtcataggaaacatattatgtgcaggtcctagcctggggtaggaaagtagatagacagaaaatcattaggtaatttaagtactaaattgggcagggctttttagtatcaaatcactactagaccgtttaatttgttaaattatctctaggatggtgatttataacctacccaaagttatcgatattcttactaaactctgaggcctgaagttctgtgatagaccttaaataagtgtcctaagtcagtggttcccaaatctggctggtcgggaatacctgggaagtttgttaaaattttttaaaaatgttttaagatttttgggtcctgagccaggcgtggtggctcacacctgtaatcccagcactttgggaggctgaggcaggtggatcgcctgaggtcaggagttcaagatcaacctggccaacatactgaaaccccgtctctactaaaaataagaaaaattagctgggcgtggtggcgggcacctgtaatcccagctacttgggaggctgaggcaggagaatcacttgaacctgggagttagaggttgcagtgagctgagatcacaccattgcgcttcagcctgggcaacaagagtgaaactccatctccaaaaaaaaaaaacaaaaagaaaaagattttggggtcccgacctcaaacctactgaatcagaatttctagggatgaagcctaggaatgtgttgttgttttcagagcttccctggtgattgtgataagcctggtttggaaaccattgctggagaactttgtaaagatacagagacccagaccttttgtatttacatttaaatacaaatacaaatcctgggtttctatatgttctgttagcttttcaggtgattctgctacacagacgttgaaaaccactgccctaagaaagagatcagaggccacatatcagagagaaaagggaccaaaccttcggtggtttgttgtgtgtcgttttaatgccaattattttaacttgcacagtcttctgaaaccttgtattaatagttctcttttgtattaccattttcaggtagggttttgatcactatgattctgaagataatagtgaaatagtgaatttcattgatatgaagagataattgattttcattcattggtttgaacacctgcaaaatcacaaataaatgagaactaagtcttgtagtgtgcacaacaaacacacaaaaaagc

SEQ ID NO: 71161 - DNA, 3405 bp, Homo sapiens
ctgcacgtgacgcttgcggaggaaggggagagagaggcgcgcgggaggtcgtctagggaatcgaggtgccggctgctccttcctcacaatttggtttgtgctgcaaggggagggtccccatcatctggccccagtggtgtaaggagctgactgggattcagtcactgacttggagccgctcgggggaagtcccggtgggtgaggttccgcggcgcctggtccagtttctcggcagtcaggccaggagggggtggggaaggtgcgaacagccgggggctcggagctcgcgccctgcgccccacccaggttgcggccgcccggggaggaagcgcgtataggttgagtgcaaagtttccttttttgctttctcgtcagagcagcccagacaggcggtgggtgggaatgcctcacttcagtttgaagagggtccggatccaaaggggttaaaacgagcgacccccgatccccgaccacacttcccgcctccctaaaacgcacaccccgctagccatgggcagccgcgaccacctgttcaaagtgctggtggtgggggacgccgcagtgggcaagacgtcgctggtgcagcgatattcccaggacagcttcagcaaacactacaagtccacggtgggagggcaggagcgcttcacctctatgacacgattgtattatcgggatgcctctgcctgtgttattatgtttgacgttaccaatgccactaccttcagcaacagccagaggtggaaacaggacctagacagcaagctcacactacccaatggagagccggtgccctgcctgctcttggccaacaagtgtgatctgtccccttgggcagtgagccgggaccagattgaccggttcagtaaagagaacggtttcacaggttggacagaaacatcagtcaaggagaacaaaaatattaatgaggctatgagagtcctcattgaaaagatgatgagaaattccacagaagatatcatgtctttgtccacccaaggggactacatcaatctacaaaccaagtcctccagctggtcctgctgctagtagtgtttggcttattttccatcccagttctgggaggtcttttaagtctcttccctttggttgcccacctgaccattttattaagtacatttgaattgtctcctgactactgtccagtaaggaggcccattgtcacttagaaaagacacctggaacccatgtgcatttctgcatctcctggattagcctttcacatgttgctgactcacattagtgccagttagtgccttcggtgtaagatcttctcatcagccctcaatttgtgatccggaattttgtgagaaggattagaaatcagcacctgcgttttagagatcataattctcacctacttctgagcttatttttccatttgatattcattgatatcatgacttccaattgagaggaaaatgagatcaaatgtcatttcccaaatttcttgtaggccgttgtttcagattctttctgtcttggaatgtaaacatctgattctggaatgcagaaggaggggtctgggcatctgtggatttttggctactagaagtgtcccagaagtcactgtatttttgaaacttctaacgtcataattaagtttctcttgtcttggcatcaagaatagtcaagttttttggccgggcatggtggctcatgcctgtaatcccagcacttggggaggccaaggcaggcggatcacatgaggccaggaattcgagaccaacctggtcagcatggcaaaaccccgtctctactaaaagtacaaaaattagccaggcgtgatggcacgtgtctgtaatcccagctactctggagactgaggtgggagaatcgcttgagactgggaggcagaggttgcagtgaaccgagatcatgccaccgcacttcagcctgggtgacagagaaggactccgtctcaaaaaaaaaagaaaaaagaatagtcatttttaaactacctatctcatgcaatgaaagcattttcttccacaaagagcttaatcctcatgataggattgcctagtgtctcccatttgcaggtttctgggttgatgtcttaatgcataatactgcaagtgacatcagctggctgtgatgcttcgaaataggtctgctcctcacagctttgggaatctgaatggaagaagaaaagagagaagttaacaacctccactggggcaactttgtgaacacgtaggcacttagtcataggaaacatattatgtgcaggtcctagcctggggtaggaaagtagatagacagaaaatcattaggtaatttaagtactaaattgggcagggctttttagtatcaaatcactactagaccgtttaatttgttaaattatctctaggatggtgatttataacctacccaaagttatcgatattcttactaaactctgaggcctgaagttctgtgatagaccttaaataagtgtcctaagtcagtggttcccaaatctggctggtcgggaatacctgggaagtttgttaaaattttttaaaaatgttttaagatttttgggtcctgagccaggcgtggtggctcacacctgtaatcccagcactttgggaggctgaggcaggtggatcgcctgaggtcaggagttcaagatcaacctggccaacatactgaaaccccgtctctactaaaaataagaaaaattagctgggcgtggtggcgggcacctgtaatcccagctacttgggaggctgaggcaggagaatcacttgaacctgggagttagaggttgcagtgagctgagatcacaccattgcgcttcagcctgggcaacaagagtgaaactccatctccaaaaaaaaaaaacaaaaagaaaaagattttggggtcccgacctcaaacctactgaatcagaatttctagggatgaagcctaggaatgtgttgttgttttcagagcttccctggtgattgtgataagcctggtttggaaaccattgctggagaactttgtaaagatacagagacccagaccttttgtatttacatttaaatacaaatacaaatcctgggtttctatatgttctgttagcttttcaggtgattctgctacacagacgttgaaaaccactgccctaagaaagagatcagaggccacatatcagagagaaaagggaccaaaccttcggtggtttgttgtgtgtcgttttaatgccaattattttaacttgcacagtcttctgaaaccttgtattaatagttctcttttgtattaccattttcaggtagggttttgatcactatgattctgaagataatagtgaaatagtgaatttcattgatatgaagagataattgattttcattcattggtttgaacacctgcaaaatcacaaataaatgagaactaagtcttgta

SEQ ID NO: 71162 - DNA, 3003 bp, Homo sapiens
  misc_feature (3003)..(3003): n is a, c, g, or t
ctgcacgtgacgcttgcggaggaaggggagagagaggcgcgcgggaggtcgtctagggaatcgaggtgccggctgctccttcctcacaatttgcccagacaggcggtgggtgggaatgcctcacttcagtttgaagagggtccggatccaaaggggttaaaacgagcgacccccgatccccgaccacacttcccgcctccctaaaacgcacaccccgctagccatgggcagccgcgaccacctgttcaaagtgctggtggtgggggacgccgcagtgggcaagacgtcgctggtgcagcgatattcccaggacagcttcagcaaacactacaagtccacggtgggagtggattttgctctgaaggttctccagtggtctgactacgagatagtgcggcttcagctgtgggatattgcagggcaggagcgcttcacctctatgacacgattgtattatcgggatgcctctgcctgtgttattatgtttgacgttaccaatgccactaccttcagcaacagccagaggtggaaacaggacctagacagcaagctcacactacccaatggagagccggtgccctgcctgctcttggccaacaagtgtgatctgtccccttgggcagtgagccgggaccagattgaccggttcagtaaagagaacggtttcacaggttggacagaaacatcagtcaaggagaacaaaaatattaatgaggctatgagagtcctcattgaaaagatgatgagaaattccacagaagatatcatgtctttgtccacccaaggggactacatcaatctacaaaccaagtcctccagctggtcctgctgctagtagtgtttggcttattttccatcccagttctgggaggtcttttaagtctcttccctttggttgcccacctgaccattttattaagtacatttgaattgtctcctgactactgtccagtaaggaggcccattgtcacttagaaaagacacctggaacccatgtgcatttctgcatctcctggattagcctttcacatgttgctgactcacattagtgccagttagtgccttcggtgtaagatcttctcatcagccctcaatttgtgatccggaattttgtgagaaggattagaaatcagcacctgcgttttagagatcataattctcacctacttctgagcttatttttccatttgatattcattgatatcatgacttccaattgagaggaaaatgagatcaaatgtcatttcccaaatttcttgtaggccgttgtttcagattctttctgtcttggaatgtaaacatctgattctggaatgcagaaggaggggtctgggcatctgtggatttttggctactagaagtgtcccagaagtcactgtatttttgaaacttctaacgtcataattaagtttctcttgtcttggcatcaagaatagtcaagttttttggccgggcatggtggctcatgcctgtaatcccagcacttggggaggccaaggcaggcggatcacatgaggccaggaattcgagaccaacctggtcagcatggcaaaaccccgtctctactaaaagtacaaaaattagccaggcgtgatggcacgtgtctgtaatcccagctactctggagactgaggtgggagaatcgcttgagactgggaggcagaggttgcagtgaaccgagatcatgccaccgcacttcagcctgggtgacagagaaggactccgtctcaaaaaaaaaagaaaaaagaatagtcatttttaaactacctatctcatgcaatgaaagcattttcttccacaaagagcttaatcctcatgataggattgcctagtgtctcccatttgcaggtttctgggttgatgtcttaatgcataatactgcaagtgacatcagctggctgtgatgcttcgaaataggtctgctcctcacagctttgggaatctgaatggaagaagaaaagagagaagttaacaacctccactggggcaactttgtgaacacgtaggcacttagtcataggaaacatattatgtgcaggtcctagcctggggtaggaaagtagatagacagaaaatcattaggtaatttaagtactaaattgggcagggctttttagtatcaaatcactactagaccgtttaatttgttaaattatctctaggatggtgatttataacctacccaaagttatcgatattcttactaaactctgaggcctgaagttctgtgatagaccttaaataagtgtcctaagtcagtggttcccaaatctggctggtcgggaatacctgggaagtttgttaaaattttttaaaaatgttttaagatttttgggtcctgagccacacgctcggtctcattttggttgtctaaagctaagatactatatgacttattacattaaattacatgaagctaacacccaaagtccctgaatttgaacctcagctctcctactcactgcttgtgtgatctttggcaaattacttggacgtctccaggtgtctagggttccacaggttttaaccctggggctaataaatagtagctgtccaacgtacggcgctcaacatactacataaggatcattcctgtgaaacctttacaacggtttctgggcaggttacagtcgtcggacgtgtacccaagttaagacgcgtgtgaaatactgcggcacaaatattggcgccagaaaatacgttatctatgtgcacgcgacagcctcattgagagacccatctgtgtactaacccacgggccaaattgcgatcaggcgtacccccccactgatgtcatcaaccatgcacttcaccgccgaggagaagatgtagcttgactacaacaacaaacacaccgtcgtgcggcgcaagaacacaacgatcagcggacgaggacaagatagctagacgatggttgcatctactcgctccctcgctcttgtctcccttgctctgtttgtcgttgcttgttagtaagagagactgaccgaaggagaggcagcn

SEQ ID NO: 71163 - DNA, 2300 bp, Homo sapiens
ctgcacgtgacgcttgcggaggaaggggagagagaggcgcgcgggaggtcgtctagggaatcgaggtgccggctgctccttcctcacaatttgcccagacaggcggtgggtgggaatgcctcacttcagtttgaagagggtccggatccaaaggggttaaaacgagcgacccccgatccccgaccacacttcccgcctccctaaaacgcacaccccgctagccatgggcagccgcgaccacctgttcaaagtgctggtggtgggggacgccgcagtgggcaagacgtcgctggtgcagcgatattcccaggacagcttcagcaaacactacaagtccacggtgggagtggattttgctctgaaggttctccagtggtctgactacgagatagtgcggcttcagctgtgggatattgcagggcaggagcgcttcacctctatgacacgattgtattatcgggatgcctctgcctgtgttattatgtttgacgttaccaatgccactaccttcagcaacagccagaggtggaaacaggacctagacagcaagctcacactacccaatggagagccggtgccctgcctgctcttggccaacaagtgtgatctgtccccttgggcagtgagccgggaccagattgaccggttcagtaaagagaacggtttcacaggttggacagaaacatcagtcaaggagaacaaaaatattaatgaggctatgagagtcctcattgaaaagatgatgagaaattccacagaagatatcatgtctttgtccacccaaggggactacatcaatctacaaaccaagtcctccagctggtcctgctgctagtagtgtttggcttattttccatcccagttctgggaggtcttttaagtctcttccctttggttgcccacctgaccattttattaagtacatttgaattgtctcctgactactgtccagtaaggaggcccattgtcacttagaaaagacacctggaacccatgtgcatttctgcatctcctggattagcctttcacatgttgctgactcacattagtgccagttagtgccttcggtgtaagatcttctcatcagccctcaatttgtgatccggaattttgtgagaaggattagaaatcagcacctgcgttttagagatcataattctcacctacttctgagcttatttttccatttgatattcattgatatcatgacttccaattgagaggaaaatgagatcaaatgtcatttcccaaatttcttgtaggccgttgtttcagattctttctgtcttggaatgtaaacatctgattctggaatgcagaaggaggggtctgggcatctgtggatttttggctactagaagtgtcccagaagtcactgtatttttgaaacttctaacgtcataattaagtttctcttgtcttggcatcaagaatagtcaagttttttggccgggcatggtggctcatgcctgtaatcccagcacttggggaggccaaggcaggcggatcacatgaggccaggaattcgagaccaacctggtcagcatggcaaaaccccgtctctactaaaagtacaaaaattagccaggcgtgatggcacgtgtctgtaatcccagctactctggagactgaggtgggagaatcgcttgagactgggaggcagaggttgcagtgaaccgagatcatgccaccgcacttcagcctgggtgacagagaaggactccgtctcaaaaaaaaaagaaaaaagaatagtcatttttaaactacctatctcatgcaatgaaagcattttcttccacaaagagcttaatcctcatgataggattgcctagtgtctcccatttgcaggtttctgggttgatgtcttaatgcataatactgcaagtgacatcagctggctgtgatgcttcgaaataggtctgctcctcacagctttgggaatctgaatggaagaagaaaagagagaagttaacaacctccactggggcaactttgtgaacacgtaggcacttagtcataggaaacatattatgtgcaggtcctagcctggggtaggaaagtagatagacagaaaatcattaggtaatttaagtactaaattgggcagggctttttagtatcaaatcactactagaccgtttaatttgttaaattatctctaggatggtgatttataacctacccaaagttatcgatattcttactaaactctgaggcctgaagttctgtgatagaccttaaataagtgtcctaagtcagtggttccccgctctaaagactttggggttctcgcaccaagg

SEQ ID NO: 71164 - DNA, 2783 bp, Homo sapiens
ctgcacgtgacgcttgcggaggaaggggagagagaggcgcgcgggaggtcgtctagggaatcgaggtgccggctgctccttcctcacaatttggtttgtgctgcaaggggagggtccccatcatctggccccagtggtgtaaggagctgactgggattcagtcactgacttggagccgctcgggggaagtcccgtgtgatctgtccccttgggcagtgagccgggaccagattgaccggttcagtaaagagaacggtttcacaggttggacagaaacatcagtcaaggagaacaaaaatattaatgaggctatgagagtcctcattgaaaagatgatgagaaattccacagaagatatcatgtctttgtccacccaaggggactacatcaatctacaaaccaagtcctccagctggtcctgctgctagtagtgtttggcttattttccatcccagttctgggaggtcttttaagtctcttccctttggttgcccacctgaccattttattaagtacatttgaattgtctcctgactactgtccagtaaggaggcccattgtcacttagaaaagacacctggaacccatgtgcatttctgcatctcctggattagcctttcacatgttgctgactcacattagtgccagttagtgccttcggtgtaagatcttctcatcagccctcaatttgtgatccggaattttgtgagaaggattagaaatcagcacctgcgttttagagatcataattctcacctacttctgagcttatttttccatttgatattcattgatatcatgacttccaattgagaggaaaatgagatcaaatgtcatttcccaaatttcttgtaggccgttgtttcagattctttctgtcttggaatgtaaacatctgattctggaatgcagaaggaggggtctgggcatctgtggatttttggctactagaagtgtcccagaagtcactgtatttttgaaacttctaacgtcataattaagtttctcttgtcttggcatcaagaatagtcaagttttttggccgggcatggtggctcatgcctgtaatcccagcacttggggaggccaaggcaggcggatcacatgaggccaggaattcgagaccaacctggtcagcatggcaaaaccccgtctctactaaaagtacaaaaattagccaggcgtgatggcacgtgtctgtaatcccagctactctggagactgaggtgggagaatcgcttgagactgggaggcagaggttgcagtgaaccgagatcatgccaccgcacttcagcctgggtgacagagaaggactccgtctcaaaaaaaaaagaaaaaagaatagtcatttttaaactacctatctcatgcaatgaaagcattttcttccacaaagagcttaatcctcatgataggattgcctagtgtctcccatttgcaggtttctgggttgatgtcttaatgcataatactgcaagtgacatcagctggctgtgatgcttcgaaataggtctgctcctcacagctttgggaatctgaatggaagaagaaaagagagaagttaacaacctccactggggcaactttgtgaacacgtaggcacttagtcataggaaacatattatgtgcaggtcctagcctggggtaggaaagtagatagacagaaaatcattaggtaatttaagtactaaattgggcagggctttttagtatcaaatcactactagaccgtttaatttgttaaattatctctaggatggtgatttataacctacccaaagttatcgatattcttactaaactctgaggcctgaagttctgtgatagaccttaaataagtgtcctaagtcagtggttcccaaatctggctggtcgggaatacctgggaagtttgttaaaattttttaaaaatgttttaagatttttgggtcctgagccaggcgtggtggctcacacctgtaatcccagcactttgggaggctgaggcaggtggatcgcctgaggtcaggagttcaagatcaacctggccaacatactgaaaccccgtctctactaaaaataagaaaaattagctgggcgtggtggcgggcacctgtaatcccagctacttgggaggctgaggcaggagaatcacttgaacctgggagttagaggttgcagtgagctgagatcacaccattgcgcttcagcctgggcaacaagagtgaaactccatctccaaaaaaaaaaaacaaaaagaaaaagattttggggtcccgacctcaaacctactgaatcagaatttctagggatgaagcctaggaatgtgttgttgttttcagagcttccctggtgattgtgataagcctggtttggaaaccattgctggagaactttgtaaagatacagagacccagaccttttgtatttacatttaaatacaaatacaaatcctgggtttctatatgttctgttagcttttcaggtgattctgctacacagacgttgaaaaccactgccctaagaaagagatcagaggccacatatcagagagaaaagggaccaaaccttcggtggtttgttgtgtgtcgttttaatgccaattattttaacttgcacagtcttctgaaaccttgtattaatagttctcttttgtattaccattttcaggtagggttttgatcactatgattctgaagataatagtgaaatagtgaatttcattgatatgaagagataattgattttcattcattggtttgaacacctgcaaaatcacaaataaatgagaactaagtcttgta

SEQ ID NO: 71165 - DNA, 2713 bp, Homo sapiens
tctaggtcctgtttccacctctggcagttgctgaaggtagtggcattggtggaaacaggacctagacagcaagctcacactacccaatggagagccggtgccctgcctgctcttggccaacaagtgtgatctgtccccttgggcagtgagccgggaccagattgaccggttcagtaaagagaacggtttcacaggttggacagaaacatcagtcaaggagaacaaaaatattaatgaggctatgagagtcctcattgaaaagatgatgagaaattccacagaagatatcatgtctttgtccacccaaggggactacatcaatctacaaaccaagtcctccagctggtcctgctgctagtagtgtttggcttattttccatcccagttctgggaggtcttttaagtctcttccctttggttgcccacctgaccattttattaagtacatttgaattgtctcctgactactgtccagtaaggaggcccattgtcacttagaaaagacacctggaacccatgtgcatttctgcatctcctggattagcctttcacatgttgctgactcacattagtgccagttagtgccttcggtgtaagatcttctcatcagccctcaatttgtgatccggaattttgtgagaaggattagaaatcagcacctgcgttttagagatcataattctcacctacttctgagcttatttttccatttgatattcattgatatcatgacttccaattgagaggaaaatgagatcaaatgtcatttcccaaatttcttgtaggccgttgtttcagattctttctgtcttggaatgtaaacatctgattctggaatgcagaaggaggggtctgggcatctgtggatttttggctactagaagtgtcccagaagtcactgtatttttgaaacttctaacgtcataattaagtttctcttgtcttggcatcaagaatagtcaagttttttggccgggcatggtggctcatgcctgtaatcccagcacttggggaggccaaggcaggcggatcacatgaggccaggaattcgagaccaacctggtcagcatggcaaaaccccgtctctactaaaagtacaaaaattagccaggcgtgatggcacgtgtctgtaatcccagctactctggagactgaggtgggagaatcgcttgagactgggaggcagaggttgcagtgaaccgagatcatgccaccgcacttcagcctgggtgacagagaaggactccgtctcaaaaaaaaaagaaaaaagaatagtcatttttaaactacctatctcatgcaatgaaagcattttcttccacaaagagcttaatcctcatgataggattgcctagtgtctcccatttgcaggtttctgggttgatgtcttaatgcataatactgcaagtgacatcagctggctgtgatgcttcgaaataggtctgctcctcacagctttgggaatctgaatggaagaagaaaagagagaagttaacaacctccactggggcaactttgtgaacacgtaggcacttagtcataggaaacatattatgtgcaggtcctagcctggggtaggaaagtagatagacagaaaatcattaggtaatttaagtactaaattgggcagggctttttagtatcaaatcactactagaccgtttaatttgttaaattatctctaggatggtgatttataacctacccaaagttatcgatattcttactaaactctgaggcctgaagttctgtgatagaccttaaataagtgtcctaagtcagtggttcccaaatctggctggtcgggaatacctgggaagtttgttaaaattttttaaaaatgttttaagatttttgggtcctgagccaggcgtggtggctcacacctgtaatcccagcactttgggaggctgaggcaggtggatcgcctgaggtcaggagttcaagatcaacctggccaacatactgaaaccccgtctctactaaaaataagaaaaattagctgggcgtggtggcgggcacctgtaatcccagctacttgggaggctgaggcaggagaatcacttgaacctgggagttagaggttgcagtgagctgagatcacaccattgcgcttcagcctgggcaacaagagtgaaactccatctccaaaaaaaaaaaacaaaaagaaaaagattttggggtcccgacctcaaacctactgaatcagaatttctagggatgaagcctaggaatgtgttgttgttttcagagcttccctggtgattgtgataagcctggtttggaaaccattgctggagaactttgtaaagatacagagacccagaccttttgtatttacatttaaatacaaatacaaatcctgggtttctatatgttctgttagcttttcaggtgattctgctacacagacgttgaaaaccactgccctaagaaagagatcagaggccacatatcagagagaaaagggaccaaaccttcggtggtttgttgtgtgtcgttttaatgccaattattttaacttgcacagtcttctgaaaccttgtattaatagttctcttttgtattaccattttcaggtagggttttgatcactatgattctgaagataatagtgaaatagtgaatttcattgatatgaagagataattgattttcattcattggtttgaacacctgcaaaatcacaaataaatgagaactaagtcttgta

SEQ ID NO: 71166 - DNA, 2616 bp, Homo sapiens
agatcccaggtgaaaccaagccatagcttttagtatattttcattttaggttaggcaagaaagttagcgaacttgtcctcaaacctaggaccatttaaaaaagtgacaataaagaagactaagaacaaaaatattaatgaggctatgagagtcctcattgaaaagatgatgagaaattccacagaagatatcatgtctttgtccacccaaggggactacatcaatctacaaaccaagtcctccagctggtcctgctgctagtagtgtttggcttattttccatcccagttctgggaggtcttttaagtctcttccctttggttgcccacctgaccattttattaagtacatttgaattgtctcctgactactgtccagtaaggaggcccattgtcacttagaaaagacacctggaacccatgtgcatttctgcatctcctggattagcctttcacatgttgctgactcacattagtgccagttagtgccttcggtgtaagatcttctcatcagccctcaatttgtgatccggaattttgtgagaaggattagaaatcagcacctgcgttttagagatcataattctcacctacttctgagcttatttttccatttgatattcattgatatcatgacttccaattgagaggaaaatgagatcaaatgtcatttcccaaatttcttgtaggccgttgtttcagattctttctgtcttggaatgtaaacatctgattctggaatgcagaaggaggggtctgggcatctgtggatttttggctactagaagtgtcccagaagtcactgtatttttgaaacttctaacgtcataattaagtttctcttgtcttggcatcaagaatagtcaagttttttggccgggcatggtggctcatgcctgtaatcccagcacttggggaggccaaggcaggcggatcacatgaggccaggaattcgagaccaacctggtcagcatggcaaaaccccgtctctactaaaagtacaaaaattagccaggcgtgatggcacgtgtctgtaatcccagctactctggagactgaggtgggagaatcgcttgagactgggaggcagaggttgcagtgaaccgagatcatgccaccgcacttcagcctgggtgacagagaaggactccgtctcaaaaaaaaaagaaaaaagaatagtcatttttaaactacctatctcatgcaatgaaagcattttcttccacaaagagcttaatcctcatgataggattgcctagtgtctcccatttgcaggtttctgggttgatgtcttaatgcataatactgcaagtgacatcagctggctgtgatgcttcgaaataggtctgctcctcacagctttgggaatctgaatggaagaagaaaagagagaagttaacaacctccactggggcaactttgtgaacacgtaggcacttagtcataggaaacatattatgtgcaggtcctagcctggggtaggaaagtagatagacagaaaatcattaggtaatttaagtactaaattgggcagggctttttagtatcaaatcactactagaccgtttaatttgttaaattatctctaggatggtgatttataacctacccaaagttatcgatattcttactaaactctgaggcctgaagttctgtgatagaccttaaataagtgtcctaagtcagtggttcccaaatctggctggtcgggaatacctgggaagtttgttaaaattttttaaaaatgttttaagatttttgggtcctgagccaggcgtggtggctcacacctgtaatcccagcactttgggaggctgaggcaggtggatcgcctgaggtcaggagttcaagatcaacctggccaacatactgaaaccccgtctctactaaaaataagaaaaattagctgggcgtggtggcgggcacctgtaatcccagctacttgggaggctgaggcaggagaatcacttgaacctgggagttagaggttgcagtgagctgagatcacaccattgcgcttcagcctgggcaacaagagtgaaactccatctccaaaaaaaaaaaacaaaaagaaaaagattttggggtcccgacctcaaacctactgaatcagaatttctagggatgaagcctaggaatgtgttgttgttttcagagcttccctggtgattgtgataagcctggtttggaaaccattgctggagaactttgtaaagatacagagacccagaccttttgtatttacatttaaatacaaatacaaatcctgggtttctatatgttctgttagcttttcaggtgattctgctacacagacgttgaaaaccactgccctaagaaagagatcagaggccacatatcagagagaaaagggaccaaaccttcggtggtttgttgtgtgtcgttttaatgccaattattttaacttgcacagtcttctgaaaccttgtattaatagttctcttttgtattaccattttcaggtagggttttgatcactatgattctgaagataatagtgaaatagtgaatttcattgatatgaagagataattgattttcattcattggtttgaacacctgcaaaatcacaaataaatgagaactaagtcttgta

SEQ ID NO: 71167 - DNA, 1733 bp, Homo sapiens
agagcttaatcctcatgataggattgcctagtgtctcccatttgcaggtttctgggttgatgtcttaatgcataatactgcaagtgacatcagctggctgtgatgcttcgaaataggtctgctcctcacagctttgggaatctgaatggaagaagaaaagagagaagttaacaacctccactggggcaactttgtgaacacgtaggcacttagtcataggaaacatattatgtgcaggtcctagcctgggtgacagagaaggactccgtctcaaaaaaaaaagaaaaaagaatagtcatttttaaactacctatctcatgcaatgaaagcattttcttccacaaagagcttaatcctcatgataggattgcctagtgtctcccatttgcaggtttctgggttgatgtcttaatgcataatactgcaagtgacatcagctggctgtgatgcttcgaaataggtctgctcctcacagctttgggaatctgaatggaagaagaaaagagagaagttaacaacctccactggggcaactttgtgaacacgtaggcacttagtcataggaaacatattatgtgcaggtcctagcctggggtaggaaagtagatagacagaaaatcattaggtaatttaagtactaaattgggcagggctttttagtatcaaatcactactagaccgtttaatttgttaaattatctctaggatggtgatttataacctacccaaagttatcgatattcttactaaactctgaggcctgaagttctgtgatagaccttaaataagtgtcctaagtcagtggttcccaaatctggctggtcgggaatacctgggaagtttgttaaaattttttaaaaatgttttaagatttttgggtcctgagccaggcgtggtggctcacacctgtaatcccagcactttgggaggctgaggcaggtggatcgcctgaggtcaggagttcaagatcaacctggccaacatactgaaaccccgtctctactaaaaataagaaaaattagctgggcgtggtggcgggcacctgtaatcccagctacttgggaggctgaggcaggagaatcacttgaacctgggagttagaggttgcagtgagctgagatcacaccattgcgcttcagcctgggcaacaagagtgaaactccatctccaaaaaaaaaaaacaaaaagaaaaagattttggggtcccgacctcaaacctactgaatcagaatttctagggatgaagcctaggaatgtgttgttgttttcagagcttccctggtgattgtgataagcctggtttggaaaccattgctggagaactttgtaaagatacagagacccagaccttttgtatttacatttaaatacaaatacaaatcctgggtttctatatgttctgttagcttttcaggtgattctgctacacagacgttgaaaaccactgccctaagaaagagatcagaggccacatatcagagagaaaagggaccaaaccttcggtggtttgttgtgtgtcgttttaatgccaattattttaacttgcacagtcttctgaaaccttgtattaatagttctcttttgtattaccattttcaggtagggttttgatcactatgattctgaagataatagtgaaatagtgaatttcattgatatgaagagataattgattttcattcattggtttgaacacctgcaaaatcacaaataaatgagaactaagtcttgta

SEQ ID NO: 71168 - DNA, 1475 bp, Homo sapiens
agagcttaatcctcatgataggattgcctagtgtctcccatttgcaggtttctgggttgatgtcttaatgcataatactgcaagtgacatcagctggctgtgatgcttcgaaataggtctgctcctcacagctttgggaatctgaatggaagaagaaaagagagaagttaacaacctccactggggcaactttgtgaacacgtaggcacttagtcataggaaacatattatgtgcaggtcctagttcacaaagttgccccagtggaggttgttaactttgtgaacacgtaggcacttagtcataggaaacatattatgtgcaggtcctagcctggggtaggaaagtagatagacagaaaatcattaggtaatttaagtactaaattgggcagggctttttagtatcaaatcactactagaccgtttaatttgttaaattatctctaggatggtgatttataacctacccaaagttatcgatattcttactaaactctgaggcctgaagttctgtgatagaccttaaataagtgtcctaagtcagtggttcccaaatctggctggtcgggaatacctgggaagtttgttaaaattttttaaaaatgttttaagatttttgggtcctgagccaggcgtggtggctcacacctgtaatcccagcactttgggaggctgaggcaggtggatcgcctgaggtcaggagttcaagatcaacctggccaacatactgaaaccccgtctctactaaaaataagaaaaattagctgggcgtggtggcgggcacctgtaatcccagctacttgggaggctgaggcaggagaatcacttgaacctgggagttagaggttgcagtgagctgagatcacaccattgcgcttcagcctgggcaacaagagtgaaactccatctccaaaaaaaaaaaacaaaaagaaaaagattttggggtcccgacctcaaacctactgaatcagaatttctagggatgaagcctaggaatgtgttgttgttttcagagcttccctggtgattgtgataagcctggtttggaaaccattgctggagaactttgtaaagatacagagacccagaccttttgtatttacatttaaatacaaatacaaatcctgggtttctatatgttctgttagcttttcaggtgattctgctacacagacgttgaaaaccactgccctaagaaagagatcagaggccacatatcagagagaaaagggaccaaaccttcggtggtttgttgtgtgtcgttttaatgccaattattttaacttgcacagtcttctgaaaccttgtattaatagttctcttttgtattaccattttcaggtagggttttgatcactatgattctgaagataatagtgaaatagtgaatttcattgatatgaagagataattgattttcattcattggtttgaacacctgcaaaatcacaaataaatgagaactaagtcttgta

SEQ ID NO: 71169 - DNA, 1780 bp, Homo sapiens
ctgcacgtgacgcttgcggaggaaggggagagagaggcgcgcgggaggtcgtctagggaatcgaggtgccggctgctccttcctcacaatttggtttgtgctgcaaggggagggtccccatcatctggccccagtggtgtaaggagctgactgggattcagtcactgacttggagccgctcgggggaagtcccggtgggtgaggttccgcggcgcctggtccagtttctcggcagtcaggccaggagggggtggggaaggtgcgaacagccgggggctcggagctcgcgccctgcgccccacccaggttgcggccgcccggggaggaagcgcgtataggttgagtgcaaagtttccttttttgctttctcgtcagagcagcccagacaggcggtgggtgggaatgcctcacttcagtttgaagagggtccggatccaaaggggttaaaacgagcgacccccgatccccgaccacacttcccgcctccctaaaacgcacaccccgctagccatgggcagccgcgaccacctgttcaaagtgctggtggtgggggacgccgcagtgggcaagacgtcgctggtgcagcgatattcccaggacagcttcagcaaacactacaagtccacggtgggagtggattttgctctgaaggttctccagtggtctgactacgagatagtgcggcttcagctgtgggatattgcagggcaggagcgcttcacctctatgacacgattgtattatcgggatgcctctgcctgtgttattatgtttgacgttaccaatgccactaccttcagcaacagccagaggtggaaacaggacctagacagcaagctcacactacccaatggagagccggtgccctgcctgctcttggccaacaagtgtgatctgtccccttgggcagtgagccgggaccagattgaccggttcagtaaagagaacggtttcacaggttggacagaaacatcagtcaaggagaacaaaaatattaatgaggctatgagagtcctcattgaaaagatgatgagaaattccacagaagatatcatgtctttgtccacccaaggggactacatcaatctacaaaccaagtcctccagctggtcctgctgctagtagtgtttggcttattttccatcccagttctgggaggtcttttaagtctcttccctttggttgcccacctgaccattttattaagtacatttgaattgtctcctgactactgtccagtaaggaggcccattgtcacttagaaaagacacctggaacccatgtgcatttctgcatctcctggattagcctttcacatgttgctgactcacattagtgccagttagtgccttcggtgtaagatcttctcatcagccctcaatttgtgatccggaattttgtgagaaggattagaaatcagcacctgcgttttagagatcataattctcacctacttctgagcttatttttccatttgatattcattgatatcatgacttccaattgagaggaaaatgagatcaaatgtcatttcccaaatttcttgtaggccgttgtttcagattctttctgtcttggaatgtaaacatctgattctggaatgcagaaggaggggtctgggcatctgtggatttttggctactagaagtgtcccagaagtcactgtatttttgaaacttctaacgtcataattaagtttctcttgtcttggcatcaagaatagtcaagtttttgacctcggctgcagcatggggatactctagagcagctctcccactat

SEQ ID NO: 71170 - DNA, 1219 bp, Homo sapiens
gaggatcccccttcctgcttctgcccttcctgcttctgcaaaatggctgcttcctgcttctgcccaggtcctagcctggggtaggaaagtagatagacagaaaatcattaggtaatttaagtactaaattgggcagggctttttagtatcaaatcactactagaccgtttaatttgttaaattatctctaggatggtgatttataacctacccaaagttatcgatattcttactaaactctgaggcctgaagttctgtgatagaccttaaataagtgtcctaagtcagtggttcccaaatctggctggtcgggaatacctgggaagtttgttaaaattttttaaaaatgttttaagatttttgggtcctgagccaggcgtggtggctcacacctgtaatcccagcactttgggaggctgaggcaggtggatcgcctgaggtcaggagttcaagatcaacctggccaacatactgaaaccccgtctctactaaaaataagaaaaattagctgggcgtggtggcgggcacctgtaatcccagctacttgggaggctgaggcaggagaatcacttgaacctgggagttagaggttgcagtgagctgagatcacaccattgcgcttcagcctgggcaacaagagtgaaactccatctccaaaaaaaaaaaacaaaaagaaaaagattttggggtcccgacctcaaacctactgaatcagaatttctagggatgaagcctaggaatgtgttgttgttttcagagcttccctggtgattgtgataagcctggtttggaaaccattgctggagaactttgtaaagatacagagacccagaccttttgtatttacatttaaatacaaatacaaatcctgggtttctatatgttctgttagcttttcaggtgattctgctacacagacgttgaaaaccactgccctaagaaagagatcagaggccacatatcagagagaaaagggaccaaaccttcggtggtttgttgtgtgtcgttttaatgccaattattttaacttgcacagtcttctgaaaccttgtattaatagttctcttttgtattaccattttcaggtagggttttgatcactatgattctgaagataatagtgaaatagtgaatttcattgatatgaagagataattgattttcattcattggtttgaacacctgcaaaatcacaaataaatgagaactaagtcttgta

SEQ ID NO: 71171 - DNA, 1772 bp, Homo sapiens
ctgcacgtgacgcttgcggaggaaggggagagagaggcgcgcgggaggtcgtctagggaatcgaggtgccggctgctccttcctcacaatttggtttgtgctgcaaggggagggtccccatcatctggccccagtggtgtaaggagctgactgggattcagtcactgacttggagccgctcgggggaagtcccggtgggtgaggttccgcggcgcctggtccagtttctcggcagtcaggccaggagggggtggggaaggtgcgaacagccgggggctcggagctcgcgccctgcgccccacccaggttgcggccgcccggggaggaagcgcgtataggttgagtgcaaagtttccttttttgctttctcgtcagagcagcccagacaggcggtgggtgggaatgcctcacttcagtttgaagagggtccggatccaaaggggttaaaacgagcgacccccgatccccgaccacacttcccgcctccctaaaacgcacaccccgctagccatgggcagccgcgaccacctgttcaaagtgctggtggtgggggacgccgcagtgggcaagacgtcgctggtgcagcgatattcccaggacagcttcagcaaacactacaagtccacggtgggagtggattttgctctgaaggttctccagtggtctgactacgagatagtgcggcttcagctgtgggatattgcagggcaggagcgcttcacctctatgacacgattgtattatcgggatgcctctgcctgtgttattatgtttgacgttaccaatgccactaccttcagcaacagccagaggtggaaacaggacctagacagcaagctcacactacccaatggagagccggtgccctgcctgctcttggccaacaagtgtgatctgtccccttgggcagtgagccgggaccagattgaccggttcagtaaagagaacggtttcacaggttggacagaaacatcagtcaaggagaacaaaaatattaatgaggctatgagagtcctcattgaaaagatgatgagaaattccacagaagatatcatgtctttgtccacccaaggggactacatcaatctacaaaccaagtcctccagctggtcctgctgctagtagtgtttggcttattttccatcccagttctgggaggtcttttaagtctcttccctttggttgcccacctgaccattttattaagtacatttgaattgtctcctgactactgtccagtaaggaggcccattgtcacttagaaaagacacctggaacccatgtgcatttctgcatctcctggattagcctttcacatgttgctgactcacattagtgccagttagtgccttcggtgtaagatcttctcatcagccctcaatttgtgatccggaattttgtgagaaggattagaaatcagcacctgcgttttagagatcataattctcacctacttctgagcttatttttccatttgatattcattgatatcatgacttccaattgagaggaaaatgagatcaaatgtcatttcccaaatttcttgtaggccgttgtttcagattctttctgtcttggaatgtaaacatctgattctggaatgcagaaggaggggtctgggcatctgtggatttttggctactagaagtgtcccagaagtcactgtatttttgaaacttctaacgtcatgagcagttccacgtgtcctgcgaccgagcatagacaacttctgttcgcgatggctgcagtcatgatgtacatcatagaacaga

SEQ ID NO: 71172 - DNA, 3190 bp, Homo sapiens
ctgcacgtgacgcttgcggaggaaggggagagagaggcgcgcgggaggtcgtctagggaatcgaggtgccggctgctccttcctcacaatttgcccagacaggcggtgggtgggaatgcctcacttcagtttgaagagggtccggatccaaaggggttaaaacgagcgacccccgatccccgaccacacttcccgcctccctaaaacgcacaccccgctagccatgggcagccgcgaccacctgttcaaagtgctggtggtgggggacgccgcagtgggcaagacgtcgctggtgcagcgatattcccaggacagcttcagcaaacactacaagtccacggtgggagtggattttgctctgaaggttctccagtggtctgactacgagatagtgcggcttcagctgtgggatattgcagggcaggagcgcttcacctctatgacacgattgtattatcgggatgcctctgcctgtgttattatgtttgacgttaccaatgccactaccttcagcaacagccagaggtggaaacaggacctagacagcaagctcacactacccaatggagagccggtgccctgcctgctcttggccaacaagtgtgatctgtccccttgggcagtgagccgggaccagattgaccggttcagtaaagagaacggtttcacaggttggacagaaacatcagtcaaggagaacaaaaatattaatgaggctatgagagtcctcattgaaaagatgatgagaaattccacagaagatatcatgtctttgtccacccaaggggactacatcaatctacaaaccaagtcctccagctggtcctgctgctagtagtgtttggcttattttccatcccagttctgggaggtcttttaagtctcttccctttggttgcccacctgaccattttattaagtacatttgaattgtctcctgactactgtccagtaaggaggcccattgtcacttagaaaagacacctggaacccatgtgcatttctgcatctcctggattagcctttcacatgttgctgactcacattagtgccagttagtgccttcggtgtaagatcttctcatcagccctcaatttgtgatccggaattttgtgagaaggattagaaatcagcacctgcgttttagagatcataattctcacctacttctgagcttatttttccatttgatattcattgatatcatgacttccaattgagaggaaaatgagatcaaatgtcatttcccaaatttcttgtaggccgttgtttcagattctttctgtcttggaatgtaaacatctgattctggaatgcagaaggaggggtctgggcatctgtggatttttggctactagaagtgtcccagaagtcactgtatttttgaaacttctaacgtcataattaagtttctcttgtcttggcatcaagaatagtcaagttttttggccgggcatggtggctcatgcctgtaatcccagcacttggggaggccaaggcaggcggatcacatgaggccaggaattcgagaccaacctggtcagcatggcaaaaccccgtctctactaaaagtacaaaaattagccaggcgtgatggcacgtgtctgtaatcccagctactctggagactgaggtgggagaatcgcttgagactgggaggcagaggttgcagtgaaccgagatcatgccaccgcacttcagcctgggtgacagagaaggactccgtctcaaaaaaaaaagaaaaaagaatagtcatttttaaactacctatctcatgcaatgaaagcattttcttccacaaagagcttaatcctcatgataggattgcctagtgtctcccatttgcaggtttctgggttgatgtcttaatgcataatactgcaagtgacatcagctggctgtgatgcttcgaaataggtctgctcctcacagctttgggaatctgaatggaagaagaaaagagagaagttaacaacctccactggggcaactttgtgaacacgtaggcacttagtcataggaaacatattatgtgcaggtcctagcctggggtaggaaagtagatagacagaaaatcattaggtaatttaagtactaaattgggcagggctttttagtatcaaatcactactagaccgtttaatttgttaaattatctctaggatggtgatttataacctacccaaagttatcgatattcttactaaactctgaggcctgaagttctgtgatagaccttaaataagtgtcctaagtcagtggttcccaaatctggctggtcgggaatacctgggaagtttgttaaaattttttaaaaatgttttaagatttttgggtcctgagccaggcgtggtggctcacacctgtaatcccagcactttgggaggctgaggcaggtggatcgcctgaggtcaggagttcaagatcaacctggccaacatactgaaaccccgtctctactaaaaataagaaaaattagctgggcgtggtggcgggcacctgtaatcccagctacttgggaggctgaggcaggagaatcacttgaacctgggagttagaggttgcagtgagctgagatcacaccattgcgcttcagcctgggcaacaagagtgaaactccatctccaaaaaaaaaaaacaaaaagaaaaagattttggggtcccgacctcaaacctactgaatcagaatttctagggatgaagcctaggaatgtgttgttgttttcagagcttccctggtgattgtgataagcctggtttggaaaccattgctggagaactttgtaaagatacagagacccagaccttttgtatttacatttaaatacaaatacaaatcctgggtttctatatgttctgttagcttttcaggtgattctgctacacagacgttgaaaaccactgccctaagaaagagatcagaggccacatatcagagagaaaagggaccaaaccttcggtggtttgttgtgtgtcgttttaatgccaattattttaacttgcacagtcttctgaaaccttgtattaatagttctcttttgtattaccattttcaggtagggttttgatcactatgattctgaagataatagtgaaatagtgaatttcattgatatgaagagataattgattttcattcattggtttgaacacctgcaaaatcacaaataaatgagaactaagtcttgta

SEQ ID NO: 71173 - DNA, 3477 bp, Homo sapiens
ctgcacgtgacgcttgcggaggaaggggagagagaggcgcgcgggaggtcgtctagggaatcgaggtgccggctgctccttcctcacaatttggtttgtgctgcaaggggagggtccccatcatctggccccagtggtgtaaggagctgactgggattcagtcactgacttggagccgctcgggggaagtcccggtgggtgaggttccgcggcgcctggtccagtttctcggcagtcaggccaggagggggtggggaaggtgcgaacagccgggggctcggagctcgcgccctgcgccccacccaggttgcggccgcccggggaggaagcgcgtataggttgagtgcaaagtttccttttttgctttctcgtcagagcagcccagacaggcggtgggtgggaatgcctcacttcagtttgaagagggtccggatccaaaggggttaaaacgagcgacccccgatccccgaccacacttcccgcctccctaaaacgcacaccccgctagccatgggcagccgcgaccacctgttcaaagtgctggtggtgggggacgccgcagtgggcaagacgtcgctggtgcagcgatattcccaggacagcttcagcaaacactacaagtccacggtgggagtggattttgctctgaaggttctccagtggtctgactacgagatagtgcggcttcagctgtgggatattgcagggcaggagcgcttcacctctatgacacgattgtattatcgggatgcctctgcctgtgttattatgtttgacgttaccaatgccactaccttcagcaacagccagaggtggaaacaggacctagacagcaagctcacactacccaatggagagccggtgccctgcctgctcttggccaacaagtgtgatctgtccccttgggcagtgagccgggaccagattgaccggttcagtaaagagaacggtttcacaggttggacagaaacatcagtcaaggagaacaaaaatattaatgaggctatgagagtcctcattgaaaagatgatgagaaattccacagaagatatcatgtctttgtccacccaaggggactacatcaatctacaaaccaagtcctccagctggtcctgctgctagtagtgtttggcttattttccatcccagttctgggaggtcttttaagtctcttccctttggttgcccacctgaccattttattaagtacatttgaattgtctcctgactactgtccagtaaggaggcccattgtcacttagaaaagacacctggaacccatgtgcatttctgcatctcctggattagcctttcacatgttgctgactcacattagtgccagttagtgccttcggtgtaagatcttctcatcagccctcaatttgtgatccggaattttgtgagaaggattagaaatcagcacctgcgttttagagatcataattctcacctacttctgagcttatttttccatttgatattcattgatatcatgacttccaattgagaggaaaatgagatcaaatgtcatttcccaaatttcttgtaggccgttgtttcagattctttctgtcttggaatgtaaacatctgattctggaatgcagaaggaggggtctgggcatctgtggatttttggctactagaagtgtcccagaagtcactgtatttttgaaacttctaacgtcataattaagtttctcttgtcttggcatcaagaatagtcaagttttttggccgggcatggtggctcatgcctgtaatcccagcacttggggaggccaaggcaggcggatcacatgaggccaggaattcgagaccaacctggtcagcatggcaaaaccccgtctctactaaaagtacaaaaattagccaggcgtgatggcacgtgtctgtaatcccagctactctggagactgaggtgggagaatcgcttgagactgggaggcagaggttgcagtgaaccgagatcatgccaccgcacttcagcctgggtgacagagaaggactccgtctcaaaaaaaaaagaaaaaagaatagtcatttttaaactacctatctcatgcaatgaaagcattttcttccacaaagagcttaatcctcatgataggattgcctagtgtctcccatttgcaggtttctgggttgatgtcttaatgcataatactgcaagtgacatcagctggctgtgatgcttcgaaataggtctgctcctcacagctttgggaatctgaatggaagaagaaaagagagaagttaacaacctccactggggcaactttgtgaacacgtaggcacttagtcataggaaacatattatgtgcaggtcctagcctggggtaggaaagtagatagacagaaaatcattaggtaatttaagtactaaattgggcagggctttttagtatcaaatcactactagaccgtttaatttgttaaattatctctaggatggtgatttataacctacccaaagttatcgatattcttactaaactctgaggcctgaagttctgtgatagaccttaaataagtgtcctaagtcagtggttcccaaatctggctggtcgggaatacctgggaagtttgttaaaattttttaaaaatgttttaagatttttgggtcctgagccaggcgtggtggctcacacctgtaatcccagcactttgggaggctgaggcaggtggatcgcctgaggtcaggagttcaagatcaacctggccaacatactgaaaccccgtctctactaaaaataagaaaaattagctgggcgtggtggcgggcacctgtaatcccagctacttgggaggctgaggcaggagaatcacttgaacctgggagttagaggttgcagtgagctgagatcacaccattgcgcttcagcctgggcaacaagagtgaaactccatctccaaaaaaaaaaaacaaaaagaaaaagattttggggtcccgacctcaaacctactgaatcagaatttctagggatgaagcctaggaatgtgttgttgttttcagagcttccctggtgattgtgataagcctggtttggaaaccattgctggagaactttgtaaagatacagagacccagaccttttgtatttacatttaaatacaaatacaaatcctgggtttctatatgttctgttagcttttcaggtgattctgctacacagacgttgaaaaccactgccctaagaaagagatcagaggccacatatcagagagaaaagggaccaaaccttcggtggtttgttgtgtgtcgttttaatgccaattattttaacttgcacagtcttctgaaaccttgtattaatagttctcttttgtattaccattttcaggtagggttttgatcactatgattctgaagataatagtgaaatagtgaatttcattgatatgaagagataattgattttcattcattggtttgaacacctgcaaaatcacaaataaatgagaactaagtcttgta

SEQ ID NO: 71174 - DNA, 3423 bp, Homo sapiens
ctgcacgtgacgcttgcggaggaaggggagagagaggcgcgcgggaggtcgtctagggaatcgaggtgccggctgctccttcctcacaatttggtttgtgctgcaaggggagggtccccatcatctggccccagtggtgtaaggagctgactgggattcagtcactgacttggagccgctcgggggaagtcccggtgggtgaggttccgcggcgcctggtccagtttctcggcagtcaggccaggagggggtggggaaggtgcgaacagccgggggctcggagctcgcgccctgcgccccacccaggttgcggccgcccggggaggaagcgcgtataggttgagtgcaaagtttccttttttgctttctcgtcagagcagcccagacaggcggtgggtgggaatgcctcacttcagtttgaagagggtccggatccaaaggggttaaaacgagcgacccccgatccccgaccacacttcccgcctccctaaaacgcacaccccgctagccatgggcagccgcgaccacctgttcaaagtgctggtggtgggggacgccgcagtgggcaagacgtcgctggtgcagcgatattcccaggacagcttcagcaaacactacaagtccacggtgggagtggattttgctctgaaggttctccagtggtctgactacgagatagtgcggcttcagctgtgggatattgcagggcaggagcgcttcacctctatgacacgattgtattatcgggatgcctctgcctgtgttattatgtttgacgttaccaatgccactaccttcagcaacagccagaggtggaaacaggacctagacagcaagctcacactacccaatggagagccggtgccctgcctgctcttggccaacaagtgtgatctgtccccttgggcagtgagccgggaccagattgaccggttcagtaaagagaacggtttcacaggttggacagaaacatcagtcaaggagaacaaaaatattaatgaggctatgagagtcctcattgaaaagatgatgagaaattccacagaagatatcatgtctttgtccacccaaggggactacatcaatctacaaaccaagtcctccagctggtcctgctgctagtagtgtttggcttattttccatcccagttctgggaggtcttttaagtctcttccctttggttgcccacctgaccattttattaagtacatttgaattgtctcctgactactgtccagtaaggaggcccattgtcacttagaaaagacacctggaacccatgtgcatttctgcatctcctggattagcctttcacatgttgctgactcacattagtgccagttagtgccttcggtgtaagatcttctcatcagccctcaatttgtgatccggaattttgtgagaaggattagaaatcagcacctgcgttttagagatcataattctcacctacttctgagcttatttttccatttgatattcattgatatcatgacttccaattgagaggctttctgtcttggaatgtaaacatctgattctggaatgcagaaggaggggtctgggcatctgtggatttttggctactagaagtgtcccagaagtcactgtatttttgaaacttctaacgtcataattaagtttctcttgtcttggcatcaagaatagtcaagttttttggccgggcatggtggctcatgcctgtaatcccagcacttggggaggccaaggcaggcggatcacatgaggccaggaattcgagaccaacctggtcagcatggcaaaaccccgtctctactaaaagtacaaaaattagccaggcgtgatggcacgtgtctgtaatcccagctactctggagactgaggtgggagaatcgcttgagactgggaggcagaggttgcagtgaaccgagatcatgccaccgcacttcagcctgggtgacagagaaggactccgtctcaaaaaaaaaagaaaaaagaatagtcatttttaaactacctatctcatgcaatgaaagcattttcttccacaaagagcttaatcctcatgataggattgcctagtgtctcccatttgcaggtttctgggttgatgtcttaatgcataatactgcaagtgacatcagctggctgtgatgcttcgaaataggtctgctcctcacagctttgggaatctgaatggaagaagaaaagagagaagttaacaacctccactggggcaactttgtgaacacgtaggcacttagtcataggaaacatattatgtgcaggtcctagcctggggtaggaaagtagatagacagaaaatcattaggtaatttaagtactaaattgggcagggctttttagtatcaaatcactactagaccgtttaatttgttaaattatctctaggatggtgatttataacctacccaaagttatcgatattcttactaaactctgaggcctgaagttctgtgatagaccttaaataagtgtcctaagtcagtggttcccaaatctggctggtcgggaatacctgggaagtttgttaaaattttttaaaaatgttttaagatttttgggtcctgagccaggcgtggtggctcacacctgtaatcccagcactttgggaggctgaggcaggtggatcgcctgaggtcaggagttcaagatcaacctggccaacatactgaaaccccgtctctactaaaaataagaaaaattagctgggcgtggtggcgggcacctgtaatcccagctacttgggaggctgaggcaggagaatcacttgaacctgggagttagaggttgcagtgagctgagatcacaccattgcgcttcagcctgggcaacaagagtgaaactccatctccaaaaaaaaaaaacaaaaagaaaaagattttggggtcccgacctcaaacctactgaatcagaatttctagggatgaagcctaggaatgtgttgttgttttcagagcttccctggtgattgtgataagcctggtttggaaaccattgctggagaactttgtaaagatacagagacccagaccttttgtatttacatttaaatacaaatacaaatcctgggtttctatatgttctgttagcttttcaggtgattctgctacacagacgttgaaaaccactgccctaagaaagagatcagaggccacatatcagagagaaaagggaccaaaccttcggtggtttgttgtgtgtcgttttaatgccaattattttaacttgcacagtcttctgaaaccttgtattaatagttctcttttgtattaccattttcaggtagggttttgatcactatgattctgaagataatagtgaaatagtgaatttcattgatatgaagagataattgattttcattcattggtttgaacacctgcaaaatcacaaataaatgagaactaagtcttgta

SEQ ID NO: 71175 - DNA, 3037 bp, Homo sapiens
ctgcacgtgacgcttgcggaggaaggggagagagaggcgcgcgggaggtcgtctagggaatcgaggtgccggctgctccttcctcacaatttggtttgtgctgcaaggggagggtccccatcatctggccccagtggtgtaaggagctgactgggattcagtcactgacttggagccgctcgggggaagtcccgtggattttgctctgaaggttctccagtggtctgactacgagatagtgcggcttcagctgtgggatattgcagggcaggagcgcttcacctctatgacacgattgtattatcgggatgcctctgcctgtgttattatgtttgacgttaccaatgccactaccttcagcaacagccagaggtggaaacaggacctagacagcaagctcacactacccaatggagagccggtgccctgcctgctcttggccaacaagtgtgatctgtccccttgggcagtgagccgggaccagattgaccggttcagtaaagagaacggtttcacaggttggacagaaacatcagtcaaggagaacaaaaatattaatgaggctatgagagtcctcattgaaaagatgatgagaaattccacagaagatatcatgtctttgtccacccaaggggactacatcaatctacaaaccaagtcctccagctggtcctgctgctagtagtgtttggcttattttccatcccagttctgggaggtcttttaagtctcttccctttggttgcccacctgaccattttattaagtacatttgaattgtctcctgactactgtccagtaaggaggcccattgtcacttagaaaagacacctggaacccatgtgcatttctgcatctcctggattagcctttcacatgttgctgactcacattagtgccagttagtgccttcggtgtaagatcttctcatcagccctcaatttgtgatccggaattttgtgagaaggattagaaatcagcacctgcgttttagagatcataattctcacctacttctgagcttatttttccatttgatattcattgatatcatgacttccaattgagaggaaaatgagatcaaatgtcatttcccaaatttcttgtaggccgttgtttcagattctttctgtcttggaatgtaaacatctgattctggaatgcagaaggaggggtctgggcatctgtggatttttggctactagaagtgtcccagaagtcactgtatttttgaaacttctaacgtcataattaagtttctcttgtcttggcatcaagaatagtcaagttttttggccgggcatggtggctcatgcctgtaatcccagcacttggggaggccaaggcaggcggatcacatgaggccaggaattcgagaccaacctggtcagcatggcaaaaccccgtctctactaaaagtacaaaaattagccaggcgtgatggcacgtgtctgtaatcccagctactctggagactgaggtgggagaatcgcttgagactgggaggcagaggttgcagtgaaccgagatcatgccaccgcacttcagcctgggtgacagagaaggactccgtctcaaaaaaaaaagaaaaaagaatagtcatttttaaactacctatctcatgcaatgaaagcattttcttccacaaagagcttaatcctcatgataggattgcctagtgtctcccatttgcaggtttctgggttgatgtcttaatgcataatactgcaagtgacatcagctggctgtgatgcttcgaaataggtctgctcctcacagctttgggaatctgaatggaagaagaaaagagagaagttaacaacctccactggggcaactttgtgaacacgtaggcacttagtcataggaaacatattatgtgcaggtcctagcctggggtaggaaagtagatagacagaaaatcattaggtaatttaagtactaaattgggcagggctttttagtatcaaatcactactagaccgtttaatttgttaaattatctctaggatggtgatttataacctacccaaagttatcgatattcttactaaactctgaggcctgaagttctgtgatagaccttaaataagtgtcctaagtcagtggttcccaaatctggctggtcgggaatacctgggaagtttgttaaaattttttaaaaatgttttaagatttttgggtcctgagccaggcgtggtggctcacacctgtaatcccagcactttgggaggctgaggcaggtggatcgcctgaggtcaggagttcaagatcaacctggccaacatactgaaaccccgtctctactaaaaataagaaaaattagctgggcgtggtggcgggcacctgtaatcccagctacttgggaggctgaggcaggagaatcacttgaacctgggagttagaggttgcagtgagctgagatcacaccattgcgcttcagcctgggcaacaagagtgaaactccatctccaaaaaaaaaaaacaaaaagaaaaagattttggggtcccgacctcaaacctactgaatcagaatttctagggatgaagcctaggaatgtgttgttgttttcagagcttccctggtgattgtgataagcctggtttggaaaccattgctggagaactttgtaaagatacagagacccagaccttttgtatttacatttaaatacaaatacaaatcctgggtttctatatgttctgttagcttttcaggtgattctgctacacagacgttgaaaaccactgccctaagaaagagatcagaggccacatatcagagagaaaagggaccaaaccttcggtggtttgttgtgtgtcgttttaatgccaattattttaacttgcacagtcttctgaaaccttgtattaatagttctcttttgtattaccattttcaggtagggttttgatcactatgattctgaagataatagtgaaatagtgaatttcattgatatgaagagataattgattttcattcattggtttgaacacctgcaaaatcacaaataaatgagaactaagtcttgta

SEQ ID NO: 71176 - DNA, 2822 bp, Homo sapiens
tgagacggagaccttctctgtcacccaggctgaagtgcggtggcatgatctggcaggagcgcttcacctctatgacacgattgtattatcgggatgcctctgcctgtgttattatgtttgacgttaccaatgccactaccttcagcaacagccagaggtggaaacaggacctagacagcaagctcacactacccaatggagagccggtgccctgcctgctcttggccaacaagtgtgatctgtccccttgggcagtgagccgggaccagattgaccggttcagtaaagagaacggtttcacaggttggacagaaacatcagtcaaggagaacaaaaatattaatgaggctatgagagtcctcattgaaaagatgatgagaaattccacagaagatatcatgtctttgtccacccaaggggactacatcaatctacaaaccaagtcctccagctggtcctgctgctagtagtgtttggcttattttccatcccagttctgggaggtcttttaagtctcttccctttggttgcccacctgaccattttattaagtacatttgaattgtctcctgactactgtccagtaaggaggcccattgtcacttagaaaagacacctggaacccatgtgcatttctgcatctcctggattagcctttcacatgttgctgactcacattagtgccagttagtgccttcggtgtaagatcttctcatcagccctcaatttgtgatccggaattttgtgagaaggattagaaatcagcacctgcgttttagagatcataattctcacctacttctgagcttatttttccatttgatattcattgatatcatgacttccaattgagaggaaaatgagatcaaatgtcatttcccaaatttcttgtaggccgttgtttcagattctttctgtcttggaatgtaaacatctgattctggaatgcagaaggaggggtctgggcatctgtggatttttggctactagaagtgtcccagaagtcactgtatttttgaaacttctaacgtcataattaagtttctcttgtcttggcatcaagaatagtcaagttttttggccgggcatggtggctcatgcctgtaatcccagcacttggggaggccaaggcaggcggatcacatgaggccaggaattcgagaccaacctggtcagcatggcaaaaccccgtctctactaaaagtacaaaaattagccaggcgtgatggcacgtgtctgtaatcccagctactctggagactgaggtgggagaatcgcttgagactgggaggcagaggttgcagtgaaccgagatcatgccaccgcacttcagcctgggtgacagagaaggactccgtctcaaaaaaaaaagaaaaaagaatagtcatttttaaactacctatctcatgcaatgaaagcattttcttccacaaagagcttaatcctcatgataggattgcctagtgtctcccatttgcaggtttctgggttgatgtcttaatgcataatactgcaagtgacatcagctggctgtgatgcttcgaaataggtctgctcctcacagctttgggaatctgaatggaagaagaaaagagagaagttaacaacctccactggggcaactttgtgaacacgtaggcacttagtcataggaaacatattatgtgcaggtcctagcctggggtaggaaagtagatagacagaaaatcattaggtaatttaagtactaaattgggcagggctttttagtatcaaatcactactagaccgtttaatttgttaaattatctctaggatggtgatttataacctacccaaagttatcgatattcttactaaactctgaggcctgaagttctgtgatagaccttaaataagtgtcctaagtcagtggttcccaaatctggctggtcgggaatacctgggaagtttgttaaaattttttaaaaatgttttaagatttttgggtcctgagccaggcgtggtggctcacacctgtaatcccagcactttgggaggctgaggcaggtggatcgcctgaggtcaggagttcaagatcaacctggccaacatactgaaaccccgtctctactaaaaataagaaaaattagctgggcgtggtggcgggcacctgtaatcccagctacttgggaggctgaggcaggagaatcacttgaacctgggagttagaggttgcagtgagctgagatcacaccattgcgcttcagcctgggcaacaagagtgaaactccatctccaaaaaaaaaaaacaaaaagaaaaagattttggggtcccgacctcaaacctactgaatcagaatttctagggatgaagcctaggaatgtgttgttgttttcagagcttccctggtgattgtgataagcctggtttggaaaccattgctggagaactttgtaaagatacagagacccagaccttttgtatttacatttaaatacaaatacaaatcctgggtttctatatgttctgttagcttttcaggtgattctgctacacagacgttgaaaaccactgccctaagaaagagatcagaggccacatatcagagagaaaagggaccaaaccttcggtggtttgttgtgtgtcgttttaatgccaattattttaacttgcacagtcttctgaaaccttgtattaatagttctcttttgtattaccattttcaggtagggttttgatcactatgattctgaagataatagtgaaatagtgaatttcattgatatgaagagataattgattttcattcattggtttgaacacctgcaaaatcacaaataaatgagaactaagtcttgta

SEQ ID NO: 71177 - DNA, 2934 bp, Homo sapiens
ctgcacgtgacgcttgcggaggaaggggagagagaggcgcgcgggaggtcgtctagggaatcgaggtgccggctgctccttcctcacaatttggtttgtgctgcaaggggagggtccccatcatctggccccagtggtgtaaggagctgactgggattcagtcactgacttggagccgctcgggggaagtcccggtgggtgaggttccgcggcgcctggtccagtttctcggcagtcaggccaggagggggtggggaaggtgcgaacagccgggggctcggagctcgcgccctgcgccccacccaggttgcggccgcccggggaggaagcgcgtataggttgagtgcaaagtttccttttttgctttctcgtcagagcagcccagacaggcggtgggtgggaatgcctcacttcagtttgaagagggtccggatccaaaggggttaaaacgagcgacccccgatccccgaccacacttcccgcctccctaaaacgcacaccccgctagccatgggcagccgcgaccacctgttcaaagtgctggtggtgggggacgccgcagtgggcaagacgtcgctggtgcagcgatattcccaggacagcttcagcaaacactacaagtccacggtgggagggcaggagcgcttcacctctatgacacgattgtattatcgggatgcctctgcctgtgttattatgtttgacgttaccaatgccactaccttcagcaacagccagaggtggaaacaggacctagacagcaagctcacactacccaatggagagccggtgccctgcctgctcttggccaacaaggtatgtggccaatctcagaaaatggtccctagcctctatctgtggttagaaaggaagtaaaatgctctctgattctgggcatccatttccccttcttaagttggcaaaatcatctctacctccttcaaaggatgttgagggtgagtgagactttctttcttttttttttttttgagacggagtctcgctctgttgcccaggctggagtgcagtggcgcgatctcggctcactgccagctctgcctcccaggttcacgccattctcttgcctcagcctcccgagtagctgggactacaggtgcccaccaccacacccagctaatttttttgtatttttagtagagactgggtttcattgtgttagccaggatggtctcgctctcctgacctcatgatctgcccgcctcagcacttggggaggccaaggcaggcggatcacatgaggccaggaattcgagaccaacctggtcagcatggcaaaaccccgtctctactaaaagtacaaaaattagccaggcgtgatggcacgtgtctgtaatcccagctactctggagactgaggtgggagaatcgcttgagactgggaggcagaggttgcagtgaaccgagatcatgccaccgcacttcagcctgggtgacagagaaggactccgtctcaaaaaaaaaagaaaaaagaatagtcatttttaaactacctatctcatgcaatgaaagcattttcttccacaaagagcttaatcctcatgataggattgcctagtgtctcccatttgcaggtttctgggttgatgtcttaatgcataatactgcaagtgacatcagctggctgtgatgcttcgaaataggtctgctcctcacagctttgggaatctgaatggaagaagaaaagagagaagttaacaacctccactggggcaactttgtgaacacgtaggcacttagtcataggaaacatattatgtgcaggtcctagcctggggtaggaaagtagatagacagaaaatcattaggtaatttaagtactaaattgggcagggctttttagtatcaaatcactactagaccgtttaatttgttaaattatctctaggatggtgatttataacctacccaaagttatcgatattcttactaaactctgaggcctgaagttctgtgatagaccttaaataagtgtcctaagtcagtggttcccaaatctggctggtcgggaatacctgggaagtttgttaaaattttttaaaaatgttttaagatttttgggtcctgagccaggcgtggtggctcacacctgtaatcccagcactttgggaggctgaggcaggtggatcgcctgaggtcaggagttcaagatcaacctggccaacatactgaaaccccgtctctactaaaaataagaaaaattagctgggcgtggtggcgggcacctgtaatcccagctacttgggaggctgaggcaggagaatcacttgaacctgggagttagaggttgcagtgagctgagatcacaccattgcgcttcagcctgggcaacaagagtgaaactccatctccaaaaaaaaaaaacaaaaagaaaaagattttggggtcccgacctcaaacctactgaatcagaatttctagggatgaagcctaggaatgtgttgttgttttcagagcttccctggtgattgtgataagcctggtttggaaaccattgctggagaactttgtaaagatacagagacccagaccttttgtatttacatttaaatacaaatacaaatcctgggtttctatatgttctgttagcttttcaggtgattctgctacacagacgttgaaaaccactgccctaagaaagagatcagaggccacatatcagagagaaaagggaccaaaccttcggtggtttgttgtgtgtcgttttaatgccaattattttaacttgcacagtcttctgaaaccttgtattaatagttctcttttgtattaccattttcaggtagggttttgatcactatgattctgaagataatagtgaaatagtgaatttcattgatatgaagagataattgattttcattcattggtttgaacacctgcaaaatcacaaataaatgagaactaagtcttgta

SEQ ID NO: 71178 - DNA, 805 bp, Homo sapiens
ctgcacgtgacgcttgcggaggaaggggagagagaggcgcgcgggaggtcgtctagggaatcgaggtgccggctgctccttcctcacaatttggtttgtgctgcaaggggagggtccccatcatctggccccagtggtgtaaggagctgactgggattcagtcactgacttggagccgctcgggggaagtcccgtggattttgctctgaaggttctccagtggtctgactacgagatagtgcggcttcagctgtgggatattgcagggcaggagcgcttcacctctatgacacgattgtattatcgggatgcctctgcctgtgttattatgtttgacgttaccaatgccactaccttcagcaacagccagaggtggaaacaggacctagacagcaagctcacactacccaatggagagccggtgccctgcctgctcttggccaacaagtgtgatctgtccccttgggcagtgagccgggaccagattgaccggttcagtaaagagaacggtttcacaggttggacagaaacatcagtcaaggagaacaaaaatattaatgaggctatgagagtcctcattgaaaagatgatgagaaattccacagaagatatcatgtctttgtccacccaaggggactacatcaatctacaaaccaagtcctccagctggtcctgctgctagtagtgtttggcttattttccatcccagttctgggaggtcttttaagtctcttccctttggttgcccacctgaccattttattaagtacatttgaccgtgagcggcgggggggtcctctagagt

SEQ ID NO: 71179 - DNA, 276 bp, Homo sapiens
taaaaaaaatatcgttttggcttcttaatgtgagcttcttatgtggtattttgaagatgtgttccagaatcattctaaagtgacacatagatttcagataaatcccttgctgtcaggaatatgtatttaaataattcaaatactaaagaaatcagcttctgctcacggtcacaagaacttttaactttcaaagggcaagaagagctaatgcagttactttgtcagtactaataaaagtcctgcagtttgccttcatttccactggaaacgtagcag

SEQ ID NO: 71180 - DNA, 1094 bp, Homo sapiens
tattctaaaaaataagactgggtctcaagactgcttccctaacagactgtttctcctgaaaatgcaggagctattctttctgttctggttatatagtttccattcatggcttcttgtcctgttgttttttgtgtcgagtacactatataaattatctccttatacatatttctcaggcaagcacagagttatactgaacttttctaaagatgctttgcatcaagaagcaaagggaaatacagaattaaaatgtttctttccattttgctttgtttttctatatcgatctagactttgtaggaaaatgcaaagcgtatatttaagaaaacctaaataagaatagattcatttactcattttcatttattcattcatgaagaatttattgaatgcctactatgtgccaggaatattgctatatttttgaaatttaaggataaaatatggcccaatctatcaagaaaggaaagtgaaagacaaatgtaagacataattacaacattctgtgggagcacaaagtaggggactcagttcttagagaagtcttttggtcttagagttcatcaagcagagaaggggaaggacatggtccaggaaaataaatcagcacacaaagagatggggtcttgagggtgcatagtacattctggacagccagttacctgggatgagttgggagggaggagaataaggacaaaagaccatctgggcaaaaatcacgaaggggtatgtgtgtcatgtaaaggtgtgccatgatagttattcatattgctattgtaatattaatatatagtaattaactacacatgacacagctttacatgaccttaagtagttatcaacattaccataatagtaatattaataactacaataagagccattattattcacttgaggcacttgttcaaaatagattttacaaaagaaaaaaaaaaaagaagcaacatgagtaaaattagatccattggctactgactccctctccaacagttttaaagctactagataagagaagcatcaagtcttaaaggaagagaatggtatgatcagatgtgtgttttccaaagactattagaaacagcatggttaag

SEQ ID NO: 71181 - DNA, 694 bp, Homo sapiens
atcacttgcttggggggaaccagctgccatgttgtgagatgctcaagcagctgtatggaggagcccatgtggaaaaaaactgagcacccctcacaaccgatattcccttaccaggagtgtggcaagcctccctggaagcagactcttcagcaccagtcaagctttcagatgctgcagccgtgggcaatgactttgctgcaatcttatgagagactaagccagaaccacccagctaagtggctcccacattcatgactcacgaaaactgtgtcttggttttgagctataaattcttgctgctatcttggacttttcctgagaatctgaatccttcagcacatcctatcacattccaccaattcttgaccttctgttatcctcaccagcccccctgggctttgttcaaagtcctgcagggaggctgcagagacaatggaatgcacaggctgtggtagctcagctgcggggactgtccaggcgcctaactggttgtgtgaggctttcagagaacgctgctcctgtgctgggcttcagagagagggcttgctgcagcacagtggggtggcctcctgctggtggcccaggccacagggatatggaaacatgtgtctagtctagagctgcgggcttgggtgaccttgaggcaagggaggcacctgggggctaaaatataaggaggcactcattctcctct

SEQ ID NO: 71182 - DNA, 973 bp, Homo sapiens
atcacttgcttggggggaaccagctgccatgttgtgagatgctcaagcagctgtatggaggagcccatgtggaaaaaaactgagcacccctcacaaccgatattcccttaccaggagtgtggcaagcctccctggaagcagactcttcagcaccagtcaagctttcagatgctgcagccgtgggcaatgactttgctgcaatcttatgagagactaagccagaaccacccagctaagtggctcccacattcatgactcacgaaaactgtgtgaggacacatggtgaatagagggcttgctggcaattggttcacaagctgaggagggcacaaaggccagatatttcatctgaagagttcacaggctattaaaaacattaacaagattttactgcctcacctaggatggaaataattgctttaaagtgaactggcattaaagtgaacacgtcaagactacctacttggaagctacaggagacagaaacagaaaacacgactcctgaatcatgttccattactttaatcgctaaacactgctccgtttaagctaaagagatataatggtacatttgacagatgccttcacatcaagatgagatagggccctgaaagtcgcatgttgaacctttcttaccttctacgaggatgtcactcaaaatcttttctcaattcctcttcattggctgattacacaatacagagtcattcctagtgcagcccaaccctctccccaggtgaaccttgctttacacaaaacacctgtgtataaataacctggtaatcattcaagttgtattctaaatgcaccacagagatctcactttttaaggaacactgaaataaatgctttagtgaagcaaaatagcccttttgtaatgtaaacaatataagcctaaataaagcttccaatttacctaagtttagatttttgcatattgggtttcattaaagcagcatatatctgtaaaaga

SEQ ID NO: 71183 - DNA, 993 bp, Homo sapiens
cgggcggatcacaaggtcaggaattctagaccagcctggccaacaatggtgaaaccctgtctctactacaaatacaaaaaagccaggcgtggtagcaggcgcctgtaatcccagctacttgggaggttgaggcaggagaatcgcttgaacccgggaggtggaggttgcagtgagccgagatcgcaccacttcactccagcctaggtgacagaggggatgacagagggtgctctgcgggcagggaaggcggggtggttgggggggagagaatgttgctctgataaccacagctgtggttattttgtggcaggtacaggtgaggttgcctcttctttccaccagatggcactggagaaaagggattttgattaacttaattttatacacaagattggtctttcagaaatctttatctaaatgaagaaactgttttacatgtagttcgcttttaagtcaccatgttgctaaatgctgtgagtctcaactttaaagagggttaatactaaagttgtcagttaaggctatagtcacatatagtcaaaatttactttgacatcattttaaatcatatgtaaaattcagtattatattgttcttagtgtgtctagcactaccagttttctaccagtattgaaacagggcacgtgtttgagcatcagaggaagtatactgtaaataaaaatttgaaaaataagcaaaaaggacagacaataattatctccattcccaccatactgaagtcatctttccacttttttttttaaagaaacaaaacataaagataaaagtagagttctctttaaccagctctcacagtcctgttccctccagaggcagccactgcagtgagtctgtgtatatgttcacctgttcatctgcttgcaatgttcatctgttccttatattttcacctagtgtctggaaggagatggtactgttttggtgctttaaaaataaatatcaagccatctgtgttctttatttttacttatg

SEQ ID NO: 71184 - DNA, 771 bp, Homo sapiens
aataaatatcaagccatctgtgttctttatttttacttatgtcttggaggcatctctgataaccacagctgtggttattttgtggcaggtacaggtgaggttgcctcttctttccaccagatggcactggagaaaagggattttgattaacttaattttatacacaagattggtctttcagaaatctttatctaaatgaagaaactgttttacatgtagttcgcttttaagtcaccatgttgctaaatgctgtgagtctcaactttaaagagggttaatactaaagttgtcagttaaggctatagtcacatatagtcaaaatttactttgacatcattttaaatcatatgtaaaattcagtattatattgttcttagtgtgtctagcactaccagttttctaccagtattgaaacagggcacgtgtttgagcatcagaggaagtatactgtaaataaaaatttgaaaaataagcaaaaaggacagacaataattatctccattcccaccatactgaagtcatctttccacttttttttttaaagaaacaaaacataaagataaaagtagagttctctttaaccagctctcacagtcctgttccctccagaggcagccactgcagtgagtctgtgtatatgttcacctgttcatctgcttgcaatgttcatctgttccttatattttcacctagtgtctggaaggagatggtactgttttggtgctttaaaaataaatatcaagccatctgtgttctttatttttacttatg

SEQ ID NO: 71185 - DNA, 784 bp, Homo sapiens
aaaatatgttggtgggagtatttacgaaaatatacacaggataggtaaaatgtggagactgataggactaaaagtatcaattgattgaaacaaaaggaaaaggtaggaatcttaagtaggtaaatgaaatagaaggtttaaaggaaaagtaactttaaaatgccgaagtatgttttgaacatatagaaaggtagctgtgaggaattgttaagagtaaggcaaagacttggccaggcgcaatggctcacgcctgtaatcccagcactttgggaggccaaagcaggcaaatcccttgaactcctgacctcaaatgatccacccaccttggcctcccgaagtgctgggattacaggcatgagccaccatgcccagccacattttagtcttttaaataaagataggatcaagtgttctttttctcattttgcctttgagaagattgaagttctctaatgactgactgcctggaatcatatacagactcggatttatgttttggaatagattttagttgtccattgtttcatgctgttatttatctttaatccaaatttaccttgaaattttcaggaccagagttcctgtagttagggaaaaaaaaattgtatgtgcaaaattagcaaaaaattattattttttagtggagaaaaggtttataactcttttttttttgtggagatggagagtctcgctttgtcgccaggctggagtgcagtggtgtgatctcggcttactgcaacctccgcctcccgggttcaagtgattctcctgcctcagcctgcca

SEQ ID NO: 71186 - DNA, 358 bp, Homo sapiens
aaacgtgacatagaggcaaggaatttaacttttttattttttctggctctaacaactcaaacctcgagaaatccaggaattttagttgtccattgtttcatgctgttatttatctttaatccaaatttaccttgaaattttcaggaccagagttcctgtagttagggaaaaaaaaattgtatgtgcaaaattagcaaaaaattattattttttagtggagaaaaggtttataactcttttttttttgtggagatggagagtctcgctttgtcgccaggctggagtgcagtggtgtgatctcggcttactgcaacctccgcctcccgggttcaagtgattctcctgcctcagcctgcca

SEQ ID NO: 71187 - DNA, 578 bp, Homo sapiens
agaaatttcaaggtaaaaatcttcaattaatctgcaaaacattttaagaatactaaccactgtgaatgtatattagcttagcattcagaatcattcaactctttagttgatatgtacagattatatgtggatactcaatgaagacaaattcaggtaatcaatgtttttttggaacctcagaaaaacaaaatactatctccaaaatattacctgttgagtatagagaccacttatttgattatccctagctagaggagaatgaaaacacgtgagcaaagacttctttttgctagctatgaatttctcagtaattatgtgaaattgaacaaatcagaaaaacataaaaatttcaaccttaaaatcataaaagttagattgtatatatctgatattttgtaagaggaaaaactgcaacacacattcagagttttgctagaacttttatatcaatcatttcacctgcctctgactttcattgtttatatgagtggttggggaaagaagaagaagaaaagaattttgagcacttgcaattttgtcactatgccaaggcacccttcctgataatccttcaccaa

SEQ ID NO: 71188 - DNA, 376 bp, Homo sapiens
gtttttgtactttaacacagtctgtccgtatgtactactgggaacagtggtgtcttgcagccagcttgtgttactcacaagagctgactgtggacatcccatctcctttagtgacttcatttcagtagctttaaattggccatggtggggctgtgtgtgccaggaaatcagcaaacactgcaaatcaggtctgtttgggggaagccagttgttaaacatgtcctagcctgccactgtttggggacttttccaagtgatgatgattctgtaaccatttctgtccatgcctctttgtgaaaacatgtgaaaggtttctctaagggagataccaagcagccacatggctgaagtagtcatagggtatgcagatttgaaa

SEQ ID NO: 71189 - DNA, 371 bp, Homo sapiens
  misc_feature (337)..(337): n is a, c, g, or t
acttagaagtgcttctgggatgggaggtcaggctgcagggtgatggacattgggcatgtgcttgggacactccttgaggcacatggagactatttgagatcacctctctgatcagaaagttgtttggtgagtaccaaaataagacaaaaatgagtaagtgtttttaagggagatttccctcaagctgtgtttggtagataactaataactctctgttctgggatattttctctctaggccactgtcattgacctctcaaatgcttgggggtgagaagggtaaagataatataaaaatatcaagaaaaggaaagtaaagggaaaatagtaaacactantgagggaaatctcccttaaaaacactgtcgacgc

SEQ ID NO: 71190 - DNA, 476 bp, Homo sapiens
gagacttgtttttgagcttaaagagttggggtctgatttggatccctttcatctactgtaaattggccttgttgtttatgtagcttcttcctctgtgctccttgttgagacactttgtatgcattaattcttactacatccctggaacctggagtaagagaagcatctttatttgacaggttgagaaatgggttgagtattcatgagataagcatttctacaacatcttcacctgtctggtttctgtttaatacctgatttttggtataattattgatctttcctgagaaaaaataaaataagtactagaagagtgtatatgctctgttgcctcatttcctgcccctggaaaaataacctctaagtatttggcctgagggaatgtaatgctattctaaggcttaggagtagaggctcatatgaaaacatttggcttagattattttctaccaaacttcaaaaagtgttgatacttt

SEQ ID NO: 71191 - DNA, 349 bp, Homo sapiens
atgagaaaatccacacaatgtagccaggcaactagccaatgtgccagcttactggctaagagaaaaaggcatcaatgaaaccaccattgcaaaattataactgagatggtgaaagagacctgaactaaccacttccttcttgattctaacctccaagctgtccttgttcattcctgggcataggccatactacctttaggaggaacttgctttacagtttgaaacaaagatagcagcgctttcccaacacaaacccccttcttgcctggtgaactagactgcctttgtaagactatcaaattagccaaaatcttcgaaatgatggcttaggagtcatgcagctggaggc

SEQ ID NO: 71192 - DNA, 347 bp, Homo sapiens
tcgtgatcctactggatacattctcctgggtcccaattttggccaccgctcattttcattgatctcattttaaggggtttgaggtatggagtccttaggatttggtgttaagtttggtgatttttcagagaggccgcaccagagctgcatcggtgatcatttgactttatgtctgaccctgtgcacaggggtctacttgtctcctaacctcagttttcctctttttccttattagaaaaacaacaataacatcaacacagtccctcttggaactaggaatggccagtagaagtggtgtgtgacttctgggaaatgtccttaaatagaggcggaatactcttctttgt

SEQ ID NO: 71193 - DNA, 239 bp, Homo sapiens
ccctcaccccaaagatttgaagcaaagtggtgcaacctgactgcaaaaggtgttctggtggcctgggcataggcatcaagccagccctgggcagggaagctgctggtaaccccaatagaaggtgtcttgcccttcctaggtgtctttctaaagacagggacttggtgcaggggctcaaacaaccctacacacagagctggagcgagaagccacagtggcccggggcctcgctcacccca

SEQ ID NO: 71194 - DNA, 316 bp, Homo sapiens
acttataaaagaaaaaaagcttaaaactcgggcttaatcattttttaaaattcaccttatcaaaagacattgtaaaaaataagcagccacaggttaggagaaaattatacatatatatgtgtataatgtatatattacacacacagacacacacgacaaaggacttgtttccagaatatataaagaactcttataactaatcaaaagacaatccaatttttaaatgggtgaaatatctgaaaagacattttaaaatgaaaccatccaaatagccaataaactcatagaaaagtgttcaacagcattagttatcagg

SEQ ID NO: 71195 - DNA, 276 bp, Homo sapiens
tctgccccacgtgttccacatcacgtatattaaagataacatggaaatacatgcccaaacagctactgggcatgtaattgatctgaattttctggaatgtcattcacaaaattcacccaaaatcttttaaaatgctcctacatttccacctaaccattctacttctaggaatttatctcacattaaatgagcagaggtacaccaaactatatacaagcatattcactgcagcacactgctattgcctttaggtttcctactattttcaataaataa

SEQ ID NO: 71196 - DNA, 493 bp, Homo sapiens
ggtacataagagatagcagtgggagatgggaagggagagccagaggccgaccaggacatcagcatggaaacattttcatgatacagcagctgctaaatgacttattggtactaaatgcttactgtacatcagggacgtgagaaaatcgaggcaaccctgtcggatgctctgtgcttcagccctgctctggtcttcttttggtctcattccttaccactagaacagatgttcctgaggccaagaatctagatccaattcagtatcccattacctcttctacaccatctgcatgtaccaggaaccctgaaaatccctaatccaatgctctgagcctatttctaaggactgaatgggcctcctcctttgtctgcaaacctcatctctgacatatgtatccttaggaccatagagccaaaaggagactgcttgtagttgagaagctggtacatgtggctcagggcatacacatgtacaagagggaactcattgtgtg

SEQ ID NO: 71197 - DNA, 262 bp, Homo sapiens
catgatcccttccgccaaggaactcatactaggtgagggcacccagaaacaaacacagccttaaatccataaaacagtcacatggccaatttgcaatcagggaccatttgtatgcatcaggattgacattttccttagcctcacagaacctgctgtggtgggtggtccaaattaataggctaagtacacttgtgaggaaaatgtttacaaagagcttgagaacaactcttttcaagccattagaagtacctattacaggctc

SEQ ID NO: 71198 - DNA, 530 bp, Homo sapiens
acatcacaggtctctgaggctctgttgtttcttctctgtacttttttctttctgttcctcagtgtggattatttcaattgccctgtcttcaagtttgctcctttatcttctgttggctcacattctgctggtaaacccctctagtgactgtttcataatttctgtcttttttaaaaaaattctttattgggtaatgcattgtttttatactttaattctttttttttttttttttaattatatatatagggtcaggcatggtggctcacacctgtaatcccagcactttgggaggccaaggcgggcagatcacaaggtcaagagatcgagaccatcctggccaacatggtgaaaccccgtctctactaaaaatacaaaaattagctgggtgtggtggtgggcacctgtaattgcagctacccgggaggctgaggcagaagaaccacttgaacccaggaggtggaggttgcagtgagctgatactgcgccactgtgctccagcctggtgacagagcgagactcctgtctca

SEQ ID NO: 71199 - DNA, 514 bp, Homo sapiens
cccacaccaaaactttgagttaatggttcttttctatcaaaatattttgattttattttaaagtggctgattaaaaatttgtttatttctgttggacagcaagatttatataagtgacttgatctggtagtaatagtctaaatcttggggaatgtgccttccatgtagcataccatgtagaaacaaatgagaatagtgtgtgtgtgttttttatttgcaacttactggtaccatttgtttgctaataatgatgcatgtttatccatagggtcatctttccagtaactttaaccatttctaatctagctcagaaactagttgtgagctagtatgttcttagtggttgtggaaccatttttggggcatctgcaacaagatctcaggctcctccccagtctcttcatcagcttggcagcattagaagctattagatttacaactacagaaaagagataatagccactgcttattgaatttctaccacattccttatgcttttcttccatcatctgta

SEQ ID NO: 71200 - DNA, 1130 bp, Homo sapiens
ggagaagccgtctgtgggcccctctcccgcagtgtcgtcatcgccctttgacgtttctgcaaacggggtcgcgagcgaaccgaccccggtcttgatttttctgctctcccttagccgcatacgtttccagacctgcctttccttctcccaccctcatcactgagcggtgattaaagagtatttgaagcctagtcatagtggataaataggtgattgggatctagtagagattatatacaccccactctttcagcttgatggaatgctttgaaggctttggaaaagagctgtccgggacgttaggtggatttttcaattctggatagttgctctgtttgacatggagtggggtgagaagtgaagggaatttgtggaaattgcactgtgtcactaggagactgattagctgagtgaccttggataagacgagacactcaccaagtcttaatttcgtcatcaataaaaactaactggattttctcaaaaggcccttccgacttcgaaatgatttggtcaatgtaattgaagaattaactacagtttagcttgacactcctccatccctcccctccctttcctgcagtgccccctgtacacagtaagatactttcattatagagagtggctgttccatggcctgggaccaaagaaagcatttattgtacgggccagtgctaggcggattggaggcggtcaataaatacttgttgaattgaattgtggagaattcattgtaaccacatcagcaaagcactgttagtatatatgctgaacaaatgtggagaaatcgctgttttacataggaaaccatggtgatttgccccagaatgtgtatccaggtttgtatcttctctgaattaacatataagattcttgtttattatttcaggcagttttcaccactcttaaaatacaaacgaggaagctagctacttagtcttttgctcattctcgatttaaaagcatttaaaatacagatgaatagcatattaaatctaacattttcattctgtgggagtatcaatattctttgaatagctagctgtcttttaaggtagctttttcatattaaaacatttgattgctctttaaaaaaatgagtgtaaagggcaaagggcaatttatttaaa

SEQ ID NO: 71201 - DNA, 1096 bp, Homo sapiens
ggagaagccgtctgtgggcccctctcccgcagtgtcgtcatcgccctttgacgtttctgcaaacggggtcgcgagcgaaccgaccccggtcttgatttttctgctctcccttagtcgccatttgctttgattccggtgaggtgtctttttccccccccggttccttcgggacctcgaggtgaaatgagcggaaggatgagagatggacacattttgaggtgccgcatacgtttccagacctgcctttccttctcccaccctcatcactgagcggtgattaaagagtatttgaagcctagtcatagtggataaataggtgagaagtgaagggaatttgtggaaattgcactgtgtcactaggagactgattagctgagtgaccttggataagacgagacactcaccaagtcttaatttcgtcatcaataaaaactaactggattttctcaaaaggcccttccgacttcgaaatgatttggtcaatgtaattgaagaattaactacagtttagcttgacactcctccatccctcccctccctttcctgcagtgccccctgtacacagtaagatactttcattatagagagtggctgttccatggcctgggaccaaagaaagcatttattgtacgggccagtgctaggcggattggaggcggtcaataaatacttgttgaattgaattgtggagaattcattgtaaccacatcagcaaagcactgttagtatatatgctgaacaaatgtggagaaatcgctgttttacataggaaaccatggtgatttgccccagaatgtgtatccaggtttgtatcttctctgaattaacatataagattcttgtttattatttcaggcagttttcaccactcttaaaatacaaacgaggaagctagctacttagtcttttgctcattctcgatttaaaagcatttaaaatacagatgaatagcatattaaatctaacattttcattctgtgggagtatcaatattctttgaatagctagctgtcttttaaggtagctttttcatattaaaacatttgattgctctttaaaaaaatgagtgtaaagggcaaagggcaatttatttaaa

SEQ ID NO: 71202 - DNA, 3504 bp, Homo sapiens
  misc_feature (2)..(2): n is a, c, g, or t
  misc_feature (4)..(7): n is a, c, g, or t
  misc_feature (11)..(11): n is a, c, g, or t
  misc_feature (18)..(18): n is a, c, g, or t
  misc_feature (22)..(22): n is a, c, g, or t
gnannnngggngagaganaganagagaggagagagaagaaacgggaggaggggataaggaaattaaaccctttaagtcaatgcatattgtggtgacaccggcacaggcgccctcacggtggagtcggccagggctgtgcgttcccaaaatatgaccaggggtgcttggatgtgtcggcagtatgacgacggcttaaaaatctggttggcagcaccccgagagaacgagaaaccgttcatcgattccgagagggctcagaaatggcgactgtctctggcatctctcttgtttttcacagtcctgctctctgatcacttgtggttctgcgccgaggccaagctgacccgggcccgggacaaggagcaccagcagcagcagcggcagcagcagcagcagcagcagcagcagaggcagcggcagcagcagcagcagcagcggcggcagcaggagccctcctggcccgcgctcctggcgagcatgggggagtcctcgcccgccgcccaggcacacagactcctctccgcctcctcgtcccccaccctgcccccctccccgggagacggcggcggcggcggcggcaagggcaaccgaggcaaagacgaccggggcaaggctctttttctaggaaactctgccaagcccgtgtggcgcctggagacttgttacccccagggcgcgtcctcgggccagtgcttcacggtggagaatgcggacgcggtgtgcgccaggaactggagtcggggggcggccgggggggacgggcaggaggtgaggagcaagcatcccactccgctctggaacttgtcggatttttacctttcgttttgtaattcctacacactttgggagttgttctcggggttgtccagtcccaacactttgaactgcagtctggatgtggtgctcaaggaaggcggcgagatgaccacttgcaggcagtgcgtcgaggcttaccaggactatgaccaccatgctcaggagaaatacgaagagtttgaaagcgtgctccacaaatatttacagtcggaggagtactcggtgaaatcctgtcctgaagactgtaagattgtctacaaagcctggctctgttcccagtattttgaagtcacacagtttaactgcagaaagacaattccttgcaagcaatactgtttggaggttcagacgaggtgtccatttatattgcccgacaatgatgaagtcatctacggaggcctctccagtttcatctgtacagggctttatgaaacctttctaaccaatgatgaaccagaatgctgtgacgtcaggagagaagaaaaatcaaataacccatccaaagggaccgtagagaaaagtggctcctgtcacaggacatcgctcacagtgtcatcagcaacaagactgtgcaacagcagactcaagctgtgtgttcttgtactgattctcttacacacagtgctcacagcctcggcagcacagaacacagccggactgagctttggaggcatcaacacgctggaagaaaactcaaccaatgaggagtaacggaaggacgagtgtcaccacagcagcagctggcccgccgtgaaaaatggcaactgctgtctcatgtaacagaaactgggtgcttttaccctcgaattacttattgcaaggcctttagggtaaaatttaaacagatgggcctgaatccaaacaaggacacaaccacagctttttattgactaaaaggctggaaagtgactttaaatttctcacaccattttatacactgtgttttaatgtttggaggttttatttgctttcgttttggtttgggtttatttgtttgtttattttttgcacttgttaatacaggatttattttgggggatggtttctcagaggtaaactaagtcttttcactgtctctatctctctatatatttctagtcattgtgtgtgttcatcagatagttctgtctttatgtcctgtcagcttctattagaggaatgattgctatgacctcatggtatagcaaaaaacaacaacaaaaaaagaataaaaaataaaaaagacaaaaaaaagaaaacaacaaaaaaataaaaataaaaaaaatccctaagtctcccttctacccacagaaccaacaacacccttcccggcctttcctttccctcgccctcttctcgtcccctaagcaaacaacatccgcttgcttctgtctgtgtaaccacagtgaatgggtgtgcacgcttgatgggcctctgagcccctgttgcacaaaccagaaacagagcggagccaagggggcctgacaagagttcctttttagctgaacaaacaagtgctctccataataggtggaatcagacagttaacacatttttatgttgaaaacaaaataaaaggaaaaaattaaaaaaaactattcatgaactgtattgctccagttcccatccccaagtgggcccagccctttcttgctgggtccagttgggacagggaggcagctattctaggaattcagggtgcgggggagttgagggaagttttttctttttggacaatgaaggtgggctttcattgtgatttttgttctgttgcagtaatataggagcacattttggccattgtaattacagggaacaaagggattgcggacacatatctggacttcttttcctcccttattgttgtggaagagacactagaaatgctcaaacacctgcaatatacagaatatacacaattttattccagtatttccctaacatatggtttaaaattattccaggtatacagtgtatgcaattctgcattatcacagaggaacaacttcttttttaaaaaataaataggtcagccatttttattaacgtgcaaaaactttatcactctaacatgctctaggtagttgaggaaaagaggtctgatcactgtttgtattttattttctttgtgggaacatttcacctgctgagtgtacatgaatttgctttctataaaaggcttttatgagtttacagtagaatcagtggaaggaagagttaataagggctgtttttaaaaaaacaaacaaacaaacaaaacaaataattaaaaaaaaattttacattccttcctattctctaactacacttgggaagtgcacttcagataagtttgcagtgtgactgagagatgaaggaaatccatagaaaaggtcctcttagtgaacaaaatttagttattaactttatagctatgaaatttccccgggcatttgtttttgttcaaacagactttaacctctgcatcatacttaaccctgcgacatgcgtacagtatgcatattttgttttgaaaaaaaatgtttcgttccagtctgttaagaatattcaaaaataataaaggtattgcttaataaaattgctagaattgtttagcagtacatgcacaatattttactagattctttgttttaatagtgttttgttgagactgaaaatcttaaaatggtctgcgcaaatacaaaaaaaaagaaaacaccaaaaaatgca

SEQ ID NO: 71203 - DNA, 3446 bp, Homo sapiens
  misc_feature (2)..(2): n is a, c, g, or t
  misc_feature (4)..(7): n is a, c, g, or t
  misc_feature (11)..(11): n is a, c, g, or t
  misc_feature (18)..(18): n is a, c, g, or t
  misc_feature (22)..(22): n is a, c, g, or t
gnannnngggngagaganaganagagaggagagagaagaaacgggaggaggggataaggaaattaaaccctttaagtcaatgcatattgtggtgacaccggcacaggcgccctcacggtggagtcggccagggctgtgcgttcccaaaatatgaccaggggtgcttggatgtgtcggcagtatgacgacggcttaaaaatctggttggcagcaccccgagagaacgagaaaccgttcatcgattccgagagggctcagaaatggcgactgtctctggcatctctcttgtttttcacagtcctgctctctgatcacttgtggttctgcgccgaggccaagctgacccgggcccgggacaaggagcaccagcagcagcagcggcagcagcagcagcagcagcagcagcagaggcagcggcagcagcagcagcagcagcggcggcagcaggagccctcctggcccgcgctcctggcgagcatgggggagtcctcgcccgccgcccaggcacacagactcctctccgcctcctcgtcccccaccctgcccccctccccgggagacggcggcggcggcggcggcaagggcaaccgaggcaaagacgaccggggcaaggctctttttctaggaaactctgccaagcccgtgtggcgcctggagacttgttacccccagggcgcgtcctcgggccagtgcttcacggtggagaatgcggacgcggtgtgcgccaggaactggagtcggggggcggccgggggggacgggcaggaggtgaggagcaagcatcccactccgctctggaacttgtcggatttttacctttcgttttgtaattcctacacactttgggagttgttctcggggttgtccagtcccaacactttgaactgcagtctggatgtggtgctcaaggaaggcggcgagatgaccacttgcaggcagtgcgtcgaggcttaccaggactatgaccaccatgctcaggagaaatacgaagagtttgaaagcgtgctccacaaatatttacagtcggaggagtactcggtgaaatcctgtcctgaagactgtaagattgtctacaaagcctggctctgttcccagtattttgaagtcacacagtttaactgcagaaagacaattccttgcaagcaatactgtttggaggttcagacgaggtgtccatttatattgcccgacaatgatgaagtcatctacggaggcctctccagtttcatctgtacagggctttatgaaacctttctaaccaatgatgaaccagaatgctgtgacgtcaggagagaagaaaaatcaaataacccatccaaagggaccgtagagaaaagtggctcctgtcacaggacatcgctcacagtgtcatcagcaacaagactgtgcaacagcagactcaagctgtgtgttcttgtactgattctcttacacacagtgctcacagcctcggcagcacagaacacagccggactgagctttggaggcatcaacacgctggaagaaaactcaaccaatgaggagtaacggaaggacgagtgtcaccacagcagcagctggcccgccgtgaaaaatggcaactgctgtctcatgtaacagaaactgggtgcttttaccctcgaattacttattgcaaggcctttagggtaaaatttaaacagatgggcctgaatccaaacaaggacacaaccacagctttttattgactaaaaggctggaaagtgactttaaatttctcacaccattttatacactgtgttttaatgtttggaggttttatttgctttcgttttggtttgggtttatttgtttgtttattttttgcacttgttaatacaggatttattttgggggatggtttctcagaggtaaactaagtcttttcactgtctctatctctctatatatttctagtcattgtgtgtgttcatcagatagttctgtctttatgtcctgtcagcttctattagaggaatgattgctatgacctcatggtatagcaaaaaacaacaacaaaaaaagaataaaaaataaaaaagacaaaaaaaagaaaacaacaaaaaaataaaaatttcctttccctcgccctcttctcgtcccctaagcaaacaacatccgcttgcttctgtctgtgtaaccacagtgaatgggtgtgcacgcttgatgggcctctgagcccctgttgcacaaaccagaaacagagcggagccaagggggcctgacaagagttcctttttagctgaacaaacaagtgctctccataataggtggaatcagacagttaacacatttttatgttgaaaacaaaataaaaggaaaaaattaaaaaaaactattcatgaactgtattgctccagttcccatccccaagtgggcccagccctttcttgctgggtccagttgggacagggaggcagctattctaggaattcagggtgcgggggagttgagggaagttttttctttttggacaatgaaggtgggctttcattgtgatttttgttctgttgcagtaatataggagcacattttggccattgtaattacagggaacaaagggattgcggacacatatctggacttcttttcctcccttattgttgtggaagagacactagaaatgctcaaacacctgcaatatacagaatatacacaattttattccagtatttccctaacatatggtttaaaattattccaggtatacagtgtatgcaattctgcattatcacagaggaacaacttcttttttaaaaaataaataggtcagccatttttattaacgtgcaaaaactttatcactctaacatgctctaggtagttgaggaaaagaggtctgatcactgtttgtattttattttctttgtgggaacatttcacctgctgagtgtacatgaatttgctttctataaaaggcttttatgagtttacagtagaatcagtggaaggaagagttaataagggctgtttttaaaaaaacaaacaaacaaacaaaacaaataattaaaaaaaaattttacattccttcctattctctaactacacttgggaagtgcacttcagataagtttgcagtgtgactgagagatgaaggaaatccatagaaaaggtcctcttagtgaacaaaatttagttattaactttatagctatgaaatttccccgggcatttgtttttgttcaaacagactttaacctctgcatcatacttaaccctgcgacatgcgtacagtatgcatattttgttttgaaaaaaaatgtttcgttccagtctgttaagaatattcaaaaataataaaggtattgcttaataaaattgctagaattgtttagcagtacatgcacaatattttactagattctttgttttaatagtgttttgttgagactgaaaatcttaaaatggtctgcgcaaatacaaaaaaaaagaaaacaccaaaaaatgca

SEQ ID NO: 71204 - DNA, 2334 bp, Homo sapiens
actataatcctcacaatgagtaaacacaaaaaagaaaaaaaccggccccctccgcttttctagaatcggctttatgaaacctttctaaccaatgatgaaccagaatgctgtgacgtcaggagagaagaaaaatcaaataacccatccaaagggaccgtagagaaaagtggctcctgtcacaggacatcgctcacagtgtcatcagcaacaagactgtgcaacagcagactcaagctgtgtgttcttgtactgattctcttacacacagtgctcacagcctcggcagcacagaacacagccggactgagctttggaggcatcaacacgctggaagaaaactcaaccaatgaggagtaacggaaggacgagtgtcaccacagcagcagctggcccgccgtgaaaaatggcaactgctgtctcatgtaacagaaactgggtgcttttaccctcgaattacttattgcaaggcctttagggtaaaatttaaacagatgggcctgaatccaaacaaggacacaaccacagctttttattgactaaaaggctggaaagtgactttaaatttctcacaccattttatacactgtgttttaatgtttggaggttttatttgctttcgttttggtttgggtttatttgtttgtttattttttgcacttgttaatacaggatttattttgggggatggtttctcagaggtaaactaagtcttttcactgtctctatctctctatatatttctagtcattgtgtgtgttcatcagatagttctgtctttatgtcctgtcagcttctattagaggaatgattgctatgacctcatggtatagcaaaaaacaacaacaaaaaaagaataaaaaataaaaaagacaaaaaaaagaaaacaacaaaaaaataaaaataaaaaaaatccctaagtctcccttctacccacagaaccaacaacacccttcccggcctttcctttccctcgccctcttctcgtcccctaagcaaacaacatccgcttgcttctgtctgtgtaaccacagtgaatgggtgtgcacgcttgatgggcctctgagcccctgttgcacaaaccagaaacagagcggagccaagggggcctgacaagagttcctttttagctgaacaaacaagtgctctccataataggtggaatcagacagttaacacatttttatgttgaaaacaaaataaaaggaaaaaattaaaaaaaactattcatgaactgtattgctccagttcccatccccaagtgggcccagccctttcttgctgggtccagttgggacagggaggcagctattctaggaattcagggtgcgggggagttgagggaagttttttctttttggacaatgaaggtgggctttcattgtgatttttgttctgttgcagtaatataggagcacattttggccattgtaattacagggaacaaagggattgcggacacatatctggacttcttttcctcccttattgttgtggaagagacactagaaatgctcaaacacctgcaatatacagaatatacacaattttattccagtatttccctaacatatggtttaaaattattccaggtatacagtgtatgcaattctgcattatcacagaggaacaacttcttttttaaaaaataaataggtcagccatttttattaacgtgcaaaaactttatcactctaacatgctctaggtagttgaggaaaagaggtctgatcactgtttgtattttattttctttgtgggaacatttcacctgctgagtgtacatgaatttgctttctataaaaggcttttatgagtttacagtagaatcagtggaaggaagagttaataagggctgtttttaaaaaaacaaacaaacaaacaaaacaaataattaaaaaaaaattttacattccttcctattctctaactacacttgggaagtgcacttcagataagtttgcagtgtgactgagagatgaaggaaatccatagaaaaggtcctcttagtgaacaaaatttagttattaactttatagctatgaaatttccccgggcatttgtttttgttcaaacagactttaacctctgcatcatacttaaccctgcgacatgcgtacagtatgcatattttgttttgaaaaaaaatgtttcgttccagtctgttaagaatattcaaaaataataaaggtattgcttaataaaattgctagaattgtttagcagtacatgcacaatattttactagattctttgttttaatagtgttttgttgagactgaaaatcttaaaatggtctgcgcaaatacaaaaaaaaagaaaacaccaaaaaatgca

SEQ ID NO: 71205 - DNA, 1689 bp, Homo sapiens
atttttttagcgtgtgtgttttgcttaaactataataggatggtttctcagaggtaaactaagtcttttcactgtctctatctctctatatatttctagtcattgtgtgtgttcatcagatagttctgtctttatgtcctgtcagcttctattagaggaatgattgctatgacctcatggtatagcaaaaaacaacaacaaaaaaagaataaaaaataaaaaagacaaaaaaaagaaaacaacaaaaaaataaaaataaaaaaaatccctaagtctcccttctacccacagaaccaacaacacccttcccggcctttcctttccctcgccctcttctcgtcccctaagcaaacaacatccgcttgcttctgtctgtgtaaccacagtgaatgggtgtgcacgcttgatgggcctctgagcccctgttgcacaaaccagaaacagagcggagccaagggggcctgacaagagttcctttttagctgaacaaacaagtgctctccataataggtggaatcagacagttaacacatttttatgttgaaaacaaaataaaaggaaaaaattaaaaaaaactattcatgaactgtattgctccagttcccatccccaagtgggcccagccctttcttgctgggtccagttgggacagggaggcagctattctaggaattcagggtgcgggggagttgagggaagttttttctttttggacaatgaaggtgggctttcattgtgatttttgttctgttgcagtaatataggagcacattttggccattgtaattacagggaacaaagggattgcggacacatatctggacttcttttcctcccttattgttgtggaagagacactagaaatgctcaaacacctgcaatatacagaatatacacaattttattccagtatttccctaacatatggtttaaaattattccaggtatacagtgtatgcaattctgcattatcacagaggaacaacttcttttttaaaaaataaataggtcagccatttttattaacgtgcaaaaactttatcactctaacatgctctaggtagttgaggaaaagaggtctgatcactgtttgtattttattttctttgtgggaacatttcacctgctgagtgtacatgaatttgctttctataaaaggcttttatgagtttacagtagaatcagtggaaggaagagttaataagggctgtttttaaaaaaacaaacaaacaaacaaaacaaataattaaaaaaaaattttacattccttcctattctctaactacacttgggaagtgcacttcagataagtttgcagtgtgactgagagatgaaggaaatccatagaaaaggtcctcttagtgaacaaaatttagttattaactttatagctatgaaatttccccgggcatttgtttttgttcaaacagactttaacctctgcatcatacttaaccctgcgacatgcgtacagtatgcatattttgttttgaaaaaaaatgtttcgttccagtctgttaagaatattcaaaaataataaaggtattgcttaataaaattgctagaattgtttagcagtacatgcacaatattttactagattctttgttttaatagtgttttgttgagactgaaaatcttaaaatggtctgcgcaaatacaaaaaaaaagaaaacaccaaaaaatgca

SEQ ID NO: 71206 - DNA, 3370 bp, Homo sapiens
  misc_feature (2)..(2): n is a, c, g, or t
  misc_feature (4)..(7): n is a, c, g, or t
  misc_feature (11)..(11): n is a, c, g, or t
  misc_feature (18)..(18): n is a, c, g, or t
  misc_feature (22)..(22): n is a, c, g, or t
gnannnngggngagaganaganagagaggagagagaagaaacgggaggaggggataaggaaattaaaccctttaagtcaatgcatattgtggtgacaccggcacaggcgccctcacggtggagtcggccagggctgtgcgttcccaaaatatgaccaggggtgcttggatgtgtcggcagtatgacgacggcttaaaaatctggttggcagcaccccgagagaacgagaaaccgttcatcgattccgagagggctcagaaatggcgactgtctctggcatctctcttgtttttcacagtcctgctctctgatcacttgtggttctgcgccgaggccaagctgacccgggcccgggacaaggagcaccagcagcagcagcggcagcagcagcagcagcagcagcagcagaggcagcggcagcagcagcagcagcagcggcggcagcaggagccctcctggcccgcgctcctggcgagcatgggggagtcctcgcccgccgcccaggcacacagactcctctccgcctcctcgtcccccaccctgcccccctccccgggagacggcggcggcggcggcggcaagggcaaccgaggcaaagacgaccggggcaaggctctttttctaggaaactctgccaagcccgtgtggcgcctggagacttgttacccccagggcgcgtcctcgggccagtgcttcacggtggagaatgcggacgcggtgtgcgccaggaactggagtcggggggcggccgggggggacgggcaggaggtgaggagcaagcatcccactccgctctggaacttgtcggatttttacctttcgttttgtaattcctacacactttgggagttgttctcggggttgtccagtcccaacactttgaactgcagtctggatgtggtgctcaaggaaggcggcgagatgaccacttgcaggcagtgcgtcgaggcttaccaggactatgaccaccatgctcaggagaaatacgaagagtttgaaagcgtgctccacaaatatttacagtcggaggagtactcggtgaaatcctgtcctgaagactgtaagattgtctacaaagcctggctctgttcccagtattttgaagtcacacagtttaactgcagaaagacaattccttgcaagcaatactgtttggaggttcagacgaggtgtccatttatattgcccgacaatgatgaagtcatctacggaggcctctccagtttcatctgtacagggctttatgaaacctttctaaccaatgatgaaccagaatgctgtgacgtcaggagagaagaaaaatcaaataacccatccaaagggaccgtagagaaaagtggctcctgtcacaggacatcgctcacagtgtcatcagcaacaagactgtgcaacagcagactcaagctgtgtgttcttgtactgattctcttacacacagtgctcacagcctcggcagcacagaacacagccggactgagctttggaggcatcaacacgctggaagaaaactcaaccaatgaggagtaacggaaggacgagtgtcaccacagcagcagctggcccgccgtgaaaaatggcaactgctgtctcatgtaacagaaactgggtgcttttaccctcgaattacttattgcaaggcctttagggtaaaatttaaacagatgggcctgaatccaaacaaggacacaaccacagctttttattgactaaaaggctggaaagtgactttaaatttctcacaccattttatacactgtgttttaatgtttggaggttttatttgctttcgttttggtttgggtttatttgtttgtttattttttgcacttgttaatacaggatttattttgggggatggtttctcagaggtaaactaagtcttttcactgtctctatctctctatatatttctagtcattgtgtgtgttcatcagatagttctgtctttatgtcctgtcagcttctattagaggaatgattgctatgacctcatggtatagcaaaaaacaacaacaaaaaaagaataaaaaataaaaaagacaaaaaaaagaaaacaacaaaaaaataaaaataaaaaaaatccctaagtctcccttctacccacagaaccaacaacacccttcccggcctttcctttccctcgccctcttctcgtcccctaagcaaacaacatccgcttgcttctgtctgtgtaaccacagtgaatgggtgtgcacgcttgatgggcctctgagcccctgttgcacaaaccagaaacagagcggagccaagggggcctgacaagagttcctttttagctgaacaaacaagtgctctccataataggtggaatcagacagttaacacatttttatgttgaaaacaaaataaaaggaaaaaattaaaaaaaactattcatgaactgtattgctccagttcccatccccaagtgggcccagccctttcttgctgggtccagttgggacagggaggcagctattctaggaattcagggtgcgggggagttgagggaagttttttctttttggacaatgaaggtgggctttcattgtgatttttgttctgttgcagtaatataggagcacattttggccattgtaattacagggaacaaagggattgcggacacatatctggacttcttttcctcccttattgttgtggaagagacactagaaatgctcaaacacctgcaatatacagaatatacacaattttattccagtatttccctaacatatggtttaaaattattccaggtatacagtgtatgcaattctgcattatcacagaggaacaacttcttttttaaaaaataaataggtcagccatttttattaacgtgcaaaaactttatcactctaacatgctctaggtagttgaggaaaagaggtctgatcactgtttgtattttattttctttgtgggaacatttcacctgctgagtgtacatgaatttgctttctataaaaggcttttatgagtttacagtagaatcagtggaaggaagagttaataagggctgtttttaaaaaaacaaacaaacaaacaaaacaaataattaaaaaaaaattttacattccttcctattctctaactacacttgggaagtgcacttcagataagtttgcagtgtgactgagagatgaaggaaatccatagaaaaggtcctcttagtgaacaaaatttagttattaactttatagctatgaaatttccccgggcatttgtttttgttcaaacagactttaacctctgcatcatacttaaccctgcgacatgcgtacagtatgcatattttgttttgaaaaaaaatgtttcgttccagtctgttaagaatattcaaaaataataaaggtattgcttaata

SEQ ID NO: 71207 - DNA, 376 bp, Homo sapiens
taaaaaagaaagaaaaaaagaatgtatgtgagcgatttgccacagagaaagaacagtgtcaccctgtattgagataaaagtgccacatctctacttaatttaaccttcttgttgacacaataccatgattgggatctcggttacctctcacattgatccaaaactgcacactatcatcctctactttacaggtgaggaaactgaggcacagagatacttaataattcacctagggtcacaaagagcagggcagaactgggattcaagcaagggagtgtgatcccagagcccacatgcttcacctctacaccacactgtctccagacaatcagtacactgacgggagaggggcaagaaacaaaaaggctttgtgtct

SEQ ID NO: 71208 - DNA, 443 bp, Homo sapiens
gtgccctggagggaaaaaaaaatcaccctagttgagaaccactgatttagttttaatttagggtatgtatttaaaaggcagaaaaataagtatagaatcaaacttaattaagcaaatgccctctaaaaaacactgaattttaaaagaggtaatagtaaaatttgaatttgcagaaatgtaggacttgcttttaaagctcatatcttaagtacatactaaccacatatggcttctcaactgtacttgagatttcttcaatcaggaaataagatcatccaccttttttttcctgaaggtatcacctatgattctaagtaatattggatgactggatgttaatgtactatgccttcataatttctaaagaaatgtatgaataagatattaacctgacataaatagtactttcttgctgtggctctagtaaagtcttaacatctgca

SEQ ID NO: 71209 - DNA, 356 bp, Homo sapiens
taagaagttccaaaatctttaagtagcttccattgaaaataggatgagttttgaggaatgaggtgaaagtaaattttctttttatacatatctgtattgcttaaacattttacaaaattatgtacatttatttcttgaatgattaaaaaaaatatatgaggcctgatgtggtggctcatgcctataattccagcactttgggaggctgaggtgggtggctcacttgaggtcaagggttcaagaccagcctggccaacatggtgaaaccccatctctactaaaaatacaaaaattagtcgggcgtggtagtgcatgcctgtagtcccagctacttgggaggctgaatcaggagaatt

SEQ ID NO: 71210 - DNA, 531 bp, Homo sapiens
acacattgtgacctcagggtcacattgtgacacattgtgacctcagggtcacattgtgaattagctgcagactcaaggctagaacttaggttttctggatcccagttcagtgtcctttctagtacataaagagatcctcattgtctccttcttattccatttactgaggacttatatagcagaaagccaagcaaagagaaatagatattgttcctatcctcaaggaatcagagtctagtgagtggaaagtgaaccattaatccagcagtgccctgcaaagacggctaaagcagagcttctcttcgcctcagataaagaagccaggagctacaattccttcccacctgctccctagataccccgttccaagacaggagcacccaagtctctgacaccctcctgcttcacccatccgcctgacttggctgaacgctggtgtcctggaactcattctctttctctgatcttcctgtccactgccagagagtggtgccacaattccaaaaatgaaaggaaagtaaaagatataga

SEQ ID NO: 71211 - DNA, 405 bp, Homo sapiens
atgaccttgacatatccatcagtttgaggagaacactttttacaccttgtcctcagttttttaactgagtcagaactttcactgggcatgttcatgactttactgcttggctgagttttccagatatcaaagcccagctgcagcctgtgactttcacactcctggaaaagtagacgtatctgcctgctcttacagcaggctttagcttgcctttgctgggactttgttctgccctcagttaccacagtaattaggttgcctcttctactttcctcttttctcacaggcaccaggagccagaggaaataacataatagttgttgaccagagcagcagcataattctttcatgactgccttttctaatttgacgattccctctcctgagagggctctttgtgtcctc

SEQ ID NO: 71212 - DNA, 609 bp, Homo sapiens
aacctagatcccctgcatgcacagttcacaatagggtttgtgctcctatgagaatctaatgctgtgctgatccgacaggaggtggagctcaggtggtaatgctcgctcacctaccactcacctcctgctgtgtggcctggttcctaacaggctcgggggctggggacccctgctgtaaataacctttcgaagatctgaaaattaactttagtatttttttgtatttactcgatattttaaacaaacaaaaatctagagaatgacataacaaatgtattttctgcgtatccactactctttactcagatcctaacattctcagttttgaaaagatgtaggctggtcacagtggctcatgcctgtaatgtcaacactttaggaggccaaggaggacagatcacgtgaatccaggagttagagaccagcctgagctataaggcaaaaccctgtctctacaaaaattagccaggtgtggtggcctgcacctgtagttctagctactcgggagcctgaggtgggagggtcaattgaccagaggctatagtgagctgtgatcctgccactacactccagtctaggtggcaaagcaagaccctgactcaaaaaaaa

SEQ ID NO: 71213 - DNA, 489 bp, Homo sapiens
tactatattgtgtacttaaaaaattgctgagggggtagatcttttgttaagtgttcttatacacatacacgttaataataatagtaatattaaagagagtaagacgaaacttttggagatgatggataggcttatggcataagtcgtggtaatggtttaaagagtatatatttatgtccaacgtcatcaagttgtatacatatatatagctttttatatgtcaatcatacctcaataatgtggttaaaatgtgaaagtgagatctcagttctgctttagaattgtctgaaacttcataatctgaaaaattaaactttattgttttctagtgtttgcataccaatcatatatatataccaccagctgatttgcaagtttaaatgtgattatacttattctgatgtattatgttattatatttggtgatcaagtatatgaaattttaatttaggtcttattcactacgaactatgtcaagtgaaagaactg

SEQ ID NO: 71214 - DNA, 942 bp, Homo sapiens
cagagggtgaaaggtagctgtcttttgactaaggaagaagaaatgctatgaaaatcaatcacttctgcctcaatggaagataattttttaaacagaattctttacttttttttaatacaggatctcactttgttggccaggctggaggacagtggtgcaatctcagctcactgcagctttgacctcctgaactcaagccatcctcccaccgcaacttcccgagtagctacaagcacacgccaccacacccagctaatttgttgttgttgtttgtagagatggcctttcaccctgttgcccaggtcgttctcgaactgtgagctcagtcgatccccccactttagcctcccaaagtgctggaattaccggcatgagccacacgcccagccaaacaaaatgcttctacttgcctctcacccctttacgtaggacagccttgacctgaggtgaactctagagatttcgaacccttgctcattcagcaaaatgccagcaattccaggaataagatatcaggaatgaagctacagcgatgagcatttctatcctaaatactgtttcacttaaccaggccattctctgtcctttatggcagtctggtgaatagtgagaatgtgtcaatggaatataaagtatctaagggccaggcgcagtggctcacatgtgtaatcccaacactttgggaggcccaggcgggcaggtcgcttaaagccaggaattcaagaccagcctggccaacatggtgaaaccccatgtctactaaaaatacgaaaattagccaggcatggtggcacgcgcctatagtcctagctactcaacttgggaggctgaggcaggagaactgcttgaaccctggaggcagaggttgcagtgagccaagaccatgccactgcactccagcctgggtgatagagggagactctgtctcaataaaagaaaaaa

SEQ ID NO: 71215 - DNA, 361 bp, Homo sapiens
tatcagtgtcagatcaatagtgaatattgtaattgtgaaatgctgaagccattttttaaatcaaattaactaaaataagaatatgttttatctaccattgctaactaacattgttctggaaattttggctgacatgtcaagatataaaacaacataaaacagtttcataaagtggttggatgtaagaaaaatatgtaaaaacaatttgtatagagcaatcacatattaaaatttaatgaaaacaattccacattctacagcaatcaaaacacatgaactgcatgagctaataaatgtgagggtttcttttaagacaactactctctatacataatagttgggttaagagcctcaacttggt

SEQ ID NO: 71216 - DNA, 223 bp, Homo sapiens
cattttttaaaggtataaccatgaatttaaaatgtatttagactttaatcttgagatacatgagcatgtgcatgtggctaaaatatgtggggtcagcacatacctcctaataaagcattgtgaaaagtaaggaatcaatttatggtttattggaaagtcacttatgcacacttgtatttatacagcacaagacaccacattttaaaaattcaataactgaagc

SEQ ID NO: 71217 - DNA, 732 bp, Homo sapiens
tagtcggcacaggggaagggagaacctagtatgagactcaggtctccaccctgcacttgactaggatgctgatttgcactcaggacatgcagcccttcaaggcatctcaaattacagacatgaaacaacagatgcctggatgaattttacaagcagggcaacagtgaggaagaaggctgtgtagcaaaatatacacttagactccagacctatggctttatcttgtcaatatcattaatattcacgggacccaagctaaggctgaagttagtgagccagctctgggtctggcaatgtactctagtgagaagatcaccggccttgaagtcaggcttgtgtctgaatcacagctctgcattttaactagctgtgtgacctcaggtgatcaccatacttctgagcctcaatttccctatctgttaatttaaataagggtgttggtatgtcaccaaaatcccttctagctctaagattttaattaatttgttaaccaatggaattgttgagttccccccaatgtttttgcataatctttgttataactgtgttttgtttacattagaatagtagaacaacaacatcaacaaaaaacccaaatcatccccaacttgatataattgcttctctaccccagctgttgtgactttgtgtcacttagctgttgtcaccctgctgagctagagttttccttggtaaaagaaaatgaatgacagtttatgttttaaagggctg

SEQ ID NO: 71218 - DNA, 516 bp, Homo sapiens
gctttaacatgtctcagatactagcaaaatagagaagcctcagatggctttaggtctggaagtgtgttgctaaaaatgctaaaaatttaacaaacttttataaatccttaagagatctttttcagttttctgaagtaccgttaattgcccatgtgtttcaacttgcagacaggcaagaatttggctttgtatgtttaaaaatatgtacatcttggttcataatgatgatttatttccaaaatggtgactcatactaggattacatataaaacatcatatgtgggccttatatgtaataatgtgtaagtatagtatattaattactctgacataacatgggcagagatttgtattaatttatttctatttcatctaatcaatattttacttaagtctaaaaccttatatatatattgacatgtatcatcgtatatataaacattgtatctattgaactgagcaatctgtagtttattttaaattctgatacattaaagatgtggagaactacatgaa

SEQ ID NO: 71219 - DNA, 783 bp, Homo sapiens
  misc_feature (30)..(32): n is a, c, g, or t
  misc_feature (35)..(36): n is a, c, g, or t
  misc_feature (41)..(41): n is a, c, g, or t
  misc_feature (43)..(43): n is a, c, g, or t
aattcgcggccgcgtcgacacggctgacgnnnagnnacgangnggggagtttcgccgccgcagtcttcgccaccatgccgccctacaccgtggtctatttcccagttcgaggccgctgcgcggccctgcgcatgctgctggcagatcagggccagagctggaaggaggaggtggtgaccgtggagacgtggcaggagggctcactcaaagcctcctgcctatacgggcagctccccaagttccaggacggagacctcaccctgtaccagtccaataccatcctgcgtcacctgggccgcacccttgggctctatgggaaggaccagcaggaggcagccctggtggacatggtgaatgacggcgtggaggacctccgctgcaaatacatctccctcatctacaccaactatgaggcgggcaaggatgactatgtgaaggcactgcccgggcaactgaagccttttgagaccctgctgtcccagaaccagggaggcaagaccttcattgtgggagaccagatctccttcgctgactacaacctgctggacttgctgctgatccatgaggtcctagcccctggctgcctggatgcgttccccctgctctcagcatatgtggggcgcctcagtgcccggcccaagctcaaggccttcctggcctcccctgagtacgtgaacctccccatcaatggcaacgggaaacagtgagggttggggggactctgagcgggaggcagagtttgccttcctttctccaggaccaataaaatttctaagagagcta

SEQ ID NO: 71220 - DNA, 750 bp, Homo sapiens
gcggccgccggggctggggccggcgggagtccgcgggaccctccagaagagcggccggcgccgtgactcagcactggggcggagcggggcgggaccacccttataaggctcggaggccgcgaggccttcgctggagtttcgccgccgcagtcttcgccaccatgccgccctacaccgtggtctatttcccagttcgaggccgctgcgcggccctgcgcatgctgctggcagatcagggccagagctggaaggaggaggtggtgaccgtggagacgtggcaggagggctcactcaaagcctcctgcctatacgggcagctccccaagttccaggacggagacctcaccctgtaccagtccaataccatcctgcgtcacctgggccgcacccttgggctctatgggaaggaccagcaggaggcagccctggtggacatggtgaatgacggcgtggaggacctccgctgcaaatacatctccctcatctacaccaactatgaggcgggcaaggatgactatgtgaaggcactgcccgggcaactgaagccttttgagaccctgctccccctgctctcagcatatgtggggcgcctcagtgcccggcccaagctcaaggccttcctggcctcccctgagtacgtgaacctccccatcaatggcaacgggaaacagtgagggttggggggactctgagcgggaggcagagtttgccttcctttctccaggaccaataaaatttctaagagagcta

SEQ ID NO: 71221 - DNA, 763 bp, Homo sapiens
ccacgcgtcgcggacgcgtgggtcgacccacgcgtcgccgcagtcttcgccaccatgccgccctacaccgtggtctatttcccagttcgaggccgctgcgcggccctgcgcatgctgctggcagatcagggccagagctggaaggaggaggtggtgaccgtggagacgtggcaggagggctcactcaaagcctcctgcctatacgggcagctccccaagttccaggacggagacctcaccctgtaccagtccaataccatcctgcgtcacctgggccgcacccttgggctctatgggaaggaccagcaggaggcagccctggtggacatggtgaatgacggcgtggaggacctccgctgcaaatacatctccctcatctacaccaactatgaggcgggcaaggatgactatgtgaaggcactgcccgggcaactgaagccttttgagaccctgctgtcccagaaccagggaggcaagaccttcattgtgggagaccagatctccttcgctgactacaacctgctggacttgctgctgatccatgaggtcctagcccctggctgcctggatgcgttccccctgctctcagcatatgtggggcgcctcagtgcccggcccaagctcaaggccttcctggcctcccctgagtacgtgaacctccccatcaatggcaacgggaaacagtgagggttggggggactctgagcgggaggcagagtttgccttcctttctccaggaccaataaaatttctaagagagcta

SEQ ID NO: 71222 - DNA, 756 bp, Homo sapiens
aaaaaaccaactacggctaggtacgaggcctcgcagtcttcgccaccatgccgccctacaccgtggtctatttcccagttcgaggccgctgcgcggccctgcgcatgctgctggcagatcagggccagagctggaaggaggaggtggtgaccgtggagacgtggcaggagggctcactcaaagcctcctgcctatacgggcagctccccaagttccaggacggagacctcaccctgtaccagtccaataccatcctgcgtcacctgggccgcacccttgggctctatgggaaggaccagcaggaggcagccctggtggacatggtgaatgacggcgtggaggacctccgctgcaaatacatctccctcatctacaccaactatgaggcgggcaaggatgactatgtgaaggcactgcccgggcaactgaagccttttgagaccctgctgtcccagaaccagggaggcaagaccttcattgtgggagaccagatctccttcgctgactacaacctgctggacttgctgctgatccatgaggtcctagcccctggctgcctggatgcgttccccctgctctcagcatatgtggggcgcctcagtgcccggcccaagctcaaggccttcctggcctcccctgagtacgtgaacctccccatcaatggcaacgggaaacagtgagggttggggggactctgagcgggaggcagagtttgccttcctttctccaggaccaataaaatttctaagagagcta

SEQ ID NO: 71223 - DNA, 849 bp, Homo sapiens
  misc_feature (30)..(32): n is a, c, g, or t
  misc_feature (35)..(36): n is a, c, g, or t
  misc_feature (41)..(41): n is a, c, g, or t
  misc_feature (43)..(43): n is a, c, g, or t
aattcgcggccgcgtcgacacggctgacgnnnagnnacgangnggggagtttcgccgccgcagtcttcgccaccatgccgccctacaccgtggtctatttcccagttcgaggccgctgcgcggccctgcgcatgctgctggcagatcagggccagagctggaaggaggaggtggtgaccgtggagacgtggcaggagggctcactcaaagcctcctgcctatacgggcagctccccaagttccaggacggagacctcaccctgtaccagtccaataccatcctgcgtcacctgggccgcacccttgggctctatgggaaggaccagcaggaggcagccctggtggacatggtgaatgacggcgtggaggacctccgctgcaaatacatctccctcatctacaccaactatgaggcgggcaaggatgactatgtgaaggcactgcccgggcaactgaagccttttgagaccctgctgtcccagaaccagggaggcaagaccttcattgtgggagaccagatctccttcgctgactacaacctgctggacttgctgctgatccatgaggtcctagcccctggctgcctggatgcgttccccctgctctcagcatatgtggggcgcctcagtgcccggcccaagctcaaggccttcctggcctcccctgagtacgtgaacctccccatcaatggcaacgggaaacagtgagggttggggggactctgagcgggaggcagagtttgccttcctttctccaggaccaataaaatttctaagagagctaaaaaaacaaaccacaccacacacacacacacaacacaccccaccaacaaaacagggcaaacaacac

SEQ ID NO: 71224 - DNA, 870 bp, Homo sapiens
gcggccgccggggctggggccggcgggagtccgcgggaccctccagaagagcggccggcgccgtgactcagcactggggcggagcggggcgggaccacccttataaggctcggaggccgcgaggccttcgctggagtttcgccgccgcagtcttcgccaccatgccgccctacaccgtggtctatttcccagttcgaggccgctgcgcggccctgcgcatgctgctggcagatcagggccagagctggaaggaggaggtggtgaccgtggagacgtggcaggagggctcactcaaagcctcctgcctatacgggcagctccccaagttccaggacggagacctcaccctgtaccagtccaataccatcctgcgtcacctgggccgcacccttgggctctatgggaaggaccagcaggaggcagccctggtggacatggtgaatgacggcgtggaggacctccgctgcaaatacatctccctcatctacaccaactatgaggcgggcaaggatgactatgtgaaggcactgcccgggcaactgaagccttttgagaccctgctgtcccagaaccagggaggcaagaccttcattgtgggagaccagatctccttcgctgactacaacctgctggacttgctgctgatccatgaggtcctagcccctggctgcctggatgcgttccccctgctctcagcatatgtggggcgcctcagtgcccggcccaagctcaaggccttcctggcctcccctgagtacgtgaacctccccatcaatggcaacgggaaacagtgagggttggggggactctgagcgggaggcagagtttgccttcctttctccaggaccaataaaatttctaagagagcta

SEQ ID NO: 71225 - DNA, 772 bp, Homo sapiens
ccacgcgtcgcggacgcgtgggtcgacccacgcgtcgcccacgcgtcgcccagttcgaggccgctgcgcggccctgcgcatgctgctggcagatcagggccagagctggaaggaggaggtggtgaccgtggagacgtggcaggagggctcactcaaagcctcctgcctatacgggcagctccccaagttccaggacggagacctcaccctgtaccagtccaataccatcctgcgtcacctgggccgcacccttgggctctatgggaaggaccagcaggaggcagccctggtggacatggtgaatgacggcgtggaggacctccgctgcaaatacatctccctcatctacaccaactatgaggcgggcaaggatgactatgtgaaggcactgcccgggcaactgaagccttttgagaccctgctgtcccagaaccagggaggcaagaccttcattgtgggagaccagatctccttcgctgactacaacctgctggacttgctgctgatccatgaggtcctagcccctggctgcctggatgcgttccccctgctctcagcatatgtggggcgcctcagtgcccggcccaagctcaaggccttcctggcctcccctgagtacgtgaacctccccatcaatggcaacgggaaacagtgagggttggggggactctgagcgggaggcagagtttgccttcctttctccaggaccaataaaatttctaagagagctaaaaaacaaacaaaaagggggacggtataaaatccctcaggg

SEQ ID NO: 71226 - DNA, 869 bp, Homo sapiens
gcggccgccggggctggggccggcgggagtccgcgggaccctccagaagagcggccggcgccgtgactcagcactggggcggagcggggcgggaccacccttataaggctcggaggccgcgaggccttcgctggagtttcgccgccgcagtcttcgccaccatgccgccctacaccgtggtctatttcccagttcgaggccgctgcgcggccctgcgcatgctgctggcagatcagggccagagctggaaggaggaggtggtgaccgtggagacgtggcaggagggctcactcaaagcctcctgcctatacgggcagctccccaagttccaggacggagacctcaccctgtaccagtccaataccatcctgcgtcacctgggccgcacccttgggctctatgggaaggaccagcaggaggcagccctggtggacatggtgaatgacggcgtggaggacctccgctgcaaatacatctccctcatctacaccaactatgaggcgggcaaggatgactatgtgaaggcactgcccgggcaactgaagccttttgagaccctgctgtcccagaaccagggaggcaagaccttcattgtgggagaccagatctccttcgctgactacaacctgctggacttgctgctgatccatgaggtcctagcccctggctgcctggatgcgttccccctgctctcagcatatgtggggcgcctcagtgcccggcccaagctcaaggccttcctggcctcccctgagtacgtgaacctccccatcaatggcaacgggaaacagtgagggttggggggactctgagcgggaggcagagtatcacccttggccagaccaaataattagcgcgtcgtgcgtccg

SEQ ID NO: 71227 - DNA, 788 bp, Homo sapiens
gggataccccttgcggtctcatagttggaggtggtgaccgtggagacgtggcaggagggctcactcaaagcctcctgcctatacgggcagctccccaagttccaggacggagacctcaccctgtaccagtccaataccatcctgcgtcacctgggccgcacccttgggctctatgggaaggaccagcaggaggcagccctggtggacatggtgaatgacggcgtggaggacctccgctgcaaatacatctccctcatctacaccaactatgaggcgggcaaggatgactatgtgaaggcactgcccgggcaactgaagccttttgagaccctgctgtcccagaaccagggaggcaagaccttcattgtgggagaccagatctccttcgctgactacaacctgctggacttgctgctgatccatgaggtcctagcccctggctgcctggatgcgttccccctgctctcagcatatgtggggcgcctcagtgcccggcccaagctcaaggccttcctggcctcccctgagtacgtgaacctccccatcaatggcaacgggaaacagtgagggttggggggactctgagcgggaggcagagtttgccttcctttctccaggaccaataaaatttctaagagagctaaaaaaaaggaaaggggagaagaaaaggaggaggaggaagagagagagaggaggagaggagagaaaaaaaagaggggggagaaaataagaagggggggaaaaaaggggagaagaggggggggggggagaaggggggagaggaagag

SEQ ID NO: 71228 - DNA, 523 bp, Homo sapiens
taattatactttaagttttagggtacatgtgcacattgtgcaggttagttacatatgtatacacgtgccatgctagtgcgctgcacccaccaactcatcatctagtattaggtatatctcccaatgctatccctcatctacaccaactatgaggcgggcaaggatgactatgtgaaggcactgcccgggcaactgaagccttttgagaccctgctgtcccagaaccagggaggcaagaccttcattgtgggagaccagatctccttcgctgactacaacctgctggacttgctgctgatccatgaggtcctagcccctggctgcctggatgcgttccccctgctctcagcatatgtggggcgcctcagtgcccggcccaagctcaaggccttcctggcctcccctgagtacgtgaacctccccatcaatggcaacgggaaacagtgagggttggggggactctgagcgggaggcagagtttgccttcctttctccaggaccaataaaatttctaagagagcta

SEQ ID NO: 71229 - DNA, 659 bp, Homo sapiens
gcggccgccggggctggggccggcgggagtccgcgggaccctccagaagagcggccggcgccgtgactcagcactggggcggagcggggcgggaccacccttataaggctcggaggccgcgaggccttcgctggagtttcgccgccgcagtcttcgccaccatgccgccctacaccgtggtctatttcccagttcgaggccgctgcgcggccctgcgcatgctgctggcagatcagggccagagctggaaggaggaggtggtgaccgtggagacgtggcaggagggctcactcaaagcctcctgcctatacgggcagctccccaagttccaggacggagacctcaccctgtaccagtccaataccatcctgcgtcacctgggccgcacccttgggctctatgggaaggaccagcaggaggcagccctggtggacatggtgaatgacggcgtggaggacctccgctgcaaatacatctccctcatctacaccaactatgaggcgggcaaggatgactatgtgaaggcactgcccgggcaactgaagccttttgagaccctgctgtcccagaaccagggaggcaagaccttcattgtgggagaccagagatctccttcgctgactacaaactccgaactcggcggtaccgagctcgattta

SEQ ID NO: 71230 - DNA, 345 bp, Homo sapiens
gtcgacccacaatgaaggtcttgcctccctggttctgggacagcagggtctcaaaaggattcagttgcccgggagaccagatctccttcgctgactacaacctgctggacttgctgctgatccatgaggtcctagcccctggctgcctggatgcgttccccctgctctcagcatatgtggggcgcctcagtgcccggcccaagctcaaggccttcctggcctcccctgagtacgtgaacctccccatcaatggcaacgggaaacagtgagggttggggggactctgagcgggaggcagagtttgccttcctttctccaggaccaataaaatttctaagagagcta

SEQ ID NO: 71231 - DNA, 247 bp, Homo sapiens
agcggccgcctactactactactactgctcgaattcaagcttctaacgatgtacggggaccccctgctctcagcatatgtggggcgcctcagtgcccggcccaagctcaaggccttcctggcctcccctgagtacgtgaacctccccatcaatggcaacgggaaacagtgagggttggggggactctgagcgggaggcagagtttgccttcctttctccaggaccaataaaatttctaagagagcta

SEQ ID NO: 71232 - DNA, 452 bp, Homo sapiens
gcggccgccggggctggggccggcgggagtccgcgggaccctccagaagagcggccggcgccgtgactcagcactggggcggagcggggcgggaccacccttataaggctcggaggccgcgaggccttcgctggagtttcgccgccgcagtcttcgccaccatgccgccctacaccgtggtctatttcccagttcgagggtaggagcatgtgtctggcagggaagggaggcaggggctggggctgcagcccacagcccctcgcccacccggagagatccgaacccccttatccctccgtcgtgtggcttttaccccgggcctccttcctgttccccgcctctcccgccatgcctgctccccgccccagtgttgtgtgaaatcttcggaggaacctgtttccctgttccctccctgcactcctgacccctccccgggttgctgcgaggcggag

SEQ ID NO: 71233 - DNA, 773 bp, Homo sapiens
caccccccccaaataggctaggtagaggcccgtgttaatcgcacgaggcgcagtcttcgccaccatgccgccctacaccgtggtctatttcccagttcgaggccgctgcgcggccctgcgcatgctgctggcagatcagggccagagctggaaggaggaggtggtgaccgtggagacgtggcaggagggctcactcaaagcctcctgcctatacgggcagctccccaagttccaggacggagacctcaccctgtaccagtccaataccatcctgcgtcacctgggccgcacccttgggctctatgggaaggaccagcaggaggcagccctggtggacatggtgaatgacggcgtggaggacctccgctgcaaatacatctccctcatctacaccaactatgaggcgggcaaggatgactatgtgaaggcactgcccgggcaactgaagccttttgagaccctgctgtcccagaaccagggaggcaagaccttcattgtgggagaccagatctccttcgctgactacaacctgctggacttgctgctgatccatgaggtcctagcccctggctgcctggatgcgttccccctgctctcagcatatgtggggcgcctcagtgcccggcccaagctcaaggccttcctggcctcccctgagtacgtgaacctccccatcaatggcaacgggaaacagtgagggttggggggactctgagcgggaggcagagtttgccttcctttctccaggaccaataaaatttctaagagagcta

SEQ ID NO: 71234 - DNA, 748 bp, Homo sapiens
ccccgggctgcaggaattcggcacgcagtcttcgccaccatgccgccctacaccgtggtctatttcccagttcgaggccgctgcgcggccctgcgcatgctgctggcagatcagggccagagctggaaggaggaggtggtgaccgtggagacgtggcaggagggctcactcaaagcctcctgcctatacgggcagctccccaagttccaggacggagacctcaccctgtaccagtccaataccatcctgcgtcacctgggccgcacccttgggctctatgggaaggaccagcaggaggcagccctggtggacatggtgaatgacggcgtggaggacctccgctgcaaatacatctccctcatctacaccaactatgaggcgggcaaggatgactatgtgaaggcactgcccgggcaactgaagccttttgagaccctgctgtcccagaaccagggaggcaagaccttcattgtgggagaccagatctccttcgctgactacaacctgctggacttgctgctgatccatgaggtcctagcccctggctgcctggatgcgttccccctgctctcagcatatgtggggcgcctcagtgcccggcccaagctcaaggccttcctggcctcccctgagtacgtgaacctccccatcaatggcaacgggaaacagtgagggttggggggactctgagcgggaggcagagtttgccttcctttctccaggaccaataaaatttctaagagagcta

SEQ ID NO: 71235 - DNA, 891 bp, Homo sapiens
  misc_feature (199)..(199): n is a, c, g, or t
  misc_feature (202)..(202): n is a, c, g, or t
  misc_feature (204)..(204): n is a, c, g, or t
  misc_feature (211)..(211): n is a, c, g, or t
  misc_feature (214)..(215): n is a, c, g, or t
ggatttgggattttggtggttggaaacaagtcttcaagggtgtctgtcttctcatctttctttgccaagctcatggagtcaatcaaagcatcaacagcattcaactgtgcctcggtgggagcatatttcttactgtttttcaaggatgaaaacatgtattgccgcaagtcttccatgaaaggcagctgcactacaccgnggncnatttccnagnncgaggccgctgcgcggccctgcgcatgctgctggcagatcagggccagagctggaaggaggaggtggtgaccgtggagacgtggcaggagggctcactcaaagcctcctgcctatacgggcagctccccaagttccaggacggagacctcaccctgtaccagtccaataccatcctgcgtcacctgggccgcacccttgggctctatgggaaggaccagcaggaggcagccctggtggacatggtgaatgacggcgtggaggacctccgctgcaaatacatctccctcatctacaccaactatgaggcgggcaaggatgactatgtgaaggcactgcccgggcaactgaagccttttgagaccctgctgtcccagaaccagggaggcaagaccttcattgtgggagaccagatctccttcgctgactacaacctgctggacttgctgctgatccatgaggtcctagcccctggctgcctggatgcgttccccctgctctcagcatatgtggggcgcctcagtgcccggcccaagctcaaggccttcctggcctcccctgagtacgtgaacctccccatcaatggcaacgggaaacagtgagggttggggggactctgagcgggaggcagagtttgccttcctttctccaggaccaataaaatttctaagagagcta

SEQ ID NO: 71236 - DNA, 986 bp, Homo sapiens
gcggcccgcgtccccggggatggggctcagagctcccagcatggggccaacccgcagcatcaggcccgggctcccggcaggctcctcgcccacctcgagacccgggacgggggcctaggggacccaggacgtccccagtgccgttagcggctttcagggggcccggagcgcctcggggagggatgggaccccgggggcggggagggggggcaggctgcgctcaccgcgccttggcatcctcccccgggctccagcaaacttttctttgttcgctgcagtgccgccctacaccgtggtctatttcccagttcgaggccgctgcgcggccctgcgcatgctgctggcagatcagggccagagctggaaggaggaggtggtgaccgtggagacgtggcaggagggctcactcaaagcctcctgcctatacgggcagctccccaagttccaggacggagacctcaccctgtaccagtccaataccatcctgcgtcacctgggccgcacccttgggctctatgggaaggaccagcaggaggcagccctggtggacatggtgaatgacggcgtggaggacctccgctgcaaatacatctccctcatctacaccaactatgaggcgggcaaggatgactatgtgaaggcactgcccgggcaactgaagccttttgagaccctgctgtcccagaaccagggaggcaagaccttcattgtgggagaccagatctccttcgctgactacaacctgctggacttgctgctgatccatgaggtcctagcccctggctgcctggatgcgttccccctgctctcagcatatgtggggcgcctcagtgcccggcccaagctcaaggccttcctggcctcccctgagtacgtgaacctccccatcaatggcaacgggaaacagtgagggttggggggactctgagcgggaggcagagtttgccttcctttctccaggaccaataaaatttctaagagagcta

SEQ ID NO: 71237 - DNA, 731 bp, Homo sapiens
ccacgcgtcgcggacgcgtgggtcgacccacgcgtcgcccacgcgtcgcccagttcgaggccgctgcgcggccctgcgcatgctgctggcagatcagggccagagctggaaggaggaggtggtgaccgtggagacgtggcaggagggctcactcaaagcctcctgcctatacgggcagctccccaagttccaggacggagacctcaccctgtaccagtccaataccatcctgcgtcacctgggccgcacccttgggctctatgggaaggaccagcaggaggcagccctggtggacatggtgaatgacggcgtggaggacctccgctgcaaatacatctccctcatctacaccaactatgaggcgggcaaggatgactatgtgaaggcactgcccgggcaactgaagccttttgagaccctgctgtcccagaaccagggaggcaagaccttcattgtgggagaccagatctccttcgctgactacaacctgctggacttgctgctgatccatgaggtcctagcccctggctgcctggatgcgttccccctgctctcagcatatgtggggcgcctcagtgcccggcccaagctcaaggccttcctggcctcccctgagtacgtgaacctccccatcaatggcaacgggaaacagtgagggttggggggactctgagcgggaggcagagtttgccttcctttctccaggaccaataaaatttctaagagagcta

SEQ ID NO: 71238 - DNA, 715 bp, Homo sapiens
agtacgaggctggtgtgaatcggccgaggattcccagttcgaggccgctgcgcggccctgcgcatgctgctggcagatcagggccagagctggaaggaggaggtggtgaccgtggagacgtggcaggagggctcactcaaagcctcctgcctatacgggcagctccccaagttccaggacggagacctcaccctgtaccagtccaataccatcctgcgtcacctgggccgcacccttgggctctatgggaaggaccagcaggaggcagccctggtggacatggtgaatgacggcgtggaggacctccgctgcaaatacatctccctcatctacaccaactatgaggcgggcaaggatgactatgtgaaggcactgcccgggcaactgaagccttttgagaccctgctgtcccagaaccagggaggcaagaccttcattgtgggagaccagatctccttcgctgactacaacctgctggacttgctgctgatccatgaggtcctagcccctggctgcctggatgcgttccccctgctctcagcatatgtggggcgcctcagtgcccggcccaagctcaaggccttcctggcctcccctgagtacgtgaacctccccatcaatggcaacgggaaacagtgagggttggggggactctgagcgggaggcagagtttgccttcctttctccaggaccaataaaatttctaagagagcta

SEQ ID NO: 71239 - DNA, 856 bp, Homo sapiens
  misc_feature (30)..(32): n is a, c, g, or t
  misc_feature (35)..(36): n is a, c, g, or t
  misc_feature (41)..(41): n is a, c, g, or t
  misc_feature (43)..(43): n is a, c, g, or t
  misc_feature (821)..(822): n is a, c, g, or t
  misc_feature (825)..(825): n is a, c, g, or t
aattcgcggccgcgtcgacacggctgacgnnnagnnacgangnggggagtttcgccgccgcagtcttcgccaccatgccgccctacaccgtggtctatttcccagttcgaggccgctgcgcggccctgcgcatgctgctggcagatcagggccagagctggaaggaggaggtggtgaccgtggagacgtggcaggagggctcactcaaagcctcctgcctatacgggcagctccccaagttccaggacggagacctcaccctgtaccagtccaataccatcctgcgtcacctgggccgcacccttgggctctatgggaaggaccagcaggaggcagccctggtggacatggtgaatgacggcgtggaggacctccgctgcaaatacatctccctcatctacaccaactatgaggcgggcaaggatgactatgtgaaggcactgcccgggcaactgaagccttttgagaccctgctgtcccagaaccagggaggcaagaccttcattgtgggagaccagatctccttcgctgactacaacctgctggacttgctgctgatccatgaggtcctagcccctggctgcctggatgcgttccccctgctctcagcatatgtggggcgcctcagtgcccggcccaagctcaaggccttcctggcctcccctgagtacgtgaacctccccatcaatggcaacgggaaacagtgagggttggggggactctgagcgggaggcagagtttgccttcctttctccaggaccaataaaatttctaagagagctaaaaacaaaacaaacacaaacacaaaaacaacagacaannaanacaaaaacggcagctatcaaaagcaaacaca

SEQ ID NO: 71240 - DNA, 922 bp, Homo sapiens
  misc_feature (30)..(32): n is a, c, g, or t
  misc_feature (35)..(36): n is a, c, g, or t
  misc_feature (41)..(41): n is a, c, g, or t
  misc_feature (43)..(43): n is a, c, g, or t
aattcgcggccgcgtcgacacggctgacgnnnagnnacgangnggggagtttcgccgccgcagtcttcgccaccatgccgccctacaccgtggtctatttcccagttcgaggccgctgcgcggccctgcgcatgctgctggcagatcagggccagagctggaaggaggaggtggtgaccgtggagacgtggcaggagggctcactcaaagcctcctgcctatacgggcagctccccaagttccaggacggagacctcaccctgtaccagtccaataccatcctgcgtcacctgggccgcacccttgggctctatgggaaggaccagcaggaggcagccctggtggacatggtgaatgacggcgtggaggacctccgctgcaaatacatctccctcatctacaccaactatgaggcgggcaaggatgactatgtgaaggcactgcccgggcaactgaagccttttgagaccctgctgtcccagaaccagggaggcaagaccttcattgtgggagaccagatctccttcgctgactacaacctgctggacttgctgctgatccatgaggtcctagcccctggctgcctggatgcgttccccctgctctcagcatatgtggggcgcctcagtgcccggcccaagctcaaggccttcctggcctcccctgagtacgtgaacctccccatcaatggcaacgggaaacagtgagggttggggggactctgagcgggaggcagagtttgccttcctttctccaggaccaataaaatttctaagagagctaaaaaaacaaaaaaaaaaaaaaatccggggccttttttcggggcggcccaagcggtttgaatgggcgggccatagtgttccggcccctttttgtccaggggaattgcggcccataagggggggtaatggaaaccggacgg

SEQ ID NO: 71241 - DNA, 1002 bp, Homo sapiens
  misc_feature (30)..(32): n is a, c, g, or t
  misc_feature (35)..(36): n is a, c, g, or t
  misc_feature (41)..(41): n is a, c, g, or t
  misc_feature (43)..(43): n is a, c, g, or t
aattcgcggccgcgtcgacacggctgacgnnnagnnacgangnggggagtttcgccgccgcagtcttcgccaccatgccgccctacaccgtggtctatttcccagttcgaggccgctgcgcggccctgcgcatgctgctggcagatcagggccagagctggaaggaggaggtggtgaccgtggagacgtggcaggagggctcactcaaagcctcctgcctatacgggcagctccccaagttccaggacggagacctcaccctgtaccagtccaataccatcctgcgtcacctgggccgcacccttgggctctatgggaaggaccagcaggaggcagccctggtggacatggtgaatgacggcgtggaggacctccgctgcaaatacatctccctcatctacaccaactatgaggcgggcaaggatgactatgtgaaggcactgcccgggcaactgaagccttttgagaccctgctgtcccagaaccagggaggcaagaccttcattgtgggagaccagatctccttcgctgactacaacctgctggacttgctgctgatccatgaggtcctagcccctggctgcctggatgcgttccccctgctctcagcatatgtggggcgcctcagtgcccggcccaagctcaaggccttcctggcctcccctgagtacgtgaacctccccatcaatggcaacgggaaacagtgagggttggggggactctgagcgggaggcagagtttgccttcctttctccaggaccaataaaatttctaagagagctaaacaaaaaaggggggggtctaaagtacctggaagggcagtaaccgtcccgttttgtcaggggccaagggagggatttaagaaggcggggcggtaacgggggggaaagtctgggttggagaccttggggtatggcacccggtagggaaatagtgagggagttttgatgtgttagacaattaaaggaggagggagcagtagagcggaaagaagagagagag

SEQ ID NO: 71242 - DNA, 805 bp, Homo sapiens
  misc_feature (30)..(32): n is a, c, g, or t
  misc_feature (35)..(36): n is a, c, g, or t
  misc_feature (41)..(41): n is a, c, g, or t
  misc_feature (43)..(43): n is a, c, g, or t
aattcgcggccgcgtcgacacggctgacgnnnagnnacgangnggggagtttcgccgccgcagtcttcgccaccatgccgccctacaccgtggtctatttcccagttcgaggccgctgcgcggccctgcgcatgctgctggcagatcagggccagagctggaaggaggaggtggtgaccgtggagacgtggcaggagggctcactcaaagcctcctgcctatacgggcagctccccaagttccaggacggagacctcaccctgtaccagtccaataccatcctgcgtcacctgggccgcacccttgggctctatgggaaggaccagcaggaggcagccctggtggacatggtgaatgacggcgtggaggacctccgctgcaaatacatctccctcatctacaccaactatgaggcgggcaaggatgactatgtgaaggcactgcccgggcaactgaagccttttgagaccctgctgtcccagaaccagggaggcaagaccttcattgtgggagaccagatctccttcgctgactacaacctgctggacttgctgctgatccatgaggtcctagcccctggctgcctggatgcgttccccctgctctcagcatatgtggggcgcctcagtgcccggcccaagctcaaggccttcctggcctcccctgagtacgtgaacctccccatcaatggcaacgggaaacagtgagggttggggggactctgagcgggaggcagagtttgccttcctttctccaggaccaataaaatttctaagagagctaaaaaaaagtcgacgcggccgga

SEQ ID NO: 71243 - DNA, 643 bp, Homo sapiens
gggataccccttgcggtctcatagttggaggtggtgaccgtggagacgtggcaggagggctcactcaaagcctcctgcctatacgggcagctccccaagttccaggacggagacctcaccctgtaccagtccaataccatcctgcgtcacctgggccgcacccttgggctctatgggaaggaccagcaggaggcagccctggtggacatggtgaatgacggcgtggaggacctccgctgcaaatacatctccctcatctacaccaactatgaggcgggcaaggatgactatgtgaaggcactgcccgggcaactgaagccttttgagaccctgctgtcccagaaccagggaggcaagaccttcattgtgggagaccagatctccttcgctgactacaacctgctggacttgctgctgatccatgaggtcctagcccctggctgcctggatgcgttccccctgctctcagcatatgtggggcgcctcagtgcccggcccaagctcaaggccttcctggcctcccctgagtacgtgaacctccccatcaatggcaacgggaaacagtgagggttggggggactctgagcgggaggcagagtttgccttcctttctccaggaccaataaaatttctaagagagcta

SEQ ID NO: 71244 - DNA, 653 bp, Homo sapiens
gagtctagagtgctccccccatccggcaggttgtactgaggtggtgaccgtggagacgtggcaggagggctcactcaaagcctcctgcctatacgggcagctccccaagttccaggacggagacctcaccctgtaccagtccaataccatcctgcgtcacctgggccgcacccttgggctctatgggaaggaccagcaggaggcagccctggtggacatggtgaatgacggcgtggaggacctccgctgcaaatacatctccctcatctacaccaactatgaggcgggcaaggatgactatgtgaaggcactgcccgggcaactgaagccttttgagaccctgctgtcccagaaccagggaggcaagaccttcattgtgggagaccagatctccttcgctgactacaacctgctggacttgctgctgatccatgaggtcctagcccctggctgcctggatgcgttccccctgctctcagcatatgtggggcgcctcagtgcccggcccaagctcaaggccttcctggcctcccctgagtacgtgaacctccccatcaatggcaacgggaaacagtgagggttggggggactctgagcgggaggcagagtttgccttcctttctccaggaccaataaaatttctaagagagcta

SEQ ID NO: 71245 - DNA, 737 bp, Homo sapiens
  misc_feature (30)..(32): n is a, c, g, or t
  misc_feature (35)..(36): n is a, c, g, or t
  misc_feature (41)..(41): n is a, c, g, or t
  misc_feature (43)..(43): n is a, c, g, or t
aattcgcggccgcgtcgacacggctgacgnnnagnnacgangnggggagtttcgccgccgcagtcttcgccaccatgccgccctacaccgtggtctatttcccagttcgaggccgctgcgcggccctgcgcatgctgctggcagatcagggccagagctggaaggaggaggtggtgaccgtggagacgtggcaggagggctcactcaaagcctcctgcctatacgggcagctccccaagttccaggacggagacctcaccctgtaccagtccaataccatcctgcgtcacctgggccgcacccttgggctctatgggaaggaccagcaggaggcagccctggtggacatggtgaatgacggcgtggaggacctccgctgcaaatacatctccctcatctacaccaactatgaggcgggcaaggatgactatgtgaaggcactgcccgggcaactgaagccttttgagaccctgctgtcccagaaccagggaggcaagaccttcattgtgggagaccagatctccttcgctgactacaacctgctggacttgctgctgatccatgaggtcctagcccctggctgcctggatgcgttccccctgctctcagcatatgtggggcgcctcagtgcccggcccaagctcaaggccttcctggcctcccctgagtacgtgaacctccccatcaatggcaacgggaaacagtgaggttaaggctccaaagcgatcgtctagatc

SEQ ID NO: 71246 - DNA, 1148 bp, Homo sapiens
  misc_feature (30)..(32): n is a, c, g, or t
  misc_feature (35)..(36): n is a, c, g, or t
  misc_feature (41)..(41): n is a, c, g, or t
  misc_feature (43)..(43): n is a, c, g, or t
aattcgcggccgcgtcgacacggctgacgnnnagnnacgangnggggagtttcgccgccgcagtcttcgccaccatgccgccctacaccgtggtctatttcccagttcgaggccgctgcgcggccctgcgcatgctgctggcagatcagggccagagctggaaggaggaggtggtgaccgtggagacgtggcaggagggctcactcaaagcctcctgcctatacgggcagctccccaagttccaggacggagacctcaccctgtaccagtccaataccatcctgcgtcacctgggccgcacccttggtgagtcttgaacctccaagtccagggcaggcatgggcaagcctctgcccccggagcccttttgtttaaatcagctgccccgcagccctctggagtggaggaaactgagacccactgaggttacgtagtttgcccaaggtcaagcctgggtgcctgcaatccttgccctgtgccaggctgcctcccaggtgtcaggtgagctctgagcacctgctgtgtggcagtctctcatccttccacgcacatcctcttcccctcctcccaggctggggctcacagacagccccctggttggcccatccccagtgactgtgtgttgatcaggcgcccagtcacgcggcctgctcccctccacccaaccccagggctctatgggaaggaccagcaggaggcagccctggtggacatggtgaatgacggcgtggaggacctccgctgcaaatacatctccctcatctacaccaactatgaggcgggcaaggatgactatgtgaaggcactgcccgggcaactgaagccttttgagaccctgctgtcccagaaccagggaggcaagaccttcattgtgggagaccagatctccttcgctgactacaacctgctggacttgctgctgatccatgaggtcctagcccctggctgcctggatgcgttccccctgctctcagcatatgtggggcgcctcagtgcccggcccaagctcaaggccttcctggcctcccctgagtacgtgaacctccccatcaatggcaacgggaaacagtgagggttggggggactctgagcgggaggcagagtttgccttcctttctccaggaccaataaaatttctaagagagcta

SEQ ID NO: 71247 - DNA, 883 bp, Homo sapiens
  misc_feature (30)..(32): n is a, c, g, or t
  misc_feature (35)..(36): n is a, c, g, or t
  misc_feature (41)..(41): n is a, c, g, or t
  misc_feature (43)..(43): n is a, c, g, or t
aattcgcggccgcgtcgacacggctgacgnnnagnnacgangnggggagtttcgccgccgcagtcttcgccaccatgccgccctacaccgtggtctatttcccagttcgaggccgctgcgcggccctgcgcatgctgctggcagatcagggccagagctggaaggaggaggtggtgaccgtggagacgtggcaggagggctcactcaaagcctcctgcctatacgggcagctccccaagttccaggacggagacctcaccctgtaccagtccaataccatcctgcgtcacctgggccgcacccttggctggggctcacagacagccccctggttggcccatccccagtgactgtgtgttgatcaggcgcccagtcacgcggcctgctcccctccacccaaccccagggctctatgggaaggaccagcaggaggcagccctggtggacatggtgaatgacggcgtggaggacctccgctgcaaatacatctccctcatctacaccaactatgaggcgggcaaggatgactatgtgaaggcactgcccgggcaactgaagccttttgagaccctgctgtcccagaaccagggaggcaagaccttcattgtgggagaccagatctccttcgctgactacaacctgctggacttgctgctgatccatgaggtcctagcccctggctgcctggatgcgttccccctgctctcagcatatgtggggcgcctcagtgcccggcccaagctcaaggccttcctggcctcccctgagtacgtgaacctccccatcaatggcaacgggaaacagtgagggttggggggactctgagcgggaggcagagtttgccttcctttctccaggaccaataaaatttctaagagagcta

SEQ ID NO: 71248 - DNA, 636 bp, Homo sapiens
  misc_feature (30)..(32): n is a, c, g, or t
  misc_feature (35)..(36): n is a, c, g, or t
  misc_feature (41)..(41): n is a, c, g, or t
  misc_feature (43)..(43): n is a, c, g, or t
aattcgcggccgcgtcgacacggctgacgnnnagnnacgangnggggagtttcgccgccgcagtcttcgccaccatgccgccctacaccgtggtctatttcccagttcgaggccgctgcgcggccctgcgcatgctgctggcagatcagggccagagctggaaggaggaggtggtgaccgtggagacgtggcaggagggctcactcaaagcctcctgcctatacgggcagctccccaagttccaggacggagacctcaccctgtaccagtccaataccatcctgcgtcacctgggccgcacccttgggctctatgggaaggaccagcaggaggcagccctggtggacatggtgaatgacggcgtggaggacctccgctgcaaatacatctccctcatctacaccaactatgaggcgggcaaggatgactatgtgaaggcactgcccgggcaactgaagccttttgagaccctgctgtcccagaaccagggaggcaagaccttcattgtgggagaccagatctccttcgctgactacaacctgctggacttgctgctgatccatgaggtcctagcccctggctgcctggatgcgttcttgggcgctcgtgccacattgggcgctcgttccggaccga

SEQ ID NO: 71249 - DNA, 549 bp, Homo sapiens
caagcagtattcaagtcaggtcgagactcacctgtacagtccaatacatcctgcgtccctggccgcactcttggctctatgggaaggaccagcaggaggcagccctggtggacatggtgaatgacggcgtggaggacctccgctgcaaatacatctccctcatctacaccaactatgaggcgggcaaggatgactatgtgaaggcactgcccgggcaactgaagccttttgagaccctgctgtcccagaaccagggaggcaagaccttcattgtgggagaccagatctccttcgctgactacaacctgctggacttgctgctgatccatgaggtcctagcccctggctgcctggatgcgttccccctgctctcagcatatgtggggcgcctcagtgcccggcccaagctcaaggccttcctggcctcccctgagtacgtgaacctccccatcaatggcaacgggaaacagtgagggttggggggactctgagcgggaggcagagtttgccttcctttctccaggaccaataaaatttctaagagagcta

SEQ ID NO: 71250 - DNA, 737 bp, Homo sapiens
  misc_feature (30)..(32): n is a, c, g, or t
  misc_feature (35)..(36): n is a, c, g, or t
  misc_feature (41)..(41): n is a, c, g, or t
  misc_feature (43)..(43): n is a, c, g, or t
aattcgcggccgcgtcgacacggctgacgnnnagnnacgangnggggagtttcgccgccgcagtcttcgccaccatgccgccctacaccgtggtctatttcccagttcgaggccgctgcgcggccctgcgcatgctgctggcagatcagggccagagctggaaggaggaggtggtgaccgtggagacgtggcaggagggctcactcaaagcctcctgcctatacgggcagctccccaagttccaggacggagacctcaccctgtaccagtccaataccatcctgcgtcacctgggccgcacccttgggctctatgggaaggaccagcaggaggcagccctggtggacatggtgaatgacggcgtggaggacctccgctgcaaatacatctccctcatctacaccaactatgaggcgggcaaggatgactatgtgaaggcactgcccgggcaactgaagccttttgagaccctgctgtcccagaaccagggaggcaagaccttcattgtgggagaccagatctccttcgctgactacaacctgctggacttgctgctgatccatgaggtcctagcccctggctgcctggatgcgttctcaaggccttcctggcctcccctgagtacgtgaacctccccatcaatggcaacgggaaacagtgagggttggggggactctgagcgggaggcagagtttgccttcctttctccaggaccaataaaatttctaagagagcta

SEQ ID NO: 71251 - DNA, 715 bp, Homo sapiens
  misc_feature (30)..(32): n is a, c, g, or t
  misc_feature (35)..(36): n is a, c, g, or t
  misc_feature (41)..(41): n is a, c, g, or t
  misc_feature (43)..(43): n is a, c, g, or t
aattcgcggccgcgtcgacacggctgacgnnnagnnacgangnggggagtttcgccgccgcagtcttcgccaccatgccgccctacaccgtggtctatttcccagttcgaggccgctgcgcggccctgcgcatgctgctggcagatcagggccagagctggaaggaggaggtggtgaccgtggagacgtggcaggagggctcactcaaagcctcctgcctatacgggcagctccccaagttccaggacggagacctcaccctgtaccagtccaataccatcctgcgtcacctgggccgcacccttgggctctatgggaaggaccagcaggaggcagccctggtggacatggtgaatgacggcgtggaggacctccgctgcaaatacatctccctcatctacaccaactatgaggcgggcaaggatgactatgtgaaggcactgcccgggcaactgaagccttttgagaccctgctgtcccagaaccagggaggcaagaccttcattgtgggagaccagatctccttcgctgactacaacctgctggacttgctgctgatccatgaggtcctagcccctggctgcctggatgcgttctgagtacgtgaacctccccatcaatggcaacgggaaacagtgagggttggggggactctgagcgggaggcagagtttgccttcctttctccaggaccaataaaatttctaagagagcta

SEQ ID NO: 71252 - DNA, 644 bp, Homo sapiens
  misc_feature (30)..(32): n is a, c, g, or t
  misc_feature (35)..(36): n is a, c, g, or t
  misc_feature (41)..(41): n is a, c, g, or t
  misc_feature (43)..(43): n is a, c, g, or t
aattcgcggccgcgtcgacacggctgacgnnnagnnacgangnggggagtttcgccgccgcagtcttcgccaccatgccgccctacaccgtggtctatttcccagttcgaggccgctgcgcggccctgcgcatgctgctggcagatcagggccagagctggaaggaggaggtggtgaccgtggagacgtggcaggagggctcactcaaagcctcctgcctatacgggcagctccccaagttccaggacggagacctcaccctgtaccagtccaataccatcctgcgtcacctgggccgcacccttgggctctatgggaaggaccagcaggaggcagccctggtggacatggtgaatgacggcgtggaggacctccgctgcaaatacatctccctcatctacaccaactatgaggcgggcaaggatgactatgtgaaggcactgcccgggcaactgaagccttttgagaccctgctgtcccagaaccagggaggcaagaccttcattgtgggagaccagatctccttcgctgactacaacctgctggacttgctgctgatccatgaggtcctagcccctggctgcctggatgcgttgcttggcgcgcgcgtcgcgggtcctctatagtctccctgcacgcacgcg

SEQ ID NO: 71253 - DNA, 481 bp, Homo sapiens
tcacctaacgcgtaacctcaccctaaccgcgtaccctaaccgcgcatggtgaatgacggcgtggaggacctccgctgcaaatacatctccctcatctacaccaactatgaggcgggcaaggatgactatgtgaaggcactgcccgggcaactgaagccttttgagaccctgctgtcccagaaccagggaggcaagaccttcattgtgggagaccagatctccttcgctgactacaacctgctggacttgctgctgatccatgaggtcctagcccctggctgcctggatgcgttccccctgctctcagcatatgtggggcgcctcagtgcccggcccaagctcaaggccttcctggcctcccctgagtacgtgaacctccccatcaatggcaacgggaaacagtgagggttggggggactctgagcgggaggcagagtttgccttcctttctccaggaccaataaaatttctaagagagcta

SEQ ID NO: 71254 - DNA, 846 bp, Homo sapiens
  misc_feature (30)..(32): n is a, c, g, or t
  misc_feature (35)..(36): n is a, c, g, or t
  misc_feature (41)..(41): n is a, c, g, or t
  misc_feature (43)..(43): n is a, c, g, or t
aattcgcggccgcgtcgacacggctgacgnnnagnnacgangnggggagtttcgccgccgcagtcttcgccaccatgccgccctacaccgtggtctatttcccagttcgaggccgctgcgcggccctgcgcatgctgctggcagatcagggccagagctggaaggaggaggtggtgaccgtggagacgtggcaggagggctcactcaaagcctcctgcctatacgggcagctccccaagttccaggacggagacctcaccctgtaccagtccaataccatcctgcgtcacctgggccgcacccttgggctctatgggaaggaccagcaggaggcagccctggtggacatggtgaatgacggcgtggaggacctccgctgcaaatacatctccctcatctacaccaactatgaggcgggcaaggatgactatgtgaaggcactgcccgggcaactgaagccttttgagaccctgctgtcccagaaccagggaggcaagaccttcattgtgggagaccagggtgagcatctggccccatgctgttccttcctcgccaccctctgcttccagatggacacaggtatctccttcgctgactacaacctgctggacttgctgctgatccatgaggtcctagcccctggctgcctggatgcgttccccctgctctcagcatatgtggggcgcctcagtgcccggcccaagctcaaggccttcctggcctcccctgagtacgtgaacctccccatcaatggcaacgggaaacagtgagggttggggggactctgagcgggaggcagagtttgccttcctttctccaggaccaataaaatttctaagagagcta

SEQ ID NO: 71255 - DNA, 961 bp, Homo sapiens
  misc_feature (30)..(32): n is a, c, g, or t
  misc_feature (35)..(36): n is a, c, g, or t
  misc_feature (41)..(41): n is a, c, g, or t
  misc_feature (43)..(43): n is a, c, g, or t
aattcgcggccgcgtcgacacggctgacgnnnagnnacgangnggggagtttcgccgccgcagtcttcgccaccatgccgccctacaccgtggtctatttcccagttcgaggccgctgcgcggccctgcgcatgctgctggcagatcagggccagagctggaaggaggaggtggtgaccgtggagacgtggcaggagggctcactcaaagcctcctgcctatacgggcagctccccaagttccaggacggagacctcaccctgtaccagtccaataccatcctgcgtcacctgggccgcacccttgggctctatgggaaggaccagcaggaggcagccctggtggacatggtgaatgacggcgtggaggacctccgctgcaaatacatctccctcatctacaccaactatgaggcgggcaaggatgactatgtgaaggcactgcccgggcaactgaagccttttgagaccctgctgtcccagaaccagggaggcaagaccttcattgtgggagaccagggtgagcatctggccccatgctgttccttcctcgccaccctctgcttccagatggacacaggtgtgagccatttgtttagcaaagcagagcagacctaggggatgggcttaggccctctgcccccaattcctccagcctgctcccgctggctgagtccctggcccccctgccctgcagatctccttcgctgactacaacctgctggacttgctgctgatccatgaggtcctagcccctggctgcctggatgcgttccccctgctctcagcatatgtggggcgcctcagtgcccggcccaagctcaaggccttcctggcctcccctgagtacgtgaacctccccatcaatggcaacgggaaacagtgagggttggggggactctgagcgggaggcagagtttgccttcctttctccaggaccaataaaatttctaagagagcta

SEQ ID NO: 71256 - DNA, 416 bp, Homo sapiens
tgggagggatgagagtaggatgatacatggtggtgtctggcaggaggcgggcaaggatgactatgtgaaggcactgcccgggcaactgaagccttttgagaccctgctgtcccagaaccagggaggcaagaccttcattgtgggagaccagatctccttcgctgactacaacctgctggacttgctgctgatccatgaggtcctagcccctggctgcctggatgcgttccccctgctctcagcatatgtggggcgcctcagtgcccggcccaagctcaaggccttcctggcctcccctgagtacgtgaacctccccatcaatggcaacgggaaacagtgagggttggggggactctgagcgggaggcagagtttgccttcctttctccaggaccaataaaatttctaagagagcta

SEQ ID NO: 71257 - DNA, 464 bp, Homo sapiens
atcagtgtctcgtatgtacagtaccattggtggacaattgatttgataggtcagggaggcatcgtaagactcggtgctaaccaactattaggaggcgggcaaggatgactatgtgaaggcactgcccgggcaactgaagccttttgagaccctgctgtcccagaaccagggaggcaagaccttcattgtgggagaccagatctccttcgctgactacaacctgctggacttgctgctgatccatgaggtcctagcccctggctgcctggatgcgttccccctgctctcagcatatgtggggcgcctcagtgcccggcccaagctcaaggccttcctggcctcccctgagtacgtgaacctccccatcaatggcaacgggaaacagtgagggttggggggactctgagcgggaggcagagtttgccttcctttctccaggaccaataaaatttctaagagagcta

SEQ ID NO: 71258 - DNA, 663 bp, Homo sapiens
  misc_feature (30)..(32): n is a, c, g, or t
  misc_feature (35)..(36): n is a, c, g, or t
  misc_feature (41)..(41): n is a, c, g, or t
  misc_feature (43)..(43): n is a, c, g, or t
aattcgcggccgcgtcgacacggctgacgnnnagnnacgangnggggagtttcgccgccgcagtcttcgccaccatgccgccctacaccgtggtctatttcccagttcgaggccgctgcgcggccctgcgcatgctgctggcagatcagggccagagctggaaggaggaggtggtgaccgtggagacgtggcaggagggctcactcaaagcctcctgcctatacgggcagctccccaagttccaggacggagacctcaccctgtaccagtccaataccatcctgcgtcacctgggccgcacccttgggctctatgggaaggaccagcaggaggcagccctggtggacatggtgaatgacggcgtggaggacctccgctgcaaatacatctccctcatctacaccaactatgaggcgggcaaggatgactatgtgaaggcactgcccgggcaactgaagccttttgagaccctgctccccctgctctcagcatatgtggggcgcctcagtgcccggcccaagctcaaggccttcctggcctcccctgagtacgtgaacctccccatcaatggcaacgggaaacagtgagggttggggggactctgagcgggaggcagagtttgccttcctttctccaggaccaataaaatttctaagagagcta

SEQ ID NO: 71259 - DNA, 1102 bp, Homo sapiens
  misc_feature (30)..(32): n is a, c, g, or t
  misc_feature (35)..(36): n is a, c, g, or t
  misc_feature (41)..(41): n is a, c, g, or t
  misc_feature (43)..(43): n is a, c, g, or t
aattcgcggccgcgtcgacacggctgacgnnnagnnacgangnggggagtttcgccgccgcagtcttcgccaccatgccgccctacaccgtggtctatttcccagttcgaggccgctgcgcggccctgcgcatgctgctggcagatcagggccagagctggaaggaggaggtggtgaccgtggagacgtggcaggagggctcactcaaagcctcctgcctatacgggcagctccccaagttccaggacggagacctcaccctgtaccagtccaataccatcctgcgtcacctgggccgcacccttggtgagtcttgaacctccaagtccagggcaggcatgggcaagcctctgcccccggagcccttttgtttaaatcagctgccccgcagccctctggagtggaggaaactgagacccactgaggttacgtagtttgcccaaggtcaagcctgggtgcctgcaatccttgccctgtgccaggctgcctcccaggtgtcaggtgagctctgagcacctgctgtgtggcagtctctcatccttccacgcacatcctcttcccctcctcccaggctggggctcacagacagccccctggttggcccatccccagtgactgtgtgttgatcaggcgcccagtcacgcggcctgctcccctccacccaaccccagggctctatgggaaggaccagcaggaggcagccctggtggacatggtgaatgacggcgtggaggacctccgctgcaaatacatctccctcatctacaccaactatgaggcgggcaaggatgactatgtgaaggcactgcccgggcaactgaagccttttgagaccctgctgtcccagaaccagggaggcaagaccttcattgtgggagaccagatctccttcgctgactacaacctgctggacttgctgctgatccatgaggtcctagcccctggctgcctggatgcgttccccctgctctcagcatatgtggggcgcctcagtgcccggcccaagctcaaggccttcctggcctcccctgagtacgtgaacctccccatcaatggcaacgggaaacagtgaggttaaggctccaaagcgatcgtctagatc

SEQ ID NO: 71260 - DNA, 598 bp, Homo sapiens
  misc_feature (30)..(32): n is a, c, g, or t
  misc_feature (35)..(36): n is a, c, g, or t
  misc_feature (41)..(41): n is a, c, g, or t
  misc_feature (43)..(43): n is a, c, g, or t
aattcgcggccgcgtcgacacggctgacgnnnagnnacgangnggggagtttcgccgccgcagtcttcgccaccatgccgccctacaccgtggtctatttcccagttcgaggccgctgcgcggccctgcgcatgctgctggcagatcagggccagagctggaaggaggaggtggtgaccgtggagacgtggcaggagggctcactcaaagcctcctgcctatacgggcagctccccaagttccaggacggagacctcaccctgtaccagtccaataccatcctgcgtcacctgggccgcacccttgggctctatgggaaggaccagcaggaggcagccctggtggacatggtgaatgacggcgtggaggacctccgctgcaaatacatctccctcatctacaccaactatccccctgctctcagcatatgtggggcgcctcagtgcccggcccaagctcaaggccttcctggcctcccctgagtacgtgaacctccccatcaatggcaacgggaaacagtgagggttggggggactctgagcgggaggcagagtttgccttcctttctccaggaccaataaaatttctaagagagcta

SEQ ID NO: 71261 - DNA, 511 bp, Homo sapiens
  misc_feature (30)..(32): n is a, c, g, or t
  misc_feature (35)..(36): n is a, c, g, or t
  misc_feature (41)..(41): n is a, c, g, or t
  misc_feature (43)..(43): n is a, c, g, or t
aattcgcggccgcgtcgacacggctgacgnnnagnnacgangnggggagtttcgccgccgcagtcttcgccaccatgccgccctacaccgtggtctatttcccagttcgaggccgctgcgcggccctgcgcatgctgctggcagatcagggccagagctggaaggaggaggtggtgaccgtggagacgtggcaggagggctcactcaaagcctcctgcctatacgggcagctccccaagttccaggacggagacctcaccctgtaccagtccaataccatcctgcgtcacctgggccgcacccttgggctctatgggaaggaccagcaggaggcagccctggtggacatggtgaatgacggcgtggaggacctccgctgcaaatacatctccctcatctacaccaactataggcggaaaggatgatttgtaaggacctccccgaaacctaagccttttagaccctcttcccgacccgggggaaggcctattggggggccagttctcttggt

SEQ ID NO: 71262 - DNA, 594 bp, Homo sapiens
tgggagggatgagagtaggatgatacatggtggtgtctggcaggaggcgggcaaggatgactatgtgaaggcactgcccgggcaactgaagccttttgagaccctgctgtcccagaaccagggaggcaagaccttcattgtgggagaccagggtgagcatctggccccatgctgttccttcctcgccaccctctgcttccagatggacacaggtgtgagccatttgtttagcaaagcagagcagacctaggggatgggcttaggccctctgcccccaattcctccagcctgctcccgctggctgagtccctggcccccctgccctgcagatctccttcgctgactacaacctgctggacttgctgctgatccatgaggtcctagcccctggctgcctggatgcgttccccctgctctcagcatatgtggggcgcctcagtgcccggcccaagctcaaggccttcctggcctcccctgagtacgtgaacctccccatcaatggcaacgggaaacagtgagggttggggggactctgagcgggaggcagagtttgccttcctttctccaggaccaataaaatttctaagagagcta

SEQ ID NO: 71263 - DNA, 501 bp, Homo sapiens
  misc_feature (30)..(32): n is a, c, g, or t
  misc_feature (35)..(36): n is a, c, g, or t
  misc_feature (41)..(41): n is a, c, g, or t
  misc_feature (43)..(43): n is a, c, g, or t
aattcgcggccgcgtcgacacggctgacgnnnagnnacgangnggggagtttcgccgccgcagtcttcgccaccatgccgccctacaccgtggtctatttcccagttcgaggccgctgcgcggccctgcgcatgctgctggcagatcagggccagagctggaaggaggaggtggtgaccgtggagacgtggcaggagggctcactcaaagcctcctgcctatacgggcagctccccaagttccaggacggagacctcaccctgtaccagtccaataccatcctgcgtcacctgggccgcacccttggttctatgggaaggaccagcaggagccacagggtgttcacatgctggacgttggcatgcagcacccacgctccagatagaactccctcatgtacactatagaggatccgcgcacggatagctacctgatgccttcttggcccttccgtcgcctcaggattcgctggagtgtaggtagacacaagggaaatctctt

SEQ ID NO: 71264 - DNA, 445 bp, Homo sapiens
cttccagatggacacaggtgtgagccatttgtttagcaaagcagagcagacctaggggatgggcttaggccctctgcccccaattcctccagcctgctcccgctggctgagtccctggcccccctgccctgcagatctccttcgctgactacaacctgctggacttgctgctgatccatgaggtcctagcccctggctgcctggatgcgttccccctgctctcagcatatgtggggcgcctcagtgcccggcccaagctcaaggccttcctggcctcccctgagtacgtgaacctccccatcaatggcaacgggaaacagtgagggttggggggactctgagcgggaggcagagtttgccttcctttctccaggaccaataaaatttctaagagagctaactatgagcactgtgtttcctgggacggggcttaggggttctcagc

SEQ ID NO: 71265 - DNA, 569 bp, Homo sapiens
cgtagtatatactagagttgaaaatcatttctaacaaaaattacattgtgtctctggagaggtaatcagtgatttgcatgaaaacttaatagtacatacattgccttaaaaagtgctactttaatcttctatcatttaagaaattcctgtgactttatgtggatcatcaatacaagcaattgtagactatattctattatacatattctagaatcagcaatgtatttatttgtttggtgtttacgtaagtcttagtgtgttttataaataataggagggtttgtttaaagtgggcttttgaagatacagtgtgactttaaaagaatggtcttagaaaacttataaatagcctaaatatgtactgaagaacatttcataatcacaaaaaaagaaataatatatctcatgaattattaagaatttgttttttaaataaagtcctctttttgaaaaggtattaagaagaggaattagacaaaacttgtttgaatatggttgtaattgcagtttactgagttatatataaaaaagcccaattagtttaaacaaatacagtatctgggtttatg

SEQ ID NO: 71266 - DNA, 532 bp, Homo sapiens
ggtttcactgtgttagccgggctggtctcgatctcctgacctcgtgatccgcccgcctcggcctcccaaagtgctgggattacaggtgtgggccatcgcgcccggccactcccatagtttttaattgataacacactttgattttctaaataagcagtcatgacatctacacatgagtttttctctttgctaaaatgtaagcctcttaatttttatccttttcctgttgcattggttaggattgccaggaatattgtaataacagcacttgttcctttttattttgcagtgagaggttagaagcatttctattaaatgttatgtagttcacatcaaaattaagatattgcctctcctatttttttttttatgttaggcttcctcaatcgggttctactttcttatttaatgtaggaaagtctaagttactttaaaattttcaaattatttaaacctatttgtgttcctttaaatccgactgtacataatgtattaaatagttcactactggaaaaaacaaaaaacaaaaaag

SEQ ID NO: 71267 - DNA, 931 bp, Homo sapiens
ggaagtttagatgtattacatatagttggtattatagcttatatattacatatgcctataagtattggttgaataaatgaatgaatgaatgaattcagagagtccatgtgtttagaagcaggccacacagcatctcaaggtagaaaaacctctggatcaacaggatggcaaatctgtggtaaccatgcctgtgttcccactcctgcacccagggcagacatcactaatcaatcccagcattgtttccaatgagcagcactcagagtccttgctccccgctgaagatctgtatctagagaggagcatgccatggtccctggcaacacccctgatctcagcccttccctgtaacttcccacagcctcaatcctggtcctctggatgctccaaggctcccaggcagctctctacatccagaagattccagagcagcctcaaaagaaccaggaccttctcctgtcagtccagggtgtcccagacaccttccaggacttcaactggtacctgggggaggagacgtacggaggcacgaggctatttacctacatccctgggatacaacggcctcagagggatggcagtgccatgggacagcgagacatcgtgggcttccccaatggttccatgctgctgcgccgcgcccagcctacagacagtggcacctaccaagtagccattaccatcaactctgaatggactatgaaggccaagactgaggtccaggtagctggtaagtgttagggtctggggatgaggtgaggaagctaatgagccctgagcagctaccatgcaccaggtgctgtgcaaacaccatttcatttggtcctctcatttattcacttgacacatattgagcatctactgtgtaccaatccccagagatagtctttaaccctcacatgcattaactaataaaatatctatgaaatgc

SEQ ID NO: 71268 - DNA, 2080 bp, Homo sapiens
ggaagtttagatgtattacatatagttggtattatagcttatatattacatatgcctataagtattggttgaataaatgaatgaatgaatgaattcagagagtccatgtgtttagaagcaggccacacagcatctcaaggtagaaaaacctctggatcaacaggatggcaaatctgtggtaaccatgcctgtgttcccactcctgcacccagggcagacatcactaatcaatcccagcattgtttccaatgagcagcactcagagtccttgctccccgctgaagatctgtatctagagaggagcatgccatggtccctggcaacacccctgatctcagcccttccctgtaacttcccacagcctcaatcctggtcctctggatgctccaaggctcccaggcagctctctacatccagaagattccagagcagcctcaaaagaaccaggaccttctcctgtcagtccagggtgtcccagacaccttccaggacttcaactggtacctgggggaggagacgtacggaggcacgaggctatttacctacatccctgggatacaacggcctcagagggatggcagtgccatgggacagcgagacatcgtgggcttccccaatggttccatgctgctgcgccgcgcccagcctacagacagtggcacctaccaagtagccattaccatcaactctgaatggactatgaaggccaagactgaggtccaggtagctgaaaagaataaggagctgcccagtacacacctgcccaccaacgctgggatcctggcggccaccatcattggatctcttgctgccggggcccttctcatcagctgcattgcctatctcctggtgacaaggaactggaggggccagagccacagactgcctgctccgaggggccagggatctctgtccatcttgtgctcggctgtatccccagtgccttcagtgacgcccagcacatggatggcgaccacagagaagccagaattgggccctgctcatgatgctggtgacaacaacatctatgaagtgatgccctctccagtcctcctggtgtcccccatcagtgacacaaggtccataaacccagcccggcccctgcccacacccccacacctgcaggcggagccagagaaccaccagtaccgcaggacctgctaaaccccgaccctgccccctactgccagctggtgccaacttcctgatgggtcctgggccaggccagccagggagaagacaaggccccagccctcctctgggagcctcacacctgagaccagcaggacaaggccattgggggctgtggggccgatgaggtggactcagccaaagactcagcagcacatggggcaggtgtcctggcagggggacaggagactgtaacaggcccaggtccttgtgcagcccgtgaatgcacgcccgccttcggtctgttccttcaagcaagctggcctgggccatgtgcctgtgaaaggcaggctctggcccctttccatgccaaagtcccccaagatctggatatctggggacaagatggtggcctcaggcctgcctcccaggcagttggctgggctcccaactgtctgtcctcaatgccctaccccaactccactagtgaccctcagagtcttctccccttaggacaaggcagacaccccaccatgcgggcctcaggtggcagagaggcccagcctcacaggcctgtggccccacacaccagtcccagcaaggtgaccacggctgctggaccccttccctgttcaggcaggcccagcccctctcagaacctgctgccagctgctggtcttggcccccaccctgaatcttactgagtccctctgggcagcagctcccttctccaccccaccccagcacccgtcccaaatgtggcctcagcttgtcctccccttccccaaactatgcattcattcagcaataaatgagcctttgctgtatgccagacccagttctaggctcttgcagccctggtagaaagcaaaacaaaaactcccgctttcccagagggtcacttggcaggggaaagaatcaggaaataaaataaataatgaacatgcgt

SEQ ID NO: 71269 - DNA, 1303 bp, Homo sapiens
ggaagtttagatgtattacatatagttggtattatagcttatatattacatatgcctataagtattggttgaataaatgaatgaatgaatgaattcagagagtccatgtgtttagaagcaggccacacagcatctcaaggtagaaaaacctctggatcaacaggatggcaaatctgtggtaaccatgcctgtgttcccactcctgcacccagggcagacatcactaatcaatcccagcattgtttccaatgagcagcactcagagtccttgctccccgctgaagatctgtatctagagaggagcatgccatggtccctggcaacacccctgatctcagcccttccctgtaacttcccacagcctcaatcctggtcctctggatgctccaaggctcccaggcagctctctacatccagaagattccagagcagcctcaaaagaaccaggaccttctcctgtcagtccagggtgtcccagacaccttccaggacttcaactggtacctgggggaggagacgtacggaggcacgaggctatttacctacatccctgggatacaacggcctcagagggatggcagtgccatgggacagcgagacatcgtgggcttccccaatggttccatgctgctgcgccgcgcccagcctacagacagtggcacctaccaagtagccattaccatcaactctgaatggactatgaaggccaagactgaggtccaggtagctgattgaaaaatggaggcacgcagtggttatgacttgctgagtaaagaatacgaaccagaatgatgtgacatgggaaaggaggtcatcagggagacctcactcaagaagtgaccttagaggagagaccagaagaagaaaagaataaggagctgcccagtacacacctgcccaccaacgctgggatcctggcggccaccatcattggatctcttgctgccggggcccttctcatcagctgcattgcctatctcctggtgacaaggaactggaggggccagagccacagactgcctgctccgaggggccagggatctctgtccatcttgtgctcggctgtatccccagtgccttcagtgacgcccagcacatggatggcgaccacagagaagccagaattgggccctgctcatgatgctggtgacaacaacatctatgaagtgatgccctctccagtcctcctggtgtcccccatcagtgacacaaggtccataaacccagcccggcccctgcccacacccccacacctgcaggcggagccagagaaccaccagtaccggtatggagctgggagctg

SEQ ID NO: 71270 - DNA, 2214 bp, Homo sapiens
ggaagtttagatgtattacatatagttggtattatagcttatatattacatatgcctataagtattggttgaataaatgaatgaatgaatgaattcagagagtccatgtgtttagaagcaggccacacagcatctcaaggtagaaaaacctctggatcaacaggatggcaaatctgtggtaaccatgcctgtgttcccactcctgcacccagggcagacatcactaatcaatcccagcattgtttccaatgagcagcactcagagtccttgctccccgctgaagatctgtatctagagaggagcatgccatggtccctggcaacacccctgatctcagcccttccctgtaacttcccacagcctcaatcctggtcctctggatgctccaaggctcccaggcagctctctacatccagaagattccagagcagcctcaaaagaaccaggaccttctcctgtcagtccagggtgtcccagacaccttccaggacttcaactggtacctgggggaggagacgtacggaggcacgaggctatttacctacatccctgggatacaacggcctcagagggatggcagtgccatgggacagcgagacatcgtgggcttccccaatggttccatgctgctgcgccgcgcccagcctacagacagtggcacctaccaagtagccattaccatcaactctgaatggactatgaaggccaagactgaggtccaggtagctgattgaaaaatggaggcacgcagtggttatgacttgctgagtaaagaatacgaaccagaatgatgtgacatgggaaaggaggtcatcagggagacctcactcaagaagtgaccttagaggagagaccagaagaagaaaagaataaggagctgcccagtacacacctgcccaccaacgctgggatcctggcggccaccatcattggatctcttgctgccggggcccttctcatcagctgcattgcctatctcctggtgacaaggaactggaggggccagagccacagactgcctgctccgaggggccagggatctctgtccatcttgtgctcggctgtatccccagtgccttcagtgacgcccagcacatggatggcgaccacagagaagccagaattgggccctgctcatgatgctggtgacaacaacatctatgaagtgatgccctctccagtcctcctggtgtcccccatcagtgacacaaggtccataaacccagcccggcccctgcccacacccccacacctgcaggcggagccagagaaccaccagtaccgcaggacctgctaaaccccgaccctgccccctactgccagctggtgccaacttcctgatgggtcctgggccaggccagccagggagaagacaaggccccagccctcctctgggagcctcacacctgagaccagcaggacaaggccattgggggctgtggggccgatgaggtggactcagccaaagactcagcagcacatggggcaggtgtcctggcagggggacaggagactgtaacaggcccaggtccttgtgcagcccgtgaatgcacgcccgccttcggtctgttccttcaagcaagctggcctgggccatgtgcctgtgaaaggcaggctctggcccctttccatgccaaagtcccccaagatctggatatctggggacaagatggtggcctcaggcctgcctcccaggcagttggctgggctcccaactgtctgtcctcaatgccctaccccaactccactagtgaccctcagagtcttctccccttaggacaaggcagacaccccaccatgcgggcctcaggtggcagagaggcccagcctcacaggcctgtggccccacacaccagtcccagcaaggtgaccacggctgctggaccccttccctgttcaggcaggcccagcccctctcagaacctgctgccagctgctggtcttggcccccaccctgaatcttactgagtccctctgggcagcagctcccttctccaccccaccccagcacccgtcccaaatgtggcctcagcttgtcctccccttccccaaactatgcattcattcagcaataaatgagcctttgctgtatgccagacccagttctaggctcttgcagccctggtagaaagcaaaacaaaaactcccgctttcccagagggtcacttggcaggggaaagaatcaggaaataaaataaataatgaacatgcgt

SEQ ID NO: 71271 - DNA, 1902 bp, Homo sapiens
ggaagtttagatgtattacatatagttggtattatagcttatatattacatatgcctataagtattggttgaataaatgaatgaatgaatgaattcagagagtccatgtgtttagaagcaggccacacagcatctcaaggtagaaaaacctctggatcaacaggatggcaaatctgtggtaaccatgcctgtgttcccactcctgcacccagggcagacatcactaatcaatcccagcattgtttccaatgagcagcactcagagtccttgctccccgctgaagatctgtatctagagaggagcatgccatggtccctggcaacacccctgatctcagcccttccctgtaacttcccacagcctcaatcctggtcctctggatgctccaaggctcccaggcagctctctacatccagaagattccagagcagcctcaaaagaaccaggaccttctcctgtcagtccagggtgtcccagacaccttccaggacttcaactggtacctgggggaggagacgtacggaggcacgaggctatttacctacatccctgggatacaacggcctcagagggatggcagtgccatgggacagcgagacatcgtgggcttccccaatggttccatgctgctgcgccgcgcccagcctacagacagtggcacctaccaagtagccattaccatcaactctgaatggactatgaaggccaagactgaggtccaggtagctgaaaagaataaggagctgcccagtacacacctgcccaccaacgctgggatcctggcggccaccatcattggatctcttgctgccggggcccttctcatcagctgcattgcctatctcctggtgacaaggaactggaggggccagagccacagactgcctgctccgaggggccagggatctctgtccatcttgtgctcggctgtatccccagtgccttcagtgacgcccagcacatggatggcgaccacagagaagccagaattgggccctgctcatgatgctggtgacaacaacatctatgaagtgatgccctctccagtcctcctggtgtcccccatcagtgacacaaggtccataaacccagcccggcccctgcccacacccccacacctgcaggcggagccagagaaccaccagtaccgcaggacctgctaaaccccgaccctgccccctactgccagctggtgccaacttcctgatgggtcctgggccaggccagccagggagaagacaaggccccagccctcctctgggagcctcacacctgagaccagcaggacaaggccattgggggctgtggggccgatgaggtggactcagccaaagactcagcagcacatggggcaggtgtcctggcagggggacaggagactgtaacaggcccaggtccttgtgcagcccgtgaatgcacgcccgccttcggtctgttccttcaagcaagctggcctgggccatgtgcctgtgaaaggcaggctctggcccctttccatgccaaagtcccccaagatctggatatctggggacaagatggtggcctcaggcctgcctcccaggcagttggctgggctcccaactgtctgtcctcaatgccctaccccaactccactagtgaccctcagagtcttctccccaccctgaatcttactgagtccctctgggcagcagctcccttctccaccccaccccagcacccgtcccaaatgtggcctcagcttgtcctccccttccccaaactatgcattcattcagcaataaatgagcctttgctgtatgccagacccagttctaggctcttgcagccctggtagaaagcaaaacaaaaactcccgctttcccagagggtcacttggcaggggaaagaatcaggaaataaaataaataatgaacatgcgt

SEQ ID NO: 71272 - DNA, 260 bp, Homo sapiens
aacagttcccctgaccatcttcagcaagagctccaatttcagatagatataaagacttgcttttgagcctaacacgttgtaatgccccctttccctttggtaactgactgtgggatttagggaagatttgaatcccagtgactccactcaggaggctgaagcgggaggatcgcttgagcccaggagttcaaggttacagtgagctatgatcgattgcaccactgcgctccagcctgggtgtcagagcgagatgtggtctc

SEQ ID NO: 71273 - DNA, 369 bp, Homo sapiens
ctgggagcagcagtttatctcacagaacctcatttagttccatgaaattgagattggtttcttgatctatgagattgcaacttggtgtggtattgtggccttccatcattttaatgaggtccttaatgatataatcccactcttggatgagttgaaggtggcatccctcttgctggagagactaggatgaaaggcattttcttttacgtaggtgacctggtttttgttttcatgaattcagaaaggaattagtagacaacaggttctgctatctaattattaccataaagaagggttgctggatacttaggctaaattcgaagtcaacactttcggtataggctctccagcattcacttggcgtacagc

SEQ ID NO: 71274 - DNA, 356 bp, Homo sapiens
actgggtggtttataaacaacagaaatttatttctcacagttctgcaggctgagaagttgaagatcaagattcagtgtctggtgagggcctgtttcctggttcatagatggtgccttcttgctgcatgtctcctggtggaagggccgaagcagctcaccaggaactcttataagggcaaatcccattcatgaggctctgcccttacgacctgattcccttcctaaaagccccaccttctaatatggcacattgatgatcaggttttaacatatgaattttgggggaatacagccattcagaccatagtacctgggcctctgtttaatggatgtgacaccctcttctccccacagtc

SEQ ID NO: 71275 - DNA, 406 bp, Homo sapiens
gctggtcctcgaaactccctgacctcaggtgatccccccactgccttggcctccccaaagtgctgggattacaggcgtgagccaccgcgccccgcctaagagccctgcatttttaacaaaaggaacatgtgattctgaccccatactgaaaaagacatttgaaggacaagtaatttgttttaaaaatacagataatcatactttagctacatcacttcctgtgggatgttttcattttagagactcctttagaattccaagttgtgtaagcagggaacttagaggttgaatattatctgcttgaattccacctaaactactaagtaaaagcaaaacaaagaggacagcctccttaattgattctttgaatcaaggtcctttaaattgtcaccatagtttaggttcc

SEQ ID NO: 71276 - DNA, 253 bp, Homo sapiens
ggatcagggaagccagtcaccggcacagctttcacatgacagcttctaagaagtcagactcacaagaccttctcgtgagtctaagcaggtcaaaactcttttgctggccaatagtgggatcatgccttttagtagccactgcactccagcctgagcactatagtaaaactccatttcaaaaaaaaattataataatttttagtatctactgaatttgaaaatatttgtgacatcaatattactttaaacaaaa

SEQ ID NO: 71277 - DNA, 441 bp, Homo sapiens
agagaggctgttttctgtgtgcactttattacatagcaacacatcctttgtctgtttcagtttccttatgctgctttattacttttttcatagcacatctctccactagacaagtctgtctttatttttttgttgtttgttatgtaaggtccatgagaacatgcagtttgtcttattttatcttcattgcccagaatagtacattgggtagtattaaccattacctcagaatgactgaaccccccaccaagctctctagtgttgttcacagtttccccttgtctagagttccttgttactgtgtttaaatttggctcagcttttttcagcttactgaaatctatcatctctttgaatccttcagtgaacatcctggtctatagtgatcatctgtccccctacatttctggaggaataaaaaaatttacttgtctattatca

SEQ ID NO: 71278 - DNA, 747 bp, Homo sapiens
aaaaataaggccagacgtgggggctcatacctgtcatccaccattctgggaggccaaggcggaggattgcttgagaccagcctgggagacatagggagacctcgtgtctacagcaaataaaactagctgggcatggtgttgggtgtctgtagtcccagctactcaagaggcagaggtgggaggattgctcaagcccagcaagtcaaggctgcagtgagctgtgattatgctactggacctcctaccctggacaagggtagccgtgatcatgctgcgtggtctcctaccctggaccagaaagtgagaccctggctctaaaaaaagaaacacacacacaaatacacaaatatatatatatacacacacacatatacatatgtatacttaacataaaaattcaaggaaaatactgtattttattttacctattttattgtgcttaattatgttcaaaaatcctattctaactgcttgagctaggattgtgccactgtacttcagcctgagagacagagcaaaaccctgtctcagttaaaaaaaaaaaaaaaagccaggtgcggtggctctactaaaaaaaaatacaaaaaattagccggatgtggtggtgggcccctgtagtcccagctactcgggagcctgaggcaggagaatggagtgaacccgggaggcggggcttgcagtgagaccagatagtgccaccgcattccagcttggatgactgagcaagactctgtctcgaaaaaaaaa

SEQ ID NO: 71279 - DNA, 400 bp, Homo sapiens
gtccagttcacaccacctgaaaaactgagggcctcagagaaactgaggcctcagagaaacagagaaactgagggcctcagagaactcctgcaggccctccagctggccactgccagccctgcccaggaccccatatctcaccagttacttgtgtccaccctgtctccttgctccatcctaccccagtttagagagtgagaatgctggctgggaccccaaagacctatctgcaactccccaactccaagaaagggggggctccaacaaggcagggctgtaatgagatggaagatttgggctaatccggagccaaatgagggcctaattcctgctgtaaaaatctgtcagctgctagttaacagttcctctggccctgggcttgagggtgggggtggggggt

SEQ ID NO: 71280 - DNA, 480 bp, Homo sapiens
ctgaaatttgaataaagccaaagtccttaccatgacctgaaagaccttcatgatggggctgctgcgttgctttccaatttcatccacctctatctcccatgttaactactcatcagccccacacttgccatgtctgtccctggacctccccattgcagggtcttcacacttgctattctctgcctggaatggtcattccccagggctttgctaagctacctttttcttaccactcaggcttcccctgctaagtccactcctcagagggactttcaccgatggtccaaagtagttcccctaaccctccctcctcatcactctctttcccatcaccatattttgtttacaacacttatgacacttatgattctatgaaattatattttgtgtttccatatttatgagtgcatagactgagcacaagttgtaacctatcttgttcactgatgtttcccaaaagccaaaaacaagtgggtggca

SEQ ID NO: 71281 - DNA, 510 bp, Homo sapiens
agttgggattgttagaagagctagaaagcacagattgcactcagttggacaaagataaacagaaagcttgcttttttatgaaattggagattaaatgagttgatggaatcaagcctagacagccacataagccagagtggaaaattatagactaaaatgcatctgatactgaagagaatgactctctccaaaagccctcactttttatttgattcaaggagtctttataagctcagcaaaccctaagattttaacaagaaaaacaaaagcctccaaacagcatggctttcatccagcgcttttgtgatttacaaatgaccagatttaaaactttaatcatctcacacctagggattttttggatttgttttagtttgtaaggcatgtccacagacaaaatgactcacaaaaaacagaatcagcctaaacccccaattggccctattcctctgtcaaatcaagacagtcagttttgccctgggatttcagagtgtccccaagtggcccttc

SEQ ID NO: 71282 - DNA, 434 bp, Homo sapiens
acacactggtgaggacacgttacacatttcatatcactgagttcacacacacacacacacacacacacacacacacacacacctatatgagggcagtatgatttccccatgtgataaagaaggaaagggaagctcagacagattagatatattgtctgacattgttcagatagcaagaagcagattcaagatgcaagcatagaccagagaccattatttgagaccatgaggccttttctcaccagttattcattcacttaatattaatcacttaatatgcatttgctgagcacctgtcgatgtcttgtaaatcagtgcaggaaaatcataagatttgaaatcacagcatctaggttcatatctcagcttcatcattaaccagcaaaccagtaaacctccctgtttgcagtttcattatcaataaaatgggttga

SEQ ID NO: 71283 - DNA, 660 bp, Homo sapiens
tttctgtatcagacatatttacatgtccatttttctgtttgccttttaaaagcataccttttacttggagatctgtgttttattacagatcttcaagcggggggtggtgggaaaaaaaaaacctcaaggaagaactggatgggttttgttttggttttcaagtaaagaagaaacctgggccgggtgcagtggctcacgcctgtaatccccgaagtttgtgagaatccttctgtctagtttttatgtgaagatattaccttttccaccgtaggcctcaaagcgctccaaatatccacttgcagattctataaaatgagtgtttgaaaaactgctcaatcaaaagaaacgttcaactccatgacctgaatgcacacaacagtgagaagtttctgagaaagtttcttggtctccccgcactttgggagaccaaggcaggcggatcacgaggtcaagagatcaagatcatcctggctaacatggtgaaaccctgtctctgctaaaaacacaaaaattagcggagcgtggtggtgtcacctgtagtcccagctactcaggaggctgaggcaggagaatcacttgaacccgggaggcagaggttgcagtgagccgagatcacaccactgtactccagcttggcgacagagcaagactccgtcttgg

SEQ ID NO: 71284 - DNA, 632 bp, Homo sapiens
ctagatcttccagtgtttatccagcaccttctgcaggagtccttctactgaaccaccagaccctgtgggctcagggacaaacacaggaacaagcccacaggataatcacacagggtggtcctgggagggcctttgacaaggtgactttgagctcagacctgatgtgtgtagaggaagaaaaaaggcatcactccatgagagagaaggagagggataggagacccgggtgaggcaaggcagagagctagtggctgcaaaagagacaacactgaccaggaggggagggaatggagggctttgtggaggaggtagaattgagccaggccctgaaggaggagctggacagagaggaggtggtgcagaggaaccctgatttgggaggaggtaagccaggtggtaggcccctgagatacccattctccagacaccatctcttacaagggcctttggtacccgagaaaatgcacatgataaactgtcaagcgaaaaatacaagatacgaaacagacagcagctgtggcgttgcgaggggttgaactagaccatccgacctagcatgtagtaggcgctcaataaacaggagatcgatggaatcatgcttttccgatttgcagacaaatggggggatcaga

SEQ ID NO: 71285 - DNA, 389 bp, Homo sapiens
ggcctctacccctcttaaaagctggccatgagttcactgatgctttcttgtctgctctgacagctttatgtcggcaatcaattatgtagagttcccattttcttcttagctcaagcttattcatgaaactaaaatatgggaaagttgaggttatttttatcaaatatgagaaatttcctgatgatttcatattggatttagtttctttctctctcttgttttttgttgaaaagctttgcagatgcagataaacattttgttttctcaacactgccatactgtacttataggatcttttggagttctttaaatgaggaatattagagaagtctaagctggtattatgggatttatagtaattttataatttatagtaattttaagattaa

SEQ ID NO: 71286 - DNA, 3022 bp, Homo sapiens
  misc_feature (542)..(542): n is a, c, g, or t
  misc_feature (789)..(789): n is a, c, g, or t
  misc_feature (1026)..(1026): n is a, c, g, or t
  misc_feature (1088)..(1088): n is a, c, g, or t
  misc_feature (1172)..(1172): n is a, c, g, or t
  misc_feature (2037)..(2037): n is a, c, g, or t
  misc_feature (2460)..(2460): n is a, c, g, or t
  misc_feature (2696)..(2696): n is a, c, g, or t
  misc_feature (2793)..(2793): n is a, c, g, or t
catcagcttcctgagaaacctttactataatggattgtaaaaataactactttaaggacaaatttcttaattgtaaatgctgcaaaatgaaggagcttgtttgggttgatgcaggacccacagcaattaaacaattgctgacgagtatatgtgatccagatgcacaggaggttattcttgcaaccagcctattggaccagatgatcttggtaccacccagatcaataaactggctcatctgatcttgtggcaccccctacccaggaactgactgagcgcaagaagacagctttgactccctatgatttaatctctaaccaatcagcactcctggctcactggcttcctcccacccaccaaattattcatagaaactctgatccctgaatgctcagggagactgatttgagtaataataaaactctggtctcccacacagctggctccatgtgaattactctttctcttgcagttcccctgtcttgatgaattggctctgtctaggcagtgggcagggtgaaccccttgggcggttacagtgntatgggacaaaattaagatttggtggccattgatgttgcctctggccacatctcctctggggagaatgtaaatcaaaaataaaattggaaccctcccccacccccaaccatcttaatggactcccttcttggccagggcactaaaatttaacctgaaagactggtcaggctggccggcgcggtggctcatgcgtgtaatcccagcactttaggagcccgaggcaggtggatcgcctgaggtcagganttcgagaccagcctggccaacatagtgaaactaaaaaatacaaaaaattgtctttactaaaaaatacaaaaaattagctgggcgtggtggtgggcgcctataatcccagctacccaggaagctgaggcaggagaatcacttgaacctgggaggcggaggttgcagtgagctgagattgcgccattgtactccagggcaacaagagcgaaactgtgtctcaaaaaaaaaaaaaaaaanaaagaaagaaagaaagactggtcaggccgtaatgggaactgggagtcagacaggcttcattntacccctccagcattaacatcaacagaccttaagtgtgataacaattacagtctattttctctgaagcttgctacctggaggcntcatctgcatgacaaaaccttggtcttcataacccttatcttaacccagacactcctttctactgataataactctttcaaccaattgctaatcagaatatgtttaaatctaccgatgacctggaagcaccttgcctttgagttgtcccacccttccagatcaaaccaatgtaaattttacatgtgttgactaatgtattatgtctccctaaaacgtacaaaagcaagctgtacccggaccacctggcctcaggacctcctgagtctgtttcactggtgcgtctttaatcttggcaaaataaaatttctaaattgacagagacttgtctctgatattttgagttcacaaaggtgatattgttggccaaatgtgcctcttactatttttttcttttcaatagcttctgcttatgtctgtcactgcttcttttgctactactaattattttaggtgaactcagactagttttacttctggatagtgatgtgaaaactgagattatcagaagtctgctctctgattcttgctttacttggactagaccttttttagacaccatagtattgtacattaatctccactagtataaacttcgtgagtcaggaacacatccccagagccctggcacaaaaagaaatcttgataaatattgtaaaatgaatgaatttactttgtgacatttcaagtttcttgaggacagaaacagtgtcttactccttatgtccctttaaaatttaatatattttaaaatatttgagtaattttttgaataggatatatatatcatatgtatatcatacatggcacaaatatgtgtgtgtgtatatgtatttgtgctatatatatatatttgtgctctctctntatatatatagagagagagcacaaatttgcaaaggtacaaagaggtatacggtgaaacaggaaacaggaatccctgtccaccagccacccagctgagaaaccctcctggagcgaacatcattattcattttttggtgtctctttccagaaatgttctgtgcatgcacaagtatttacatacatatcttcaaatgcaaatggtagtatactttctagatacttttttacattgcatttaacattagaacatgtagagcagcctcgttccttttaaagactgcaaagtattcggaatggacataccacatttaaaaaaaactagtcttctattgatggacctttatattgtttccaaagttttgctgttttggaaaatgctactgtgaatttccttgtttgttgctttacaaattggcagatttntctgtagaataaattcctacaagtgcaattgccggcttaaagggtactatgtgtgttttacgtattgagagatattggcaaattggccttaaagagttctattgactatttatagttctactaatgatttatacagtattttgttaacacggccttttggtctggaaataattacactgtaagacagtacagttgaaatatcaaagaaattaaaacaaagttaggtatgtcataantatatgaaatatgtgtagacactagtccattttatcatttgctaccataaaatatgcacacatctgttatacaaagttaaaatttatcaaaacatanaaacacagaacatgcatagcataatttgtggttgagaaatgtaaacaagtgtaaagatgcagtattattacgcatataataactgtagtccatgctgtactactgtaataattttgtagccacctcttgttgctgttgtgactcactcagtgttgacactcatcaccttcttgtgaacagttcatctcttcagtaaattgtgttttaacattaaaaagtgatctctcgc

SEQ ID NO: 71287 - DNA, 3561 bp, Homo sapiens
ctgggccccagcgaggcggtggggcggggcggggcggggcggggcgcgcagcaggagcgagtggggccgcccgccgggccgcggacactgtcgcccggcgcccaggttcccaacaaggctacgcagaagaacccccttgactgaagcaatggaggggggtccagctgtctgctgccaggatcctcgggcagagctggtagaacgggtggcagccatcgatgtgactcacttggaggaggcagatggtggcccagagcctactagaaacggtgtggaccccccaccacgggccagagctgcctctgtgatccctggcagtacttcaagactgctcccagcccggcctagcctctcagccaggaagctttccctacaggagcggccagcaggaagctatctggaggcgcaggctgggccttatgccacggggcctgccagccacatctccccccgggcctggcggaggcccaccatcgagtcccaccacgtggccatctcagatgcagaggactgcgtgcagctgaaccagtacaagctgcagagtgagattggcaagggtgcctacggtgtggtgaggctggcctacaacgaaagtgaagacagacactatgcaatgaaagtcctttccaaaaagaagttactgaagcagtatggctttccacgtcgccctcccccgagagggtcccaggctgcccagggaggaccagccaagcagctgctgcccctggagcgggtgtaccaggagattgccatcctgaagaagctggaccacgtgaatgtggtcaaactgatcgaggtcctggatgacccagctgaggacaacctctatttggtgtttgacctcctgagaaaggggcccgtcatggaagtgccctgtgacaagcccttctcggaggagcaagctcgcctctacctgcgggacgtcatcctgggcctcgagtacttgcactgccagaagatcgtccacagggacatcaagccatccaacctgctcctgggggatgatgggcacgtgaagatcgccgactttggcgtcagcaaccagtttgaggggaacgacgctcagctgtccagcacggcgggaaccccagcattcatggcccccgaggccatttctgattccggccagagcttcagtgggaaggccttggatgtatgggccactggcgtcacgttgtactgctttgtctatgggaagtgcccattcatcgacgatttcatcctggccctccacaggaagatcaagaatgagcccgtggtgtttcctgaggagccagaaatcagcgaggagctcaaggacctgatcctgaagatgttagacaagaatcccgagacgagaattggggtgccagacatcaagttgcacccttgggtgaccaagaacggggaggagccccttccttcggaggaggagcactgcagcgtggtggaggtgacagaggaggaggttaagaactcagtcaggctcatccccagctggaccacggtgatcctggtgaagtccatgctgaggaagcgttcctttgggaacccgtttgagccccaagcacggagggaagagcgatccatgtctgctccaggaaacctactggtgaaagaagggtttggtgaagggggcaagagcccagagctccccggcgtccaggaagacgaggctgcatcctgagcccctgcatgcacccagggccacccggcagcacactcatcccgcgcctccagaggcccacccctcatgcaacagccgcccccgcaggcagggggctggggactgcagccccactcccgcccctcccccatcgtgctgcatgacctccacgcacgcacgtccagggacagactggaatgtatgtcatttggggtcttgggggcagggctcccacgaggccatcctcctcttcttggccctccttggcctgacccattctgtggggaaaccgggtgcccatggagcctcagaaatgccacccggctggttggcatggcctggggcaggaggcagaggcaggagaccaagatggcaggtggaggccaggcttaccacaacggaagagacctcccgctggggccgggcaggcctggctcagctgccacaggcatatggtggagaggggggtaccctgcccaccttggggtggtggcaccagagctcttgtctattcagacgctggtatgggggctcggacccctcactggggacagggccagtgttggagaattctgattccttttttgttgtcttttacttttgtttttaacctgggggttcggggagaggccctgcttgggaacatctcacgagctttcctacatcttccgtggttcccagcacagcccaagattatttggcagccaagtggatggaactaactttcctggactgtgtttcgcattcggcgttatctggaaagtggactgaacggaatcaagctctgagcagaggcctgaagcggaagcaccacatcgtccctgcccatctcactctctcccttgatgatgcccctagagctgaggctggagaagacaccagggctgactttgaccgagggccatggacgcgacaggcctgtggccctgcgcatgctgaaataactggaacccagcctctcctcctacaccggcctacccatctgggcccaagagctgcactcacactcctacaacgaaggacaaactgtccaggtcggagggatcacgagacacagaacctggaggggtgtgcacgctggcaggtggcctctgcggcaattgcctcaccctgaggacatcagcagtcagcctgctcagagcgggggtgctggagcgcgtgcagacacagctcttccggagcagccttcaccttctctctgggatcagtgtccggctggccgacgtggcatttgctgaccgaatgctcatagaggttgacccccacagggtcacgcaggactcggacactgccctggaaacatggatggacaagggcttttggccacaggtgtgggtgtcctgttggaggagggcttgtttggagaagggaggctggctgggggagaaacccggatcccgctgcatctccgcgcctgtgggtgcatgtcgcgtgctcatctgttgcacacagctcactcgtatgtcctgcactggtacatgcatctgtaatacagtttctacgtctatttaaggctaggagccgaatgtgccccattgtcagtgggtccacgtttctccccggctcctctgggctaaggcagtgtggcccgaggcttaaaaagttactcggtactgtttttaagaacacttttatagagttagtggaaggcaagttaagagccaatcactgatccccaagtgtttcttgagcatctggtctggggggaccactttgatcggacccacccttggaaagctcaggggtaggcccaggtgggatgctcaccctgtcactgagggttttggttggcatcgttgtttttgaatgtagcacaagcgatgagcaaactctataagagtgttttaaaaattaacttcccaggaagtgagttaaaaacaataaaagccctttcttgagttaaaaagaaaaaaaaa

SEQ ID NO: 71288 - DNA, 854 bp, Homo sapiens
ctgggccccagcgaggcggtggggcggggcggggcggggcggggcgcgcagcaggagcgagtggggccgcccgccgggccgcggacactgtcgcccggcgcccaggttcccaacaaggctacgcagaagaacccccttgactgaagcaatggaggggggtccagctgtctgctgccaggatcctcgggcagagctggtagaacgggtggcagccatcgatgtgactcacttggaggaggcagatggtggcccagagcctactagaaacggtgtggaccccccaccacgggccagagctgcctctgtgatccctggcagtacttcaagactgctcccagcccggcctagcctctcagccaggaagctttccctacaggagcggccagcaggaagctatctggaggcgcaggctgggccttatgccacggggcctgccagccacatctccccccgggcctggcggaggcccaccatcgagtcccaccacgtggccatctcagatgcagaggactgcgtgcagctgaaccagtacaagctgcagagtgagattggcaagggtgcctacggtgtggtgaggctggcctacaacgaaagtgaagacagacactatgcaatgaaagtcctttccaaaaagaagttactgaagcagtatggctttccacgtcgccctcccccgagagggtcccaggctgcccagggaggaccagccaagcagctgctgcccctggagcgggtgtaccaggagattgccatcctgaagaagctggaccacgtgaatgtggtcaaactgatcgagggtctggattgaccagttggggacaacctctattgggcctgcagaaccaggccagaat

SEQ ID NO: 71289 - DNA, 2431 bp, Homo sapiens
caagcccttgttgtgaaattcctgcctgctgtccggaactcagtcttcccatccgagggacgaaggtttcgggaagagaggtggacaggaaggggtcctcatcagcggtcccaccctcctctccttccttcgccctctccaggccagaaatcagcgaggagctcaaggacctgatcctgaagatgttagacaagaatcccgagacgagaattggggtgccagacatcaagttgcacccttgggtgaccaagaacggggaggagccccttccttcggaggaggagcactgcagcgtggtggaggtgacagaggaggaggttaagaactcagtcaggctcatccccagctggaccacggtgatcctggtgaagtccatgctgaggaagcgttcctttgggaacccgtttgagccccaagcacggagggaagagcgatccatgtctgctccaggaaacctactggtgaaagaagggtttggtgaagggggcaagagcccagagctccccggcgtccaggaagacgaggctgcatcctgagcccctgcatgcacccagggccacccggcagcacactcatcccgcgcctccagaggcccacccctcatgcaacagccgcccccgcaggcagggggctggggactgcagccccactcccgcccctcccccatcgtgctgcatgacctccacgcacgcacgtccagggacagactggaatgtatgtcatttggggtcttgggggcagggctcccacgaggccatcctcctcttcttggccctccttggcctgacccattctgtggggaaaccgggtgcccatggagcctcagaaatgccacccggctggttggcatggcctggggcaggaggcagaggcaggagaccaagatggcaggtggaggccaggcttaccacaacggaagagacctcccgctggggccgggcaggcctggctcagctgccacaggcatatggtggagaggggggtaccctgcccaccttggggtggtggcaccagagctcttgtctattcagacgctggtatgggggctcggacccctcactggggacagggccagtgttggagaattctgattccttttttgttgtcttttacttttgtttttaacctgggggttcggggagaggccctgcttgggaacatctcacgagctttcctacatcttccgtggttcccagcacagcccaagattatttggcagccaagtggatggaactaactttcctggactgtgtttcgcattcggcgttatctggaaagtggactgaacggaatcaagctctgagcagaggcctgaagcggaagcaccacatcgtccctgcccatctcactctctcccttgatgatgcccctagagctgaggctggagaagacaccagggctgactttgaccgagggccatggacgcgacaggcctgtggccctgcgcatgctgaaataactggaacccagcctctcctcctacaccggcctacccatctgggcccaagagctgcactcacactcctacaacgaaggacaaactgtccaggtcggagggatcacgagacacagaacctggaggggtgtgcacgctggcaggtggcctctgcggcaattgcctcaccctgaggacatcagcagtcagcctgctcagagcgggggtgctggagcgcgtgcagacacagctcttccggagcagccttcaccttctctctgggatcagtgtccggctggccgacgtggcatttgctgaccgaatgctcatagaggttgacccccacagggtcacgcaggactcggacactgccctggaaacatggatggacaagggcttttggccacaggtgtgggtgtcctgttggaggagggcttgtttggagaagggaggctggctgggggagaaacccggatcccgctgcatctccgcgcctgtgggtgcatgtcgcgtgctcatctgttgcacacagctcactcgtatgtcctgcactggtacatgcatctgtaatacagtttctacgtctatttaaggctaggagccgaatgtgccccattgtcagtgggtccacgtttctccccggctcctctgggctaaggcagtgtggcccgaggcttaaaaagttactcggtactgtttttaagaacacttttatagagttagtggaaggcaagttaagagccaatcactgatccccaagtgtttcttgagcatctggtctggggggaccactttgatcggacccacccttggaaagctcaggggtaggcccaggtgggatgctcaccctgtcactgagggttttggttggcatcgttgtttttgaatgtagcacaagcgatgagcaaactctataagagtgttttaaaaattaacttcccaggaagtgagttaaaaacaataaaagccctttcttgagttaaaaagaaaaaaaaa

SEQ ID NO: 71290 - DNA, 3336 bp, Homo sapiens
ctgggccccagcgaggcggtggggcggggcggggcggggcggggcgcgcagcaggagcgagtggggccgcccgccgggccgcggacactgtcgcccggcgcccaggttcccaacaaggctacgcagaagaacccccttgactgaagcaatggaggggggtccagctgtctgctgccaggatcctcgggcagagctggtagaacgggtggcagccatcgatgtgactcacttggaggaggcagatggtggcccagagcctactagaaacggtgtggaccccccaccacgggccagagctgcctctgtgatccctggcagtacttcaagactgctcccagcccggcctagcctctcagccaggaagctttccctacaggagcggccagcaggaagctatctggaggcgcaggctgggccttatgccacggggcctgccagccacatctccccccgggcctggcggaggcccaccatcgagtcccaccacgtggccatctcagatgcagaggactgcgtgcagctgaaccagtacaagctgcagagtgagattggcaagggtgcctacggtgtggtgaggctggcctacaacgaaagtgaagacagacactatgcaatgaaagtcctttccaaaaagaagttactgaagcagtatggctttccacgtcgccctcccccgagagggtcccaggctgcccagggaggaccagccaagcagctgctgcccctggagcgggtgtaccaggagattgccatcctgaagaagctggaccacgtgaatgtggtcaaactgatcgaggtcctggatgacccagctgaggacaacctctatttggtgtttgacctcctgagaaaggggcccgtcatggaagtgccctgtgacaagcccttctcggaggagcaagctcgcctctacctgcgggacgtcatcctgggcctcgagtacttgcactgccagaagatcgtccacagggacatcaagccatccaacctgctcctgggggatgatgggcacgtgaagatcgccgactttggcgtcagcaaccagtttgaggggaacgacgctcagctgtccagcacggcgggaaccccagcattcatggcccccgaggccatttctgattccggccagagcttcagtgggaaggccttggatgtatgggccactggcgtcacgttgtactgctttgtctatgggaagtgcccattcatcgacgatttcatcctggccctccacaggaagatcaagaatgagcccgtggtgtttcctgaggagccagaaatcagcgaggagctcaaggacctgatcctgaagatgttagacaagaatcccgagacgagaattggggtgccagacatcaagttgcacccttgggtgaccaagaacggggaggagccccttccttcggaggaggagcactgcagcgtggtggaggtgacagaggaggaggttaagaactcagtcaggctcatccccagctggaccacggtgatcctggtgaagtccatgctgaggaagcgttcctttgggaacccgtttgagccccaagcacggagggaagagcgatccatgtctgctccaggaaacctactggtgaaagaagggtttggtgaagggggcaagagcccagagctccccggcgtccaggaagacgaggctgcatcctgagcccctgcatgcacccagggccacccggcagcacactcatcccgcgcctccagaggcccacccctcatgcaacagccgcccccgcaggcagggggctggggactgcagccccactcccgcccctcccccatcgtgctgcatgacctccacgcacgcacgtccagggacagactggaatgtatgtcatttggggtcttgggggcagggctcccacgaggccatcctcctcttcttggccctccttggcctgacccattctgtggggaaaccgggtgcccatggagcctcagaaatgccacccggctggttggcatggcctggggcaggaggcagaggcaggagaccaagatggcaggtggaggccaggcttaccacaacggaagagacctcccgctggggccgggcaggcctggctcagctgccacaggcatatggtggagaggggggtaccctgcccaccttggggtggtggcaccagagctcttgtctattcagacgctggtatgggggctcggacccctcactggggacagggccagtgttggagaattctgattccttttttgttgtcttttacttttgtttttaacctgggggttcggggagaggccctgcttgggaacatctcacgagctttcctacatcttccgtggttcccagcacagcccaagattatttggcagccaagtggatggaactaactttcctggactgtgtttcgcattcggcgttatctggaaagtggactgaacggaatcaagctctgagcagaggcctgaagcggaagcaccacatcgtccctgcccatctcactctctcccttgatgatgcccctagagctgaggctggagaagacaccagggctgactttgaccgagggccatggacgcgacaggcctgtggccctgcgcatgctgaaataactggaacccagcctctcctcctacaccggcctacccatctgggcccaagagctgcactcacactcctacaacgaaggacaaactgtccaggtcggagggatcacgagacacagaacctggaggggtgtgcacgctggcaggtggcctctgcggcaattgcctcaccctgaggacatcagcagtcagcctgctcagagcgggggtgctggagcgcgtgcagacacagctcttccggagcagccttcaccttctctctgggatcagtgtccggctggccgacgtggcatttgctgaccgaatgctcatagaggttgacccccacagggtcacgcaggactcggacactgccctggaaacatggatggacaagggcttttggccacaggtgtgggtgtcctgttggaggagggcttgtttggagaagggaggctggctgggggagaaacccggatcccgctgcatctccgcgcctgtgggtgcatgtcgcgtgctcatctgttgcacacagctcactcgtatgtcctgcactggtacatgcatctgtaatacagtttctacgtctatttaaggctaggagccgaatgtgccccattgtcagtgggtccacgtttctccccggctcctctgggctaaggcagtgtggcccgaggcttaaaaagttactcggtacttgttttaaaaattaacttcccaggaagtgagttaaaaacaataaaagccctttcttgagttaaaaagaaaaaaaaa

SEQ ID NO: 71291 - DNA, 419 bp, Homo sapiens
ggcaccagcagagaggagcagagacgcccagaacacactgtcccccaatgccagccccaagcggggccagctcagggtgcggtgggcagagccatcctgcagctctgagatccgcaaggtggaggtgggagtagcgccaggctccactgtgttggagcttgccccgtttgagcccaatttgattccggagccatgacctgcagcacattggcgaccagaagacacccaaagctctttgtcctgggaagagtttgctgcatcttccagtttcagtaatcaaagaagcaaagttccctgcagttcttcaaggaaccttgagaattcagaaggtcttggggtggctgcatccatcctgcagacaaatgccaatcagcagaggggccattcccagggacacatgtctggctgacttgggcctt

SEQ ID NO: 71292 - DNA, 376 bp, Homo sapiens
tttggagacatggattcacgttgttgctcaggctaaagtacagtgggcatgaacacagcttactgcagcctcaacctccgggactcaaacaagactctaacctgacccttcaagtagcagggacatcaggggcgcccatcacacccagctaatttttttttttttttaaagacagagtctcactatgttgcccaggctggtcttcaactcttgggctcaagaaatcctcctgcattggcctcccaaagtgctgacattagacaatttatgggcctgtgcctggcctataaatggctaacattatgtttataatttttatatcaatgttaatgagagatgggtctattttattgggtgttgatatcaaaggtttgct

SEQ ID NO: 71293 - DNA, 265 bp, Homo sapiens
cctgaggccagtcagcctgtcagcactggcatacctgcagagagctcctaggacagtggtgatcagacaagttgtgcagttctgatggagaggttttcctgagcatttgggtgtcctaattaaatacagccttatttcatgataggagtgactcagggtcaaaggcaatgggaaatgctacagagaacacgactgcaacaccaggaaggctttggaaaggcagaggctagtgttgcagagaaagagcccaggcaggggattgcag

SEQ ID NO: 71294 - DNA, 449 bp, Homo sapiens
aaaaaaaaaaaaaaaaagaaagaaagaaagagcaagggatgtccttaaccagaaaaatgatatttattttttcattttcagcaaacatcatacttaaaggggtaatgcaagcatttattttaagctagtggaactgagtattactactgctactattcaaaattgaactggaagttttaattagaacagtaaaagagggaaaagacatgaaaagtaaatgtactgactgatactacctgacttcaaggcttactgaaaagctaccagacagtgtggtataagccaaagaataaataaatagatcagtggaacagaataaggagtccagaaatagacccacacagacatagtcaattcttttgaaaaaggtgcaaaggcaatccaaaggagaaaagataatattttcaacaaaaggtgctggcacaacaggacatccagaagcaaaaaag

SEQ ID NO: 71295 - DNA, 582 bp, Homo sapiens
gaaaataagtcagactctctcatttggccatattgaagctaatagtctcagaaccactgtgtcataacactgacattttgcttaaagctctgtatcacctttaatggcttaaaatattctagactgtattgagatcatgcaagtagatcaaagaaagagaattacacgcaaaggaagggatagctgtactagggagttcactggtaacagagtcaggggtccacagctctgggctgggtctgtcctgaaaggcagtctctggatagcaggatgagatggagtgatcactggctttggagtcagacacaatagactgagctatgttgaaggacaatgacaaataacacaatagatagcattcattgaaccctcactatatgccaggccttatgctaagctctttatgtactttatgttatgcaattttaataactaccctgtttttattagtattttatggatgagaaaacacaggtttagaggttatcaaatttgtccatgaccacatgaacttgtaattcccagtaaatatttttgtaaataaatatctgaaagtgtccaggcacggtggctcatgcctgc

SEQ ID NO: 71296 - DNA, 1418 bp, Homo sapiens
tcttgccttggatctgagaaaggctaccagtgtgaatgtccccggggcctggtgctgtctgaggataaccacacttgccaagtccctgtgttgtgcaaatcaaatgccattgaagtgaacatccccagggagctggttggtggcctggagctcttcctgaccaacacctcctgccgaggagtgtccaacggcacccatgtcaacatcctcttctctctcaagacatgtggtacagtggtcgatgtggtgaatgacaagattgtggccagcaacctcgtgacaggtctacccaagcagaccccggggagcagcggggacttcatcatccgaaccagcaagctgctgatcccggtgacctgcgagtttccacgcctgtacaccatttctgaaggatacgttcccaaccttcgaaactccccactggaaatcatgagccgaaatcatgggatcttcccattcactctggagatcttcaaggacaatgagtttgaagagccttaccgggaagctctgcccaccctcaagcttcgtgactccctctactttggcattgagcccgtggtgcacgtgagcggcttggaaagcttggtggagagctgctttgccacccccacctccaagatcgacgagctgtgtttcagatgactcggtaaagcagtacacatcccgggatcacctagcaaagcacttccaggtccctgtcttcaagtttgtgggcaaagaccacaaggaagtgtttctgcactgccgggttcttgtctgtggagtgttggacgagcgttcccgctgtgcccagggttgccaccggcgaatgcgtcgtggggcaggaggagaggactcagccggtctacagggccagacgctaacaggcggcccgatccgcatcgactgggaggactagttcgtagccatacctcgagtccctgcattggacggctctgctctttggagcttctccccccaccgccctctaagaacatctgccaacagctgggttcagacttcacactgtgagttcagactcccagcaccaactcactctgattctggtccattcagtgggcacaggtcacagcactgctgaacaatgtggcctgggtggggtttcatctttctagggttgaaaactaaactgtccacccagaaagacactcaccccatttccctcatttctttcctacacttaaatacctcgtgtatggtgcaatcagaccacaaaatcagaagctgggtataatatttcaagttacaaaccctagaaaaattaaacagttactgaaattatgacttaaatacccaatgactccttaaatatgtaaattatagttataccttgaaatttcaattcaaatgcagactaattatagggaatttggaagtgtatcaataaaacagtatataattttaaaagtagtatt

SEQ ID NO: 71297 - DNA, 1447 bp, Homo sapiens
tcttgccttggatctgagaaaggctaccagtgtgaatgtccccggggcctggtgctgtctgaggataaccacacttgccaagtccctgtgttgtgcaaatcaaatgccattgaagtgaacatccccagggagctggttggtggcctggagctcttcctgaccaacacctcctgccgaggagtgtccaacggcacccatgtcaacatcctcttctctctcaagacatgtggtacagtggtcgatgtggtgaatgacaagattgtggccagcaacctcgtgacaggtctacccaagcagaccccggggagcagcggggacttcatcatccgaaccagcaagctgctgatcccggtgacctgcgagtttccacgcctgtacaccatttctgaaggatacgttcccaaccttcgaaactccccactggaaatcatgagccgaaatcatgggatcttcccattcactctggagatcttcaaggacaatgagtttgaagagccttaccgggaagctctgcccaccctcaagcttcgtgactccctctactttggcattgagcccgtggtgcacgtgagcggcttggaaagcttggtggagagctgctttgccacccccacctccaagatcgacgaggtcctgaaatactacctcatccgggatggctgtgtttcagatgactcggtaaagcagtacacatcccgggatcacctagcaaagcacttccaggtccctgtcttcaagtttgtgggcaaagaccacaaggaagtgtttctgcactgccgggttcttgtctgtggagtgttggacgagcgttcccgctgtgcccagggttgccaccggcgaatgcgtcgtggggcaggaggagaggactcagccggtctacagggccagacgctaacaggcggcccgatccgcatcgactgggaggactagttcgtagccatacctcgagtccctgcattggacggctctgctctttggagcttctccccccaccgccctctaagaacatctgccaacagctgggttcagacttcacactgtgagttcagactcccagcaccaactcactctgattctggtccattcagtgggcacaggtcacagcactgctgaacaatgtggcctgggtggggtttcatctttctagggttgaaaactaaactgtccacccagaaagacactcaccccatttccctcatttctttcctacacttaaatacctcgtgtatggtgcaatcagaccacaaaatcagaagctgggtataatatttcaagttacaaaccctagaaaaattaaacagttactgaaattatgacttaaatacccaatgactccttaaatatgtaaattatagttataccttgaaatttcaattcaaatgcagactaattatagggaatttggaagtgtatcaataaaacagtatataattttaaaagtagtatt

SEQ ID NO: 71298 - DNA, 1245 bp, Homo sapiens
  misc_feature (180)..(180): n is a, c, g, or t
aggccaacattcttttccacactgcttgtaagtatatgcatgtccatcccagctataccatggttacagaacaactgcctaacaatgatggctgatccctgattgcccctcaatcaggcaggaagctcaggcagttaccctacagaaaggtgcttgcagaaaacactggttatttgaacnagacaagtgcatgggagccaatgctatccccagaccttggtgtgaagaaggaagatgctcaagttagtagatgttgcttcacaaaggtctcttctgttccagctccatgcaggagttatgaatgtgggtttttttaatcactcatgtgacttaaatgcaaactttgccacattttttattaaatgtgtacatttgggcaagttccttaacctctctgtttccttatctgtaaaatggggatgataaactctacttgtggatgtccttgttaagattacatgacttaatgtttaggaacatttagtattgtgtcttgtaagtgccccacaagtggcagcagttattgtttttattaacagtcgtgatcatctcttcaggaagtgtttctgcactgccgggttcttgtctgtggagtgttggacgagcgttcccgctgtgcccagggttgccaccggcgaatgcgtcgtggggcaggaggagaggactcagccggtctacagggccagacgctaacaggcggcccgatccgcatcgactgggaggactagttcgtagccatacctcgagtccctgcattggacggctctgctctttggagcttctccccccaccgccctctaagaacatctgccaacagctgggttcagacttcacactgtgagttcagactcccagcaccaactcactctgattctggtccattcagtgggcacaggtcacagcactgctgaacaatgtggcctgggtggggtttcatctttctagggttgaaaactaaactgtccacccagaaagacactcaccccatttccctcatttctttcctacacttaaatacctcgtgtatggtgcaatcagaccacaaaatcagaagctgggtataatatttcaagttacaaaccctagaaaaattaaacagttactgaaattatgacttaaatacccaatgactccttaaatatgtaaattatagttataccttgaaatttcaattcaaatgcagactaattatagggaatttggaagtgtatcaataaaacagtatataattttaaaagtagtatt

SEQ ID NO: 71299 - DNA, 1396 bp, Homo sapiens
tcttgccttggatctgagaaaggctaccagtgtgaatgtccccggggcctggtgctgtctgaggataaccacacttgccaagtccctgtgttgtgcaaatcaaatgccattgaagtgaacatccccagggagctggttggtggcctggagctcttcctgaccaacacctcctgccgaggagtgtccaacggcacccatgtcaacatcctcttctctctcaagacatgtggtacagtggtcgatgtggtgaatgacaagattgtggccagcaacctcgtgacaggtctacccaagcagaccccggggagcagcggggacttcatcatccgaaccagcaagctgctgatcccggtgacctgcgagtttccacgcctgtacaccatttctgaaggatacgttcccaaccttcgaaactccccactggaaatcatgagccgaaatcatgggatcttcccattcactctggagatcttcaaggacaatgagtttgaagagccttaccgggaagctctgcccaccctcaagcttcgtgactccctctactttggcattgagcccgtggtgcacgtgagcggcttggaaagcttggtggagagctgctttgccacccccacctccaagatcgacgagctgtgtttcagatgactcggtaaagcagtacacatcccgggatcacctagcaaagcacttccaggtccctgtcttcaagtttgtgggcaaagaccacaaggaagtgtttctgcactgccgggttcttgtctgtggagtgttggacgagcgttcccgctgtgcccagggttgccaccggcgaatgcgtcgtggggcaggaggagaggactcagccggtctacagggccagacgctaacaggcggcccgatccgcatcgactgggaggactagttcgtagccatacctcgagtccctgcattggacggctctgctctttggagcttctccccccaccgccctctaagaacatctgccaacagctgggttcagacttcacactgtgagttcagactcccagcaccaactcactctgattctggtccattcagtgggcacaggtcacagcactgctgaacaatgtggcctgggtggggtttcatctttctagggttgaaaactaaactgtccacccagaaagacactcaccccatttccctcatttctttcctacacttaaatacctcgtgtatggtgcaatcagaccacaaaatcagaagctgggtataatatttcaagttacaaaccctagaaaaattaaacagttactgaaattatgacttaaatacccaatgactccttaaatatgtaaattatagttatggggggaaggggggggggcagggggggacgggagtggagggaagttggaaggggggggggaaacag

SEQ ID NO: 71300 - DNA, 1050 bp, Homo sapiens
tcttgccttggatctgagaaaggctaccagtgtgaatgtccccggggcctggtgctgtctgaggataaccacacttgccaagtccctgtgttgtgcaaatcaaatgccattgaagtgaacatccccagggagctggttggtggcctggagctcttcctgaccaacacctcctgccgaggagtgtccaacggcacccatgtcaacatcctcttctctctcaagacatgtggtacagtggtcgatgtggtgaatgacaagattgtggccagcaacctcgtgacaggtctacccaagcagaccccggggagcagcggggacttcatcatccgaaccagcaagctgctgatcccggtgacctgcgagtttccacgcctgtacaccatttctgaaggatacgttcccaaccttcgaaactccccactggaaatcatgagccgaaatcatgggatcttcccattcactctggagatcttcaaggacaatgagtttgaagagccttaccgggaagctctgcccaccctcaagcttcgtgactccctctactttggcattgagcccgtggtgcacgtgagcggcttggaaagcttggtggagagctgctttgccacccccacctccaagatcgacgagctgtgtttcagatgactcggtaaagcagtacacatcccgggatcacctagcaaagcacttccaggtccctgtcttcaagtttgtgggcaaagaccacaaggaagtgtttctgcactgccgggttcttgtctgtggagtgttggacgagcgttcccgctgtgcccagggttgccaccggcgaatgcgtcgtggggcaggaggagaggactcagccggtctacagggccagacgctaacaggcggcccgatccgcatcgactgggaggactagttcgtagccatacctcgagtccctgcattggacggctctgctctttggagcttctccccccaccgccctctaagaacatctgccaacagctgggttcagacttcacactaaataatcacttccatcaaggataactctaggattgctct

SEQ ID NO: 71301 - DNA, 785 bp, Homo sapiens
catatttgaaccaaatgttacattctagccattgatatcatctaagtaaaactaacattggctctaaaaggtgccgaataagaatcaaagtgtagaatattcttacttcctcaggaaaagttactgaatatatagtcatgaaatattcaaaagtaaagttctaagaatgattctgaggcttgcctagaagcagaattctaagatgatggctcttttcattaaggagtgtttattttaatttcttcaccccactgttggttttggggggtttgtttttgttttgtctaattacaaatccctctcctttccctgaagggcatgacgaagctttgttcatctctgtacctccagctgccagctcaatgcctagcatattgtggacattcaatatatatcaacttactgatgatcattagcataaataaaatttttaaatatacaattttttctttggtgagatccgatgtgttctaataataaaagtgagaatctttcaagtcagctagagtgagtaaatgttgttttgcatcaaaaataaataaataattaaattacaaggcacaggaaaccaagtaaaagtattgcttgtggtgctggtggaaaggaaaggacttccagaccaaggtacagtattttgattactggagaagagagaagaaacctgttagtgctttggccagtattgggtcaaatgaaatgcctgtggcccagtgtgaatcaccagagtatcttgctaaaatgctgattctaactcagtgggtatagggcagggcccaggatccctt

SEQ ID NO: 71302 - DNA, 468 bp, Homo sapiens
aggtcacacagccagcagggggcagcgctggcacgcaggctcagcaggttcaccagcactctgcctgccgccttgcgcctccctaccgcatcttctccaacccatgctgctgcagatgaggacacaggtcttgaacactcacatgcttttgagaggccacatagcaagaaaacagcagagtcagggtcacaactggtctgactcctgtcccagggctcccttctttaatcctatcattgtttctgctcagcctgtctgtgtggcggacttggagaagcctgtgaggcccaccaggatgtaagctccatgtctgtcctcatccatcctgcatgtccggtgcctgaatcagtttctgcacagtgaatgcagttgaatgaatgaaccaatgagtctctgccatcatgacgcatcctcaaatgggagagctgatgccacctgtggggcgagggatataaggtcggagatgat

SEQ ID NO: 71303 - DNA, 364 bp, Homo sapiens
ccgcccacctcggcctcccaaagtgtgggattacaggcatcagccaccgtgcccggcctgtgttttatttttaattataattcttttcttctgttatagcaatttatggcgttttaaacattcagtaaattaactcataacaaatactgaaggcctttatactaaatacactgcactaggagctagggataaagtcctcagtaatacaaagtcctgccctaatggagcttacttctaatgtagaagacaagaccagtatgtaataaaatgtagtaagtgctgtgaagaaaagcaataacttactgaacttttgccatgttccagatggacactgttctaaacaataaatatgtgtaattattat

SEQ ID NO: 71304 - DNA, 361 bp, Homo sapiens
ttttttttttacaagttataataagcaccaccagaattcaacagaaaaaaaatgggctaaacatcctatgctgaggatagaattaacagtcatacctcagcttactcactatttatacattatagctgttccctcttcaaaatcgagactgaaagaatgggaaaatgttagactctaaaccatcatctattcaaagttacaatggaatataattgctactatagagcaagaacataaaccttaaaaatgtacccagggtaggggcagggagaaaagacatcatgatacatgctagtttaaagattttatttggaatgaattacataaactaccatatttcaaagactgggcttcattatct

SEQ ID NO: 71305 - DNA, 2649 bp, Homo sapiens
  misc_feature (1859)..(1859): n is a, c, g, or t
ttgcccacatttactaaaagatgagtgtgctggaaatttcaagtattatatgagcctctgatacctaccagtatttaaacaggatttaattatttcaacacttcacccatcaatcttcacttctcctgttcagataaaaatgctttcatcccaaataagtaaaacaagaacattaatagtgctaataatataatcttttcattggataggtctgagtttagcgtttgtttgttttcttaatgagatcaaaagttaaagaccaaggcagcaaaatattgtgaaacaagctgaacttggggtcagcatacatttgttcagtcttgtttcatttagtatgactttgggcatatcacttaaatctcttatctataaaacaagtacataaaagtcttgattcctgaagtgcctttctactttaaaatattttgtttaaaatatcaaacttcaatataaatatgttggaaaacaattctaatcaaagaacttctattaagtaaaacaagacaaaatgtgtgtaaaaatatgcctaacacatagatttccttgattgtattttctactgaactattttcaagtattcagctttatactaatatattaatctcaaaatacctttgtttcattgttgctactccttaaacttttttctttattatctagatctagtaaagttttctgcattcattgtattaatgttggttcaaaagtaattgcgtcctttgtcgttatataaattgttttataaatggctttaactatgacataagccttttaacataatcagctttctttaaaggaggaagtcagatgagtagagaaggaaagttatattcctttacaaatgctcttaattttaatgtcttaagggaattatagagacttccattattctgccttaaataagggatgttacttcagttttcttgtcatggctccctgcatgggcagtcatgttaacaagagtcagggagatagcagatattccataatagtgactgcagataggccagtcaaagtcattttgttttaaaggaagggaggttgctggtagttaggtgggaaaataacacctgtgaaaaggaagtccaagtcactggctcagggactttggaggcattttcatatcatattcactagtcaagaaacgtgtagattatatgtgtgagtgacatagtctgtttcaaagtattagaaaagagacaatagaatcacccaccctcccttcgacacacacttccttatgtaaaatcagaatcaaataattatcattcctaaccctcacagtgaaggatttggtttcatgtaacaatgaaagtagataatgggtcagacatggaaatagcaataaaagggaattacaacaagataaatgtgagtaatagttcattttcctgcatttttgatgagggccatgaagataggtcatggtaatctatggagaaggtccttaagagcatagaacaatataaatataatatgggccatatatataattttaaaattttctacagccaaatgttaaaaagtaaaaaacaattttaataatccagtagctccaaaatattattttaatatgtaatccaatatattgaagttataagatattttacattctttttttgatatctgatgtatattttacactttcatcacatctccattcagaccggctacaatttgatcagttgtcacatgtggatgactagtggctatgataatggacagcataggtttagacaatgcctattcaactattcaacttgttttacatttataaatctcaaaatgcctttatttcattgttggtactcttttttattacccagatacaataaagttttccaagtttcattgtacanatgaaatgagtttactgtggaaatgaaaatgcagagtaagtccaacagctagtttatcatcctgaacccagtgaagaaatcaaagctgaataaaagcgactcctagttgttactctcaagggcaggtataatttatgtgcaagactttgtagcataatgttttgcaagtagtggatgttcaatatctacaataaatgaattgtagtactatattgcttgaaggaagtttataacctgtctagaacaactttctcaattttacaactaaactaggagatccagggcttaaatcatgattgaactgattattcctgttaaatttatgtgtgaaccatatgtgaacattctttgaaaatgtatgataagcatttcaagatttctgttttaattattaacatttagaattctaggaaatcttttgggatacagagaacttatttcttccaactgttgcttcagacgctgataagattgtagaagatagggaagctgtagtttactatctagttttttaatgcacatgaagtaatttaaaatgctcttcttcctttcttgtcacatacttttaaaaaattctctaaagattgaataattttaagtatttcttaactgggcaaaatggaaactttgtaactgaagccagtcaaggtgaatacacagaaaatcattttcttattaaggtcagttaatgggataaaccgttttaagagagttgagaaaaaataaagttctattttaaatttatacatgtaactttaataaaaactaagtcagacaaaatttaacaaaa

SEQ ID NO: 71306 - DNA, 563 bp, Homo sapiens
ttaatctcaggagacctgattctctcttgctgagatgggtagagagaaatcctttggcaactaaacctgttactctagcattgtctctgttttccaaaaatcctgcttaagctttacttatctgtatttaatgtgaacctatccccccttattgttcttctgtgccacctcatcttaaagtctatacattgataggttctgcattgagttcttgcacttctctaaggaaagagagcaagagaattgtggaagtttggaagaagtgagggtaaagagactggatatctttccaagttaaagcagtttggagccaaggctgatggtaaagagaatattgcagaatttgttaaatatccattaatgagtagaatctggcaattcctggaaccatagttcgagattgagggtggaataaagatatatcagatacacccacaatcagagaatttaacacctatagcccctcattgaaagaaaaagtgtgggatgcaagaaaaatggtgaatacagaaatatgataaaaatgccagtaaattaaacaattattgactggaaacagccgt

SEQ ID NO: 71307 - DNA, 3864 bp, Homo sapiens
  misc_feature (1)..(2): n is a, c, g, or t
  misc_feature (4)..(4): n is a, c, g, or t
  misc_feature (7)..(7): n is a, c, g, or t
  misc_feature (56)..(56): n is a, c, g, or t
  misc_feature (366)..(366): n is a, c, g, or t
  misc_feature (369)..(370): n is a, c, g, or t
  misc_feature (376)..(376): n is a, c, g, or t
  misc_feature (411)..(411): n is a, c, g, or t
  misc_feature (470)..(470): n is a, c, g, or t
  misc_feature (516)..(516): n is a, c, g, or t
  misc_feature (667)..(667): n is a, c, g, or t
  misc_feature (674)..(674): n is a, c, g, or t
  misc_feature (684)..(684): n is a, c, g, or t
  misc_feature (716)..(716): n is a, c, g, or t
  misc_feature (815)..(816): n is a, c, g, or t
  misc_feature (878)..(878): n is a, c, g, or t
  misc_feature (1658)..(1658): n is a, c, g, or t
  misc_feature (1665)..(1665): n is a, c, g, or t
  misc_feature (1674)..(1675): n is a, c, g, or t
  misc_feature (1680)..(1680): n is a, c, g, or t
  misc_feature (1875)..(1875): n is a, c, g, or t
  misc_feature (1880)..(1880): n is a, c, g, or t
  misc_feature (1892)..(1892): n is a, c, g, or t
  misc_feature (2040)..(2040): n is a, c, g, or t
  misc_feature (2161)..(2162): n is a, c, g, or t
  misc_feature (2307)..(2307): n is a, c, g, or t
  misc_feature (2331)..(2331): n is a, c, g, or t
  misc_feature (2393)..(2393): n is a, c, g, or t
  misc_feature (2481)..(2481): n is a, c, g, or t
nngngcngggctgaatggtcgctgagacagagatggaagccaggacaagggagccnaccgggcccagatagagacttcagaacccactcctgagaacagcggagccaggcgcttagaggaagaccaaatgctgccaggacacggattgtccaggattacattccagcatcttattagatggcctgattagccagaggtttccaggccgtctgtccgcctccaggagatggactgggacctttagacatcggtggagaacaggatgctctgtcccttgctgtccagggcagggatggcctccagccgcaagaagtacagcagcacctcgacctgccctcgcggagtggggaagaggagagtggctcngannggggcncacagctgctggtgggaggtctttggggcccaagntcccaagtccacctcaggtgctagaaacccctgctggtgtcatgaaccccttacagtgngacgggggtggggtggggtcctgacaaggcatgacttgttgggtgnggggtggttatttattttagagatgcacagggccttgctctgtcccccaggctggagtacagtggctccatcatggatcactgcagcctctaactcctgggctcaagcaatcctcctgtgtcagcctcccagatacctaggattacagatntgtgccncaatgcctgnctaatttttctttgtattttttctggagatgnggtttgctacattgcccagactggtctcaaacacctgggttcagttgtcctgcctcggcctcccaaagtgctgggattacaggcatgagccaccacacnngaacacttggggtggttttaagcccccagcaaggtgcaccagcaggaccaggaggtggcctnggcaccccctatcactcccatccatgcaaacctaggcaagtccctgtctctgaatctcagccaccaccacatacaatgcaagtcggaagatgggcaggactgggggtggggcaggcagaggccacctctgtcaggctggggttgcatgggctggagcctgtcttcccatacctgggacatgacctccaaggaccagctgtcagtcatggtgatgggctggctggggttggcagggagcttgctctccttctcggagggccggagcagcgtggggccaaacaccgtgccaaggttgtgcagggacatcttattgactgcctccttctctgccatcctgtagaggaccgaagcagagggtgctgtttcaacgccaccaccaggagagaggcagaggggctgtgccgtgctagagtcctcagggagggagtgacctcgaccctggctgtgctgcaagctgactccagccttggggtcagcagcacccggcgaacagcagcaggaggagccgctagagcagctgctgatgggcagagcagccctcgggcaactcctgccaccaccccctccccagggagcccaaggcaggggaggctcagcatggaatgaaacaggggagtgagggacacaaggaggtgggaagtgggagggtcccagccccaccaagtacgcagagaccccctcgtcgtcctggacaccacaggggcacctgcaggctgggagaccaggtcctctgtgcatgggcccgggaggcagacctgccctaagggtgatgcacaggcnacaggtnctgcacgcnncagcncccactctagacatcagcctccaggttgactaagggtcaggtcatgtttgaaaccatgcttggctggaccaggacccatggcaagagcacctgggcaccagtgtttagccctggtctgcaggaaggaggacagcagactttaggaccccacagcacggcagtgctgaccatttcacccacttggcctccttgagnaatanggatggggagcnctctggggatgggcaaggccttccaggataggctcagttttggtcccctgctttttgaggttgggttaaaattccgaccatggcagaggaagcacagctcgggttcccacacctcacttttcacagcctctgagggcagcagtgcacntggaggagacgtctcccatgaggccaaggcctccagtgctcaccgatgccctctgcgaagttggggtagaactcgtcagtgaagaggggctcgggcagctcacggaagtacagcttcagcnngcctgcgatggcgttcacgtccatctcgctcatcatcactgacacgtccttgttatctggaaagagcacggaaatgcagcggcctccttgaagatcctgataaatgaagaaaagacacagagaaggatgtgacatgcctgggccntggagcactctgagatctcatcgnggacaccactgcccacacctccatcccgtcctgcgcaggccgacactcactgacgttgaagnctgccttcagtgcctggatgtctgcggccaccccagacatgcggtagatgcccacctcctccatgcctcggcgctcgatctcctccangcactggcgcacgatgtagggcaccttggacctctctctcctgcgggaggagggaatgttctcagtgtcctaacagccctgcttgggccataacacaggagacctgctccctatctgcgcacccggaggtggggtgaggacggtgacgaaggtacccaggtctggggctgcacacagagccttctgcatgcctgtcctccctctgcaagctctgtcctcattgcatgtactttctcaggaacctttcaagcggccagaacccctgcgaatcacacatgacctttgcgggaaggtcaggaggcctgtctaagtcaagtcagcacgggaagggcatctgacagattccaggcctggggttagcagcctgtgcccccggctgggaggtcagacccggtgttggtcctgccacccacgtgctgtgtgagaggagaaaccctgacccctgccctgggccttaacacacatccgacgaatgaatgaagggttgcctcagcaccggtgctccaagtcctgcgatgctaagtgcttttctcctctgagtcttagcaatggacaattccaatacctccacacaggacactagagtaagaatccttcacagttagaacgcagtgctgtgcggaggccttaacttgagttctgttttgcacctggatttaccagcacatcaaagctgcttcgcaagccccctcatcagcagggcttatgtgggggagctgctgatggagtcctcgctgctcatgcccacagccctcccagagtgctatgcgagtggctgccgtgcagttgggggtggggcgtggtgtttagacacagataggagtccagggtatgactgatggaggccccggcccacgtgaccagcaaggtcagaggcccagccagattccatcctggggaagcaaatgaattctcagaggaagtggtctgtgtctgcatgaactgctctcaaaccaacaaataggcttctcttggcaactgactcgtgacaaagggttcaagattgtttgaaaaaaaaaaaaggggggggggaacagggaggcagtaggtcctggaaaagtaaattctttattttacaataaaaaagtgattacatattttattttttttacaatggtggaaaattagaagtgattgtgaaaatgatgtctacccgccttgctgatgagtaggatgtgatttggctctttaggaaactgaatttgcagaacttaagaatattgatttataaagggcatggccattgacccagtccatcttatgcaaatctggatgccataaataatatttaaaaatgaaagtattggggtggaggttgcagtgagcggagatcgccccactacactccagcctggtcaacagagtgagactctgtctcaaaac

SEQ ID NO: 71308 - DNA, 3007 bp, Homo sapiens
  misc_feature (801)..(801): n is a, c, g, or t
  misc_feature (808)..(808): n is a, c, g, or t
  misc_feature (817)..(818): n is a, c, g, or t
  misc_feature (823)..(823): n is a, c, g, or t
  misc_feature (1018)..(1018): n is a, c, g, or t
  misc_feature (1023)..(1023): n is a, c, g, or t
  misc_feature (1035)..(1035): n is a, c, g, or t
  misc_feature (1183)..(1183): n is a, c, g, or t
  misc_feature (1304)..(1305): n is a, c, g, or t
  misc_feature (1450)..(1450): n is a, c, g, or t
  misc_feature (1474)..(1474): n is a, c, g, or t
  misc_feature (1536)..(1536): n is a, c, g, or t
  misc_feature (1624)..(1624): n is a, c, g, or t
cgagttggcggctggacgaggacgctcagagcccagctctcgagagttcaagcaaccgacggttccccactgctcccaggagcggttacctgggcactctgtgcccctccttcctgttcgggcccaggccgaggacctgccagtagggctcagttgcctggagcccgttcagcccatcccccagttcactttgcttgtgggatctccccgttgctcctgcccgtggactgagtggcaggccatcctacaagcacccggacacttgacatcagtggtgtcaagacaactctaagaaggttttccgtgatcctgcaagccctgccttccttcctgggatcctgccttcaatttgattgcacagaggaccgaagcagagggtgctgtttcaacgccaccaccaggagagaggcagaggggctgtgccgtgctagagtcctcagggagggagtgacctcgaccctggctgtgctgcaagctgactccagccttggggtcagcagcacccggcgaacagcagcaggaggagccgctagagcagctgctgatgggcagagcagccctcgggcaactcctgccaccaccccctccccagggagcccaaggcaggggaggctcagcatggaatgaaacaggggagtgagggacacaaggaggtgggaagtgggagggtcccagccccaccaagtacgcagagaccccctcgtcgtcctggacaccacaggggcacctgcaggctgggagaccaggtcctctgtgcatgggcccgggaggcagacctgccctaagggtgatgcacaggcnacaggtnctgcacgcnncagcncccactctagacatcagcctccaggttgactaagggtcaggtcatgtttgaaaccatgcttggctggaccaggacccatggcaagagcacctgggcaccagtgtttagccctggtctgcaggaaggaggacagcagactttaggaccccacagcacggcagtgctgaccatttcacccacttggcctccttgagnaatanggatggggagcnctctggggatgggcaaggccttccaggataggctcagttttggtcccctgctttttgaggttgggttaaaattccgaccatggcagaggaagcacagctcgggttcccacacctcacttttcacagcctctgagggcagcagtgcacntggaggagacgtctcccatgaggccaaggcctccagtgctcaccgatgccctctgcgaagttggggtagaactcgtcagtgaagaggggctcgggcagctcacggaagtacagcttcagcnngcctgcgatggcgttcacgtccatctcgctcatcatcactgacacgtccttgttatctggaaagagcacggaaatgcagcggcctccttgaagatcctgataaatgaagaaaagacacagagaaggatgtgacatgcctgggccntggagcactctgagatctcatcgnggacaccactgcccacacctccatcccgtcctgcgcaggccgacactcactgacgttgaagnctgccttcagtgcctggatgtctgcggccaccccagacatgcggtagatgcccacctcctccatgcctcggcgctcgatctcctccangcactggcgcacgatgtagggcaccttggacctctctctcctgcgggaggagggaatgttctcagtgtcctaacagccctgcttgggccataacacaggagacctgctccctatctgcgcacccggaggtggggtgaggacggtgacgaaggtacccaggtctggggctgcacacagagccttctgcatgcctgtcctccctctgcaagctctgtcctcattgcatgtactttctcaggaacctttcaagcggccagaacccctgcgaatcacacatgacctttgcgggaaggtcaggaggcctgtctaagtcaagtcagcacgggaagggcatctgacagattccaggcctggggttagcagcctgtgcccccggctgggaggtcagacccggtgttggtcctgccacccacgtgctgtgtgagaggagaaaccctgacccctgccctgggccttaacacacatccgacgaatgaatgaagggttgcctcagcaccggtgctccaagtcctgcgatgctaagtgcttttctcctctgagtcttagcaatggacaattccaatacctccacacaggacactagagtaagaatccttcacagttagaacgcagtgctgtgcggaggccttaacttgagttctgttttgcacctggatttaccagcacatcaaagctgcttcgcaagccccctcatcagcagggcttatgtgggggagctgctgatggagtcctcgctgctcatgcccacagccctcccagagtgctatgcgagtggctgccgtgcagttgggggtggggcgtggtgtttagacacagataggagtccagggtatgactgatggaggccccggcccacgtgaccagcaaggtcagaggcccagccagattccatcctggggaagcaaatgaattctcagaggaagtggtctgtgtctgcatgaactgctctcaaaccaacaaataggcttctcttggcaactgactcgtgacaaagggttcaagattgtttgaaaaaaaaaaaaggggggggggaacagggaggcagtaggtcctggaaaagtaaattctttattttacaataaaaaagtgattacatattttattttttttacaatggtggaaaattagaagtgattgtgaaaatgatgtctacccgccttgctgatgagtaggatgtgatttggctctttaggaaactgaatttgcagaacttaagaatattgatttataaagggcatggccattgacccagtccatcttatgcaaatctggatgccataaataatatttaaaaatgaaagtattggggtggaggttgcagtgagcggagatcgccccactacactccagcctggtcaacagagtgagactctgtctcaaaac

SEQ ID NO: 71309 - DNA, 781 bp, Homo sapiens
tgtcccaacctcaggcctccacatgtgacttctgcacctcatctctgggatggtttcagtgggtcctagattgctttctgtgctccctgggacagttggtggcactctgtgagactactctcaggtacccttacaagctactcttaattttccccgctgttctgcttgttggacatggcatcatgctgcaatgttaacagtctttcaaagctaagcgcggaggatgtgattccatccctggcagttcttagattccctcatgactataggacagagaggagactgagaaacacaagaagcaccagagtggttgaaaggagctgaaggttcagacagcaacctggacactaagggtccaaagccaagcccaaggtcaagtagctggacagagaaacagctgcaagcacagacttggatcctgacctgattttctgcagaagcaagtccctgtttagccttctactgcctccttttagaatgaagccagaccagtcctttccatcatgggctcctgtggaaaatgaccccagctcagctcagtagttgatgggacatctgattcaggttggacccagcccagacatctgattcaaacaatattcttctccaggaattttgtaaccagcactggtaaagggagggaagtgctccccagtggggagagctgcagaatgtgagacttggaaaccaaaggccgccatgttttctgtctcatgatggaatccaatcttctttggcggggaaaataaatgaagccaacaccagtaggtataagagagat

SEQ ID NO: 71310 - DNA, 1048 bp, Homo sapiens
tgtcccaacctcaggcctccacatgtgacttctgcacctcatctctgggatggtttcagtgggtcctagattgctttctgtgctccctgggacagttggtggcactctgtgagactactctcaggtacccttacaagctactcttaattttccccgctgttctgcttgttggacatggcatcatgctgcaatgttaacagtctttcaaagctaagcgcggaggatgtgattccatccctggcagttcttagattccctttggattacagaagtgatttttaaagacactattaatagaggtattttatcttggtacaaaattatttaaaaaatagacttaaacagagacttccacttatgggtataatagactaagaccctgttggatgatttcttcaccctgcatacaacaactgtgagactgcacgtaatcatatgatagtactggagactgaagagaagatgacaggatctaatgggggagtccatgcttgcttgaaggaggagagatatggatctggacaacatgactataggacagagaggagactgagaaacacaagaagcaccagagtggttgaaaggagctgaaggttcagacagcaacctggacactaagggtccaaagccaagcccaaggtcaagtagctggacagagaaacagctgcaagcacagacttggatcctgacctgattttctgcagaagcaagtccctgtttagccttctactgcctccttttagaatgaagccagaccagtcctttccatcatgggctcctgtggaaaatgaccccagctcagctcagtagttgatgggacatctgattcaggttggacccagcccagacatctgattcaaacaatattcttctccaggaattttgtaaccagcactggtaaagggagggaagtgctccccagtggggagagctgcagaatgtgagacttggaaaccaaaggccgccatgttttctgtctcatgatggaatccaatcttctttggcggggaaaataaatgaagccaacaccagtaggtataagagagat

SEQ ID NO: 71311 - DNA, 416 bp, Homo sapiens
tgccatatcaagtttaatcctcctgctacagacttcacatacgctcagaataatacatggactctcctgggtattggattagcattcctgatgactcacatcacagttgcagtcttgtgttttcttgcaaacagaaaggtaccaataagaggagaaatgtgatgctcagagggtgtggctgacaagctccaggacacaggtaataagtaaaatctagatctcgggtctttcaattgaaactagaaacataggaaacaacaacagaagtcacaacaatttaacagttatttagaggtgtcagtgatttgggatttaaaaatatggaatttaacatttctggtttcaaagtcaatacacagcttccatatgacactatagagtaagtaaaaaataaaagataatttatctgatgtaaa

SEQ ID NO: 71312 - DNA, 553 bp, Homo sapiens
tgccatatcaagtttaatcctcctgctacagacttcacatacgctcagaataatacatggactctcctgggtattggattagcattcctgatgactcacatcacagttgcagtcttgtgttttcttgcaaacagaaaggtaccaataaggaaaaccgagggaagtggtaactgtgcctttgtcaatccagtttacgggaactggagcaacccagagaaaacagagagttctgtctattccttctcaaacccattatatggcacaacatcaggaagcctggagaccctgtcacatcatctcaaatagcagcatcgagaccaagtctgatccaacatgtgtagtttctagaaaattgaagtctccacaatctgatagaaactcatcttctacaatggtaaaaagagaaaggattgtaaatgccagtgtaattataacatttatgaatgaattttcttgcagaatatagagaatgtttatatggaatcagaatcagtaccttatcttcactgaacatctgaatattttaataaaatttctatttaatcaaatttct

SEQ ID NO: 71313 - DNA, 335 bp, Homo sapiens
gacgagacagtaggacaagcttaaggagccggtctactatttttaatacggtggtcaaggcaggattcactgaatagacctgaaggtaagtgaaattagccacacagctcagctgagagcattccaaagggaaaacgacaacttaaatgcttaatgacagagtgcttggtatagaggattagccaggtcaattcagctatagcgcagaagtcagaaaaattgagttaaaaacggctgcaggtacaatggggaggctattttaaaaagaaaaaagggaaaaaaaacctgttgcaggatttgaaacagtgctataatccatttcaaaatcagtaccc

SEQ ID NO: 71314 - DNA, 946 bp, Homo sapiens
cctgtgggccgcatccacagacacttgaagactcgcaccacaagccatggaagggtgggtgccactgctgccgtgcacagggctgcgattccggggtacctcactgcagaggtgctggagctggcaggcctatgggtgatagtggctttaaatgtttggctgattctgtctggatctccttttattgataattccaggaacttgcttggccccaagtgtggaaggctccagcttccttccccgccgcaggatcctattacttctttgttctgtttgaactctgcagactctaaagtgaagtgagtcggtggaaaacctggctggatctcaagaatacagcctgcgtctgagtcccatgaatctccccgcagcttaaggcctcctgtgagcagagcggatactgtaaagccctctcaaagacactaataactagaagtgggactgtagctccaaagtggcttttttttcccctttcccccgtgtaacttgctggaagcacttcgtatttctttatttctttgtggaataaaaaaaatttgtttgtaattccatgagaattagaaaggcttgtctcaacttctgagttggtacttgacattcagatactaaatttactagaggaagcacttttgctagattaaccaacgatggatttttcttcacaattgcgtgttaatttgctccctctttgagatgtcaatttttggttttagcaacacagcccaccccatagatcagcagatctgtgagtgtggattcagttgttagcatcacggggcaggggtccctggactgcatgtgcctttgtattaattgactagacttgcagttatattaattctacttgtggttgtttaaattgtgcctacttgcaccttacttgttgagtcaagataacaggggttatataaacgagtttataatatatttggcttatcctgctcaa

SEQ ID NO: 71315 - DNA, 209 bp, Homo sapiens
tctgggtgccgataccttgtcctcctcttgcctcttcaggcctatgggtgatagtggctttaaatgtttggctgattctgtctggatctccttttattgataattccaggaacttggtggtggcagaagtgggatccaaagtagagcttctcgtaacccccagaagcactgagtgaccaagtgtgacaccagctggactcattgtgtcc

SEQ ID NO: 71316 - DNA, 199 bp, Homo sapiens
  misc_feature (7)..(7): n is a, c, g, or t
  misc_feature (28)..(30): n is a, c, g, or t
  misc_feature (38)..(39): n is a, c, g, or t
  misc_feature (41)..(41): n is a, c, g, or t
  misc_feature (46)..(47): n is a, c, g, or t
tggcagnccgccagccacatggagctannnctgagcgnncnttgannaaaattgttgggttagtctttattgaggtcagctgtaagcgtaaaatacacactggatcttgaagacttagtgtgaaaaaataatgtaagatgtctaaataattttaatgtatcttaggtttattgagttaaaataattattaaaataattt

SEQ ID NO: 71317 - DNA, 754 bp, Homo sapiens
ctcacaggacagccttcaaaactgcactccatgccccggagaagtgtgactagcacagccggttctcccaggaactccatctgggaagaagttggggttcatccaccacacctgagatgcctgtaatttggatcccaccagcatgtccgtaggtaagatgtgtctgactcctgtggaagtcatgtggaaagggaggcctgagttcggggtccttgtgtggatccagaagcagaggtaagatgggaagcctcagccagcctcctaagccgtcctctcagatctctgcacacctctcacccacaagcttttactccacataaacccagatgccctcattcacagcacagaaagcacacaaatcctggagtcagagggacttgcgtttgaatcccagctctgccactcatcaatcaggcgaccttgggtacctgttttctcatcataaacaaagggggtaactggccgggcatggcagctcacacctgtaatcccagcactttgggagatcgaggcgggtggatcacttgagctcaggagtttgagaccagcctggccaacatggtgaaaccccatctctactaaaatacaaaaattagctgggaatggtggcacgtgcctgtaatcccagctacctgggaggctgaggcaggagaattccttgaacccgggaggcaggaggcggaggttgcagtgagccgagattgtgccactgtactgcagcctgggcaacagagcgagactccatctcaaatta

SEQ ID NO: 71318 - DNA, 417 bp, Homo sapiens
gcaccccagccaggggtagagatcattccctgctgagcaatcccttttcctgtggaagaccactcttcacagggtcctgcgcctccccagctcagactcagggacacagcacatctgcctagggcagccgtggaaggacatggaagggtgtaaccatgctctttccaaagaatgggcacccctaactctctcttctaccccactccggtaaccccatcctcaccagagaaccccatctctactaaaatacaaaaattagctgggaatggtggcacgtgcctgtaatcccagctacctgggaggctgaggcaggagaattccttgaacccgggaggcaggaggcggaggttgcagtgagccgagattgtgccactgtactgcagcctgggcaacagagcgagactccatctcaaatta

SEQ ID NO: 71319 - DNA, 327 bp, Homo sapiens
gttccaaagccacttcctcctccagtccaaggactgcaaccacccttccagtgctgacaagcacagccaccaaatccacagctaccagctttacacccatcccctccttcacccttgggaccaccgggaccctcccagaacagaccaccacacccatggccaccatgtccacaatccacccctcctccactccggagaccacccacacctccacagtgctgaccacgaaggccaccacgacaagggccaccagttccatgtccaccccctcctccactccggggacgacctggatcctcacagagctgaccacagcagccactacaa

SEQ ID NO: 71320 - DNA, 1129 bp, Homo sapiens
  misc_feature (1128)..(1129): n is a, c, g, or t
tggggggcgccctagaggatccgagaggtgggacaccgggaccctcccagaacagaccaccacacccatggccaccatgtccacaatccacccctcctccactccggagaccacccacacctccacagtgctgaccacgaaggccaccacgacaagggccaccagttccatgtccaccccctcctccactccggggacgacctggatcctcacagagctgaccacagcagccactacaactgcagccactggccccacggccaccccgtcctccaccccagggaccacctggatcctcacagagcccagcactacagccaccgtgacggtgcccaccggatccacgcccaccgcctcctccacccgggcaactgctggcaccctcaaagtgctgaccagcacgaccaccacacccacagtcatcagctccagagccactccctcctccagtccagggactgcaaccgcccttccagcactgagaagcacagccaccacacccacagctaccagcgttacagccatcccctcttcctccctgggcaccgcctggacccgcctatcacagaccaccacacccacggccaccatgtccacagccacaccctcctccactccagagactgtccacacctccacagtgcttaccaccacggccaccacaaccagggccaccggctctgtggccaccccctcctccaccccaggaacagctcacactaccaaagtgccgactaccacaaccacgggcttcacagccaccccctcctccagcccagggacggcactcacgcctccagtgtggatcagcacaaccaccacacccacaaccagaggctccacggtgaccccctcctccatcccggggaccacccacaccgccacagtgctgaccaccaccaccacaactgtggccactggttctatggcaacaccctcctctagcacacagaccagtggtactcccccatcactgaccaccacggccactacgatcacagccaccggctccaccaccaacccctcctcaactccagggacaactcccatccccccagtgctgaccaccaccgccaccacacctgcagccaccagcagcacagtgactccctcctctgccctagggann

SEQ ID NO: 71321 - DNA, 5504 bp, Homo sapiens
gagtgagtcacctgaccgctgccctcgccgcccgccgggcgctctcgcttcagtcagtcgggccgcgccgcgcctcagctctggttgatgataattagaagcatgctttccactgaacttcccgacaacatttgttatgcagaatgtctctgagtgagaactcggtttttgcctatgaatcttctgtgcatagcaccaatgttttactcagccttaatgaccagcggaagaaagatgtgctgtgcgatgtcaccatctttgtggagggacagcggttccgcgctcaccggtccgtgctggcggcatgcagcagttacttccactcaagaatcgtaggccaggctgatggagagctgaacattactcttccagaagaggtgacagttaaaggatttgaacctttaattcagtttgcctacactgctaaactgattttaagtaaagagaatgtggatgaagtgtgcaaatgtgtggagtttttaagtgtacataatattgaggaatcctgctttcagtttctgaaatttaagtttttggactccactgcagaccagcaagaatgcccaagaaaaaaatgcttttcatcacactgtcagaaaacagaccttaaactttcacttttggaccagagggatctagaaactgatgaagtggaggaatttctggaaaataaaaatgttcagactcctcagtgtaaactccgcaggtatcaaggaaatgcaaaagcctcacctcctctacaagacagtgccagtcagacatatgagtccatgtgcttagagaaggatgctgctctggccttgccttctttatgccccaaatacagaaaattccaaaaagcatttggaactgacagagtccgtactggggaatctagtgtcaaagacattcatgcttctgttcagccaaatgaaaggtctgaaaatgaatgcctgggaggagtcccggagtgtagagatttgcaggtgatgttaaaatgtgacgaaagtaaattagcaatggaacctgaagaaacgaagaaagatcctgcttctcagtgcccaactgaaaaatcagaagtgactcctttcccccacaattcttccatagaccctcatggactttattctttgtctcttttacacacatatgaccaatatggtgacttgaattttgctggtatgcaaaacacaacagtgttaacagaaaagcctttgtcaggtacagacgtccaagaaaaaacatttggtgaaagtcaggatttacctttgaaatccgacttgggcaccagggaagatagtagtgttgcatctagtgataggagtagtgtggagcgagaagtggcagaacacctagcaaaaggcttctggagtgacatttgcagcacggacactccttgccaaatgcagttatcacctgctgtggccaaagatggctcagaacagatctcacagaaacggtctgagtgtccgtggttaggtatcaggattagtgagagcccagaaccaggtcaaaggactttcacaacattaagttctgtcaactgcccttttataagtactctgagtactgaaggctgttcaagcaatttggaaattggaaacgatgattatgtttcagaaccccagcaagaaccttgcccatatgcttgtgtcattagcttgggagacgactctgagacggacaccgaaggagacagtgaatcctgttcagccagagaacaagaatgtgaggtaaaactgccattcaatgcacaacggataatttcactgtctcgaaatgattttcagtccttgttgaaaatgcacaagcttactccagaacagctggattgtatccatgatattcgaagaagaagtaaaaacagaattgctgcacagcgctgtcgcaagagaaaacttgactgtatacagaatcttgaatcagaaattgagaagctgcaaagtgaaaaggagagcttgttgaaggaaagagatcacattttgtcaactctgggcgagacaaagcagaacctaactggactttgccagaaagtttgtaaagaagcagctctgagtcaagaacaaatacagatactcgccaagtactcagctgcagattgcccactttcatttttaatttctgaaaaagataaaagtactcctgatggtgaactggcgttaccatcaattttcagtttatctgaccggcctccagcagtgctgcctccctgtgccagaggaaacagtgagcctggctacgcgcgagggcaggagtcccagcagatgtccacagccacctctgagcaagctgggcctgcggaacagtgtcgtcagagtggtgggatctcagatttctgtcagcagatgactgataaatgtactactgatgagtaaacttgcattcacttccttcaaaccatctaattttctcctgaagttttggcagcgtcttgaaagcctaatatgaccatctgttgctcaacaatactgtttttttcctttagtagtttaccacaagggaatttcctttaagtcaaccatgatttctccttgatttctacaagagacaaagaaatgattttgcctcctggatatcagaaaaatccatgtgaaaatgtagtaaacctttaaaactcatgttttaaagaataataactctagtaataactcttcctgctattcagaataagtaggagaatgaaaactgcagcatatcagacagcaatttaacagcttgaaacatctacagatagttcctactaaaagaagtggcctgcagaagtttaataatttgacttttttctaatattttagtttgaaagaaaatttcttcccaagcaatgctaatagagttctattcttagaagcagggtgtcagctactgggaatatttttgtagagctgcattgtgaaaaaaagatggtcttacctgaatcttagggctttgttcttcggctcctaaaatcaggctttaagctacattgggaagatttagtaaataggcaagtggttggcctaagacgggggctgcttctcctcttcagtatggactctagaaagtctggctacatgaatagatttaagtgtcactttccctccctgccccccgcttcagtctctaccatatctggtcccatcatggacttcctatttcctggcatttttgtccctttggaagaagaaataggactcagaatacagtggcatgagtgattacactggcagcattatctcaggctccctagaatctggagagcttaccaacatgtaaagctgttcatttttccaccgtgggtcaccaatgccagaaaaccagacatcacggggaaagaatgttgcttactttttaccaggagtgcagttcatttttttcaccctgtttttgaagtcgtattattcacttgtaaaaatgattgtaacagataaaaaatgtatctgcagcaactctgcaggtttgtgaaataggatgaaactcaatctttttctattgtgggtttgcatttgaaaagcaggttgaatccttgctctcttctccaaatttggtgtggtataaagacacacaaatcattttaacttggacatttaaagatcagtcttagtgtttgttcagtcctgttacaaaatagataactgagcacctatcgcataacattttgcggtggcttttagccatgctggggttagatgtgtttgagagtcaaatgaaagctatggatcttctcagcaattaaaaaaaatgcatatattcacattcacagaaacattggcagaacccagttttaatggtacagaggagtagtttatagtgttgatttcaccaaaatcagagggctgaaagagacacttctatagactgcatcctgagcctagtgcagggcttgtctagctaatgtgggcagccaccacccactgtgtatgaacaagtctgaagcaagttggccttgcccttgagagtatatggggaccagtcttcatgtcttggagtaatttgtcaaatgttaccctttttgatcagggtgtagggggaggatattgctagtatattttcagtggtttgtatgttctctctgtcactgacttatttgtaagagaaaattagttggacttgtttattttctagtagcttttataagtacactcaagaatttgtcagggagaataattctgatagtgcatcccatactgcaaaagaatttgtgtgtgtgtgtgtgtgtgtgtgtgtgtatgtgtatgtatacatatatatctctccatataggtatttctttgatacttgtaattttaaatttcagcttcacgatataaaataatataagaacttctggtttacaaaatgtaaaatcttaagccaatggaacccttgatttcctacctcagtgtacactcaactattggttgtatcagtttgtgtatgtgcaaatgtcaaataatcttttgctttaattgctactgtacttgctttgaaagattacctactattttatgataaaatgtagttgtctccagagcttaaatataatttgtaaagcacttggtttaaatttctctctacctataaacagtttagcattaagggtttctattaatgacacagaattattggccaagtgtaatttcttaaaatttagcattactttaaatagccagcatgtaatacaagtaactacactacctcatatctacatgattttcaagttgtaatgcagatggacagataaaaaagattttacgtttgtcttttggccataagtgggaaagttttctgtatattgcatagcattacacatttatgcctattttaacattaacttctaaagaagttttttctaagaaaatgtttcaaggcaatattttttttgaggctgccgaagacaaatgacaggattatgagtatacagtgtatgccttttccttcatgcagaattttgaaatgttttcagtttgtatattgcatattcacatgatcattgctcactattttatgaactggccttctcaatgtttgatgattttttaaaagctgttatgttgaattcagtaaaataacattaccttattttttttcttattcaaattctggaactatagcaaataattcgttaaattgtcatattcaaaacaaatgtggatacagtcttggttctccatctgtaattttttttaacagtttgctatagcttactgcttaactaattttaaataaggaaataagtatgttagatgcagtagacgatacaggttgcatgtggacactcagtcacattaacaacttgggaaaaaaatggcaatgttacggtgaattctcaggtgaacttttttcagttataaaacatctattttgaatctgtaaatattttaaatgttttattaaggcatgtaataaactattctttgaaacttgttgggtagaatgaaaattaaagccataatggtaaaagatggcatactgattataaaagaagcagaaaaacattgatttttttatatctttcataatataattttctaacaatgcaataaaaccactaaacttttgtgtccata

SEQ ID NO: 71322 - DNA, 476 bp, Homo sapiens
gtctactcagcccggtggctgtcgcgcgtggaatcgcgtaagaaaagccgagtttgtggctggggagagaaggccaccgtgctgagctggatttagcgaagactggttttggggaccggagagcccaggactccctttgttggagttttgcccacgcgttgtaattaagcctcgcacaatatggtgagagtgggcgttgattctggagacaccagctttgtgctcgtgtaatgtaacacgagtgccgttgctttctcattcttacacggcagtttcatgtcattgagtagaattgtgcggaatgcttttatggagtgaggcttctgcgttaaacttgtgctgattccaggtaaagtgtagtagtaattgtgaaagaacgtgtatgaggaaaacgagctacaatgtcatgcttggaggaacaaagaatgttttgtaggatgctttgctttttggagaattgttcggggcctggactg

SEQ ID NO: 71323 - DNA, 5767 bp, Homo sapiens
gtctactcagcccggtggctgtcgcgcgtggaatcgcgtaagaaaagccgagtttgtggctggggagagaaggccaccgtgctgagctggatttagcgaagactggttttggggaccggagagcccaggactccctttgttggagttttgcccacgcgttgtaattaagcctcgcacaatatggttgatgataattagaagcatgctttccactgaacttcccgacaacatttgttatgcagaatgtctctgagtgagaactcggtttttgcctatgaatcttctgtgcatagcaccaatgttttactcagccttaatgaccagcggaagaaagatgtgctgtgcgatgtcaccatctttgtggagggacagcggttccgcgctcaccggtccgtgctggcggcatgcagcagttacttccactcaagaatcgtaggccaggctgatggagagctgaacattactcttccagaagaggtgacagttaaaggatttgaacctttaattcagtttgcctacactgctaaactgattttaagtaaagagaatgtggatgaagtgtgcaaatgtgtggagtttttaagtgtacataatattgaggaatcctgctttcagtttctgaaatttaagtttttggactccactgcagaccagcaagaatgcccaagaaaaaaatgcttttcatcacactgtcagaaaacagaccttaaactttcacttttggaccagagggatctagaaactgatgaagtggaggaatttctggaaaataaaaatgttcagactcctcagtgtaaactccgcaggtatcaaggaaatgcaaaagcctcacctcctctacaagacagtgccagtcagacatatgagtccatgtgcttagagaaggatgctgctctggccttgccttctttatgccccaaatacagaaaattccaaaaagcatttggaactgacagagtccgtactggggaatctagtgtcaaagacattcatgcttctgttcagccaaatgaaaggtctgaaaatgaatgcctgggaggagtcccggagtgtagagatttgcaggtgatgttaaaatgtgacgaaagtaaattagcaatggaacctgaagaaacgaagaaagatcctgcttctcagtgcccaactgaaaaatcagaagtgactcctttcccccacaattcttccatagaccctcatggactttattctttgtctcttttacacacatatgaccaatatggtgacttgaattttgctggtatgcaaaacacaacagtgttaacagaaaagcctttgtcaggtacagacgtccaagaaaaaacatttggtgaaagtcaggatttacctttgaaatccgacttgggcaccagggaagatagtagtgttgcatctagtgataggagtagtgtggagcgagaagtggcagaacacctagcaaaaggcttctggagtgacatttgcagcacggacactccttgccaaatgcagttatcacctgctgtggccaaagatggctcagaacagatctcacagaaacggtctgagtgtccgtggttaggtatcaggattagtgagagcccagaaccaggtcaaaggactttcacaacattaagttctgtcaactgcccttttataagtactctgagtactgaaggctgttcaagcaatttggaaattggaaacgatgattatgtttcagaaccccagcaagaaccttgcccatatgcttgtgtcattagcttgggagacgactctgagacggacaccgaaggagacagtgaatcctgttcagccagagaacaagaatgtgaggtaaaactgccattcaatgcacaacggataatttcactgtctcgaaatgattttcagtccttgttgaaaatgcacaagcttactccagaacagctggattgtatccatgatattcgaagaagaagtaaaaacagaattgctgcacagcgctgtcgcaagagaaaacttgactgtatacagaatcttgaatcagaaattgagaagctgcaaagtgaaaaggagagcttgttgaaggaaagagatcacattttgtcaactctgggcgagacaaagcagaacctaactggactttgccagaaagtttgtaaagaagcagctctgagtcaagaacaaatacagatactcgccaagtactcagctgcagattgcccactttcatttttaatttctgaaaaagataaaagtactcctgatggtgaactggcgttaccatcaattttcagtttatctgaccggcctccagcagtgctgcctccctgtgccagaggaaacagtgagcctggctacgcgcgagggcaggagtcccagcagatgtccacagccacctctgagcaagctgggcctgcggaacagtgtcgtcagagtggtgggatctcagatttctgtcagcagatgactgataaatgtactactgatgagtaaacttgcattcacttccttcaaaccatctaattttctcctgaagttttggcagcgtcttgaaagcctaatatgaccatctgttgctcaacaatactgtttttttcctttagtagtttaccacaagggaatttcctttaagtcaaccatgatttctccttgatttctacaagagacaaagaaatgattttgcctcctggatatcagaaaaatccatgtgaaaatgtagtaaacctttaaaactcatgttttaaagaataataactctagtaataactcttcctgctattcagaataagtaggagaatgaaaactgcagcatatcagacagcaatttaacagcttgaaacatctacagatagttcctactaaaagaagtggcctgcagaagtttaataatttgacttttttctaatattttagtttgaaagaaaatttcttcccaagcaatgctaatagagttctattcttagaagcagggtgtcagctactgggaatatttttgtagagctgcattgtgaaaaaaagatggtcttacctgaatcttagggctttgttcttcggctcctaaaatcaggctttaagctacattgggaagatttagtaaataggcaagtggttggcctaagacgggggctgcttctcctcttcagtatggactctagaaagtctggctacatgaatagatttaagtgtcactttccctccctgccccccgcttcagtctctaccatatctggtcccatcatggacttcctatttcctggcatttttgtccctttggaagaagaaataggactcagaatacagtggcatgagtgattacactggcagcattatctcaggctccctagaatctggagagcttaccaacatgtaaagctgttcatttttccaccgtgggtcaccaatgccagaaaaccagacatcacggggaaagaatgttgcttactttttaccaggagtgcagttcatttttttcaccctgtttttgaagtcgtattattcacttgtaaaaatgattgtaacagataaaaaatgtatctgcagcaactctgcaggtttgtgaaataggatgaaactcaatctttttctattgtgggtttgcatttgaaaagcaggttgaatccttgctctcttctccaaatttggtgtggtataaagacacacaaatcattttaacttggacatttaaagatcagtcttagtgtttgttcagtcctgttacaaaatagataactgagcacctatcgcataacattttgcggtggcttttagccatgctggggttagatgtgtttgagagtcaaatgaaagctatggatcttctcagcaattaaaaaaaatgcatatattcacattcacagaaacattggcagaacccagttttaatggtacagaggagtagtttatagtgttgatttcaccaaaatcagagggctgaaagagacacttctatagactgcatcctgagcctagtgcagggcttgtctagctaatgtgggcagccaccacccactgtgtatgaacaagtctgaagcaagttggccttgcccttgagagtatatggggaccagtcttcatgtcttggagtaatttgtcaaatgttaccctttttgatcagggtgtagggggaggatattgctagtatattttcagtggtttgtatgttctctctgtcactgacttatttgtaagagaaaattagttggacttgtttattttctagtagcttttataagtacactcaagaatttgtcagggagaataattctgatagtgcatcccatactgcaaaagaatttgtgtgtgtgtgtgtgtgtgtgtgtgtgtatgtgtatgtatacatatatatctctccatataggtatttctttgatacttgtaattttaaatttcagcttcacgatataaaataatataagaacttctggtttacaaaatgtaaaatcttaagccaatggaacccttgatttcctacctcagtgtacactcaactattggttgtatcagtttgtgtatgtgcaaatgtcaaataatcttttgctttaattgctactgtacttgctttgaaagattacctactattttatgataaaatgtagttgtctccagagcttaaatataatttgtaaagcacttggtttaaatttctctctacctataaacagtttagcattaagggtttctattaatgacacagaattattggccaagtgtaatttcttaaaatttagcattactttaaatagccagcatgtaatacaagtaactacactacctcatatctacatgattttcaagttgtaatgcagatggacagataaaaaagattttacgtttgtcttttggccataagtgggaaagttttctgtatattgcatagcattacacatttatgcctattttaacattaacttctaaagaagttttttctaagaaaatgtttcaaggcaatattttttttgaggctgccgaagacaaatgacaggattatgagtatacagtgtatgccttttccttcatgcagaattttgaaatgttttcagtttgtatattgcatattcacatgatcattgctcactattttatgaactggccttctcaatgtttgatgattttttaaaagctgttatgttgaattcagtaaaataacattaccttattttttttcttattcaaattctggaactatagcaaataattcgttaaattgtcatattcaaaacaaatgtggatacagtcttggttctccatctgtaattttttttaacagtttgctatagcttactgcttaactaattttaaataaggaaataagtatgttagatgcagtagacgatacaggttgcatgtggacactcagtcacattaacaacttgggaaaaaaatggcaatgttacggtgaattctcaggtgaacttttttcagttataaaacatctattttgaatctgtaaatattttaaatgttttattaaggcatgtaataaactattctttgaaacttgttgggtagaatgaaaattaaagccataatggtaaaagatggcatactgattataaaagaagcagaaaaacattgatttttttatatctttcataatataattttctaacaatgcaataaaaccactaaacttttgtgtccatattttactgagaccatgtttcattaaaagcatagtttcatagtatttaatttacatttctccctaatgttcttacccaaatgtacctgaactaaaaaatgttagatgttggtgataagttgacagttaaataaaattctctaaaattgcttctaattgaaagaa

SEQ ID NO: 71324 - DNA, 5704 bp, Homo sapiens
gcaaaagactgttgaagtagagagcattttgcccagctcactcggattctttgctggcatgccttcagtttcagttgtcatccagagaagtcaaaggaaatgctgcttggggatgagcatgttgatgataattagaagcatgctttccactgaacttcccgacaacatttgttatgcagaatgtctctgagtgagaactcggtttttgcctatgaatcttctgtgcatagcaccaatgttttactcagccttaatgaccagcggaagaaagatgtgctgtgcgatgtcaccatctttgtggagggacagcggttccgcgctcaccggtccgtgctggcggcatgcagcagttacttccactcaagaatcgtaggccaggctgatggagagctgaacattactcttccagaagaggtgacagttaaaggatttgaacctttaattcagtttgcctacactgctaaactgattttaagtaaagagaatgtggatgaagtgtgcaaatgtgtggagtttttaagtgtacataatattgaggaatcctgctttcagtttctgaaatttaagtttttggactccactgcagaccagcaagaatgcccaagaaaaaaatgcttttcatcacactgtcagaaaacagaccttaaactttcacttttggaccagagggatctagaaactgatgaagtggaggaatttctggaaaataaaaatgttcagactcctcagtgtaaactccgcaggtatcaaggaaatgcaaaagcctcacctcctctacaagacagtgccagtcagacatatgagtccatgtgcttagagaaggatgctgctctggccttgccttctttatgccccaaatacagaaaattccaaaaagcatttggaactgacagagtccgtactggggaatctagtgtcaaagacattcatgcttctgttcagccaaatgaaaggtctgaaaatgaatgcctgggaggagtcccggagtgtagagatttgcaggtgatgttaaaatgtgacgaaagtaaattagcaatggaacctgaagaaacgaagaaagatcctgcttctcagtgcccaactgaaaaatcagaagtgactcctttcccccacaattcttccatagaccctcatggactttattctttgtctcttttacacacatatgaccaatatggtgacttgaattttgctggtatgcaaaacacaacagtgttaacagaaaagcctttgtcaggtacagacgtccaagaaaaaacatttggtgaaagtcaggatttacctttgaaatccgacttgggcaccagggaagatagtagtgttgcatctagtgataggagtagtgtggagcgagaagtggcagaacacctagcaaaaggcttctggagtgacatttgcagcacggacactccttgccaaatgcagttatcacctgctgtggccaaagatggctcagaacagatctcacagaaacggtctgagtgtccgtggttaggtatcaggattagtgagagcccagaaccaggtcaaaggactttcacaacattaagttctgtcaactgcccttttataagtactctgagtactgaaggctgttcaagcaatttggaaattggaaacgatgattatgtttcagaaccccagcaagaaccttgcccatatgcttgtgtcattagcttgggagacgactctgagacggacaccgaaggagacagtgaatcctgttcagccagagaacaagaatgtgaggtaaaactgccattcaatgcacaacggataatttcactgtctcgaaatgattttcagtccttgttgaaaatgcacaagcttactccagaacagctggattgtatccatgatattcgaagaagaagtaaaaacagaattgctgcacagcgctgtcgcaagagaaaacttgactgtatacagaatcttgaatcagaaattgagaagctgcaaagtgaaaaggagagcttgttgaaggaaagagatcacattttgtcaactctgggcgagacaaagcagaacctaactggactttgccagaaagtttgtaaagaagcagctctgagtcaagaacaaatacagatactcgccaagtactcagctgcagattgcccactttcatttttaatttctgaaaaagataaaagtactcctgatggtgaactggcgttaccatcaattttcagtttatctgaccggcctccagcagtgctgcctccctgtgccagaggaaacagtgagcctggctacgcgcgagggcaggagtcccagcagatgtccacagccacctctgagcaagctgggcctgcggaacagtgtcgtcagagtggtgggatctcagatttctgtcagcagatgactgataaatgtactactgatgagtaaacttgcattcacttccttcaaaccatctaattttctcctgaagttttggcagcgtcttgaaagcctaatatgaccatctgttgctcaacaatactgtttttttcctttagtagtttaccacaagggaatttcctttaagtcaaccatgatttctccttgatttctacaagagacaaagaaatgattttgcctcctggatatcagaaaaatccatgtgaaaatgtagtaaacctttaaaactcatgttttaaagaataataactctagtaataactcttcctgctattcagaataagtaggagaatgaaaactgcagcatatcagacagcaatttaacagcttgaaacatctacagatagttcctactaaaagaagtggcctgcagaagtttaataatttgacttttttctaatattttagtttgaaagaaaatttcttcccaagcaatgctaatagagttctattcttagaagcagggtgtcagctactgggaatatttttgtagagctgcattgtgaaaaaaagatggtcttacctgaatcttagggctttgttcttcggctcctaaaatcaggctttaagctacattgggaagatttagtaaataggcaagtggttggcctaagacgggggctgcttctcctcttcagtatggactctagaaagtctggctacatgaatagatttaagtgtcactttccctccctgccccccgcttcagtctctaccatatctggtcccatcatggacttcctatttcctggcatttttgtccctttggaagaagaaataggactcagaatacagtggcatgagtgattacactggcagcattatctcaggctccctagaatctggagagcttaccaacatgtaaagctgttcatttttccaccgtgggtcaccaatgccagaaaaccagacatcacggggaaagaatgttgcttactttttaccaggagtgcagttcatttttttcaccctgtttttgaagtcgtattattcacttgtaaaaatgattgtaacagataaaaaatgtatctgcagcaactctgcaggtttgtgaaataggatgaaactcaatctttttctattgtgggtttgcatttgaaaagcaggttgaatccttgctctcttctccaaatttggtgtggtataaagacacacaaatcattttaacttggacatttaaagatcagtcttagtgtttgttcagtcctgttacaaaatagataactgagcacctatcgcataacattttgcggtggcttttagccatgctggggttagatgtgtttgagagtcaaatgaaagctatggatcttctcagcaattaaaaaaaatgcatatattcacattcacagaaacattggcagaacccagttttaatggtacagaggagtagtttatagtgttgatttcaccaaaatcagagggctgaaagagacacttctatagactgcatcctgagcctagtgcagggcttgtctagctaatgtgggcagccaccacccactgtgtatgaacaagtctgaagcaagttggccttgcccttgagagtatatggggaccagtcttcatgtcttggagtaatttgtcaaatgttaccctttttgatcagggtgtagggggaggatattgctagtatattttcagtggtttgtatgttctctctgtcactgacttatttgtaagagaaaattagttggacttgtttattttctagtagcttttataagtacactcaagaatttgtcagggagaataattctgatagtgcatcccatactgcaaaagaatttgtgtgtgtgtgtgtgtgtgtgtgtgtgtatgtgtatgtatacatatatatctctccatataggtatttctttgatacttgtaattttaaatttcagcttcacgatataaaataatataagaacttctggtttacaaaatgtaaaatcttaagccaatggaacccttgatttcctacctcagtgtacactcaactattggttgtatcagtttgtgtatgtgcaaatgtcaaataatcttttgctttaattgctactgtacttgctttgaaagattacctactattttatgataaaatgtagttgtctccagagcttaaatataatttgtaaagcacttggtttaaatttctctctacctataaacagtttagcattaagggtttctattaatgacacagaattattggccaagtgtaatttcttaaaatttagcattactttaaatagccagcatgtaatacaagtaactacactacctcatatctacatgattttcaagttgtaatgcagatggacagataaaaaagattttacgtttgtcttttggccataagtgggaaagttttctgtatattgcatagcattacacatttatgcctattttaacattaacttctaaagaagttttttctaagaaaatgtttcaaggcaatattttttttgaggctgccgaagacaaatgacaggattatgagtatacagtgtatgccttttccttcatgcagaattttgaaatgttttcagtttgtatattgcatattcacatgatcattgctcactattttatgaactggccttctcaatgtttgatgattttttaaaagctgttatgttgaattcagtaaaataacattaccttattttttttcttattcaaattctggaactatagcaaataattcgttaaattgtcatattcaaaacaaatgtggatacagtcttggttctccatctgtaattttttttaacagtttgctatagcttactgcttaactaattttaaataaggaaataagtatgttagatgcagtagacgatacaggttgcatgtggacactcagtcacattaacaacttgggaaaaaaatggcaatgttacggtgaattctcaggtgaacttttttcagttataaaacatctattttgaatctgtaaatattttaaatgttttattaaggcatgtaataaactattctttgaaacttgttgggtagaatgaaaattaaagccataatggtaaaagatggcatactgattataaaagaagcagaaaaacattgatttttttatatctttcataatataattttctaacaatgcaataaaaccactaaacttttgtgtccatattttactgagaccatgtttcattaaaagcatagtttcatagtatttaatttacatttctccctaatgttcttacccaaatgtacctgaactaaaaaatgttagatgttggtgataagttgacagttaaataaaattctctaaaattgcttctaattgaaagaa

SEQ ID NO: 71325 - DNA, 5628 bp, Homo sapiens
tgcctttggacatcttgaagaagcttagggaagaaaggctcccggttgatgataattagaagcatgctttccactgaacttcccgacaacatttgttatgcagaatgtctctgagtgagaactcggtttttgcctatgaatcttctgtgcatagcaccaatgttttactcagccttaatgaccagcggaagaaagatgtgctgtgcgatgtcaccatctttgtggagggacagcggttccgcgctcaccggtccgtgctggcggcatgcagcagttacttccactcaagaatcgtaggccaggctgatggagagctgaacattactcttccagaagaggtgacagttaaaggatttgaacctttaattcagtttgcctacactgctaaactgattttaagtaaagagaatgtggatgaagtgtgcaaatgtgtggagtttttaagtgtacataatattgaggaatcctgctttcagtttctgaaatttaagtttttggactccactgcagaccagcaagaatgcccaagaaaaaaatgcttttcatcacactgtcagaaaacagaccttaaactttcacttttggaccagagggatctagaaactgatgaagtggaggaatttctggaaaataaaaatgttcagactcctcagtgtaaactccgcaggtatcaaggaaatgcaaaagcctcacctcctctacaagacagtgccagtcagacatatgagtccatgtgcttagagaaggatgctgctctggccttgccttctttatgccccaaatacagaaaattccaaaaagcatttggaactgacagagtccgtactggggaatctagtgtcaaagacattcatgcttctgttcagccaaatgaaaggtctgaaaatgaatgcctgggaggagtcccggagtgtagagatttgcaggtgatgttaaaatgtgacgaaagtaaattagcaatggaacctgaagaaacgaagaaagatcctgcttctcagtgcccaactgaaaaatcagaagtgactcctttcccccacaattcttccatagaccctcatggactttattctttgtctcttttacacacatatgaccaatatggtgacttgaattttgctggtatgcaaaacacaacagtgttaacagaaaagcctttgtcaggtacagacgtccaagaaaaaacatttggtgaaagtcaggatttacctttgaaatccgacttgggcaccagggaagatagtagtgttgcatctagtgataggagtagtgtggagcgagaagtggcagaacacctagcaaaaggcttctggagtgacatttgcagcacggacactccttgccaaatgcagttatcacctgctgtggccaaagatggctcagaacagatctcacagaaacggtctgagtgtccgtggttaggtatcaggattagtgagagcccagaaccaggtcaaaggactttcacaacattaagttctgtcaactgcccttttataagtactctgagtactgaaggctgttcaagcaatttggaaattggaaacgatgattatgtttcagaaccccagcaagaaccttgcccatatgcttgtgtcattagcttgggagacgactctgagacggacaccgaaggagacagtgaatcctgttcagccagagaacaagaatgtgaggtaaaactgccattcaatgcacaacggataatttcactgtctcgaaatgattttcagtccttgttgaaaatgcacaagcttactccagaacagctggattgtatccatgatattcgaagaagaagtaaaaacagaattgctgcacagcgctgtcgcaagagaaaacttgactgtatacagaatcttgaatcagaaattgagaagctgcaaagtgaaaaggagagcttgttgaaggaaagagatcacattttgtcaactctgggcgagacaaagcagaacctaactggactttgccagaaagtttgtaaagaagcagctctgagtcaagaacaaatacagatactcgccaagtactcagctgcagattgcccactttcatttttaatttctgaaaaagataaaagtactcctgatggtgaactggcgttaccatcaattttcagtttatctgaccggcctccagcagtgctgcctccctgtgccagaggaaacagtgagcctggctacgcgcgagggcaggagtcccagcagatgtccacagccacctctgagcaagctgggcctgcggaacagtgtcgtcagagtggtgggatctcagatttctgtcagcagatgactgataaatgtactactgatgagtaaacttgcattcacttccttcaaaccatctaattttctcctgaagttttggcagcgtcttgaaagcctaatatgaccatctgttgctcaacaatactgtttttttcctttagtagtttaccacaagggaatttcctttaagtcaaccatgatttctccttgatttctacaagagacaaagaaatgattttgcctcctggatatcagaaaaatccatgtgaaaatgtagtaaacctttaaaactcatgttttaaagaataataactctagtaataactcttcctgctattcagaataagtaggagaatgaaaactgcagcatatcagacagcaatttaacagcttgaaacatctacagatagttcctactaaaagaagtggcctgcagaagtttaataatttgacttttttctaatattttagtttgaaagaaaatttcttcccaagcaatgctaatagagttctattcttagaagcagggtgtcagctactgggaatatttttgtagagctgcattgtgaaaaaaagatggtcttacctgaatcttagggctttgttcttcggctcctaaaatcaggctttaagctacattgggaagatttagtaaataggcaagtggttggcctaagacgggggctgcttctcctcttcagtatggactctagaaagtctggctacatgaatagatttaagtgtcactttccctccctgccccccgcttcagtctctaccatatctggtcccatcatggacttcctatttcctggcatttttgtccctttggaagaagaaataggactcagaatacagtggcatgagtgattacactggcagcattatctcaggctccctagaatctggagagcttaccaacatgtaaagctgttcatttttccaccgtgggtcaccaatgccagaaaaccagacatcacggggaaagaatgttgcttactttttaccaggagtgcagttcatttttttcaccctgtttttgaagtcgtattattcacttgtaaaaatgattgtaacagataaaaaatgtatctgcagcaactctgcaggtttgtgaaataggatgaaactcaatctttttctattgtgggtttgcatttgaaaagcaggttgaatccttgctctcttctccaaatttggtgtggtataaagacacacaaatcattttaacttggacatttaaagatcagtcttagtgtttgttcagtcctgttacaaaatagataactgagcacctatcgcataacattttgcggtggcttttagccatgctggggttagatgtgtttgagagtcaaatgaaagctatggatcttctcagcaattaaaaaaaatgcatatattcacattcacagaaacattggcagaacccagttttaatggtacagaggagtagtttatagtgttgatttcaccaaaatcagagggctgaaagagacacttctatagactgcatcctgagcctagtgcagggcttgtctagctaatgtgggcagccaccacccactgtgtatgaacaagtctgaagcaagttggccttgcccttgagagtatatggggaccagtcttcatgtcttggagtaatttgtcaaatgttaccctttttgatcagggtgtagggggaggatattgctagtatattttcagtggtttgtatgttctctctgtcactgacttatttgtaagagaaaattagttggacttgtttattttctagtagcttttataagtacactcaagaatttgtcagggagaataattctgatagtgcatcccatactgcaaaagaatttgtgtgtgtgtgtgtgtgtgtgtgtgtgtatgtgtatgtatacatatatatctctccatataggtatttctttgatacttgtaattttaaatttcagcttcacgatataaaataatataagaacttctggtttacaaaatgtaaaatcttaagccaatggaacccttgatttcctacctcagtgtacactcaactattggttgtatcagtttgtgtatgtgcaaatgtcaaataatcttttgctttaattgctactgtacttgctttgaaagattacctactattttatgataaaatgtagttgtctccagagcttaaatataatttgtaaagcacttggtttaaatttctctctacctataaacagtttagcattaagggtttctattaatgacacagaattattggccaagtgtaatttcttaaaatttagcattactttaaatagccagcatgtaatacaagtaactacactacctcatatctacatgattttcaagttgtaatgcagatggacagataaaaaagattttacgtttgtcttttggccataagtgggaaagttttctgtatattgcatagcattacacatttatgcctattttaacattaacttctaaagaagttttttctaagaaaatgtttcaaggcaatattttttttgaggctgccgaagacaaatgacaggattatgagtatacagtgtatgccttttccttcatgcagaattttgaaatgttttcagtttgtatattgcatattcacatgatcattgctcactattttatgaactggccttctcaatgtttgatgattttttaaaagctgttatgttgaattcagtaaaataacattaccttattttttttcttattcaaattctggaactatagcaaataattcgttaaattgtcatattcaaaacaaatgtggatacagtcttggttctccatctgtaattttttttaacagtttgctatagcttactgcttaactaattttaaataaggaaataagtatgttagatgcagtagacgatacaggttgcatgtggacactcagtcacattaacaacttgggaaaaaaatggcaatgttacggtgaattctcaggtgaacttttttcagttataaaacatctattttgaatctgtaaatattttaaatgttttattaaggcatgtaataaactattctttgaaacttgttgggtagaatgaaaattaaagccataatggtaaaagatggcatactgattataaaagaagcagaaaaacattgatttttttatatctttcataatataattttctaacaatgcaataaaaccactaaacttttgtgtccatattttactgagaccatgtttcattaaaagcatagtttcatagtatttaatttacatttctccctaatgttcttacccaaatgtacctgaactaaaaaatgttagatgttggtgataagttgacagttaaataaaattctctaaaattgcttctaattgaaagaa

SEQ ID NO: 71326 - DNA, 613 bp, Homo sapiens
tttttattgttgctgttgttgttttgtttgtgactttactctttcttactgcttgcttttctcattgatatttcaggaagttttgtttactgactttgttctgtaccccctcatggaggtaaataaatcatattactattctcctaataggaaaacagtatcatcctaaatggatctgtgatggtcagcaccacccgcctacccagttcctccagtggagaccagttgggtagtggtgactgggtacgctacaagctctgcatgtgtgctgatgggacgctcttcaaggtgcaagtaaccagccagaacatgggctgccaaatctcagacaacccctgtggaaacactcattaaaagaaccccagaggtcaccaacatgtttatatcttgacttgacttttttatgcatgcaaatcattgtttttacagagtttgtgataactcataattattttaatggcagagcactgctgtatctgttttatggtctacatagttaaaatcttctcagagagcctaaattctaatacattttattaatttatactaatcttcatatttactgttctctaaaataattatgagaagcaaataaaatcaaaagtcatgttta

SEQ ID NO: 71327 - DNA, 495 bp, Homo sapiens
ttcccacgctctcttttcctcattctccacctccagctccctggcagccaggcaagagacagaagagccttctctgggattcctgatgcatatagaaaaaagatctgaagatactgtcatttggcaagtcccggtgaaaaagccatgtaatttccctcttgtgacacctgtcagtcacaagccctacccctcaaataattttctatgaattcatcactaagtatgaatactgagccagggatcaatagacttttgaggaaagtgccaagaattgaaaaatgatagagatgaaaactcctaaaccatggaaaaaatagaaactcatggaatagagaaaatgccacaaaaactaccaaaaaaacaaaagccctaaattcagtattttcagagaaataagaatatactgcatcaatgaaacaagaataacatgccatttaaaaggcacaagccaggcacagtggctcatgcctgataaagtgagaccctgtctctacc

SEQ ID NO: 71328 - DNA, 4731 bp, Homo sapiens
tgcctgggcaatatagcgagacccctttctccagaaaaaggaaaaaaaaaaaaaaaaatcgataccatcgacctcgaggaggggcgggcacagtcgggcggggagctcggcggcggcgggcgcgggaagatggcggcagcggcggcggcggctgcagaacagcaaagttccaatggtcctgtaaagaagtccatgcgtgagaaggctgttgagagaaggagtgtcaataaagagcacaacagtaactttaaagctggatacattccgattgatgaagatcgtctccacaaaacagggttgagaggaagaaagggcaatttagccatctgtgtgattatcctcttgtttatcctggctgtcatcaatttaataataacacttgttatttgggccgtgattcgcattggaccaaatggctgtgatagtatggagtttcatgaaagtggcctgcttcgatttaagcaagtatctgacatgggagtgatccaccctctttataaaagcacagtaggaggaaggcgaaatgaaaatttggtcatcactggcaacaaccagcctattgtttttcagcaagggacaacaaagctcagtgtagaaaacaacaaaacttctattacaagtgacatcggcatgcagttttttgacccgaggactcaaaatatcttattcagcacagactatgaaactcatgagtttcatttgccaagtggagtgaaaagtttgaatgttcaaaaggcatctactgaaaggattaccagcaatgctaccagtgatttaaatataaaagttgatgggcgtgctattgtgcgtggaaatgaaggtgtattcattatgggcaaaaccattgaatttcacatgggtggtaatatggagttaaaggcggaaaacagtatcatcctaaatggatctgtgatggtcagcaccacccgcctacccagttcctccagtggagaccagttgggtagtggtgactgggtacgctacaagctctgcatgtgtgctgatgggacgctcttcaaggtgcaagtaaccagccagaacatgggctgccaaatctcagacaacccctgtggaaacactcattaaaagaaccccagaggtcaccaacatgtttatatcttgacttgacttttttatgcatgcaaatcattgtttttacagagtttgtgataactcataattattttaatggcagagcactgctgtatctgttttatggtctacatagttaaaatcttctcagagagcctaaattctaatacattttattaatttatactaatcttcatatttactgttctctaaaataattatgagaagcaaataaaatcaaaagtcatgtttaaagacgtgtttttaaaattccactatcccttttctaaaggttaaaggtctgaagcagctgtttagattcactgtaagtaaactttggtaactctaatggggatagacccacttaagatatttaaaaaggtatggcatcagcgtttcatgctctgccttttagcttctaaaaggaaagatgcagatttctagtgcattaagcctgagccatattctcacatgcaagtgaagtcattaaagaactttacatatgtgagatagatacaatggttccttagttttgcactgggaagaaaatattttgtaaaagaatgtttatttgaaataatgataactatcaattgttcacaatgtggtggaaattaaaacaccatctcagctttaacttttaaataataatgataactatctttattgagcatcttctacatcctaggcattgtcctaggcattgcatgtttatatccccaattctcaccacaaccctgcaagtaggtggtattatccaagttttacccattaagaaactgaagatcagagaagttaagaaacttgctcaacatcatatagtaagtagcagagttgggattggaattcaggcatgactcaaacctggatgtacttgattccaaatgccatgttgttttcactctctgcactgactttttaattatttaaaactctagaaagatgaacaaaggttaatttaaacttacctaagaagatgagaatcaaacaaaacagatatgcttactctagttaaaaagaaaataaatctcatgtcagacccagaaaggaccaatcactgtccgattgtaagctatgttgggccaattccaaaatattatacgatggagaggtcaaatttacctacttctgagttacctcagtttcccaacaatggaccttggcacactggagtaacaatacataacagagttgccaagatatttataccctcagcactcggggcaacacagtggaaagtggggaggccatagacccaaacaagttctttgggccaggcatggcctagtaagtacaccatgcctcgaaaataagtccagaagcactggactaaagagtgctaatgcaggaaataatacacataatttttaggtaaggataataatttatctctgctcctaatattactatcccattgtaattatttataaccctcaagccagttgatttttaatatatttgattggaaaagaactctctggtattattaagactcacacagaatcagggacagggcccccaaaggagtttgctgtaaaataggcagtagagttgtggcatgggcccaaccctgcattcaagtgtaacagcattctgtcagggtcactttgaattgtgcacataagaaaaccaatacaaaaaacaatttgtattcaatattgtcacatttctctctggtagaaaaatcaaataccttagagattatgaagtcattaatttatactgaaattggattgacttactacctaacactgagcgctgtttttaaatgaaaagaatgagatttataaccacttgagtgttattgcagtgatatttgaactcatttgaatatattcagtatcatttaatgtctgaattcagaaaaaaatgccgaaatttttattcagatggtccataaattaaattgcatattcattacttatctgctctatttagatttattttaaaagtttatttaagtaaatatttttataaaaaccagaaaacactgtattacaaaatattatttattaaatgtagttcaggaaataatctatttttactcttttttgggaaatacttgtgtttttgatacatctccatgaagtgcttttgagaggagaggctattttgatgtttttatacaactgaaggttaacagccatagcattttatgatactttacaggtagtcctggctttttccctgaaacataagcttggaaaatctattagaaagcagaacagggcaaactctccattttacttatggcttttctaatttttaattaattaatttatttttttgagacagagtcttgttctgtcgccaggctggagtgcagtggcacaatctcggctctcggctcactgcaacctctgcctcccaggttcaagcgattctcctgcctcagcctcccgagtacctgggactacaggcatgtgccacagttcccggctaatttttgtatttttagtagagacggggtttcaccatgttggccaggatggtctcaatctcttgacctcgtgatctgcctgccttggcctcccaaagtgctgggattacaggtgtgagccaccacgcctggccggcttatttttatccacagtaaatcttcagcaactcattgtctccaccagatagtatttttctgtaaatgaaatgctgacttcgcctcttcctgctgtatgctcatccctgcactgagcacagatatgacaagcagtagccatgggggaggtgggtgacaaagataggaccccgggagggggcgcaggtacatgctagtttcaattaccacagtattctagagaccgggttgcaatgacaaggggggcaaatgaaatcaatgcaagatttcttaataatgggcagacagaaaaatgtaaaaccacacaaaacggactgctgataatattttaaaatatacttatttgtcttctttttgcattgtgaaaaaaacaaaataaattttgtgtgataattttgatgatgaaaggtggaagttctacctagatttgaatgagtgtttttttaagggaatgagaatgtcatggtgctaaacctgacaaataagagatcattgaaatgctgaaaattttaacagtcttcttaaaagtattgagggggcaaaaattaccaattatggtatacaaaaataagcctataaatgtgtttcacattgctaacttgagtttcagttgattcagtttgtaataactagtaatgagcttctgtttacaataaaaattctgtaaattgaaaaaaaaaaaaaaaaaaaaaaaaaaaaaaaaaaaaaaaaaaaaaaaaaaaaaaaaaaaaaaaaaaaaaaaaaaaaaaaaaaggggggggggggcggaaaaaatttcccggggggggccaaccacagatgagaccagcagaccacccgtactgtatgttgcagaaaggagggggccccccccagaagaaaggaggttcatataatacaacaggcgagaggaggcgcggcgcggtcgctaacaaacaggacggtcgaggaggaagcaaaaaaaacgagcagcgcgaagaggagaatcattttagtgaggagacgcacaccaccctggggggggggggaacaaatcaagggaaacaaaaaccaacgaagaaataaagagccgcgggaagacacaa

SEQ ID NO: 71329 - DNA, 4521 bp, Homo sapiens
tgcctgggcaatatagcgagacccctttctccagaaaaaggaaaaaaaaaaaaaaaaatcgataccatcgacctcgaggaggggcgggcacagtcgggcggggagctcggcggcggcgggcgcgggaagatggcggcagcggcggcggcggctgcagaacagataacacttgttatttgggccgtgattcgcattggaccaaatggctgtgatagtatggagtttcatgaaagtggcctgcttcgatttaagcaagtatctgacatgggagtgatccaccctctttataaaagcacagtaggaggaaggcgaaatgaaaatttggtcatcactggcaacaaccagcctattgtttttcagcaagggacaacaaagctcagtgtagaaaacaacaaaacttctattacaagtgacatcggcatgcagttttttgacccgaggactcaaaatatcttattcagcacagactatgaaactcatgagtttcatttgccaagtggagtgaaaagtttgaatgttcaaaaggcatctactgaaaggattaccagcaatgctaccagtgatttaaatataaaagttgatgggcgtgctattgtgcgtggaaatgaaggtgtattcattatgggcaaaaccattgaatttcacatgggtggtaatatggagttaaaggcggaaaacagtatcatcctaaatggatctgtgatggtcagcaccacccgcctacccagttcctccagtggagaccagttgggtagtggtgactgggtacgctacaagctctgcatgtgtgctgatgggacgctcttcaaggtgcaagtaaccagccagaacatgggctgccaaatctcagacaacccctgtggaaacactcattaaaagaaccccagaggtcaccaacatgtttatatcttgacttgacttttttatgcatgcaaatcattgtttttacagagtttgtgataactcataattattttaatggcagagcactgctgtatctgttttatggtctacatagttaaaatcttctcagagagcctaaattctaatacattttattaatttatactaatcttcatatttactgttctctaaaataattatgagaagcaaataaaatcaaaagtcatgtttaaagacgtgtttttaaaattccactatcccttttctaaaggttaaaggtctgaagcagctgtttagattcactgtaagtaaactttggtaactctaatggggatagacccacttaagatatttaaaaaggtatggcatcagcgtttcatgctctgccttttagcttctaaaaggaaagatgcagatttctagtgcattaagcctgagccatattctcacatgcaagtgaagtcattaaagaactttacatatgtgagatagatacaatggttccttagttttgcactgggaagaaaatattttgtaaaagaatgtttatttgaaataatgataactatcaattgttcacaatgtggtggaaattaaaacaccatctcagctttaacttttaaataataatgataactatctttattgagcatcttctacatcctaggcattgtcctaggcattgcatgtttatatccccaattctcaccacaaccctgcaagtaggtggtattatccaagttttacccattaagaaactgaagatcagagaagttaagaaacttgctcaacatcatatagtaagtagcagagttgggattggaattcaggcatgactcaaacctggatgtacttgattccaaatgccatgttgttttcactctctgcactgactttttaattatttaaaactctagaaagatgaacaaaggttaatttaaacttacctaagaagatgagaatcaaacaaaacagatatgcttactctagttaaaaagaaaataaatctcatgtcagacccagaaaggaccaatcactgtccgattgtaagctatgttgggccaattccaaaatattatacgatggagaggtcaaatttacctacttctgagttacctcagtttcccaacaatggaccttggcacactggagtaacaatacataacagagttgccaagatatttataccctcagcactcggggcaacacagtggaaagtggggaggccatagacccaaacaagttctttgggccaggcatggcctagtaagtacaccatgcctcgaaaataagtccagaagcactggactaaagagtgctaatgcaggaaataatacacataatttttaggtaaggataataatttatctctgctcctaatattactatcccattgtaattatttataaccctcaagccagttgatttttaatatatttgattggaaaagaactctctggtattattaagactcacacagaatcagggacagggcccccaaaggagtttgctgtaaaataggcagtagagttgtggcatgggcccaaccctgcattcaagtgtaacagcattctgtcagggtcactttgaattgtgcacataagaaaaccaatacaaaaaacaatttgtattcaatattgtcacatttctctctggtagaaaaatcaaataccttagagattatgaagtcattaatttatactgaaattggattgacttactacctaacactgagcgctgtttttaaatgaaaagaatgagatttataaccacttgagtgttattgcagtgatatttgaactcatttgaatatattcagtatcatttaatgtctgaattcagaaaaaaatgccgaaatttttattcagatggtccataaattaaattgcatattcattacttatctgctctatttagatttattttaaaagtttatttaagtaaatatttttataaaaaccagaaaacactgtattacaaaatattatttattaaatgtagttcaggaaataatctatttttactcttttttgggaaatacttgtgtttttgatacatctccatgaagtgcttttgagaggagaggctattttgatgtttttatacaactgaaggttaacagccatagcattttatgatactttacaggtagtcctggctttttccctgaaacataagcttggaaaatctattagaaagcagaacagggcaaactctccattttacttatggcttttctaatttttaattaattaatttatttttttgagacagagtcttgttctgtcgccaggctggagtgcagtggcacaatctcggctctcggctcactgcaacctctgcctcccaggttcaagcgattctcctgcctcagcctcccgagtacctgggactacaggcatgtgccacagttcccggctaatttttgtatttttagtagagacggggtttcaccatgttggccaggatggtctcaatctcttgacctcgtgatctgcctgccttggcctcccaaagtgctgggattacaggtgtgagccaccacgcctggccggcttatttttatccacagtaaatcttcagcaactcattgtctccaccagatagtatttttctgtaaatgaaatgctgacttcgcctcttcctgctgtatgctcatccctgcactgagcacagatatgacaagcagtagccatgggggaggtgggtgacaaagataggaccccgggagggggcgcaggtacatgctagtttcaattaccacagtattctagagaccgggttgcaatgacaaggggggcaaatgaaatcaatgcaagatttcttaataatgggcagacagaaaaatgtaaaaccacacaaaacggactgctgataatattttaaaatatacttatttgtcttctttttgcattgtgaaaaaaacaaaataaattttgtgtgataattttgatgatgaaaggtggaagttctacctagatttgaatgagtgtttttttaagggaatgagaatgtcatggtgctaaacctgacaaataagagatcattgaaatgctgaaaattttaacagtcttcttaaaagtattgagggggcaaaaattaccaattatggtatacaaaaataagcctataaatgtgtttcacattgctaacttgagtttcagttgattcagtttgtaataactagtaatgagcttctgtttacaataaaaattctgtaaattgaaaaaaaaaaaaaaaaaaaaaaaaaaaaaaaaaaaaaaaaaaaaaaaaaaaaaaaaaaaaaaaaaaaaaaaaaaaaaaaaaaggggggggggggcggaaaaaatttcccggggggggccaaccacagatgagaccagcagaccacccgtactgtatgttgcagaaaggagggggccccccccagaagaaaggaggttcatataatacaacaggcgagaggaggcgcggcgcggtcgctaacaaacaggacggtcgaggaggaagcaaaaaaaacgagcagcgcgaagaggagaatcattttagtgaggagacgcacaccaccctggggggggggggaacaaatcaagggaaacaaaaaccaacgaagaaataaagagccgcgggaagacacaa

SEQ ID NO: 71330 - DNA, 4443 bp, Homo sapiens
attatttttatatgaggcagttatatgtgcgaaggagaggaggggctaggctggagaccactctcttaattctccaccgctacaataacacttgttatttgggccgtgattcgcattggaccaaatggctgtgatagtatggagtttcatgaaagtggcctgcttcgatttaagcaagtatctgacatgggagtgatccaccctctttataaaagcacagtaggaggaaggcgaaatgaaaatttggtcatcactggcaacaaccagcctattgtttttcagcaagggacaacaaagctcagtgtagaaaacaacaaaacttctattacaagtgacatcggcatgcagttttttgacccgaggactcaaaatatcttattcagcacagactatgaaactcatgagtttcatttgccaagtggagtgaaaagtttgaatgttcaaaaggcatctactgaaaggattaccagcaatgctaccagtgatttaaatataaaagttgatgggcgtgctattgtgcgtggaaatgaaggtgtattcattatgggcaaaaccattgaatttcacatgggtggtaatatggagttaaaggcggaaaacagtatcatcctaaatggatctgtgatggtcagcaccacccgcctacccagttcctccagtggagaccagttgggtagtggtgactgggtacgctacaagctctgcatgtgtgctgatgggacgctcttcaaggtgcaagtaaccagccagaacatgggctgccaaatctcagacaacccctgtggaaacactcattaaaagaaccccagaggtcaccaacatgtttatatcttgacttgacttttttatgcatgcaaatcattgtttttacagagtttgtgataactcataattattttaatggcagagcactgctgtatctgttttatggtctacatagttaaaatcttctcagagagcctaaattctaatacattttattaatttatactaatcttcatatttactgttctctaaaataattatgagaagcaaataaaatcaaaagtcatgtttaaagacgtgtttttaaaattccactatcccttttctaaaggttaaaggtctgaagcagctgtttagattcactgtaagtaaactttggtaactctaatggggatagacccacttaagatatttaaaaaggtatggcatcagcgtttcatgctctgccttttagcttctaaaaggaaagatgcagatttctagtgcattaagcctgagccatattctcacatgcaagtgaagtcattaaagaactttacatatgtgagatagatacaatggttccttagttttgcactgggaagaaaatattttgtaaaagaatgtttatttgaaataatgataactatcaattgttcacaatgtggtggaaattaaaacaccatctcagctttaacttttaaataataatgataactatctttattgagcatcttctacatcctaggcattgtcctaggcattgcatgtttatatccccaattctcaccacaaccctgcaagtaggtggtattatccaagttttacccattaagaaactgaagatcagagaagttaagaaacttgctcaacatcatatagtaagtagcagagttgggattggaattcaggcatgactcaaacctggatgtacttgattccaaatgccatgttgttttcactctctgcactgactttttaattatttaaaactctagaaagatgaacaaaggttaatttaaacttacctaagaagatgagaatcaaacaaaacagatatgcttactctagttaaaaagaaaataaatctcatgtcagacccagaaaggaccaatcactgtccgattgtaagctatgttgggccaattccaaaatattatacgatggagaggtcaaatttacctacttctgagttacctcagtttcccaacaatggaccttggcacactggagtaacaatacataacagagttgccaagatatttataccctcagcactcggggcaacacagtggaaagtggggaggccatagacccaaacaagttctttgggccaggcatggcctagtaagtacaccatgcctcgaaaataagtccagaagcactggactaaagagtgctaatgcaggaaataatacacataatttttaggtaaggataataatttatctctgctcctaatattactatcccattgtaattatttataaccctcaagccagttgatttttaatatatttgattggaaaagaactctctggtattattaagactcacacagaatcagggacagggcccccaaaggagtttgctgtaaaataggcagtagagttgtggcatgggcccaaccctgcattcaagtgtaacagcattctgtcagggtcactttgaattgtgcacataagaaaaccaatacaaaaaacaatttgtattcaatattgtcacatttctctctggtagaaaaatcaaataccttagagattatgaagtcattaatttatactgaaattggattgacttactacctaacactgagcgctgtttttaaatgaaaagaatgagatttataaccacttgagtgttattgcagtgatatttgaactcatttgaatatattcagtatcatttaatgtctgaattcagaaaaaaatgccgaaatttttattcagatggtccataaattaaattgcatattcattacttatctgctctatttagatttattttaaaagtttatttaagtaaatatttttataaaaaccagaaaacactgtattacaaaatattatttattaaatgtagttcaggaaataatctatttttactcttttttgggaaatacttgtgtttttgatacatctccatgaagtgcttttgagaggagaggctattttgatgtttttatacaactgaaggttaacagccatagcattttatgatactttacaggtagtcctggctttttccctgaaacataagcttggaaaatctattagaaagcagaacagggcaaactctccattttacttatggcttttctaatttttaattaattaatttatttttttgagacagagtcttgttctgtcgccaggctggagtgcagtggcacaatctcggctctcggctcactgcaacctctgcctcccaggttcaagcgattctcctgcctcagcctcccgagtacctgggactacaggcatgtgccacagttcccggctaatttttgtatttttagtagagacggggtttcaccatgttggccaggatggtctcaatctcttgacctcgtgatctgcctgccttggcctcccaaagtgctgggattacaggtgtgagccaccacgcctggccggcttatttttatccacagtaaatcttcagcaactcattgtctccaccagatagtatttttctgtaaatgaaatgctgacttcgcctcttcctgctgtatgctcatccctgcactgagcacagatatgacaagcagtagccatgggggaggtgggtgacaaagataggaccccgggagggggcgcaggtacatgctagtttcaattaccacagtattctagagaccgggttgcaatgacaaggggggcaaatgaaatcaatgcaagatttcttaataatgggcagacagaaaaatgtaaaaccacacaaaacggactgctgataatattttaaaatatacttatttgtcttctttttgcattgtgaaaaaaacaaaataaattttgtgtgataattttgatgatgaaaggtggaagttctacctagatttgaatgagtgtttttttaagggaatgagaatgtcatggtgctaaacctgacaaataagagatcattgaaatgctgaaaattttaacagtcttcttaaaagtattgagggggcaaaaattaccaattatggtatacaaaaataagcctataaatgtgtttcacattgctaacttgagtttcagttgattcagtttgtaataactagtaatgagcttctgtttacaataaaaattctgtaaattgaaaaaaaaaaaaaaaaaaaaaaaaaaaaaaaaaaaaaaaaaaaaaaaaaaaaaaaaaaaaaaaaaaaaaaaaaaaaaaaaaaggggggggggggcggaaaaaatttcccggggggggccaaccacagatgagaccagcagaccacccgtactgtatgttgcagaaaggagggggccccccccagaagaaaggaggttcatataatacaacaggcgagaggaggcgcggcgcggtcgctaacaaacaggacggtcgaggaggaagcaaaaaaaacgagcagcgcgaagaggagaatcattttagtgaggagacgcacaccaccctggggggggggggaacaaatcaagggaaacaaaaaccaacgaagaaataaagagccgcgggaagacacaa

SEQ ID NO: 71331 - DNA, 3999 bp, Homo sapiens
tttttattgttgctgttgttgttttgtttgtgactttactctttcttactgcttgcttttctcattgatatttcaggaagttttgtttactgactttgttctgtaccccctcatggaggtaaataaatcatattactattctcctaataggaaaacagtatcatcctaaatggatctgtgatggtcagcaccacccgcctacccagttcctccagtggagaccagttgggtagtggtgactgggtacgctacaagctctgcatgtgtgctgatgggacgctcttcaaggtgcaagtaaccagccagaacatgggctgccaaatctcagacaacccctgtggaaacactcattaaaagaaccccagaggtcaccaacatgtttatatcttgacttgacttttttatgcatgcaaatcattgtttttacagagtttgtgataactcataattattttaatggcagagcactgctgtatctgttttatggtctacatagttaaaatcttctcagagagcctaaattctaatacattttattaatttatactaatcttcatatttactgttctctaaaataattatgagaagcaaataaaatcaaaagtcatgtttaaagacgtgtttttaaaattccactatcccttttctaaaggttaaaggtctgaagcagctgtttagattcactgtaagtaaactttggtaactctaatggggatagacccacttaagatatttaaaaaggtatggcatcagcgtttcatgctctgccttttagcttctaaaaggaaagatgcagatttctagtgcattaagcctgagccatattctcacatgcaagtgaagtcattaaagaactttacatatgtgagatagatacaatggttccttagttttgcactgggaagaaaatattttgtaaaagaatgtttatttgaaataatgataactatcaattgttcacaatgtggtggaaattaaaacaccatctcagctttaacttttaaataataatgataactatctttattgagcatcttctacatcctaggcattgtcctaggcattgcatgtttatatccccaattctcaccacaaccctgcaagtaggtggtattatccaagttttacccattaagaaactgaagatcagagaagttaagaaacttgctcaacatcatatagtaagtagcagagttgggattggaattcaggcatgactcaaacctggatgtacttgattccaaatgccatgttgttttcactctctgcactgactttttaattatttaaaactctagaaagatgaacaaaggttaatttaaacttacctaagaagatgagaatcaaacaaaacagatatgcttactctagttaaaaagaaaataaatctcatgtcagacccagaaaggaccaatcactgtccgattgtaagctatgttgggccaattccaaaatattatacgatggagaggtcaaatttacctacttctgagttacctcagtttcccaacaatggaccttggcacactggagtaacaatacataacagagttgccaagatatttataccctcagcactcggggcaacacagtggaaagtggggaggccatagacccaaacaagttctttgggccaggcatggcctagtaagtacaccatgcctcgaaaataagtccagaagcactggactaaagagtgctaatgcaggaaataatacacataatttttaggtaaggataataatttatctctgctcctaatattactatcccattgtaattatttataaccctcaagccagttgatttttaatatatttgattggaaaagaactctctggtattattaagactcacacagaatcagggacagggcccccaaaggagtttgctgtaaaataggcagtagagttgtggcatgggcccaaccctgcattcaagtgtaacagcattctgtcagggtcactttgaattgtgcacataagaaaaccaatacaaaaaacaatttgtattcaatattgtcacatttctctctggtagaaaaatcaaataccttagagattatgaagtcattaatttatactgaaattggattgacttactacctaacactgagcgctgtttttaaatgaaaagaatgagatttataaccacttgagtgttattgcagtgatatttgaactcatttgaatatattcagtatcatttaatgtctgaattcagaaaaaaatgccgaaatttttattcagatggtccataaattaaattgcatattcattacttatctgctctatttagatttattttaaaagtttatttaagtaaatatttttataaaaaccagaaaacactgtattacaaaatattatttattaaatgtagttcaggaaataatctatttttactcttttttgggaaatacttgtgtttttgatacatctccatgaagtgcttttgagaggagaggctattttgatgtttttatacaactgaaggttaacagccatagcattttatgatactttacaggtagtcctggctttttccctgaaacataagcttggaaaatctattagaaagcagaacagggcaaactctccattttacttatggcttttctaatttttaattaattaatttatttttttgagacagagtcttgttctgtcgccaggctggagtgcagtggcacaatctcggctctcggctcactgcaacctctgcctcccaggttcaagcgattctcctgcctcagcctcccgagtacctgggactacaggcatgtgccacagttcccggctaatttttgtatttttagtagagacggggtttcaccatgttggccaggatggtctcaatctcttgacctcgtgatctgcctgccttggcctcccaaagtgctgggattacaggtgtgagccaccacgcctggccggcttatttttatccacagtaaatcttcagcaactcattgtctccaccagatagtatttttctgtaaatgaaatgctgacttcgcctcttcctgctgtatgctcatccctgcactgagcacagatatgacaagcagtagccatgggggaggtgggtgacaaagataggaccccgggagggggcgcaggtacatgctagtttcaattaccacagtattctagagaccgggttgcaatgacaaggggggcaaatgaaatcaatgcaagatttcttaataatgggcagacagaaaaatgtaaaaccacacaaaacggactgctgataatattttaaaatatacttatttgtcttctttttgcattgtgaaaaaaacaaaataaattttgtgtgataattttgatgatgaaaggtggaagttctacctagatttgaatgagtgtttttttaagggaatgagaatgtcatggtgctaaacctgacaaataagagatcattgaaatgctgaaaattttaacagtcttcttaaaagtattgagggggcaaaaattaccaattatggtatacaaaaataagcctataaatgtgtttcacattgctaacttgagtttcagttgattcagtttgtaataactagtaatgagcttctgtttacaataaaaattctgtaaattgaaaaaaaaaaaaaaaaaaaaaaaaaaaaaaaaaaaaaaaaaaaaaaaaaaaaaaaaaaaaaaaaaaaaaaaaaaaaaaaaaaggggggggggggcggaaaaaatttcccggggggggccaaccacagatgagaccagcagaccacccgtactgtatgttgcagaaaggagggggccccccccagaagaaaggaggttcatataatacaacaggcgagaggaggcgcggcgcggtcgctaacaaacaggacggtcgaggaggaagcaaaaaaaacgagcagcgcgaagaggagaatcattttagtgaggagacgcacaccaccctggggggggggggaacaaatcaagggaaacaaaaaccaacgaagaaataaagagccgcgggaagacacaa

SEQ ID NO: 71332 - DNA, 1707 bp, Homo sapiens
  misc_feature (16)..(16): n is a, c, g, or t
ctcgaggcccaagaantcggcacgagtaagtaaatatttttataaaaaccagaaaacactgtattacaaaatattatttattaaatgtagttcaggaaataatctatttttactcttttttgggaaatacttgtgtttttgatacatctccatgaagtgcttttgagaggagaggctattttgatgtttttatacaactgaaggttaacagccatagcattttatgatactttacaggtagtcctggctttttccctgaaacataagcttggaaaatctattagaaagcagaacagggcaaactctccattttacttatggcttttctaatttttaattaattaatttatttttttgagacagagtcttgttctgtcgccaggctggagtgcagtggcacaatctcggctctcggctcactgcaacctctgcctcccaggttcaagcgattctcctgcctcagcctcccgagtacctgggactacaggcatgtgccacagttcccggctaatttttgtatttttagtagagacggggtttcaccatgttggccaggatggtctcaatctcttgacctcgtgatctgcctgccttggcctcccaaagtgctgggattacaggtgtgagccaccacgcctggccggcttatttttatccacagtaaatcttcagcaactcattgtctccaccagatagtatttttctgtaaatgaaatgctgacttcgcctcttcctgctgtatgctcatccctgcactgagcacagatatgacaagcagtagccatgggggaggtgggtgacaaagataggaccccgggagggggcgcaggtacatgctagtttcaattaccacagtattctagagaccgggttgcaatgacaaggggggcaaatgaaatcaatgcaagatttcttaataatgggcagacagaaaaatgtaaaaccacacaaaacggactgctgataatattttaaaatatacttatttgtcttctttttgcattgtgaaaaaaacaaaataaattttgtgtgataattttgatgatgaaaggtggaagttctacctagatttgaatgagtgtttttttaagggaatgagaatgtcatggtgctaaacctgacaaataagagatcattgaaatgctgaaaattttaacagtcttcttaaaagtattgagggggcaaaaattaccaattatggtatacaaaaataagcctataaatgtgtttcacattgctaacttgagtttcagttgattcagtttgtaataactagtaatgagcttctgtttacaataaaaattctgtaaattgaaaaaaaaaaaaaaaaaaaaaaaaaaaaaaaaaaaaaaaaaaaaaaaaaaaaaaaaaaaaaaaaaaaaaaaaaaaaaaaaaaggggggggggggcggaaaaaatttcccggggggggccaaccacagatgagaccagcagaccacccgtactgtatgttgcagaaaggagggggccccccccagaagaaaggaggttcatataatacaacaggcgagaggaggcgcggcgcggtcgctaacaaacaggacggtcgaggaggaagcaaaaaaaacgagcagcgcgaagaggagaatcattttagtgaggagacgcacaccaccctggggggggggggaacaaatcaagggaaacaaaaaccaacgaagaaataaagagccgcgggaagacacaa

SEQ ID NO: 71333 - DNA, 2124 bp, Homo sapiens
tgcctgggcaatatagcgagacccctttctccagaaaaaggaaaaaaaaaaaaaaaaatcgataccatcgacctcgaggaggggcgggcacagtcgggcggggagctcggcggcggcgggcgcgggaagatggcggcagcggcggcggcggctgcagaacagcaaagttccaatggtcctgtaaagaagtccatgcgtgagaaggctgttgagagaaggagtgtcaataaagagcacaacagtaactttaaagctggatacattccgattgatgaagatcgtctccacaaaacagggttgagaggaagaaagggcaatttagccatctgtgtgattatcctcttgtttatcctggctgtcatcaatttaataataacacttgttatttgggccgtgattcgcattggaccaaatggctgtgatagtatggagtttcatgaaagtggcctgcttcgatttaagcaagtatctgacatgggagtgatccaccctctttataaaagcacagtaggaggaaggcgaaatgaaaatttggtcatcactggcaacaaccagcctattgtttttcagcaagggacaacaaagctcagtgtagaaaacaacaaaacttctattacaagtgacatcggcatgcagttttttgacccgaggactcaaaatatcttattcagcacagactatgaaactcatgagtttcatttgccaagtggagtgaaaagtttgaatgttcaaaaggcatctactgaaaggattaccagcaatgctaccagtgatttaaatataaaagttgatgggcgtgctattgtgcgtggaaatgaaggtgtattcattatgggcaaaaccattgaatttcacatgggtggtaatatggagttaaaggcggaaaacagtatcatcctaaatggatctgtgatggtcagcaccacccgcctacccagttcctccagtggagaccagttgggtagtggtgactgggtacgctacaagctctgcatgtgtgctgatgggacgctcttcaaggtgcaagtaaccagccagaacatgggctgccaaatctcagacaacccctgtggaaacactcattaaaagaaccccagaggtcaccaacatgtttatatcttgacttgacttttttatgcatgcaaatcattgtttttacagagtttgtgataactcataattattttaatggcagagcactgctgtatctgttttatggtctacatagttaaaatcttctcagagagcctaaattctaatacattttattaatttatactaatcttcatatttactgttctctaaaataattatgagaagcaaataaaatcaaaagtcatgtttaaagacgtgtttttaaaattccactatcccttttctaaaggttaaaggtctgaagcagctgtttagattcactgtaagtaaactttggtaactctaatggggatagacccacttaagatatttaaaaaggtatggcatcagcgtttcatgctctgccttttagcttctaaaaggaaagatgcagatttctagtgcattaagcctgagccatattctcacatgcaagtgaagtcattaaagaactttacatatgtgagatagatacaatggttccttagttttgcactgggaagaaaatattttgtaaaagaatgtttatttgaaataatgataactatcaattgttcacaatgtggtggaaattaaaacaccatctcagctttaacttttaaataataatgataactatctttattgagcatcttctacatcctaggcattgtcctaggcattgcatgtttatatccccaattctcaccacaaccctgcaagtaggtggtattatccaagttttacccattaagaaactgaagatcagagaagttaagaaacttgctcaacatcatatagtaagtagcagagttgggattggaattcctttttttttttttttaactagagtaagcatatctgttttgtttgattctcatcttcttaggtaagtttaaattaacctttgttcatctttctagagttttaaataattaaaaagtcagtgcagagagtgaaaacaacatggcatttggaatcaagtacatccaggtttgagtcatgcctgaa

SEQ ID NO: 71334 - DNA, 1345 bp, Homo sapiens
tgcctgggcaatatagcgagacccctttctccagaaaaaggaaaaaaaaaaaaaaaaatcgataccatcgacctcgaggaggggcgggcacagtcgggcggggagctcggcggcggcgggcgcgggaagatggcggcagcggcggcggcggctgcagaacagcaaagttccaatggtcctgtaaagaagtccatgcgtgagaaggctgttgagagaaggagtgtcaataaagagcacaacagtaactttaaagctggatacattccgattgatgaagatcgtctccacaaaacagggttgagaggaagaaagggcaatttagccatctgtgtgattatcctcttgtttatcctggctgtcatcaatttaataataacacttgttatttgggccgtgattcgcattggaccaaatggctgtgatagtatggagtttcatgaaagtggcctgcttcgatttaagcaagtatctgacatgggagtgatccaccctctttataaaagcacagtaggaggaaggcgaaatgaaaatttggtcatcactggcaacaaccagcctattgtttttcagcaagggacaacaaagctcagtgtagaaaacaacaaaacttctattacaagtgacatcggcatgcagttttttgacccgaggactcaaaatatcttattcagcacagactatgaaactcatgagtttcatttgccaagtggagtgaaaagtttgaatgttcaaaaggcatctactgaaaggattaccagcaatgctaccagtgatttaaatataaaagttgatgggcgtgctattgtgcgtggaaatgaaggtgtattcattatgggcaaaaccattgaatttcacatgggtggtaatatggagttaaaggcggaaaacagtatcatcctaaatggatctgtgatggtcagcaccacccgcctacccagttcctccagtggagaccagttgggtagtggtgactgggtacgctacaagctctgcatgtgtgctgatgggacgctcttcaaggtgcaagtaaccagccagaacatgggctgccaaatctcagacaacccctgtggaaacactcattaaaagaaccccagaggtcaccaacatgtttatatcttgacttgacttttttatgcatgcaaatcattgtttttacagagtttgtgataactcataattattttaatggcagagcactgctgtatctgttttatggtctacatagttaaaatcttctcagagagcctaaattctaatacattttattaatttatactaatcttcatatttactgttctctaaaataattatgagaagcaaataaaatcaaaagtcatgttta

SEQ ID NO: 71335 - DNA, 4477 bp, Homo sapiens
  misc_feature (4370)..(4370): n is a, c, g, or t
  misc_feature (4379)..(4379): n is a, c, g, or t
tgcctgggcaatatagcgagacccctttctccagaaaaaggaaaaaaaaaaaaaaaaatcgataccatcgacctcgaggaggggcgggcacagtcgggcggggagctcggcggcggcgggcgcgggaagatggcggcagcggcggcggcggctgcagaacagcaaagttccaatggtcctgtaaagaagtccatgcgtgagaaggctgttgagagaaggagtgtcaataaagagcacaacagtaactttaaagctggatacattccgattgatgaagatcgtctccacaaaacagggttgagaggaagaaagggcaatttagccatctgtgtgattatcctcttgtttatcctggctgtcatcaatttaataataacacttgttatttgggccgtgattcgcattggaccaaatggctgtgatagtatggagtttcatgaaagtggcctgcttcgatttaagcaagtatctgacatgggagtgatccaccctctttataaaagcacagtaggaggaaggcgaaatgaaaatttggtcatcactggcaacaaccagcctattgtttttcagcaagggacaacaaagctcagtgtagaaaacaacaaaacttctattacaagtgacatcggcatgcagttttttgacccgaggactcaaaatatcttattcagcacagactatgaaactcatgagtttcatttgccaagtggagtgaaaagtttgaatgttcaaaaggcatctactgaaaggattaccagcaatgctaccagtgatttaaatataaaagttgatgggcgtgctattgtgcgtggaaatgaaggtgtattcattatgggcaaaaccattgaatttcacatgggtggtaatatggagttaaaggcggaaaacagtatcatcctaaatggatctgtgatggtcagcaccacccgcctacccagttcctccagtggagaccagttgggtagtggtgactgggtacgctacaagctctgcatgtgtgctgatgggacgctcttcaaggtgcaagtaaccagccagaacatgggctgccaaatctcagacaacccctgtggaaacactcattaaaagaaccccagaggtcaccaacatgtttatatcttgacttgacttttttatgcatgcaaatcattgtttttacagagtttgtgataactcataattattttaatggcagagcactgctgtatctgttttatggtctacatagttaaaatcttctcagagagcctaaattctaatacattttattaatttatactaatcttcatatttactgttctctaaaataattatgagaagcaaataaaatcaaaagtcatgtttaaagacgtgtttttaaaattccactatcccttttctaaaggttaaaggtctgaagcagctgtttagattcactgtaagtaaactttggtaactctaatggggatagacccacttaagatatttaaaaaggtatggcatcagcgtttcatgctctgccttttagcttctaaaaggaaagatgcagatttctagtgcattaagcctgagccatattctcacatgcaagtgaagtcattaaagaactttacatatgtgagatagatacaatggttccttagttttgcactgggaagaaaatattttgtaaaagaatgtttatttgaaataatgataactatcaattgttcacaatgtggtggaaattaaaacaccatctcagctttaacttttaaataataatgataactatctttattgagcatcttctacatcctaggcattgtcctaggcattgcatgtttatatccccaattctcaccacaaccctgcaagtaggtggtattatccaagttttacccattaagaaactgaagatcagagaagttaagaaacttgctcaacatcatatagtaagtagcagagttgggattggaattcaggcatgactcaaacctggatgtacttgattccaaatgccatgttgttttcactctctgcactgactttttaattatttaaaactctagaaagatgaacaaaggttaatttaaacttacctaagaagatgagaatcaaacaaaacagatatgcttactctagttaaaaagaaaataaatctcatgtcagacccagaaaggaccaatcactgtccgattgtaagctatgttgggccaattccaaaatattatacgatggagaggtcaaatttacctacttctgagttacctcagtttcccaacaatggaccttggcacactggagtaacaatacataacagagttgccaagatatttataccctcagcactcggggcaacacagtggaaagtggggaggccatagacccaaacaagttctttgggccaggcatggcctagtaagtacaccatgcctcgaaaataagtccagaagcactggactaaagagtgctaatgcaggaaataatacacataatttttaggtaaggataataatttatctctgctcctaatattactatcccattgtaattatttataaccctcaagccagttgatttttaatatatttgattggaaaagaactctctggtattattaagactcacacagaatcagggacagggcccccaaaggagtttgctgtaaaataggcagtagagttgtggcatgggcccaaccctgcattcaagtgtaacagcattctgtcagggtcactttgaattgtgcacataagaaaaccaatacaaaaaacaatttgtattcaatattgtcacatttctctctggtagaaaaatcaaataccttagagattatgaagtcattaatttatactgaaattggattgacttactacctaacactgagcgctgtttttaaatgaaaagaatgagatttataaccacttgagtgttattgcagtgatatttgaactcatttgaatatattcagtatcatttaatgtctgaattcagaaaaaaatgccgaaatttttattcagatggtccataaattaaattgcatattcattacttatctgctctatttagatttattttaaaagtttatttaagtaaatatttttataaaaaccagaaaacactgtattacaaaatattatttattaaatgtagttcaggaaataatctatttttactcttttttgggaaatacttgtgtttttgatacatctccatgaagtgcttttgagaggagaggctattttgatgtttttatacaactgaaggttaacagccatagcattttatgatactttacaggtagtcctggctttttccctgaaacataagcttggaaaatctattagaaagcagaacagggcaaactctccattttacttatggcttttctaatttttaattaattaatttatttttttgagacagagtcttgttctgtcgccaggctggagtgcagtggcacaatctcggctctcggctcactgcaacctctgcctcccaggttcaagcgattctcctgcctcagcctcccgagtacctgggactacaggcatgtgccacagttcccggctaatttttgtatttttagtagagacggggtttcaccatgttggccaggatggtctcaatctcttgacctcgtgatctgcctgccttggcctcccaaagtgctgggattacaggtgtgagccaccacgcctggccggcttatttttatccacagtaaatcttcagcaactcattgtctccaccagatagtatttttctgtaaatgaaatgctgacttcgcctcttcctgctgtatgctcatccctgcactgagcacagatatgacaagcagtagccatgggggaggtgggtgacaaagataggaccccgggagggggcgcaggtacatgctagtttcaattaccacagtattctagagaccgggttgcaatgacaaggggggcaaatgaaatcaatgcaagatttcttaataatgggcagacagaaaaatgtaaaaccacacaaaacggactgctgataatattttaaaatatacttatttgtcttctttttgcattgtgaaaaaaacaaaataaattttgtgtgataattttgatgatgaaaggtggaagttctacctagatttgaatgagtgtttttttaagggaatgagaatgtcatggtgctaaacctgacaaataagagatcattgaaatgctgaaaattttaacagtcttcttaaaagtattgagggggcaaaaattaccaattatggtatacaaaaataagcctataaatgtgtttcacattgctaacttgagtttcagttgattcagtttgtaataactagtaatgagcttctgtttacaataaaaattctgtaaattgaaaaaaaaaaaaaaaaaaaaaaaaaaaaaacnctcgttttnaaattcaagaaaaattgtgtttatctttagaattttgtattcaatactttatgtactatgtgcctaatgcttctggataaataagcaccaaatatgta

SEQ ID NO: 71336 - DNA, 4841 bp, Homo sapiens
tgcctgggcaatatagcgagacccctttctccagaaaaaggaaaaaaaaaaaaaaaaatcgataccatcgacctcgaggaggggcgggcacagtcgggcggggagctcggcggcggcgggcgcgggaagatggcggcagcggcggcggcggctgcagaacagcaaagttccaatggtcctgtaaagaagtccatgcgtgagaaggctgttgagagaaggagtgtcaataaagagcacaacagtaactttaaagctggatacattccgattgatgaagatcgtctccacaaaacagggttgagaggaagaaagggcaatttagccatctgtgtgattatcctcttgtttatcctggctgtcatcaatttaatactccctggcagccaggcaagagacagaagagccttctctgggattcctgatgcatatagaaaaaagatctgaagatactgtcatttggcaagtcccggtgaaaaagccatataacacttgttatttgggccgtgattcgcattggaccaaatggctgtgatagtatggagtttcatgaaagtggcctgcttcgatttaagcaagtatctgacatgggagtgatccaccctctttataaaagcacagtaggaggaaggcgaaatgaaaatttggtcatcactggcaacaaccagcctattgtttttcagcaagggacaacaaagctcagtgtagaaaacaacaaaacttctattacaagtgacatcggcatgcagttttttgacccgaggactcaaaatatcttattcagcacagactatgaaactcatgagtttcatttgccaagtggagtgaaaagtttgaatgttcaaaaggcatctactgaaaggattaccagcaatgctaccagtgatttaaatataaaagttgatgggcgtgctattgtgcgtggaaatgaaggtgtattcattatgggcaaaaccattgaatttcacatgggtggtaatatggagttaaaggcggaaaacagtatcatcctaaatggatctgtgatggtcagcaccacccgcctacccagttcctccagtggagaccagttgggtagtggtgactgggtacgctacaagctctgcatgtgtgctgatgggacgctcttcaaggtgcaagtaaccagccagaacatgggctgccaaatctcagacaacccctgtggaaacactcattaaaagaaccccagaggtcaccaacatgtttatatcttgacttgacttttttatgcatgcaaatcattgtttttacagagtttgtgataactcataattattttaatggcagagcactgctgtatctgttttatggtctacatagttaaaatcttctcagagagcctaaattctaatacattttattaatttatactaatcttcatatttactgttctctaaaataattatgagaagcaaataaaatcaaaagtcatgtttaaagacgtgtttttaaaattccactatcccttttctaaaggttaaaggtctgaagcagctgtttagattcactgtaagtaaactttggtaactctaatggggatagacccacttaagatatttaaaaaggtatggcatcagcgtttcatgctctgccttttagcttctaaaaggaaagatgcagatttctagtgcattaagcctgagccatattctcacatgcaagtgaagtcattaaagaactttacatatgtgagatagatacaatggttccttagttttgcactgggaagaaaatattttgtaaaagaatgtttatttgaaataatgataactatcaattgttcacaatgtggtggaaattaaaacaccatctcagctttaacttttaaataataatgataactatctttattgagcatcttctacatcctaggcattgtcctaggcattgcatgtttatatccccaattctcaccacaaccctgcaagtaggtggtattatccaagttttacccattaagaaactgaagatcagagaagttaagaaacttgctcaacatcatatagtaagtagcagagttgggattggaattcaggcatgactcaaacctggatgtacttgattccaaatgccatgttgttttcactctctgcactgactttttaattatttaaaactctagaaagatgaacaaaggttaatttaaacttacctaagaagatgagaatcaaacaaaacagatatgcttactctagttaaaaagaaaataaatctcatgtcagacccagaaaggaccaatcactgtccgattgtaagctatgttgggccaattccaaaatattatacgatggagaggtcaaatttacctacttctgagttacctcagtttcccaacaatggaccttggcacactggagtaacaatacataacagagttgccaagatatttataccctcagcactcggggcaacacagtggaaagtggggaggccatagacccaaacaagttctttgggccaggcatggcctagtaagtacaccatgcctcgaaaataagtccagaagcactggactaaagagtgctaatgcaggaaataatacacataatttttaggtaaggataataatttatctctgctcctaatattactatcccattgtaattatttataaccctcaagccagttgatttttaatatatttgattggaaaagaactctctggtattattaagactcacacagaatcagggacagggcccccaaaggagtttgctgtaaaataggcagtagagttgtggcatgggcccaaccctgcattcaagtgtaacagcattctgtcagggtcactttgaattgtgcacataagaaaaccaatacaaaaaacaatttgtattcaatattgtcacatttctctctggtagaaaaatcaaataccttagagattatgaagtcattaatttatactgaaattggattgacttactacctaacactgagcgctgtttttaaatgaaaagaatgagatttataaccacttgagtgttattgcagtgatatttgaactcatttgaatatattcagtatcatttaatgtctgaattcagaaaaaaatgccgaaatttttattcagatggtccataaattaaattgcatattcattacttatctgctctatttagatttattttaaaagtttatttaagtaaatatttttataaaaaccagaaaacactgtattacaaaatattatttattaaatgtagttcaggaaataatctatttttactcttttttgggaaatacttgtgtttttgatacatctccatgaagtgcttttgagaggagaggctattttgatgtttttatacaactgaaggttaacagccatagcattttatgatactttacaggtagtcctggctttttccctgaaacataagcttggaaaatctattagaaagcagaacagggcaaactctccattttacttatggcttttctaatttttaattaattaatttatttttttgagacagagtcttgttctgtcgccaggctggagtgcagtggcacaatctcggctctcggctcactgcaacctctgcctcccaggttcaagcgattctcctgcctcagcctcccgagtacctgggactacaggcatgtgccacagttcccggctaatttttgtatttttagtagagacggggtttcaccatgttggccaggatggtctcaatctcttgacctcgtgatctgcctgccttggcctcccaaagtgctgggattacaggtgtgagccaccacgcctggccggcttatttttatccacagtaaatcttcagcaactcattgtctccaccagatagtatttttctgtaaatgaaatgctgacttcgcctcttcctgctgtatgctcatccctgcactgagcacagatatgacaagcagtagccatgggggaggtgggtgacaaagataggaccccgggagggggcgcaggtacatgctagtttcaattaccacagtattctagagaccgggttgcaatgacaaggggggcaaatgaaatcaatgcaagatttcttaataatgggcagacagaaaaatgtaaaaccacacaaaacggactgctgataatattttaaaatatacttatttgtcttctttttgcattgtgaaaaaaacaaaataaattttgtgtgataattttgatgatgaaaggtggaagttctacctagatttgaatgagtgtttttttaagggaatgagaatgtcatggtgctaaacctgacaaataagagatcattgaaatgctgaaaattttaacagtcttcttaaaagtattgagggggcaaaaattaccaattatggtatacaaaaataagcctataaatgtgtttcacattgctaacttgagtttcagttgattcagtttgtaataactagtaatgagcttctgtttacaataaaaattctgtaaattgaaaaaaaaaaaaaaaaaaaaaaaaaaaaaaaaaaaaaaaaaaaaaaaaaaaaaaaaaaaaaaaaaaaaaaaaaaaaaaaaaaggggggggggggcggaaaaaatttcccggggggggccaaccacagatgagaccagcagaccacccgtactgtatgttgcagaaaggagggggccccccccagaagaaaggaggttcatataatacaacaggcgagaggaggcgcggcgcggtcgctaacaaacaggacggtcgaggaggaagcaaaaaaaacgagcagcgcgaagaggagaatcattttagtgaggagacgcacaccaccctggggggggggggaacaaatcaagggaaacaaaaaccaacgaagaaataaagagccgcgggaagacacaa

SEQ ID NO: 71337 - DNA, 4645 bp, Homo sapiens
tgcctgggcaatatagcgagacccctttctccagaaaaaggaaaaaaaaaaaaaaaaatcgataccatcgacctcgaggaggggcgggcacagtcgggcggggagctcggcggcggcgggcgcgggaagatggcggcagcggcggcggcggctgcagaacagcaaagttccaatggtcctgtaaagaagtccatgcgtgagaaggctgttgagagaaggagtgtcaataaagagcacaacagtaactttaaagctggatacattccgattgatgaagatcgtctccacaaaacagggttgagaggaagaaagggcaatttagccatctgtgtgattatcctcttgtttatcctggctgtcatcaatttaataataacacttgttatttgggccgtgattcgcattggaccaaatggctgtgatagtatggagtttcatgaaagtggcctgcttcgatttaagcaagtatctgacatgggagtgatccaccctctttataaaagcacagtaggaggaaggcgaaatgaaaatttggtcatcactggcaacaaccagcctattgtttttcagcaagggacaacaaagctcagtgtagaaaacaacaaaacttctattacaagtgacatcggcatgcagttttttgacccgaggactcaaaatatcttattcagcacagactatgaaactcatgagtttcatttgccaagtggagtgaaaagtttgaatgttcaaaaggcatctactgaaaggattaccagcaatgctaccagtgatttaaatataaaagttgatgggcgtgctattgtgcgtggaaatgaaggtgtattcattatgggcaaaaccattgaatttcacatgggtggtaatatggagttaaaggcggaaaacagtatcatcctaaatggatctgtgatggtcagcaccacccgcctacccagttcctccagtggagaccagttgggtagtggtgactgggtacgctacaagctctgcatgtgtgctgatgggacgctcttcaaggtgcaagtaaccagccagaacatgggctgccaaatctcagacaacccctgtggaaacactcattaaaagaaccccagaggtcaccaacatgtttatatcttgacttgacttttttatgcatgcaaatcattgtttttacagagtttgtgataactcataattattttaatggcagagcactgctgtatctgttttatggtctacatagttaaaatcttctcagagagcctaaattctaatacattttattaatttatactaatcttcatatttactgttctctaaaataattatgagaagcaaataaaatcaaaagtcatgtttaaagacgtgtttttaaaattccactatcccttttctaaaggttaaaggtctgaagcagctgtttagattcactgtaagtaaactttggtaactctaatggggatagacccacttaagatatttaaaaaggtatggcatcagcgtttcatgctctgccttttagcttctaaaaggaaagatgcagatttctagtgcattaagcctgagccatattctcacatgcaagtgaagtcattaaagaactttacatatgtgagatagatacaatggttccttagttttgcactgggaagaaaatattttgtaaaagaatgtttatttgaaataatgataactatcaattgttcacaatgtggtggaaattaaaacaccatctcagctttaacttttaaataataatgataactatctttattgagcatcttctacatcctaggcattgtcctaggcattgcatgtttatatccccaattctcaccacaaccctgcaagtaggtggtattatccaagttttacccattaagaaactgaagatcagagaagttaagaaacttgctcaacatcatatagtaagtagcagagttgggattggaattcaggcatgactcaaacctggatgtacttgattccaaatgccatgttgttttcactctctgcactgactttttaattatttaaaactctagaaagatgaacaaaggttaatttaaacttacctaagaagatgagaatcaaacaaaacagatatgcttactctagttaaaaagaaaataaatctcatgtcagacccagaaaggaccaatcactgtccgattgtaagctatgttgggccaattccaaaatattatacgatggagaggtcaaatttacctacttctgagttacctcagtttcccaacaatggaccttggcacactggagtaacaatacataacagagttgccaagatatttataccctcagcactcggggcaacacagtggaaagtggggaggccatagacccaaacaagttctttgggccaggcatggcctagtaagtacaccatgcctcgaaaataagtccagaagcactggactaaagagtgctaatgcaggaaataatacacataatttttaggtaaggataataatttatctctgctcctaatattactatcccattgtaattatttataaccctcaagccatttgctgtaaaataggcagtagagttgtggcatgggcccaaccctgcattcaagtgtaacagcattctgtcagggtcactttgaattgtgcacataagaaaaccaatacaaaaaacaatttgtattcaatattgtcacatttctctctggtagaaaaatcaaataccttagagattatgaagtcattaatttatactgaaattggattgacttactacctaacactgagcgctgtttttaaatgaaaagaatgagatttataaccacttgagtgttattgcagtgatatttgaactcatttgaatatattcagtatcatttaatgtctgaattcagaaaaaaatgccgaaatttttattcagatggtccataaattaaattgcatattcattacttatctgctctatttagatttattttaaaagtttatttaagtaaatatttttataaaaaccagaaaacactgtattacaaaatattatttattaaatgtagttcaggaaataatctatttttactcttttttgggaaatacttgtgtttttgatacatctccatgaagtgcttttgagaggagaggctattttgatgtttttatacaactgaaggttaacagccatagcattttatgatactttacaggtagtcctggctttttccctgaaacataagcttggaaaatctattagaaagcagaacagggcaaactctccattttacttatggcttttctaatttttaattaattaatttatttttttgagacagagtcttgttctgtcgccaggctggagtgcagtggcacaatctcggctctcggctcactgcaacctctgcctcccaggttcaagcgattctcctgcctcagcctcccgagtacctgggactacaggcatgtgccacagttcccggctaatttttgtatttttagtagagacggggtttcaccatgttggccaggatggtctcaatctcttgacctcgtgatctgcctgccttggcctcccaaagtgctgggattacaggtgtgagccaccacgcctggccggcttatttttatccacagtaaatcttcagcaactcattgtctccaccagatagtatttttctgtaaatgaaatgctgacttcgcctcttcctgctgtatgctcatccctgcactgagcacagatatgacaagcagtagccatgggggaggtgggtgacaaagataggaccccgggagggggcgcaggtacatgctagtttcaattaccacagtattctagagaccgggttgcaatgacaaggggggcaaatgaaatcaatgcaagatttcttaataatgggcagacagaaaaatgtaaaaccacacaaaacggactgctgataatattttaaaatatacttatttgtcttctttttgcattgtgaaaaaaacaaaataaattttgtgtgataattttgatgatgaaaggtggaagttctacctagatttgaatgagtgtttttttaagggaatgagaatgtcatggtgctaaacctgacaaataagagatcattgaaatgctgaaaattttaacagtcttcttaaaagtattgagggggcaaaaattaccaattatggtatacaaaaataagcctataaatgtgtttcacattgctaacttgagtttcagttgattcagtttgtaataactagtaatgagcttctgtttacaataaaaattctgtaaattgaaaaaaaaaaaaaaaaaaaaaaaaaaaaaaaaaaaaaaaaaaaaaaaaaaaaaaaaaaaaaaaaaaaaaaaaaaaaaaaaaaggggggggggggcggaaaaaatttcccggggggggccaaccacagatgagaccagcagaccacccgtactgtatgttgcagaaaggagggggccccccccagaagaaaggaggttcatataatacaacaggcgagaggaggcgcggcgcggtcgctaacaaacaggacggtcgaggaggaagcaaaaaaaacgagcagcgcgaagaggagaatcattttagtgaggagacgcacaccaccctggggggggggggaacaaatcaagggaaacaaaaaccaacgaagaaataaagagccgcgggaagacacaa

SEQ ID NO: 71338 - DNA, 4227 bp, Homo sapiens
tgcctgggcaatatagcgagacccctttctccagaaaaaggaaaaaaaaaaaaaaaaatcgataccatcgacctcgaggaggggcgggcacagtcgggcggggagctcggcggcggcgggcgcgggaagatggcggcagcggcggcggcggctgcagaacagcaaagttccaatggtcctgtaaagaagtccatgcgtgagaaggctgttgagagaaggagtgtcaataaagagcacaacagtaactttaaagctggatacattccgattgatgaagatcgtctccacaaaacagggttgagaggaagaaagggcaatttagccatctgtgtgattatcctcttgtttatcctggctgtcatcaatttaataataacacttgttatttgggccgtgattcgcattggaccaaatggctgtgatagtatggagtttcatgaaagtggcctgcttcgatttaagcaagtatctgacatgggagtgatccaccctctttataaaagcacagtaggaggaaggcgaaatgaaaatttggtcatcactggcaacaaccagcctattgtttttcagcaagggacaacaaagctcagtgtagaaaacaacaaaacttctattacaagtgacatcggcatgcagttttttgacccgaggactcaaaatatcttattcagcacagactatgaaactcatgagtttcatttgccaagtggagtgaaaagtttgaatgttcaaaaggcatctactgaaaggattaccagcaatgctaccagtgatttaaatataaaagttgatgggcgtgctattgtgcgtggaaatgaaggtgtattcattatgggcaaaaccattgaatttcacatgggtggtaatatggagttaaaggcggaaaacagtatcatcctaaatggatctgtgatggtcagcaccacccgcctacccagttcctccagtggagaccagttgggtagtggtgactgggtacgctacaagctctgcatgtgtgctgatgggacgctcttcaaggtgcaagtaaccagccagaacatgggctgccaaatctcagacaacccctgtggaaacactcattaaaagaaccccagaggtcaccaacatgtttatatcttgacttgacttttttatgcatgcaaatcattgtttttacagagtttgtgataactcataattattttaatggcagagcactgctgtatctgttttatggtctacatagttaaaatcttctcagagagcctaaattctaatacattttattaatttatactaatcttcatatttactgttctctaaaataattatgagaagcaaataaaatcaaaagtcatgtttaaagacgtgtttttaaaattccactatcccttttctaaaggttaaaggtctgaagcagctgtttagattcactgtaagtaaactttggtaactctaatggggatagacccacttaagatatttaaaaaggtatggcatcagcgtttcatgctctgccttttagcttctaaaaggaaagatgcagatttctagtgcattaagcctgagccatattctcacatgcaagtgaagtcattaaagaactttacatatgtgagatagatacaatggttccttagttttgcactgggaagaaaatattttgtaaaagaatgtttatttgaaataatgataactatcaattgttcacaatgtggtggaaattaaaacaccatctcagctttaacttttaaataataatgataactatctttattgagcatcttctacatcctaggcattgtcctaggcattgcatgtttatatccccaattctcaccacaaccctgcaagtaggtggtattatccaagttttacccattaagaaactgaagatcagagaagttaagaaacttgctcaacatcatatagtaagtagcagagttgggattggaattcaggcatgactcaaacctggatgtacttgattccaaatgccatgttgttttcactctctgcactgactttttaattatttaaaactctagaaagatgaacaaaggttaatttaaacttacctaagaagatgagaatcaaacaaaacagatatgcttactctagttaaaaagaaaataaatctcatgtcagacccagaaaggaccaatcactgtccgattgtaagctatgttgggccaattccaaaatattatacgatggagaggtcaaatttacctacttctgagttacctcagtttcccaacaatggaccttggcacactggagtaacaatacataacagagttgccaagatatttataccctcagcactcggggcaacacagtggaaagtggggaggccatagacccaaacaagttctttgggccaggcatggcctagtaagtacaccatgcctcgaaaataagtccagaagcactggactaaagagtgctaatgcaggaaataatacacataatttttaggtaaggataataatttatctctgctcctaatattactatcccattgtaattatttataaccctcaagccagttgatttttaatatatttgattggaaaagaactctctggtattattaagactcacacagaatcagggacagggcccccaaaggagtttgctgtaaaataggcagtagagttgtggcatgggcccaaccctgcattcaagtgtaacagcattctgtcagggtcactttgaattgtgcacataagaaaaccaatacaaaaaacaatttgtattcaatattgtcacatttctctctggtagaaaaatcaaataccttagagattatgaagtcattaatttatactgaaattggattgacttactacctaacactgagcgctgtttttaaatgaaaagaatgagatttataaccacttgagtgttattgcagtgatatttgaactcatttgaatatattcagtatcatttaatgtctgaattcagaaaaaaatgccgaaatttttattcagatggtccataaattaaattgcatattcattacttatctgctctatttagatttattttaaaagtttatttaagtaaatatttttataaaaaccagaaaacactgtattacaaaatattatttattaaatgtagttcaggaaataatctatttttactcttttttgggaaatacttgtgtttttgatacatctccatgaagtgcttttgagaggagaggctattttgatgtttttatacaactgaaggttaacagccatagcattttatgatactttacaggtagtcctggctttttccctgaaacataagcttggaaaatctattagaaagcagaacagggcaaactctccattttacttatggcttttctaatttttaattaattaatttatttttttgagacagagtcttgttctgtcgccaggctggagtgcagtggcacaatctcggctctcggctcactgcaacctctgcctcccaggttcaagcgattctcctgcctcagcctcccgagtacctgggactacaggcatgtgccacagttcccggctaatttttgtatttttagtagagacggggtttcaccatgttggccaggatggtctcaatctcttgacctcgtgatctgcctgccttggcctcccaaagtgctgggattacaggtgtgagccaccacgcctggccggcttatttttatccacagtaaatcttcagcaactcattgtctccaccagatagtatttttctgtaaatgaaatgctgacttcgcctcttcctgctgtatgctcatccctgcactgagcacagatatgacaagcagtagccatgggggaggtgggtgacaaagataggaccccgggagggggcgcaggtacatgctagtttcaattaccacagtattctagagaccgggttgcaatgacaaggggggcaaatgaaatcaatgcaagatttcttaataatgggcagacagaaaaatgtaaaaccacacaaaacggactgctgataatattttaaaatatacttatttgtcttctttttgcattgtgaaaaaaacaaaataaattttgtgtgataattttgatgatgaaaggtggaagttctacctagatttgaatgagtgtttttttaagggaatgagaatgtcatggtgctaaacctgacaaataagagatcattgaaatgctgaaatttacgtcttctattgaggggcaaataccattatgatacaatatactcaccgct

SEQ ID NO: 71339 - DNA, 625 bp, Homo sapiens
tgcctgggcaatatagcgagacccctttctccagaaaaaggaaaaaaaaaaaaaaaaatcgataccatcgacctcgaggaggggcgggcacagtcgggcggggagctcggcggcggcgggcgcgggaagatggcggcagcggcggcggcggctgcagaacagcaaagttccaatggtcctgtaaagaagtccatgcgtgagaaggctgttgagagaaggagtgtcaataaagagcacaacagtaactttaaagctggatacattccgattgatgaagatcgtctccacaaaacagggttgagaggaagaaagggcaatttagccatctgtgtgattatcctcttgtttatcctggctgtcatcaatttaatagtgagtatttgtaagaatactcattttaattgccatggggaattttttatctgctttatagtgaaatcatagactttattttctccttttctatacatgtcttgtctcttactgaattttaatgaatactttattaaaaaaactagtgtgctaatattttcatatattaatttcatttacaaaaaaatgtgcatgggtttatccctttaatggacttaatttttagcaaggatagaattatgaggctcccacc

SEQ ID NO: 71340 - DNA, 1385 bp, Homo sapiens
gatgaatactttaaatacaagaaaaagttgaattgcagaaaagaagaggggctaaaaaggaagaaagttttaattctcaacaagaaacactatttagatggaaagcttaaatgtattcttattaagggtatttgatgatgcattttatttgcaaaaataaccagtgggtaattttttctctgaaaatttagctttaataagtcgtaaaatttcctaaagattttggagacgatatttcgattataccagctcttgcttttattttgggagcctggagaaatgagagtgattgcacctgtcaaattttgtatctcatcacttttggatcatcacactgtgactaaaatgacttcagcattttgttggccaccacagtgaagaactattccctgaaagttaatcagttgcctgagagacttttctgctactgaggggaaagaaaggaaagctttatttacctctaatgagctccgttccaagtcagttaatcactgttcccttacacccaagagtttcatcagtatcagagtcaacttgtcaaaacactggttctcagacgtttttttcagagggacttcttttccccacatggccagatttctttacaattaagaaaataagagctacagcgtattcttggttaaaaaccagtttagatgatgttaccaaatgaaaacaagtctgtattagcaaatgccacattatatttagtcgtattctcactaaattctccgttattaaaatgatttctgcatcttgcctggaaaatgcacttacatatttacaagcgttgtatgtcaatgtgcatgttttgaatttcctaacagtgtctaatcttagtagtttcatagtagttatgtaaaatctctttaactgcaaaatactataaaatattacttgaaatattaaagtattagtgccatttctagctgtggcaaggcacaagtcttactatagcttacttatgtcttctcatagatttcagtacagcatctgagtagtggatctgtttactgacagtatacacaaactaggtcttgacctcacttctttcttcatttaaaaggagaagatttgaaatagagctagtgtaaataataaataaaattatttaaatagcatcagtggctcaataccatctgttgaggaataaaataatttggttaacatacagaacatcgataatatacaataatgactttttaaaaaatgagtctgatctttttggctcacctagcttcccttaataagaaaatttgagaaacttggatctgaaaagtgtagttgtacttcctaacattaaattcctggctgtaatagttaatactttggcagcattatggttagtcttgtttatgccattggcacttactaggctaaacttt

SEQ ID NO: 71341 - DNA, 399 bp, Homo sapiens
atatatatatatatatatacacacatacacacacacacacacacacacacacacacacacacgcaagatagcattctgctttgatgagaaaactgagctaatctgagtgaaacaaaaacagtaaatagactagaagccagactggtattttgcatcgtgtatgcttgtttgaaaatctttgcttctgaagtaaatatttggcaaccacagtgattagcagttaaagtaatttcaacaaaataagaagtcattaaaaatggactgtttgtctgaaagagcagtacctatattataaagattgaatttcgtggctcatcacaaccattttcaaaatttaactcctactatcttcttataaattaagagaatttcatttgtgttccatagtgcaatgacaaa

SEQ ID NO: 71342 - DNA, 1304 bp, Homo sapiens
tatttaataaatggtgctgggaaaactggctagccaaatgtagaaagctgaaactggatcccttccttacaccttatacaaaaattaattcaagatggattaaagacttaaatgttagacctaaaaccataaacaccctagaagaaaacctaggcaataccattcaggacataggcatgggcaaggacttcatggctgaaacaccaaaggcaatgggaacaaaagtcaaaattgacagatgggatctaattaaactaaagagcttctgcacagcaaaagaaactaccatcagagtgaacaggcagcctacaaaatgggagaaaatttttgcaatctacttatctaacaaagggctaatacccagaatctacaatgaactcaaacagatttacaagaaaaaaccccatcaacaagtgggtgaaggatatgaacagacacttctcaaaagaagacatttgtgcagccaacagacacatgaaaaaatgctcatcatcactggccatcagagaaatgcaaatcaaaaccacaatgagataccatctcacaccagttagaatggcgatcattaaaaagtcaggaaacaacaggtgctggagagaatgtggagaaataggaatacttttacactgttggtgggactgtaaactagttcaaccattgtggaagtcagtgtggcgattccttagggatctagaactagaaataccatttgacccagccatcccattactgggtatataccgaaaggattataaatcatgctgctataaagacacatgcacacgtatgtttattgcggcactattcacagtagcaaagacttagaaccaacccaaatgtccaacaatgatagactggattaagaaaatgtggcacatatacaccgtgcaatactatgcagccataaaaaaaatgatgagtttatgtcctctgtcgggacatggatgaagctggaaaccatcattctcagcaaactatcgcaaggacaaaaaaccaaacagtgcatgttctcactcataggtgggaattgaacaatgagaacacatggacacaggaaggggaatgtcacacaccagggcctgttgtggggtggagggaggcggggagggatagcattaggagagatacctaatattaaatgatgagttcatgggtgcagcacaccagcatggcacatgtatacatatgtaacaaacctgcacgttgtgcacatgtaccctaaaacttaaaagtataatataaaaaataaattcttacttgaattgtgcaatttgtagaactttaataaaaaaatgatacatctt

SEQ ID NO: 71343 - DNA, 581 bp, Homo sapiens
cattattcatatatatctgttttatgcttttgggggctttctccctaattttatctgtgcctatttattgaactacttattatacagattgagcatccctaattagaaaatccaaaatgctccaaaatcccaaactttctgaacactgacatgctcacatgaccattgcagcatttcagattttggattcttggattagggatgctcctgcattctacaaagattcaaaaatctgagaatatctgaaatctgaatgcttctggtcccaagctgtctaaataagggatactcaacctgtattgattcgtgtgggcactaagctacttatttttctcaattagttttcttcttcctataagatgaattgaggctgcgcgcggtgggtcacgcctgtaatcccatctttttgggaggccgaggcaggcggatcacctgaggtcagaagtttgagaccagcctggccaacatggtgatacttcatctctattgaaaatacaaaaattagctgggcatggtgtcacgcatctgtagtcccagctagccaggaggctgaggtgggagaatcacttgaacctgggaag

SEQ ID NO: 71344 - DNA, 283 bp, Homo sapiens
cattagaaaaaaagagcatgtcttactgttctgtgaatatactaagagttgtgagcagctgccatattggtggagtagaaaaccatgaggaggccaggcactgtggctcacgcctgtaatccaagcactttgggaggccgaggcaggcggatcacgaggtcaggagattgagaccaccctggctaacacagtgaaaccccgtctctattaaaaatacaaaaaactagccgggtgcggtggtgggcacctgtagtgccagctacttgggaggctgaggcaggag

SEQ ID NO: 71345 - DNA, 696 bp, Homo sapiens
cgctggattctcgggtgcccggctggtcgagggactgcaggcatgcgcccttggccagatctctgccctctggctgccctaggatgtcgagatggagtcaagtgactttggccccagtgtcttctaatcttcctttctacccaccccccttaaccagtgcaccctcccccaaccttgaaaatagagaaacaaataagcgcaaacactttgcactcatgcagacaacgtcttaaatttctaaagttatcttcttcactaaagtcgagagcacttttaggctaacaagctgcctgcatttgataacagggaggtagaaaaggggtgaaatgacatctacaaggtcactcgcgaaatcagggcacagggggccttcaagccccagtctcctggtttccagctttcctctcttcttaaacccggccgaagggggtgcccctgagaccactggcagtccaggcagttgttcattcctagtaaatgtacctgtttattttgtccttatctttccttcctcttccattgtgccacccatctagtttctcctggcctgtacctgaggcctgcttccaaggatgtgcctggcccactccccaaggtcctcagcagtcctgtatttcgggccctgcttgcagtgggaacccaaatggtacactatcctcctctttactgaacatcattaaaattctattttgaaat

SEQ ID NO: 71346 - DNA, 419 bp, Homo sapiens
gtctcaattcattgaattagtatgcatggactttcctatagaagaaccactttaaaagaggcccacctgcattcattccctctctggttgttcagggtcaaacacctgggcacctctaactctgagcgcatctgtactggttggcagtgtgcccattgctctatttatttctagcacaagactccagacagtggaataatttgtctgctatgcagccaagagaggattccaacagctggtgcagggtggaactggctcacttttgaggtccctgaaaaccctaggactgcatgattctttgaacaatgagtatgttttagagataaccatgaatttccaacagggctttaaagtaacccttccccaaagggagcacagacatgtccctaagcccaaggaacttaaaattttatttaaaa

SEQ ID NO: 71347 - DNA, 383 bp, Homo sapiens
aaccttttttttttactacagattttaaatccaattcttaggagcaacctggagaagaaagggtactttttgaatgatttaaatctttgggaaatggggataaggcaggttgtttgttggagtaaaaatacattataggctgagcacggtggctgacgcctgtaatcccagtactttgggaggtcaaggcaggcagatcacctgaggttgggagtttgagacaagcctgaccaacagggagaaaccccgtctctactaaaaatacaaaattagccgggcgtggtggcgcatgcctgtagtcccagctactcaggaggctgaggcaggagaattgcttgaacctaggaggctggtcgacgcggccgcgaatttagtagtagtag

SEQ ID NO: 71348 - DNA, 272 bp, Homo sapiens
tccgcacggtgggtccacccagggagctttaacaactgccaatgctggggccccagcttctccacttgtgatctaaccggtctggggtatgggctgggcttcagaatgttttaaagctccccaggtgacactaatgctcagcagtttgagaagcactgatgtggatgaaacgataataagtaaccagtggcaatgtggagaatttcagccaagcaataccctcatagactcctaaaaagcctgaatcctggataaactttcaaatcacagaa

SEQ ID NO: 71349 - DNA, 299 bp, Homo sapiens
attgggagaagcaaaaacaaagaaaatgatacttgtacttaaggtctgtattactttagttctttatttctaagcatatacaaaactcagacagagacatgtacatgcacacagactcaaacatggagttggatcttaaacaatttatctgtgactgatctgtgatctgctgtgatggatttatagtttcaatcatgtcattcattttaagacaatttttacattagtcatttaacagaccatttaggtgtctattagtcatctattctacctagctacagtacaatgtgttgtgacgt

SEQ ID NO: 71350 - DNA, 1490 bp, Homo sapiens
gccatctcagcctgatgtcacaacccaataaatggggcactttcttcttttgtaaactattatcattttggtttctgtgacattaacttaattatatatgatcgtattaactcatgtagttctcaaaataggcagctgcttctgaagccagtaaaataaaattcagttagttattaaaaactaaattcctattagtaaggtaacaccatgattatgtgtgatatactgtttttgagatcatagttatcagtcattctcaatatctaattgagtccctaagaatattttaaaccttttaaaaatcacataaatatcatctcatgcctcataattctaatatatttaatacatcagtaaaatagctgcttattacttcccacactttgttctcagtattgttagtgcatcatgagtttcctgctagtgtttgaccactgggtactcctgaagatgttttttagtactagggatgcttttcagtattagggatgcttttttcagtactagggatgtactagggagtactgagtactcctgaagatgtttttcagtactagggatgcttttttcagtgttagggatgcttttcagtactagggatgcttttttcagtgctagggatgcttttcagtactagggatgctttccaaaatatcacctctttaacgtttactttttctagtgtgtgtctggaatccaaaggacatgaataagccactcataattaattttgagaagttttatcaaatgtttatgtttctaactgcaaaccttaattttggaaaggcacaatgtttaactcacctatgtttaaccatggctaatttaaaatagtctaagatttggccgtcactaattagtattctcaagaatttcatttttcaattttaagaagaaaagggattttggtcacattttgcttgtaaatgaaaattacatcctcattctttgtgtagtatctacacattgttataagccaaaaaacaaagtctgtctggaatctttgtacatatttgtatgttgctataattgttatttttatcttcattattgtgcaaaatataaatgagcatttgtacattgactgtataagaaaccatgggccaggtcctgtggctcatgcctataatcccaacactttgggaggctgaggcaggaggattgcttcagtccaggagttcaagactaacctgggcaacatagccctcatctctacaaaaaataaaaaaattagttgggtgtgatggcatgtgcctgtagtcccagctactcaggagactgacatgagaggatcacttgagactgggagattctgaggctgcagtgagctgtgattgcaccactacactccatcctaggtgagagggcaagaccctttctcagaaaaggaaaaaaagaaattctggacatgtttttatcagttttcaggacttggtatcaatgtacatagaatggctaataaaaattggaattgagattattgaaaaaaa

SEQ ID NO: 71351 - DNA, 953 bp, Homo sapiens
gccatctcagcctgatgtcacaacccaataaatggggcactttcttcttttgtaaactattatcattttggtttctgtgacattaacttaattatatatgatcgtattaactcatgtagttctcaaaataggcagctgcttctgaagccagtaaaataaaattcagttagttattaaaaactaaattcctattagtaaggtaacaccatgattatgtgtgatatactgtttttgagatcatagttatcagtcattctcaatatctaattgagtccctaagaatattttaaaccttttaaaaatcacataaatatcatctcatgcctcataattctaatatatttaatacatcagtaaaatagctgcttattacttcccacactttgttctcagtattgttagtgcatcatgagtttcctgctagtgtttgaccactgggtactcctgaagatgttttttagtactagggatgcttttcagtattagggatgcttttttcagtactagggatgtactagggagtactgagtactcctgaagatgtttttcagtactagggatgcttttttcagtgttagggatgcttttcagtactagggatgcttttttcagtgctagggatgcttttcagtactagggatgctttccaaaatatcacctctttaacgtttactttttctagtgtgtgtctggaatccaaaggacatgaataagccactcataattaattttgagaagttttatcaaatgtttatgtttctaactgcaaaccttaattttggaaaggcacaatgtttaactcacctatgtttaaccatggctaatttaaaatagtctaagatttggcctgggctgtcttttcaactttagttttatttttatattttactttttagagacagggtttcactctgttgtccaggctggagtgaaactccatcttaaaacaaaca

SEQ ID NO: 71352 - DNA, 702 bp, Homo sapiens
tttttgagacagagtctcactctgtcgcccaggctggagtgcagaggtgcaattttggctcactataacctctgcctgccaggttcaagcaattcttgtgcctcagcctcccaaatagctgggactacaggcacgcaccaccacgcctgatttttatatttttagtagagacagggtttccccatgttggccagccattctctctttaaataatgcttttgcccattctatctctcatctactttcaggattcatatgtatatgtacatacatattagaacttctcactgtatcttgtattgaacttaccttctcctatattttcctctttcctgtttactctgaacattcccttttgacttacctttcagttagggaattctttcctctgcggtgtctaatttgctgctaaatccatctacaaaggtcctaattagaggggttgtatttttcacttctagaatatccatttttctttctcatagtttgtaactttctacaaaattcttaatcaggtcaaaattctcaacatagctattttaaatctgataactagaatatctagagttacccgtgggcctgtttctattctctattgtgtcacatatcttgtcatgtgcctattttgtgtgcagaacataaaatttgcaaaatcgtctgacaaaacatttttacatgtagaaactggtaattctccagaga

SEQ ID NO: 71353 - DNA, 258 bp, Homo sapiens
tctagagtagccttacctttattaggatacaaaaattggtaagcctgaagtaatctgccttttctttttctaaacggaacaaagctggatgaagaatgactttgacgagttgagagaagaaggcttcagacgatcaaattactctgagctacgggaggacattcaaaccaaaggcaaagaagttgaaaactttgaaaaaaaattagaagaatgtataactagaataaccaatacagagaagtgcttaaaggagctgat

SEQ ID NO: 71354 - DNA, 468 bp, Homo sapiens
ggccttggcccaaacaggaatgaggggcacagagtgcccgggtaaccgctcctgggagcagtggggaactgtcggatacttgaactctcaagagctgggctctgagcgtcctcgtccagcttgcccaccgccgggccgccctgctgcactatgagaacctgcccccactgccccctgtgtgggaaagccaagcccagcagctgggaggggaggctggggatgatggggactcgagggatggggagccgagacgtcaactgtgaagggttcctgtgattgcgtttagcgccctcccgttctgtccatttgtcttgtctgccgactgtccgtgtgtgttttttttggttggaattttgaaacattttgtacctgttgattttatttatcagtttatttttctatttattgttttaaatgtaatttaacatatttattattaatataattatttttaaattctgaaaaaaa

SEQ ID NO: 71355 - DNA, 2178 bp, Homo sapiens
gagggcttagctccgggcgggcggcggctgctgcagcgggacccgggagcggggcccggcgccgcccgggccgcggggcgatgtgagccccaggtgtatcccagagggatccgggtgacttctctgcagactgtttgccatgacagcccaccaaggacggggggaataaagtgggaacccttccccatgcccctcccacggtcagctccccgatggcctgggtgagggcaggctggctgctctgacaccatggggagctgctgcagctgcctgaacagagacagcgttccagacaaccaccccaccaagttcaaggtgacaaatgtggatgatgagggggtggagctgggctctggggtgatggagctgacgcagagtgagctggtgctgcacctgcatcggcgtgaggccgtccgctggccttatctctgcttgcggcgctatggctacgactccaacctcttctcctttgagagtggccgccgatgtcagacaggccagggaatatttgcatttaagtgttcccgggctgaggaaatcttcaacctccttcaggatctgatgcagtgcaacagcatcaatgtgatggaagagcctgtcatcatcacccgcaatagccaccccgctgagcttgacctccctcgagccccccagccacccaatgctctaggctacactgtctccagcttttccaatggctgccctggagagggcccacgattctcagctccccggcggctctcgacaagcagcctgcggcacccctcgcttggggaagagtccacccatgccctcattgctcctgatgagcagtcccacacctatgtcaacacaccggccagtgaagatgaccaccgcaggggccgccactgcctgcagcccctgcctgagggtcaggcacccttcctcccgcaggcccggggacctgaccaacgggacccacaggtgttcttgcagccaggccaggtgaagtttgtgttgggcccgacccctgctcggcggcacatggtgaagtgccagggcctctgtcccagcctgcatgaccccccacaccacaataataacaatgaggccccttctgagtgtccagcccagcccaagtgcacctacgagaacgtcaccggggggctgtggcgaggggctggctggagactgagcccagaggagccgggctggaatggccttgcccaccgccgggccgccctgctgcactatgagaacctgcccccactgccccctgtgtgggaaagccaagcccagcagctgggaggggaggctggggatgatggggactcgagggatgggctcacaccctcttccaatggcttccctgatggtgaggaggacgagaccccactgcagaagcccaccagcacccgggccgccatccgcagccacggcagctttcctgtgccactgacccgccgccgcggctccccaagggtcttcaactttgatttccgccggccggggcccgagcccccaaggcagcttaactacatccaggtggagctaaagggctggggtggagaccgccctaaggggccccagaacccctcgagcccccaagcccccatgcccaccacccaccctgcccgaagctcagactcctacgccgtgattgacctcaaaaagaccgtggccatgtccaacctgcagagagctctgccccgagacgatggcaccgccaggaaaacccggcacaacagcaccgacctgcctctgtagggacttcccggtcctcaccaccctctgccccaccatgatccagcctctgcctcacactcctgtcctctgaacccaccctccccagggttcagggttgctttgcagaaggcatggaggtgggaccagatgcttccctgtgctggctggagtccccagagatatcagccaccgagtctcctggtctgtctccaggctggggagagaagggtgaccaggcgaggagggagccgagacgtcaactgtgaagggttcctgtgattgcgtttagcgccctcccgttctgtccatttgtcttgtctgccgactgtccgtgtgtgttttttttggttggaattttgaaacattttgtacctgttgattttatttatcagtttatttttctatttattgttttaaatgtaatttaacatatttattattaatataattatttttaaattctgaaaaaaa

SEQ ID NO: 71356 - DNA, 862 bp, Homo sapiens
gagggcttagctccgggcgggcggcggctgctgcagcgggacccgggagcggggcccggcgccgcccgggccgcggggcgatgtgagccccaggtgtatcccagagggatccgggtgacttctctgcagactgtttgccatgacagcccaccaaggacggggggaataaagtgggaacccttccccatgcccctcccacggtcagctccccgatggcctgggtgaggtcattcaagcttgggtggtgtcctcttcattctaggcacagtcctgactattgtgacatataatccaagtactggaatcctggaggggaagagccaaatagtaaggcctctggtctccccttcagaaaaagggaaggaaacccagcattttttttaaatgaagaaatatccacttgaggttattaaaactgcactgttttaaatgttcagtcttctgaatatatctttatgatcacaatgtaacaactcatttgaagaggacatcagaaagataaatttgcactggatgttgggatggtagtaagggagaagagagaacttggatgaagtggaatggatgagggcaggctggctgctctgacaccatggggagctgctgcagctgcctgaacagagacagcgttccagacaaccaccccaccaagttcaagagaaaacaaaattctgtatttgtgagttaatatacgtaaagtatttaaaatagtgcttagtggccaggcacggtggctcacacctgtaataccagcacttttggaggccaaggcaggcggatcacctgaggtcaggagctcgagaccagcctggccaacatggcgaaaccccgtctctactaaaaatacaaaaattagccaggt

SEQ ID NO: 71357 - DNA, 520 bp, Homo sapiens
atctgggtcccgtcgaggtaccaacagctacaaatcaggacaggcaaccagaagtagaccatactgccttgaacttgtccatatgtacaaactgatcaccagctttctccatacatttttaatgcagacctgtaattgagttcagaagcctccaagaaaacagaaaggatcccctttctccagtttgtgctggaagaggagctgatcagagacatcaaataagagaaagatgggttgctagaggatggtagaactggaagcaaggcagctacctttttgcaaaaggaaatggtgttaggccccttttccagaagataagacagactcatagagattaaatgatcactatggtccttcttctgttaaatggagccaaagacgcctatgttgttctgaagtcttgtaatgtttaacttctgagaacttagattagtggtgtgatgatagagtctgtataacgcattgaaaagggtatcaggcttagttatttatccaataaatatttattgtatgcagggta

SEQ ID NO: 71358 - DNA, 435 bp, Homo sapiens
cgcagcactgggagatacctacatggaattatccaaaattcttttcaattgaaaatgatcctggaaatggattaatgtagagatggccctgttttattttggtagaaagaagggctacacccctcttgatcttaacccttcaacctcagctcgtggatcattgtgtttgtgaaaccttttcttctcagattccaaactatacctccatgagctcctagaaggcagtgaaatctatctcccagaggttgtgaagcctccacgggtatgtaagggatatgtttgtgagagtggttattgactgagttgggcttatccatgatacactgaacttataaatcaacttttaggcttgaaaaattgtttttgaaatctttgggatctgggggagccagatattgtcctccccatcagctgtttggaaaattgagatcaaaa

SEQ ID NO: 71359 - DNA, 1472 bp, Homo sapiens
agcggcacctgaccggagagccggctagatatggcgtcctctttgcttgcgggcgagcgattggtgcgtgctttgggccccggcggggagctggagccagagcggctaccccgaaagctgcgggccgagcttgaggccgcgctggggaagaagcacaagggcggtgatagctccagtggcccccaacgcttggtttctttccgtctcatccgggatctgcaccagcatctgagagaaagggattccaaactatacctccatgagctcctagaaggcagtgaaatctatctcccagaggttgtgaagcctccacggaacccagaactagttgcccggctggagaagattaagatacagctggccaatgaggaatataaacggatcacccgcaacgtcacttgtcaggatacaagacatggtgggactctcagcgacctgggaaagcaagtgagatcattgaaggctctggtcatcaccatcttcaatttcattgtcacggtggttgctgccttcgtctgcacttaccttggaagccaatatatcttcacagaaatggcctcgcgggtgctagctgcattgatcgtcgcctctgtggtgggtctggccgagctgtatgtcatggtgcgggcaatggaaggcgagctgggagaactgtaactggtgcttcatcatcaagtctagagaagactttgggggcttcaggctccaattggcagtcaccgactcagtcaacccatcagactttttgtattcagctccagttagtcagaagaccagcccaggccagctgctgtttctgtggggagccctaatcttctgtgaatttccaaagggagcattggaggagattgagataacacatctttaaaacagaaagaactggtcttggtctatcagtacctcttcctgaatctggtacccatctgccttctccagttcattctaaacactgctgggactagggtttttccatcaggagcaaatggaatccaggccttcccagaagtagaccatactgccttgaacttgtccatatgtacaaactgatcaccagctttctccatacatttttaatgcagacctgtaattgagttcagaagcctccaagaaaacagaaaggatcccctttctccagtttgtgctggaagaggagctgatcagagacatcaaataagagaaagatgggttgctagaggatggtagaactggaagcaaggcagctacctttttgcaaaaggaaatggtgttaggccccttttccagaagataagacagactcatagagattaaatgatcactatggtccttcttctgttaaatggagccaaagacgcctatgttgttctgaagtcttgtaatgtttaacttctgagaacttagattagtggtgtgatgatagagtctgtataacgcattgaaaagggtatcaggcttagttatttatccaataaatatttattgtatgcagggta

SEQ ID NO: 71360 - DNA, 1735 bp, Homo sapiens
agcggcacctgaccggagagccggctagatatggcgtcctctttgcttgcgggcgagcgattggtgcgtgctttgggccccggcggggagctggagccagagcggctaccccgaaagctgcgggccgagcttgaggccgcgctggggaagaagcacaagggcggtgatagctccagtggcccccaacgcttggtttctttccgtctcatccgggatctgcaccagcatctgagagaaagggattccaaactatacctccatgagctcctagaaggcagtgaaatctatctcccagaggttgtgaagcctccacggaacccagaactagttgcccggctggagaagattaagatacagctggccaatgaggaatataaacggatcacccgcaacgtcacttgtcaggatacaagacatggtgggactctcagcgacctgggaaagcaagtgagatcattgaaggctctggtcatcaccatcttcaatttcattgtcacggtggttgctgccttcgtctgcacttaccttggaagccaatatatcttcacagaaatggcctcgcgggtgctagctgcattgatcgtcgcctctgtggtgggtctggccgagctgtatgtcatggtgcgggcaatggaaggcgagctgggagaactgtaactggtgcttcatcatcaagtctagagaagactttgggggcttcaggctccaattggcagtcaccgactcagtcaacccatcagactttttgtattcagctccagttagtcagaagaccagcccaggccagctgctgtttctgtggggagccctaatcttctgtgaatttccaaagggagcattggaggagattgagataacacatctttaaaacagaaagaactggtcttggtctatcagtacctcttcctgaatctggtacccatctgccttctccagttcattctaaacactgctgggactagggtttttccatcaggagcaaatggaatccaggccttcccagaagtagaccatactgccttgaacttgtccatatgtacaaactgatcaccagctttctccatacatttttaatgcagacctgtaattgagttcagaagcctccaagaaaacagaaaggatcccctttctccagtttgtgctggaagaggagctgatcagagacatcaaataagagaaagatgggttgctagaggatggtagaactggaagcaaggcagctacctttttgcaaaaggaaatggtgttaggccccttttccagaagataagacagactcatagagattaaatgatcactatggtccttcttctgttaaatggagccaaagacgcctatgttgttctgaagtcttgtaatgtttaacttctgagaacttagattagtggtgtgatgatagagtctgtataacgcattgaaaagggtatcaggcttagttatttatccaataaatatttattgtatgcagggtattcctattttaactcctgtgacaacacaaagcatagcgatttccatagttctaactgttcagggtctgctcctcctggtacactctttttggttcactgtatgtactcctgttgtctttttttttttttccaaagcacttttctgttttcataaattatatactcattcactcagtggaaaaaaaaaacaccaaaagcaagaaaaaaaaagggggggccaaaaaaccaggggccatgcccattgaaaggcccaataaaaaaag

SEQ ID NO: 71361 - DNA, 1785 bp, Homo sapiens
agcggcacctgaccggagagccggctagatatggcgtcctctttgcttgcgggcgagcgattggtgcgtgctttgggccccggcggggagctggagccagagcggctaccccgaaagctgcgggccgagcttgaggccgcgctggggaagaagcacaagggcggtgatagctccagtggcccccaacgcttggtttctttccgtctcatccgggatctgcaccagcatctgagagaaagggattccaaactatacctccatgagctcctagaaggcagtgaaatctatctcccagaggttgtgaagcctccacggaacccagaactagttgcccggctggagaagattaagatacagctggccaatgaggaatataaacggatcacccgcaacgtcacttgtcaggatacaagacatggtgggactctcagcgacctgggaaagcaagtgagatcattgaaggctctggtcatcaccatcttcaatttcattgtcacggtggttgctgccttcgtctgcacttaccttggaagccaatatatcttcacagaaatggcctcgcgggtgctagctgcattgatcgtcgcctctgtggtgggtctggccgagctgtatgtcatggtgcgggcaatggaaggcgagctgggagaactgtaactggtgcttcatcatcaagtctagagaagactttgggggcttcaggctccaattggcagtcaccgactcagtcaacccatcagactttttgtattcagctccagttagtcagaagaccagcccaggccagctgctgtttctgtggggagccctaatcttctgtgaatttccaaagggagcattggaggagattgagataacacatctttaaaacagaaagaactggtcttggtctatcagtacctcttcctgaatctggtacccatctgccttctccagttcattctaaacactgctgggactagggtttttccatcaggagcaaatggaatccaggccttcccagaagtagaccatactgccttgaacttgtccatatgtacaaactgatcaccagctttctccatacatttttaatgcagacctgtaattgagttcagaagcctccaagaaaacagaaaggatcccctttctccagtttgtgctggaagaggagctgatcagagacatcaaataagagaaagatgggttgctagaggatggtagaactggaagcaaggcagctacctttttgcaaaaggaaatggtgttaggccccttttccagaagataagacagactcatagagattaaatgatcactatggtccttcttctgttaaatggagccaaagacgcctatgttgttctgaagtcttgtaatgtttaacttctgagaacttagattagtggtgtgatgatagagtctgtataacgcattgaaaagggtatcaggcttagttatttatccaataaatatttattgtatgcagggtattcctattttaactcctgtgacaacacaaagcatagcgatttccatagttctaactgttcagggtctgctcctcctggtacactctttttggttcactgtatgtactcctgttgtctttttttttttttccaaagcacttttctgttttcataaattatatactcattcactcagtggacacttcctctacaatgtttgccagtttctgttagttgggagaagtgtcagctgtgaaaagaaaaagtagggtggcattttacagtgtttccagtaacctgaggctattattaaaatttgtgggttaaaaagcta

SEQ ID NO: 71362 - DNA, 1731 bp, Homo sapiens
agcggcacctgaccggagagccggctagatatggcgtcctctttgcttgcgggcgagcgattggtgcgtgctttgggccccggcggggagctggagccagagcggctaccccgaaagctgcgggccgagcttgaggccgcgctggggaagaagcacaagggcggtgatagctccagtggcccccaacgcttggtttctttccgtctcatccgggatctgcaccagcatctgagagaaagggattccaaactatacctccatgagctcctagaaggcagtgaaatctatctcccagaggttgtgaagcctccacggaacccagaactagttgcccggctggagaagattaagatacagctggccaatgaggaatataaacggatcacccgcaacgtcacttgtcaggatacaagacatggtgggactctcagcgacctgggaaagcaagtgagatcattgaaggctctggtcatcaccatcttcaatttcattgtcacggtggttgctgccttcgtctgcacttaccttggaagccaatatatcttcacagaaatggcctcgcgggtgctagctgcattgatcgtcgcctctgtggtgggtctggccgagctgtatgtcatggtgcgggcaatggaaggcgagctgggagaactgtaactggtgcttcatcatcaagtctagagaagactttgggggcttcaggctccaattggcagtcaccgactcagtcaacccatcagactttttgtattcagctccagttagtcagaagaccagcccaggccagctgctgtttctgtggggagccctaatcttctgtgaatttccaaagggagcattggaggagattgagataacacatctttaaaacagaaagaactggtcttggtctatcagtacctcttcctgaatctggtacccatctgccttctccagttcattctaaacactgctgggactagggtttttccatcaggagcaaatggaatccaggccttcccagaagtagaccatactgccttgaacttgtccatatgtacaaactgatcaccagctttctccatacatttttaatgcagacctgtaattgagttcagaagcctccaagaaaacagaaaggatcccctttctccagtttgtgctggaagaggagctgatcagagacatcaaataagagaaagatgggttgctagaggatggtagaactggaagcaaggcagctacctttttgcttaaatgatcactatggtccttcttctgttaaatggagccaaagacgcctatgttgttctgaagtcttgtaatgtttaacttctgagaacttagattagtggtgtgatgatagagtctgtataacgcattgaaaagggtatcaggcttagttatttatccaataaatatttattgtatgcagggtattcctattttaactcctgtgacaacacaaagcatagcgatttccatagttctaactgttcagggtctgctcctcctggtacactctttttggttcactgtatgtactcctgttgtctttttttttttttccaaagcacttttctgttttcataaattatatactcattcactcagtggacacttcctctacaatgtttgccagtttctgttagttgggagaagtgtcagctgtgaaaagaaaaagtagggtggcattttacagtgtttccagtaacctgaggctattattaaaatttgtgggttaaaaagcta

SEQ ID NO: 71363 - DNA, 1635 bp, Homo sapiens
agcggcacctgaccggagagccggctagatatggcgtcctctttgcttgcgggcgagcgattggtgcgtgctttgggccccggcggggagctggagccagagcggctaccccgaaagctgcgggccgagcttgaggccgcgctggggaagaagcacaagggcggtgatagctccagtggcccccaacgcttggtttctttccgtctcatccgggatctgcaccagcatctgagagaaagggattccaaactatacctccatgagctcctagaaggcagtgaaatctatctcccagaggttgtgaagcctccacggaacccagaactagttgcccggctggagaagattaagatacagctggccaatgaggaatataaacggatcacccgcaacgtcacttgtcaggatacaagacatggtgggactctcagcgacctgggaaagcaaggtgaggtactaggagatcaggcttctaaaaccttttcctgagatgggtcatgacactcaggcttgttgtttgactgaaacccagttggtgggggagccatgagataagagcacctcctagagaatgttgaactaaaggtgccctctctggctcctccccaaagtgagatcattgaaggctctggtcatcaccatcttcaatttcattgtcacggtggttgctgccttcgtctgcacttaccttggaagccaatatatcttcacagaaatggcctcgcgggtgctagctgcattgatcgtcgcctctgtggtgggtctggccgagctgtatgtcatggtgcgggcaatggaaggcgagctgggagaactgtaactggtgcttcatcatcaagtctagagaagactttgggggcttcaggctccaattggcagtcaccgactcagtcaacccatcagactttttgtattcagctccagttagtcagaagaccagcccaggccagctgctgtttctgtggggagccctaatcttctgtgaatttccaaagggagcattggaggagattgagataacacatctttaaaacagaaagaactggtcttggtctatcagtacctcttcctgaatctggtacccatctgccttctccagttcattctaaacactgctgggactagggtttttccatcaggagcaaatggaatccaggccttcccagaagtagaccatactgccttgaacttgtccatatgtacaaactgatcaccagctttctccatacatttttaatgcagacctgtaattgagttcagaagcctccaagaaaacagaaaggatcccctttctccagtttgtgctggaagaggagctgatcagagacatcaaataagagaaagatgggttgctagaggatggtagaactggaagcaaggcagctacctttttgcaaaaggaaatggtgttaggccccttttccagaagataagacagactcatagagattaaatgatcactatggtccttcttctgttaaatggagccaaagacgcctatgttgttctgaagtcttgtaatgtttaacttctgagaacttagattagtggtgtgatgatagagtctgtataacgcattgaaaagggtatcaggcttagttatttatccaataaatatttattgtatgcagggta

SEQ ID NO: 71364 - DNA, 1137 bp, Homo sapiens
  misc_feature (1119)..(1120): n is a, c, g, or t
  misc_feature (1129)..(1129): n is a, c, g, or t
agcggcacctgaccggagagccggctagatatggcgtcctctttgcttgcgggcgagcgattggtgcgtgctttgggccccggcggggagctggagccagagcggctaccccgaaagctgcgggccgagcttgaggccgcgctggggaagaagcacaagggcggtgatagctccagtggcccccaacgcttggtttctttccgtctcatccgggatctgcaccagcatctgagagaaagggattccaaactatacctccatgagctcctagaaggcagtgaaatctatctcccagaggttgtgaagcctccacggaacccagaactagttgcccggctggagaagattaagatacagctggccaatgaggaatataaacggatcacccgcaacgtcacttgtcaggatacaagacatggtgggactctcagcgacctgggaaagcaagtgagatcattgaaggctctggtcatcaccatcttcaatttcattgtcacggtggttgctgccttcgtctgcacttaccttggaagccaatatatcttcacagaaatggcctcgcgggtgctagctgcattgatcgtcgcctctgtggtgggtctggccgagctgtatgtcatggtgcgggcaatggaaggcgagctgggagaactgtaactggtgcttcatcatcaagtctagagaagactttgggggcttcaggctccaattggcagtcaccgactcagtcaacccatcagactttttgtattcagctccagttagtcagaagaccagcccaggccagctgctgtttctgtggggagccctaatcttctgtgaatttccaaagggagcattggaggagattgagataacacatctttaaaacagaaagaactggtcttggtctatcagtacctcttcctgaatctggtacccatctgccttctccagttcattctaaacactgctgggactagggtttttccatcaggagcaaatggaatccaggccttcccagaagtagaccatactgccttgaacttgtccatatgtacaaactgatcaccagctttctccatacatttttaatgcagacctgtaattgagttcagaagcctccaagaaaaacaaatnngagaagganggttggtt

SEQ ID NO: 71365 - DNA, 1264 bp, Homo sapiens
agcggcacctgaccggagagccggctagatatggcgtcctctttgcttgcgggcgagcgattggtgcgtgctttgggccccggcggggagctggagccagagcggctaccccgaaagctgcgggccgagcttgaggccgcgctggggaagaagcacaagggcggtgatagctccagtggcccccaacgcttggtttctttccgtctcatccgggatctgcaccagcatctgagagaaagggattccaaactatacctccatgagctcctagaaggcagtgaaatctatctcccagaggttgtgaagcctccacggaacccagaactagttgcccggctggagaagattaagatacagctggccaatgaggaatataaacggatcacccgcaacgtcacttgtcaggatacaagacatggtgggactctcagcgacctgggaaagcaagtgagatcattgaaggctctggtcatcaccatcttcaatttcattgtcacggtggttgctgccttcgtctgcacttaccttggaagccaatatatcttcacagaaatggcctcgcgggtgctagctgcattgatcgtcgcctctgtggtgggtctggccgagctgtatgtcatggtgcgggcaatggaaggcgagctgggagaactgtaactggtgcttcatcatcaagtctagagaagactttgggggcttcaggctccaattggcagtcaccgactcagtcaacccatcagactttttgtattcagctccagttagtcagaagaccagcccaggccagctgctgtttctgtggggagccctaatcttctgtgaatttccaaagggagcattggaggagattgagataacacatctttaaaacagaaagaactggtcttggtctatcagtacctcttcctgaatctggtacccatctgctttgtgctggaagaggagctgatcagagacatcaaataagagaaagatgggttgctagaggatggtagaactggaagcaaggcagctacctttttgcaaaaggaaatggtgttaggccccttttccagaagataagacagactcatagagattaaatgatcactatggtccttcttctgttaaatggagccaaagacgcctatgttgttctgaagtcttgtaatgtttaacttctgagaacttagattagtggtgtgatgatagagtctgtataacgcattgaaaagggtatcaggcttagttatttatccaataaatatttattgtatgcagggta

SEQ ID NO: 71366 - DNA, 1411 bp, Homo sapiens
agcggcacctgaccggagagccggctagatatggcgtcctctttgcttgcgggcgagcgattggtgcgtgctttgggccccggcggggagctggagccagagcggctaccccgaaagctgcgggccgagcttgaggccgcgctggggaagaagcacaagggcggtgatagctccagtggcccccaacgcttggtttctttccgtctcatccgggatctgcaccagcatctgagagaaagggattccaaactatacctccatgagctcctagaaggcagtgaaatctatctcccagaggttgtgaagcctccacggaacccagaactagttgcccggctggagaagattaagatacagctggccaatgaggaatataaacggatcacccgcaacgtcacttgtcaggatacaagacatggtgggactctcagcgacctgggaaagcaagtgagatcattgaaggctctggtcatcaccatcttcaatttcattgtcacggtggttgctgccttcgtctgcacttaccttggaagccaatatatcttcacagaaatggcctcgcgggtgctagctgcattgatcgtcgcctctgtggtgggtctggccgagctgtatgtcatggtgcgggcaatggaaggcgagctgggagaactgtaactggtgcttcatcatcaagtctagagaagactttgggggcttcaggctccaattggcagtcaccgactcagtcaacccatcagactttttgtattcagctccagttagtcagaagaccagcccaggccagctgctgtttctgtggggagccctaatcttctgtgaatttccaaagggagcattggaggagattgagataacacatctttcttctccagttcattctaaacactgctgggactagggtttttccatcaggagcaaatggaatccaggccttcccagaagtagaccatactgccttgaacttgtccatatgtacaaactgatcaccagctttctccatacatttttaatgcagacctgtaattgagttcagaagcctccaagaaaacagaaaggatcccctttctccagtttgtgctggaagaggagctgatcagagacatcaaataagagaaagatgggttgctagaggatggtagaactggaagcaaggcagctacctttttgcaaaaggaaatggtgttaggccccttttccagaagataagacagactcatagagattaaatgatcactatggtccttcttctgttaaatggagccaaagacgcctatgttgttctgaagtcttgtaatgtttaacttctgagaacttagattagtggtgtgatgatagagtctgtataacgcattgaaaagggtatcaggcttagttatttatccaataaatatttattgtatgcagggta

SEQ ID NO: 71367 - DNA, 1780 bp, Homo sapiens
agcggcacctgaccggagagccggctagatatggcgtcctctttgcttgcgggcgagcgattggtgcgtgctttgggccccggcggggagctggagccagagcggctaccccgaaagctgcgggccgagcttgaggccgcgctggggaagaagcacaagggcggtgatagctccagtggcccccaacgcttggtttctttccgtctcatccgggatctgcaccagcatctgagagaaagggattccaaactatacctccatgagctcctagaaggcagtgaaatctatctcccagaggttgtgaagcctccacggaacccagaactagttgcccggctggagaagattaagatacagctggccaatgaggaatataaacggatcacccgcaacgtcacttgtcaggatacaagacatggtgggactctcagcgacctgggaaagcaagtgagatcattgaaggctctggtcatcaccatcttcaatttcattgtcacggtggttgctgccttcgtctgcacttaccttggaagccaatatatcttcacagaaatggcctcggtgagtaggcactgggcagggcagggtgccctggtgggggtgttagtgggtaagggaggacgtatgtgaaagtgccttgcacaggttaggtattgaacagatatttatgccattaataaggggagcattagagctttccagcagtcacgggaggttaggtaataaccccaggagaagccacattctcttttcttcccctcccccaacttagagggtggttggggggctctccatcctcattaaagttgctggggtacagagctggttgttggcctgcatcccttaagcctggttctccccatctccagcgggtgctagctgcattgatcgtcgcctctgtggtgggtctggccgagctgtatgtcatggtgcgggcaatggaaggcgagctgggagaactgtaactggtgcttcatcatcaagtctagagaagactttgggggcttcaggctccaattggcagtcaccgactcagtcaacccatcagactttttgtattcagctccagttagtcagaagaccagcccaggccagctgctgtttctgtggggagccctaatcttctgtgaatttccaaagggagcattggaggagattgagataacacatctttaaaacagaaagaactggtcttggtctatcagtacctcttcctgaatctggtacccatctgccttctccagttcattctaaacactgctgggactagggtttttccatcaggagcaaatggaatccaggccttcccagaagtagaccatactgccttgaacttgtccatatgtacaaactgatcaccagctttctccatacatttttaatgcagacctgtaattgagttcagaagcctccaagaaaacagaaaggatcccctttctccagtttgtgctggaagaggagctgatcagagacatcaaataagagaaagatgggttgctagaggatggtagaactggaagcaaggcagctacctttttgcaaaaggaaatggtgttaggccccttttccagaagataagacagactcatagagattaaatgatcactatggtccttcttctgttaaatggagccaaagacgcctatgttgttctgaagtcttgtaatgtttaacttctgagaacttagattagtggtgtgatgatagagtctgtataacgcattgaaaagggtatcaggcttagttatttatccaataaatatttattgtatgcagggta

SEQ ID NO: 71368 - DNA, 1609 bp, Homo sapiens
aacagtttcaaagcactggagttacgactagtatgtgggtctcctgatacctttagcagtgctttacccctggaaccaatgattgtgatgtgctttctaacaagctgggaatatcattcttctcatttgatttttctgcttcagaacccagaactagttgcccggctggagaagattaagatacagctggccaatgaggaatataaacggatcacccgcaacgtcacttgtcaggatacaagacatggtgggactctcagcgacctgggaaagcaagtgagatcattgaaggctctggtcatcaccatcttcaatttcattgtcacggtggttgctgccttcgtctgcacttaccttggaagccaatatatcttcacagaaatggcctcggtgagtaggcactgggcagggcagggtgccctggtgggggtgttagtgggtaagggaggacgtatgtgaaagtgccttgcacaggttaggtattgaacagatatttatgccattaataaggggagcattagagctttccagcagtcacgggaggttaggtaataaccccaggagaagccacattctcttttcttcccctcccccaacttagagggtggttggggggctctccatcctcattaaagttgctggggtacagagctggttgttggcctgcatcccttaagcctggttctccccatctccagcgggtgctagctgcattgatcgtcgcctctgtggtgggtctggccgagctgtatgtcatggtgcgggcaatggaaggcgagctgggagaactgtaactggtgcttcatcatcaagtctagagaagactttgggggcttcaggctccaattggcagtcaccgactcagtcaacccatcagactttttgtattcagctccagttagtcagaagaccagcccaggccagctgctgtttctgtggggagccctaatcttctgtgaatttccaaagggagcattggaggagattgagataacacatctttaaaacagaaagaactggtcttggtctatcagtacctcttcctgaatctggtacccatctgccttctccagttcattctaaacactgctgggactagggtttttccatcaggagcaaatggaatccaggccttcccagaagtagaccatactgccttgaacttgtccatatgtacaaactgatcaccagctttctccatacatttttaatgcagacctgtaattgagttcagaagcctccaagaaaacagaaaggatcccctttctccagtttgtgctggaagaggagctgatcagagacatcaaataagagaaagatgggttgctagaggatggtagaactggaagcaaggcagctacctttttgcaaaaggaaatggtgttaggccccttttccagaagataagacagactcatagagattaaatgatcactatggtccttcttctgttaaatggagccaaagacgcctatgttgttctgaagtcttgtaatgtttaacttctgagaacttagattagtggtgtgatgatagagtctgtataacgcattgaaaagggtatcaggcttagttatttatccaataaatatttattgtatgcagggta

SEQ ID NO: 71369 - DNA, 1939 bp, Homo sapiens
cggcacgagaacatttatctccagtcagcacacttgatgttcacagttagacatttaaacaagagctcatcctttcgtagtagatataaaagtaatttgtaaagggaagattgttttaggaacctgggcgatgctgcaaacacagagtagcctgatgcatttctgaggaaggtgaatcttcgtgtctttgagcatcaagccaataggaaggtactgggaacggtatttacatttgacaaaagaaattactggttagctatagcaacagattggacaaattttgttagttttctgttgtcagaaatttttataatactgtctcaggatggcagcacacagctcagattcatgtcttgagccaaacaagtgaatgtatctgagaagactcagtaccacatggtactgggagatcttactcacttcagctggcgttgctcattagtgaatgtatgacagcaggatgtgaggggatgcccaggagtcagtgttagcattgtcatctgagatcactgctattaatatcatccattaatttattagtgagcttcactatatgcagactgggagataaggagaaaatctgtcacattctctctagctaatcagatcagctaccaattaatgagattctgaatgaaatatcaatatgtgtttttctaatttggacctaggacagagctgttgcttgtcatagagaaaaacaataatgcttaaacatagcacattataattaaagcaggtttctcacatacttttcattttatcctttggataattttgtgaggaacgcaggacaccaacttccctttcatagatacaatccccatgctattgatgaaagtgtttttgaatgaagtcatacaacaaataactgatcaaagtggcattacaccaaaatttcttagtaggactcctgcatagaatgtttagatagacgtgaaagttgttaagaggaacagcaagagagaaactggttctttggaagtctttcgtgctacattatacctccatcagagtaagacagcttaggcactcctaagaggaaaggtctgtggagatgacatgaatccgaattctacacttccaaatcaaataggtaaaagggtggcatacatcacagaaaaacatttcagctgcagtcaccaacttgaaaagcgagtgagtaggagtttgtcacactgccatgtaccagactggaaatgcatttcctaccaattacacatttggtgtgggggaatggtgatgtcattttttgacaggattttattttgtgtgcatgcattctgctccaagtgtcacaattctggttacaataattataatatttggagttactactaagactttcctgaaagaggtgtattgtaccaaattttgtaacataaaaaaatactaaatgatcttaaagcttcctaaattgtgaaaagggtatgtgctaacatctcagaactttagacctgcttgttgtcatctttaccgatctctgatgataaatgcagaagggatctgagagtttttaaagcaagtagagtcaatcagagttttgaacatcatagtaatacttccgtgattcagagttagatcatataaatcaaagtaacaatttggattttttttaaacaacaatatcataactgtcataaaacagatggtccaaccccaggagcagataataacttgggcagctctgtggggaacaagacggggaaaacaactgttctaactgcccactagaacagtggtttcaactactacaattctcagtgtttgagaggtacaagggaagaaaggactatgtggatcccttgtggctatgcagatacctacctcacagagttgttgtagaagactggtggtttggttcaaaccttgtgattaaagagtttgtcaagcattttattcttttgaataaaagcaacatatctaaaacattttaaag

SEQ ID NO: 71370 - DNA, 1885 bp, Homo sapiens
cggcacgagaacatttatctccagtcagcacacttgatgttcacagttagacatttaaacaagagctcatcctttcgtagtagatataaaagtaatttgtaaagggaagattgttttaggaacctgggcgatgctgcaaacacagagtagcctgatgcatttctgaggaaggtgaatcttcgtgtctttgagcatcaagccaataggaaggtactgggaacggtatttacatttgacaaaagaaattactggttagctatagcaacagattggacaaattttgttagttttctgttgtcagaaatttttataatactgtctcaggatggcagcacacagctcagattcatgtcttgagccaaacaagtgaatgtatctgagaagactcagtaccacatggtactgggagatcttactcacttcagctggcgttgctcattagtgaatgtatgacagcaggatgtgaggggatgcccaggagtcagtgttagcattgtcatctgagatcactgctattaatatcatccattaatttattagtgagcttcactatatgcagactgggagataaggagaaaatctgtcacattctctctagctaatcagatcagctaccaattaatgagattctgaatgaaatatcaatatgtgtttttctaatttggacctaggacagagctgttgcttgtcatagagaaaaacaataatgcttaaacatagcacattataattaaagcaggtttctcacatacttttcattttatcctttggataattttgtgaggaacgcaggacaccaacttccctttcatagatacaatccccatgctattgatgaaagtgtttttgaatgaagtcatacaacaaataactgatcaaagtggcattacacctaagaggaacagcaagagagaaactggttctttggaagtctttcgtgctacattatacctccatcagagtaagacagcttaggcactcctaagaggaaaggtctgtggagatgacatgaatccgaattctacacttccaaatcaaataggtaaaagggtggcatacatcacagaaaaacatttcagctgcagtcaccaacttgaaaagcgagtgagtaggagtttgtcacactgccatgtaccagactggaaatgcatttcctaccaattacacatttggtgtgggggaatggtgatgtcattttttgacaggattttattttgtgtgcatgcattctgctccaagtgtcacaattctggttacaataattataatatttggagttactactaagactttcctgaaagaggtgtattgtaccaaattttgtaacataaaaaaatactaaatgatcttaaagcttcctaaattgtgaaaagggtatgtgctaacatctcagaactttagacctgcttgttgtcatctttaccgatctctgatgataaatgcagaagggatctgagagtttttaaagcaagtagagtcaatcagagttttgaacatcatagtaatacttccgtgattcagagttagatcatataaatcaaagtaacaatttggattttttttaaacaacaatatcataactgtcataaaacagatggtccaaccccaggagcagataataacttgggcagctctgtggggaacaagacggggaaaacaactgttctaactgcccactagaacagtggtttcaactactacaattctcagtgtttgagaggtacaagggaagaaaggactatgtggatcccttgtggctatgcagatacctacctcacagagttgttgtagaagactggtggtttggttcaaaccttgtgattaaagagtttgtcaagcattttattcttttgaataaaagcaacatatctaaaacattttaaag

SEQ ID NO: 71371 - DNA, 280 bp, Homo sapiens
gcaggaaaaagaaagaaaaggcatccagattggaaaggaagaagtaaaactgtcattattcatagacacggtcatctacgtaaatatttctttagaatctacaaaataagctactagaacgagtgcatttagcaaggttgcagcatacaaaataatgtataaaacgtaactgtatttctatatagtatcaatgaaccactaaaaatgtaaatttaaaatttctatttacaacattaaaaaatatgaaatgcttagggatatatctgatcaaatgtttaag

SEQ ID NO: 71372 - DNA, 384 bp, Homo sapiens
tatctccctatctctgtgagcatactcagtacggcaaaagccagggactcacagccgtggttggctataaaatttcccatatttgagactgtttaaagtcctaaagtggtcatttaatccaacgttcccaagtttttaatggccacagagacttccagttaaaaggaacaatactagaagccagatattctgactggaggttgacagaggttcagataggcagagttcaccttcatcacactctttttcccttctgttcacaagagaccctcaggggcaccactgaatatggtctgaaaaccacagctgtacctcgctcttatctccccaagtattgaacatacaacaggacaaacaacttgagatcagaaaaataaaataaaa

SEQ ID NO: 71373 - DNA, 998 bp, Homo sapiens
agcaatctgatcccataaatgagggatgcggagtaatgagcaggttctaaatgtcttacttccgagtggtataacatgagactcgatggcaacccttaaaccaggctgctttcaaatagtatgtatgttacatttatcttccttcaaacaaattcttttggcaatgtaaaagaaatcctgttttttttttaagggggtattttaagaaggtaattactatttccattttcaccaaaagcagcctagttttatttttaatgggtaaatgatgtaagaaccttaaaaaaccacatgaaacacagaggacaaagctgcaaaatgttcagtagtatcctcacttatttcgggtcagggcaataggtcctttttcacagttacagattaaactttctttgaaaaacacagtaagcttaagaactttgaggaaaaagaatgcactaaaacgctaagcagttacaaaaatgctcttttcatacagtttaagtttaatatgtgaagttgctctagtaaatacataaaaactcctcccttacatagtttcctgaagaatttttttgtccaatttttcacattgacttaagttacaaattgcagaggatagattgagggggactctgggtgggtgcaagtgcaggatattgagaaatcgcaagggcaaagttaaaatgattgaatacgtaccatgtgaagagtcaaggtgaggaaacgggacaaacgacatgtctagatcctgatgtcacttacttgtgttaaacacatgaatctactgccttttataaaatgtatgtgctgggtggttgtttttgtagattttttaaaatgcccaatattcattattcaagtttcaataagaatgattttgtttctacaaaaaggaaacaattttttaattttttatttggaaaaaaattaaatgtacagaaagttgcataaataatattgcaaataccatatatattaaggtaaacattaaaatattcctaatattttaaaccatt

SEQ ID NO: 71374 - DNA, 255 bp, Homo sapiens
tatttctggagttttgctgtaattttgagaggaaacagagtgtaagttgggcattctaaaaattagactgaactcacacataaatcatgaatctcaaaacttattcacaaacttaatatttttgtggcccatttcccatttttctctacttttcaccaccttaccccctttttttagacacagggtctcactctgttccccaggctggagtgtagtggtaagatagatggctcactgcagcctgacccactacag

SEQ ID NO: 71375 - DNA, 766 bp, Homo sapiens
aagggcagggagggacagcaaccactagaaggctgacatgggctggccctcttgttctatgaccccccatccgtagatcacttgccctgcaagagagttcagtatcccttgattccccgcccctcctcctcccactccgcagacccccatttttggactgaatcctggagaccccgtggggctgggttatttgaaacccattgttcaaatggaatctgggctaggcagagacctaggagcccttggacctgaggaacacaattgggaacccatagaatcactggaacctttctgtcctccctctctcctattccttagataaggagctctgagtttagagggtggaggggcccaagcctgatcaattcatttttctttgttttagaaacagtttaacttttgttttcatgtaaatcttcattgcttcttttcccccttcttctgactacaagagcaatataagcttattgtaaaatgtcaaacattacagaaatataggttccagaaaataaaagccctcccaacatgattctccccttggagatatataccatatagtggctaatttctttctgtctctctgaacgtatataggtagacagacacatatatatgtaatcactttaatttggaaaatggcttttaaaacaatttatcctgtagaattttgttcaaataatttgatgccaatcttgctcacctaatgattagaccacagaaagcagcaatcagtgctaaagatgatagtcaaaaacaggaaaaactt

SEQ ID NO: 71376 - DNA, 197 bp, Homo sapiens
aaatgcacaataatgtgtcaagagccctggacttattgcttctcggacgttagcaaagatcaagcgcagaccactggctttggggtctgataccccaggagagtcccggtttcgtgctcatgtgttatgtgacccttgacccctcgttcaattctcacgtgcttcactctcctaagccatgcaaaagggacataagg

SEQ ID NO: 71377 - DNA, 1560 bp, Homo sapiens
  misc_feature (151)..(151): n is a, c, g, or t
agagtgggaaaaagcagaaggagaccagaggtgcccaggtagtgctgggcatgggcaggggcacagtgccacctgcaattgcctttgatgcctcttggtgccctgtgtttacttcttagacatctagggagtaaggtctggctctttcccntcttaacccaaggttggttgggactctgcagtctggccaagggatgtgttgtcctgtcccttctcccttaggtcactgaaaggcagtcaggtgagatgccctgtctggcccaaaacgatctcggaccctcggtgctggtctcactctggtgaggctgtccctgatgcttggccttctctccagggaaccagtggatgaggtgctgcagatccccccatccctgctgacatgcggcggctgccagcagaacatcggggaccgctacttcctgaaggccatcgaccagtactggcacgaggactgcctgagctgcgacctctgtggctgccggctgggtgaggtggggcggcgcctctactacaaactgggccggaagctctgccggagagactatctcaggctttttgggcaagacggtctctgcgcatcctgtgacaagcggattcgtgcctatgagatgacaatgcgggtgaaagacaaagtgtatcacctggaatgtttcaagtgcgccgcctgtcagaagcatttctgtgtaggtgacagatacctcctcatcaactctgacatagtgtgcgaacaggacatctacgagtggactaagatcaatgggatgatataggcccgagtccccgggcatctttggggaggtgttcactgaagacgccgtctccatggcatcttcgtcttcactcttaggcactttgggggtttgagggtggggtaagggatttcttaggggatggtagacctttattgggtatcaagacatagcatccaagtggcataattcaggggctgacacttcaaggtgacagaaggaccagcccttgagggagaacttatggccacagcccatccatagtaactgacatgattagcagaagaaaggaacatttaggggcaagcaggcgctgtgctatcatgatggaatttcatatctacagatagagagttgttgtgtacagacttgttgtgactttgacgcttgcgaactagagatgtgcaattgatttcttttcttcctggctttttaactcccctgtttcaatcactgtcctccacacaagggaaggacagaaaggagagtggccattctttttttcttggcccccttcccaaggccttaagctttggacccaaggaaaactgcatggagacgcatttcggttgagaatggaaaccacaacttttaaccaaacaattatttaaagcaatgctgatgaatcactgtttttagacaccttcattttgaggggaggagttccacagattgtttctatacaaatataaatcttaaaaagttgttcaactattttattatcctagattatatcaaagtatttgtcgtgtgtagaaaaaaaaaacagctctgcaggcttaataaaaatgacagactgaaaaaaaaaaaa

SEQ ID NO: 71378 - DNA, 737 bp, Homo sapiens
ttccgcctgccccacccgtcacgctatcaaggacacccgcctgctatcagaaagccctgggggtctttttccctagtttatcaaggacctgtggaaacatttctctaactgaagataagaattttttttctctctctttctcctttctacttctagctgtctaaaccagagggttcctctcattttctttcagtaacaactgctctgaaaagaagatatttttcaacctgaacttgcagtagctagtggagaggcaggatacctccctcaacaatgggcattcctagggagcatcattaacaagattccagctctactccttcctgctgaggtttgtcgcttaagaatctggagacaggtagggtgcagtggcttacacctgtaatcctagcactttgggaggccaaggcgtgtagatcacctgaggtcaggagttcaacaccagcctgaccaatatggtgaaaccctgactctactacaaatacaaaaattagccaggcgtggtagtgtgcacctatagtcccagctactcaggaggctgagacaggagaatcacttgaaaccgggaggcagaggttgcagtgagctgagatcacgccaccgcactccagcctgggtaacagagtgagacactgtctcaaaaaaaaaagttttgcatgcggccgaattagggctccttggccaatcccctttagggggggggattttacgggccccggtttaccggggggcaggcc

SEQ ID NO: 71379 - DNA, 2558 bp, Homo sapiens
gaattcgtccaaactgaggatcacaagtctccacattctgagtaggaggatgagggtctgagttaggatttgggtcctgcagggcttgctaaggaatcccctgatggcctaggattccacgcagagcacatctggtgtgagagagctcgctgcaagggtgaaggctccgccctatcagatagacaaccaggccaccaagaggcccagccctccaaaccctggatttgcaacatcctcaaagaacagcaacgggccttgagcagaattgagaaggaaatacccccacctgccctcagccgttaagtgggctttgctattcacaagggcctctgggtgtcctggcagagaggggagatggcacaggcaccaggtgctagggtgccagggcctcccgagaaggaacaggtgcaaagcaggcaattagcccagaaggtatccgtggggcaggcagcctagatctgatgggggaagccaccaggattacatcatctgctgaccggcagatgcatacaatggcaaggccacctgatacaccagtcctgttcatttggaaaagggacaactccttcacattcacaagctgggctgctgtctaaaccagagggttcctctcattttctttcagtaacaactgctctgaaaagaagatatttttcaacctgaacttgcagtagctagtggagaggcaggaaaaaggaaatgaaaccagagacagagggaagctgagcgaaaatagaccttcccgagagaggaggaagcccggagagagacgcacggtcccctccccgcccctaggccgccgccccctctctgccctcggcggcgagcagcgcgccgcgacccggggccgaaggtgcgaggggctccgggcggccgggcgggcgcacaccatccccgcgggcggcgcggagccggcgacagcgcgcgagagggaccgggcggtggcggcggcgggaccgggatggaaggttaagtcctgagcagcagcagcagctgcagccgcctggagccaggctgcgcgccccggcccccgcctcggccgcggcgcgcccgcagcccggtgattcgctctctctctttggcgtttgaagggagcgcggtgactgtccttgagcgcggaggggcgagctcgccggcggagcgccggagcaagcggaggcgcaggagcggcggcgacggcggcggcggcggcggcgcccgagcacccgagggggtccgagccccggcagccggccagccccgcgccacaaagggagcgcccccgccgcccggcaccccgcctccctccccaatgtcctcggccatcgaaaggaagagcctggacccttcagaggaaccagtggatgaggtgctgcagatccccccatccctgctgacatgcggcggctgccagcagaacatcggggaccgctacttcctgaaggccatcgaccagtactggcacgaggactgcctgagctgcgacctctgtggctgccggctgggtgaggtggggcggcgcctctactacaaactgggccggaagctctgccggagagactatctcaggctttttgggcaagacggtctctgcgcatcctgtgacaagcggattcgtgcctatgagatgacaatgcgggtgaaagacaaagtgtatcacctggaatgtttcaagtgcgccgcctgtcagaagcatttctgtgtaggtgacagatacctcctcatcaactctgacatagtgtgcgaacaggacatctacgagtggactaagatcaatgggatgatataggcccgagtccccgggcatctttggggaggtgttcactgaagacgccgtctccatggcatcttcgtcttcactcttaggcactttgggggtttgagggtggggtaagggatttcttaggggatggtagacctttattgggtatcaagacatagcatccaagtggcataattcaggggctgacacttcaaggtgacagaaggaccagcccttgagggagaacttatggccacagcccatccatagtaactgacatgattagcagaagaaaggaacatttaggggcaagcaggcgctgtgctatcatgatggaatttcatatctacagatagagagttgttgtgtacagacttgttgtgactttgacgcttgcgaactagagatgtgcaattgatttcttttcttcctggctttttaactcccctgtttcaatcactgtcctccacacaagggaaggacagaaaggagagtggccattctttttttcttggcccccttcccaaggccttaagctttggacccaaggaaaactgcatggagacgcatttcggttgagaatggaaaccacaacttttaaccaaacaattatttaaagcaatgctgatgaatcactgtttttagacaccttcattttgaggggaggagttccacagattgtttctatacaaatataaatcttaaaaagttgttcaactattttattatcctagattatatcaaagtatttgtcgtgtgtagaaaaaaaaaacagctctgcaggcttaataaaaatgacagactgaaaaaaaaaaaa

SEQ ID NO: 71380 - DNA, 1354 bp, Homo sapiens
acattccagttctgagttgagggcaaagattgtaatgggatgcttcagagaagccttggctcccaaggaggttataacttcaaagggtgtttttgaaaaaccaaggcggatgaggaaagtggctacaagttccttccatcacagaggatcaatgaaggggaacaaagatttgggagcatctactttgtgccagtaacaactgctctgaaaagaagatatttttcaacctgaacttgcagtagctagtggagaggcaggaaaaaggaaatgaaaccagagacagagggaagctgagcgaaaatagaccttcccgagagaggaggaagcccggagagagacgcacggctttttgggcaagacggtctctgcgcatcctgtgacaagcggattcgtgcctatgagatgacaatgcgggtgaaagacaaagtgtatcacctggaatgtttcaagtgcgccgcctgtcagaagcatttctgtgtaggtgacagatacctcctcatcaactctgacatagtgtgcgaacaggacatctacgagtggactaagatcaatgggatgatataggcccgagtccccgggcatctttggggaggtgttcactgaagacgccgtctccatggcatcttcgtcttcactcttaggcactttgggggtttgagggtggggtaagggatttcttaggggatggtagacctttattgggtatcaagacatagcatccaagtggcataattcaggggctgacacttcaaggtgacagaaggaccagcccttgagggagaacttatggccacagcccatccatagtaactgacatgattagcagaagaaaggaacatttaggggcaagcaggcgctgtgctatcatgatggaatttcatatctacagatagagagttgttgtgtacagacttgttgtgactttgacgcttgcgaactagagatgtgcaattgatttcttttcttcctggctttttaactcccctgtttcaatcactgtcctccacacaagggaaggacagaaaggagagtggccattctttttttcttggcccccttcccaaggccttaagctttggacccaaggaaaactgcatggagacgcatttcggttgagaatggaaaccacaacttttaaccaaacaattatttaaagcaatgctgatgaatcactgtttttagacaccttcattttgaggggaggagttccacagattgtttctatacaaatataaatcttaaaaagttgttcaactattttattatcctagattatatcaaagtatttgtcgtgtgtagaaaaaaaaaacagctctgcaggcttaataaaaatgacagactgaaaaaaaaaaaa

SEQ ID NO: 71381 - DNA, 1039 bp, Homo sapiens
gaattcgtccaaactgaggatcacaagtctccacattctgagtaggaggatgagggtctgagttaggatttgggtcctgcagggcttgctaaggaatcccctgatggcctaggattccacgcagagcacatctggtgtgagagagctcgctgcaagggtgaaggctccgccctatcagatagacaaccaggccaccaagaggcccagccctccaaaccctggatttgcaacatcctcaaagaacagcaacgggccttgagcagaattgagaaggaaatacccccacctgccctcagccgttaagtgggctttgctattcacaagggcctctgggtgtcctggcagagaggggagatggcacaggcaccaggtgctagggtgccagggcctcccgagaaggaacaggtgcaaagcaggcaattagcccagaaggtatccgtggggcaggcagcctagatctgatgggggaagccaccaggattacatcatctgctgtaacaactgctctgaaaagaagatatttttcaacctgaacttgcagtagctagtggagaggcaggatacctccctcaacaatgggcattcctagggagcatcattaacaagattccagctctactccttcctgctgaggtttgtcgcttaagaatctggagacaggtagggtgcagtggcttacacctgtaatcctagcactttgggaggccaaggcgtgtagatcacctgaggtcaggagttcaacaccagcctgaccaatatggtgaaaccctgactctactacaaatacaaaaattagccaggcgtggtagtgtgcacctatagtcccagctactcaggaggctgagacaggagaatcacttgaaaccgggaggcagaggttgcagtgagctgagatcacgccaccgcactccagcctgggtaacagagtgagacactgtctcaaaaaaaaaagttttgcatgcggccgaattagggctccttggccaatcccctttagggggggggattttacgggccccggtttaccggggggcaggcc

SEQ ID NO: 71382 - DNA, 2305 bp, Homo sapiens
gaattcgtccaaactgaggatcacaagtctccacattctgagtaggaggatgagggtctgagttaggatttgggtcctgcagggcttgctaaggaatcccctgatggcctaggattccacgcagagcacatctggtgtgagagagctcgctgcaagggtgaaggctccgccctatcagatagacaaccaggccaccaagaggcccagccctccaaaccctggatttgcaacatcctcaaagaacagcaacgggccttgagcagaattgagaaggaaatacccccacctgccctcagccgttaagtgggctttgctattcacaagggcctctgggtgtcctggcagagaggggagatggcacaggcaccaggtgctagggtgccagggcctcccgagaaggaacaggtgcaaagcaggcaattagcccagaaggtatccgtggggcaggcagcctagatctgatgggggaagccaccaggattacatcatctgctgtaacaactgctctgaaaagaagatatttttcaacctgaacttgcagtagctagtggagaggcaggaaaaaggaaatgaaaccagagacagagggaagctgagcgaaaatagaccttcccgagagaggaggaagcccggagagagacgcacggtcccctccccgcccctaggccgccgccccctctctgccctcggcggcgagcagcgcgccgcgacccggggccgaaggtgcgaggggctccgggcggccgggcgggcgcacaccatccccgcgggcggcgcggagccggcgacagcgcgcgagagggaccgggcggtggcggcggcgggaccgggatggaagggagcgcggtgactgtccttgagcgcggaggggcgagctcgccggcggagcgccggagcaagcggaggcgcaggagcggcggcgacggcggcggcggcggcggcgcccgagcacccgagggggtccgagccccggcagccggccagccccgcgccacaaagggagcgcccccgccgcccggcaccccgcctccctccccaatgtcctcggccatcgaaaggaagagcctggacccttcagaggaaccagtggatgaggtgctgcagatccccccatccctgctgacatgcggcggctgccagcagaacatcggggaccgctacttcctgaaggccatcgaccagtactggcacgaggactgcctgagctgcgacctctgtggctgccggctgggtgaggtggggcggcgcctctactacaaactgggccggaagctctgccggagagactatctcaggctttttgggcaagacggtctctgcgcatcctgtgacaagcggattcgtgcctatgagatgacaatgcgggtgaaagacaaagtgtatcacctggaatgtttcaagtgcgccgcctgtcagaagcatttctgtgtaggtgacagatacctcctcatcaactctgacatagtgtgcgaacaggacatctacgagtggactaagatcaatgggatgatataggcccgagtccccgggcatctttggggaggtgttcactgaagacgccgtctccatggcatcttcgtcttcactcttaggcactttgggggtttgagggtggggtaagggatttcttaggggatggtagacctttattgggtatcaagacatagcatccaagtggcataattcaggggctgacacttcaaggtgacagaaggaccagcccttgagggagaacttatggccacagcccatccatagtaactgacatgattagcagaagaaaggaacatttaggggcaagcaggcgctgtgctatcatgatggaatttcatatctacagatagagagttgttgtgtacagacttgttgtgactttgacgcttgcgaactagagatgtgcaattgatttcttttcttcctggctttttaactcccctgtttcaatcactgtcctccacacaagggaaggacagaaaggagagtggccattctttttttcttggcccccttcccaaggccttaagctttggacccaaggaaaactgcatggagacgcatttcggttgagaatggaaaccacaacttttaaccaaacaattatttaaagcaatgctgatgaatcactgtttttagacaccttcattttgaggggaggagttccacagattgtttctatacaaatataaatcttaaaaagttgttcaactattttattatcctagattatatcaaagtatttgtcgtgtgtagaaaaaaaaaacagctctgcaggcttaataaaaatgacagactgaaaaaaaaaaaa

SEQ ID NO: 71383 - DNA, 2126 bp, Homo sapiens
acattccagttctgagttgagggcaaagattgtaatgggatgcttcagagaagccttggctcccaaggaggttataacttcaaagggtgtttttgaaaaaccaaggcggatgaggaaagtggctacaagttccttccatcacagaggatcaatgaaggggaacaaagatttgggagcatctactttgtgccagtaacaactgctctgaaaagaagatatttttcaacctgaacttgcagtagctagtggagaggcaggaaaaaggaaatgaaaccagagacagagggaagctgagcgaaaatagaccttcccgagagaggaggaagcccggagagagacgcacggtcccctccccgcccctaggccgccgccccctctctgccctcggcggcgagcagcgcgccgcgacccggggccgaaggtgcgaggggctccgggcggccgggcgggcgcacaccatccccgcgggcggcgcggagccggcgacagcgcgcgagagggaccgggcggtggcggcggcgggaccgggatggaaggttaagtcctgagcagcagcagcagctgcagccgcctggagccaggctgcgcgccccggcccccgcctcggccgcggcgcgcccgcagcccggtgattcgctctctctctttggcgtttgaagggagcgcggtgactgtccttgagcgcggaggggcgagctcgccggcggagcgccggagcaagcggaggcgcaggagcggcggcgacggcggcggcggcggcggcgcccgagcacccgagggggtccgagccccggcagccggccagccccgcgccacaaagggagcgcccccgccgcccggcaccccgcctccctccccaatgtcctcggccatcgaaaggaagagcctggacccttcagaggaaccagtggatgaggtgctgcagatccccccatccctgctgacatgcggcggctgccagcagaacatcggggaccgctacttcctgaaggccatcgaccagtactggcacgaggactgcctgagctgcgacctctgtggctgccggctgggtgaggtggggcggcgcctctactacaaactgggccggaagctctgccggagagactatctcaggctttttgggcaagacggtctctgcgcatcctgtgacaagcggattcgtgcctatgagatgacaatgcgggtgaaagacaaagtgtatcacctggaatgtttcaagtgcgccgcctgtcagaagcatttctgtgtaggtgacagatacctcctcatcaactctgacatagtgtgcgaacaggacatctacgagtggactaagatcaatgggatgatataggcccgagtccccgggcatctttggggaggtgttcactgaagacgccgtctccatggcatcttcgtcttcactcttaggcactttgggggtttgagggtggggtaagggatttcttaggggatggtagacctttattgggtatcaagacatagcatccaagtggcataattcaggggctgacacttcaaggtgacagaaggaccagcccttgagggagaacttatggccacagcccatccatagtaactgacatgattagcagaagaaaggaacatttaggggcaagcaggcgctgtgctatcatgatggaatttcatatctacagatagagagttgttgtgtacagacttgttgtgactttgacgcttgcgaactagagatgtgcaattgatttcttttcttcctggctttttaactcccctgtttcaatcactgtcctccacacaagggaaggacagaaaggagagtggccattctttttttcttggcccccttcccaaggccttaagctttggacccaaggaaaactgcatggagacgcatttcggttgagaatggaaaccacaacttttaaccaaacaattatttaaagcaatgctgatgaatcactgtttttagacaccttcattttgaggggaggagttccacagattgtttctatacaaatataaatcttaaaaagttgttcaactattttattatcctagattatatcaaagtatttgtcgtgtgtagaaaaaaaaaacagctctgcaggcttaataaaaatgacagactgaaaaaaaaaaaa

SEQ ID NO: 71384 - DNA, 1721 bp, Homo sapiens
gaattcgtccaaactgaggatcacaagtctccacattctgagtaggaggatgagggtctgagttaggatttgggtcctgcagggcttgctaaggaatcccctgatggcctaggattccacgcagagcacatctggtgtgagagagctcgctgcaagggtgaaggctccgccctatcagatagacaaccaggccaccaagaggcccagccctccaaaccctggatttgcaacatcctcaaagaacagcaacgggccttgagcagaattgagaaggaaatacccccacctgccctcagccgttaagtgggctttgctattcacaagggcctctgggtgtcctggcagagaggggagatggcacaggcaccaggtgctagggtgccagggcctcccgagaaggaacaggtgcaaagcaggcaattagcccagaaggtatccgtggggcaggcagcctagatctgatgggggaagccaccaggattacatcatctgctgggaaccagtggatgaggtgctgcagatccccccatccctgctgacatgcggcggctgccagcagaacatcggggaccgctacttcctgaaggccatcgaccagtactggcacgaggactgcctgagctgcgacctctgtggctgccggctgggtgaggtggggcggcgcctctactacaaactgggccggaagctctgccggagagactatctcaggctttttgggcaagacggtctctgcgcatcctgtgacaagcggattcgtgcctatgagatgacaatgcgggtgaaagacaaagtgtatcacctggaatgtttcaagtgcgccgcctgtcagaagcatttctgtgtaggtgacagatacctcctcatcaactctgacatagtgtgcgaacaggacatctacgagtggactaagatcaatgggatgatataggcccgagtccccgggcatctttggggaggtgttcactgaagacgccgtctccatggcatcttcgtcttcactcttaggcactttgggggtttgagggtggggtaagggatttcttaggggatggtagacctttattgggtatcaagacatagcatccaagtggcataattcaggggctgacacttcaaggtgacagaaggaccagcccttgagggagaacttatggccacagcccatccatagtaactgacatgattagcagaagaaaggaacatttaggggcaagcaggcgctgtgctatcatgatggaatttcatatctacagatagagagttgttgtgtacagacttgttgtgactttgacgcttgcgaactagagatgtgcaattgatttcttttcttcctggctttttaactcccctgtttcaatcactgtcctccacacaagggaaggacagaaaggagagtggccattctttttttcttggcccccttcccaaggccttaagctttggacccaaggaaaactgcatggagacgcatttcggttgagaatggaaaccacaacttttaaccaaacaattatttaaagcaatgctgatgaatcactgtttttagacaccttcattttgaggggaggagttccacagattgtttctatacaaatataaatcttaaaaagttgttcaactattttattatcctagattatatcaaagtatttgtcgtgtgtagaaaaaaaaaacagctctgcaggcttaataaaaatgacagactgaaaaaaaaaaaa

SEQ ID NO: 71385 - DNA, 713 bp, Homo sapiens
tcaagtaaaagatattttcatataagagaattttatgtattcttcttacttgattcatcaacagattatgaagcctagcagtgttctggcaaaacctttttaacttgcctagaacacagaagggatgttgccctttttaaggttgtagatcttttcagagtcactgtgggtcattctcaaccctttgcagttctgcaagctcacatatggtgcaagaggaaatgctggtatgactctgtgcattttcttgcccccaaacaggaacagttgatttcctacattaaatggaaggtagatgtgactatggaagagaagtacacaggggtgtttctgcatgtgaaatatttgtcataagttaaaaacccatcatggaataactgtttgttgtgatcagcatgtttttatcacacatgggcactggttttgtgagcacctggcttgatagtggtggggcggccaatgtgccagcgcccgcctactgagcattcatggacattggaaatcagcgaacaccacagacacaccgaatcagctgatgcacggtcatgttctggggtaaaacctgttcattatccatgtccacatttgtatagttatcactagactaaaatgaagatggaaataaatattttaccctgtgttcatgaaccaaatgtgtaccttcagagtctttttaagtaaaataaaaaaattattttggtgataattatttg

SEQ ID NO: 71386 - DNA, 451 bp, Homo sapiens
atactattactttatcggtagatgctttaaggttttccacatataagataatatcatctgtgagcagagatgattatacttcctttataattcaggtaccttttcctttttcactttcttttttattttggcctacttgttctggctaggacattcagtattatgttgaatagaagtggtaaaagtggataatcttgtcttgtactttatcttagaggaaaagctgtcagtttttcactgctgaatatgatgttaactatgaactttttatacatgtatttactatgttgaggtaatttccttctactcctggtttaagtgttttttgttttttgttttttttttttttaaatcatggaaggacttgggttttatcaaatgtcttttctgtatctattgagatgaccaatttgtattagtcagcgttcttcagagaaactgaaccaacata

SEQ ID NO: 71387 - DNA, 3271 bp, Homo sapiens
  misc_feature (1)..(1): n is a, c, g, or t
  misc_feature (3)..(5): n is a, c, g, or t
nannnccgccagccccgccagtccccgcgcagtccccgcgcagtcccagcgccaccgggcagcagcggcgccgtgctcgctccagggcgcaaccatgtcgccatttcttcggattggcttgtccaactttgactgcgggtcctgccagtcttgtcagggcgaggctgttaacccttactgtgctgtgctcgtcaaagagtatgtcgaatcagagaacgggcagatgtatatccagaaaaagcctaccatgtacccaccctgggacagcacttttgatgcccatatcaacaagggaagagtcatgcagatcattgtgaaaggcaaaaacgtggacctcatctctgaaaccaccgtggagctctactcgctggctgagaggtgcaggaagaacaacgggaagacagaaatatggttagagctgaaacctcaaggccgaatgctaatgaatgcaagatactttctggaaatgagtgacacaaaggacatgaatgaatttgagacggaaggcttctttgctttgcatcagcgccggggtgccatcaagcaggcaaaggtccaccacgtcaagtgccacgagttcactgccaccttcttcccacagcccacattttgctctgtctgccacgagtttgtctggggcctgaacaaacagggctaccagtgccgacaatgcaatgcagcaattcacaagaagtgtattgataaagttatagcaaagtgcacaggatcagctatcaatagccgagaaaccatgttccacaaggagagattcaaaattgacatgccacacagatttaaagtctacaattacaagagcccgaccttctgtgaacactgtgggaccctgctgtggggactggcacggcaaggactcaagtgtgatgcatgtggcatgaatgtgcatcatagatgccagacaaaggtggccaacctttgtggcataaaccagaagctaatggctgaagcgctggccatgattgagagcactcaacaggctcgctgcttaagagatactgaacagatcttcagagaaggtccggttgaaattggtctcccatgctccatcaaaaatgaagcaaggccgccatgtttaccgacaccgggaaaaagagagcctcagggcatttcctgggagtctccgttggatgaggtggataaaatgtgccatcttccagaacctgaactgaacaaagaaagaccatctctgcagattaaactaaaaattgaggattttatcttgcacaaaatgttggggaaaggaagttttggcaaggtcttcctggcagaattcaagaaaaccaatcaatttttcgcaataaaggccttaaagaaagatgtggtcttgatggacgatgatgttgagtgcacgatggtagagaagagagttctttccttggcctgggagcatccgtttctgacgcacatgttttgtacattccagaccaaggaaaacctcttttttgtgatggagtacctcaacggaggggacttaatgtaccacatccaaagctgccacaagttcgacctttccagagcgacgttttatgctgctgaaatcattcttggtctgcagttccttcattccaaaggaatagtctacagggacctgaagctagataacatcctgttagacaaagatggacatatcaagatcgcggattttggaatgtgcaaggagaacatgttaggagatgccaagacgaataccttctgtgggacacctgactacatcgccccagagatcttgctgggtcagaaatacaaccactctgtggactggtggtccttcggggttctcctttatgaaatgctgattggtcagtcgcctttccacgggcaggatgaggaggagctcttccactccatccgcatggacaatcccttttacccacggtggctggagaaggaagcaaaggaccttctggtgaagctcttcgtgcgagaacctgagaagaggctgggcgtgaggggagacatccgccagcaccctttgtttcgggagatcaactgggaggaacttgaacggaaggagattgacccaccgttccggccgaaagtgaaatcaccatttgactgcagcaatttcgacaaagaattcttaaacgagaagccccggctgtcatttgccgacagagcactgatcaacagcatggaccagaatatgttcaggaacttttccttcatgaaccccgggatggagcggctgatatcctgaatcttgcccctccagagacaggaaagaatttgccttctccctgggaactggttcaagagacactgcttgggttcctttttcaacttggaaaaagaaagaaacactcaacaataaagactgagacccgttcgcccccatgtgacttttatctgtagcagaaaccaagtctacttcactaatgacgatgcccgtgtgtctcgtctcctgacatgtctcacagacgctcctgaagttaggtcattactaaccatagttatttacttgaaagatgggtctccgcacttggaaaggtttcaagacttgatactgcaataaattatggctcttcacctgggcgccaactgctgatcaacgaaatgcttgttgaatcaggggcaaacggagtacagacgtctcaagactgaaacggccccattgcctggtctagtagcggatctcactcagccgcagacaagtaatcactaacccgttttattctattcctatctgtggatgtgtaaatggctggggggccagccctggataggtttttatgggaattctttacaataaacatagcttgtaacttgagatctacaaatccattcatcctgattgggcatgaaatccatggtcaagaggacaagtggaaagtgagagggaaggtttgctagacaccttcgcttgttatcttgtcaagatagaaaagatagtatcatttcacccttgccagtaaaaacctttccatccacccattctcagcagactccagtattggcacagtcactcactgccattctcacactataacaagaaaagaaatgaagtgcataagtctcctgggaaaagaaccttaaccccttctcgtgccatgactggtgatttcatgactcataagcccctccgtaggcatcattcaagatcaatggcccatgcatgctgtttgcagcagtcaattgagttgaattagaattccaaccatacattttaaaggtatttgtgctgtgtgtatattttgataaaatgttgtgacttcatggcaaacaggtggatgtgtaaaaatggaataaaaaaaaa

SEQ ID NO: 71388 - DNA, 2361 bp, Homo sapiens
  misc_feature (1)..(1): n is a, c, g, or t
  misc_feature (3)..(5): n is a, c, g, or t
nannnccgccagccccgccagtccccgcgcagtccccgcgcagtcccagcgccaccgggcagcagcggcgccgtgctcgctccagggcgcaaccatgtcgccatttcttcggattggcttgtccaactttgactgcgggtcctgccagtcttgtcagggcgaggctgttaacccttactgtgctgtgctcgtcaaagagtatgtcgaatcagagaacgggcagatgtatatccagaaaaagcctaccatgtacccaccctgggacagcacttttgatgcccatatcaacaagggaagagtcatgcagatcattgtgaaaggcaaaaacgtggacctcatctctgaaaccaccgtggagctctactcgctggctgagaggtgcaggaagaacaacgggaagacagaaatatggttagagctgaaacctcaaggccgaatgctaatgaatgcaagatactttctggaaatgagtgacacaaaggacatgaatgaatttgagacggaaggcttctttgctttgcatcagcgccggggtgccatcaagcaggcaaaggtccaccacgtcaagtgccacgagttcactgccaccttcttcccacagcccacattttgctctgtctgccacgagtttgtctggggcctgaacaaacagggctaccagtgccgacaatgcaatgcagcaattcacaagaagtgtattgataaagttatagcaaagtgcacaggatcagctatcaatagccgagaaaccatgttccacaaggagagattcaaaattgacatgccacacagatttaaagtctacaattacaagagcccgaccttctgtgaacactgtgggaccctgctgtggggactggcacggcaaggactcaagtgtgatgcatgtggcatgaatgtgcatcatagatgccagacaaaggtggccaacctttgtggcataaaccagaagctaatggctgaagcgctggccatgattgagagcactcaacaggctcgctgcttaagagatactgaacagatcttcagagaaggtccggttgaaattggtctcccatgctccatcaaaaatgaagcaaggccgccatgtttaccgacaccgggaaaaagagagcctcagggcatttcctgggagtctccgttggatgaggtggataaaatgtgccatcttccagaacctgaactgaacaaagaaagaccatctctgcagattaaactaaaaattgaggattttatcttgcacaaaatgttggggaaaggaagttttggcaaggtcttcctggcagaattcaagaaaaccaatcaatttttcgcaataaaggccttaaagaaagatgtggtcttgatggacgatgatgttgagtgcacgatggtagagaagagagttctttccttggcctgggagcatccgtttctgacgcacatgttttgtacattccagaccaaggaaaacctcttttttgtgatggagtacctcaacggaggggacttaatgtaccacatccaaagctgccacaagttcgacctttccagagcgacgttttatgctgctgaaatcattcttggtctgcagttccttcattccaaaggaatagtctacagggacctgaagctagataacatcctgttagacaaagatggacatatcaagatcgcggattttggaatgtgcaaggagaacatgttaggagatgccaagacgaataccttctgtgggacacctgactacatcgccccagagatcttgctgggtcagaaatacaaccactctgtggactggtggtccttcggggttctcctttatgaaatgctgattggtcagtcgcctttccacgggcaggatgaggaggagctcttccactccatccgcatggacaatcccttttacccacggtggctggagaaggaagcaaaggaccttctggtgaaggtaagaagcgaagccaagagcgtcttcataagacgagcattaggtcttctggtcagttttctgttcctcttagtttccaacttgcatgtggcaaacaatgattattattgaactgggtttaaatgggatgtgcaccgtctgtgttttaatagaggcaccaatattatgagcattaaatgtcaaaatgagtgtaagagaaaccctcatgtgcatcagttataacataacggccccaggaaccagttccatgaccttgaatacgctcacctggagatgtagttggttcattaaacaagcacagtgtgtggcttaaaaatcaatcttctagctacttgggaggttgaggcaggaggattgaagttggaagtgtgaggtcagcctgggcaatgtatcgagacccctgtctccaaaacaataaaggggaaaaaaaa

SEQ ID NO: 71389 - DNA, 204 bp, Homo sapiens
acgcagatcacggcctagataacaaaagtgaagatcatgaacttaatggctgatttttcttctctttctttcttcccttaaactctgactaagaaatcaccatttgactgcagcaatttcgacaaagaattcttaaacgagaagccccggctgtcatttgccgacagagcactgatcaacagcatggaccagaatatgttcagg

SEQ ID NO: 71390 - DNA, 351 bp, Homo sapiens
caactcttttttttttaagtgtcaggaaactgaagcacaaaagatttaaatgtcacattaaataaatgctagaggtgggatgggaattcacatttttttcatttccaaactgatgttcgcttagatatgctcaaaggatttttagaaatgatgaattattgatggatgtcacactattgttgacttttctgatcaagagatttaaaattcaattctagcttgtacaaaagctttgaaattaattgcagacacctgtcaatgtctttgctctgtcccttacccgaggagattattgctaaacctctgttatttgtgttgctatcacattctgcccccagctggggtcgatgc

SEQ ID NO: 71391 - DNA, 1619 bp, Homo sapiens
ggagagaaggaagaaggaaggggcgaacggcgtgagctggcgccgaaatgggagaaagcagcgagtgagaggggaaggggcgccaggcgagcacccgggagccagcgggacctgggcaggggcgcccggagcaggcgcgcatggcgggccccgcgcggggatccggctggaagagagcgtagcacggctcgcacgagtccggggccgatgtaccaggtgagcggccagcgcccctctggctgcgacgcgccctatggagcccccagcgcagccccgggcccagcccagaccctatccctccttcctgggctggaggtagtaacaggatccactcaccctgcggaggcagcaccagaggagggctccctggaggaggcggcaacccccatgccccaaggcaatggccctggcatcccccagggcctggacagcactgacctcgacgtccccacagaagctgtgacatgccagcctcaggggaaccccttgggctgcaccccacttctgccgaatgactctggccacccctcagagctgggcggcaccagacgggcggggaatggtgccctgggtggccccaaggcccaccggaagttgcagacacacccatctctcgccagccagggcagcaagaagagtaagagcagcagcaaatccaccacctcccagatccccctccaggcacaggaagactgctgtgtccactgcatcctgtcctgcctgttctgcgagttcctgacgctgtgcaacatcgtcctggactgcgccacctgtggctcctgcagctcggaggactcgtgcctctgctgctgctgctgtggctctggcgagtgtgccgactgcgacctgccctgcgacctggactgcggcatcctggatgcctgctgcgagtccgcggactgcctggagatctgcatggagtgctgtgggctctgcttctcctcctgagcctctgtcgggggctaagccagcctggcgcccctgcagattccagcagggtccctctgagtggggccaggcccaggactgtcacacaaggcttgagaagccccctctccctggtcctctcctacccacccatgtcctctcagaaccccagccttgaaaatagtggggggcactcagaggggccacctcctcagccgtgggtggtgggcccatggcagagaagcctgaactctttactgggttaccaggttcatacattgctgaggacctgacaggacaacctaggggcagggctggggtggggaccgcagggggcagccagggctggggaacactgtgaaagttacttggggagggtgggccggtggggccgtagctctctacctctccctgctcctggtgcctgcctctctcctccaccccaggcttagaggacagaaaaatgtgaagagacgccccacccaccctcagccagccctctccagtctcctttcctaggcttttttgggggcctaacccacgcagtgaccccagagggcagggctaggcgagagcctggggtggggcgggagggggaacagtatggaaaagactggaaggggaaaggaagggaagggagggagggtctgttctatctgttgctgtaaataaagatatttgtccatctcaaa

SEQ ID NO: 71392 - DNA, 553 bp, Homo sapiens
ggagagaaggaagaaggaaggggcgaacggcgtgagctggcgccgaaatgggagaaagcagcgagtgagaggggaaggggcgccaggcgagcacccgggagccagcgggacctgggcaggggcgcccggagcaggcgcgcatggcgggccccgcgcggggatccggctggaagagagcgtagcacggctcgcacgagtccggggccgatgtaccaggtgagcggccagcgcccctctggctgcgacgcgccctatggagcccccagcgcagccccgggcccaggcctgcctctctcctccaccccaggcttagaggacagaaaaatgtgaagagacgccccacccaccctcagccagccctctccagtctcctttcctaggcttttttgggggcctaacccacgcagtgaccccagagggcagggctaggcgagagcctggggtggggcgggagggggaacagtatggaaaagactggaaggggaaaggaagggaagggagggagggtctgttctatctgttgctgtaaataaagatatttgtccatctcaaa

SEQ ID NO: 71393 - DNA, 1255 bp, Homo sapiens
ggagagaaggaagaaggaaggggcgaacggcgtgagctggcgccgaaatgggagaaagcagcgagtgagaggggaaggggcgccaggcgagcacccgggagccagcgggacctgggcaggggcgcccggagcaggcgcgcatggcgggccccgcgcggggatccggctggaagagagcgtagcacggctcgcacgagtccggggccgatgtaccaggtgagcggccagcgcccctctggctgcgacgcgccctatggagcccccagcgcagccccgggcccagcccagaccctatccctccttcctgggctggaggtagtaacaggatccactcaccctgcggaggcagcaccagaggagggctccctggaggaggcggcaacccccatgccccaaggcaatggccctggcatcccccagggcctggacagcactgacctcgacgtccccacagaagctgtgacatgccagcctcaggggaaccccttgggctgcaccccacttctgccgaatgactctggccacccctcagagctgggcggcaccagacgggcggggaatggtgccctgggtggccccaaggcccaccggaagttgcagacacacccatctctcgccagccagggcagcaagaagagtaagagcagcagcaaatccaccacctcccagatccccctccaggcacaggaagactgctgtgtccactgcatcctgtcctgcctgttctgcgagttcctgacgctgtgcaacatcgtcctggactgcgccacctcctcagccgtgggtggtgggcccatggcagagaagcctgaactctttactgggttaccaggttcatacattgctgaggacctgacaggacaacctaggggcagggctggggtggggaccgcagggggcagccagggctggggaacactgtgaaagttacttggggagggtgggccggtggggccgtagctctctacctctccctgctcctggtgcctgcctctctcctccaccccaggcttagaggacagaaaaatgtgaagagacgccccacccaccctcagccagccctctccagtctcctttcctaggcttttttgggggcctaacccacgcagtgaccccagagggcagggctaggcgagagcctggggtggggcgggagggggaacagtatggaaaagactggaaggggaaaggaagggaagggagggagggtctgttctatctgttgctgtaaataaagatatttgtccatctcaaa

SEQ ID NO: 71394 - DNA, 1354 bp, Homo sapiens
ggagagaaggaagaaggaaggggcgaacggcgtgagctggcgccgaaatgggagaaagcagcgagtgagaggggaaggggcgccaggcgagcacccgggagccagcgggacctgggcaggggcgcccggagcaggcgcgcatggcgggccccgcgcggggatccggctggaagagagcgtagcacggctcgcacgagtccggggccgatgtaccaggtgagcggccagcgcccctctggctgcgacgcgccctatggagcccccagcgcagccccgggcccagcccagaccctatccctccttcctgggctggaggtagtaacaggatccactcaccctgcggaggcagcaccagaggagggctccctggaggaggcggcaacccccatgccccaaggcaatggccctggcatcccccagggcctggacagcactgacctcgacgtccccacagaagctgtgacatgccagcctcaggggaaccccttgggctgcaccccacttctgccgaatgactctggccacccctcagagctgggcggcaccagacgggcggggaatggtgccctgggtggccccaaggcccaccggaagttgcagacacacccatctctcgccagccagggcagcaagaagagtaagagcagcagcaaatccaccacctcccagatccccctccaggcacaggaagactgctgtgtccactgcatcctgtcctgcctgttctgcgagttcctgacgctgtgcaacatcgtcctggactgcgccacctgtggctcctgcagctcggaggactcgtgcctctgctgctgctgctgtggctctggcgagtgtgccgactgcgacctgccctgcgacctggactgcggcatcctggatgcctgctgcgagtccgcggactgcctggagatctgcatggagtgctgtgggctctgcttctcctcctgagcctctgtcgggggctaagccagcctggcgcccctgcagattccagcagggtccctctgagtggggccaggcccaggactgtcacacaaggcttgagaagccccctctccctggtcctctcctacccacccatgtcgcctgcctctctcctccaccccaggcttagaggacagaaaaatgtgaagagacgccccacccaccctcagccagccctctccagtctcctttcctaggcttttttgggggcctaacccacgcagtgaccccagagggcagggctaggcgagagcctggggtggggcgggagggggaacagtatggaaaagactggaaggggaaaggaagggaagggagggagggtctgttctatctgttgctgtaaataaagatatttgtccatctcaaa

SEQ ID NO: 71395 - DNA, 774 bp, Homo sapiens
ggagagaaggaagaaggaaggggcgaacggcgtgagctggcgccgaaatgggagaaagcagcgagtgagaggggaaggggcgccaggcgagcacccgggagccagcgggacctgggcaggggcgcccggagcaggcgcgcatggcgggccccgcgcggggatccggctggaagagagcgtagcacggctcgcacgagtccggggccgatgtaccaggtgagcggccagcgcccctctggctgcgacgcgccctatggagcccccagcgcagccccgggcccagcccagaccctatccctccttcctgggctggaggtagtaacaggatccactcaccctgcggaggcagcaccagaggagggctccctggaggaggcggcaacccccatgccccaaggcaatggccctggcatcccccagggcctggacagcactgacctcgacgtccccacagaagctgtgacatgccagcctcaggggaaccccttgggctgcaccccacttgcctgcctctctcctccaccccaggcttagaggacagaaaaatgtgaagagacgccccacccaccctcagccagccctctccagtctcctttcctaggcttttttgggggcctaacccacgcagtgaccccagagggcagggctaggcgagagcctggggtggggcgggagggggaacagtatggaaaagactggaaggggaaaggaagggaagggagggagggtctgttctatctgttgctgtaaataaagatatttgtccatctcaaa

SEQ ID NO: 71396 - DNA, 1526 bp, Homo sapiens
ggagagaaggaagaaggaaggggcgaacggcgtgagctggcgccgaaatgggagaaagcagcgagtgagaggggaaggggcgccaggcgagcacccgggagccagcgggacctgggcaggggcgcccggagcaggcgcgcatggcgggccccgcgcggggatccggctggaagagagcgtagcacggctcgcacgagtccggggccgatgtaccaggtgagcggccagcgcccctctggctgcgacgcgccctatggagcccccagcgcagccccgggcccagcccagaccctatccctccttcctgggctggaggtagtaacaggatccactcaccctgcggaggcagcaccagaggagggctccctggaggaggcggcaacccccatgccccaaggcaatggccctggcatcccccagggcctggacagcactgacctcgacgtccccacagaagctgtgacatgccagcctcaggggaaccccttgggctgcaccccacttctgccgaatgactctggccacccctcagagctgggcggcaccagacgggcggggaatggtgccctgggtggccccaaggcccaccggaagttgcagacacacccatctctcgccagccagggcagcaagaagagtaagagcagcagcaaatccaccactctcctttcctaggcttttttgggggcctaacccacgcagtgaccccagagggcagggctaggcgagagcctggggtggggcgggagggggaacagtatggaaaagactggaaggggaaaggaagggaagggagggagggtctgttctatctgttgctgtaaataaagatatttgtccatctcaaaaaaaaaaaaaaaaaaaattcgaaattagtttctctccgaaagaatggcggagggtgcaggctccggggtgcattgagtggtcgaggaccatctccgggagccgccgtggcggaccatcggtggctaaacaggatacgtgcgtgggccggaaagggtgggggctcgaacgctgtgaagggcgatcaacatttcttgggcaatttctacaggaaacaagtgttggaagtacctgggctttcctccggaaagcgggatgaacaccaaaccctttcccagaggccccttaccatttccggggcccccaagccggaatcttctggggggaccgtggcagaggtatgcgtgcgcccacaaaaaccaaggcggaggccaggccgctctgggaccggtctcaagggggttaggacgggaatcccaccggacctagggacaaggaaaaacggggaaggggggtaccctggtgccctcaaaggtcgtgcagtctgaagcctacaagaaaagttggccaaatcgggggacgcatggctcacgaaggtgggcttggaaagttcccaggcagttgacaagacaccccgtggaggagaagaaggaaaggaaaaagccaagatcccattaccggaagaaagaaccagcccaagaaggcaacggaaacaggcccgaaaacaccgtgcagaagaa

SEQ ID NO: 71397 - DNA, 1436 bp, Homo sapiens
ggagagaaggaagaaggaaggggcgaacggcgtgagctggcgccgaaatgggagaaagcagcgagtgagaggggaaggggcgccaggcgagcacccgggagccagcgggacctgggcaggggcgcccggagcaggcgcgcatggcgggccccgcgcggggatccggctggaagagagcgtagcacggctcgcacgagtccggggccgatgtaccaggtgagcggccagcgcccctctggctgcgacgcgccctatggagcccccagcgcagccccgggcccaggccagcctcaggggaaccccttgggctgcaccccacttctgccgaatgactctggccacccctcagagctgggcggcaccagacgggcggggaatggtgccctgggtggccccaaggcccaccggaagttgcagacacacccatctctcgccagccagggcagcaagaagagtaagagcagcagcaaatccaccacctcccagatccccctccaggcacaggaagactgctgtgtccactgcatcctgtcctgcctgttctgcgagttcctgacgctgtgcaacatcgtcctggactgcgccacctgtggctcctgcagctcggaggactcgtgcctctgctgctgctgctgtggctctggcgagtgtgccgactgcgacctgccctgcgacctggactgcggcatcctggatgcctgctgcgagtccgcggactgcctggagatctgcatggagtgctgtgggctctgcttctcctcctgagcctctgtcgggggctaagccagcctggcgcccctgcagattccagcagggtccctctgagtggggccaggcccaggactgtcacacaaggcttgagaagccccctctccctggtcctctcctacccacccatgtcctctcagaaccccagccttgaaaatagtggggggcactcagaggggccacctcctcagccgtgggtggtgggcccatggcagagaagcctgaactctttactgggttaccaggttcatacattgctgaggacctgacaggacaacctaggggcagggctggggtggggaccgcagggggcagccagggctggggaacactgtgaaagttacttggggagggtgggccggtggggccgtagctctctacctctccctgctcctggtgcctgcctctctcctccaccccaggcttagaggacagaaaaatgtgaagagacgccccacccaccctcagccagccctctccagtctcctttcctaggcttttttgggggcctaacccacgcagtgaccccagagggcagggctaggcgagagcctggggtggggcgggagggggaacagtatggaaaagactggaaggggaaaggaagggaagggagggagggtctgttctatctgttgctgtaaataaagatatttgtccatctcaaa

SEQ ID NO: 71398 - DNA, 1318 bp, Homo sapiens
ggagagaaggaagaaggaaggggcgaacggcgtgagctggcgccgaaatgggagaaagcagcgagtgagaggggaaggggcgccaggcgagcacccgggagccagcgggacctgggcaggggcgcccggagcaggcgcgcatggcgggccccgcgcggggatccggctggaagagagcgtagcacggctcgcacgagtccggggccgatgtaccaggtgagcggccagcgcccctctggctgcgacgcgccctatggagcccccagcgcagccccgggcccagcccagaccctatccctccttcctgggctggaggtagtaacaggatccactcaccctgcggaggcagcaccagaggagggctccctggaggaggcggcaacccccatgccccaaggcaatggccctggcatcccccagggcctggacagcactgacctcgacgtccccacagaagctgtgacatgccagcctcaggggaaccccttgggctgcaccccacttctgccgaatgactctggccacccctcagagctgggcggcaccagacgggcggggaatggtgccctgggtggccccaaggcccaccggaagttgcagacacacccatctctcgccagccagggcagcacccggggacccagcgggacctgggcaagggcgcccggaacctggcgcccctgcagattccagcagggtccctctgagtggggccaggcccaggactgtcacacaaggcttgagaagccccctctccctggtcctctcctacccacccatgtcctctcagaaccccagccttgaaaatagtggggggcactcagaggggccacctcctcagccgtgggtggtgggcccatggcagagaagcctgaactctttactgggttaccaggttcatacattgctgaggacctgacaggacaacctaggggcagggctggggtggggaccgcagggggcagccagggctggggaacactgtgaaagttacttggggagggtgggccggtggggccgtagctctctacctctccctgctcctggtgcctgcctctctcctccaccccaggcttagaggacagaaaaatgtgaagagacgccccacccaccctcagccagccctctccagtctcctttcctaggcttttttgggggcctaacccacgcagtgaccccagagggcagggctaggcgagagcctggggtggggcgggagggggaacagtatggaaaagactggaaggggaaaggaagggaagggagggagggtctgttctatctgttgctgtaaataaagatatttgtccatctcaaa

SEQ ID NO: 71399 - DNA, 972 bp, Homo sapiens
ggagagaaggaagaaggaaggggcgaacggcgtgagctggcgccgaaatgggagaaagcagcgagtgagaggggaaggggcgccaggcgagcacccgggagccagcgggacctgggcaggggcgcccggagcaggcgcgcatggcgggccccgcgcggggatccggctggaagagagcgtagcacggctcgcacgagtccggggccgatgtaccaggtgagcggccagcgcccctctggctgcgacgcgccctatggagcccccagcgcagccccgggcccagcccagaccctatccctccttcctgggctggaggtagtaacaggatccactcaccctgcggaggcagcaccagaggagggctccctggaggaggcggcaacccccatgccccaaggcaatggccctggcatcccccagggcctggacagcactgacctcgacgtccccacagaagctgtgacatgccagcctcaggggaaccccttgggctgcaccccacttctgccgaatgactctggccacccctcagagctgggcggcaccagacgggcggggaatggtgccctgggtggccccaaggcccaccggaagttgcagacacacccatctctcgccagccagggcagcaagaagagtaagagcagcagcaaatccaccacctcccagatccccctccaggcacaggaaggtaagcacccatcccatctctccctgggagaggcctccaaagccgggttcctcgaagcatgacgcatgggcccactggagcaccttcaccaggctgttacttagagatgcaggatctcagcctccttccacgcctactggattggaatctctggtggagcttaacaagccctgcagggaacctgacgcatgaccaaatcttagaaccttgcaaagtacacccgttgggtaaaggtgtacctgccttctcaaggccacctccccaccccaccccaaacccct

SEQ ID NO: 71400 - DNA, 422 bp, Homo sapiens
tattattataaggatttcagatctgagccagtttttagattcagaatgcactaactgaaggacaggtcaggtttccaagaaaagactctgcaacactatggcaggtatacatgcaaatgattctcccactccttctccaaatgggcctacagccactaactagggtgactgtacattggggaaagaggggacccaaacattatgaggaatgttgaccttagtgtccaagtggatgttgtcacccagagatctatagtgtcaccttgatcctccttctagactgaggtgtggaatttgaacatcttgctcaaagccatacagcttgtaaatggcagagctggggatcagatccagagttgtcggatttgagagtctttacttcgttttttgagactgggtgacacagcgagactctgtctcaa

SEQ ID NO: 71401 - DNA, 939 bp, Homo sapiens
tgttggtcttacttagtcatttgcagccaaacgcaaatgaatctcagacaaattctgcttgtcataactctattcattgtgctctttggcctaatcttatcattgttaatagttccgtatgattcagacactgatttggatactcgaggtcctctgactgagtttcctaaacaagaaatgatacttcacatgcctgaaaatgaataatctagaatatttcattaacattcagctgaccagttttaaataagagcagttgggattgcattcaattaaactggagtctataaggaacaacagttaaaaatgggaacagaggtatcccaagagaactcttactgctatagtatttgtgaggtcatgacagtattatcaacatctcgggacctattaatagttttgtcaagaagaaaagaaaatgaatagcctagttcagtaattcccctcatttggaaaggaatcaagaacccctttgtgattctgttgacagctatggtccctctcccaagaaaatgtctactttgcattcaatttcaataaatttccagaagccttgatgtgcatccacagggttctatgtgagaaaaccctcttcttggatgatttctaagtctacagtgttgtatacttcacaggaataaaaaatcaaccaaccagccgagcgcagtggctcacacctataatcccagcactttgggaggccaaggtgggcagatcacttgaggtcaggagttctagaccagcctggccaacatggtgaaaacccatctctactaaaaacacaaaaaaattagccaggtgtggtggcatgtgcctgtagtcccagctactcaggaggctgaggcaagagaatcgctggagcccatgaagcagaggttgcagtgagccgagatcacgccactgtattccagcctaggcaacggagcaaagctctgtctc

SEQ ID NO: 71402 - DNA, 358 bp, Homo sapiens
tgttggtcttacttagtcatttgcagccaaacgcaaatgaatctcagacaaattctgcttgtcataactctattcattgtgctctttggcctaatcttatcattgttaatagttccgtatgattcagacactgatttggatactcgaggtcctctgactgagtttcctaaacaagaaatgatacttcattaaataagagcagttgggattgcattcaattaaactggagtctataaggtaagagttttatttattcttttaattttttaaaatacaaaaaaaagcctgaagaatatgacttttctctgtgtcaaatgtgcaaaataacataaaaattttaaagaaaaacttagattta

SEQ ID NO: 71403 - DNA, 436 bp, Homo sapiens
tggtttgagaggtcggttcacaagacttctcttttcacacctgcgtggctcaggactgaggggtgcccaagatttgggacttccagttttatagccaggaaagtccttggaaagcccagctttctctctgtcctcgtccagaatgacttgaggtatatgaagaatccaggaggatggaagttaaattaaaatacacacaaataaacaagcaaactaccatcaaaaggcatgctcactgctgctggagcgaggttcacgggcacgcctagctctgcagccccgctggtcccccagtgccgagcacgaagagggcttctcagtcacactagccggtgaggaggagctggtcaggatgagtcccgacctgcaggcaccagctcccatggtgagtgtgagtcacacttgcccagcttcccctctgcccaggaaggcaccc

SEQ ID NO: 71404 - DNA, 492 bp, Homo sapiens
ttggagcttcctagaaattgttcatattccacatagtacagccataattttcactcactgaaaatgctggtaacaacctttgtcagcaagaggaggaaatagatttgatctatttattctctaaaattgtactacctgaaaagaatttctgagatacttagtattcctcatagacattctagtagttttgttaatatatgaatcacagggaaataatatgccatttctgggtagttctgaatttatataagttaacagtgagtaaaaaagatcaaagaattaattgtgacccttttcagcatgtattaaaatgaccttagatctttaaaaagtcagcagaattagagtttattaggttgattaaaagtcccttttaatgggacactttttaatgctttttctcctgcttagtgataactcagccttttattcatagactgtgctgtgtgacaagatgatggtttctataacatgtagtggccactcagaaac

SEQ ID NO: 71405 - DNA, 556 bp, Homo sapiens
  misc_feature (75)..(75): n is a, c, g, or t
  misc_feature (82)..(82): n is a, c, g, or t
gggggccccccccccccccaaagggccccccccacagtgctgtctgatctgtgctttccagctcaccccccacantcactcntgagacccttggcctccggcgtcagcctccagcctctgttcccctagtaagtgccttccatgtcggcctctaaccccaggccccgaggacccagacccagtggggaggcggacgttccagccggcatggctgggaactgcagacctgtcctcctggtgggtccaggggcccctccagcttgtggagccccacactggggtgccgcctgcccgtctctctcccatggagccccagccccctttgggcccagggacaccagccaggctctgtgctgaccctcctgttgcacccagccctggtctcagcagcgaccacccctgcctccaccctccgagctttgcatgttccactaaccccgggcgggtggcaggtggaggtgtcaggctgctggcgcctctgcaagggcagaacactaacctgaccgtgggcggggccttgcggtatccgcccccaataaaagcaattccaacctta

SEQ ID NO: 71406 - DNA, 354 bp, Homo sapiens
  misc_feature (136)..(136): n is a, c, g, or t
  misc_feature (143)..(143): n is a, c, g, or t
aattcggcactagggggccccagtcagcctctctcccagtctacccagagaagccccttccccatgggatgacgaggccctcggccaagcccccacagtgctgtctgatctgtgctttccagctcaccccccacantcactcntgagacccctgaccctcctgttgcacccagccctggtctcagcagcgaccacccctgcctccaccctccgagctttgcatgttccactaaccccgggcgggtggcaggtggaggtgtcaggctgctggcgcctctgcaagggcagaacactaacctgaccgtgggcggggccttgcggtatccgcccccaataaaagcaattccaacctta

SEQ ID NO: 71407 - DNA, 1238 bp, Homo sapiens
  misc_feature (75)..(75): n is a, c, g, or t
  misc_feature (82)..(82): n is a, c, g, or t
gggggccccccccccccccaaagggccccccccacagtgctgtctgatctgtgctttccagctcaccccccacantcactcntgagacccttggcctccggcgtcagcctccagcctctgttcccctagtaagtgccttccatgtcggcctctaaccccaggccccgaggacccagacccagtggggaggcggacgttccagccggcatggctgggaactgcagacctgtcctcctggtgggtccaggggcccctccagcttgtggagccccacactggggtgccgcctgcccgtctctctcccatggagccccagccccctttgggcccagggacaccagccaggctctgtgctgaccctcctgttgcacccagccctggtctcagcagcgaccacccctgcctccaccctccgagctttgcatgttccactaaccccgggcgggtggcaggtggaggtgtcaggctgctggcgcctctgcaagggcagaacactaacctgaccgtgggcggggccttgcggtatccgcccccaataaaagcaattccaaccttaaaaaaaaaaaaaaaaaaaaaaacaaaaaaaaaaaaaaaaaaaaaaaacaccacgaagacaacagaaaccaaacaaagaaagaggggcccagcgacccgcaacaaccacacgcccctggggggcgacccgaacgaactaataggacggaagccccaaagctatgctagaacggaacggaggccaccacaaactaagagcaggtgcccacaactacacaccacacgacaggcacgagccagactagaccacacccaagtcgacgcgtggggaaacaccaacgactaccgactgccaccctcagcagcccaggccacaccccttcctcggggcagagcacagcgcgcaaggcacactccacagagaaatcagcccaccgcggctacataacaaatatctcggcggcttcttcggctccacacacggccaactacgccgccccagaaacaccatgcacctcgcactctattataacaatctaaccccgccgagaaatataagagcgacacgcagcaaagcgacgcacgtacaagcgaccagccagagagcggaaccacagtcgcaaccacgcacaacaagcgacgcacagccgcaaacacccaacagcagagcaactcaggcccatccgcatccgtgactcactgcgcgacaaccgcacacagacgacaataacaaacaacagcgc

SEQ ID NO: 71408 - DNA, 1597 bp, Homo sapiens
tattgcttgataataactataattactacaaggactgcctgagatgaaaaagacaggtgaaatcgaactttcacatggactggtgtctgagctggagagtctgtttgagtttgagtaggggaaagcctgaaaccccccaccacctgctcccgttagtccctgcattaactaggggcggactgggacctgatcctccaagctggaggcttgaaaactcaagggcaggcgcctggtccagcgattcggaaaccgagatgcaaagtcctcccgcgctcctagagaggacccggaagcgcggcgcggtcccggaagacgaggtggtgacacgcttccggcctttgtgactcattgtgtctgtgtcgaggcgtcgggagggcctaagtccgtgtgcggtgcccttcggccggcctgagcccagagtcagctcccctttctcgcccagcgcccccaggccgctcccggggctcacgagtcttgctctgtcgcccaggctggagtgcagtggtgcgatctcggcttactgcaacctctgcctcccgagttcaagcgatcctcctgcctccgcctcccgaatagctgggactacaggcatgtgtcccaaggcttggctgatttttgtatttttagtagagacagagtttcgccatgttggccaggctggtctcgaacgcctgatctcaggcagtccgccaacctcagcctcccaaagtgctgggattacgggcgtgagccactgtgtgcccagcctttgtttacattttcaagactatgccctggaaaaatactgggctgtttggaacacagcctttgagcttgtaacttcaagccgttgtttaagaaaatcatttctgtttatcctaggtgagaactgaggtatccttagctgctggaggtaattttatttaaagtggatggtatgtcagtatatttttcagcccatattcacccagaggtagtttcctactatctggaacccccaccctacccccatttgactgataaagatacaaaatgccagagaagttaaatacctctctcagggatgtgccacttacttgtgggagactagaattcagttattgcctgtgcagctttcactattacaggagttgtcccattgcttaatcttctaagcaggctgaaaattggaatgtacagttacatcttttaagcttattgaaaaaaattaagacatttctgtagtgcctactaaatgccaggcactattttaagtgctttatatctattacctcatttaatcctcacggcaactctatgggacaaatgctgatttttattcccattatacagatgaggaaactgacgcatagagaggttaacttgttgacttgcctaaggccgtcaactagtaaggggtggagcagctttaatgctaacctgatactcatccaactaggtccatggaacaaatttgagtgcaacattgaatgtagaatgatcgggcttttaaaaaatagtaacgttgtcaattcagtcaagtgtatttttgaaactgaggcttgcaaggaatcatgctaagtggtctaaggagtacaaagaggcctgctcttaataatctagctgatggaagaagaca

SEQ ID NO: 71409 - DNA, 672 bp, Homo sapiens
tattgcttgataataactataattactacaaggactgcctgagatgaaaaagacaggtgaaatcgaactttcacatggactggtgtctgagctggagagtctgtttgagtttgagtaggggaaagcctgaaaccccccaccacctgctcccgttagtccctgcattaactaggggcggactgggacctgatcctccaagctggaggcttgaaaactcaagggcaggcgcctggtccagcgattcggaaaccgagatgcaaagtcctcccgcgctcctagagaggacccggaagcgcggcgcggtcccggaagacgaggtggtgacacgcttccggcctttgtgactcattgtgtctgtgtcgaggcgtcgggagggcctaagtccgtgtgcggtgcccttcggccggcctgagcccagagtcagctcccctttctcgcccagcgcccccaggccgctcccggggctcacggtgagacttggggccggcctctggggtgggagggcggggccgcaagggtgtgtgcgcgagggtgggctccgcagctgcgccctgggaccccctccaggcggccccgctgttgtgcgaagagagtccatgcccctgcctcctggccgggcccggccgtagaaagcgccgttcttcctgggagacgtccccgccccacccccag

SEQ ID NO: 71410 - DNA, 297 bp, Homo sapiens
tcctagcctcgccagtgtcctagcctcgccagtgtcctagcctcgccagtgtcctagcctcgccagtgtcctagcctcgccagtggagaggaggccgtgacccttctagaagacttggagcttgatttatcaggacaacaggtaaaaagaggtgaaacctattatgtgtgagcagggcacagacgttgaaactggagccaggagaagtattggcaggctttaggttattaggtggttactctgtcttaaaaatgttctggctttcttcctgcatccactggcatactcatggtctgt

SEQ ID NO: 71411 - DNA, 370 bp, Homo sapiens
  misc_feature (266)..(266): n is a, c, g, or t
aatcgagctcggcctcattttattgacagacttggagcttgatttatcaggacacaggtcccaggtcaagttcatggacctgagatgctcgcaagggggatggtgcctctggatccagttcaggagtcctcgagctttgaccttcatcacgaggccacccagtcccacttcaaacattcgtctcggaaaccccgcctcttacagtcacgaggaatagtaaagaaacacatcataaaacctcccaggacataaaggtgagcacagancctgtttggatcaagtcagttcctggagcctgaatgatgactgctgaatcacgggaagccagggtctgtccccacagtctgcacaagagaaggatgtatcgtaa

SEQ ID NO: 71412 - DNA, 972 bp, Homo sapiens
gaggcgtctagaggacccctcacgccagtcacaaggattccaccctacaggacacgcctcctccagacccagagatattccgccaacgcttcaggcgcttctgttaccagaacacttttgggccccgagaggctctcagtcggctgaaggaactttgtcatcagtggctgcggccagaaataaacaccaaggaacagatcctggagcttctggtgctagagcagtttctttccatcctgcccaaggagctccaggtctggctgcaggaataccgccccgatagtggagaggaggccgtgacccttctagaagacttggagcttgatttatcaggacaacaggtcccaggtcaagttcatggacctgagatgctcgcaagggggatggtgcctctggatccagttcaggagtcctcgagctttgaccttcatcacgaggccacccagtcccacttcaaacattcgtctcggaaaccccgcctcttacagtcacgagctcttcctgctgcccacattcctgcaccccctcatgagggtagtcccagagaccaggcgatggcatctgcactattcacagcggattcccaggcaatggtgaagatcgaggacatggctgtgtccctcattctggaggaatggggatgtcagaatctggctcggaggaatctcagtagggacaacaggcaggagaattatgggagcgcatttccccagggtggtgaaaacaggaatgagaacgaggagtcaacctcaaaggctgaaacctcggaagattcagcatcacgcggggagacaacaggaagatcccagaaagagtttggagagaaacgtgaccaggagggcaaaacaggagaaagacagcagaaaaaccctgaggagaaaaccaggaaagagaaaagagattcagggccagcaataggaaaggacaaaaaaaccatcacaggagagagaggtcacaagggagaaggggaaa

SEQ ID NO: 71413 - DNA, 1297 bp, Homo sapiens
  misc_feature (1193)..(1193): n is a, c, g, or t
tattgcttgataataactataattactacaaggactgcctgagatgaaaaagacaggtgaaatcgaactttcacatggactggtgtctgagctggagagtctgtttgagtttgagtaggggaaagcctgaaaccccccaccacctgctcccgttagtccctgcattaactaggggcggactgggacctgatcctccaagctggaggcttgaaaactcaagggcaggcgcctggtccagcgattcggaaaccgagatgcaaagtcctcccgcgctcctagagaggacccggaagcgcggcgcggtcccggaagacgaggtggtgacacgcttccggcctttgtgactcattgtgtctgtgtcgaggcgtcgggagggcctaagtccgtgtgcggtgcccttcggccggcctgagcccagagtcagctcccctttctcgcccagcgcccccaggccgctcccggggctcacggaatagtaaagaaacacatcataaaacctcccaggacataaaggtgagcacagaccctgtttggatcaagtcagttcctggagcctgaatgatgactgctgaatcacgggaagccacgggtctgtccccacaggctgcacaggagaaggatggtatcgtaatagtgaaggtggaagaggaagatgaggaagaccacatgtgggggcaggattccaccctacaggacacgcctcctccagacccagagatattccgccaacgcttcaggcgcttctgttaccagaacacttttgggccccgagaggctctcagtcggctgaaggaactttgtcatcagtggctgcggccagaaataaacaccaaggaacagatcctggagcttctggtgctagagcagtttctttccatcctgcccaaggagctccaggtctggctgcaggaataccgccccgatagtggagaggaggccgtgacccttctagaagacttggagcttgatttatcaggacaacaggtcccaggtcaagttcatggacctgagatgctcgcaagggggatggtgcctctggatccagttcaggagtcctcgagctttgaccttcatcacgaggccacccagtcccacttcaaacattcgtctcggaaaccccgcctcttacagtcacgaggaatagtaaagaaacacatcataaaacctcccaggacataaaggtgagcacagancctgtttggatcaagtcagttcctggagcctgaatgatgactgctgaatcacgggaagccagggtctgtccccacagtctgcacaagagaaggatgtatcgtaa

SEQ ID NO: 71414 - DNA, 360 bp, Homo sapiens
aggtcttgggaaaactgaggccctgtgttctctcgtttgtgttgtctggaattctgtatttgggacctaaacactgaacagtgaacatgctggtgcaggaaggaacatgccccgagcccttctttgagcaaggctcagagcggagctgatttactcacagaccctttctcctcccccagctcttcctgctgcccacattcctgcaccccctcatgagggtagtcccagagaccaggcgatggcatctgcactattcacagcggattcccaggtgagctgtggcccctctgctctcctgagtcctcagtgtctgcctctgttcctgagctctcttcattatctccacaggccactctggat

SEQ ID NO: 71415 - DNA, 456 bp, Homo sapiens
cccaacctgtctgtcttcaggtcccaggtcaagttcatggacctgagatgctcgcaagggggatggtgcctctggatccagttcaggagtcctcgagctttgaccttcatcacgaggccacccagtcccacttcaaacattcgtctcggaaaccccgcctcttacagtcacgagctcttcctgctgcccacattcctgcaccccctcatgagggtagtcccagagaccaggcgatggcatctgcactattcacagcggattcccaggcaatggtgaagatcgaggacatggctgtgtccctcattctggaggaatggggatgtcagaatctggctcggaggaatctcagtagggacaacagctaacacacagagagacaaaaccatcttatcagacagtaagcctgcatccgtcttacctgggaaatgcgctcccataattctcgggtaccgagct

SEQ ID NO: 71416 - DNA, 1615 bp, Homo sapiens
tattgcttgataataactataattactacaaggactgcctgagatgaaaaagacaggtgaaatcgaactttcacatggactggtgtctgagctggagagtctgtttgagtttgagtaggggaaagcctgaaaccccccaccacctgctcccgttagtccctgcattaactaggggcggactgggacctgatcctccaagctggaggcttgaaaactcaagggcaggcgcctggtccagcgattcggaaaccgagatgcaaagtcctcccgcgctcctagagaggacccggaagcgcggcgcggtcccggaagacgaggtggtgacacgcttccggcctttgtgactcattgtgtctgtgtcgaggcgtcgggagggcctaagtccgtgtgcggtgcccttcggccggcctgagcccagagtcagctcccctttctcgcccagcgcccccaggccgctcccggggctcacggaatagtaaagaaacacatcataaaacctcccaggacataaaggtgagcacagaccctgtttggatcaagtcagttcctggagcctgaatgatgactgctgaatcacgggaagccacgggtctgtccccacaggctgcacaggagaaggatggtatcgtaatagtgaaggtggaagaggaagatgaggaagaccacatgtgggggcaggattccaccctacaggacacgcctcctccagacccagagatattccgccaacgcttcaggcgcttctgttaccagaacacttttgggccccgagaggctctcagtcggctgaaggaactttgtcatcagtggctgcggccagaaataaacaccaaggaacagatcctggagcttctggtgctagagcagtttctttccatcctgcccaaggagctccaggtctggctgcaggaataccgccccgatagtggagaggaggccgtgacccttctagaagacttggagcttgatttatcaggacaacaggtcccaggtcaagttcatggacctgagatgctcgcaagggggatggtgcctctggatccagttcaggagtcctcgagctttgaccttcatcacgaggccacccagtcccacttcaaacattcgtctcggaaaccccgcctcttacagtcacgagctcttcctgctgcccacattcctgcaccccctcatgagggtagtcccagagaccaggcgatggcatctgcactattcacagcggattcccaggcaatggtgaagatcgaggacatggctgtgtccctcattctggaggaatggggatgtcagaatctggctcggaggaatctcagtagggacaacaggcaggagaattatgggagcgcatttccccagggtggtgaaaacaggaatgagaacgaggagtcaacctcaaaggctgaaacctcggaagattcagcatcacgcggggagacaacaggaagatcccagaaagagtttggagagaaacgtgaccaggagggcaaaacaggagaaagacagcagaaaaaccctgaggagaaaaccaggaaagagaaaagagattcagggccagcaataggaaaggacaaaaaaaccatcacaggagagagaggtcacaagggagaaggggaaa

SEQ ID NO: 71417 - DNA, 1731 bp, Homo sapiens
tattgcttgataataactataattactacaaggactgcctgagatgaaaaagacaggtgaaatcgaactttcacatggactggtgtctgagctggagagtctgtttgagtttgagtaggggaaagcctgaaaccccccaccacctgctcccgttagtccctgcattaactaggggcggactgggacctgatcctccaagctggaggcttgaaaactcaagggcaggcgcctggtccagcgattcggaaaccgagatgcaaagtcctcccgcgctcctagagaggacccggaagcgcggcgcggtcccggaagacgaggtggtgacacgcttccggcctttgtgactcattgtgtctgtgtcgaggcgtcgggagggcctaagtccgtgtgcggtgcccttcggccggcctgagcccagagtcagctcccctttctcgcccagcgcccccaggccgctcccggggctcacggaatagtaaagaaacacatcataaaacctcccaggacataaaggtgagcacagaccctgtttggatcaagtcagttcctggagcctgaatgatgactgctgaatcacgggaagccacgggtctgtccccacaggctgcacaggagaaggatggtatcgtaatagtgaaggtggaagaggaagatgaggaagaccacatgtgggggcaggattccaccctacaggacacgcctcctccagacccagagatattccgccaacgcttcaggcgcttctgttaccagaacacttttgggccccgagaggctctcagtcggctgaaggaactttgtcatcagtggctgcggccagaaataaacaccaaggaacagatcctggagcttctggtgctagagcagtttctttccatcctgcccaaggagctccaggtctggctgcaggaataccgccccgatagtggagaggaggccgtgacccttctagaagacttggagcttgatttatcaggacaacaggtcccaggtcaagttcatggacctgagatgctcgcaagggggatggtgcctctggatccagttcaggagtcctcgagctttgaccttcatcacgaggccacccagtcccacttcaaacattcgtctcggaaaccccgcctcttacagtcacgaggtaagaagcaaggtttcatttaggggaagggaaatgattcaggacgagagtctttgtgctgctgagtgcctgtgatgaagaagcatgttagtcctgggcaacgtagcgagaccccatctctacaaaaaatagaaaaattagccaggtatagtggcgcacacctgtgattccagctacgcaggaggctgaggtgggaggattgcttgagcccaggaggttgaggctgcagtgagctgtaatcatgccactactccaacctgggcaacacagcaaggaccctgtctcaaaagctacttacagaaaagaattaggctcggcacggtagctcacacctgtaatcccagcactttgggaggctgaggcgggcagatcacttgaggtcaggagtttgagaccagcctggccaacatggtgaaaccttgtctctactaaaaatatgaaaattagccaggcatggtggcacattcctgtaatcccagctactcgggaggctgaggcaggagaatcacttgaacccaggaggtggaggttgcagtaagccgagatcgtaccactgtgctctagccttggtgacagagcgagactgtcttaaa

SEQ ID NO: 71418 - DNA, 321 bp, Homo sapiens
gctttacaaggctctgcctaacgaccttggaacttccatgaggtctttggtgaaagtcccctagttcttccccaggtagatgagttttcagtgggattcacatgccatgtgaaatctacgtgttggataattatgactgtgtctggtgaatatgaaattatttacagaccagatgttgatagtttctgactctgaatcacagcatagctgcaagaggtaaataaaaagcaagaggccgggagcggtggctcacgcctgtaatcccagcactttgggaggccgaggtgggtgaatcacaaggtcaggagatcgagaccatcc

SEQ ID NO: 71419 - DNA, 4651 bp, Homo sapiens
gaattcctgccactcttcctgcaacggcccaggagctcagagctccacatctgaccttctagtcatgaccaggaccagggcagcactcctcctgttcacagccttagcaacttctctaggtttcaacttggacacagaggagctgacagccttccgtgtggacagcgctgggtttggagacagcgtggtccagtatgccaactcctgggtggtggttggagccccccaaaagataacagctgccaaccaaacgggtggcctctaccagtgtggctacagcactggtgcctgtgagcccatcggcctgcaggtgcccccggaggccgtgaacatgtccctgggcctgtccctggcgtctaccaccagcccttcccagctgctggcctgcggccccaccgtgcaccacgagtgcgggaggaacatgtacctcaccggactctgcttcctcctgggccccacccagctcacccagaggctcccggtgtccaggcaggagtgcccaagacaggagcaggacattgtgttcctgatcgatggctcaggcagcatctcctcccgcaactttgccacgatgatgaacttcgtgagagctgtgataagccagttccagagacccagcacccagttttccctgatgcagttctccaacaaattccaaacacacttcactttcgaggaattcaggcgcacgtcaaaccccctcagcctgttggcttctgttcaccagctgcaagggtttacatacacggccaccgccatccaaaatgtcgtgcaccgattgttccatgcctcatatggggcccgtagggatgccaccaaaattctcattgtcatcactgatgggaagaaagaaggcgacagcctggattataaggatgtcatccccatggctgatgcagcaggcatcatccgctatgcaattggggttggattagcttttcaaaacagaaattcttggaaagaattaaatgacattgcatcgaagccctcccaggaacacatatttaaagtggaggactttgatgctctgaaagatattcaaaaccaactgaaggagaagatctttgccattgagggtacggagaccacaagcagtagctccttcgaattggagatggcacaggagggcttcagcgctgtgttcacacctgatggccccgttctgggggctgtggggagcttcacctggtctggaggtgccttcctgtaccccccaaatatgagccctaccttcatcaacatgtctcaggagaatgtggacatgagggactcttacctgggttactccaccgagctggccctctggaaaggggtgcagagcctggtcctgggggccccccgctaccagcacaccgggaaggctgtcatcttcacccaggtgtccaggcaatggaggatgaaggccgaagtcacggggactcagatcggctcctacttcggggcctccctctgctccgtggacgtagacaccgacggcagcaccgacctggtcctcatcggggccccccattactacgagcagacccgagggggccaggtgtctgtgtgtcccttgcccagggggtggagaaggtggtggtgtgatgctgttctctacggggagcagggccacccctggggtcgctttggggcggctctgacagtgctgggggatgtgaatggggacaagctgacagacgtggtcatcggggccccaggagaggaggagaaccggggtgctgtctacctgtttcacggagtcttgggacccagcatcagcccctcccacagccagcggatcgcgggctcccagctctcctccaggctgcagtattttgggcaggcactgagcgggggtcaagacctcacccaggatggactggtggacctggctgtgggggcccggggccaggtgctcctgctcaggaccagacctgtgctctgggtgggggtgagcatgcagttcatacctgccgagatccccaggtctgcgtttgagtgtcgggagcaggtggtctctgagcagaccctggtacagtccaacatctgcctttacattgacaaacgttctaagaacctgcttgggagccgtgacctccaaagctctgtgaccttggacctggccctcgaccctggccgcctgagtccccgtgccaccttccaggaaacaaagaaccggagtctgagccgagtccgagtcctcgggctgaaggcacactgtgaaaacttcaacctgctgctcccgagctgcgtggaggactctgtgacccccattaccttgcgtctgaacttcacgctggtgggcaagcccctccttgccttcagaaacctgcggcctatgctggccgcactggctcagagatacttcacggcctccctaccctttgagaagaactgtggagccgaccatatctgccaggacaatctcggcatctccttcagcttcccaggcttgaagtccctgctggtggggagtaacctggagctgaacgcagaagtgatggtgtggaatgacggggaagactcctacggaaccaccatcaccttctcccaccccgcaggactgtcctaccgctacgtggcagagggccagaaacaagggcagctgcgttccctgcacctgacatgtgacagcgccccagttgggagccagggcacctggagcaccagctgcagaatcaaccacctcatcttccgtggcggcgcccagatcaccttcttggctacctttgacgtctcccccaaggctgtcctgggagaccggctgcttctgacagccaatgtgagcagtgagaacaacactcccaggaccagcaagaccaccttccagctggagctcccggtgaagtatgctgtctacactgtggttagcagccacgaacaattcaccaaatacctcaacttctcagagtctgaggagaaggaaagccatgtggccatgcacagataccaggtcaataacctgggacagagggacctgcctgtcagcatcaacttctgggtgcctgtggagctgaaccaggaggctgtgtggatggatgtggaggtctcccacccccagaacccatcccttcggtgctcctcagagaaaatcgcacccccagcatctgacttcctggcgcacattcagaagaatcccgtgctggactgctccattgctggctgcctgcggttccgctgtgacgtcccctccttcagcgtccaggaggagctggatttcaccctgaagggcaacctcagctttggctgggtccgccagatattgcagaagaaggtgtcggtcgtgagtgtggctgaaattacgttcgacacatccgtgtactcccagcttccaggacaggaggcatttatgagagctcagacgacaacggtgctggagaagtacaaggtccacaaccccacccccctcatcgtaggcagctccattgggggtctgttgctgctggcactcatcacagcggtactgtacaaagttggcttcttcaagcgtcagtacaaggaaatgatggaggaggcaaatggacaaattgccccagaaaacgggacacagacccccagcccgcccagtgagaaatgatcccctctttgccttggacttcttctcccccgcgagttttccccacttacttaccctcacctgtcaggcctgacggggaggaaccactgcaccaccgagagaggctgggatgggcctgcttcctgtctttgggagaaaacgtcttgcttgggaaggggcctttgtcttgtcaaggttccaactggaaacccttaggacagggtccctgctgtgttccccaaaaggacttgacttgcaatttctacctagaaatacatggacaatacccccaggcctcagtctcccttctcccatgaggcacgaatgatctttctttcctttccttttttttttttttcttttctttttttttttttttgagacggagtctcgctctgtcacccaggctggagtgcaatggcgtgatctcggctcgctgcaacctccgcctcccgggttcaagtaattctgctgtctcagcctcctgcgtagctgggactacaggcacacgccacctcgcccggcccgatctttctaaaatacagttctgaatatgctgctcatccccacctgtcttcaacagctccccattaccctcaggacaatgtctgaactctccagcttcgcgtgagaagtccccttccatcccagagggtgggcttcagggcgcacagcatgagaggctctgtgcccccatcaccctcgtttccagtgaattagtgtcatgtcagcatcagctcagggcttcatcgtggggctctcagttccgatttcccaggctgaattgggagtgagatgcctgcatgctgggttctgcacagctggcctcccgcgttgggcaacattgctggctggaagggaggagcgccctctagggagggacatggccccggtgcggctgcagctcacccagccccaggggcagaagagacccaaccacttctattttttgaggctatgaatatagtacctgaaaaaatgccaagacatgattatttttttaaaaagcgtactttaaatgtttgtgttaataaattaaaacatgcacaaaaagatgcatctaccgctccttgggaaataatctgaaaggtctaaaaataaaaaagccttctgtgg

SEQ ID NO: 71420 - DNA, 4609 bp, Homo sapiens
acatatctgtccccacagtgcccccggaggccgtgaacatgtccctgggcctgtccctggcgtctaccaccagcccttcccagctgctggcctgcggccccaccgtgcaccacgagtgcgggaggaacatgtacctcaccggactctgcttcctcctgggccccacccagctcacccagaggctcccggtgtccaggcaggagtgcccaagacaggagcaggacattgtgttcctgatcgatggctcaggcagcatctcctcccgcaactttgccacgatgatgaacttcgtgagagctgtgataagccagttccagagacccagcacccagttttccctgatgcagttctccaacaaattccaaacacacttcactttcgaggaattcaggcgcacgtcaaaccccctcagcctgttggcttctgttcaccagctgcaagggtttacatacacggccaccgccatccaaaatgtcgtgcaccgattgttccatgcctcatatggggcccgtagggatgccaccaaaattctcattgtcatcactgatgggaagaaagaaggcgacagcctggattataaggatgtcatccccatggctgatgcagcaggcatcatccgctatgcaattggggttggattagcttttcaaaacagaaattcttggaaagaattaaatgacattgcatcgaagccctcccaggaacacatatttaaagtggaggactttgatgctctgaaagatattcaaaaccaactgaaggagaagatctttgccattgagggtacggagaccacaagcagtagctccttcgaattggagatggcacaggagggcttcagcgctgtgttcacacctgatggccccgttctgggggctgtggggagcttcacctggtctggaggtgccttcctgtaccccccaaatatgagccctaccttcatcaacatgtctcaggagaatgtggacatgagggactcttacctgggttactccaccgagctggccctctggaaaggggtgcagagcctggtcctgggggccccccgctaccagcacaccgggaaggctgtcatcttcacccaggtgtccaggcaatggaggatgaaggccgaagtcacggggactcagatcggctcctacttcggggcctccctctgctccgtggacgtagacaccgacggcagcaccgacctggtcctcatcggggccccccattactacgagcagacccgagggggccaggtgtctgtgtgtcccttgcccagggggtggagaaggtggtggtgtgatgctgttctctacggggagcagggccacccctggggtcgctttggggcggctctgacagtgctgggggatgtgaatggggacaagctgacagacgtggtcatcggggccccaggagaggaggagaaccggggtgctgtctacctgtttcacggagtcttgggacccagcatcagcccctcccacagccagcggatcgcgggctcccagctctcctccaggctgcagtattttgggcaggcactgagcgggggtcaagacctcacccaggatggactggtggacctggctgtgggggcccggggccaggtgctcctgctcaggtgagagcagcctttctcagaggctccccaggtggtcctaggttcagatgggggtgcccaccccacgtggtgctcccaggagccgacggcctgtcctcagctcggtgctctgcccgcaggaccagacctgtgctctgggtgggggtgagcatgcagttcatacctgccgagatccccaggtctgcgtttgagtgtcgggagcaggtggtctctgagcagaccctggtacagtccaacatctgcctttacattgacaaacgttctaagaacctgcttgggagccgtgagtcccctcccctccaacccaggacaccctgacctctggagtcccccatcccaggcccctgtctcccaccctgctcattgtccacccaaggagttcctgtctcaacgccgtccctgcgaccgcctacaggtgacctccaaagctctgtgaccttggacctggccctcgaccctggccgcctgagtccccgtgccaccttccaggaaacaaagaaccggagtctgagccgagtccgagtcctcgggctgaaggcacactgtgaaaacttcaacctgctgctcccgagctgcgtggaggactctgtgacccccattaccttgcgtctgaacttcacgctggtgggcaagcccctccttgccttcagaaacctgcggcctatgctggccgcactggctcagagatacttcacggcctccctaccctttgagaagaactgtggagccgaccatatctgccaggacaatctcggcatctccttcagcttcccaggcttgaagtccctgctggtggggagtaacctggagctgaacgcagaagtgatggtgtggaatgacggggaagactcctacggaaccaccatcaccttctcccaccccgcaggactgtcctaccgctacgtggcagagggccagaaacaagggcagctgcgttccctgcacctgacatgtgacagcgccccagttgggagccagggcacctggagcaccagctgcagaatcaaccacctcatcttccgtggcggcgcccagatcaccttcttggctacctttgacgtctcccccaaggctgtcctgggagaccggctgcttctgacagccaatgtgagcagtgagaacaacactcccaggaccagcaagaccaccttccagctggagctcccggtgaagtatgctgtctacactgtggttagcagccacgaacaattcaccaaatacctcaacttctcagagtctgaggagaaggaaagccatgtggccatgcacagataccaggtcaataacctgggacagagggacctgcctgtcagcatcaacttctgggtgcctgtggagctgaaccaggaggctgtgtggatggatgtggaggtctcccacccccagaacccatcccttcggtgctcctcagagaaaatcgcacccccagcatctgacttcctggcgcacattcagaagaatcccgtgctggactgctccattgctggctgcctgcggttccgctgtgacgtcccctccttcagcgtccaggaggagctggatttcaccctgaagggcaacctcagctttggctgggtccgccagatattgcagaagaaggtgtcggtcgtgagtgtggctgaaattacgttcgacacatccgtgtactcccagcttccaggacaggaggcatttatgagagctcagacgacaacggtgctggagaagtacaaggtccacaaccccacccccctcatcgtaggcagctccattgggggtctgttgctgctggcactcatcacagcggtactgtacaaagttggcttcttcaagcgtcagtacaaggaaatgatggaggaggcaaatggacaaattgccccagaaaacgggacacagacccccagcccgcccagtgagaaatgatcccctctttgccttggacttcttctcccccgcgagttttccccacttacttaccctcacctgtcaggcctgacggggaggaaccactgcaccaccgagagaggctgggatgggcctgcttcctgtctttgggagaaaacgtcttgcttgggaaggggcctttgtcttgtcaaggttccaactggaaacccttaggacagggtccctgctgtgttccccaaaaggacttgacttgcaatttctacctagaaatacatggacaatacccccaggcctcagtctcccttctcccatgaggcacgaatgatctttctttcctttccttttttttttttttcttttctttttttttttttttgagacggagtctcgctctgtcacccaggctggagtgcaatggcgtgatctcggctcgctgcaacctccgcctcccgggttcaagtaattctgctgtctcagcctcctgcgtagctgggactacaggcacacgccacctcgcccggcccgatctttctaaaatacagttctgaatatgctgctcatccccacctgtcttcaacagctccccattaccctcaggacaatgtctgaactctccagcttcgcgtgagaagtccccttccatcccagagggtgggcttcagggcgcacagcatgagaggctctgtgcccccatcaccctcgtttccagtgaattagtgtcatgtcagcatcagctcagggcttcatcgtggggctctcagttccgatttcccaggctgaattgggagtgagatgcctgcatgctgggttctgcacagctggcctcccgcgttgggcaacattgctggctggaagggaggagcgccctctagggagggacatggccccggtgcggctgcagctcacccagccccaggggcagaagagacccaaccacttctattttttgaggctatgaatatagtacctgaaaaaatgccaagacatgattatttttttaaaaagcgtactttaaatgtttgtgttaataaattaaaacatgcacaaaaagatgcatctaccgctccttgggaaataatctgaaaggtctaaaaataaaaaagccttctgtgg

SEQ ID NO: 71421 - DNA, 790 bp, Homo sapiens
gaattcctgccactcttcctgcaacggcccaggagctcagagctccacatctgaccttctagtcatgaccaggaccagggcagcactcctcctgttcacagccttagcaacttctctaggtttcaacttggacacagaggagctgacagccttccgtgtggacagcgctgggtttggagacagcgtggtccagtatgccaactcctgggtggtggttggagccccccaaaagataacagctgccaaccaaacgggtggcctctaccagtgtggctacagcactggtgcctgtgagcccatcggcctgcaggtgcccccggaggccgtgaacatgtccctgggcctgtccctggcgtctaccaccagcccttcccagctgctggcctgcggccccaccgtgcaccacgagtgcgggaggaacatgtacctcaccggactctgcttcctcctgggccccacccagctcacccagaggctcccggtgtccaggcaggagatggtcttactctgtcactgaggctggagtgcagtggtacaatcacagctcactgcagcctccaactcctgggctcaagtgatcctcccgcctcggcctccagagtagctgggaccacagagaagagctaccatgcccagctgatttttaacaatttttagtagatgtgaggtctaactatgctgtccaggctgatcttgaaatcctgggctcaagcaattctcctgcctaggcctcccaaagtgtttggattataggagtaagtcactgcacccagtctgaccttcactcttt

SEQ ID NO: 71422 - DNA, 597 bp, Homo sapiens
tgctcaccacttaggtccagtcatttcaaccttcccttccactcgcccctctcctccctggatgctacatgattttattcccttcctgccatcaaggtcccaccaaatgcccatccctgcagccgccctccaccccaagggagcagggttccctgagaacgaagggctgcttttcttggcaaaagtcaagaaagctctgttaaaaaataggcaaaggggctgctccaggtggctcacatctgtaattccgatttcccaggctgaattgggagtgagatgcctgcatgctgggttctgcacagctggcctcccgcgttgggcaacattgctggctggaagggaggagcgccctctagggagggacatggccccggtgcggctgcagctcacccagccccaggggcagaagagacccaaccacttctattttttgaggctatgaatatagtacctgaaaaaatgccaagacatgattatttttttaaaaagcgtactttaaatgtttgtgttaataaattaaaacatgcacaaaaagatgcatctaccgctccttgggaaataatctgaaaggtctaaaaataaaaaagccttctgtgg

SEQ ID NO: 71423 - DNA, 670 bp, Homo sapiens
ccatgtgggccaggatggtctcgatctcctgacctcgtgatccgcccccctcggcctcccaaagtactgggattacaggcgtgagccaccacgcctggctcatcacagcctctttaggcaactttaagagaatgaagggccttgttccaggcaaggggttagggaagctctgcccctgatgaggagaggacccagggtgtggagcctgactcccatcgccagactaggggcttaggggaggaagggttttgggagagtgagctcttgtggccaggaggccacggtcctggactccaggagtgtcacttggaggaccggtgccacctccttccccagagtgcccaagacaggagcaggacattgtgttcctgatcgatggctcaggcagcatctcctcccgcaactttgccacgatgatgaacttcgtgagagctgtgataagccagttccagagacccagcacccaggtgtgcctttgggggagggaggctgctgggggtgggtgcttcgatcctggtgaaatggcctcagccccagccctgtgtgcttctcccagttttccctgatgcagttctccaacaaattccaaacacacttcactttcgaggaattcaggcgcacgtcaaaccccctcagcctgttggcttctgttcaccagctgcaagggttt

SEQ ID NO: 71424 - DNA, 521 bp, Homo sapiens
ctatgttgcctgggttggtctcaaactcctgggctcaagcaatcctcccgcctcagcctcccaaagtgctgggattccaggtgtgagccaccacacccagactcaacaaatatttcttgtctccatacgccagagaatccaacagacagaaatcccttccacatggactttaaattattaaaatccatcttgcagatgaggaagctgaggctcagggagggaacgcaaacttgccggagtggcagctgtgctgcagcgtccacactcttacctaaagtgttctttgtctcctcgcagggtggtggttggagccccccaaaagataacagctgccaaccaaacgggtggcctctaccagtgtggctacagcactggtgcctgtgagcccatcggcctgcagggtgagtcaccgcccctcccgggacccagggccgggctcccaggcttccctgctccaggggcccgtggactcaccggagtgtcactttcagcttccactgtgtctgagaccctcaccctca

SEQ ID NO: 71425 - DNA, 3529 bp, Homo sapiens
gttctaagaaccgtaggaattcctctcctgagcatggctaaactctgagctaatagtatcattatatgaaagatgaggaaacggaggcacagacagattgagtccttgcccacggcctcgtggctcatacgtggaggagtcagaattggaactagagactgatcgaatgaatgacactcgggtcaccaggacacccttcctatctccactcttacatctgtttcttagcaatcatctcccaactcctacctcctcttttcaggttcttcttggtgacatctgttcacaactcaccccttctctccctttccgatggtcctacctccatattccccttgttacttatttccaacttcttcccctactttccatcttgattcacccttctctcctctggccagcggatcgcgggctcccagctctcctccaggctgcagtattttgggcaggcactgagcgggggtcaagacctcacccaggatggactggtggacctggctgtgggggcccggggccaggtgctcctgctcaggtgagagcagcctttctcagaggctccccaggtggtcctaggttcagatgggggtgcccaccccacgtggtgctcccaggagccgacggcctgtcctcagctcggtgctctgcccgcaggaccagacctgtgctctgggtgggggtgagcatgcagttcatacctgccgagatccccaggtctgcgtttgagtgtcgggagcaggtggtctctgagcagaccctggtacagtccaacatctgcctttacattgacaaacgttctaagaacctgcttgggagccgtgagtcccctcccctccaacccaggacaccctgacctctggagtcccccatcccaggcccctgtctcccaccctgctcattgtccacccaaggagttcctgtctcaacgccgtccctgcgaccgcctacaggtgacctccaaagctctgtgaccttggacctggccctcgaccctggccgcctgagtccccgtgccaccttccaggaaacaaagaaccggagtctgagccgagtccgagtcctcgggctgaaggcacactgtgaaaacttcaacctgctgctcccgagctgcgtggaggactctgtgacccccattaccttgcgtctgaacttcacgctggtgggcaagcccctccttgccttcagaaacctgcggcctatgctggccgcactggctcagagatacttcacggcctccctaccctttgagaagaactgtggagccgaccatatctgccaggacaatctcggcatctccttcagcttcccaggcttgaagtccctgctggtggggagtaacctggagctgaacgcagaagtgatggtgtggaatgacggggaagactcctacggaaccaccatcaccttctcccaccccgcaggactgtcctaccgctacgtggcagagggccagaaacaagggcagctgcgttccctgcacctgacatgtgacagcgccccagttgggagccagggcacctggagcaccagctgcagaatcaaccacctcatcttccgtggcggcgcccagatcaccttcttggctacctttgacgtctcccccaaggctgtcctgggagaccggctgcttctgacagccaatgtgagcagtgagaacaacactcccaggaccagcaagaccaccttccagctggagctcccggtgaagtatgctgtctacactgtggttagcagccacgaacaattcaccaaatacctcaacttctcagagtctgaggagaaggaaagccatgtggccatgcacagataccaggtcaataacctgggacagagggacctgcctgtcagcatcaacttctgggtgcctgtggagctgaaccaggaggctgtgtggatggatgtggaggtctcccacccccagaacccatcccttcggtgctcctcagagaaaatcgcacccccagcatctgacttcctggcgcacattcagaagaatcccgtgctggactgctccattgctggctgcctgcggttccgctgtgacgtcccctccttcagcgtccaggaggagctggatttcaccctgaagggcaacctcagctttggctgggtccgccagatattgcagaagaaggtgtcggtcgtgagtgtggctgaaattacgttcgacacatccgtgtactcccagcttccaggacaggaggcatttatgagagctcagacgacaacggtgctggagaagtacaaggtccacaaccccacccccctcatcgtaggcagctccattgggggtctgttgctgctggcactcatcacagcggtactgtacaaagttggcttcttcaagcgtcagtacaaggaaatgatggaggaggcaaatggacaaattgccccagaaaacgggacacagacccccagcccgcccagtgagaaatgatcccctctttgccttggacttcttctcccccgcgagttttccccacttacttaccctcacctgtcaggcctgacggggaggaaccactgcaccaccgagagaggctgggatgggcctgcttcctgtctttgggagaaaacgtcttgcttgggaaggggcctttgtcttgtcaaggttccaactggaaacccttaggacagggtccctgctgtgttccccaaaaggacttgacttgcaatttctacctagaaatacatggacaatacccccaggcctcagtctcccttctcccatgaggcacgaatgatctttctttcctttccttttttttttttttcttttctttttttttttttttgagacggagtctcgctctgtcacccaggctggagtgcaatggcgtgatctcggctcgctgcaacctccgcctcccgggttcaagtaattctgctgtctcagcctcctgcgtagctgggactacaggcacacgccacctcgcccggcccgatctttctaaaatacagttctgaatatgctgctcatccccacctgtcttcaacagctccccattaccctcaggacaatgtctgaactctccagcttcgcgtgagaagtccccttccatcccagagggtgggcttcagggcgcacagcatgagaggctctgtgcccccatcaccctcgtttccagtgaattagtgtcatgtcagcatcagctcagggcttcatcgtggggctctcagttccgatttcccaggctgaattgggagtgagatgcctgcatgctgggttctgcacagctggcctcccgcgttgggcaacattgctggctggaagggaggagcgccctctagggagggacatggccccggtgcggctgcagctcacccagccccaggggcagaagagacccaaccacttctattttttgaggctatgaatatagtacctgaaaaaatgccaagacatgattatttttttaaaaagcgtactttaaatgtttgtgttaataaattaaaacatgcacaaaaagatgcatctaccgctccttgggaaataatctgaaaggtctaaaaataaaaaagccttctgtgg

SEQ ID NO: 71426 - DNA, 2706 bp, Homo sapiens
gttctaagaaccgtaggaattcctctcctgagcatggctaaactctgagctaatagtatcattatatgaaagatgaggaaacggaggcacagacagattgagtccttgcccacggcctcgtggctcatacgtggaggagtcagaattggaactagagactgatcgaatgaatgacactcgggtcaccaggacacccttcctatctccactcttacatctgtttcttagcaatcatctcccaactcctacctcctcttttcaggttcttcttggtgacatctgttcacaactcaccccttctctccctttccgatggtcctacctccatattccccttgttacttatttccaacttcttcccctactttccatcttgattcacccttctctcctctggccagcggatcgcgggctcccagctctcctccaggctgcagtattttgggcaggcactgagcgggggtcaagacctcacccaggatggactggtggacctggctgtgggggcccggggccaggtgctcctgctcaggtgagagcagcctttctcagaggctccccaggtggtcctaggttcagatgggggtgcccaccccacgtggtgctcccaggagccgacggcctgtcctcagctcggtgctctgcccgcaggaccagacctgtgctctgggtgggggtgagcatgcagttcatacctgccgagatccccaggtctgcgtttgagtgtcgggagcaggtggtctctgagcagaccctggtacagtccaacatctgcctttacattgacaaacgttctaagaacctgcttgggagccgtgagtcccctcccctccaacccaggacaccctgacctctggagtcccccatcccaggcccctgtctcccaccctgctcattgtccacccaaggagttcctgtctcaacgccgtccctgcgaccgcctacaggtgacctccaaagctctgtgaccttggacctggccctcgaccctggccgcctgagtccccgtgccaccttccaggaaacaaagaaccggagtctgagccgagtccgagtcctcgggctgaaggcacactgtgaaaacttcaacctgctgctcccgagctgcgtggaggactctgtgacccccattaccttgcgtctgaacttcacgctggtgggcaagcccctccttgccttcagaaacctgcggcctatgctggccgcactggctcagagatacttcacggcctccctaccctttgagaagaactgtggagccgaccatatctgccaggacaatctcggcatctccttcagcttcccaggcttgaagtccctgctggtggggagtaacctggagctgaacgcagaagtgatggtgtggaatgacggggaagactcctacggaaccaccatcaccttctcccaccccgcaggactgtcctaccgctacgtggcagagggccagaaacaagggcagctgcgttccctgcacctgacatgtgacagcgccccagttgggagccagggcacctggagcaccagctgcagaatcaaccacctcatcttccgtggcggcgcccagatcaccttcttggctacctttgacgtctcccccaaggctgtcctgggagaccggctgcttctgacagccaatgtgagcagtgagaacaacactcccaggaccagcaagaccaccttccagctggagctcccggtgaagtatgctgtctacactgtggttagcagccacgaacaattcaccaaatacctcaacttctcagagtctgaggagaaggaaagccatgtggccatgcacagataccaggtcaataacctgggacagagggacctgcctgtcagcatcaacttctgggtgcctgtggagctgaaccaggaggctgtgtggatggatgtggaggtctcccacccccagaacccatcccttcggtgctcctcagagaaaatcgcacccccagcatctgacttcctggcgcacattcagaagaatcccgtgctggactgctccattgctggctgcctgcggttccgctgtgacgtcccctccttcagcgtccaggaggagctggatttcaccctgaagggcaacctcagctttggctgggtccgccagatattgcagaagaaggtgtcggtcgtgagtgtggctgaaattacgttcgacacatccgtgtactcccagcttccaggacaggaggcatttatgagagctcagacgacaacggtgctggagaagtacaaggtccacaaccccacccccctcatcgtaggcagctccattgggggtctgttgctgctggcactcatcacagcggtactgtacaaagttggcttcttcaagcgtcagtacaaggaaatgatggaggaggcaaatggacaaattgccccagaaaacgggacacagacccccagcccgcccagtgagaaatgatcccctctttgccttggacttcttctcccccgcgagttttccccacttacttaccctcacctgtcaggcctgacggggaggaaccactgcaccaccgagagaggctgggatgggcctgcttcctgtctttgggagaaaacgtcttgcttgggaaggggcctttgtcttgtcaaggttccaactggaaacccttaggacagggtccctgctgtgttccccaaaaggacttgacttgcaatttctacctagaaatacatggacaatacccccag

SEQ ID NO: 71427 - DNA, 149 bp, Homo sapiens
tgtggatggatgtggaggtctcccacccccaggtacccaaggactgcatgtggctcctccacgaatgccctttctacctggattccttgtgccccatgtgggtccctgatgtcccagctgagacacttgttctctgcattttcccccag

SEQ ID NO: 71428 - DNA, 186 bp, Homo sapiens
gtgacctccaaagctctgtgaccttggacctggccctcgaccctggccgcctgagtccccgtgccaccttccaggaaacaaagaaccggagtctgagccgagtccgagtcctcgggctgaaggcacactgtgaaaacttcaacctgctgctcccggtgcgtctgggcatgaacgtgggtggcggcc

SEQ ID NO: 71429 - DNA, 1688 bp, Homo sapiens
gagatttcctcaggaggtttcttgaagcttatcaggtttacagaccataacatactctttgctgattcatatagcaatgaatgataaaatcagaggcacttggtttgggcacttaaaggaatgttttcatctcttctcccagttgaggccatgactttgaagaaaggttaaaatggtttgagtatcaagtagcatcctacaaaaggatctaaaactagattttctagtttgctcagttaaaatgataaaatgagataattggagactatcagttgtaaatctgagttagaaataacacggtagctgaaaaaaatgtcagtgattcacaagaaaaaataagaaaacaacattacttcagttttgcctcagaaaagttaaatgattttttaaatagaaaaaaatcgccctcaagtttgttcctctagtgcctatggtactttgaaaaggatctctttttaaaatgttaaaaggtaattaactttgtttcagcagcatctctcaatcacatataccccataaatatgtacaactattaaaggacctataatgataattaaaaataaaatattttaaaaatcttttataaacaatttttaacactcatacctttttactagggcagataaaataataaggtgaacctgaagtataatggaaatagataaatataatcttaggcagggcaaacttgctgagataaagctaattgctggaatatgccaatgggaagttgatatggtttggatgtttgtcccctccaaatctcatattgaaacgcagtccctggtgttggagctggggcctggtgggaggtgtttggatcatgagggcggatccttcgtgaatgacttagtgccatccccttggtgatgagtgagttcttgctgtgagttcacaggagacctgcttgtttaaaagtgtgtggcacttccccccctcactcttgctcccactctcgccatgtgatatgcctgctccccttcttcttctgccgtgattgtgagcttcctgaggcctcattagaggcagatgttctgtatggcctgctgaactgaggtctattataagaactccctgcccatccttttaacaagaggcttagaaagagacatgccaaaaccacctccaaaaaccaaggtaaactatgttttctctgtaggcgaccatgcagttgactcacaagcacattacttttctgggaagaaacttttaagtggagaaaccttctactcctccacaatgaaaagaagctgtccagtaaacgaaatccctcctgcttcatgtccacttagcatggcagataattcgtactctacactctcctgtggaacagagagccttacagcttactgttgtatcatcacagttctatgatggcaatgtataaaaattaagattgaggcatgatattttaatgtcttttttattttcagtcacattaatttatcagggttaattagtgcctggtatcacatattttttttttttttggtgatgggttccttattcaatttttaaagattagaccatcttaaaatatttttagtgttgactgtgacaatttgttttttggctttcaaaacaaattattgtgtgttttaagtatgatgaccctagttttattggaggtatatatctacctccttttgcttttttatttgctaaactagctcatactgtatctcata

SEQ ID NO: 71430 - DNA, 1088 bp, Homo sapiens
gagatttcctcaggaggtttcttgaagcttatcaggtttacagaccataacatactctttgctgattcatatagcaatgaatgataaaatcagaggcacttggtttgggcacttaaaggaatgttttcatctcttctcccagttgaggccatgactttgaagaaaggttaaaatggtttgagtatcaagtagcatcctacaaaaggatctaaaactagattttctagtttgctcagttaaaatgataaaatgagataattggagactatcagttgtaaatctgagttagaaataacacggtagctgaaaaaaatgtcagtgattcacaagaaaaaataagaaaacaacattacttcagttttgcctcagaaaagttaaatgattttttaaatagaaaaaaatcgccctcaagtttgttcctctagtgcctatggtactttgaaaaggatctctttttaaaatgttaaaaggtaattaactttgtttcagcagcatctctcaatcacatataccccataaatatgtacaactattaaaggacctataatgataattaaaaataaaatattttaaaaatcttttataaacaatttttaacactcatacctttttactagggcagataaaataataaggtgaacctgaagtataatggaaatagataaatataatcttaggcagggcaaacttgctgagataaagctaattgctggaatatgccaatgggaagttgatatggtttggatgtttgtcccctccaaatctcatattgaaacgcagtccctggtgttggagctggggcctggtgggaggtgtttggatcatgagggcggatccttcgtgaatgacttagtgccatccccttggtgatgagtgagttcttgctgtgagttcacaggagacctgcttgtttaaaagtgtgtggcacttccccccctcactcttgctcccactctcgccatgtgatatgcctgctccccttcttcttctgccgtgattgtgagcttcctgaggcctcattagaggcagatgttctgtatggcctgctgaactgtgagtcaattaaacctctttttgaaataaattac

SEQ ID NO: 71431 - DNA, 1619 bp, Homo sapiens
gtgtcagtattttcacctttgtgtaatccccttccctagaatatccactggatttagtgattcagtactgacaagtttggtagaatgcagcatagtgatgggatatcaattgtgatattaaattaaaaggactacagcaccactacacacctattagatctaggccagaatctggaagactgacaacaccaaatgctgatgaggctgtggggaaagaggaactcttatttattgttcgtgggaattaaaaatggtgtagccactttggaagacaattcgactattccttgcaaaactattcaatctagcagttgcactccttggtatgtaacccagaaagctgcatgtattacactcctcagtatgtaacccaaaaagctgtggtatgtctacacaaaaagctgcacacagatgtttatagtagctatattcataattgccaaaaattggaagcaaccaagatgtctttcagtaagcgaatgaataaataaactgtggtacatttagacaatggaataatatccagtgctaaaaagaaatgagctatcaagccacgaaaagacatggaggaaatgtaaatacaattactaattgaaagaagccaatcttaaaaggctacatgtatgattccaactatatgacattctggaaaatgcaaaactagggaagaagtaaagaagataagtggttgctaggggtcggggagggagagataaataggtggagtatagaggattttttagagcagtgagactactctgtacagtactataatggtggacacatgtcattatatatttgtccaaatccatggaatgtacaataccaagagtgaatcttaacgtagattacagactttgggtgataatggtatgccaatgtaggccttctgcttgattttgcggtgaacctaatattgctgtaaaaaacaaaatcaatttttaaaaaatgacagctttttattgggtattctgtctctatctcactctcttgtcctggggagtgagcttggaaccaaatttcccccagttgaaccagaaaaaacagagaaataagtgtttgtcatttttagctgctaaattttggggataatttatcctgcagttacatataactaatatacatgatatatctacatatctttttctacccttctgttttcagattatgttttctctttttaatccagactgacaatttctgcctctaactggattgtttagtccatttacatttaatgtaattactaatattacagggttgaatttaaatctaccatcttggtatatgatttctatctgtcccatctgattgttgttcacctgtgtctttcttcctgttttcccttggtgaatgcagtaatttttagtattccatttagtataagtgtacatatttttagtatttattttttatctcccctgttaacctcttctgtgtcttgtgtgagtttgtgtggtttttctaggaattgcaatatgcatccttgacatatctattgtctcatgaaggatgtaagatattccaaaagtgtaatttccttaaccgactttcctggcccttatgttcttgtcatgtattttatttctatgtataacactataatacatatattgtta

SEQ ID NO: 71432 - DNA, 1565 bp, Homo sapiens
gtgtcagtattttcacctttgtgtaatccccttccctagaatatccactggatttagtgattcagtactgacaagtttggtagaatgcagcatagtgatgggatatcaattgtgatattaaattaaaaggactacagcaccactacacacctattagatctaggccagaatctggaagactgacaacaccaaatgctgatgaggctgtggggaaagaggaactcttatttattgttcgtgggaattaaaaatggtgtagccactttggaagacaattcgactattccttgcaaaactattcaatctagcagttgcactccttggtatgtaacccagaaagctgcatgtattacactcctcagtatgtaacccaaaaagctgtggtatgtctacacaaaaagctgcacacagatgtttatagtagctatattcataattgccaaaaattggaagcaaccaagatgtctttcagtaagcgaatgaataaataaactgtggtacatttagacaatggaataatatccagtgctaaaaagaaatgagctatcaagccacgaaaagacatggaggaaatgtaaatacaattactaattgaaagaagccaatcttaaaaggctacatgtatgattccaactatatgacattctggaaaatgcaaaactagggaagaagtaaagaagataagtggttgctaggggtcggggagggagagataaataggtggagtatagaggattttttagagcagtgagactactctgtacagtactataatggtggacacatgtcattatatatttgtccaaatccatggaatgtacaataccaagagtgaatcttaacgtagattacagactttgggtgataatggtatgccaatgtaggccttctgcttgattttgcggtgaacctaatattgctgtaaaaaacaaaatcaatttttaaaaaatgacagctttttattgggtattctgtctctatctcactctcttgtcctggggagtgagcttggaaccaaatttcccccagttgaaccagaatatcctgcagttacatataactaatatacatgatatatctacatatctttttctacccttctgttttcagattatgttttctctttttaatccagactgacaatttctgcctctaactggattgtttagtccatttacatttaatgtaattactaatattacagggttgaatttaaatctaccatcttggtatatgatttctatctgtcccatctgattgttgttcacctgtgtctttcttcctgttttcccttggtgaatgcagtaatttttagtattccatttagtataagtgtacatatttttagtatttattttttatctcccctgttaacctcttctgtgtcttgtgtgagtttgtgtggtttttctaggaattgcaatatgcatccttgacatatctattgtctcatgaaggatgtaagatattccaaaagtgtaatttccttaaccgactttcctggcccttatgttcttgtcatgtattttatttctatgtataacactataatacatatattgtta

SEQ ID NO: 71433 - DNA, 2726 bp, Homo sapiens
caacagtccccaggcatcaccattcaagatgcatccaggggtcctggctgccttcctcttcttgagctggactcattgtcgggccctgccccttcccagtggtggtgatgaagatgatttgtctgaggaagacctccagtttgcagagcgctacctgagatcatactaccatcctacaaatctcgcgggaatcctgaaggagaatgcagcaagctccatgactgagaggctccgagaaatgcagtctttcttcggcttagaggtgactggcaaacttgacgataacaccttagatgtcatgaaaaagccaagatgcggggttcctgatgtgggtgaatacaatgttttccctcgaactcttaaatggtccaaaatgaatttaacctacagaattgtgaattacacccctgatatgactcattctgaagtcgaaaaggcattcaaaaaagccttcaaagtttggtccgatgtaactcctctgaattttaccagacttcacgatggcattgctgacatcatgatctcttttggaattaaggagcatggcgacttctacccatttgatgggccctctggcctgctggctcatgcttttcctcctgggccaaattatggaggagatgcccattttgatgatgatgaaacctggacaagtagttccaaaggctacaacttgtttcttgttgctgcgcatgagttcggccactccttaggtcttgaccactccaaggaccctggagcactcatgtttcctatctacacctacaccggcaaaagccactttatgcttcctgatgacgatgtacaagggatccagtctctctatggtccaggagatgaagaccccaaccctaaacatccaaaaacgccagacaaatgtgacccttccttatcccttgatgccattaccagtctccgaggagaaacaatgatctttaaagacagattcttctggcgcctgcatcctcagcaggttgatgcggagctgtttttaacgaaatcattttggccagaacttcccaaccgtattgatgctgcatatgagcacccttctcatgacctcatcttcatcttcagaggtagaaaattttgggctcttaatggttatgacattctggaaggttatcccaaaaaaatatctgaactgggtcttccaaaagaagttaagaagataagtgcagctgttcactttgaggatacaggcaagactctcctgttctcaggaaaccaggtctggagatatgatgatactaaccatattatggataaagactatccgagactaatagaagaagacttcccaggaattggtgataaagtagatgctgtctatgagaaaaatggttatatctattttttcaacggacccatacagtttgaatacagcatctggagtaaccgtattgttcgcgtcatgccagcaaattccattttgtggtgttaagtgtctttttaaaaattgttatttaaatcctgaagagcatttggggtaatacttccagaagtgcggggtaggggaagaagagctatcaggagaaagcttggttctgtgaacaagcttcagtaagttatctttgaatatgtagtatctatatgactatgcgtggctggaaccacattgaagaatgttagagtaatgaaatggaggatctctaaagagcatctgattcttgttgctgtacaaaagcaatggttgatgatacttcccacaccacaaatgggacacatggtctgtcaatgagagcataatttaaaaatatatttataaggaaattttacaagggcataaagtaaatacatgcatataatgaataaatcattcttactaaaaagtataaaatagtatgaaaatggaaatttgggagagccatacataaaagaaataaaccaaaggaaaatgtctgtaataatagactgtaacttccaaataaataattttcattttgcactgaggatattcagatgtatgtgcccttcttcacacagacactaacgaaatatcaaagtcattaaagacaggagacaaaagagcagtggtaagaatagtagatgtggcctttgaattctgtttaattttcacttttggcaatgactcaaagtctgctctcatataagacaaatattcctttgcatattataaaggataaagaaggatgatgtctttttattaaaatatttcaggttcttcagaagtcacacattacaaagttaaaattgttatcaaaatagtctaaggccatggcatccctttttcataaattatttgattatttaagactaaaagttgcattttaaccctattttacctagctaattatttaattgtccagtttgtcttggatatataggctattttctaaagacttgtatagcatgaaataaaatatatcttataaagtggaagtatgtatattaaaaaagagacatccaaatttttttttaaagcagtctactagattgtgatcccttgagatatggaaggatgcctttttttctctgcatttaaaaaaatcccccagcacttcccacagtgcctattgatacttggggagggtgcttggcacttattgaatatatgatcggccatcaagggaagaactattgtgctcagagacactgttgataaaaactcaggcaaagaaaatgaaatgcatatttgcaaagtgtattaggaagtgtttatgttgtttataataaaaatatattttcaacagaaaaaaaaaata

SEQ ID NO: 71434 - DNA, 808 bp, Homo sapiens
tgagaatactaagcgcaaatcaggagttctaatgtattcacagctacaacttgtttcttgttgctgcgcatgagttcggccactccttaggtcttgaccactccaaggaccctggagcactcatgtttcctatctacacctacaccggcaaaagccactttatgcttcctgatgacgatgtacaagggatccagtctctctatggtccaggagatgaagaccccaaccctaaacatccaaaaacgccagacaaatgtgacccttccttatcccttgatgccattaccagtctccgaggagaaacaatgatctttaaagacagattcttctggcgcctgcatcctcagcaggttgatgcggagctgtttttaacgaaatcattttggccagaacttcccaaccgtattgatgctgcatatgagcacccttctcatgacctcatcttcatcttcagaggtagaaaattttgggctcttaatggttatgacattctggaaggttatcccaaaaaaatatctgaactgggtcttccaaaagaagttaagaagataagtgcagctgttcactttgaggatacaggcaagactctcctgttctcaggaaaccaggtctggagatttgttgttttaccctattttgggtataggactatcgcgactatagagaaggagttccggaattgggtacagagctgcgtttgcgaaacagggttttcttttttcacggcccctaccgtctggtacccttgggaaccctgtggtctgcgccacctcggggtgtcgcttccggttatcgcgctgggggtcca

SEQ ID NO: 71435 - DNA, 389 bp, Homo sapiens
aattggtattagttgtcatagttattaatgttggaaggtgttttgcctactttagttggcaaaattttttgaagatttttgaaattgctttcaaaaacattttaagaatgaaaattggtcctacttttttgctttgacctcaaacgcagttatccagcttgatcatctgctttattcattaaccttgtctccaaaaattaaattggttcaattctgtactaaaaaatgtagtctcccaagcccctgattccctgttgagtctggttttaaaaaaaactgttgactgtgctcagaaattccaggtagaggcaggaggaactggttgcttggcctctcagtatatacccccggaggctaccatgtgtctccccatcgcccacgtgcatggg

SEQ ID NO: 71436 - DNA, 202 bp, Homo sapiens
gcaaagcaccaagtgacacttaggaatattttagacaagagagcttggttcatgattcaacattagacagatattctggcacaaatatgaagaaccctcaattttcccctgtgggtcagccacaagaccagggcaatttaacgccttgtctcatccacctcccagctggctgctacctcctgcccctctttgagccctgtgg

SEQ ID NO: 71437 - DNA, 360 bp, Homo sapiens
attcccccaggctctcttgcctcgcgtctctctcttacggagggctgtgtgggttctcagtggtcatcttctccagcctggctcatgttggggagcaaggtagctggagctcctgggagtccatagcactgggcatagaatgggacagacttcccctgtccacgttgcttagcagcccatacaggtgagcacctggggaacagggagttgggaagcatctcttatagaaatgaacctaaagccatttctgcctcagccttttgctttgtttttaagtggcctggtttcctcactgcttctgggacatccagctgaactttatctctgtttactatgcctcactattgttagaagctacaa

SEQ ID NO: 71438 - DNA, 584 bp, Homo sapiens
aaataccgcatgttctcacttgtgagagctaaacattgagtacacatggatacaaagaagggaacagacaccagggcctacttgaggggggaagaagagaggggggcaaggttgaaaaagtattgagtactatgctgagtacttgggtaacaggatcagtcataccccaaacctcagcatcacacaatacacctaggtaaaaagcccgcatatgaacccctgaatctgaaataaaagttgaaattatattttaaaaaatgtggagaatttgaatagtgcaaggaatgtatacagaaaacagtgtctggagaatgcctgacttagtttgccaaaaaagtgtcggctccgctgccttgcctccagtggattacccctaggatgatcttatttccctttctgtttagattcagggaagtactgagcatcagcgtcttttccgtgtggctgttactgatattgttacagtttcataaagaacaatacttatcataccttaggccaaatgttctccaaaacaaaaaaaaagtaaatagaaacttccagccctgacaggtattcaagcctaaagtatgatacagagaaac

SEQ ID NO: 71439 - DNA, 355 bp, Homo sapiens
attattttgcatgttctaggtagactttttagtcctatctgtaagttacaattttttcctaagccaaaatctgtttctcttaattttattactctaatttttgaccaaagtctctagaataatttccaaattgaaaatattataatatttttctcagtataatttgaattattctagtgttttaccattaagtatggtgtttgctgttttgttttacatagaaaattgaggacattactttttgtatctagttttcctttatttctagaattaggaaaaatcaggccaccttccctcaagtctccattttgaacttctgcagtgtctaggtttcaggaacaggaatgggggatag

SEQ ID NO: 71440 - DNA, 579 bp, Homo sapiens
aagcaggaatctgatggacatattatgtcaattactcatttgaatccatgactcagagtattttaaatatacatatggaaaccagagtcttttcataaccagactctacaaacaagaaatgtgtgccaagacgtgacaaacacaatcttaaaaagcttcacagatttaaatcttccatttaaagcacaacttattttatcaatgcttttatgtaatccccaaaatacagcaacactgagtttaaaattccaaagatgttttctggtttcaatgatggaaattgcttgtcctgtctacaataaacacacacagtaggacacaaaacttcaaagagaaaattcatatattgatggagacaatttttgaaattttcttgtcatatatgaaaagcaatttgtgatggatatctccgggccacaacttttcttttttttttttttgagatggagtctcagtctgtcacccaggctagaatgcagtggtgcgatctcagcccaaaatcagagaaatttatatccagcttccccaggaggctaaagcaaattttttggaataatttttgtctctttgttaaaacaa

SEQ ID NO: 71441 - DNA, 378 bp, Homo sapiens
ctatatgatcttggcatgccgggatattagggcaaaaacaaaccttctgtaattgaaaactgtgaagtctcatatttagtttaaaaatataattcaaggttgggtgcagtggctcacgcctgttatcccagcactttgggaggccaaggcgggcggatcacgaggtcaggagatccagaccttcctggctaacacggtgaaaccccgtctctactaaaaatacaaaaaattagccgggcgtggtggcgggcgcctgtagtcccagctactccggaggctgaggcaggagaatggcgtgaacccgggaggcggagcttgcagtgagccgagatcgcgccactgcactccagcctgggcgacaaagcgagactccctctc

SEQ ID NO: 71442 - DNA, 485 bp, Homo sapiens
agattagtggtatggataatgctataggagatcagagagaggtgctcactgtataccagagtattaaaggtgtcagggaggaagtaatatttgagatttaattctaagaatgggttggatttgcattatcttgattagaggagctctgagtatttcagaacctaaggatggcttaaaattggaaatgagcattttgtttataggaaaacctagtaaagccttttgtgtacttcagccctcattgatctccctctggatcgtctgtctatttttatagttttatggttaataccattgtatgttactatatttctttttgtttattattttatgtagaaattttgtgtactgtaatctcacccagtcctcataataatcattgcacaggtgaggcagtgggaggatcatagggaccagagaaaacttgtaattgtccatggtctcaaggctaaagtggtagagctgagattcaagcccaggtttta

SEQ ID NO: 71443 - DNA, 667 bp, Homo sapiens
cggaaatctgggcagatttgggatctagagcagggaggtctcagggttgaggcctgaagtccagcacggcacacagcagggctgagagcagaatccagggtcatgtctgattcccaggccggttaccgcctctctgaccccagatgtctcacctgtcgaatgggtacattcgggaacagcacccactctacgaagccaccatgaggacgaaagagaagggtcactgagcaggtttttttcagctctgagcagctctcctttttcagctcttgccgcatctcggactgtcccaatgacagccgtagcaagaagagataagaaacaagacaagttcatgttgtccagttttgaggtcttgaaagaagttgcaccagtatgagaatagtggatcagttttctctaggatccagaaagcatatcaggcagccttggggtgaggaaaggagcccggcctctccagcagccacacaggcctgcagtaggatggggttggggctggccatgtggatcacttgggcctcatgaggggaaaggaaataccagggggcagaggaggagcatgggggcagctggttgcctaaggagaaggcacctcagggaaggggactgtattcgtttgttttcacactgctataaagaaatacctgagattgggtaatgtaaaaag

SEQ ID NO: 71444 - DNA, 744 bp, Homo sapiens
  misc_feature (2)..(2): n is a, c, g, or t
  misc_feature (6)..(6): n is a, c, g, or t
  misc_feature (11)..(11): n is a, c, g, or t
  misc_feature (13)..(13): n is a, c, g, or t
  misc_feature (88)..(88): n is a, c, g, or t
gnaagnagaangntaaaacagggcagattattatgtagcagctatttaatagacaaataagtgtaagttgatggaaagcagtaatgtnccttaatacagacacttgcacttggtagacagattcacccaagtttgcatattataattccagccaccacacagtgagtgagtgactctttctcacaatatcactaactctaagtctctgtctctcatcacatcctatattctcacaccacccctgagccctaggggacatgatgcctacccgatcctgccggctgagagaaggatggtatattttcttacattagtcaggagctggttggagaagatgaacgtagacatacatgaagtggcacgaaaacaaaggtgatataaggaccacctcctgcacaaaacagaactgagaaaaggggaagacttgtttactcggattaggtaggatatacacgaatccatctcacaccagatattcttctgctgtagacttccaagtgtttcagtccaccattaatcatggactctcacaattagcagagatgcagagtgacctaatccaacatcccagctgaaacgtgaacaaaccaccctcccaaggaatttgtccacccaccaaagctgttttccaatgtgacttaaccttgggcacatgtccccacccccaaaggaagcaaccccttccatctttgggttaatgttggcttccttctaaaatgaattggctcaatttctctgttgagt

SEQ ID NO: 71445 - DNA, 452 bp, Homo sapiens
gctaagaccacagagagtcttgtatggtataataggaaagagtgagggatttggagccaggtgacatgggtttaaataaatactgccaatccttgctgtgtgatcttgggcacatcatttatactctctgattgtcaatttcctcctgtacaaaatggagataattcttatggtatgtggttgttaggacaaagtgaagttatacaagggaaagttttgtttaaattgtgaagggttatataaatattattattaggcgccctgaacaagagtgcttgcatgctgacaagggcaacctggagggtgtgttggaaacacatcatgtctgtttctatggcagttctgcctcatgtaaggtgctgccccatcatgagcccacatgttatacctactcagaaatgagtaatacagagcttgttttgattatgtaggtttccgagaaaaaagggaaa

SEQ ID NO: 71446 - DNA, 402 bp, Homo sapiens
tttactataacgttaacagtaattatttaaattattagcacatggacactgcagcgtaggatcaaaatgcattcaaacaacgggatggaatttattgccaacaaaatataatactaaaatcagttttgcacttccattgtttttttacacatgtcttcacacggacattttcatgtttcttcccaagcttttgccttccttttcacctaattctttgtcatttttgttgctgttggggtcttgcataagcatgctgatgttttgtaagatcagcccgctgtcccttatgatgattcccttcagaattggtgcattcaatgtctttggcagaaaatcctatgtaatactggcttgtgtgttaagctcattcccatcatcatcaattggagacgcttacttaag

SEQ ID NO: 71447 - DNA, 1474 bp, Homo sapiens
tttttgcattctatacattcataggttttatttcagaaacgagttcttgtcttcatgtggaactggaacaactgacgaccctaccacatgtttgtatttataagggttttctcccttgaatcctttcatgttttcaaagaaatgaaaaagctgaaggcttgactatgtttcttaagattatgtagtttttctacgtattaaaattcaactatgcctttgaaaagatgtgggaaaatcaagttcattaacacgttttttacattcattattttttccaatacaagtttttctaagttttcaaagagaactgggaaagttgaatgctttcttgtgtttctttcatcgatagggttctgtacagtgtgagttcttttatgtgttctaataaactagagcatatgacggctttaccacatttcttacatgagaataatgtttttgaagatagcccagttgactaacattgtcctgtgttggttttgttgtgtttctccttccccaggcttgagttgggaaaccagttctcccacttcattaataatgatgtcgatgttcctggcagtgtttataccaaatgctactttgacctttgcgccttggcacacgacagtagcctatatttgccattttgtcttcttgacatagaaagagcatgggaactgaaggttgtttcaaggttggaagacaaagacttctatggtactgccaacaaaaggaaaaggtctttgagttctgatgatttaattgatcttcagtgccttaaggccatcctctcctgaaggaagaagtgaggggttatataacatctgaacccctcatcaaaaaagacaggaaaatatcacctttcctgctgaagaactagaaaagtactttcaaaagaagaaacacctacaattcaagttaactcaaggacaactaggattgcacttcatagaaaagaatgggaccttgtcaatgcaacaacacactcttacactcttctgtcccttttaatgtaaagagagttataaaaaccactccaaagtgaaggctcctatgtgagctgatagcagtgaactatgtaagggtttaaaacaatggtttaaatttttagattttaaagataacttttctgtttcttttatatttttctttcccccaatattgctgcatatgcatttagcatcatattaccattaaaacataggactcttaacaactcataaagccactaggagcagatgcagcattgtcaggtactgaaggggctcttccttcctactcttagaatcgaagctactagttactggcaatcattttaagcaaaagcttctggataacatttgccattcatatcctctgtaagcacttcttattagcagttagcatgtttggggtcataaaaagagaaaatattggttattgattatctacttttattagggtctgtggtgtatttcttgtgaactataatggttctcatttgctgataaat

SEQ ID NO: 71448 - DNA, 426 bp, Homo sapiens
gctgttcggcttggaccaacctgggcagcgtgagccatctggatcagagccaccaggggaagggggcagcctgcccacacctgtggtcctgtgaacggcctgcacggccagtggcccagcggagcggtactgtttatggcacaatgcacacaggccagcaagtggctttgatgtggcccttggaggggtggagacgagcccattacaggaacaggcgtagggcctcgtcacctcttacccaagatgttcttggaaatgctcttgctctgagtgaagattaggaaaccgtcttctattttaggagcctggtgtatgttacatactgtgttgactcgcccatgacagttgtgtgggtcctttgaaaggggtgtgtcagtgggggagaacttgacaccccatggggaggggcaactcggggatgctggg

SEQ ID NO: 71449 - DNA, 5365 bp, Homo sapiens
ggggaagcttcgcaggcgtgcacggagcagtgagatcactggcgttataaatatcccggtgccagcgcggagatccgctcgggtggcctctctcttcccctctccccttctcttccccgaggctatgtccacccggtgcggcgaggcgggcagagccagaggcacgcagccgcacaggggctacagagcccagaatcagccctacaagatgcacttaggacccccgcggctggaagaatgagcttgtccttcctcctcctcctcttcttcagccacctgatcctcagcgcctgggctcacggggagaagcgtctcgcccccaaagggcaacccggacccgctgccactgataggaaccctagaggctccagcagcagacagagcagcagtagcgctatgtcttcctcttctgcctcctcctcccccgcagcttctctgggcagccaaggaagtggcttggagcagagcagtttccagtggagcccctcggggcgccggaccggcagcctctactgcagagtgggcatcggtttccatctgcagatctacccggatggcaaagtcaatggatcccacgaagccaatatgttaagtgttttggaaatatttgctgtgtctcaggggattgtaggaatacgaggagttttcagcaacaaatttttagcgatgtcaaaaaaaggaaaactccatgcaagtgccaagttcacagatgactgcaagttcagggagcgttttcaagaaaatagctataatacctatgcctcagcaatacatagaactgaaaaaacagggcgggagtggtatgtggccctgaataaaagaggaaaagccaaacgagggtgcagcccccgggttaaaccccagcatatctctacccattttctgccaagattcaagcagtcggagcagccagaactttctttcacggttactgttcctgaaaagaaaaagccacctagccctatcaagccaaagattcccctttctgcacctcggaaaaataccaactcagtgaaatacagactcaagtttcgctttggataatattcctcttggccttgtgagaaaccattctttcccctcaggagtttctataggtgtcttcagagttctgaagaaaaattactggacacagcttcagctatacttacactgtattgaagtcacgtcatttgtttcaatgtgactgaaacaaaatgttttttgataggaaggaaactggaattctttgtactaatacagggagcacactccttcagttcagcaagacataaagccttttgctttatgcttgagggatatttagaactttgtattttcggaaagttaaataacagggactacgtatttttctgacttttacagattaacctgaaagaacatacatgatacatttttatttttggtttccaaagaatattttgatgcagataaaatattttgttaacttttgtttttttttgtttgttttcttaaaagtacctctgcattgagcatattttcttacttttattattttaattaatatgacataagcaatcattttatgctgtttatgaattataaatgtgtttatagctcatttgtaatatggaaatcttttacatttttcctattcactgcacttttttattgtttttatttctagccatacctcagataatatgtttagttttacattttaaaatgtttaaattctctttcacagcaccaaaggctcagcttggatttgtgtgtatgtgtatgtcaattcatgacattatgtggaatcctaaacctttggtggctgggatatgatgggttagaagcaaggagaaaatataaggactttttgatggaattaaatgtgggaggtaaggaaaaggatttagaggtaaaagtacactaagtttgcaacatttattgagatctaagtctgtcttgccttcatttctctttttatctcccccttgccctcattcttgaacagctggaggaatacattttattctgtccatgaagcatacactatgaaattcaagtgcttaaaaatacttctatgactctctgctatcccactgtatagatccacagggagcaaacacttagaaatgatagagaactgaaggagatcaatggtttaacagttatccatgccaagtcccattgtcagaaatattcttattactcagtcaaacactctttgagcttcccttcctaaaggtaaccattccagtgaatagatgtgcccttttataaggaaacttctgatgtttattaaaaaaactggccttttgatagaggtaacttaatttgggaatttgttgtgttgaaatggcatttaatttcaacctaaatactgactgctggacataaatcacagaaaatttaacttaagaaaatttacaaaatttattctcaggtaatcattttaataaagttctgcaaaatacacgtttatcttacattcagaaatgtggcaaaaaaggcatagctaaaggctaaacatatggctttagtagtaacaaaagggttcatagaaacttcatggtttgcatttaaacatgtttaaagtgtacttataaactatttttttcttaaagcaaactatgatttattttggtgcacaaatacaaagtggaaacttaccaaaattgaactagctaccatataagcagattgctttaatttgatgggaaaatagtacacacatatatataacaaataatatattaaaaaacccatccatcaactaaaacattatatgtatacatcagtatagtgttttattataaagccaattatctgattaagcattctttccactgaatgcataatgtttaaatagcataaaatgaaatgctacaaaaattgaactaatttatactttaaagtatttctgggttaaatgaaacaatgaaattttttagtatgttcaactctcatccaaatggcatatgaccctgtttacacagcctaaagctaaaaatattactctagtttattctaatctattgttaagtattgtgcactgtataccaagttcttagggcacatgaaaaattttagctgccaaacaggaactagtaaacatatgttcctaataagtgaagggaaagataataatgatggtcaacaataagccacgtcaatgcataagttgtataggctaaatgttgcttgtaggctacattaaactcaaatgtaatagttatcttatactcctggtttgatttgattagcatattaacgtgaaagtaggatagctactaaatatatattatgcaagtcaggaatcattaatttcaaaatttaaagccatgctaaaattaaaaagaaaatattaaattacacaattacacttgtctttactggccatacaaaatgattttttttttttttttgagacagagtcttgctctgtcaccaggctggagtgcagtggcatgatctcggctcactgcaacctccaactccctggtttaagggattctcctgcctcagcctcccaagtagctgggattacagactcatgccaccacgccagctaatttttgtatttttagtagagacggggtttcaccatgttggtcaggatggtctcaatcctggcctcttgatagtcctgacctcatgatctgcccacctcggcctccccaaagtgctgggattacaggtacaatgatgtataattaatgcttagtgaagcataaagttacctacatcaattaattaaatgaacttatgtacagaaaacatgtataaatataagtctatactaatgcttacaactttctaagagggttcttgcttatgtagctttttattattttaagtaactagaaccaccaaatatcaaataaaattatttggttatggttatgttcatctaaacacaacaataacttttatattaatatttaggagtctattttgtctataggtgacaaacatctccagactaacatgtcagttttatcaattatattatgtttaattatttaagatttctttatgtggaacatctatagagataaatagaaattttcaataagatgtagtaacactgtgatttatctttcaagagtctctcttcacttccttctaaagagactaatttgagagtacaggtgcatattaattttcttggttctttcagctgaattatattggtccagaagttcaaaatcatgtgacaataataagggatactgacagaagttatttccaagtttgtgtatatattataaaaattacatatataaaactaaggcttttatttctgttatttttaagcttttatttcttgtagctaaaaataaaacatcataaatcttcttattaaatcaatcttgtaaatagaaaatgtaataactttcttaccattaacatttttttacccttccatagaagggagggaataaatcatgacttatcccattttcaataacaaaacgaactatggcactaaccaaaaacttgcattctggcataatttttacagttgcagagaattgtttctgggctcattaaaaaaagtagtattgcagacattgctgcaatgggaagcagacaataacttcttaaaggaattctacacctcctttaagatttacttaattgctacatctaaattctgataatttaaaatccattttaggtgataaaattttttaaaagttttgaaggaaacctctggataaatggacaaggcctaatttttttttgtagtcaatccaactgtactggccaatttttgaaataagattatatgattaggtattagcagagacaaagagttacctcctccatcttactctgccctatttgaaagtctcaggggagaaaagggaacaagatgctgatccaacctgagtggagtcaggtgaggcatctttacatctaagaatttttttttaaattttattattattatacttcaagttctagggtacatgtccacaatgcacatgtctgtcacacatgcacacatgtgccatgctggtgtgctgcacccaccaacctgtcatccagcattaggtatatctcctaatgctatccctcccctctccacccaccccacagcaggccccggtatgtgatgttccccttcgtgtgtccatgtgttcttattgttcaattcccacctatgagtgagaatatgtggtgtttggtttttggtccttgcaacagtttgctgagaatgatggtttccagcttcatccatgtccctacaaagaacatgaactcatcattttttatggctgcatagtattccatggtgtatatgtgccacattttcttaatccagtctatcattgttggacatttgggttggttccaagtctttgctattgtgaatagtgctgcaataaacatatgtgtg

SEQ ID NO: 71450 - DNA, 1877 bp, Homo sapiens
  misc_feature (24)..(24): n is a, c, g, or t
tggattacttggccaggcgtggtngctcatgcctgtaaatcccagtagtttgggaggccgaggtgagtggataacatgttggtcaggatggtctcaatcctggcctcttgatagtcctgacctcatgatctgcccacctcggcctccccaaagtgctgggattacaggtacaatgatgtataattaatgcttagtgaagcataaagttacctacatcaattaattaaatgaacttatgtacagaaaacatgtataaatataagtctatactaatgcttacaactttctaagagggttcttgcttatgtagctttttattattttaagtaactagaaccaccaaatatcaaataaaattatttggttatggttatgttcatctaaacacaacaataacttttatattaatatttaggagtctattttgtctataggtgacaaacatctccagactaacatgtcagttttatcaattatattatgtttaattatttaagatttctttatgtggaacatctatagagataaatagaaattttcaataagatgtagtaacactgtgatttatctttcaagagtctctcttcacttccttctaaagagactaatttgagagtacaggtgcatattaattttcttggttctttcagctgaattatattggtccagaagttcaaaatcatgtgacaataataagggatactgacagaagttatttccaagtttgtgtatatattataaaaattacatatataaaactaaggcttttatttctgttatttttaagcttttatttcttgtagctaaaaataaaacatcataaatcttcttattaaatcaatcttgtaaatagaaaatgtaataactttcttaccattaacatttttttacccttccatagaagggagggaataaatcatgacttatcccattttcaataacaaaacgaactatggcactaaccaaaaacttgcattctggcataatttttacagttgcagagaattgtttctgggctcattaaaaaaagtagtattgcagacattgctgcaatgggaagcagacaataacttcttaaaggaattctacacctcctttaagatttacttaattgctacatctaaattctgataatttaaaatccattttaggtgataaaattttttaaaagttttgaaggaaacctctggataaatggacaaggcctaatttttttttgtagtcaatccaactgtactggccaatttttgaaataagattatatgattaggtattagcagagacaaagagttacctcctccatcttactctgccctatttgaaagtctcaggggagaaaagggaacaagatgctgatccaacctgagtggagtcaggtgaggcatctttacatctaagaatttttttttaaattttattattattatacttcaagttctagggtacatgtccacaatgcacatgtctgtcacacatgcacacatgtgccatgctggtgtgctgcacccaccaacctgtcatccagcattaggtatatctcctaatgctatccctcccctctccacccaccccacagcaggccccggtatgtgatgttccccttcgtgtgtccatgtgttcttattgttcaattcccacctatgagtgagaatatgtggtgtttggtttttggtccttgcaacagtttgctgagaatgatggtttccagcttcatccatgtccctacaaagaacatgaactcatcattttttatggctgcatagtattccatggtgtatatgtgccacattttcttaatccagtctatcattgttggacatttgggttggttccaagtctttgctattgtgaatagtgctgcaataaacatatgtgtg

SEQ ID NO: 71451 - DNA, 5261 bp, Homo sapiens
ggggaagcttcgcaggcgtgcacggagcagtgagatcactggcgttataaatatcccggtgccagcgcggagatccgctcgggtggcctctctcttcccctctccccttctcttccccgaggctatgtccacccggtgcggcgaggcgggcagagccagaggcacgcagccgcacaggggctacagagcccagaatcagccctacaagatgcacttaggacccccgcggctggaagaatgagcttgtccttcctcctcctcctcttcttcagccacctgatcctcagcgcctgggctcacggggagaagcgtctcgcccccaaagggcaacccggacccgctgccactgataggaaccctagaggctccagcagcagacagagcagcagtagcgctatgtcttcctcttctgcctcctcctcccccgcagcttctctgggcagccaaggaagtggcttggagcagagcagtttccagtggagcccctcggggcgccggaccggcagcctctactgcagagtgggcatcggtttccatctgcagatctacccggatggcaaagtcaatggatcccacgaagccaatatgttaagccaagttcacagatgactgcaagttcagggagcgttttcaagaaaatagctataatacctatgcctcagcaatacatagaactgaaaaaacagggcgggagtggtatgtggccctgaataaaagaggaaaagccaaacgagggtgcagcccccgggttaaaccccagcatatctctacccattttctgccaagattcaagcagtcggagcagccagaactttctttcacggttactgttcctgaaaagaaaaagccacctagccctatcaagccaaagattcccctttctgcacctcggaaaaataccaactcagtgaaatacagactcaagtttcgctttggataatattcctcttggccttgtgagaaaccattctttcccctcaggagtttctataggtgtcttcagagttctgaagaaaaattactggacacagcttcagctatacttacactgtattgaagtcacgtcatttgtttcaatgtgactgaaacaaaatgttttttgataggaaggaaactggaattctttgtactaatacagggagcacactccttcagttcagcaagacataaagccttttgctttatgcttgagggatatttagaactttgtattttcggaaagttaaataacagggactacgtatttttctgacttttacagattaacctgaaagaacatacatgatacatttttatttttggtttccaaagaatattttgatgcagataaaatattttgttaacttttgtttttttttgtttgttttcttaaaagtacctctgcattgagcatattttcttacttttattattttaattaatatgacataagcaatcattttatgctgtttatgaattataaatgtgtttatagctcatttgtaatatggaaatcttttacatttttcctattcactgcacttttttattgtttttatttctagccatacctcagataatatgtttagttttacattttaaaatgtttaaattctctttcacagcaccaaaggctcagcttggatttgtgtgtatgtgtatgtcaattcatgacattatgtggaatcctaaacctttggtggctgggatatgatgggttagaagcaaggagaaaatataaggactttttgatggaattaaatgtgggaggtaaggaaaaggatttagaggtaaaagtacactaagtttgcaacatttattgagatctaagtctgtcttgccttcatttctctttttatctcccccttgccctcattcttgaacagctggaggaatacattttattctgtccatgaagcatacactatgaaattcaagtgcttaaaaatacttctatgactctctgctatcccactgtatagatccacagggagcaaacacttagaaatgatagagaactgaaggagatcaatggtttaacagttatccatgccaagtcccattgtcagaaatattcttattactcagtcaaacactctttgagcttcccttcctaaaggtaaccattccagtgaatagatgtgcccttttataaggaaacttctgatgtttattaaaaaaactggccttttgatagaggtaacttaatttgggaatttgttgtgttgaaatggcatttaatttcaacctaaatactgactgctggacataaatcacagaaaatttaacttaagaaaatttacaaaatttattctcaggtaatcattttaataaagttctgcaaaatacacgtttatcttacattcagaaatgtggcaaaaaaggcatagctaaaggctaaacatatggctttagtagtaacaaaagggttcatagaaacttcatggtttgcatttaaacatgtttaaagtgtacttataaactatttttttcttaaagcaaactatgatttattttggtgcacaaatacaaagtggaaacttaccaaaattgaactagctaccatataagcagattgctttaatttgatgggaaaatagtacacacatatatataacaaataatatattaaaaaacccatccatcaactaaaacattatatgtatacatcagtatagtgttttattataaagccaattatctgattaagcattctttccactgaatgcataatgtttaaatagcataaaatgaaatgctacaaaaattgaactaatttatactttaaagtatttctgggttaaatgaaacaatgaaattttttagtatgttcaactctcatccaaatggcatatgaccctgtttacacagcctaaagctaaaaatattactctagtttattctaatctattgttaagtattgtgcactgtataccaagttcttagggcacatgaaaaattttagctgccaaacaggaactagtaaacatatgttcctaataagtgaagggaaagataataatgatggtcaacaataagccacgtcaatgcataagttgtataggctaaatgttgcttgtaggctacattaaactcaaatgtaatagttatcttatactcctggtttgatttgattagcatattaacgtgaaagtaggatagctactaaatatatattatgcaagtcaggaatcattaatttcaaaatttaaagccatgctaaaattaaaaagaaaatattaaattacacaattacacttgtctttactggccatacaaaatgattttttttttttttttgagacagagtcttgctctgtcaccaggctggagtgcagtggcatgatctcggctcactgcaacctccaactccctggtttaagggattctcctgcctcagcctcccaagtagctgggattacagactcatgccaccacgccagctaatttttgtatttttagtagagacggggtttcaccatgttggtcaggatggtctcaatcctggcctcttgatagtcctgacctcatgatctgcccacctcggcctccccaaagtgctgggattacaggtacaatgatgtataattaatgcttagtgaagcataaagttacctacatcaattaattaaatgaacttatgtacagaaaacatgtataaatataagtctatactaatgcttacaactttctaagagggttcttgcttatgtagctttttattattttaagtaactagaaccaccaaatatcaaataaaattatttggttatggttatgttcatctaaacacaacaataacttttatattaatatttaggagtctattttgtctataggtgacaaacatctccagactaacatgtcagttttatcaattatattatgtttaattatttaagatttctttatgtggaacatctatagagataaatagaaattttcaataagatgtagtaacactgtgatttatctttcaagagtctctcttcacttccttctaaagagactaatttgagagtacaggtgcatattaattttcttggttctttcagctgaattatattggtccagaagttcaaaatcatgtgacaataataagggatactgacagaagttatttccaagtttgtgtatatattataaaaattacatatataaaactaaggcttttatttctgttatttttaagcttttatttcttgtagctaaaaataaaacatcataaatcttcttattaaatcaatcttgtaaatagaaaatgtaataactttcttaccattaacatttttttacccttccatagaagggagggaataaatcatgacttatcccattttcaataacaaaacgaactatggcactaaccaaaaacttgcattctggcataatttttacagttgcagagaattgtttctgggctcattaaaaaaagtagtattgcagacattgctgcaatgggaagcagacaataacttcttaaaggaattctacacctcctttaagatttacttaattgctacatctaaattctgataatttaaaatccattttaggtgataaaattttttaaaagttttgaaggaaacctctggataaatggacaaggcctaatttttttttgtagtcaatccaactgtactggccaatttttgaaataagattatatgattaggtattagcagagacaaagagttacctcctccatcttactctgccctatttgaaagtctcaggggagaaaagggaacaagatgctgatccaacctgagtggagtcaggtgaggcatctttacatctaagaatttttttttaaattttattattattatacttcaagttctagggtacatgtccacaatgcacatgtctgtcacacatgcacacatgtgccatgctggtgtgctgcacccaccaacctgtcatccagcattaggtatatctcctaatgctatccctcccctctccacccaccccacagcaggccccggtatgtgatgttccccttcgtgtgtccatgtgttcttattgttcaattcccacctatgagtgagaatatgtggtgtttggtttttggtccttgcaacagtttgctgagaatgatggtttccagcttcatccatgtccctacaaagaacatgaactcatcattttttatggctgcatagtattccatggtgtatatgtgccacattttcttaatccagtctatcattgttggacatttgggttggttccaagtctttgctattgtgaatagtgctgcaataaacatatgtgtg

SEQ ID NO: 71452 - DNA, 3265 bp, Homo sapiens
tccgctcgtcgacgggcctcgagcgaaacgataacagcaaccagagctccatcgcagatgcctcccccatcaaacaggagaacagcagcaactccagccccgctccagagcccaactcggctgtgcccagcgacggcaccgaggccaaggtggatgaggcccaggctgatgggaaggagcacccaggagctgaagatgcttctgatgagcagaattcacagtcctcgatggaacattcgatgaacagctcagagaaagtagatcggcagccgtctggagactcgggtctggccgcagagacgtctgcaatctctcaggatctggaaggagtgccaccctctaaaaagatgaaactggaggcctctcaacaaaactccgaagagatgtagacgatgctttaaagcctccgatccatgttccatggaaggtacatcagcaattaattctagagcaactttgccccagcgattcctcttgggtgcgaacagaactactaacgtttcaagtttaccaagtgcaaatccaagaagacccagaacggcgtcacttctcagacactgaagaactctgctgtgaagcaaaacactcaaacctttaagggactgtccttggggaggcaggcggggctgacagctcaggagtgtctgcacactgtctcggaagccaggattccatttgtgttgctgctgtattttccccccacttctctatgtaacgatataagctatcggagggtggtaccgatcaggaacgctttttggcggggctttccactgttcaaccgattccttccgctttctttttttgtgccttgtgcccttgaggtgacctctggcatgtatcctggtggttcttacatccccctctgcaaagtgccctcttggtttggttcgggcggcggctgccaccctactcaccgctctcctccctgccccaggacttcatcggagcaggcagggtggagcgaaggagctccttagcccacctggtttgcaggtgcagggggaccttaggcacgccccaagcaccaggcaccagggcccaaggacgcgcaggtgttggggcacagtccccaagggctcggccccttggatcaggctgggcactcgctgtgctctcccctccttggggcgtttaggactgggcgtctccaagcccaccatggcccagatggacgtgcaaagcccttggaattttctggcacttcctctctattgcccccaccaccaccacccccatcactgctttctcccagacctccgaatacgaaatggcttctctggctgactgcaaggctgtctccttaaggcactgagtgggccggggaggctgggagccggcggcaggattagctggtgctgaactttctctcataggacgtcgcttggatttcaaatccacggtcacctgctgccctttgcctcccccgacgccccagcctgtgccccggagaggcaggatcgcagtggtcagaatccacgtgctttcctattctcaggctgttctgactctgagccaacagctggaccgtgtctcatccccagaacatgccgtctgtccaccggggagtggccttgatggccggcctcgaaggccacaaacaaggcgtcgaggaattggaaagatttgcacaccctccagaaaggagagacgcaatctcccctccctcccatcccccaccttcgctggaacagcttcctctcactgaacggagacgcccccttggacgaactgcctaatcgtttggttctgaggcctggtttgctcttaattaatatatgaactcctcagaccttaaaccttttcctaagctttctttactgcactggagttctgactccctttgagttgtgtgttactgggggtggggtggggtcatgggttttgttgtttttgggggctaattggtgcatattcaggtaccacctttgacgtgtggctctttctcctgaccatcatgggaagtgtctgctggattccattttctaagagtttctgagggtgaggctcttattttttttttaagggatcctgtctatttcctgcacttcgagaagaatcaaaatgttcctgaatttcaaatacctcatgcaaaatgtgtctcctgaaataagggaaaaaaaaaaaaaaccacaactttgaaaatcttaatgttgaagttagcaatgccgaaaggtttctgtcttaaaaaaaaaaaatccttgtacttatcaattttgccccttaggcagtcagttttgttgagaactgtgtcctgcatcctggcgcagaacctcctgatgcggttcctctccacgcatctcgaggcggcgttacctccagattccgtagagttagagtcacatttttctttgcagcgaaactccgtcttggtgagagatgaatttggatatttatttccttctctgtttttgggaaacgagaggctacaaccaagacagctgaaggagaatgaaacacacatccacagaaacagagaggcgtaggtggccctgccgttgaccgcagcctctctggacaggcaaggggagttggcgcaggtgaggactcagacgacgtccaccgtcccaaggctgtcactagtatttctctgaagtgcctgaaggtaggaatgggccggcgattgggaccagctgggccccaccacggccacgccaggcaaagcgccagcagccctgcactccacgctggccaagaaggccttccacgcagaatgacaagactgcaaaaatccgatgtgcttccttccctggcgcagtcgctcctcgagccgctgccccccacccaccctgcacccctcgccctcccccccaccacagaatctaagacctttcagcttcgagccagggggcgggggatcccgagcaaaagccttccatggacatcaggccccgtggcctcaagggctcccagggcaaacctaattcccccaaaacgtgaagtcggggaagctgcggctacacattccacaaagtgctggcacttacacccacaacccggaaggctgtggaccgattcctctagggtggtgacctcccattagcaaacggtgtcatggtttggaatgttcattatcgccaagaacctggttagaggcataaagaccttttttcaccgttacctaattttttcccctttcaagaattttttttttttttggtgtgttgtacagcagtataatttttcacttatttattcctacagtagatatggtttgtacaatgtacaattgtttcatttcagaaaataaaaatttcaaatcatg

SEQ ID NO: 71453 - DNA, 5824 bp, Homo sapiens
tttgtcctactgttcttttattcccacggttttacccctgctctttgttcgatattttgtatatcgtctttccttcattttgcgggtgtgccgtgctggtgtctttacccccctgtttgtcactcgactatttctgggtcatccgttctccatctcttttagttccccacgtgttcgccccgttgtgtcttataccctcttttttgttcgcggtctcttggttttttggtggtgccttgtgggtgttttgttcgttttttctttgcttttttcttgagacttccgtgttttgctctgttgcccaggctggagtgcaatggcatgatcattgcacctctgcctcccaggttcaagcattttcctgcctcagcctcccgcgtagctcagattacaggcctgcaccaccacgcccagctaatttttgtatttttagtagagacagggtttctccatgttggccaggctggtctcgaactcctgacctcgtgatctgcccacttcggcctccaaagtgctgggattacaggcatgaaccaccgcgcccggccttttttttttttctgagacagggtctcactctgtctcccaggctggagtgcagtggctggatctctgctcactgcaacctccgtctcccaggttcaagcgagtctcctgcctcagactcccgagtagctgcgattacaggagcccaccaccgcgcccggctaatttttgtatttttagtagagacggggtttcacccaccatgttggccaggctggtatcgaactcttaacctcaagtgatccacccgcctcggcctcccaaagtgctggtattacaggcatgagccaccgcgcccggccagtatttgttcttttcttcatttttcacgtcaggagactgcgtttcagaatagtaaaaacaaatgcctaggaaaaggcctgcggtctctccatttccacagtagcgtgttccccaaagaccaaaccctcaggggaaacgtctagaatgagtaacaacttaaggctgcaaccttaaactttcccaggactcagtttccccagctgtgaaatggctgctgtcgggctgtcatctccaggcccggggcgctgacatttgggccactctcggtctccctcttcattctgggcgcgcattagctctggtccggccggttccgctgcagctgaacagcaagatgcggcacccaggttaccctgatcatcgcagatttctccccggggctctgttctgaggcctcaaaagtgctccttgtagatgggaccaggggtcatttgggcagtagcagcgcctggtctcagtctggtactgaagtcaggaatggcttaaggtgaaatcgtggtcctctggtgaagctcagcgaagaccccctcgccttgtttatgacaagagaacttctgggggcgggaggaagagtccctgttacgatgctgatcatcattgagcttttgctgagaaaactctttagtactaaggtcgagagtctctgtggtctgcctggcaccagcaccttcctacaaccctagttttccaaaaggaaaagcctggggccaggcgacgtcctagctcgcattatgacagggccgcgggccaccagagatgcgcgatgcccaactctttccaagagcacctcgcgtcccgaaccggtgccttcaactcggagaagtcaagagacccgcaagaaacttgcacgactgcacccgccgccgcgctgctgggggctgggcaggggcagctgggctggctcccggggagacgcgacccccccgcgccccgcagaccggctgtctcccatggacccctcggcacctgcagctccgaggaagggtcagcgcgcgtgtccgcaccccgcccccaccgcgcgcccagagccgggggtcgccgtggcccttcgccacctccccaggagggcgtccggggcgtcccctctgggcgacgcgaggcccggggggctgcggtggccgcggcgcggagccgcactccggcggcggcggcggcgcggctccccctgctctgtgcagctgccgcccgggcttgcgctgggccaggcgcgcggcggccccgggctttgtgtgtgtgtatgtgtgtgtgtgtgtgtgtgtgtgtgtgtgagagtgtgtgcgtgtgagagtgcgagtgtctgtgcgcgagtgagtgagcggcgggcgggcgcgagtgtggccgccgcggagcgcgagcaggacccggcgggcgcgctccccagcctccgtctccccgccggaaccatgtcgggcaggtcggttcgagccgagacgaggagccgggccaaagatgatatcaagagggtcatggcggcgatcgagaaagtgcgcaaatgggagaagaaatgggtgaccgttggtgacacatccctacgaatctacaaatgggtccctgtgacggagcccaaggttgatgacaaaaacaagaataagaaaaaaggcaaggacgagaagtgtggctcagaggtgaccactccggagaacagttcctccccagggatgatggacatgcatgacgataacagcaaccagagctccatcgcagatgcctcccccatcaaacaggagaacagcagcaactccagccccgctccagagcccaactcggctgtgcccagcgacggcaccgaggccaaggtggatgaggcccaggctgatgggaaggagcacccaggagctgaagatgcttctgatgagcagaattcacagtcctcgatggaacattcgatgaacagctcagagaaagtagatcggcagccgtctggagactcgggtctggccgcagagacgtctgcaatctctcaggtacctcgctcgaggtctcagaggggcagccagatcggccgggagcccattgggttgtcgggggatctggaaggagtgccaccctctaaaaagatgaaactggaggcctctcaacaaaactccgaagagatgtagacgatgctttaaagcctccgatccatgttccatggaaggtacatcagcaattaattctagagcaactttgccccagcgattcctcttgggtgcgaacagaactactaacgtttcaagtttaccaagtgcaaatccaagaagacccagaacggcgtcacttctcagacactgaagaactctgctgtgaagcaaaacactcaaacctttaagggactgtccttggggaggcaggcggggctgacagctcaggagtgtctgcacactgtctcggaagccaggattccatttgtgttgctgctgtattttccccccacttctctatgtaacgatataagctatcggagggtggtaccgatcaggaacgctttttggcggggctttccactgttcaaccgattccttccgctttctttttttgtgccttgtgcccttgaggtgacctctggcatgtatcctggtggttcttacatccccctctgcaaagtgccctcttggtttggttcgggcggcggctgccaccctactcaccgctctcctccctgccccaggacttcatcggagcaggcagggtggagcgaaggagctccttagcccacctggtttgcaggtgcagggggaccttaggcacgccccaagcaccaggcaccagggcccaaggacgcgcaggtgttggggcacagtccccaagggctcggccccttggatcaggctgggcactcgctgtgctctcccctccttggggcgtttaggactgggcgtctccaagcccaccatggcccagatggacgtgcaaagcccttggaattttctggcacttcctctctattgcccccaccaccaccacccccatcactgctttctcccagacctccgaatacgaaatggcttctctggctgactgcaaggctgtctccttaaggcactgagtgggccggggaggctgggagccggcggcaggattagctggtgctgaactttctctcataggacgtcgcttggatttcaaatccacggtcacctgctgccctttgcctcccccgacgccccagcctgtgccccggagaggcaggatcgcagtggtcagaatccacgtgctttcctattctcaggctgttctgactctgagccaacagctggaccgtgtctcatccccagaacatgccgtctgtccaccggggagtggccttgatggccggcctcgaaggccacaaacaaggcgtcgaggaattggaaagatttgcacaccctccagaaaggagagacgcaatctcccctccctcccatcccccaccttcgctggaacagcttcctctcactgaacggagacgcccccttggacgaactgcctaatcgtttggttctgaggcctggtttgctcttaattaatatatgaactcctcagaccttaaaccttttcctaagctttctttactgcactggagttctgactccctttgagttgtgtgttactgggggtggggtggggtcatgggttttgttgtttttgggggctaattggtgcatattcaggtaccacctttgacgtgtggctctttctcctgaccatcatgggaagtgtctgctggattccattttctaagagtttctgagggtgaggctcttattttttttttaagggatcctgtctatttcctgcacttcgagaagaatcaaaatgttcctgaatttcaaatacctcatgcaaaatgtgtctcctgaaataagggaaaaaaaaaaaaaaccacaactttgaaaatcttaatgttgaagttagcaatgccgaaaggtttctgtcttaaaaaaaaaaaatccttgtacttatcaattttgccccttaggcagtcagttttgttgagaactgtgtcctgcatcctggcgcagaacctcctgatgcggttcctctccacgcatctcgaggcggcgttacctccagattccgtagagttagagtcacatttttctttgcagcgaaactccgtcttggtgagagatgaatttggatatttatttccttctctgtttttgggaaacgagaggctacaaccaagacagctgaaggagaatgaaacacacatccacagaaacagagaggcgtaggtggccctgccgttgaccgcagcctctctggacaggcaaggggagttggcgcaggtgaggactcagacgacgtccaccgtcccaaggctgtcactagtatttctctgaagtgcctgaaggtaggaatgggccggcgattgggaccagctgggccccaccacggccacgccaggcaaagcgccagcagccctgcactccacgctggccaagaaggccttccacgcagaatgacaagactgcaaaaatccgatgtgcttccttccctggcgcagtcgctcctcgagccgctgccccccacccaccctgcacccctcgccctcccccccaccacagaatctaagacctttcagcttcgagccagggggcgggggatcccgagcaaaagccttccatggacatcaggccccgtggcctcaagggctcccagggcaaacctaattcccccaaaacgtgaagtcggggaagctgcggctacacattccacaaagtgctggcacttacacccacaacccggaaggctgtggaccgattcctctagggtggtgacctcccattagcaaacggtgtcatggtttggaatgttcattatcgccaagaacctggttagaggcataaagaccttttttcaccgttacctaattttttcccctttcaagaattttttttttttttggtgtgttgtacagcagtataatttttcacttatttattcctacagtagatatggtttgtacaatgtacaattgtttcatttcagaaaataaaaatttcaaatcatg

SEQ ID NO: 71454 - DNA, 3010 bp, Homo sapiens
tttgtcctactgttcttttattcccacggttttacccctgctctttgttcgatattttgtatatcgtctttccttcattttgcgggtgtgccgtgctggtgtctttacccccctgtttgtcactcgactatttctgggtcatccgttctccatctcttttagttccccacgtgttcgccccgttgtgtcttataccctcttttttgttcgcggtctcttggttttttggtggtgccttgtgggtgttttgttcgttttttctttgcttttttcttgagacttccgtgttttgctctgttgcccaggctggagtgcaatggcatgatcattgcacctctgcctcccaggttcaagcattttcctgcctcagcctcccgcgtagctcagattacaggcctgcaccaccacgcccagctaatttttgtatttttagtagagacagggtttctccatgttggccaggctggtctcgaactcctgacctcgtgatctgcccacttcggcctccaaagtgctgggattacaggcatgaaccaccgcgcccggccttttttttttttctgagacagggtctcactctgtctcccaggctggagtgcagtggctggatctctgctcactgcaacctccgtctcccaggttcaagcgagtctcctgcctcagactcccgagtagctgcgattacaggagcccaccaccgcgcccggctaatttttgtatttttagtagagacggggtttcacccaccatgttggccaggctggtatcgaactcttaacctcaagtgatccacccgcctcggcctcccaaagtgctggtattacaggcatgagccaccgcgcccggccagtatttgttcttttcttcatttttcacgtcaggagactgcgtttcagaatagtaaaaacaaatgcctaggaaaaggcctgcggtctctccatttccacagtagcgtgttccccaaagaccaaaccctcaggggaaacgtctagaatgagtaacaacttaaggctgcaaccttaaactttcccaggactcagtttccccagctgtgaaatggctgctgtcgggctgtcatctccaggcccggggcgctgacatttgggccactctcggtctccctcttcattctgggcgcgcattagctctggtccggccggttccgctgcagctgaacagcaagatgcggcacccaggttaccctgatcatcgcagatttctccccggggctctgttctgaggcctcaaaagtgctccttgtagatgggaccaggggtcatttgggcagtagcagcgcctggtctcagtctggtactgaagtcaggaatggcttaaggtgaaatcgtggtcctctggtgaagctcagcgaagaccccctcgccttgtttatgacaagagaacttctgggggcgggaggaagagtccctgttacgatgctgatcatcattgagcttttgctgagaaaactctttagtactaaggtcgagagtctctgtggtctgcctggcaccagcaccttcctacaaccctagttttccaaaaggaaaagcctggggccaggcgacgtcctagctcgcattatgacagggccgcgggccaccagagatgcgcgatgcccaactctttccaagagcacctcgcgtcccgaaccggtgccttcaactcggagaagtcaagagacccgcaagaaacttgcacgactgcacccgccgccgcgctgctgggggctgggcaggggcagctgggctggctcccggggagacgcgacccccccgcgccccgcagaccggctgtctcccatggacccctcggcacctgcagctccgaggaagggtcagcgcgcgtgtccgcaccccgcccccaccgcgcgcccagagccgggggtcgccgtggcccttcgccacctccccaggagggcgtccggggcgtcccctctgggcgacgcgaggcccggggggctgcggtggccgcggcgcggagccgcactccggcggcggcggcggcgcggctccccctgctctgtgcagctgccgcccgggcttgcgctgggccaggcgcgcggcggccccgggctttgtgtgtgtgtatgtgtgtgtgtgtgtgtgtgtgtgtgtgtgagagtgtgtgcgtgtgagagtgcgagtgtctgtgcgcgagtgagtgagcggcgggcgggcgcgagtgtggccgccgcggagcgcgagcaggacccggcgggcgcgctccccagcctccgtctccccgccggaaccatgtcgggcaggtcggttcgagccgagacgaggagccgggccaaagatgatatcaagagggtcatggcggcgatcgagaaagtgcgcaaatgggagaagaaatgggtgaccgttggtgacacatccctacgaatctacaaatgggtccctgtgacggagcccaaggttgatgacaaaaacaagaataagaaaaaaggcaaggacgagaagtgtggctcagaggtgaccactccggagaacagttcctccccagggatgatggacatgcatggtgagtgcccatggcctgccagcctctcctgcccagcccggggccttggccaagcactcggtcatgtttttgtttctccagcaggtttgttcacattccaggcaaggggtaggagggctgggcagggcccggcggcctctgtgccaaggagaagagtcagcggaggagaggatgtttcttttcccagcgtaccaagccaagagacataaactaagccagagacatagaaattagaccctctcctcacccagggacaagaaccccgcaggagatgtttctctcagcctcgtgtgtccaggaagattgtttgggcgtatgtttcttcgccccctcatataaattatataaatggctgtgtttcccattttgctttggctgctgggaatctccaaactggattttgtttgtttgttttgttttgttttgtttttgagatggagttttgctctgttgaccagcctgggcaagagagtgaggccttgtctcc

SEQ ID NO: 71455 - DNA, 3707 bp, Homo sapiens
ccaagtgcaaatccaagaagacccagaacggcgtcacttctcagacactgaagaactctgctgagagtgtgtgcgtgtgagagtgcgagtgtctgtgcgcgagtgagtgagcggcgggcgggcgcgagtgtggccgccgcggagcgcgagcaggacccggcgggcgcgctccccagcctccgtctccccgccggaaccatgtcgggcaggtcggttcgagccgagacgaggagccgggccaaagatgatatcaagagggtcatggcggcgatcgagaaagtgcgcaaatgggagaagaaatgggtgaccgttggtgacacatccctacgaatctacaaatgggtccctgtgacggagcccaaggttgatgacaaaaacaagaataagaaaaaaggcaaggacgagaagtgtggctcagaggtgaccactccggagaacagttcctccccagggatgatggacatgcatgacgataacagcaaccagagctccatcgcagatgcctcccccatcaaacaggagaacagcagcaactccagccccgctccagagcccaactcggctgtgcccagcgacggcaccgaggccaaggtggatgaggcccaggctgatgggaaggagcacccaggagctgaagatgcttctgatgagcagaattcacagtcctcgatggaacattcgatgaacagctcagagaaagtagatcggcagccgtctggagactcgggtctggccgcagagacgtctgcaatctctcaggatctggaaggagtgccaccctctaaaaagatgaaactggaggcctctcaacaaaactccgaagagatgtagacgatgctttaaagcctccgatccatgttccatggaaggtacatcagcaattaattctagagcaactttgccccagcgattcctcttgggtgcgaacagaactactaacgtttcaagtttaccaagtgcaaatccaagaagacccagaacggcgtcacttctcagacactgaagaactctgctgtgaagcaaaacactcaaacctttaagggactgtccttggggaggcaggcggggctgacagctcaggagtgtctgcacactgtctcggaagccaggattccatttgtgttgctgctgtattttccccccacttctctatgtaacgatataagctatcggagggtggtaccgatcaggaacgctttttggcggggctttccactgttcaaccgattccttccgctttctttttttgtgccttgtgcccttgaggtgacctctggcatgtatcctggtggttcttacatccccctctgcaaagtgccctcttggtttggttcgggcggcggctgccaccctactcaccgctctcctccctgccccaggacttcatcggagcaggcagggtggagcgaaggagctccttagcccacctggtttgcaggtgcagggggaccttaggcacgccccaagcaccaggcaccagggcccaaggacgcgcaggtgttggggcacagtccccaagggctcggccccttggatcaggctgggcactcgctgtgctctcccctccttggggcgtttaggactgggcgtctccaagcccaccatggcccagatggacgtgcaaagcccttggaattttctggcacttcctctctattgcccccaccaccaccacccccatcactgctttctcccagacctccgaatacgaaatggcttctctggctgactgcaaggctgtctccttaaggcactgagtgggccggggaggctgggagccggcggcaggattagctggtgctgaactttctctcataggacgtcgcttggatttcaaatccacggtcacctgctgccctttgcctcccccgacgccccagcctgtgccccggagaggcaggatcgcagtggtcagaatccacgtgctttcctattctcaggctgttctgactctgagccaacagctggaccgtgtctcatccccagaacatgccgtctgtccaccggggagtggccttgatggccggcctcgaaggccacaaacaaggcgtcgaggaattggaaagatttgcacaccctccagaaaggagagacgcaatctcccctccctcccatcccccaccttcgctggaacagcttcctctcactgaacggagacgcccccttggacgaactgcctaatcgtttggttctgaggcctggtttgctcttaattaatatatgaactcctcagaccttaaaccttttcctaagctttctttactgcactggagttctgactccctttgagttgtgtgttactgggggtggggtggggtcatgggttttgttgtttttgggggctaattggtgcatattcaggtaccacctttgacgtgtggctctttctcctgaccatcatgggaagtgtctgctggattccattttctaagagtttctgagggtgaggctcttattttttttttaagggatcctgtctatttcctgcacttcgagaagaatcaaaatgttcctgaatttcaaatacctcatgcaaaatgtgtctcctgaaataagggaaaaaaaaaaaaaaccacaactttgaaaatcttaatgttgaagttagcaatgccgaaaggtttctgtcttaaaaaaaaaaaatccttgtacttatcaattttgccccttaggcagtcagttttgttgagaactgtgtcctgcatcctggcgcagaacctcctgatgcggttcctctccacgcatctcgaggcggcgttacctccagattccgtagagttagagtcacatttttctttgcagcgaaactccgtcttggtgagagatgaatttggatatttatttccttctctgtttttgggaaacgagaggctacaaccaagacagctgaaggagaatgaaacacacatccacagaaacagagaggcgtaggtggccctgccgttgaccgcagcctctctggacaggcaaggggagttggcgcaggtgaggactcagacgacgtccaccgtcccaaggctgtcactagtatttctctgaagtgcctgaaggtaggaatgggccggcgattgggaccagctgggccccaccacggccacgccaggcaaagcgccagcagccctgcactccacgctggccaagaaggccttccacgcagaatgacaagactgcaaaaatccgatgtgcttccttccctggcgcagtcgctcctcgagccgctgccccccacccaccctgcacccctcgccctcccccccaccacagaatctaagacctttcagcttcgagccagggggcgggggatcccgagcaaaagccttccatggacatcaggccccgtggcctcaagggctcccagggcaaacctaattcccccaaaacgtgaagtcggggaagctgcggctacacattccacaaagtgctggcacttacacccacaacccggaaggctgtggaccgattcctctagggtggtgacctcccattagcaaacggtgtcatggtttggaatgttcattatcgccaagaacctggttagaggcataaagaccttttttcaccgttacctaattttttcccctttcaagaattttttttttttttggtgtgttgtacagcagtataatttttcacttatttattcctacagtagatatggtttgtacaatgtacaattgtttcatttcagaaaataaaaatttcaaatcatg

SEQ ID NO: 71456 - DNA, 340 bp, Homo sapiens
taagtgtgcaggagagggttgcagacgccagggtccgtgtgtgacctggctgctggaaacagcgccactgaaaaatcaacaggagactccccagccctccagccccccagctcattgtagccttcaaagaccactggccccaaaactacccgattcaaggtattttcagtatttggccccaccggccccgcctctcacgtgtctgaaaacagctcctgtcgtcttgctcttccctcagatgcttctgatgagcagaattcacagtcctcgatggaacattcgatgaacagctcagagaaagtagatcggcagccgtctggagactcgggtctggccgcag

SEQ ID NO: 71457 - DNA, 5761 bp, Homo sapiens
tttgtcctactgttcttttattcccacggttttacccctgctctttgttcgatattttgtatatcgtctttccttcattttgcgggtgtgccgtgctggtgtctttacccccctgtttgtcactcgactatttctgggtcatccgttctccatctcttttagttccccacgtgttcgccccgttgtgtcttataccctcttttttgttcgcggtctcttggttttttggtggtgccttgtgggtgttttgttcgttttttctttgcttttttcttgagacttccgtgttttgctctgttgcccaggctggagtgcaatggcatgatcattgcacctctgcctcccaggttcaagcattttcctgcctcagcctcccgcgtagctcagattacaggcctgcaccaccacgcccagctaatttttgtatttttagtagagacagggtttctccatgttggccaggctggtctcgaactcctgacctcgtgatctgcccacttcggcctccaaagtgctgggattacaggcatgaaccaccgcgcccggccttttttttttttctgagacagggtctcactctgtctcccaggctggagtgcagtggctggatctctgctcactgcaacctccgtctcccaggttcaagcgagtctcctgcctcagactcccgagtagctgcgattacaggagcccaccaccgcgcccggctaatttttgtatttttagtagagacggggtttcacccaccatgttggccaggctggtatcgaactcttaacctcaagtgatccacccgcctcggcctcccaaagtgctggtattacaggcatgagccaccgcgcccggccagtatttgttcttttcttcatttttcacgtcaggagactgcgtttcagaatagtaaaaacaaatgcctaggaaaaggcctgcggtctctccatttccacagtagcgtgttccccaaagaccaaaccctcaggggaaacgtctagaatgagtaacaacttaaggctgcaaccttaaactttcccaggactcagtttccccagctgtgaaatggctgctgtcgggctgtcatctccaggcccggggcgctgacatttgggccactctcggtctccctcttcattctgggcgcgcattagctctggtccggccggttccgctgcagctgaacagcaagatgcggcacccaggttaccctgatcatcgcagatttctccccggggctctgttctgaggcctcaaaagtgctccttgtagatgggaccaggggtcatttgggcagtagcagcgcctggtctcagtctggtactgaagtcaggaatggcttaaggtgaaatcgtggtcctctggtgaagctcagcgaagaccccctcgccttgtttatgacaagagaacttctgggggcgggaggaagagtccctgttacgatgctgatcatcattgagcttttgctgagaaaactctttagtactaaggtcgagagtctctgtggtctgcctggcaccagcaccttcctacaaccctagttttccaaaaggaaaagcctggggccaggcgacgtcctagctcgcattatgacagggccgcgggccaccagagatgcgcgatgcccaactctttccaagagcacctcgcgtcccgaaccggtgccttcaactcggagaagtcaagagacccgcaagaaacttgcacgactgcacccgccgccgcgctgctgggggctgggcaggggcagctgggctggctcccggggagacgcgacccccccgcgccccgcagaccggctgtctcccatggacccctcggcacctgcagctccgaggaagggtcagcgcgcgtgtccgcaccccgcccccaccgcgcgcccagagccgggggtcgccgtggcccttcgccacctccccaggagggcgtccggggcgtcccctctgggcgacgcgaggcccggggggctgcggtggccgcggcgcggagccgcactccggcggcggcggcggcgcggctccccctgctctgtgcagctgccgcccgggcttgcgctgggccaggcgcgcggcggccccgggctttgtgtgtgtgtatgtgtgtgtgtgtgtgtgtgtgtgtgtgtgagagtgtgtgcgtgtgagagtgcgagtgtctgtgcgcgagtgagtgagcggcgggcgggcgcgagtgtggccgccgcggagcgcgagcaggacccggcgggcgcgctccccagcctccgtctccccgccggaaccatgtcgggcaggtcggttcgagccgagacgaggagccgggccaaagatgatatcaagagggtcatggcggcgatcgagaaagtgcgcaaatgggagaagaaatgggtgaccgttggtgacacatccctacgaatctacaaatgggtccctgtgacggagcccaaggttgatgacaaaaacaagaataagaaaaaaggcaaggacgagaagtgtggctcagaggtgaccactccggagaacagttcctccccagggatgatggacatgcatgacgataacagcaaccagagctccatcgcagatgcctcccccatcaaacaggagaacagcagcaactccagccccgctccagagcccaactcggctgtgcccagcgacggcaccgaggccaaggtggatgaggcccaggctgatgggaaggagcacccaggagctgaagatgcttctgatgagcagaattcacagtcctcgatggaacattcgatgaacagctcagagaaagtagatcggcagccgtctggagactcgggtctggccgcagagacgtctgcaatctctcaggatctggaaggagtgccaccctctaaaaagatgaaactggaggcctctcaacaaaactccgaagagatgtagacgatgctttaaagcctccgatccatgttccatggaaggtacatcagcaattaattctagagcaactttgccccagcgattcctcttgggtgcgaacagaactactaacgtttcaagtttaccaagtgcaaatccaagaagacccagaacggcgtcacttctcagacactgaagaactctgctgtgaagcaaaacactcaaacctttaagggactgtccttggggaggcaggcggggctgacagctcaggagtgtctgcacactgtctcggaagccaggattccatttgtgttgctgctgtattttccccccacttctctatgtaacgatataagctatcggagggtggtaccgatcaggaacgctttttggcggggctttccactgttcaaccgattccttccgctttctttttttgtgccttgtgcccttgaggtgacctctggcatgtatcctggtggttcttacatccccctctgcaaagtgccctcttggtttggttcgggcggcggctgccaccctactcaccgctctcctccctgccccaggacttcatcggagcaggcagggtggagcgaaggagctccttagcccacctggtttgcaggtgcagggggaccttaggcacgccccaagcaccaggcaccagggcccaaggacgcgcaggtgttggggcacagtccccaagggctcggccccttggatcaggctgggcactcgctgtgctctcccctccttggggcgtttaggactgggcgtctccaagcccaccatggcccagatggacgtgcaaagcccttggaattttctggcacttcctctctattgcccccaccaccaccacccccatcactgctttctcccagacctccgaatacgaaatggcttctctggctgactgcaaggctgtctccttaaggcactgagtgggccggggaggctgggagccggcggcaggattagctggtgctgaactttctctcataggacgtcgcttggatttcaaatccacggtcacctgctgccctttgcctcccccgacgccccagcctgtgccccggagaggcaggatcgcagtggtcagaatccacgtgctttcctattctcaggctgttctgactctgagccaacagctggaccgtgtctcatccccagaacatgccgtctgtccaccggggagtggccttgatggccggcctcgaaggccacaaacaaggcgtcgaggaattggaaagatttgcacaccctccagaaaggagagacgcaatctcccctccctcccatcccccaccttcgctggaacagcttcctctcactgaacggagacgcccccttggacgaactgcctaatcgtttggttctgaggcctggtttgctcttaattaatatatgaactcctcagaccttaaaccttttcctaagctttctttactgcactggagttctgactccctttgagttgtgtgttactgggggtggggtggggtcatgggttttgttgtttttgggggctaattggtgcatattcaggtaccacctttgacgtgtggctctttctcctgaccatcatgggaagtgtctgctggattccattttctaagagtttctgagggtgaggctcttattttttttttaagggatcctgtctatttcctgcacttcgagaagaatcaaaatgttcctgaatttcaaatacctcatgcaaaatgtgtctcctgaaataagggaaaaaaaaaaaaaaccacaactttgaaaatcttaatgttgaagttagcaatgccgaaaggtttctgtcttaaaaaaaaaaaatccttgtacttatcaattttgccccttaggcagtcagttttgttgagaactgtgtcctgcatcctggcgcagaacctcctgatgcggttcctctccacgcatctcgaggcggcgttacctccagattccgtagagttagagtcacatttttctttgcagcgaaactccgtcttggtgagagatgaatttggatatttatttccttctctgtttttgggaaacgagaggctacaaccaagacagctgaaggagaatgaaacacacatccacagaaacagagaggcgtaggtggccctgccgttgaccgcagcctctctggacaggcaaggggagttggcgcaggtgaggactcagacgacgtccaccgtcccaaggctgtcactagtatttctctgaagtgcctgaaggtaggaatgggccggcgattgggaccagctgggccccaccacggccacgccaggcaaagcgccagcagccctgcactccacgctggccaagaaggccttccacgcagaatgacaagactgcaaaaatccgatgtgcttccttccctggcgcagtcgctcctcgagccgctgccccccacccaccctgcacccctcgccctcccccccaccacagaatctaagacctttcagcttcgagccagggggcgggggatcccgagcaaaagccttccatggacatcaggccccgtggcctcaagggctcccagggcaaacctaattcccccaaaacgtgaagtcggggaagctgcggctacacattccacaaagtgctggcacttacacccacaacccggaaggctgtggaccgattcctctagggtggtgacctcccattagcaaacggtgtcatggtttggaatgttcattatcgccaagaacctggttagaggcataaagaccttttttcaccgttacctaattttttcccctttcaagaattttttttttttttggtgtgttgtacagcagtataatttttcacttatttattcctacagtagatatggtttgtacaatgtacaattgtttcatttcagaaaataaaaatttcaaatcatg

SEQ ID NO: 71458 - DNA, 2929 bp, Homo sapiens
tttgtcctactgttcttttattcccacggttttacccctgctctttgttcgatattttgtatatcgtctttccttcattttgcgggtgtgccgtgctggtgtctttacccccctgtttgtcactcgactatttctgggtcatccgttctccatctcttttagttccccacgtgttcgccccgttgtgtcttataccctcttttttgttcgcggtctcttggttttttggtggtgccttgtgggtgttttgttcgttttttctttgcttttttcttgagacttccgtgttttgctctgttgcccaggctggagtgcaatggcatgatcattgcacctctgcctcccaggttcaagcattttcctgcctcagcctcccgcgtagctcagattacaggcctgcaccaccacgcccagctaatttttgtatttttagtagagacagggtttctccatgttggccaggctggtctcgaactcctgacctcgtgatctgcccacttcggcctccaaagtgctgggattacaggcatgaaccaccgcgcccggccttttttttttttctgagacagggtctcactctgtctcccaggctggagtgcagtggctggatctctgctcactgcaacctccgtctcccaggttcaagcgagtctcctgcctcagactcccgagtagctgcgattacaggagcccaccaccgcgcccggctaatttttgtatttttagtagagacggggtttcacccaccatgttggccaggctggtatcgaactcttaacctcaagtgatccacccgcctcggcctcccaaagtgctggtattacaggcatgagccaccgcgcccggccagtatttgttcttttcttcatttttcacgtcaggagactgcgtttcagaatagtaaaaacaaatgcctaggaaaaggcctgcggtctctccatttccacagtagcgtgttccccaaagaccaaaccctcaggggaaacgtctagaatgagtaacaacttaaggctgcaaccttaaactttcccaggactcagtttccccagctgtgaaatggctgctgtcgggctgtcatctccaggcccggggcgctgacatttgggccactctcggtctccctcttcattctgggcgcgcattagctctggtccggccggttccgctgcagctgaacagcaagatgcggcacccaggttaccctgatcatcgcagatttctccccggggctctgttctgaggcctcaaaagtgctccttgtagatgggaccaggggtcatttgggcagtagcagcgcctggtctcagtctggtactgaagtcaggaatggcttaaggtgaaatcgtggtcctctggtgaagctcagcgaagaccccctcgccttgtttatgacaagagaacttctgggggcgggaggaagagtccctgttacgatgctgatcatcattgagcttttgctgagaaaactctttagtactaaggtcgagagtctctgtggtctgcctggcaccagcaccttcctacaaccctagttttccaaaaggaaaagcctggggccaggcgacgtcctagctcgcattatgacagggccgcgggccaccagagatgcgcgatgcccaactctttccaagagcacctcgcgtcccgaaccggtgccttcaactcggagaagtcaagagacccgcaagaaacttgcacgactgcacccgccgccgcgctgctgggggctgggcaggggcagctgggctggctcccggggagacgcgacccccccgcgccccgcagaccggctgtctcccatggacccctcggcacctgcagctccgaggaagggtcagcgcgcgtgtccgcaccccgcccccaccgcgcgcccagagccgggggtcgccgtggcccttcgccacctccccaggagggcgtccggggcgtcccctctgggcgacgcgaggcccggggggctgcggtggccgcggcgcggagccgcactccggcggcggcggcggcgcggctccccctgctctgtgcagctgccgcccgggcttgcgctgggccaggcgcgcggcggccccgggctttgtgtgtgtgtatgtgtgtgtgtgtgtgtgtgtgtgtgtgtgagagtgtgtgcgtgtgagagtgcgagtgtctgtgcgcgagtgagtgagcggcgggcgggcgcgagtgtggccgccgcggagcgcgagcaggacccggcgggcgcgctccccagcctccgtctccccgccggaaccatgtcgggcaggtcggttcgagccgagacgaggagccgggccaaagatgatatcaagagggtcatggcggcgatcgagaaagtgcgcaaatgggagaagaaatgggtgaccgttggtgacacatccctacgaatctacaaatgggtccctgtgacggagcccaaggttgatgacaaaaacaagaataagaaaaaaggcaaggacgagaagtgtggctcagaggtgaccactccggagaacagttcctccccagggatgatggacatgcatgcaggtttgttcacattccaggcaaggggtaggagggctgggcagggcccggcggcctctgtgccaaggagaagagtcagcggaggagaggatgtttcttttcccagcgtaccaagccaagagacataaactaagccagagacatagaaattagaccctctcctcacccagggacaagaaccccgcaggagatgtttctctcagcctcgtgtgtccaggaagattgtttgggcgtatgtttcttcgccccctcatataaattatataaatggctgtgtttcccattttgctttggctgctgggaatctccaaactggattttgtttgtttgttttgttttgttttgtttttgagatggagttttgctctgttgaccagcctgggcaagagagtgaggccttgtctcc

SEQ ID NO: 71459 - DNA, 3586 bp, Homo sapiens
gagcgtctagaggatcccgctgctgactactactacccggtgctgcgctccccagcctccgtctccccgccggaaccatgtcgggcaggtcggttcgagccgagacgaggagccgggccaaagatgatatcaagagggtcatggcggcgatcgagaaagtgcgcaaatgggagaagaaatgggtgaccgttggtgacacatccctacgaatctacaaatgggtccctgtgacggagcccaaggttgatgacaaaaacaagaataagaaaaaaggcaaggacgagaagtgtggctcagaggtgaccactccggagaacagttcctccccagggatgatggacatgcatgacgataacagcaaccagagctccatcgcagatgcctcccccatcaaacaggagaacagcagcaactccagccccgctccagagcccaactcggctgtgcccagcgacggcaccgaggccaaggtggatgaggcccaggctgatgggaaggagcacccaggagctgaagatgcttctgatgagcagaattcacagtcctcgatggaacattcgatgaacagctcagagaaagtagatcggcagccgtctggagactcgggtctggccgcagagacgtctgcaatctctcaggatctggaaggagtgccaccctctaaaaagatgaaactggaggcctctcaacaaaactccgaagagatgtagacgatgctttaaagcctccgatccatgttccatggaaggtacatcagcaattaattctagagcaactttgccccagcgattcctcttgggtgcgaacagaactactaacgtttcaagtttaccaagtgcaaatccaagaagacccagaacggcgtcacttctcagacactgaagaactctgctgtgaagcaaaacactcaaacctttaagggactgtccttggggaggcaggcggggctgacagctcaggagtgtctgcacactgtctcggaagccaggattccatttgtgttgctgctgtattttccccccacttctctatgtaacgatataagctatcggagggtggtaccgatcaggaacgctttttggcggggctttccactgttcaaccgattccttccgctttctttttttgtgccttgtgcccttgaggtgacctctggcatgtatcctggtggttcttacatccccctctgcaaagtgccctcttggtttggttcgggcggcggctgccaccctactcaccgctctcctccctgccccaggacttcatcggagcaggcagggtggagcgaaggagctccttagcccacctggtttgcaggtgcagggggaccttaggcacgccccaagcaccaggcaccagggcccaaggacgcgcaggtgttggggcacagtccccaagggctcggccccttggatcaggctgggcactcgctgtgctctcccctccttggggcgtttaggactgggcgtctccaagcccaccatggcccagatggacgtgcaaagcccttggaattttctggcacttcctctctattgcccccaccaccaccacccccatcactgctttctcccagacctccgaatacgaaatggcttctctggctgactgcaaggctgtctccttaaggcactgagtgggccggggaggctgggagccggcggcaggattagctggtgctgaactttctctcataggacgtcgcttggatttcaaatccacggtcacctgctgccctttgcctcccccgacgccccagcctgtgccccggagaggcaggatcgcagtggtcagaatccacgtgctttcctattctcaggctgttctgactctgagccaacagctggaccgtgtctcatccccagaacatgccgtctgtccaccggggagtggccttgatggccggcctcgaaggccacaaacaaggcgtcgaggaattggaaagatttgcacaccctccagaaaggagagacgcaatctcccctccctcccatcccccaccttcgctggaacagcttcctctcactgaacggagacgcccccttggacgaactgcctaatcgtttggttctgaggcctggtttgctcttaattaatatatgaactcctcagaccttaaaccttttcctaagctttctttactgcactggagttctgactccctttgagttgtgtgttactgggggtggggtggggtcatgggttttgttgtttttgggggctaattggtgcatattcaggtaccacctttgacgtgtggctctttctcctgaccatcatgggaagtgtctgctggattccattttctaagagtttctgagggtgaggctcttattttttttttaagggatcctgtctatttcctgcacttcgagaagaatcaaaatgttcctgaatttcaaatacctcatgcaaaatgtgtctcctgaaataagggaaaaaaaaaaaaaaccacaactttgaaaatcttaatgttgaagttagcaatgccgaaaggtttctgtcttaaaaaaaaaaaatccttgtacttatcaattttgccccttaggcagtcagttttgttgagaactgtgtcctgcatcctggcgcagaacctcctgatgcggttcctctccacgcatctcgaggcggcgttacctccagattccgtagagttagagtcacatttttctttgcagcgaaactccgtcttggtgagagatgaatttggatatttatttccttctctgtttttgggaaacgagaggctacaaccaagacagctgaaggagaatgaaacacacatccacagaaacagagaggcgtaggtggccctgccgttgaccgcagcctctctggacaggcaaggggagttggcgcaggtgaggactcagacgacgtccaccgtcccaaggctgtcactagtatttctctgaagtgcctgaaggtaggaatgggccggcgattgggaccagctgggccccaccacggccacgccaggcaaagcgccagcagccctgcactccacgctggccaagaaggccttccacgcagaatgacaagactgcaaaaatccgatgtgcttccttccctggcgcagtcgctcctcgagccgctgccccccacccaccctgcacccctcgccctcccccccaccacagaatctaagacctttcagcttcgagccagggggcgggggatcccgagcaaaagccttccatggacatcaggccccgtggcctcaagggctcccagggcaaacctaattcccccaaaacgtgaagtcggggaagctgcggctacacattccacaaagtgctggcacttacacccacaacccggaaggctgtggaccgattcctctagggtggtgacctcccattagcaaacggtgtcatggtttggaatgttcattatcgccaagaacctggttagaggcataaagaccttttttcaccgttacctaattttttcccctttcaagaattttttttttttttggtgtgttgtacagcagtataatttttcacttatttattcctacagtagatatggtttgtacaatgtacaattgtttcatttcagaaaataaaaatttcaaatcatg

SEQ ID NO: 71460 - DNA, 3077 bp, Homo sapiens
ggagctgcggagctcggatttctcccccgtctggcccgctctcgacccgcgcgctctgctgggccatggagccggcccccgacgcccaggaggcgcgcactgtgcgcgaggcgctgggccgctacgaggcggcgctggagggtgcggtgcgcgcgctgcacgaggacatgcgggggctgcagcgcggcgtggagcggcgagtggcagaggcgatgcgcctggccggccccctggcgcgcacggtggccgacctgcagcgggacaaccagcggctgcaggcgcagctcgagcgcctgacgcgccaggtggaggcgctgggcttggccagcgggatgtccccggtgcccggcactcccggcacgcccagccccccgcccgcgcccggggttcccgaccgcgcgccccgcctgggcagcgcacgcttcgccagccacgccaccttctcgctgtccggccgcggccagagtttggatcacgatgaggccagtgagtcggagatgagaaagacctcaaactcctgcatcatggaaaatgggcaccagccgggggcagagaagaattcctctttcacgtggtctgtgccaagctctggctatggggcagtgacagcaagcaaacacagcaatagcccaccgctggtgacaccaccccagtcgcccgtgtccccgcagccgccagccataactcaggtccatcggcagggggagcgtcgcagggagctggtgaggtcgcagacgctgccccgcacctcggaggcgcaggcccggaaagcattgtttgagaagtgggagcaggaaacggcggccggcaaggggaaaggcgaggcccgggccaggctgaagcggtcgcagagcttcggcgtggccagcgccagcagcatcaagcagatcctgctcgagtggtgccgcagcaagacgctgggctaccagcacgtggacctgcagaacttctcctccagctggagcgacggcatggccttctgcgccctggtacactccttcttccccgatgcctttgactacaactccctgagccccacgcagaggcagaagaacttcgagctggctttcaccatggccgagaatctggccaactgtgagcgcctcatcgaagtggaggacatgatggtgatgggccgcaagccggaccccatgtgtgtcttcacctacgtccagtcgctgtacaaccacctgcgtcgcttcgagtaaagcccctgagcctggattgccaaagagcagccccaggaagaggccgggggtccgcttgcgattccccagccaggatgcccccaggagccttgccgtttggtgtgagcgcgctgtttgttctgtggcatgtgacggcactccccttcgagcccagctgtgttactgattaaaagtactgctgagctgtggtccgacagcactgatcacagccaagggcttggaggaaaaggaaaaattatgagagagagagagacattggtgctaagtaatgatcttcctaaagaaatgcttgtgtttatagcttccagaatgctaatctacaattttccctctggtgaattcgatacatcggctttacagggttacagtgattaccaagtgtttttttttatcaaaatacccagagttttttacttcctcacgcgattgtaggttcctctcctccctccctctgggccactgccaggaaacagagagaccgcttaatcagcagcttgacaaagaagacctcaagtcttgggaagaaacagtttaatcactcccaagtcctgggcaacagatgaccttcaagtcacctccgctctccggggagatgggaaggctctcctctcggtcccaaagtcctcctgttcttcccaggaggccccacaagtgtttggctaagcacaggctctcgggaatttaacacttttggggaaggaataggccctttgtgctgagagagagtttttattcacatcttttttaggggatttgctgcagatatttataaaaagtaactccctctgtaccactgacccatttatacataaaaaagatgtgttgaattttgcttggggtttgtcatttctgtttaggagatgggagttctgtgaataagagactttgcacaccttccaagtgaatatccactacattccacccctgttcctgcacttaaatcactggcctggaaagctgaagatggcatttgctgtcatctctgatcatctctgagtgtgcctgtctcccatctccatgttgtggaaggagcgtcaacagaaagttccccttgagatccgtcctctggatgtagaccgcagtgtttgtgataaacagtggcccaagacagcagggtttggggtggtcccgcacttggaggaagcccatcaaggaacgttggtttattttcacagctgtttggtggtaggactttcatagaaaaatcttgagattctatagagctccagccattagcttattctcagccaagaatcattgtataattgggttggattttagccatgcacttctaaaccttccctttaaggagcggatctgtgtcttcacctcatgcagccggctctcaacaccagtgcctgtgtgcctttgtggggtcccacgtgtcccttgggtggtatattgggggtgggcaggagatccctggggtgtcaggaggaacatgcagagcctgcaggtgggtgagcagtattctccatggattggttggtccaggctgcagtcttgccctctctctcggattctcccactctggaaaccattcccttgctagctctctcgtctcttgtacgcttggggaggtgagacctattattaacaggacacataactgaaggttagggtttcaaacctgaagccaatctgggaacacaagggctctgtaaaaagcatggctatatgttactgagtcctcgcacacgttaaatggagctctcccgagttgcagacatggccgtacctctgcgcatgaaacagagcagatcctgccagaatgcagaacaatttcttttaaactttaggaatggtgtccctcatgtctcacattcagaatgagacagactcgagtttttaaagttggttccatgatgt

SEQ ID NO: 71461 - DNA, 2034 bp, Homo sapiens
ggagctgcggagctcggatttctcccccgtctggcccgctctcgacccgcgcgctctgctgggccatggagccggcccccgacgcccaggaggcgcgcactgtgcgcgaggcgctgggccgctacgaggcggcgctggagggtgcggtgcgcgcgctgcacgaggacatgcgggggctgcagcgcggcgtggagcggcgagtggcagaggcgatgcgcctggccggccccctggcgcgcacggtggccgacctgcagcgggacaaccagcggctgcaggcgcagctcgagcgcctgacgcgccaggtggaggcgctgggcttggccagcgggatgtccccggtgcccggcactcccggcacgcccagccccccgcccgcgcccggggttcccgaccgcgcgccccgcctgggcagcgcacgcttcgccagccacgccaccttctcgctgtccggccgcggccagagtttggatcacgatgaggccagtgagtcggagatgagaaagacctcaaactcctgcatcatggaaaatgggcaccagccgggggcagagaagaattcctctttcacgtggtctgtgccaagctctggctatggggcagtgacagcaagcaaacacagcaatagcccaccgctggtgacaccaccccagtcgcccgtgtccccgcagccgccagccataactcaggtccatcggcagggggagcgtcgcagggagctggtgaggtcgcagacgctgccccgcacctcggaggcgcaggcccggaaagcattgtttgagaagtgggagcaggaaacggcggccggcaaggggaaaggcgaggcccgggccaggctgaagcggtcgcagagcttcggcgtggccagcgccagcagcatcaagcagatcctgctcgagtggtgccgcagcaagacgctgggctaccagcacgtggacctgcagaacttctcctccagctggagcgacggcatggccttctgcgccctggtacactccttcttccccgatgcctttgactacaactccctgagccccacgcagaggcagaagaacttcgagctggctttcaccatggccgagaatctggccaactgtgagcgcctcatcgaagtggaggacatgatggtgatgggccgcaagccggaccccatgtgtgtcttcacctacgtccagtcgctgtacaaccacctgcgtcgcttcgagtaaagcccctgagcctggattgccaaagagcagccccaggaagaggccgggggtccgcttgcgattccccagccaggatgcccccaggagccttgccgtttggtgtgagcgcgctgtttgttctgtggcatgtgacggcactccccttcgagcccagctgtgttactgattaaaagtactgctgagctgtggtccgacagcactgatcacagccaagggcttggaggaaaaggaaaaattatgagagagagagagacattggtgctaagtaatgatcttcctaaagaaatgcttgtgtttatagcttccagaatgctaatctacaattttccctctggtgaattcgatacatcggctttacagggttacagtgattaccaagtgtttttttttatcaaaatacccagagttttttacttcctcacgcgattgtaggttcctctcctccctccctctgggccactgccaggaaacagagagaccgcttaatcagcagcttgacaaagaagacctcaagtcttgggaagaaacagtttaatcactcccaagtcctgggcaacagatgaccttcaagtcacctccgctctccggggagatgggaaggctctcctctcggtcccaaagtcctcctgttcttcccaggaggccccacaagtgtttggctaagcacaggctctcgggaatttaacacttttggggaaggaataggccctttgtgctgagagagagtttttattcacatcttttttaggggatttgctgcagatatttataaaaagtaactccctctgtaccactgacccatttatacataaaaaagatgtgttga

SEQ ID NO: 71462 - DNA, 786 bp, Homo sapiens
ggagctgcggagctcggatttctcccccgtctggcccgctctcgacccgcgcgctctgctgggccatggagccggcccccgacgcccaggaggcgcgcactgtgcgcgaggcgctgggccgctacgaggcggcgctggagggtgcggtgcgcgcgctgcacgaggacatgcgggggctgcagcgcggcgtggagcggcgagtggcagaggcgatgcgcctggccggccccctggcgcgcacggtggccgacctgcagcgggacaaccagcggctgcaggcgcagctcgagcgcctgacgcgccaggtggaggcgctgggcttggccagcgggatgtccccggtgcccggcactcccggcacgcccagccccccgcccgcgcccggggttcccgaccgcgcgccccgcctgggcagcgcacgcttcgccagccacgccaccttctcgctgtccggccgcggccagagtttggatcacgatgaggccagtgagtcggagatgagaaagacctcaaactcctgcatcatggaaaatgggcaccagccgggggcaggtccaggcgatggaccccctgagattgcccaaaacttctcagcaccagatccccccaggcctcgtcctgtgagcctctccttgcggctgccccaccagccagtcacggccatcacccgagtctctgacaggttctctggggagacctcagctgcggctctatcacccatgtctgctgccaccctggggggcctcaacccaagccccagcgaggtcatcacgccctggactccca

SEQ ID NO: 71463 - DNA, 909 bp, Homo sapiens
ccgggtgtcaatcggccgagggtggctagtggtatcagttctctgatccacttccatttaagctccccaggaaatcccatgacaaactggcctctggctggcgcgctgattagacttcagttcctgaaaaggaccagtggagggaagagctatacttctggagaagtaggcctggagttactacagtatgggggaaaagggtcgagttagaacaaagctaaggcaattcctattgcttccttgcgcaacttctcaaaacgatgaaagtcagaaggctgtcaaactcaaatatctttgcaaacactgtttgaatactgtgaattcattacgaagaatgttcgagagaaagcaggggtctaatccaaaagaaatgtcattaaccaatactccaagtccttgagttttgttatatctgaactagttgaactgtgactgacaggtaatcctaatatatccaaatccaactgaataccaaattgagatggcaaatttttgtttgatataagttagcttgttagcatatgccctagagggcctccatccctgtattctaatgtttttactcaaagctctagcctttaggataggtgaatatgtaaatcttttatcactttctcaaattcaaactaaaggggaaagatcaaaccccttcccttcctacctgttttctgagctggctgacttgccagccacaagctgctcttgcagagttcttaccattcctgtaaatgttttgacttgttgcagaaattcctatctactttattaagcagtattgatctgactgtggaaacatcctctcacttgcattcttttaacttaaaactatttaagaactgatgttccgattattgtatatatttttctaaaaaccaaataaagctacctatgaaaatgaaaaaaaaaatc

SEQ ID NO: 71464 - DNA, 467 bp, Homo sapiens
  misc_feature (11)..(11): n is a, c, g, or t
ggatccccttntccacaggggttcctgaaaaggaccagtggagggaagagctatacttctggagaagtaggcctggagttactacagtatgggggaaaagggtcgagttagaacaaagctaaggcaattcctattgcttccttgcgcaacttctcaaaacgatgaaagtcagaaggctgtcaaactcaaatatctttgcaaacactgtttgaatactgtgaattcattacgaagaatgttcgagagaaagcaggggtctaatccaaaagaaatgtcattaaccaatactccaagtccttgagttttgttatatctgaactagttgaactgtgactgacaggtaatcctaatatatccaaatccaactgaataccaaattgagatggcaaatttttgtttgatataagttagcttgttagcatatgccctagagggcctccatcctgtggaaagtaggtaccggccac

SEQ ID NO: 71465 - DNA, 3707 bp, Homo sapiens
cattgaccttcaggtctgtcatcctgcttaagagtttccgtgctttgtctgcaagatggtgcttaaagctttacctaggagcagtatttgctgggttatgtcggtggaggacagcgtgctctgcctcgctggctactaagtgctggagctgcagcctgtcccctccaggtgcaatgtcacgtccccagatgcttaacttgtggtctaggggtaccttttaaaaatcgttgcaacactgcttacaattttcgccctccaagtggacagcttcgggcatccctcaccgccccagattctcaagggggtctggtgcccaccgttttatgtagcgtgagtttaattcccagggctcagatgtcaaggagacaagagctaccgctcagtgggcgttttctcaacccaaactcccgatcgacctcgagtctccccgccggacccggagcaaatctcagagtcaagatgcgagaaggggtggccgggcggcggacctcaggcttccggcacccttgcgcttcccgccggcacgaaggactcccctggacaaccgcccgcctctcagaggccggagtcctaggccctccggcctgcgttgcctgtccacagacgcgccggcctcgggacacccaccacaggggtaagacgcgcctctgccagctccccagcccgaaacccagaacgccctcctaggagcctcacagcgcagatcaggggacgggctttcggccgcaccccttcactctttccccgccttctttgtttattccggacccaccattggctgcttgccctcgataccgggcgagccgccggtctttggagagaggcgattggacgaagtccctgccgctcggccagcagcccgctcgcgattggttgaggcgccgccgggggtttgaatcgcatccccggccggggagggttctgccaaagtgccacgttgggcccggcggcggcgtgaagactggcggctgcgtgagactccggctccaggcgttcgcaccgtaatgcccggccgttggggccgtcggtaggcgcgaggcgagtcgaggcagccggccggtcggcggccgccggcgggaacggggctgaggcggcgcagcggagtctgggcggcggcgcgtcccgcccgagggcggctctggctgagggcggaggggccggggaagagcccggggcagcggctgaggcgggacggcggcgggggccgctgcccctagaagacccagccgagatgctggcggaaaacctggtagaggagtttgagatgaaggaggacgagccgtggtacgaccaccaggacctccagcaagatcttcaacttgctgctgagcttgggaagacattactggatcggaacacagagttggaggactctgttcagcagatgtatacaaccaatcaggagcagttacaggaaattgaggtaattcacttggcaggagagttacacttttgacacttcgatgtgttgctgttatgccaatcacatactgtatctgacgaagcaagtggaacttctacggcagatgaacgaacaacatgcaaaggtttatgaacaattagacgtcacagcaagggaactggaagaaacaaatcaaaagctagttgctgacagcaaggcctcacagcaaaagattctgagcctgactgaaacgattgaatgcctgcaaaccaacattgatcacctccagagccaagtggaggagctgaagtcatctggccaagggagaaggagcccgggaaagtgtgaccaggagaaaccggcacccagctttgcatgtctgaaggagctgtatgacctccgccaacacttcgtgtatgatcatgtgttcgctgagaagatcacttccttgcaaggtcagccaagccctgatgaagaggaaaatgagcacttgaaaaaaacagtgacaatgttgcaggcccagctgagcctggagcggcagaagcgggtgactatggaggaggaatatgggctcgtgttaaaggagaacagtgaactggagcagcagctgggggccacaggtgcctaccgagcacgggcgctggaactagaggccgaggtggcagagatgcgacagatgttgcagtcagagcatccatttgtgaatggagttgagaagctggtgccagactctctgtatgttcctttcaaagagcccagccagagcctgctggaagagatgttcctgactgtgccggaatcacatagaaagcctctcaagcgcagcagcagtgagacgatcctcagcagcttggcagggagtgacatcgtgaagggccacgaggagacctgcatcaggagggccaaggctgtgaaacagaggggcatctcccttctgcacgaagtggacacgcagtacagcgccctgaaggtgaagtatgaagagttgctgaagaagtgccaagaggaacaggactccctgtcacacaaggctgtgcagacctccagggctgcagccaaggacctgactggagtgaacgcccagtctgagcctgttgccagcggctgggaactggcctctgtcaacccagagcccgtgagttcccctacaacacctccagaatacaaagcgttgtttaaggagatctttagttgcatcaagaaaactaagcaggaaatagatgaacagagaacaaaataccgatcactctcctctcattcttaattgaacctctagctctactactaatttgcctattgcctatcgcctctctctcccattcagacaagtgtttgtagactctgaagcctaatgttactcatgacgtttgcctcattgctttgcttatttagcaaatgcatacaacgaggaaaggaggtggctagtggtatcagttctctgatccacttccatttaagctccccaggaaatcccatgacaaactggcctctggctggcgcgctgattagacttcagttcctgaaaaggaccagtggagggaagagctatacttctggagaagtaggcctggagttactacagtatgggggaaaagggtcgagttagaacaaagctaaggcaattcctattgcttccttgcgcaacttctcaaaacgatgaaagtcagaaggctgtcaaactcaaatatctttgcaaacactgtttgaatactgtgaattcattacgaagaatgttcgagagaaagcaggggtctaatccaaaagaaatgtcattaaccaatactccaagtccttgagttttgttatatctgaactagttgaactgtgactgacaggtaatcctaatatatccaaatccaactgaataccaaattgagatggcaaatttttgtttgatataagttagcttgttagcatatgccctagagggcctccatccctgtattctaatgtttttactcaaagctctagcctttaggataggtgaatatgtaaatcttttatcactttctcaaattcaaactaaaggggaaagatcaaaccccttcccttcctacctgttttctgagctggctgacttgccagccacaagctgctcttgcagagttcttaccattcctgtaaatgttttgacttgttgcagaaattcctatctactttattaagcagtattgatctgactgtggaaacatcctctcacttgcattcttttaacttaaaactatttaagaactgatgttccgattattgtatatatttttctaaaaaccaaataaagctacctatgaaaatgaaaaaaaaaatc

SEQ ID NO: 71466 - DNA, 810 bp, Homo sapiens
  misc_feature (11)..(11): n is a, c, g, or t
ggatccccttntccacaggggttcctgaaaaggaccagtggagggaagagctatacttctggagaagtaggcctggagttactacagtatgggggaaaagggtcgagttagaacaaagctaaggcaattcctattgcttccttgcgcaacttctcaaaacgatgaaagtcagaaggctgtcaaactcaaatatctttgcaaacactgtttgaatactgtgaattcattacgaagaatgttcgagagaaagcaggggtctaatccaaaagaaatgtcattaaccaatactccaagtccttgagttttgttatatctgaactagttgaactgtgactgacaggtaatcctaatatatccaaatccaactgaataccaaattgagatggcaaatttttgtttgatataagttagcttgttagcatatgccctagagggcctccatccctgtattctaatgtttttactcaaagctctagcctttaggataggtgaatatgtaaatcttttatcactttctcaaattcaaactaaaggggaaagatcaaaccccttcccttcctacctgttttctgagctggctgacttgccagccacaagctgctcttgcagagttcttaccattcctgtaaatgttttgacttgttgcagaaattcctatctactttattaagcagtattgatctgactgtggaaacatcctctcacttgcattcttttaacttaaaactatttaagaactgatgttccgattattgtatatatttttctaaaaaccaaataaagctacctatgaaaatgaaaaaaaaaatc

SEQ ID NO: 71467 - DNA, 2970 bp, Homo sapiens
cattgaccttcaggtctgtcatcctgcttaagagtttccgtgctttgtctgcaagatggtgcttaaagctttacctaggagcagtatttgctgggttatgtcggtggaggacagcgtgctctgcctcgctggctactaagtgctggagctgcagcctgtcccctccaggtgcaatgtcacgtccccagatgcttaacttgtggtctaggggtaccttttaaaaatcgttgcaacactgcttacaattttcgccctccaagtggacagcttcgggcatccctcaccgccccagattctcaagggggtctggtgcccaccgttttatgtagcgtgagtttaattcccagggctcagatgtcaaggagacaagagctaccgctcagtgggcgttttctcaacccaaactcccgatcgacctcgagtctccccgccggacccggagcaaatctcagagtcaagatgcgagaaggggtggccgggcggcggacctcaggcttccggcacccttgcgcttcccgccggcacgaaggactcccctggacaaccgcccgcctctcagaggccggagtcctaggccctccggcctgcgttgcctgtccacagacgcgccggcctcgggacacccaccacaggggtaagacgcgcctctgccagctccccagcccgaaacccagaacgccctcctaggagcctcacagcgcagatcaggggacgggctttcggccgcaccccttcactctttccccgccttctttgtttattccggacccaccattggctgcttgccctcgataccgggcgagccgccggtctttggagagaggcgattggacgaagtccctgccgctcggccagcagcccgctcgcgattggttgaggcgccgccgggggtttgaatcgcatccccggccggggagggttctgccaaagtgccacgttgggcccggcggcggcgtgaagactggcggctgcgtgagactccggctccaggcgttcgcaccgtaatgcccggccgttggggccgtcggtaggcgcgaggcgagtcgaggcagccggccggtcggcggccgccggcgggaacggggctgaggcggcgcagcggagtctgggcggcggcgcgtcccgcccgagggcggctctggctgagggcggaggggccggggaagagcccggggcagcggctgaggcgggacggcggcgggggccgctgcccctagaagacccagccgagatgctggcggaaaacctggtagaggagtttgagatgaaggaggacgagccgtggtacgaccaccaggacctccagcaagatcttcaacttgctgctgagcttgggaagacattactggatcggaacacagagttggaggactctgttcagcagatgtatacaaccaatcaggagcagttacaggaaattgagtatctgacgaagcaagtggaacttctacggcagatgaacgaacaacatgcaaaggtttatgaacaattagacgtcacagcaagggaactggaagaaacaaatcaaaagctagttgctgacagcaaggcctcacagcaaaagattctgagcctgactgaaacgattgaatgcctgcaaaccaacattgatcacctccagagccaagtggaggagctgaagtcatctggccaagggagaaggagcccgggaaagtgtgaccaggagaaaccggcacccagctttgcatgtctgaaggagctgtatgacctccgccagtaagagcctgcctttctgtggagttacagcagggactgtctcatgtcattggcacattctgatttccagtagattgaaagtaccattttaagaaaagtcacttagctattaagctaccatggtttgaacaaaatcacttaaacatataaattacagagttcttagatattagtagttctcattttgaaagtcttggaacacttatttcagtgtttttaatgtattaaatcatagtttaagatgaattctgatagactagatttgggagttgtgttttacattagagtgaagaaaaacagaaatactggtaaaacaaaaattcaagcgaacaggagattttttgcttaaagaagtacctttataatttagagttataagtctgaatctttaagaagtatttatggaacacttgtgtggcaagctgtatgctagacccaagggttggcgagcaaaatagtttctacccctgtgagctttcagtctaacggaacggcagataagcaaataaaaacacaaataaatagtcaaggtgcttcagactgagcaggagaaaccaggtggttcatttggtgggtctcaaccttggctgtacatcagatcacctgtggggtttttcaaaatgcaaataccaacacatttcctcaggcctaaatcagaatttctaggtgcgggtaaaaagctgcccaggcaattctgatgaacattcctggttaaaaatcaccacagcaacagtaatttgctgtagtgattcaatcgtagttacatattatgaatcatttggagagcctttagaaaccctcaggccaggtagcagaccaactaggttggaatctgtgggttgggacccaggcaccagtactttttaaggtttcccttgtgaggtcattgtcatactgctagaatagatgttctctagtacttttaacattaaaaaaagatttgtcacaaaaattgagtttgctttcatgtgtttatttaccagcctcacacaattccattttagccactgctccaagtgtggctaaaaaccaatcaccacacccagcaaatttttgtatttttagtagagacggggttttgccatgttggccgggctggtctcgaactcctgacctcaagtgatctgcccacctcggcctcccagggtgctgggattacagccatgagccacagcacctgccaaagtggtcttaaaaggcttctgaagaggttatgtttgaaatgtcgccgat

SEQ ID NO: 71468 - DNA, 3637 bp, Homo sapiens
cattgaccttcaggtctgtcatcctgcttaagagtttccgtgctttgtctgcaagatggtgcttaaagctttacctaggagcagtatttgctgggttatgtcggtggaggacagcgtgctctgcctcgctggctactaagtgctggagctgcagcctgtcccctccaggtgcaatgtcacgtccccagatgcttaacttgtggtctaggggtaccttttaaaaatcgttgcaacactgcttacaattttcgccctccaagtggacagcttcgggcatccctcaccgccccagattctcaagggggtctggtgcccaccgttttatgtagcgtgagtttaattcccagggctcagatgtcaaggagacaagagctaccgctcagtgggcgttttctcaacccaaactcccgatcgacctcgagtctccccgccggacccggagcaaatctcagagtcaagatgcgagaaggggtggccgggcggcggacctcaggcttccggcacccttgcgcttcccgccggcacgaaggactcccctggacaaccgcccgcctctcagaggccggagtcctaggccctccggcctgcgttgcctgtccacagacgcgccggcctcgggacacccaccacaggggtaagacgcgcctctgccagctccccagcccgaaacccagaacgccctcctaggagcctcacagcgcagatcaggggacgggctttcggccgcaccccttcactctttccccgccttctttgtttattccggacccaccattggctgcttgccctcgataccgggcgagccgccggtctttggagagaggcgattggacgaagtccctgccgctcggccagcagcccgctcgcgattggttgaggcgccgccgggggtttgaatcgcatccccggccggggagggttctgccaaagtgccacgttgggcccggcggcggcgtgaagactggcggctgcgtgagactccggctccaggcgttcgcaccgtaatgcccggccgttggggccgtcggtaggcgcgaggcgagtcgaggcagccggccggtcggcggccgccggcgggaacggggctgaggcggcgcagcggagtctgggcggcggcgcgtcccgcccgagggcggctctggctgagggcggaggggccggggaagagcccggggcagcggctgaggcgggacggcggcgggggccgctgcccctagaagacccagccgagatgctggcggaaaacctggtagaggagtttgagatgaaggaggacgagccgtggtacgaccaccaggacctccagcaagatcttcaacttgctgctgagcttgggaagacattactggatcggaacacagagttggaggactctgttcagcagatgtatacaaccaatcaggagcagttacaggaaattgagtatctgacgaagcaagtggaacttctacggcagatgaacgaacaacatgcaaaggtttatgaacaattagacgtcacagcaagggaactggaagaaacaaatcaaaagctagttgctgacagcaaggcctcacagcaaaagattctgagcctgactgaaacgattgaatgcctgcaaaccaacattgatcacctccagagccaagtggaggagctgaagtcatctggccaagggagaaggagcccgggaaagtgtgaccaggagaaaccggcacccagctttgcatgtctgaaggagctgtatgacctccgccaacacttcgtgtatgatcatgtgttcgctgagaagatcacttccttgcaaggtcagccaagccctgatgaagaggaaaatgagcacttgaaaaaaacagtgacaatgttgcaggcccagctgagcctggagcggcagaagcgggtgactatggaggaggaatatgggctcgtgttaaaggagaacagtgaactggagcagcagctgggggccacaggtgcctaccgagcacgggcgctggaactagaggccgaggtggcagagatgcgacagatgttgcagtcagagcatccatttgtgaatggagttgagaagctggtgccagactctctgtatgttcctttcaaagagcccagccagagcctgctggaagagatgttcctgactgtgccggaatcacatagaaagcctctcaagcgcagcagcagtgagacgatcctcagcagcttggcagggagtgacatcgtgaagggccacgaggagacctgcatcaggagggccaaggctgtgaaacagaggggcatctcccttctgcacgaagtggacacgcagtacagcgccctgaaggtgaagtatgaagagttgctgaagaagtgccaagaggaacaggactccctgtcacacaaggctgtgcagacctccagggctgcagccaaggacctgactggagtgaacgcccagtctgagcctgttgccagcggctgggaactggcctctgtcaacccagagcccgtgagttcccctacaacacctccagaatacaaagcgttgtttaaggagatctttagttgcatcaagaaaactaagcaggaaatagatgaacagagaacaaaataccgatcactctcctctcattcttaattgaacctctagctctactactaatttgcctattgcctatcgcctctctctcccattcagacaagtgtttgtagactctgaagcctaatgttactcatgacgtttgcctcattgctttgcttatttagcaaatgcatacaacgaggaaaggaggtggctagtggtatcagttctctgatccacttccatttaagctccccaggaaatcccatgacaaactggcctctggctggcgcgctgattagacttcagttcctgaaaaggaccagtggagggaagagctatacttctggagaagtaggcctggagttactacagtatgggggaaaagggtcgagttagaacaaagctaaggcaattcctattgcttccttgcgcaacttctcaaaacgatgaaagtcagaaggctgtcaaactcaaatatctttgcaaacactgtttgaatactgtgaattcattacgaagaatgttcgagagaaagcaggggtctaatccaaaagaaatgtcattaaccaatactccaagtccttgagttttgttatatctgaactagttgaactgtgactgacaggtaatcctaatatatccaaatccaactgaataccaaattgagatggcaaatttttgtttgatataagttagcttgttagcatatgccctagagggcctccatccctgtattctaatgtttttactcaaagctctagcctttaggataggtgaatatgtaaatcttttatcactttctcaaattcaaactaaaggggaaagatcaaaccccttcccttcctacctgttttctgagctggctgacttgccagccacaagctgctcttgcagagttcttaccattcctgtaaatgttttgacttgttgcagaaattcctatctactttattaagcagtattgatctgactgtggaaacatcctctcacttgcattcttttaacttaaaactatttaagaactgatgttccgattattgtatatatttttctaaaaaccaaataaagctacctatgaaaatgaaaaaaaaaatc

SEQ ID NO: 71469 - DNA, 3524 bp, Homo sapiens
cattgaccttcaggtctgtcatcctgcttaagagtttccgtgctttgtctgcaagatggtgcttaaagctttacctaggagcagtatttgctgggttatgtcggtggaggacagcgtgctctgcctcgctggctactaagtgctggagctgcagcctgtcccctccaggtgcaatgtcacgtccccagatgcttaacttgtggtctaggggtaccttttaaaaatcgttgcaacactgcttacaattttcgccctccaagtggacagcttcgggcatccctcaccgccccagattctcaagggggtctggtgcccaccgttttatgtagcgtgagtttaattcccagggctcagatgtcaaggagacaagagctaccgctcagtgggcgttttctcaacccaaactcccgatcgacctcgagtctccccgccggacccggagcaaatctcagagtcaagatgcgagaaggggtggccgggcggcggacctcaggcttccggcacccttgcgcttcccgccggcacgaaggactcccctggacaaccgcccgcctctcagaggccggagtcctaggccctccggcctgcgttgcctgtccacagacgcgccggcctcgggacacccaccacaggggtaagacgcgcctctgccagctccccagcccgaaacccagaacgccctcctaggagcctcacagcgcagatcaggggacgggctttcggccgcaccccttcactctttccccgccttctttgtttattccggacccaccattggctgcttgccctcgataccgggcgagccgccggtctttggagagaggcgattggacgaagtccctgccgctcggccagcagcccgctcgcgattggttgaggcgccgccgggggtttgaatcgcatccccggccggggagggttctgccaaagtgccacgttgggcccggcggcggcgtgaagactggcggctgcgtgagactccggctccaggcgttcgcaccgtaatgcccggccgttggggccgtcggtaggcgcgaggcgagtcgaggcagccggccggtcggcggccgccggcgggaacggggctgaggcggcgcagcggagtctgggcggcggcgcgtcccgcccgagggcggctctggctgagggcggaggggccggggaagagcccggggcagcggctgaggcgggacggcggcgggggccgctgcccctagaagacccagccgagatgctggcggaaaacctggtagaggagtttgagatgaaggaggacgagccgtggtacgaccaccaggacctccagcaagtatctgacgaagcaagtggaacttctacggcagatgaacgaacaacatgcaaaggtttatgaacaattagacgtcacagcaagggaactggaagaaacaaatcaaaagctagttgctgacagcaaggcctcacagcaaaagattctgagcctgactgaaacgattgaatgcctgcaaaccaacattgatcacctccagagccaagtggaggagctgaagtcatctggccaagggagaaggagcccgggaaagtgtgaccaggagaaaccggcacccagctttgcatgtctgaaggagctgtatgacctccgccaacacttcgtgtatgatcatgtgttcgctgagaagatcacttccttgcaaggtcagccaagccctgatgaagaggaaaatgagcacttgaaaaaaacagtgacaatgttgcaggcccagctgagcctggagcggcagaagcgggtgactatggaggaggaatatgggctcgtgttaaaggagaacagtgaactggagcagcagctgggggccacaggtgcctaccgagcacgggcgctggaactagaggccgaggtggcagagatgcgacagatgttgcagtcagagcatccatttgtgaatggagttgagaagctggtgccagactctctgtatgttcctttcaaagagcccagccagagcctgctggaagagatgttcctgactgtgccggaatcacatagaaagcctctcaagcgcagcagcagtgagacgatcctcagcagcttggcagggagtgacatcgtgaagggccacgaggagacctgcatcaggagggccaaggctgtgaaacagaggggcatctcccttctgcacgaagtggacacgcagtacagcgccctgaaggtgaagtatgaagagttgctgaagaagtgccaagaggaacaggactccctgtcacacaaggctgtgcagacctccagggctgcagccaaggacctgactggagtgaacgcccagtctgagcctgttgccagcggctgggaactggcctctgtcaacccagagcccgtgagttcccctacaacacctccagaatacaaagcgttgtttaaggagatctttagttgcatcaagaaaactaagcaggaaatagatgaacagagaacaaaataccgatcactctcctctcattcttaattgaacctctagctctactactaatttgcctattgcctatcgcctctctctcccattcagacaagtgtttgtagactctgaagcctaatgttactcatgacgtttgcctcattgctttgcttatttagcaaatgcatacaacgaggaaaggaggtggctagtggtatcagttctctgatccacttccatttaagctccccaggaaatcccatgacaaactggcctctggctggcgcgctgattagacttcagttcctgaaaaggaccagtggagggaagagctatacttctggagaagtaggcctggagttactacagtatgggggaaaagggtcgagttagaacaaagctaaggcaattcctattgcttccttgcgcaacttctcaaaacgatgaaagtcagaaggctgtcaaactcaaatatctttgcaaacactgtttgaatactgtgaattcattacgaagaatgttcgagagaaagcaggggtctaatccaaaagaaatgtcattaaccaatactccaagtccttgagttttgttatatctgaactagttgaactgtgactgacaggtaatcctaatatatccaaatccaactgaataccaaattgagatggcaaatttttgtttgatataagttagcttgttagcatatgccctagagggcctccatccctgtattctaatgtttttactcaaagctctagcctttaggataggtgaatatgtaaatcttttatcactttctcaaattcaaactaaaggggaaagatcaaaccccttcccttcctacctgttttctgagctggctgacttgccagccacaagctgctcttgcagagttcttaccattcctgtaaatgttttgacttgttgcagaaattcctatctactttattaagcagtattgatctgactgtggaaacatcctctcacttgcattcttttaacttaaaactatttaagaactgatgttccgattattgtatatatttttctaaaaaccaaataaagctacctatgaaaatgaaaaaaaaaatc

SEQ ID NO: 71470 - DNA, 2784 bp, Homo sapiens
cattgaccttcaggtctgtcatcctgcttaagagtttccgtgctttgtctgcaagatggtgcttaaagctttacctaggagcagtatttgctgggttatgtcggtggaggacagcgtgctctgcctcgctggctactaagtgctggagctgcagcctgtcccctccaggtgcaatgtcacgtccccagatgcttaacttgtggtctaggggtaccttttaaaaatcgttgcaacactgcttacaattttcgccctccaagtggacagcttcgggcatccctcaccgccccagattctcaagggggtctggtgcccaccgttttatgtagcgtgagtttaattcccagggctcagatgtcaaggagacaagagctaccgctcagtgggcgttttctcaacccaaactcccgatcgacctcgagtctccccgccggacccggagcaaatctcagagtcaagatgcgagaaggggtggccgggcggcggacctcaggcttccggcacccttgcgcttcccgccggcacgaaggactcccctggacaaccgcccgcctctcagaggccggagtcctaggccctccggcctgcgttgcctgtccacagacgcgccggcctcgggacacccaccacaggggtaagacgcgcctctgccagctccccagcccgaaacccagaacgccctcctaggagcctcacagcgcagatcaggggacgggctttcggccgcaccccttcactctttccccgccttctttgtttattccggacccaccattggctgcttgccctcgataccgggcgagccgccggtctttggagagaggcgattggacgaagtccctgccgctcggccagcagcccgctcgcgattggttgaggcgccgccgggggtttgaatcgcatccccggccggggagggttctgccaaagtgccacgttgggcccggcggcggcgtgaagactggcggctgcgtgagactccggctccaggcgttcgcaccgtaatgcccggccgttggggccgtcggtaggcgcgaggcgagtcgaggcagccggccggtcggcggccgccggcgggaacggggctgaggcggcgcagcggagtctgggcggcggcgcgtcccgcccgagggcggctctggctgagggcggaggggccggggaagagcccggggcagcggctgaggcgggacggcggcgggggccgctgcccctagaagacccagccgagatgctggcggaaaacctggtagaggagtttgagatgaaggaggacgagccgtggtacgaccaccaggacctccagcaagtgagacgatcctcagcagcttggcagggagtgacatcgtgaagggccacgaggagacctgcatcaggagggccaaggctgtgaaacagaggggcatctcccttctgcacgaagtggacacgcagtacagcgccctgaaggtgaagtatgaagagttgctgaagaagtgccaagaggaacaggactccctgtcacacaaggctgtgcagacctccagggctgcagccaaggacctgactggagtgaacgcccagtctgagcctgttgccagcggctgggaactggcctctgtcaacccagagcccgtgagttcccctacaacacctccagaatacaaagcgttgtttaaggagatctttagttgcatcaagaaaactaagcaggaaatagatgaacagagaacaaaataccgatcactctcctctcattcttaattgaacctctagctctactactaatttgcctattgcctatcgcctctctctcccattcagacaagtgtttgtagactctgaagcctaatgttactcatgacgtttgcctcattgctttgcttatttagcaaatgcatacaacgaggaaaggaggtggctagtggtatcagttctctgatccacttccatttaagctccccaggaaatcccatgacaaactggcctctggctggcgcgctgattagacttcagttcctgaaaaggaccagtggagggaagagctatacttctggagaagtaggcctggagttactacagtatgggggaaaagggtcgagttagaacaaagctaaggcaattcctattgcttccttgcgcaacttctcaaaacgatgaaagtcagaaggctgtcaaactcaaatatctttgcaaacactgtttgaatactgtgaattcattacgaagaatgttcgagagaaagcaggggtctaatccaaaagaaatgtcattaaccaatactccaagtccttgagttttgttatatctgaactagttgaactgtgactgacaggtaatcctaatatatccaaatccaactgaataccaaattgagatggcaaatttttgtttgatataagttagcttgttagcatatgccctagagggcctccatccctgtattctaatgtttttactcaaagctctagcctttaggataggtgaatatgtaaatcttttatcactttctcaaattcaaactaaaggggaaagatcaaaccccttcccttcctacctgttttctgagctggctgacttgccagccacaagctgctcttgcagagttcttaccattcctgtaaatgttttgacttgttgcagaaattcctatctactttattaagcagtattgatctgactgtggaaacatcctctcacttgcattcttttaacttaaaactatttaagaactgatgttccgattattgtatatatttttctaaaaaccaaataaagctacctatgaaaatgaaaaaaaaaatc

SEQ ID NO: 71471 - DNA, 621 bp, Homo sapiens
  misc_feature (68)..(68): n is a, c, g, or t
gattcctgccactcgcaccactctcttgacaggaatcatgtaatctcgaagaaccaagtcatttacangattcctgccaagacactggtgcaagtggccatctatgctctgggccgagagcccaccttcttcttcgacccggaaaattttgacccaacccgatggctgagcaaagacaagaacatcacctacttccggaacttgggctttggctggggtgtgcggcagtgtctgggacggcggatcgctgagctagagatgaccatcttcctcatcaatatgctggagaacttcagagttgaaatccaacacctcagcgatgtgggcaccacattcaacctcattctgatgcctgaaaagcccatctccttcaccttctggccctttaaccaggaagcaacccagcagtgatcagagaggatggcctgcagccacatgggaggaaggcccaggggtggggcccatggggtctctgcatcttcagtcgtctgtcccaagtcctgctcctttctgcccagcctgctcagcaggttgaatgggttctcagtggtcaccttcctcagctcagctgggccactcctcttcacccaccccatggagacaataaacagctgaaccatg

SEQ ID NO: 71472 - DNA, 404 bp, Homo sapiens
  misc_feature (14)..(14): n is a, c, g, or t
  misc_feature (36)..(36): n is a, c, g, or t
ccaattttaaaacngtccttaaagcaagtattattntctatttgtagtacctaagttataaaatttcactgaggctagaaatgtgaagactggtcacctttgaaggacggagaagctcggcaacgtggagtcggtttatgtcatcgaccctgaagatgtggcccttctctttaagtccgagggccccaacccagaacgattcctcatcccgccctgggtcgcctatcaccagtattaccagagacccataggagtcctgttgaaaagtcggcagcctggaagaaagacaatcacaacctaattgagcgtcgcaggcgattcaacattaacgacaggatcaaggaactgggcactctcatccctaagtccagtgacccggagatgcgctggaacaagggcaccat
